United States Patent Application Publication US 2025/0311734 A1 - sequence listing, part 3

SEQ ID NO: 9375 - protein, 291 aa, Thermomyces lanuginosus
MRSSLVLFFVSAWTALASPIRRDVSADLLNQFKLFAQYSAAAYCGRNNDAPAGTNITCSANACPLVEAADATFLYSFENSGVGDVTGFLAVDNTNKLIVLSFRGSRSIENWITNLNFDLVDINDICSGCRGHDGFTSSWRSVADTLRQAVDDAVAAHPDYKVVVTGHSLGGALATLAGADLRNNGYDVDLYTYGAPRVGNRAFAEFITVQTGGTLYRVTHTNDVVPRLPPRQFGYSHPSPEYWIKSGTLVPVRRRDIVKIEGIDATGGNNQNNAPDIPAHLWYFGTIGTCI

SEQ ID NO: 9376 - protein, 291 aa, Thermomyces lanuginosus
MRSSLVLFFVSAWTALASPIRRDVSADLLNQFKLFAQYSAAAYCGRNNDAPAGTNITCSANACPLVEAADATFLYSFENSGVGDVTGFLAVDNTNKLIVLSFRGSRSIENWITNLNFDLVDINDICSGCRGHQGFTSSWRSVADTLRQAVDDAVAAHPDYKVVVTGHSLGGALATLAGADLRNNGYDVDLYTYGAPRVGNRAFAEFITVQTGGTLYRVTHTNDVVPRLPPRQFGYSHPSPEYWIKSGTLVPVRRRDIVKIEGIDATGGNNQNNTPDIPAHLWYFGLIGTCI

SEQ ID NO: 9377 - protein, 291 aa, Thermomyces lanuginosus
MRSSLVLFFVSAWTALASPIRRDVSADLLNQFKLFAQYSAAAYCGRNNDAPAGTNITCSANACPLVEAADATFLYSFENSGVGDVTGFLAVDNTNKLIVLSFRGSRSIENWITNLNFDLVDINDICRGCRGHDGFTSSWRSVADTLRQAVDDAVAAHPDYKVVVTGHSLGGALATLAGADLRNNGYDVDLYTYGAPRVGNRAFAEFITVQTGGTLYRVTHTNDVVPRLPPRQFGYSHPSPEYWIKSGTLVPVRRRDIVKIEGIDATGGNNQNNTPDIPAHLWYFGLIGTCI

SEQ ID NO: 9378 - protein, 291 aa, Thermomyces lanuginosus
MRSSLVLFFVSAWTALASPIRRDVSADLLNQFKLFAQYSAAAYCGRNNDAPAGTNITCSANACPLVEAADATFLYSFENSGVGDVTGFLAVDNTNKLIVLSFRGSRSIENWITNLNFDLVDINDICSGCRGHDGFTSSWRSVADTLRQAVDDAVAAHPDYKVVVTGHSLGGALATLAGADLRNNGYDVDLYTYGAPRVGNRAFAEFITVQTGGTLYRVTHTNDVVPRLPPRQFGYSHPSPEYWIKSGTLVPVRRRDIVKIEGIDATGGNNQNNAPDIPAHLWYFGPIGTCI

SEQ ID NO: 9379 - protein, 291 aa, Thermomyces lanuginosus
MRSSLVLFFVSAWTALASPIRRDVSADLLNQFKLFAQYSAAAYCGRNNDAPAGTNITCSANACPLVEAADATFLYSFENSGVGDVTGFLAVDNTNKLIVLSFRGSRSPENWITNLNFDLVDINDICSGCRGHDGFTSSWRSVADTLRQAVDDAVAAHPDYKVVVTGHSLGGALATLAGADLRNNGYDVDLYTYGAPRVGNRAFAEFITVQTGGTLYRVTHTNDVVPRLPPRQFGYSHPSPEYWIKSGTLVPVRRRDIVKIEGIDATGGNNQNNTPDIPAHLWYFGLIGTCI

SEQ ID NO: 9380 - protein, 291 aa, Thermomyces lanuginosus
MRSSLVLFFVSAWTALASPIRRDVSADLLNQFKLFAQYSAAAYCGRNNDAPAGTNITCSANACPLVEAADATFLYSFENSGVGDVTGFLAEDNTNKLIVLSFRGSRSIENWITNLNFDLVDINDICSGCRGHDGFTSSWRSVADTLRQAVDDAVAAHPDYKVVVTGHSLGGALATLAGADLRNNGYDVDLYTYGAPRVGNRAFAEFITVQTGGTLYRVTHTNDVVPRLPPRQFGYSHPSPEYWIKSGTLVPVRRRDIVKIEGIDATGGNNQNNAPDIPAHLWYFGAIGTCI

SEQ ID NO: 9381 - protein, 291 aa, Thermomyces lanuginosus
MRSSLVLFFVSAWTALASPIRRDVSADLLNQFKLFAQYSAAAYCGRNNDAPAGTNITCVANACPLVEAADATFLYSFENSGVGDVTGFLAVDNTNKLIVLSFRGSRSIENWITNLNFDLVDINDICSGCRGHDGFTSSWRSVADTLRQAVDDAVAAHPDYKVVVTGHSLGGALATLAGADLRNNGYDVDLYTYGAPRVGNRAFAEFITVQTGGTLYRVTHTNDVVPRLPPRQFGYSHPSPEYWIKSGTLVPVRRRDIVKIEGIDATGGNNQNNAPDIPAHLWYFGAIGTCI

SEQ ID NO: 9382 - protein, 291 aa, Thermomyces lanuginosus
MRSSLVLFFVSAWTALASPIRRDVSADLLNQFKLFAQYSAAAYCGRNNDAPAGTNITCSANACPLVEAADATFLYSFENSGVGDVTGFLAVDNTNKLIVLSFRGSRSIENWITNLNFDLVDINDICSGCRGHDGFTSSWRSVADTLRQAVDDAVAAHPDYKVVVTGHSLGGALATLAGADLRNNGYDVDLYTYGQPRVGNRAFAEFITVQTGGTLYRVTHTNDVVPRLPPRQFGYSHPSPEYWIKSGTLVPVRRRDIVKIEGIDATGGNNQNNTPDIPAHLWYFGLIGTCI

SEQ ID NO: 9383 - protein, 291 aa, Thermomyces lanuginosus
MRSSLVLFFVSAWTALASPIRRDVSADLLNQFKLFAQYSAAAYCGRNQDAPAGTNITCSANACPLVEAADATFLYSFENSGVGDVTGFLAVDNTNKLIVLSFRGSRSIENWITNLNFDLVDINDICSGCRGHDGFTSSWRSVADTLRQAVDDAVAAHPDYKVVVTGHSLGGALATLAGADLRNNGYDVDLYTYGAPRVGNRAFAEFITVQTGGTLYRVTHTNDVVPRLPPRQFGYSHPSPEYWIKSGTLVPVRRRDIVKIEGIDATGGNNQNNTPDIPAHLWYFGLIGTCI

SEQ ID NO: 9384 - protein, 291 aa, Thermomyces lanuginosus
MRSSLVLFFVSAWTALASPIRRDVSADLLNQFKLFAQYSAAAYCGRNNDAPAGTNITCSANACPLVEAADATFLYSFENSGVGDVTGFLAVDNTNKLIVLSFRGSRSIENWITNLNFDLVDINDICSGCRGHDGFTSSWRSVADTLRQAVDDAVAAHPDYKVVVTGHSLGGALATLAGADLRNNGYDVDLYTYGAPRVGNRAFAEFITVQTGGTLYRVTHTNDVVPRLPPRQFDYSHPSPEYWIKSGTLVPVRRRDIVKIEGIDATGGNNQNNTPDIPAHLWYFGLIGTCI

SEQ ID NO: 9385 - protein, 291 aa, Thermomyces lanuginosus
MRSSLVLFFVSAWTALASPIRRDVSADLLNQFKLFAQYSAAAYCGRNNDAPAGTNITCSANACPLVEAADATFLYSFENSGVGDVTGFLAVDNTNKLIVLSFRGSRSIENWITNLNFDLVDINDICSGCRGHDGFTSSWRSVADTLRQAVDQAVAAHPDYKVVVTGHSLGGALATLAGADLRNNGYDVDLYTYGAPRVGNRAFAEFITVQTGGTLYRVTHTNDVVPRLPPRQFGYSHPSPEYWIKSGTLVPVRRRDIVKIEGIDATGGNNQNNTPDIPAHLWYFGLIGTCI

SEQ ID NO: 9386 - protein, 291 aa, Thermomyces lanuginosus
MRSSLVLFFVSAWTALASPIRRLVSADLLNQFKLFAQYSAAAYCGRNNDAPAGTNITCSANACPLVEAADATFLYSFENSGVGDVTGFLAVDNTNKLIVLSFRGSRSIENWITNLNFDLVDINDICSGCRGHDGFTSSWRSVADTLRQAVDDAVAAHPDYKVVVTGHSLGGALATLAGADLRNNGYDVDLYTYGAPRVGNRAFAEFITVQTGGTLYRVTHTNDVVPRLPPRQFGYSHPSPEYWIKSGTLVPVRRRDIVKIEGIDATGGNNQNNAPDIPAHLWYFGAIGTCI

SEQ ID NO: 9387 - protein, 291 aa, Thermomyces lanuginosus
MRSSLVLFFVSAWTALASPIRRDVSADLLNQFKLFAQYSAAAYCGRNNDAPAGTNITCSANACPLVEAADATFLYSFENSGVGDVTGFLAVDNTNKLIVLSFRGSRSIENWITNLQFDLVDINDICSGCRGHDGFTSSWRSVADTLRQAVDDAVAAHPDYKVVVTGHSLGGALATLAGADLRNNGYDVDLYTYGAPRVGNRAFAEFITVQTGGTLYRVTHTNDVVPRLPPRQFGYSHPSPEYWIKSGTLVPVRRRDIVKIEGIDATGGNNQNNTPDIPAHLWYFGLIGTCI

SEQ ID NO: 9388 - protein, 291 aa, Thermomyces lanuginosus
MRSSLVLFFVSAWTALASPIRRDVSADLLNQFKLFAQYSAAAYCGRNNDAPAGTNITCSANACPLVEAADATFLYSFENSGVGDVTGFLAVDNTNKLIVLSFRGSRSIENWITNLNFDLVDINDICSGCRGHDGFTSSWRSVADTLRQAVDDAVAAHPDYKVVVTGHSLGGALATLAGADLRNNGYDVQLYTYGAPRVGNRAFAEFITVQTGGTLYRVTHTNDVVPRLPPRQFGYSHPSPEYWIKSGTLVPVRRRDIVKIEGIDATGGNNQNNTPDIPAHLWYFGLIGTCI

SEQ ID NO: 9389 - protein, 291 aa, Thermomyces lanuginosus
MRSSLVLFFVSAWTALASPIRRDVSADLLNQFKLFAQYSAAAYCGRNNDAPAGTNITCSANACPLVEAADATFLYSFENSGVGDVTGFLAVDNTNKLIVLSFRGSRSIENWRTNLNFDLVDINDICSGCRGHDGFTSSWRSVADTLRQAVDDAVAAHPDYKVVVTGHSLGGALATLAGADLRNNGYDVDLYTYGAPRVGNRAFAEFITVQTGGTLYRVTHTNDVVPRLPPRQFGYSHPSPEYWIKSGTLVPVRRRDIVKIEGIDATGGNNQNNTPDIPAHLWYFGLIGTCI

SEQ ID NO: 9390 - protein, 291 aa, Thermomyces lanuginosus
MRSSLVLFFVSAWTALASPIRRYVSADLLNQFKLFAQYSAAAYCGRNNDAPAGTNITCSANACPLVEAADATFLYSFENSGVGDVTGFLAVDNTNKLIVLSFRGSRSIENWITNLNFDLVDINDICSGCRGHDGFTSSWRSVADTLRQAVDDAVAAHPDYKVVVTGHSLGGALATLAGADLRNNGYDVDLYTYGAPRVGNRAFAEFITVQTGGTLYRVTHTNDVVPRLPPRQFGYSHPSPEYWIKSGTLVPVRRRDIVKIEGIDATGGNNQNNAPDIPAHLWYFGAIGTCI

SEQ ID NO: 9391 - protein, 291 aa, Thermomyces lanuginosus
MRSSLVLFFVSAWTALASPIRRDVSADLLNQFKLFAQYSAAAYCGRNNDAPAGTNITCSANACPLVEAADATFLYSFENSGVGDVTGFLAVDNTNKLIVLSFRGSRSIENWITNLNFDLVDINDICSGCRGHDGFTSSWRSVADTLRQAVDDAVAAHPDYKVVVTGHSLGGALATLAGADLRNEGYDVDLYTYGAPRVGNRAFAEFITVQTGGTLYRVTHTNDVVPRLPPRQFGYSHPSPEYWIKSGTLVPVRRRDIVKIEGIDATGGNNQNNTPDIPAHLWYFGLIGTCI

SEQ ID NO: 9392 - protein, 291 aa, Thermomyces lanuginosus
MRSSLVLFFVSAWTALASPIRRDVSADLLNQFKLFAQYSAAAYCGRNNDAPAGTNINCSANACPLVEAADATFLYSFENSGVGDVTGFLAVDNTNKLIVLSFRGSRSIENWITNLNFDLVDINDICSGCRGHDGFTSSWRSVADTLRQAVDDAVAAHPDYKVVVTGHSLGGALATLAGADLRNNGYDVDLYTYGAPRVGNRAFAEFITVQTGGTLYRVTHTNDVVPRLPPRQFGYSHPSPEYWIKSGTLVPVRRRDIVKIEGIDATGGNNQNNTPDIPAHLWYFGLIGTCI

SEQ ID NO: 9393 - protein, 291 aa, Thermomyces lanuginosus
MRSSLVLFFVSAWTALASPIRRDVSADLLNQFKLFAQYSAAAYCGRNNDAPAGTNITCSANACPLVEAADATFLYSFESSGVGDVTGFLAVDNTNKLIVLSFRGSRSIENWITNLNFDLVDINDICSGCRGHDGFTSSWRSVADTLRQAVDDAVAAHPDYKVVVTGHSLGGALATLAGADLRNNGYDVDLYTYGAPRVGNRAFAEFITVQTGGTLYRVTHTNDVVPRLPPRQFGYSHPSPEYWIKSGTLVPVRRRDIVKIEGIDATGGNNQNNAPDIPAHLWYFGAIGTCI

SEQ ID NO: 9394 - protein, 291 aa, Thermomyces lanuginosus
MRSSLVLFFVSAWTALASPIRRDVSADLLNQFKLFAQYSAAAYCGRNNDAPAGTNITCSANACPLVEAADATFLYSFENSGMGDVTGFLAVDNTNKLIVLSFRGSRSIENWITNLNFDLVDINDICSGCRGHDGFTSSWRSVADTLRQAVDDAVAAHPDYKVVVTGHSLGGALATLAGADLRNNGYDVDLYTYGAPRVGNRAFAEFITVQTGGTLYRVTHTNDVVPRLPPRQFGYSHPSPEYWIKSGTLVPVRRRDIVKIEGIDATGGNNQNNTPDIPAHLWYFGLIGTCI

SEQ ID NO: 9395 - protein, 291 aa, Thermomyces lanuginosus
MRSSLVLFFVSAWTALASPIRRCVSADLLNQFKLFAQYSAAAYCGRNNDAPAGTNITCSANACPLVEAADATFLYSFENSGVGDVTGFLAVDNTNKLIVLSFRGSRSIENWITNLNFDLVDINDICSGCRGHDGFTSSWRSVADTLRQAVDDAVAAHPDYKVVVTGHSLGGALATLAGADLRNNGYDVDLYTYGAPRVGNRAFAEFITVQTGGTLYRVTHTNDVVPRLPPRQFGYSHPSPEYWIKSGTLVPVRRRDIVKIEGIDATGGNNQNNAPDIPAHLWYFGAIGTCI

SEQ ID NO: 9396 - protein, 291 aa, Thermomyces lanuginosus
MRSSLVLFFVSAWTALASPIRRDVSADLLNQFKLFAQYSAAAYCGRNNDAPAGTNITCSANACPLVEGADATFLYSFENSGVGDVTGFLAVDNTNKLIVLSFRGSRSIENWITNLNFDLVDINDICSGCRGHDGFTSSWRSVADTLRQAVDDAVAAHPDYKVVVTGHSLGGALATLAGADLRNNGYDVDLYTYGAPRVGNRAFAEFITVQTGGTLYRVTHTNDVVPRLPPRQFGYSHPSPEYWIKSGTLVPVRRRDIVKIEGIDATGGNNQNNAPDIPAHLWYFGAIGTCI

SEQ ID NO: 9397 - protein, 291 aa, Thermomyces lanuginosus
MRSSLVLFFVSAWTALASPIRRDVSEDLLNQFKLFAQYSAAAYCGRNNDAPAGTNITCSANACPLVEAADATFLYSFENSGVGDVTGFLAVDNTNKLIVLSFRGSRSIENWITNLNFDLVDINDICSGCRGHDGFTSSWRSVADTLRQAVDDAVAAHPDYKVVVTGHSLGGALATLAGADLRNNGYDVDLYTYGAPRVGNRAFAEFITVQTGGTLYRVTHTNDVVPRLPPRQFGYSHPSPEYWIKSGTGVPVRRRDIVKIEGIDATGGNNQNNTPDIPAHLWYFGLIGTCI

SEQ ID NO: 9398 - protein, 291 aa, Thermomyces lanuginosus
MRSSLVLFFVSAWTALASPIRRDVSADLLNQFKLFAQYSAAAYCGRNNDAPNGTNITCSANACPLVEAADATFLYSFENSGVGDVTGFLAVDNTNKLIVLSFRGSRSIENWITNLNFDLVDINDICSGCRGHDGFTSSWRSVADTLRQAVDDAVAAHPDYKVVVTGHSLGGALATLAGADLRNNGYDVDLYTYGAPRVGNRAFAEFITVQTGGTLYRVTHTNDVVPRLPPRQFGYSHPSPEYWIKSGTLVPVRRRDIVKIEGIDATGGNNQNNTPDIPAHLWYFGLIGTCI

SEQ ID NO: 9399 - protein, 291 aa, Thermomyces lanuginosus
MRSSLVLFFVSAWTALASPIRRDVSADLLNQFKLFAQYSAAAYCGRNNDAPAGTNITCSANACPLVEAADATFLYSFENSGVGDVTGFLAVDNTNKLIVLSFRGSRSIENWITNLNFDLVDINDICSGCRGHDGFTSSWRSVADTLRQAVDDAVAAHPDYKVVVTGHSLGGALATLAGADLRNNGYDVDLYTYGAPRVGNRAFAEFITVQTGGTLYRVTHTNDVVPRLPPRQFGYSHPSPEYWIKSGTLPPVRRRDIVKIEGIDATGGNNQNNTPDIPAHLWYFGLIGTCI

SEQ ID NO: 9400 - protein, 291 aa, Thermomyces lanuginosus
MRSSLVLFFVSAWTALASPIRRDVSADLLNQFKLFAQYSAAAYCGRNNDAPAGTNITCSANACPLVEAADATFLYSFENSGVGDVTGFLAVDNTNKLIVLSFRGSRSFENWITNLNFDLVDINDICSGCRGHDGFTSSWRSVADTLRQAVDDAVAAHPDYKVVVTGHSLGGALATLAGADLRNNGYDVDLYTYGAPRVGNRAFAEFITVQTGGTLYRVTHTNDVVPRLPPRQFGYSHPSPEYWIKSGTLVPVRRRDIVKIEGIDATGGNNQNNTPDIPAHLWYFGLIGTCI

SEQ ID NO: 9401 - protein, 291 aa, Thermomyces lanuginosus
MRSSLVLFFVSAWTALASPIRRDVSADLLNQFKLFAQYSAAAYCGRNNDAPAGTNITCSSNACPLVEAADATFLYSFENSGVGDVTGFLAVDNTNKLIVLSFRGSRSIENWITNLNFDLVDINDICSGCRGHDGFTSSWRSVADTLRQAVDDAVAAHPDYKVVVTGHSLGGALATLAGADLRNNGYDVDLYTYGAPRVGNRAFAEFITVQTGGTLYRVTHTNDVVPRLPPRQFGYSHPSPEYWIKSGTLVPVRRRDIVKIEGIDATGGNNQNNAPDIPAHLWYFGAIGTCI

SEQ ID NO: 9402 - protein, 291 aa, Thermomyces lanuginosus
MRSSLVLFFVSAWTALASPIRRDVSADLLNQFKLFAQYSAAAYCGRNNDAPAGTNITCSANACPLVEAADATFNYSFENSGVGDVTGFLAVDNTNKLIVLSFRGSRSIENWITNLNFDLVDINDICSGCRGHDGFTSSWRSVADTLRQAVDDAVAAHPDYKVVVTGHSLGGALATLAGADLRNNGYDVDLYTYGAPRVGNRAFAEFITVQTGGTLYRVTHTNDVVPRLPPRQFGYSHPSPEYWIKSGTLVPVRRRDIVKIEGIDATGGNNQNNTPDIPAHLWYFGLIGTCI

SEQ ID NO: 9403 - protein, 291 aa, Thermomyces lanuginosus
MRSSLVLFFVSAWTALASPIRRDVSADLLNQFKLFAQYSAAAYCGRNNDAPAGTNITCSANACPLVEAADATFLYSFENSGVGDVTGFLAVDQTNKLIVLSFRGSRSIENWITNLNFDLVDINDICSGCRGHDGFTSSWRSVADTLRQAVDDAVAAHPDYKVVVTGHSLGGALATLAGADLRNNGYDVDLYTYGAPRVGNRAFAEFITVQTGGTLYRVTHTNDVVPRLPPRQFGYSHPSPEYWIKSGTLVPVRRRDIVKIEGIDATGGNNQNNTPDIPAHLWYFGLIGTCI

SEQ ID NO: 9404 - protein, 291 aa, Thermomyces lanuginosus
MRSSLVLFFVSAWTALASPIRRDVSADLLNQFKLFAQYSAAAYCGRNNDAPAGTNITCSANACPLVEAADATFLYSFENSGVGDVTGFLAVDNTNKLIVLSFRGSRSIENWITNLNFDLVDINDICSGCRGHDGFTSSWRSVADTLRQAVDDAVAAHPDYKVVVTGHSLGGALATLAGADLRNNGSDVDLYTYGAPRVGNRAFAEFITVQTGGTLYRVTHTNDVVPRLPPRQFGYSHPSPEYWIKSGTLVPVRRRDIVKIEGIDATGGNNQNNTPDIPAHLWYFGLIGTCI

SEQ ID NO: 9405 - protein, 291 aa, Thermomyces lanuginosus
MRSSLVLFFVSAWTALASPIRRDVSADLLNQFKLFAQYSAAAYCGRNNDAPAGTNITCSANACPLVEAADATFLYSFENSSVGDVTGFLAVDNTNKLIVLSFRGSRSIENWITNLNFDLVDINDICSGCRGHDGFTSSWRSVADTLRQAVDDAVAAHPDYKVVVTGHSLGGALATLAGADLRNNGYDVDLYTYGAPRVGNRAFAEFITVQTGGTLYRVTHTNDVVPRLPPRQFGYSHPSPEYWIKSGTLVPVRRRDIVKIEGIDATGGNNQNNTPDIPAHLWYFGLIGTCI

SEQ ID NO: 9406 - protein, 291 aa, Thermomyces lanuginosus
MRSSLVLFFVSAWTALASPIRRDVSADLLQQFKLFAQYSAAAYCGRNNDAPAGTNITCSANACPLVEAADATFLYSFENSGVGDVTGFLAVDNTNKLIVLSFRGSRSIENWITNLNFDLVDINDICSGCRGHDGFTSSWRSVADTLRQAVDDAVAAHPDYKVVVTGHSLGGALATLAGADLRNNGYDVDLYTYGAPRVGNRAFAEFITVQTGGTLYRVTHTNDVVPRLPPRQFGYSHPSPEYWIKSGTLVPVRRRDIVKIEGIDATGGNNQNNTPDIPAHLWYFGLIGTCI

SEQ ID NO: 9407 - protein, 291 aa, Thermomyces lanuginosus
MRSSLVLFFVSAWTALASPIRRDVSADLLNQFKLFAQYSAAAYCGRNNDAPAGTNITCSANACPLVEAADATFLYSFENSGVGDVTGFLAVDNTNKLIVLSFRGSRSIENWITNLNFDLVDINDICSGCRGHDGFTSSWRSVADTLRQAVDDAVAAHPDYKVVVTGHSLGGALATLAGADLRNNGYDVDLYTYGAPRVGNRAFAEFITVQTGGTLYRVTHTNDVVPRLPPRQFGYSHPSPEYWIKSGTLVPVRRRDIVKIEGIDATGGNNQNNTPSIPAHLWYFGLIGTCI

SEQ ID NO: 9408 - protein, 291 aa, Thermomyces lanuginosus
MRSSLVLFFVSAWTALASPIRRDVSADLLNQFKLFAQYSAAAYCGRNNDAPAGTNITCSANACPLVEAADATFLYSFENSGVGDVTGFLAVDNTNKLIVLSFRGTRSIENWITNLNFDLVDINDICSGCRGHDGFTSSWRSVADTLRQAVDDAVAAHPDYKVVVTGHSLGGALATLAGADLRNNGYDVDLYTYGAPRVGNRAFAEFITVQTGGTLYRVTHTNDVVPRLPPRQFGYSHPSPEYWIKSGTLVPVRRRDIVKIEGIDATGGNNQNNTPDIPAHLWYFGLIGTCI

SEQ ID NO: 9409 - protein, 291 aa, Thermomyces lanuginosus
MRSSLVLFFVSAWTALASPIRRDVSADLLNQFKLFAQYSAAAYCGRNNDAPAGTNITCSANACPLVEAADATFLYSFENSGVGDVTGFLAVDNTNKLIVLSFRGSRSIENWITNLNFQLVDINDICSGCRGHDGFTSSWRSVADTLRQAVDDAVAAHPDYKVVVTGHSLGGALATLAGADLRNNGYDVDLYTYGAPRVGNRAFAEFITVQTGGTLYRVTHTNDVVPRLPPRQFGYSHPSPEYWIKSGTLVPVRRRDIVKIEGIDATGGNNQNNTPDIPAHLWYFGLIGTCI

SEQ ID NO: 9410 - protein, 291 aa, Thermomyces lanuginosus
MRSSLVLFFVSAWTALASPIRRDVSADLLNQFKLFAQYSAAAYCGRNNDAPAGTNITCSANACPLVEAADATFLYSFENSGVGDVTGFLAVDNTNKLIVLSFRGSRSIENWITNLNFHLVDINDICSGCRGHDGFTSSWRSVADTLRQAVDDAVAAHPDYKVVVTGHSLGGALATLAGADLRNNGYDVDLYTYGAPRVGNRAFAEFITVQTGGTLYRVTHTNDVVPRLPPRQFGYSHPSPEYWIKSGTLVPVRRRDIVKIEGIDATGGNNQNNTPDIPAHLWYFGLIGTCI

SEQ ID NO: 9411 - protein, 291 aa, Thermomyces lanuginosus
MRSSLVLFFVSAWTALASPIRRDVSADLLNQFKLFAQYSAAAYCGRNNDAPAGTNITCSANACPLVEAADATFLYSFENSGVGDVTGFLAVDNTNKLIVLSFRGSRSIENWITNLNFDLVDINDICSGCEGHDGFTSSWRSVADTLRQAVDDAVAAHPDYKVVVTGHSLGGALATLAGADLRNNGYDVDLYTYGAPRVGNRAFAEFITVQTGGTLYRVTHTNDVVPRLPPRQFGYSHPSPEYWIKSGTLVPVRRRDIVKIEGIDATGGNNQNNTPDIPAHLWYFGLIGTCI

SEQ ID NO: 9412 - protein, 291 aa, Thermomyces lanuginosus
MRSSLVLFFVSAWTALASPIRRDVSADLLNQFKLFAQYSAAAYCGRNNDAPAGTNITCSANACPLVEAADATFLYSFENSGVGDVTGFLAVDNTNKLIVLSFRGSRSIENWITNLNFDLVDINDICSGCRGHDGFTSSWRSVADTLRQAVDDAVAAHPDYKVVVTGHSLGGALATLAGADLRNNGYQVDLYTYGAPRVGNRAFAEFITVQTGGTLYRVTHTNDVVPRLPPRQFGYSHPSPEYWIKSGTLVPVRRRDIVKIEGIDATGGNNQNNTPDIPAHLWYFGLIGTCI

SEQ ID NO: 9413 - protein, 291 aa, Thermomyces lanuginosus
MRSSLVLFFVSAWTALASPIRRDVSADLLNQFKLFAQYSAAAYCGRNNDAPAGTNITCSANACPLVEAADATFLYSFENSGVGDVTGFLAVQNTNKLIVLSFRGSRSIENWITNLNFDLVDINDICSGCRGHDGFTSSWRSVADTLRQAVDDAVAAHPDYKVVVTGHSLGGALATLAGADLRNNGYDVDLYTYGAPRVGNRAFAEFITVQTGGTLYRVTHTNDVVPRLPPRQFGYSHPSPEYWIKSGTLVPVRRRDIVKIEGIDATGGNNQNNTPDIPAHLWYFGLIGTCI

SEQ ID NO: 9414 - protein, 291 aa, Thermomyces lanuginosus
MRSSLVLFFVSAWTALASPIRRDVSADLLNQFKLFAQYSAAAYCGRNNDAPAGTNITCSAQACPLVEAADATFLYSFENSGVGDVTGFLAVDNTNKLIVLSFRGSRSIENWITNLNFDLVDINDICSGCRGHDGFTSSWRSVADTLRQAVDDAVAAHPDYKVVVTGHSLGGALATLAGADLRNNGYDVDLYTYGAPRVGNRAFAEFITVQTGGTLYRVTHTNDVVPRLPPRQFGYSHPSPEYWIKSGTLVPVRRRDIVKIEGIDATGGNNQNNTPDIPAHLWYFGLIGTCI

SEQ ID NO: 9415 - protein, 291 aa, Thermomyces lanuginosus
MRSSLVLFFVSAWTALASPIRRDVSADLLNQFKLFAQYSAAAYCGRNNDAPAGTNITCSANACPLVEAADATFLYSFENSGVGDVTGFLAVDNTNKLIVLSFRGSRSIENWITNLNFDLVDINDICSGCRGHDGFTSSWRSVADTLRQAVDDAVAAHPDYKVVVTGHSLGGALATLAGADLRNNGYDVDEYTYGAPRVGNRAFAEFITVQTGGTLYRVTHTNDVVPRLPPRQFGYSHPSPEYWIKSGTLVPVRRRDIVKIEGIDATGGNNQNNAPDIPAHLWYFGAIGTCI

SEQ ID NO: 9416 - protein, 291 aa, Thermomyces lanuginosus
MRSSLVLFFVSAWTALASPIRRDVSADLLNQFKLFAQYSAAAYCGRNNDAPAGTNITCSANACPLVEAADATILYSFENSGVGDVTGFLAVDNTNKLIVLSFRGSRSIENWITNLNFDLVDINDICSGCRGHDGFTSSWRSVADTLRQAVDDAVAAHPDYKVVVTGHSLGGALATLAGADLRNNGYDVDLYTYGAPRVGNRAFAEFITVQTGGTLYRVTHTNDVVPRLPPRQFGYSHPSPEYWIKSGTLVPVRRRDIVKIEGIDATGGNNQNNTPDIPAHLWYFGLIGTCI

SEQ ID NO: 9417 - protein, 291 aa, Thermomyces lanuginosus
MRSSLVLFFVSAWTALASPIRRDVSADLLEQFKLFAQYSAAAYCGRNNDAPAGTNITCSANACPLVEAADATFLYSFENSGVGDVTGFLAVDNTNKLIVLSFRGSRSIENWITNLNFDLVDINDICSGCRGHDGFTSSWRSVADTLRQAVDDAVAAHPDYKVVVTGHSLGGALATLAGADLRNNGYDVDLYTYGAPRVGNRAFAEFITVQTGGTLYRVTHTNDVVPRLPPRQFGYSHPSPEYWIKSGTLVPVRRRDIVKIEGIDATGGNNQNNTPDIPAHLWYFGLIGTCI

SEQ ID NO: 9418 - protein, 291 aa, Thermomyces lanuginosus
MRSSLVLFFVSAWTALASPIRRDVSADLLNQFKLFAQYSAAAYCGRNNDAPAGTNITCSANACPLVEAADATFLYSFENSGVGDVTGFLAVDNTNKLIVLSFRGSRSIENWITNLNFDLVDINDICSGCRGHDGFTSSWRSVADTLRQAVDDAVAAHPDYKVVVTGHSLGGALATLAGADLRNNGYDVDLYTYGAPRVGDRAFAEFITVQTGGTLYRVTHTNDVVPRLPPRQFGYSHPSPEYWIKSGTLVPVRRRDIVKIEGIDATGGNNQNNTPDIPAHLWYFGLIGTCI

SEQ ID NO: 9419 - protein, 291 aa, Thermomyces lanuginosus
MRSSLVLFFVSAWTALASPIRRDVSEDLLNQFKLFAQYSAAAYCGRNNDAPAGTNITCSANACPLVEAADATFLYSFENSGVGDVTGFLAVDNTNKLIVLSFRGSRSIENWITNLNFDLVDINDICSGCRGHDGFTSSWRSVADTLRQAVDDAVAAHPDYKVVVTGHSLGGALATLAGADLRNNGYDVDLYTYGAPRVGNRAFAEFITVQTGGTLYRVTHTNDVVPRLPPRQVGYSHPSPEYWIKSGTLVPVRRRDIVKIEGIDATGGNNQNNTPDIPAHLWYFGLIGTCI

SEQ ID NO: 9420 - protein, 291 aa, Thermomyces lanuginosus
MRSSLVLFFVSAWTALASPIRRGVSADLLNQFKLFAQYSAAAYCGRNNDAPAGTNITCSANACPLVEAADATFLYSFENSGVGDVTGFLAVDNTNKLIVLSFRGSRSIENWITNLNFDLVDINDICSGCRGHDGFTSSWRSVADTLRQAVDDAVAAHPDYKVVVTGHSLGGALATLAGADLRNNGYDVDLYTYGAPRVGNRAFAEFITVQTGGTLYRVTHTNDVVPRLPPRQFGYSHPSPEYWIKSGTLVPVRRRDIVKIEGIDATGGNNQNNAPDIPAHLWYFGAIGTCI

SEQ ID NO: 9421 - protein, 291 aa, Thermomyces lanuginosus
MRSSLVLFFVSAWTALASPIRRDVSADLLNQFKLFAQYSAAAYCGRNNDAPAGTNITCSANACPLVEAADATFLYSFENSGVGDVTGFLAVDNTNKLIVLSFRGSRSIENWITNLNFDLVDINDICSGCRGHDGFTSSWRSVADTLRQAVDDAVAAHPDYKVVVTGHSLGGALATLAGADLRNNGYDVDLYTYGAPRVGNRAFAEFITVQTGGTLYRVTHTNDVVPRLPPRQFGYSHPSPEYWIKSGTGVPVRRRDIVKIEGIDATGGNNQNNTPDIPAHLWYFGLIGTCI

SEQ ID NO: 9422 - protein, 291 aa, Thermomyces lanuginosus
MRSSLVLFFVSAWTALASPIRRDVSADLLNQFKLFAQYSAAAYCGRNNDAPAGTNITCSANACPLVEAADATFLYSFENSGVGDVTGFLAVDNTNKLIVLSFRGSRSIENWITNLNFDLVDINDICSGCRGHDGFTSSWRSVADTLRQAVDDAVAAHPDYKVVVTGHSLGGALATLAGADLRNNGYDVDLYTYGAPRVGNRAFAEFITVQTGGTLYRVTHTNDVVPRLPPRQFGYSHPSPEYWIKSGTLVPVRRRDIVKIEGIDATGGNNQNNTPDIPAHLWYFGIIGTCI

SEQ ID NO: 9423 - protein, 291 aa, Thermomyces lanuginosus
MRSSLVLFFVSAWTALASPIRRDVSADLLNQFKLFAQYSAAAYCGRNNDAPAGTNITCSANACPLVERADATFLYSFENSGVGDVTGFLAVDNTNKLIVLSFRGSRSIENWITNLNFDLVDINDICSGCRGHDGFTSSWRSVADTLRQAVDDAVAAHPDYKVVVTGHSLGGALATLAGADLRNNGYDVDLYTYGAPRVGNRAFAEFITVQTGGTLYRVTHTNDVVPRLPPRQFGYSHPSPEYWIKSGTLVPVRRRDIVKIEGIDATGGNNQNNAPDIPAHLWYFGAIGTCI

SEQ ID NO: 9424 - protein, 291 aa, Thermomyces lanuginosus
MRSSLVLFFVSAWTALASPIRRRVSADLLNQFKLFAQYSAAAYCGRNNDAPAGTNITCSANACPLVEAADATFLYSFENSGVGDVTGFLAVDNTNKLIVLSFRGSRSIENWITNLNFDLVDINDICSGCRGHDGFTSSWRSVADTLRQAVDDAVAAHPDYKVVVTGHSLGGALATLAGADLRNNGYDVDLYTYGAPRVGNRAFAEFITVQTGGTLYRVTHTNDVVPRLPPRQFGYSHPSPEYWIKSGTLVPVRRRDIVKIEGIDATGGNNQNNAPDIPAHLWYFGAIGTCI

SEQ ID NO: 9425 - protein, 291 aa, Thermomyces lanuginosus
MRSSLVLFFVSAWTALASPIRRDVSADLLNQFKLFAQYSAAAYCGRNNDAPAGTNITCSANACPLVEAADATFLYSFENSGVGDVTGFLAVDNTNKLIVLSFRGSRSIENWITNLNFDLVDINDICSGCRGHDGFTSSWRSVADTLRQAVDDAVAAHPDYKVVVTGHSLGGALATLAGADLRNNGYDVDLYTYGAPRVGNRAFAEFITVQTGGTLYRVTHTNDVVPRLPPRQFGYSHPSPEYWIKSGTLVPVRRRDIVKIEGIDATGGNNQNNAPDIPAHLWYFGAIGTCI

SEQ ID NO: 9426 - protein, 291 aa, Thermomyces lanuginosus
MRSSLVLFFVSAWTALASPIRRDVSADLLNQFKLFAQYSAAAYCGRNNDAPAGTNITCSANACPLVEAADATFLYSFENSGVGDVTGFLAVDNTNKLIVLSFRGSRSIENWITNLSFDLVDINDICSGCRGHDGFTSSWRSVADTLRQAVDDAVAAHPDYKVVVTGHSLGGALATLAGADLRNNGYDVDLYTYGAPRVGNRAFAEFITVQTGGTLYRVTHTNDVVPRLPPRQFGYSHPSPEYWIKSGTLVPVRRRDIVKIEGIDATGGNNQNNTPDIPAHLWYFGLIGTCI

SEQ ID NO: 9427 - protein, 291 aa, Thermomyces lanuginosus
MRSSLVLFFVSAWTALASPIRRDVSADLLNQFKLFAQYSAAAYCGRNNDAPAGTNITCSANACPLVEAADATFLYSFENSGVGDVTGFLAVDNTNKLIVLSFRGSRSIENWITNLNFDLVDINDICSGCRGHDGFTSSWRSVADTLRQAVDDAVAAHPDYKVVVTGHSLGGALATLAGADLRNNGYDVDLYTYGAPRVGNREFAEFITVQTGGTLYRVTHTNDVVPRLPPRQFGYSHPSPEYWIKSGTLVPVRRRDIVKIEGIDATGGNNQNNTPDIPAHLWYFGLIGTCI

SEQ ID NO: 9428 - protein, 291 aa, Thermomyces lanuginosus
MRSSLVLFFVSAWTALASPIRRDVSADLLNQFKLFAQYSAAAYCGRNNDAPAGTNITCSANACPLVEAADATFLYSFENSGVGDVTGFLAVDNTNKLIVLSFRGSRSIENWITNLNFDLVDIRDICSGCRGHDGFTSSWRSVADTLRQAVDDAVAAHPDYKVVVTGHSLGGALATLAGADLRNNGYDVDLYTYGAPRVGNRAFAEFITVQTGGTLYRVTHTNDVVPRLPPRQFGYSHPSPEYWIKSGTLVPVRRRDIVKIEGIDATGGNNQNNTPDIPAHLWYFGLIGTCI

SEQ ID NO: 9429 - protein, 291 aa, Thermomyces lanuginosus
MRSSLVLFFVSAWTALASPIRRDVSADLLNQFKLFAQYSAAAYCGRNNDAPAGTNITCSANACPGVEAADATFLYSFENSGVGDVTGFLAVDNTNKLIVLSFRGSRSIENWITNLNFDLVDINDICSGCRGHDGFTSSWRSVADTLRQAVDDAVAAHPDYKVVVTGHSLGGALATLAGADLRNNGYDVDLYTYGAPRVGNRAFAEFITVQTGGTLYRVTHTNDVVPRLPPRQFGYSHPSPEYWIKSGTLVPVRRRDIVKIEGIDATGGNNQNNAPDIPAHLWYFGAIGTCI

SEQ ID NO: 9430 - protein, 291 aa, Thermomyces lanuginosus
MRSSLVLFFVSAWTALASPIRRDVSADLLNQFKLFAQYSAAAYCGRNNDAPAGTNITCSANACPLVEFADATFLYSFENSGVGDVTGFLAVDNTNKLIVLSFRGSRSIENWITNLNFDLVDINDICSGCRGHDGFTSSWRSVADTLRQAVDDAVAAHPDYKVVVTGHSLGGALATLAGADLRNNGYDVDLYTYGAPRVGNRAFAEFITVQTGGTLYRVTHTNDVVPRLPPRQFGYSHPSPEYWIKSGTLVPVRRRDIVKIEGIDATGGNNQNNAPDIPAHLWYFGAIGTCI

SEQ ID NO: 9431 - protein, 291 aa, Thermomyces lanuginosus
MRSSLVLFFVSAWTALASPIRRDVSADLLNQFKLFAQYSAAAYCGRNNDAPAGTNITCYANACPLVEAADATFLYSFENSGVGDVTGFLAVDNTNKLIVLSFRGSRSIENWITNLNFDLVDINDICSGCRGHDGFTSSWRSVADTLRQAVDDAVAAHPDYKVVVTGHSLGGALATLAGADLRNNGYDVDLYTYGAPRVGNRAFAEFITVQTGGTLYRVTHTNDVVPRLPPRQFGYSHPSPEYWIKSGTLVPVRRRDIVKIEGIDATGGNNQNNAPDIPAHLWYFGAIGTCI

SEQ ID NO: 9432 - protein, 291 aa, Thermomyces lanuginosus
MRSSLVLFFVSAWTALASPIRRDVSADLLNQFKLFAQYSAAAYCGRNNDAPAGTNITCSANACPLVEAADATFLYSFENSGVGDVTGFLAVDNTNKLIVLSFRGSRSIENWITNLNFDLVDINDICSGCRGHDGFTSSWRSVAQTLRQAVDDAVAAHPDYKVVVTGHSLGGALATLAGADLRNNGYDVDLYTYGAPRVGNRAFAEFITVQTGGTLYRVTHTNDVVPRLPPRQFGYSHPSPEYWIKSGTLVPVRRRDIVKIEGIDATGGNNQNNTPDIPAHLWYFGLIGTCI

SEQ ID NO: 9433 - protein, 291 aa, Thermomyces lanuginosus
MRSSLVLFFVSAWTALASPIRRDVSADLLNQFKLFAQYSAAAYCGRNNDAPAGTNITCSANACPLVEAADATFLYSFENSGVGDVTGFLAVDNTNKLIVLSFRGSRSIENWITNLNFDLVDINDICSGCRGHDGFTSSWRSVADTLRQAVDDAVAAHPDYKVVVTGHSLGGALATLAGADLRNNGYDVDLYTYGAPRVGNRAFAEFITVQTGGTLYRVTHTNDVVPRLPPRQSGYSHPSPEYWIKSGTLVPVRRRDIVKIEGIDATGGNNQNNTPDIPAHLWYFGLIGTCI

SEQ ID NO: 9434 - protein, 291 aa, Thermomyces lanuginosus
MRSSLVLFFVSAWTALASPIRRDVSADLLNQFKLFAQYSAAAYCGRNNDAPAGTNITCSANACPLVEAADATFLYSFENSGVGDVTGFLAVDNTNKLIVLSFRGSRSIENWITNLNFDLVDINDICSGCRGHDGFTSSWRSVADTLRQAVDDAVAAHPDYKVVVTGHSLGGALATLAGADLRNNGYDVDLYTYGAPRVGNRAFAEFITVQTGGTLYRVTHTNDVVPRLPPRQFGYSHPSPEYWIKSGTLVPVRRRDIVKIEGIDAEGGNNQNNTPDIPAHLWYFGLIGTCI

SEQ ID NO: 9435 - protein, 291 aa, Thermomyces lanuginosus
MRSSLVLFFVSAWTALASPIRRDVSADLLNQFKLFAQYSAAAYCGRNNDAPAGTNITCSANACPLVEAADATFLYSFENSGVGDVTGFLAVDNTNKLIVLSFRGSRSIENWITNLNFDLVDINDICSGCRGHDGFTSSWRSVADTLRQAVDDAVAAHPDYKVVVTGHSLGGALATLAGADLRNNGYDVDLYTYGAPRVGNRAFAEFITVQTGGTLYRVTHTNDVVPRLPPRQFGYSHPSPEYWIKSGTLVPVRRRDIVKIEGIDATGGNNQNNTPDAPAHLWYFGLIGTCI

SEQ ID NO: 9436 - protein, 291 aa, Thermomyces lanuginosus
MRSSLVLFFVSAWTALASPIRRDVSADLLNQFKLFAQYSAAAYCGRNNDAPAGTNITCSANACPLVEAADATVLYSFENSGVGDVTGFLAVDNTNKLIVLSFRGSRSIENWITNLNFDLVDINDICSGCRGHDGFTSSWRSVADTLRQAVDDAVAAHPDYKVVVTGHSLGGALATLAGADLRNNGYDVDLYTYGAPRVGNRAFAEFITVQTGGTLYRVTHTNDVVPRLPPRQFGYSHPSPEYWIKSGTLVPVRRRDIVKIEGIDATGGNNQNNTPDIPAHLWYFGLIGTCI

SEQ ID NO: 9437 - protein, 291 aa, Thermomyces lanuginosus
MRSSLVLFFVSAWTALASPIRRDVSADLLNQFKLFAQYSAAAYCGRNNDAPAGTNITCSANACPLVEAADATFLYSFNNSGVGDVTGFLAVDNTNKLIVLSFRGSRSIENWITNLNFDLVDINDICSGCRGHDGFTSSWRSVADTLRQAVDDAVAAHPDYKVVVTGHSLGGALATLAGADLRNNGYDVDLYTYGAPRVGNRAFAEFITVQTGGTLYRVTHTNDVVPRLPPRQFGYSHPSPEYWIKSGTLVPVRRRDIVKIEGIDATGGNNQNNTPDIPAHLWYFGLIGTCI

SEQ ID NO: 9438 - protein, 291 aa, Thermomyces lanuginosus
MRSSLVLFFVSAWTALASPIRRDVSADLLNQFKLFAQYSAAAYCGRNNDAPAGTNITCSANACPLVEAADATFLYSFENSGVGDVTGFLAVDNTNKLIVLSFRGSRSIENWITNLNFDLVDINDICSGCRGHDGFTSSWRSVADTLRQAVDDAVAAHPDYKVVVTGHSLGGALATLAGADLRNNGYDVDLYTYGAPRVGNRAFAEFITVQTGGTLYRVTHTNDVVPRLPPRQFEYSHPSPEYWIKSGTLVPVRRRDIVKIEGIDATGGNNQNNTPDIPAHLWYFGLIGTCI

SEQ ID NO: 9439 - protein, 291 aa, Thermomyces lanuginosus
MRSSLVLFFVSAWTALASPIRRDVSADLLNQFKLFAQYSAAAYCGRNNDAPAGTNITCSANACPLVEAADATFLYSFENSGVGDVTGFLAKDNTNKLIVLSFRGSRSIENWITNLNFDLVDINDICSGCRGHDGFTSSWRSVADTLRQAVDDAVAAHPDYKVVVTGHSLGGALATLAGADLRNNGYDVDLYTYGAPRVGNRAFAEFITVQTGGTLYRVTHTNDVVPRLPPRQFGYSHPSPEYWIKSGTLVPVRRRDIVKIEGIDATGGNNQNNAPDIPAHLWYFGAIGTCI

SEQ ID NO: 9440 - protein, 291 aa, Thermomyces lanuginosus
MRSSLVLFFVSAWTALASPIRRDVSADLLNQFKLFAQYSAAAYCGRNNDAPAGTNITCSANACPLVEAADATFLYSFENSGVGDVTGFLAVDNTNKLIVLSFRGSRSIEDWITNLNFDLVDINDICSGCRGHDGFTSSWRSVADTLRQAVDDAVAAHPDYKVVVTGHSLGGALATLAGADLRNNGYDVDLYTYGAPRVGNRAFAEFITVQTGGTLYRVTHTNDVVPRLPPRQFGYSHPSPEYWIKSGTLVPVRRRDIVKIEGIDATGGNNQNNTPDIPAHLWYFGLIGTCI

SEQ ID NO: 9441 - protein, 291 aa, Thermomyces lanuginosus
MRSSLVLFFVSAWTALASPIRRCVSADLLNQFKLFAQYSAAAYCGRNNDAPAGTNITCSANACPLVEAADATFLYSFENSGVGDVTGFLAVDNTNKLIVLSFRGSRSIENWITNLNFDLVDINDICSGCRGHDGFTSSWRSVADTLRQAVDDAVAAHPDYKVVVTGHSLGGALATLAGADLRNNGYDVDLYTYGAPRVGNRAFAEFITVQTGGTLYRVTHTNDVVPRLPPRQFGYSHPSPEYWIKSGTLVPVRRCDIVKIEGIDATGGNNQNNAPDIPAHLWYFGAIGTCI

SEQ ID NO: 9442 - protein, 291 aa, Thermomyces lanuginosus
MRSSLVLFFVSAWTALASPIRRDVSADLLNQFKLFAQYSAAAYCGRNNDAPAGTNITCSANACPLVEAAQATFLYSFENSGVGDVTGFLAVDNTNKLIVLSFRGSRSIENWITNLNFDLVDINDICSGCRGHDGFTSSWRSVADTLRQAVDDAVAAHPDYKVVVTGHSLGGALATLAGADLRNNGYDVDLYTYGAPRVGNRAFAEFITVQTGGTLYRVTHTNDVVPRLPPRQFGYSHPSPEYWIKSGTLVPVRRRDIVKIEGIDATGGNNQNNTPDIPAHLWYFGLIGTCI

SEQ ID NO: 9443 - protein, 291 aa, Thermomyces lanuginosus
MRSSLVLFFVSAWTALASPIRRDVSADLLNQFKLFAQYSAAAYCGRNNQAPAGTNITCSANACPLVEAADATFLYSFENSGVGDVTGFLAVDNTNKLIVLSFRGSRSIENWITNLNFDLVDINDICSGCRGHDGFTSSWRSVADTLRQAVDDAVAAHPDYKVVVTGHSLGGALATLAGADLRNNGYDVDLYTYGAPRVGNRAFAEFITVQTGGTLYRVTHTNDVVPRLPPRQFGYSHPSPEYWIKSGTLVPVRRRDIVKIEGIDATGGNNQNNTPDIPAHLWYFGLIGTCI

SEQ ID NO: 9444 - protein, 291 aa, Thermomyces lanuginosus
MRSSLVLFFVSAWTALASPIRRDVSADLLNQFKLFAQYSAAAYCGRNNDAPAGTNITCSANACPLVENADATFLYSFENSGVGDVTGFLAVDNTNKLIVLSFRGSRSIENWITNLNFDLVDINDICSGCRGHDGFTSSWRSVADTLRQAVDDAVAAHPDYKVVVTGHSLGGALATLAGADLRNNGYDVDLYTYGAPRVGNRAFAEFITVQTGGTLYRVTHTNDVVPRLPPRQFGYSHPSPEYWIKSGTLVPVRRRDIVKIEGIDATGGNNQNNAPDIPAHLWYFGAIGTCI

SEQ ID NO: 9445 - protein, 291 aa, Thermomyces lanuginosus
MRSSLVLFFVSAWTALASPIRRDVSRDLLNQFKLFAQYSAAAYCGRNNDAPAGTNITCSANACPLVEAADATFLYSFENSGVGDVTGFLAVDNTNKLIVLSFRGSRSIENWITNLNFDLVDINDICSGCRGHDGFTSSWRSVADTLRQAVDDAVAAHPDYKVVVTGHSLGGALATLAGADLRNNGYDVDLYTYGAPRVGNRAFAEFITVQTGGTLYRVTHTNDVVPRLPPRQFGYSHPSPEYWIKSGTLVPVRRRDIVKIEGIDATGGNNQNNAPDIPAHLWYFGAIGTCI

SEQ ID NO: 9446 - protein, 291 aa, Thermomyces lanuginosus
MRSSLVLFFVSAWTALASPIRRDVSLDLLNQFKLFAQYSAAAYCGRNNDAPAGTNITCSANACPLVEAADATFLYSFENSGVGDVTGFLAVDNTNKLIVLSFRGSRSIENWITNLNFDLVDINDICSGCRGHDGFTSSWRSVADTLRQAVDDAVAAHPDYKVVVTGHSLGGALATLAGADLRNNGYDVDLYTYGAPRVGNRAFAEFITVQTGGTLYRVTHTNDVVPRLPPRQFGYSHPSPEYWIKSGTLVPVRRRDIVKIEGIDATGGNNQNNAPDIPAHLWYFGAIGTCI

SEQ ID NO: 9447 - protein, 291 aa, Thermomyces lanuginosus
MRSSLVLFFVSAWTALASPIRRDVSADLLNQFKLFAQYSAAAYCGRNNDAPAGTNITCSANACPLVEAADATFLYSFENSGVGDVTGFLAVDNTNKLIVLSFRGSRSIENWITNLRFDLVDINDICSGCRGHDGFTSSWRSVADTLRQAVDDAVAAHPDYKVVVTGHSLGGALATLAGADLRNNGYDVDLYTYGAPRVGNRAFAEFITVQTGGTLYRVTHTNDVVPRLPPRQFGYSHPSPEYWIKSGTLVPVRRRDIVKIEGIDATGGNNQNNTPDIPAHLWYFGLIGTCI

SEQ ID NO: 9448 - protein, 291 aa, Thermomyces lanuginosus
MRSSLVLFFVSAWTALASPIRRDVSADLLNQFKLFAQYSAAAYCGRNNDAPAGTNITCSANACPLVEAADATFLYSFENSGVGDVTGFLAVDNTNKLIVLSFRGSRSIENWITNLNFDLVDINDICSGCRGHDGFTSSWRSVADTLRQAVDDAVAAHPDYKVVVTGHSLGGALATLAGADLRNNGYDVDLYTYGAPRVGNRAFAEFITVQTGGTLYRVTHTNDVVPRLPPRQFGYSHPSPEYWIKSGTLVPVRQRDIVKIEGIDATGGNNQNNTPDIPAHLWYFGLIGTCI

SEQ ID NO: 9449 - protein, 291 aa, Thermomyces lanuginosus
MRSSLVLFFVSAWTALASPIRRDVSADLLNQFKLFAQYSAAAYCGRNNDAPAGTNITCSANACPLVEAADATFLYSFENSGVGDVTGFLAVDNTNKLIVLSFRGSRSIENWITNLNFDLVDINDICSGCRGHDGFTSSWRSVADTLRQAVDDAVAAHPDYKVVVTGHSLGGALATLAGADLRNNGYDVDLYTYGAPRVGNRAFAEFITVQTGGTLYRVTHTNDVVPRLPPRQFGYSHPSPEYWIKSGTLVPVRRRDIVKIEGIDATGGNNQNNAPDIPAHLWYFGIIGTCI

SEQ ID NO: 9450 - protein, 291 aa, Thermomyces lanuginosus
MRSSLVLFFVSAWTALASPIRRDVSADLLNQFKLFAQYSAAAYCGRNNDAPAGTNITCSANACPLVEAADATFLYSFENSGVGDVTGFLAVDNTNKLIVLSFRGSRSIENWITNLNFDLVDINDICSGCRGHDGFTSSWRSVADTLRQAVDDAVAAHPDYKVVVTGHSLGGALATLAGADLRNNGYDVDLYTYGAPRVGNRAFAEFITVQTGGTLYRVTHTNDVVPRLPPRQFGYSHPSPEYWIKSGTLVPVRRRDIVKIEGIDATGGNNQNNAPDIPAHLWYFGSIGTCI

SEQ ID NO: 9451 - protein, 291 aa, Thermomyces lanuginosus
MRSSLVLFFVSAWTALASPIRRDVSADLLNQFKLFAQYSAAAYCGRNNDAPAGTNITCSANACPLVEAADATFLYSFENSGVGDVTGFLAVDNTNKLIVLSFRGSRSIENWITNLNFSLVDINDICSGCRGHDGFTSSWRSVADTLRQAVDDAVAAHPDYKVVVTGHSLGGALATLAGADLRNNGYDVDLYTYGAPRVGNRAFAEFITVQTGGTLYRVTHTNDVVPRLPPRQFGYSHPSPEYWIKSGTLVPVRRRDIVKIEGIDATGGNNQNNTPDIPAHLWYFGLIGTCI

SEQ ID NO: 9452 - protein, 291 aa, Thermomyces lanuginosus
MRSSLVLFFVSAWTALASPIRRDVSADLLNQFKLFAQYSAAAYCGRNNDAPAGTNITCSANACPLVEAADATFLYSFENSGVGDVTGFLAVDNTNKLIVLSFRGSRSIENWITNLNFDLVDINDICSGCRGHDGFTSSWRSVADTLRQAVDDAVAAHPDYKVVVTGHSLGGALATLAGADLRNNGYDVDLYTYGAPRVGNRAFAEFITVQTGGTLYRVTHTNDVVPRLPPRQTGYSHPSPEYWIKSGTLVPVRRRDIVKIEGIDATGGNNQNNTPDIPAHLWYFGLIGTCI

SEQ ID NO: 9453 - protein, 291 aa, Thermomyces lanuginosus
MRSSLVLFFVSAWTALASPIRRDVSADLLNQFKLFAQYSAAAYCGRNNDAPAGTNITCSANACPLVEAADATFLYSFENSGVGDVTGFLAVDNTNKLIVLSFRGSRSIENWITNFNFDLVDINDICSGCRGHDGFTSSWRSVADTLRQAVDDAVAAHPDYKVVVTGHSLGGALATLAGADLRNNGYDVDLYTYGAPRVGNRAFAEFITVQTGGTLYRVTHTNDVVPRLPPRQFGYSHPSPEYWIKSGTLVPVRRRDIVKIEGIDATGGNNQNNTPDIPAHLWYFGLIGTCI

SEQ ID NO: 9454 - protein, 291 aa, Thermomyces lanuginosus
MRSSLVLFFVSAWTALASPIRRMVSADLLNQFKLFAQYSAAAYCGRNNDAPAGTNITCSANACPLVEAADATFLYSFENSGVGDVTGFLAVDNTNKLIVLSFRGSRSIENWITNLNFDLVDINDICSGCRGHDGFTSSWRSVADTLRQAVDDAVAAHPDYKVVVTGHSLGGALATLAGADLRNNGYDVDLYTYGAPRVGNRAFAEFITVQTGGTLYRVTHTNDVVPRLPPRQFGYSHPSPEYWIKSGTLVPVRRRDIVKIEGIDATGGNNQNNAPDIPAHLWYFGAIGTCI

SEQ ID NO: 9455 - protein, 291 aa, Thermomyces lanuginosus
MRSSLVLFFVSAWTALASPIRRDVSADLLNQFKLFAQYSAAAYCGRNNDAPAGTNITCSANACPLVEAADATFLYSFENSGVGDVTGFLAVDNTNKLIVLSFRGSRSIENWITNLNFDLVDINDICSGCRGHDGFTSSWRSVADTLRQAVDDAVAAHPDYKVVVTGHSLGGALATLAGADLRNNGYDVDLYTYGAPRVGNRAFAEFITVQTGGTLYRVTHTNDVVPRLPPRQVGYSHPSPEYWIKSGTLVPVRRRDIVKIEGIDATGGNNQNNAPDIPAHLWYFGLIGTCI

SEQ ID NO: 9456 - protein, 291 aa, Thermomyces lanuginosus
MRSSLVLFFVSAWTALASPIRRDVSADLLNQFKLFAQYSAAAYCGRNNDAPAGTNITCSANACPLVEAADATFLYSFENSGVGDVTGFLAVDNTNKLIVLSFRGSRSIENWITNLNFDLVDIDDICSGCRGHDGFTSSWRSVADTLRQAVDDAVAAHPDYKVVVTGHSLGGALATLAGADLRNNGYDVDLYTYGAPRVGNRAFAEFITVQTGGTLYRVTHTNDVVPRLPPRQFGYSHPSPEYWIKSGTLVPVRRRDIVKIEGIDATGGNNQNNTPDIPAHLWYFGLIGTCI

SEQ ID NO: 9457 - protein, 290 aa, Thermomyces lanuginosus
MRSSLVLFFVSAWTALASPIRRDVSADLLNQFKLFAQYSAAAYCGRNNDAPAGTNITCSANACPLVEAADATFLYSFENSGVGDVTGFLAVDNTNKLIVLSFRGSRSIENWITNLNFDLVDINDICSGCRGHDGFTSSWRSVADTLRQAVDDAVAAHPDYKVVVTGHSLGGALATLAGADLRNNGYDVDLYTYGAPRVGNRAFAEFITVQTGGTLYRVTHTNDVVPRLPPRQVGYSHPSPEYWIKSGTLVPVRRRDIVKIEGIDATGGNNQNNTPDIPAHLWYFGAIGTC

SEQ ID NO: 9458 - protein, 274 aa, Talaromyces thermophilus
SPVRREVSQDLFDQFNLFAQYSAAAYCAKNNDAPAGGNVTCRGSICPEVEKADATFLYSFEDSGVGDVTGFLALDNTNRLIVLSFRGSRSLENWIGNINLDLKGIDDICSGCKGHDGFTSSWRSVANTLTQQVQNAVREHPDYRVVFTGHSLGGALATVAGASLRGNGYDIDVFSYGAPRVGNRAFAEFLTAQTGGTLYRITHTNDIVPRLPPRELGYSHSSPEYWITSGTLVPVTKNDIVKVEGIDSTDGNNQPNTPDIAAHLWYFGSMATCL

SEQ ID NO: 9459 - protein, 274 aa, Thermomyces lanuginosus
SPIRRDVSADLLNQFKLFAQYSAAAYCGRNNDAPAGTNITCSANACPLVEAADATFLYSFENSGVGDVTGFLAVDNTNKLIVLSFRGSRSIENWITNLNFDLVDINDICSGCRGHDGFTSSWRSVADTLRQAVDDAVAAHPDYKVVVTGHSLGGALATLAGADLRNNGYDVDLYTYGAPRVGNRAFAEFITVQTGGTLYRVTHTNDVVPRLPPRQFRYSHPSPEYWIKSGTLVPVRRRDIVKIEGIDATGGNNQNNTPDIPAHLWYFGLIGTCI

SEQ ID NO: 9460 - protein, 274 aa, Thermomyces lanuginosus
SPIRRDVSADLLNQFKLFAQYSAAAYCGRNNDAPAGTNITCSANACPLVEAADATFLYSFENSGVGDVTGFLAVQNTNKLIVLSFRGSRSIENWITNLNFDLVDINDICSGCRGHDGFTSSWRSVADTLRQAVDDAVAAHPDYKVVVTGHSLGGALATLAGADLRNNGYDVDLYTYGAPRVGNRAFAEFITVQTGGTLYRVTHTNDVVPRLPPRQFGYSHPSPEYWIKSGTLVPVRRRDIVKIEGIDATGGNNQNNTPDIPAHLWYFGLIGTCI

SEQ ID NO: 9461 - protein, 274 aa, Thermomyces lanuginosus
SPIRRDVSADLLNQFKLFAQYSAAAYCGRNNDAPAGTNITCSANACPLVEAADATFLYSFENSGVGDVTGFLAVDNTNKLIVLSFRGSRSIENWITNLQFDLVDINDICSGCRGHDGFTSSWRSVADTLRQAVDDAVAAHPDYKVVVTGHSLGGALATLAGADLRNNGYDVDLYTYGAPRVGNRAFAEFITVQTGGTLYRVTHTNDVVPRLPPRQFGYSHPSPEYWIKSGTLVPVRRRDIVKIEGIDATGGNNQNNTPDIPAHLWYFGLIGTCI

SEQ ID NO: 9462 - protein, 274 aa, Thermomyces lanuginosus
SPIRRDVSADLLNQFKLFAQYSAAAYCGRNNDAPAGTNITCSANACPLVEAADATFLYSFENSGVGDVTGFLAVDNTNKLIVLSFRGSRSIENWITNLNFSLVDINDICSGCRGHDGFTSSWRSVADTLRQAVDDAVAAHPDYKVVVTGHSLGGALATLAGADLRNNGYDVDLYTYGAPRVGNRAFAEFITVQTGGTLYRVTHTNDVVPRLPPRQFGYSHPSPEYWIKSGTLVPVRRRDIVKIEGIDATGGNNQNNTPDIPAHLWYFGLIGTCI

SEQ ID NO: 9463 - protein, 274 aa, Thermomyces lanuginosus
SPIRRDVSADLLNQFKLFAQYSAAAYCGRNNDAPAGTNITCSANACPLVEAADATFLYSFENSGVGDVTGFLAVDNTNKLIVLSFRGSRSFENWITNLNFDLVDINDICSGCRGHDGFTSSWRSVADTLRQAVDDAVAAHPDYKVVVTGHSLGGALATLAGADLRNNGYDVDLYTYGAPRVGNRAFAEFITVQTGGTLYRVTHTNDVVPRLPPRQFGYSHPSPEYWIKSGTLVPVRRRDIVKIEGIDATGGNNQNNTPDIPAHLWYFGLIGTCI

SEQ ID NO: 9464 - protein, 274 aa, Thermomyces lanuginosus
SPIRRDVSADLLNQFKLFAQYSAAAYCGRNNDAPAGTNITCSANACPLVEAADATFLYSFENSGVGDVTGFLAVDNTNKLIVLSFRGSRSIENWITNLNFDLVDINDICSGCRGHDGFTSSWRSVADTLRQAVDDAVAAHPDYKVVVTGHSLGGALATLAGADLRNNGYDVDLYTYGAPRVGNRAFAEFITVQTGGTLYRVTHTNDVVPRLPPRQYGYSHPSPEYWIKSGTLVPVRRRDIVKIEGIDATGGNNQNNTPDIPAHLWYFGLIGTCI

SEQ ID NO: 9465 - protein, 274 aa, Thermomyces lanuginosus
SPIRRDVSADLLNQFKLFAQYSAAAYCGRNNDAPAGTNITCSANACPLVEAADATFLYSFENSGVGDVTGFLAVDNTNKLIVLSFRGSRSIENWITNLNFDLVDINDICSGCRGHDGFTSSWRSVADTLRQAVDDAVAAHPDYKVVVTGHSLGGALATLAGADLRNNGYDVDLYTYGAPRVGNRAFAEFITVQTGGTLYRVTHTNDVVPRLPPRQSGYSHPSPEYWIKSGTLVPVRRRDIVKIEGIDATGGNNQNNTPDIPAHLWYFGLIGTCI

SEQ ID NO: 9466 - protein, 274 aa, Thermomyces lanuginosus
SPIRRYVSADLLNQFKLFAQYSAAAYCGRNNDAPAGTNITCSANACPLVEAADATFLYSFENSGVGDVTGFLAVDNTNKLIVLSFRGSRSIENWITNLNFDLVDINDICSGCRGHDGFTSSWRSVADTLRQAVDDAVAAHPDYKVVVTGHSLGGALATLAGADLRNNGYDVDLYTYGAPRVGNRAFAEFITVQTGGTLYRVTHTNDVVPRLPPRQFGYSHPSPEYWIKSGTLVPVRRRDIVKIEGIDATGGNNQNNAPDIPAHLWYFGAIGTCI

SEQ ID NO: 9467 - protein, 274 aa, Thermomyces lanuginosus
SPIRRDVSAQLLNQFKLFAQYSAAAYCGRNNDAPAGTNITCSANACPLVEAADATFLYSFENSGVGDVTGFLAVDNTNKLIVLSFRGSRSIENWITNLNFDLVDINDICSGCRGHDGFTSSWRSVADTLRQAVDDAVAAHPDYKVVVTGHSLGGALATLAGADLRNNGYDVDLYTYGAPRVGNRAFAEFITVQTGGTLYRVTHTNDVVPRLPPRQFGYSHPSPEYWIKSGTLVPVRRRDIVKIEGIDATGGNNQNNTPDIPAHLWYFGLIGTCI

SEQ ID NO: 9468 - protein, 274 aa, Thermomyces lanuginosus
SPIRRDVSADLLNQFKLFAQYSAAAYCGRNNDAPAGTNITCSANACPLVEAADATFLYSFENSGVGDVTGFLAVDNTNKLIVLSFRGSRSIENWITNLNFDLVDINDICSGCRGHDGFTSSWRSVADTLRQAVDDAVAAHPDYKVVVTGHSLGGALATLAGADLRNNGYDVDLYTYGAPRVGNRAFAEFITVQTGGTLYRVTHTNDVVPRLPPRQFGYSHPSPEYWIKSGTLVPVRRRDIVKIEGIDAEGGNNQNNTPDIPAHLWYFGLIGTCI

SEQ ID NO: 9469 - protein, 274 aa, Thermomyces lanuginosus
SPIRRDVSADLLNQFKLFAQYSAAAYCGRNNDAPAGTNITCSANACPLVEAADATFLYSFENSGVGDVTGFLAVDNTNKLIVLSFRGSRSIENWITNLNFDLVDINDICSGCRGHDGFTSSWRSVADTLRQAVDDAVAAHPDYKVVVTGHSLGGALATLAGADLRNNGYDVDLYTYGAPRVGNRAFAEFITVQTGGTLYRVTHTNDVVPRLPPRQFGYSHPSPEYWIKSGTLVPVRRQDIVKIEGIDATGGNNQNNTPDIPAHLWYFGLIGTCI

SEQ ID NO: 9470 - protein, 274 aa, Thermomyces lanuginosus
SPIRRDVSADLLNQFKLFAQYSAAAYCGRNNDAPAGTNITCSANACPLVEAADATFLYSFENSSVGDVTGFLAVDNTNKLIVLSFRGSRSIENWITNLNFDLVDINDICSGCRGHDGFTSSWRSVADTLRQAVDDAVAAHPDYKVVVTGHSLGGALATLAGADLRNNGYDVDLYTYGAPRVGNRAFAEFITVQTGGTLYRVTHTNDVVPRLPPRQFGYSHPSPEYWIKSGTLVPVRRRDIVKIEGIDATGGNNQNNTPDIPAHLWYFGLIGTCI

SEQ ID NO: 9471 - protein, 274 aa, Thermomyces lanuginosus
SPIRRDVSADLLNQFKLFAQYSAAAYCGRNNDAPAGTNITCSANACPLVEAADATFLYSFESSGVGDVTGFLAVDNTNKLIVLSFRGSRSIENWITNLNFDLVDINDICSGCRGHDGFTSSWRSVADTLRQAVDDAVAAHPDYKVVVTGHSLGGALATLAGADLRNNGYDVDLYTYGAPRVGNRAFAEFITVQTGGTLYRVTHTNDVVPRLPPRQFGYSHPSPEYWIKSGTLVPVRRRDIVKIEGIDATGGNNQNNAPDIPAHLWYFGAIGTCI

SEQ ID NO: 9472 - protein, 274 aa, Thermomyces lanuginosus
SPIRRDVSADLLNQFKLFAQYSAAAYCGRNNDAPAGTNITCSANACPLVEAADATFLYSFENSGVGDVTGFLAVDNTNKLIVLSFRGSRSIENWITNLNFDLVDINDICSGCRGHDGFTSSWRSVADTLRQAVDDAVAAHPDYKVVVTGHSLGGALATLAGADLRNNGYDVQLYTYGAPRVGNRAFAEFITVQTGGTLYRVTHTNDVVPRLPPRQFGYSHPSPEYWIKSGTLVPVRRRDIVKIEGIDATGGNNQNNTPDIPAHLWYFGLIGTCI

SEQ ID NO: 9473 - protein, 274 aa, Thermomyces lanuginosus
SPIRRHVSADLLNQFKLFAQYSAAAYCGRNNDAPAGTNITCSANACPLVEAADATFLYSFENSGVGDVTGFLAVDNTNKLIVLSFRGSRSIENWITNLNFDLVDINDICSGCRGHDGFTSSWRSVADTLRQAVDDAVAAHPDYKVVVTGHSLGGALATLAGADLRNNGYDVDLYTYGAPRVGNRAFAEFITVQTGGTLYRVTHTNDVVPRLPPRQFGYSHPSPEYWIKSGTLVPVRRRDIVKIEGIDATGGNNQNNAPDIPAHLWYFGAIGTCI

SEQ ID NO: 9474 - protein, 274 aa, Thermomyces lanuginosus
SPIRRDVSADLLNQFKLFAQYSAAAYCGRNNDAPAGTNITCSANACPLVEAADATFLYSFENSGVGDVTGFLAVDNTNKLIVLSFRGSRSIENWITNLNFDLVDINDICSGCRGHDGFTSSWRSVADTLRQAVDDAVAAHPDYKVVVTGHSLGGALATLAGADLRNNGYDVDLYTYGAPRVGNRAFAEFITVQTGGTLYRVTHTNDVVPRLPPRQFGYSHPSPEYWIKSGTLVPVRQRDIVKIEGIDATGGNNQNNTPDIPAHLWYFGLIGTCI

SEQ ID NO: 9475 - protein, 274 aa, Thermomyces lanuginosus
SPIRRDVSADLLNQFKLFAQYSAAAYCGRNNDAPAGTNITCSANACPLVEAADATFLYSFENSGVGDVTGFLAVDNTNKLIVLSFRGSRSIENWITNLNFDLVDINDICSGCRGHDGFTSSWRSVADTLRQAVDDAVAAHPDYKVVVTGHSLGGALATLAGADLRNNGYDVDLYTYGAPRVGNRAFAEFITVQTGGTLYRVTHTNDVVPRLPPRQFGYSHPSPEYWIKSGTLVPVRRRDIVKIEGIDATGGNNQNNTPDIPAHLWYFGIIGTCI

SEQ ID NO: 9476 - protein, 274 aa, Thermomyces lanuginosus
SPIRRDVSADLLNQFKLFAQYSAAAYCGRNNDAPAGTNITCSANACPLVEAADATFLYSFENSGVGDVTGFLAVDNTNKLIVLSFRGSRSIENWITNLNFDLVDINDICSGCRGHDGFTSSWRSVADTLRQAVDDAVAAHPDYKVVVTGHSLGGALATLAGADLRNNGYDVDLYTYGAPRVGNREFAEFITVQTGGTLYRVTHTNDVVPRLPPRQFGYSHPSPEYWIKSGTLVPVRRRDIVKIEGIDATGGNNQNNTPDIPAHLWYFGLIGTCI

SEQ ID NO: 9477 - protein, 274 aa, Thermomyces lanuginosus
SPIRRDVSADLLNQFKLFAQYSAAAYCGRNNDAPAGTNITCSANACPLVEAADATFLYSFENSGVGDVTGFLAVDNTSKLIVLSFRGSRSIENWITNLNFDLVDINDICSGCRGHDGFTSSWRSVADTLRQAVDDAVAAHPDYKVVVTGHSLGGALATLAGADLRNNGYDVDLYTYGAPRVGNRAFAEFITVQTGGTLYRVTHTNDVVPRLPPRQFGYSHPSPEYWIKSGTLVPVRRRDIVKIEGIDATGGNNQNNTPDIPAHLWYFGLIGTCI

SEQ ID NO: 9478 - protein, 274 aa, Thermomyces lanuginosus
SPIRRLVSADLLNQFKLFAQYSAAAYCGRNNDAPAGTNITCSANACPLVEAADATFLYSFENSGVGDVTGFLAVDNTNKLIVLSFRGSRSIENWITNLNFDLVDINDICSGCRGHDGFTSSWRSVADTLRQAVDDAVAAHPDYKVVVTGHSLGGALATLAGADLRNNGYDVDLYTYGAPRVGNRAFAEFITVQTGGTLYRVTHTNDVVPRLPPRQFGYSHPSPEYWIKSGTLVPVRRRDIVKIEGIDATGGNNQNNAPDIPAHLWYFGAIGTCI

SEQ ID NO: 9479 - protein, 274 aa, Thermomyces lanuginosus
SPIRRDVSADLLNQFKLFAQYSAAAYCGRNNDAPAGTNITCSANACPLVEAADATFLYSFENSGVGDVTGFLAVDNTNKLIVLSFRGSRSIENWITNLNFDLVDINDICSGCRGHDGFTSSWRSVADTLRQAVDDAVAAHPDYKVVVTGHSLGGALATLAGADLRNNGYDVDLYTYGAPRVGNRAFAEFITVQTGGTLYRVTHTNDVVPRLPPRQFGYSHPSPEYWIKSGTLVPVRRRDIVKIEGIDATGGNNQNNAPDIPAHLWYFGTIGTCI

SEQ ID NO: 9480 - protein, 274 aa, Thermomyces lanuginosus
SPIRRDVSADLLNQFKLFAQYSAAAYCGRNNDAPAGTNITCSSNACPLVEAADATFLYSFENSGVGDVTGFLAVDNTNKLIVLSFRGSRSIENWITNLNFDLVDINDICSGCRGHDGFTSSWRSVADTLRQAVDDAVAAHPDYKVVVTGHSLGGALATLAGADLRNNGYDVDLYTYGAPRVGNRAFAEFITVQTGGTLYRVTHTNDVVPRLPPRQFGYSHPSPEYWIKSGTLVPVRRRDIVKIEGIDATGGNNQNNAPDIPAHLWYFGAIGTCI

SEQ ID NO: 9481 - protein, 274 aa, Thermomyces lanuginosus
SPIRRDVSADLLNQFKLFAQYSAAAYCGRNNDAPAGTNITCSANACPLVEAADATFLYSFENSGVGDVTGFLAVDNTNKLIVLSFRGSRSIENWITNLNFDLVDINDICSGCRGHDGFTSSWRSVAQTLRQAVDDAVAAHPDYKVVVTGHSLGGALATLAGADLRNNGYDVDLYTYGAPRVGNRAFAEFITVQTGGTLYRVTHTNDVVPRLPPRQFGYSHPSPEYWIKSGTLVPVRRRDIVKIEGIDATGGNNQNNTPDIPAHLWYFGLIGTCI

SEQ ID NO: 9482 - protein, 274 aa, Thermomyces lanuginosus
SPIRRDVSADLLNQFKLFAQYSAAAYCGRNNDAPAGTNITCSANACPLVEAADATFLYSFENSGVGDVTGFLAVDNTNKLIVLSFRGSRSIENWITNLNFDLVDINDICSGCRGHDGFTSSWRSVADTLRQAVDDAVAAHPDYKVVVTGHSLGGALATLAGADLRNNGYDVDLYTYGAPRVGNRAFAEFITVQTGGTLYRVTHTNDVVPRLPPRQNGYSHPSPEYWIKSGTLVPVRRRDIVKIEGIDATGGNNQNNTPDIPAHLWYFGLIGTCI

SEQ ID NO: 9483 - protein, 274 aa, Thermomyces lanuginosus
SPIRRDVSADLLNQFKLFAQYSAAAYCGRNNDAPAGTNITCVANACPLVEAADATFLYSFENSGVGDVTGFLAVDNTNKLIVLSFRGSRSIENWITNLNFDLVDINDICSGCRGHDGFTSSWRSVADTLRQAVDDAVAAHPDYKVVVTGHSLGGALATLAGADLRNNGYDVDLYTYGAPRVGNRAFAEFITVQTGGTLYRVTHTNDVVPRLPPRQFGYSHPSPEYWIKSGTLVPVRRRDIVKIEGIDATGGNNQNNAPDIPAHLWYFGAIGTCI

SEQ ID NO: 9484 - protein, 274 aa, Thermomyces lanuginosus
SPIRRDVSADLLNQFKLFAQYSAAAYCGRNNDAPAGTNITCSANACPLVEAADATFLYSFENSGVGDVTGFLAVDNTNKLIVLSFRGSRSIENWITNLNFILVDINDICSGCRGHDGFTSSWRSVADTLRQAVDDAVAAHPDYKVVVTGHSLGGALATLAGADLRNNGYDVDLYTYGAPRVGNRAFAEFITVQTGGTLYRVTHTNDVVPRLPPRQFGYSHPSPEYWIKSGTLVPVRRRDIVKIEGIDATGGNNQNNTPDIPAHLWYFGLIGTCI

SEQ ID NO: 9485 - protein, 274 aa, Thermomyces lanuginosus
SPIRRDVSADLLNQFKLFAQYSAAAYCGRNNDAPAGTNITCSANACPLVEAADATFLYSFENSGVGDVTGFLAVDNTNKLIVLSFRGSRSIENWITNLNFDLVDIQDICSGCRGHDGFTSSWRSVADTLRQAVDDAVAAHPDYKVVVTGHSLGGALATLAGADLRNNGYDVDLYTYGAPRVGNRAFAEFITVQTGGTLYRVTHTNDVVPRLPPRQFGYSHPSPEYWIKSGTLVPVRRRDIVKIEGIDATGGNNQNNTPDIPAHLWYFGLIGTCI

SEQ ID NO: 9486 - protein, 274 aa, Thermomyces lanuginosus
SPIRRDVSADLLNQFKLFAQYSAAAYCGRNNDAPAGTNITCSANACPLVEAADATFLYSFENSGVGDVTGFLAVDNTNKLIVLSFRGSRSIENWITNLNFDLVDINDICSGCRGHDGFTSSWRSVADTLRQAVDDAVAAHPDYKVVVTGHSLGGALATLAGADLRNNGYQVDLYTYGAPRVGNRAFAEFITVQTGGTLYRVTHTNDVVPRLPPRQFGYSHPSPEYWIKSGTLVPVRRRDIVKIEGIDATGGNNQNNTPDIPAHLWYFGLIGTCI

SEQ ID NO: 9487 - protein, 274 aa, Thermomyces lanuginosus
SPIRRGVSADLLNQFKLFAQYSAAAYCGRNNDAPAGTNITCSANACPLVEAADATFLYSFENSGVGDVTGFLAVDNTNKLIVLSFRGSRSIENWITNLNFDLVDINDICSGCRGHDGFTSSWRSVADTLRQAVDDAVAAHPDYKVVVTGHSLGGALATLAGADLRNNGYDVDLYTYGAPRVGNRAFAEFITVQTGGTLYRVTHTNDVVPRLPPRQFGYSHPSPEYWIKSGTLVPVRRRDIVKIEGIDATGGNNQNNAPDIPAHLWYFGAIGTCI

SEQ ID NO: 9488 - protein, 274 aa, Thermomyces lanuginosus
SPIRRDVSADLLNQFKLFAQYSAAAYCGRNNDAPAGTNITCSANACPLVEAADATFLYSFENSGVGDVTGFLAVDNTNKLIVLSFRGSRSIENWITNLNFDLVDINDICSGCRGHDGFTSSWRSVADTLRQAVDDAVAAHPDYKVVVTGHSLGGALATLAGADLRNNGYDVDLYTYGAPRVGNRAFAEFITVQTGGTLYRVTHTNDVVPRLPPRQFDYSHPSPEYWIKSGTLVPVRRRDIVKIEGIDATGGNNQNNTPDIPAHLWYFGLIGTCI

SEQ ID NO: 9489 - protein, 274 aa, Thermomyces lanuginosus
SPIRRDVSADLLNQFKLFAQYSAAAYCGRNNDAPAGTNITCSANACPLVEAADATFLYSFENSGVGDVTGFLAVDNTNKLIVLSFRGSRSIENWITNLRFDLVDINDICSGCRGHDGFTSSWRSVADTLRQAVDDAVAAHPDYKVVVTGHSLGGALATLAGADLRNNGYDVDLYTYGAPRVGNRAFAEFITVQTGGTLYRVTHTNDVVPRLPPRQFGYSHPSPEYWIKSGTLVPVRRRDIVKIEGIDATGGNNQNNTPDIPAHLWYFGLIGTCI

SEQ ID NO: 9490 - protein, 274 aa, Thermomyces lanuginosus
SPIRRDVSADLLNQFKLFAQYSAAAYCGRNNQAPAGTNITCSANACPLVEAADATFLYSFENSGVGDVTGFLAVDNTNKLIVLSFRGSRSIENWITNLNFDLVDINDICSGCRGHDGFTSSWRSVADTLRQAVDDAVAAHPDYKVVVTGHSLGGALATLAGADLRNNGYDVDLYTYGAPRVGNRAFAEFITVQTGGTLYRVTHTNDVVPRLPPRQFGYSHPSPEYWIKSGTLVPVRRRDIVKIEGIDATGGNNQNNTPDIPAHLWYFGLIGTCI

SEQ ID NO: 9491 - protein, 274 aa, Thermomyces lanuginosus
SPIRRDVSADLLNQFKLFAQYSAAAYCGRNNDAPAGTNITCSANACPLVEAADATFLYSFENSGVGDVTGFLAVDNTNKLIVLSFRGSRSIENWITNLNFDLVDINDICSGCRGHDGFTSSWRSVADTLRQAVDDAVAAHPDYKVVVTGHSLGGALATLAGADLRNNGYDVDLYTYGAPRVGNRAFAEFITVQTGGTLYRVTHTNDVVPRLPPRQFGYSHPSPEYWIKSGTLVPVRRRDIVKIEGIDATGGNNQNNAPDIPAHLWYFGPIGTCI

SEQ ID NO: 9492 - protein, 274 aa, Thermomyces lanuginosus
SPIRRDVSADLLNQFKLFAQYSAAAYCGRNNDAPAGTNITCSANACPLVEAADATFLYSFENSGVGDVTGFLAVDNTNKLIVLSFRGSRSIENWITNLNFDLVDINDICSGCRGHDGFTSSWRSVADTLRQAVDDAVAAHPDYKVVVTGHSLGGALATLAGADLRNNGYDVDLYTYGAPRVGNRAFAEFITVQTGGTLYRVTHTNDVVPRLPPRQFGYSHPSPEYWIKSGTLPPVRRRDIVKIEGIDATGGNNQNNTPDIPAHLWYFGLIGTCI

SEQ ID NO: 9493 - protein, 274 aa, Thermomyces lanuginosus
SPIRRMVSADLLNQFKLFAQYSAAAYCGRNNDAPAGTNITCSANACPLVEAADATFLYSFENSGVGDVTGFLAVDNTNKLIVLSFRGSRSIENWITNLNFDLVDINDICSGCRGHDGFTSSWRSVADTLRQAVDDAVAAHPDYKVVVTGHSLGGALATLAGADLRNNGYDVDLYTYGAPRVGNRAFAEFITVQTGGTLYRVTHTNDVVPRLPPRQFGYSHPSPEYWIKSGTLVPVRRRDIVKIEGIDATGGNNQNNAPDIPAHLWYFGAIGTCI

SEQ ID NO: 9494 - protein, 274 aa, Thermomyces lanuginosus
SPIRRDVSADLLNQFKLFAQYSAAAYCGRNNDAPAGTNITCSANACPLVEAADATFLYSFENSGVGDVTGFLAKDNTNKLIVLSFRGSRSIENWITNLNFDLVDINDICSGCRGHDGFTSSWRSVADTLRQAVDDAVAAHPDYKVVVTGHSLGGALATLAGADLRNNGYDVDLYTYGAPRVGNRAFAEFITVQTGGTLYRVTHTNDVVPRLPPRQFGYSHPSPEYWIKSGTLVPVRRRDIVKIEGIDATGGNNQNNAPDIPAHLWYFGAIGTCI

SEQ ID NO: 9495 - protein, 274 aa, Thermomyces lanuginosus
SPIRRDVSADLLNQFKLFAQYSAAAYCGRNNDAPAGTNITCSANACPLVEAADATFLYSFENSGVGDVTGFLAVDNTNKLIVLSFRGSRSIEDWITNLNFDLVDINDICSGCRGHDGFTSSWRSVADTLRQAVDDAVAAHPDYKVVVTGHSLGGALATLAGADLRNNGYDVDLYTYGAPRVGNRAFAEFITVQTGGTLYRVTHTNDVVPRLPPRQFGYSHPSPEYWIKSGTLVPVRRRDIVKIEGIDATGGNNQNNTPDIPAHLWYFGLIGTCI

SEQ ID NO: 9496 - protein, 274 aa, Thermomyces lanuginosus
SPIRRWVSADLLNQFKLFAQYSAAAYCGRNNDAPAGTNITCSANACPLVEAADATFLYSFENSGVGDVTGFLAVDNTNKLIVLSFRGSRSIENWITNLNFDLVDINDICSGCRGHDGFTSSWRSVADTLRQAVDDAVAAHPDYKVVVTGHSLGGALATLAGADLRNNGYDVDLYTYGAPRVGNRAFAEFITVQTGGTLYRVTHTNDVVPRLPPRQFGYSHPSPEYWIKSGTLVPVRRRDIVKIEGIDATGGNNQNNAPDIPAHLWYFGAIGTCI

SEQ ID NO: 9497 - protein, 274 aa, Thermomyces lanuginosus
SPIRRDVSADLLNQFKLFAQYSAAAYCGRNNDAPAGTNITCSANACPLVEAADATFLYSFENSGVGDVTGFLAVDNTNKLIVLSFRGSRSIEQWITNLNFDLVDINDICSGCRGHDGFTSSWRSVADTLRQAVDDAVAAHPDYKVVVTGHSLGGALATLAGADLRNNGYDVDLYTYGAPRVGNRAFAEFITVQTGGTLYRVTHTNDVVPRLPPRQFGYSHPSPEYWIKSGTLVPVRRRDIVKIEGIDATGGNNQNNTPDIPAHLWYFGLIGTCI

SEQ ID NO: 9498 - protein, 274 aa, Thermomyces lanuginosus
SPIRRDVSADLLNQFKLFAQYSAAAYCGRNNDAPAGTNITCSANACPLVEAADATFLYSFENSGVGDVTGFLAVDNTNKLIVLSFRGSRSIENWITNLNFDLVDINDICSGCRGHDGFTSSWRSVADTLRQAVDDAVAAHPDYKVVVTGHSLGGALATLAGADLRNNGYDVDLYTYGAPRVGDRAFAEFITVQTGGTLYRVTHTNDVVPRLPPRQFGYSHPSPEYWIKSGTLVPVRRRDIVKIEGIDATGGNNQNNTPDIPAHLWYFGLIGTCI

SEQ ID NO: 9499 - protein, 274 aa, Thermomyces lanuginosus
SPIRRAVSADLLNQFKLFAQYSAAAYCGRNNDAPAGTNITCSANACPLVEAADATFLYSFENSGVGDVTGFLAVDNTNKLIVLSFRGSRSIENWITNLNFDLVDINDICSGCRGHDGFTSSWRSVADTLRQAVDDAVAAHPDYKVVVTGHSLGGALATLAGADLRNNGYDVDLYTYGAPRVGNRAFAEFITVQTGGTLYRVTHTNDVVPRLPPRQFGYSHPSPEYWIKSGTLVPVRRRDIVKIEGIDATGGNNQNNAPDIPAHLWYFGAIGTCI

SEQ ID NO: 9500 - protein, 274 aa, Thermomyces lanuginosus
SPIRRDVSADLLNQFKLFAQYSAAAYCGRNNDAPAGTNITCSANACPLVEAADATFLYSFNNSGVGDVTGFLAVDNTNKLIVLSFRGSRSIENWITNLNFDLVDINDICSGCRGHDGFTSSWRSVADTLRQAVDDAVAAHPDYKVVVTGHSLGGALATLAGADLRNNGYDVDLYTYGAPRVGNRAFAEFITVQTGGTLYRVTHTNDVVPRLPPRQFGYSHPSPEYWIKSGTLVPVRRRDIVKIEGIDATGGNNQNNTPDIPAHLWYFGLIGTCI

SEQ ID NO: 9501 - protein, 274 aa, Thermomyces lanuginosus
SPIRRDVSRDLLNQFKLFAQYSAAAYCGRNNDAPAGTNITCSANACPLVEAADATFLYSFENSGVGDVTGFLAVDNTNKLIVLSFRGSRSIENWITNLNFDLVDINDICSGCRGHDGFTSSWRSVADTLRQAVDDAVAAHPDYKVVVTGHSLGGALATLAGADLRNNGYDVDLYTYGAPRVGNRAFAEFITVQTGGTLYRVTHTNDVVPRLPPRQFGYSHPSPEYWIKSGTLVPVRRRDIVKIEGIDATGGNNQNNAPDIPAHLWYFGAIGTCI

SEQ ID NO: 9502 - protein, 274 aa, Thermomyces lanuginosus
SPIRRDVSADLLNQFKLFAQYSAAAYCGRNNDAPAGTNITCSANACPLVEAADATFLYSFENSGVGDVTGFLAVDNTNKLIVLSFRGSRSIENWITNLNFDLVDINDICSGCRGHDGFTSSWRSVADTLRQAVDDAVAAHPDYKVVVTGHSLGGALATLAGADLRNNGYDVDLYTYGAPRVGNRAFAEFITVQTGGTLYRVTHTNDVVPRLPPRQFGYSHPSPEYWIKSGTLVPVRRRDIVKIEGIDATGGNNQNNAPDIPAHLWYFGAIGTCI

SEQ ID NO: 9503 - protein, 274 aa, Thermomyces lanuginosus
SPIRRDVSADLLNQFKLFAQYSAAAYCGRNNDAPAGTNITCSANACPLVEAADATFLYSFENSGVGDVTGFLAVDNTNKLIVLSFRGSRSIENWITNLNFDLVDINDICSGCRGHDGFTSSWRSVADTLRQAVDDAVAAHPDYKVVVTGHSLGGALATLAGADLRNNGYDVDLYTYGAPRVGNRAFAEFITVQTGGTLYRVTHTNDVVPRLPPRQTGYSHPSPEYWIKSGTLVPVRRRDIVKIEGIDATGGNNQNNTPDIPAHLWYFGLIGTCI

SEQ ID NO: 9504 - protein, 274 aa, Thermomyces lanuginosus
SPIRRDVSADLLNQFKLFAQYSAAAYCGRNNDAPAGTNITCSANACPLVEAADATFLYSFENSGVGDVTGFLAVDNTNKLIVLSFRGSRSIENWITNLNFDLVDINDICRGCRGHDGFTSSWRSVADTLRQAVDDAVAAHPDYKVVVTGHSLGGALATLAGADLRNNGYDVDLYTYGAPRVGNRAFAEFITVQTGGTLYRVTHTNDVVPRLPPRQFGYSHPSPEYWIKSGTLVPVRRRDIVKIEGIDATGGNNQNNTPDIPAHLWYFGLIGTCI

SEQ ID NO: 9505 - protein, 274 aa, Thermomyces lanuginosus
SPIRRDVSADLLNQFKLFAQYSAAAYCGRNNDAPAGTNITCSANACPLVEAADATFLYSFENSGVGDVTGFLAEDNTNKLIVLSFRGSRSIENWITNLNFDLVDINDICSGCRGHDGFTSSWRSVADTLRQAVDDAVAAHPDYKVVVTGHSLGGALATLAGADLRNNGYDVDLYTYGAPRVGNRAFAEFITVQTGGTLYRVTHTNDVVPRLPPRQFGYSHPSPEYWIKSGTLVPVRRRDIVKIEGIDATGGNNQNNAPDIPAHLWYFGAIGTCI

SEQ ID NO: 9506 - protein, 274 aa, Thermomyces lanuginosus
SPIRRRVSADLLNQFKLFAQYSAAAYCGRNNDAPAGTNITCSANACPLVEAADATFLYSFENSGVGDVTGFLAVDNTNKLIVLSFRGSRSIENWITNLNFDLVDINDICSGCRGHDGFTSSWRSVADTLRQAVDDAVAAHPDYKVVVTGHSLGGALATLAGADLRNNGYDVDLYTYGAPRVGNRAFAEFITVQTGGTLYRVTHTNDVVPRLPPRQFGYSHPSPEYWIKSGTLVPVRRRDIVKIEGIDATGGNNQNNAPDIPAHLWYFGAIGTCI

SEQ ID NO: 9507 - protein, 274 aa, Thermomyces lanuginosus
SPIRRDVSADLLNQFKLFAQYSAAAYCGRNNDAPAGTNITCSANACPLVEAADATFLYSFENSGVGDVTGFLAVDNTNKLIVLSFRGSRSIENWITNLNFDLVDINDICSGCRGHDGFTSSWRSVADTLRQAVDDAVAAHPDYKVVVTGHSLGGALATLAGADLRNNGYDVDLYTYGAPRVGNRAFAEFITVQTGGTLYRVTHTNDVVPRLPPRQFGYSHPSPEYWIKSGTLVPVRRKDIVKIEGIDATGGNNQNNTPDIPAHLWYFGLIGTCI

SEQ ID NO: 9508 - protein, 274 aa, Thermomyces lanuginosus
SPIRRDVSADLLNQFKLFAQYSAAAYCGRNNDAPAGTNITCSADACPLVEAADATFLYSFENSGVGDVTGFLAVDNTNKLIVLSFRGSRSIENWITNLNFDLVDINDICSGCRGHDGFTSSWRSVADTLRQAVDDAVAAHPDYKVVVTGHSLGGALATLAGADLRNNGYDVDLYTYGAPRVGNRAFAEFITVQTGGTLYRVTHTNDVVPRLPPRQFGYSHPSPEYWIKSGTLVPVRRRDIVKIEGIDATGGNNQNNTPDIPAHLWYFGLIGTCI

SEQ ID NO: 9509 - protein, 274 aa, Thermomyces lanuginosus
SPIRRDVSADLLNQFKLFAQYSAAAYCGRNNDAPAGTNITCSANACPLVEAADATFLYSFENSGVGQVTGFLAVDNTNKLIVLSFRGSRSIENWITNLNFDLVDINDICSGCRGHDGFTSSWRSVADTLRQAVDDAVAAHPDYKVVVTGHSLGGALATLAGADLRNNGYDVDLYTYGAPRVGNRAFAEFITVQTGGTLYRVTHTNDVVPRLPPRQFGYSHPSPEYWIKSGTLVPVRRRDIVKIEGIDATGGNNQNNTPDIPAHLWYFGLIGTCI

SEQ ID NO: 9510 - protein, 274 aa, Thermomyces lanuginosus
SPIRRDVSADLLDQFKLFAQYSAAAYCGRNNDAPAGTNITCSANACPLVEAADATFLYSFENSGVGDVTGFLAVDNTNKLIVLSFRGSRSIENWITNLNFDLVDINDICSGCRGHDGFTSSWRSVADTLRQAVDDAVAAHPDYKVVVTGHSLGGALATLAGADLRNNGYDVDLYTYGAPRVGNRAFAEFITVQTGGTLYRVTHTNDVVPRLPPRQFGYSHPSPEYWIKSGTLVPVRRRDIVKIEGIDATGGNNQNNTPDIPAHLWYFGLIGTCI

SEQ ID NO: 9511 - protein, 274 aa, Thermomyces lanuginosus
SPIRRDVSADLLNQFKLFAQYSAAAYCGRNNDAPAGTNITCSANACPLVEAADATFLYSFENSGVGDVTGFLAVDNTNKLIVLSFRGSRSIENWITNLNFNLSDINDICSGCRGHDGFTSSWRSVADTLRQAVDDAVAAHPDYKVVVTGHSLGGALATLAGADLRNNGYDVDLYTYGAPRVGNRAFAEFITVQTGGTLYRVTHTNDVVPRLPPRQFGYSHPSPEYWIKSGTLVPVRRRDIVKIEGIDATGGNNQNNTPDIPAHLWYFGLIGTCI

SEQ ID NO: 9512 - protein, 274 aa, Thermomyces lanuginosus
SPIRRDVSADLLNQFKLFAQYSAAAYCGRNNDAPAGTNITCSANACPLVEAADATFLYSFENSGVGDVTGFLAVDNTNKLIVLSFRGSRSIENWITNLNFDLVDINDICSGCRGHDGFTSSWRSVADTLRQAVDDAVAAHPDYKVVVTGHSLGGALATLAGADLRNNGYDVDLYTYGAPRVGNRAFAEFITVQTGGTLYRVTHTQDVVPRLPPRQFGYSHPSPEYWIKSGTLVPVRRRDIVKIEGIDATGGNNQNNTPDIPAHLWYFGLIGTCI

SEQ ID NO: 9513 - protein, 274 aa, Thermomyces lanuginosus
SPIRRDVSADLLNQFKLFAQYSAAAYCGRNNDAPAGTNITCSANACPLVEAADATFLYSFENSGVGDVTGFLAVDNTNKLIVLSFRGSRSIENWITNLNFDLVDINDICSGCRGHDGFTSSWRSVADTLRQAVDDAVAAHPDYKVVVTGHSLGGALATLAGADLRNNGYDVDEYTYGAPRVGNRAFAEFITVQTGGTLYRVTHTNDVVPRLPPRQFGYSHPSPEYWIKSGTLVPVRRRDIVKIEGIDATGGNNQNNAPDIPAHLWYFGAIGTCI

SEQ ID NO: 9514 - protein, 274 aa, Thermomyces lanuginosus
SPIRRDVSADLLNQFKLFAQYSAAAYCGRNNDAPAGTNITCSANACPLVEAADATFLYSFENSGVGDVTGFLAVDNTNKLIVLSFRGSRSIENWRTNLNFDLVDINDICSGCRGHDGFTSSWRSVADTLRQAVDDAVAAHPDYKVVVTGHSLGGALATLAGADLRNNGYDVDLYTYGAPRVGNRAFAEFITVQTGGTLYRVTHTNDVVPRLPPRQFGYSHPSPEYWIKSGTLVPVRRRDIVKIEGIDATGGNNQNNTPDIPAHLWYFGLIGTCI

SEQ ID NO: 9515 - protein, 274 aa, Thermomyces lanuginosus
SPIRRFVSADLLNQFKLFAQYSAAAYCGRNNDAPAGTNITCSANACPLVEAADATFLYSFENSGVGDVTGFLAVDNTNKLIVLSFRGSRSIENWITNLNFDLVDINDICSGCRGHDGFTSSWRSVADTLRQAVDDAVAAHPDYKVVVTGHSLGGALATLAGADLRNNGYDVDLYTYGAPRVGNRAFAEFITVQTGGTLYRVTHTNDVVPRLPPRQFGYSHPSPEYWIKSGTLVPVRRRDIVKIEGIDATGGNNQNNAPDIPAHLWYFGAIGTCI

SEQ ID NO: 9516 - protein, 274 aa, Thermomyces lanuginosus
SPIRRDVSADLLNQFKLFAQYSAAAYCGRNNDAPAGTQITCSANACPLVEAADATFLYSFENSGVGDVTGFLAVDNTNKLIVLSFRGSRSIENWITNLNFDLVDINDICSGCRGHDGFTSSWRSVADTLRQAVDDAVAAHPDYKVVVTGHSLGGALATLAGADLRNNGYDVDLYTYGAPRVGNRAFAEFITVQTGGTLYRVTHTNDVVPRLPPRQFGYSHPSPEYWIKSGTLVPVRRRDIVKIEGIDATGGNNQNNTPDIPAHLWYFGLIGTCI

SEQ ID NO: 9517 - protein, 274 aa, Thermomyces lanuginosus
SPIRRDVSADLLNQFKLFAQYSAAAYCGRNNDAPAGTNITCSANACPLVEAAQATFLYSFENSGVGDVTGFLAVDNTNKLIVLSFRGSRSIENWITNLNFDLVDINDICSGCRGHDGFTSSWRSVADTLRQAVDDAVAAHPDYKVVVTGHSLGGALATLAGADLRNNGYDVDLYTYGAPRVGNRAFAEFITVQTGGTLYRVTHTNDVVPRLPPRQFGYSHPSPEYWIKSGTLVPVRRRDIVKIEGIDATGGNNQNNTPDIPAHLWYFGLIGTCI

SEQ ID NO: 9518 - protein, 274 aa, Thermomyces lanuginosus
SPIRRDVSADLLNQFKLFAQYSAAAYCGRNNDAPAGTNITCSANACPLVEAADATFLYSFENSGMGDVTGFLAVDNTNKLIVLSFRGSRSIENWITNLNFDLVDINDICSGCRGHDGFTSSWRSVADTLRQAVDDAVAAHPDYKVVVTGHSLGGALATLAGADLRNNGYDVDLYTYGAPRVGNRAFAEFITVQTGGTLYRVTHTNDVVPRLPPRQFGYSHPSPEYWIKSGTLVPVRRRDIVKIEGIDATGGNNQNNTPDIPAHLWYFGLIGTCI

SEQ ID NO: 9519 - protein, 274 aa, Thermomyces lanuginosus
SPIRRDVSADLLNQFKLFAQYSAAAYCGRNNDAPAGTNITCSANACPLVEAADATFLYSFENSGVGDVTGFLAVDNTNKLIVLSFRGSRSIENWITNLNFDLVDINDICSGCRGHDGFTSSWRSVADTLRQAVDDAVAAHPDYKVVVTGHSLGGALATLAGADLRNNGYDVDLYTYGAPRVGNRAFAEFITVQTGGTLYRVTHTNDVVPRLPPRQFGYSHPSPEYWIKSGTLVPVRRNDIVKIEGIDATGGNNQNNTPDIPAHLWYFGLIGTCI

SEQ ID NO: 9520 - protein, 274 aa, Thermomyces lanuginosus
SPIRRDVSADLLNQFKLFAQYSAAAYCGRNNDAPAGTNITCSANACPLVEAADATFLYSFENSGVGDVTGFLAVDQTNKLIVLSFRGSRSIENWITNLNFDLVDINDICSGCRGHDGFTSSWRSVADTLRQAVDDAVAAHPDYKVVVTGHSLGGALATLAGADLRNNGYDVDLYTYGAPRVGNRAFAEFITVQTGGTLYRVTHTNDVVPRLPPRQFGYSHPSPEYWIKSGTLVPVRRRDIVKIEGIDATGGNNQNNTPDIPAHLWYFGLIGTCI

SEQ ID NO: 9521 - protein, 274 aa, Thermomyces lanuginosus
SPIRRDVSADLLNQFKLFAQYSAAAYCGRNNDAPAGTNITCSANACPLVEAADATFLYSFENSGVGDVTGFLAVDNTNKLIVLSFRGSRSIENWITNLNFDLVDINDICSGCRGHDGFTSSWRSVADTLRQAVDDAVAAHPDYKVVVTGHSLGGALATLAGADLRNDGYDVDLYTYGAPRVGNRAFAEFITVQTGGTLYRVTHTNDVVPRLPPRQFGYSHPSPEYWIKSGTLVPVRRRDIVKIEGIDATGGNNQNNTPDIPAHLWYFGLIGTCI

SEQ ID NO: 9522 - protein, 274 aa, Thermomyces lanuginosus
SPIRRDVSADLLNQFKLFAQYSAAAYCGRNNDAPAGTNITCSANACPLVEAADATFLYSFENSGVGDVTGFLAVDNTNKLIVLSFRGSRSIENWITNLNFDLVDIRDICSGCRGHDGFTSSWRSVADTLRQAVDDAVAAHPDYKVVVTGHSLGGALATLAGADLRNNGYDVDLYTYGAPRVGNRAFAEFITVQTGGTLYRVTHTNDVVPRLPPRQFGYSHPSPEYWIKSGTLVPVRRRDIVKIEGIDATGGNNQNNTPDIPAHLWYFGLIGTCI

SEQ ID NO: 9523 - protein, 274 aa, Thermomyces lanuginosus
SPIRRDVSADLLNQFKLFAQYSAAAYCGRNNDAPNGTNITCSANACPLVEAADATFLYSFENSGVGDVTGFLAVDNTNKLIVLSFRGSRSIENWITNLNFDLVDINDICSGCRGHDGFTSSWRSVADTLRQAVDDAVAAHPDYKVVVTGHSLGGALATLAGADLRNNGYDVDLYTYGAPRVGNRAFAEFITVQTGGTLYRVTHTNDVVPRLPPRQFGYSHPSPEYWIKSGTLVPVRRRDIVKIEGIDATGGNNQNNTPDIPAHLWYFGLIGTCI

SEQ ID NO: 9524 - protein, 274 aa, Thermomyces lanuginosus
SPIRRDVSADLLNQFKLFAQYSAAAYCGRNNDAPAGTNITCSANACPLVEAADATFLYSFENSGVGDVTGFLAVDNTNKLIVLSFRGSRSIENWITNLNFDLVDINDICSGCRGHDGFTSSWRSVADTLRQAVDDAVAAHPDYKVVVTGHSLGGALATLAGADLRNNGYDVDLYTYGQPRVGNRAFAEFITVQTGGTLYRVTHTNDVVPRLPPRQFGYSHPSPEYWIKSGTLVPVRRRDIVKIEGIDATGGNNQNNTPDIPAHLWYFGLIGTCI

SEQ ID NO: 9525 - protein, 274 aa, Thermomyces lanuginosus
SPIRRDVSADLLNQFKLFAQYSAAAYCGRNNDAPAGTNITCSANACPLVEAADATFLYSFENSGVGDVTGFLAVDNTNKLIVLSFRGSRSPENWITNLNFDLVDINDICSGCRGHDGFTSSWRSVADTLRQAVDDAVAAHPDYKVVVTGHSLGGALATLAGADLRNNGYDVDLYTYGAPRVGNRAFAEFITVQTGGTLYRVTHTNDVVPRLPPRQFGYSHPSPEYWIKSGTLVPVRRRDIVKIEGIDATGGNNQNNTPDIPAHLWYFGLIGTCI

SEQ ID NO: 9526 - protein, 274 aa, Thermomyces lanuginosus
SPIRRDVSADLLNQFKLFAQYSAAAYCGRNNDAPAGTNITCSANACPLVEAADATFLYSFENSGVGDVTGFLAVDNTNKLIVLSFRGSRSIENWITNLNFDLVDINDICSGCRGHQGFTSSWRSVADTLRQAVDDAVAAHPDYKVVVTGHSLGGALATLAGADLRNNGYDVDLYTYGAPRVGNRAFAEFITVQTGGTLYRVTHTNDVVPRLPPRQFGYSHPSPEYWIKSGTLVPVRRRDIVKIEGIDATGGNNQNNTPDIPAHLWYFGLIGTCI

SEQ ID NO: 9527 - protein, 274 aa, Thermomyces lanuginosus
SPIRRDVSADLLNQFKLFAQYSAAAYCGRNNDAPAGTNITCSANACPLVEAADATFLYSFENSGVGDVTGFLAVDNTNKLIVLSFRGSRSIENWITNLNFDLVDINDICSGCRGHDGFTSSWRSVADTLRQAVDDAVAAHPDYKVVVTGHSLGGALATLAGADLRNNGYDVDLYTYGAPRVGNRAFAEFITVQTGGTLYRVTHTNDVVPRLPPRQFGYSHPSPEYWIKSGTLVPVRRRDIVKIEGIDATGGNNQNNTPDAPAHLWYFGLIGTCI

SEQ ID NO: 9528 - protein, 274 aa, Thermomyces lanuginosus
SPIRRDVSADLFNQFKLFAQYSAAAYCGRNNDAPAGTNITCSANACPLVEAADATFLYSFENSGVGDVTGFLAVDNTNKLIVLSFRGSRSIENWITNLNFDLVDINDICSGCRGHDGFTSSWRSVADTLRQAVDDAVAAHPDYKVVVTGHSLGGALATLAGADLRNNGYDVDLYTYGAPRVGNRAFAEFITVQTGGTLYRVTHTNDVVPRLPPRQFGYSHPSPEYWIKSGTGVPVRRRDIVKIEGIDATGGNNQNNAPDIPAHLWYFGAIGTCI

SEQ ID NO: 9529 - protein, 274 aa, Thermomyces lanuginosus
SPIRRDVSADLLNQFKLFAQYSAAAYCGRNNDAPAGTNITCSANACPLVEAADATFLYSFENSGSGDVTGFLAVDNTNKLIVLSFRGSRSIENWITNLNFDLVDINDICSGCRGHDGFTSSWRSVADTLRQAVDDAVAAHPDYKVVVTGHSLGGALATLAGADLRNNGYDVDLYTYGAPRVGNRAFAEFITVQTGGTLYRVTHTNDVVPRLPPRQFGYSHPSPEYWIKSGTLVPVRRRDIVKIEGIDATGGNNQNNTPDIPAHLWYFGLIGTCI

SEQ ID NO: 9530 - protein, 274 aa, Thermomyces lanuginosus
SPIRRDVSADLLNQFKLFAQYSAAAYCGRNNDAPAGTNITCSANACPLVEAADATFLYSFENSGVGDVTGFLAVDNTNKLIVLSFRGSRSIENWITNLNFDLVDINDICSGCRGHDGFTSSWRSVADTLRQAVDDAVAAHPDYKVVVTGHSLGGALATLAGADLRNNGSDVDLYTYGAPRVGNRAFAEFITVQTGGTLYRVTHTNDVVPRLPPRQFGYSHPSPEYWIKSGTLVPVRRRDIVKIEGIDATGGNNQNNTPDIPAHLWYFGLIGTCI

SEQ ID NO: 9531 - protein, 274 aa, Thermomyces lanuginosus
SPIRRDVSADLLNQFKLFAQYSAAAYCGRNNDAPAGTNITCSANACPGVEAADATFLYSFENSGVGDVTGFLAVDNTNKLIVLSFRGSRSIENWITNLNFDLVDINDICSGCRGHDGFTSSWRSVADTLRQAVDDAVAAHPDYKVVVTGHSLGGALATLAGADLRNNGYDVDLYTYGAPRVGNRAFAEFITVQTGGTLYRVTHTNDVVPRLPPRQFGYSHPSPEYWIKSGTLVPVRRRDIVKIEGIDATGGNNQNNAPDIPAHLWYFGAIGTCI

SEQ ID NO: 9532 - protein, 274 aa, Thermomyces lanuginosus
SPIRRDVSEDLLNQFKLFAQYSAAAYCGRNNDAPAGTNITCSANACPLVEAADATFLYSFENSGVGDVTGFLAVDNTNKLIVLSFRGSRSIENWITNLNFDLVDINDICSGCRGHDGFTSSWRSVADTLRQAVDDAVAAHPDYKVVVTGHSLGGALATLAGADLRNNGYDVDLYTYGAPRVGNRAFAEFITVQTGGTLYRVTHTNDVVPRLPPRQVGYSHPSPEYWIKSGTLVPVRRRDIVKIEGIDATGGNNQNNTPDIPAHLWYFGLIGTCI

SEQ ID NO: 9533 - protein, 274 aa, Thermomyces lanuginosus
SPIRRDVSADLLNQFKLFAQYSAAAYCGRNNDAPAGTNITCSANACPLVEAADATFLYSFENSGVGDVTGFLAVDNTNKLIVLSFRGSRSIENWITNLNFHLVDINDICSGCRGHDGFTSSWRSVADTLRQAVDDAVAAHPDYKVVVTGHSLGGALATLAGADLRNNGYDVDLYTYGAPRVGNRAFAEFITVQTGGTLYRVTHTNDVVPRLPPRQFGYSHPSPEYWIKSGTLVPVRRRDIVKIEGIDATGGNNQNNTPDIPAHLWYFGLIGTCI

SEQ ID NO: 9534 - protein, 274 aa, Thermomyces lanuginosus
SPIRRDVSADLLNQFKLFAQYSAAAYCGRNNDAPAGTNITCSANACPLVEAADATFLYSFENSGVGDVTGFLAVDNTNKLIVLSFRGSRSIENWITNLSFDLVDINDICSGCRGHDGFTSSWRSVADTLRQAVDDAVAAHPDYKVVVTGHSLGGALATLAGADLRNNGYDVDLYTYGAPRVGNRAFAEFITVQTGGTLYRVTHTNDVVPRLPPRQFGYSHPSPEYWIKSGTLVPVRRRDIVKIEGIDATGGNNQNNTPDIPAHLWYFGLIGTCI

SEQ ID NO: 9535 - protein, 274 aa, Thermomyces lanuginosus
SPIRRDVSADLLNQFKLFAQYSAAAYCGRNNDAPAGTNITCSANACPLVEAADATFLYSFENSGVGDVTGFLAVDNTNKLIVLSFRGSRSIENWITNLNFDLVDINDICSGCRGHDGFTSSWRSVADTLRQAVDDAVAAHPDYKVVVTGHSLGGALATLAGAQLRNNGYDVDLYTYGAPRVGNRAFAEFITVQTGGTLYRVTHTNDVVPRLPPRQFGYSHPSPEYWIKSGTLVPVRRRDIVKIEGIDATGGNNQNNTPDIPAHLWYFGLIGTCI

SEQ ID NO: 9536 - protein, 274 aa, Thermomyces lanuginosus
SPIRRDVSADLLNQFKLFAQYSAAAYCGRNNDAPAGTNITCSANACPLVEGADATFLYSFENSGVGDVTGFLAVDNTNKLIVLSFRGSRSIENWITNLNFDLVDINDICSGCRGHDGFTSSWRSVADTLRQAVDDAVAAHPDYKVVVTGHSLGGALATLAGADLRNNGYDVDLYTYGAPRVGNRAFAEFITVQTGGTLYRVTHTNDVVPRLPPRQFGYSHPSPEYWIKSGTLVPVRRRDIVKIEGIDATGGNNQNNAPDIPAHLWYFGAIGTCI

SEQ ID NO: 9537 - protein, 274 aa, Thermomyces lanuginosus
SPIRRDVSADLLEQFKLFAQYSAAAYCGRNNDAPAGTNITCSANACPLVEAADATFLYSFENSGVGDVTGFLAVDNTNKLIVLSFRGSRSIENWITNLNFDLVDINDICSGCRGHDGFTSSWRSVADTLRQAVDDAVAAHPDYKVVVTGHSLGGALATLAGADLRNNGYDVDLYTYGAPRVGNRAFAEFITVQTGGTLYRVTHTNDVVPRLPPRQFGYSHPSPEYWIKSGTLVPVRRRDIVKIEGIDATGGNNQNNTPDIPAHLWYFGLIGTCI

SEQ ID NO: 9538 - protein, 274 aa, Thermomyces lanuginosus
SPIRRDVSADLLNQFKLFAQYSAAAYCGRNNDAPAGTNITCSANACPLVEAADATFLYSFENSGVGDVTGFLAVDNTNKLIVLSFRGSRSIENWITNLNFQLVDINDICSGCRGHDGFTSSWRSVADTLRQAVDDAVAAHPDYKVVVTGHSLGGALATLAGADLRNNGYDVDLYTYGAPRVGNRAFAEFITVQTGGTLYRVTHTNDVVPRLPPRQFGYSHPSPEYWIKSGTLVPVRRRDIVKIEGIDATGGNNQNNTPDIPAHLWYFGLIGTCI

SEQ ID NO: 9539 - protein, 274 aa, Thermomyces lanuginosus
SPIRRDVSADLLNQFKLFAQYSAAAYCGRNNDAPAGTNITCSANACPLVEAADATILYSFENSGVGDVTGFLAVDNTNKLIVLSFRGSRSIENWITNLNFDLVDINDICSGCRGHDGFTSSWRSVADTLRQAVDDAVAAHPDYKVVVTGHSLGGALATLAGADLRNNGYDVDLYTYGAPRVGNRAFAEFITVQTGGTLYRVTHTNDVVPRLPPRQFGYSHPSPEYWIKSGTLVPVRRRDIVKIEGIDATGGNNQNNTPDIPAHLWYFGLIGTCI

SEQ ID NO: 9540 - protein, 274 aa, Thermomyces lanuginosus
SPIRRDVSADLLNQFKLFAQYSAAAYCGRNNDAPAGTNITCSANACPLVEAADATFLYSFENSGVGDVTGFLAVDNTNKLIVLSFRGSRSIENWITNLNFDLVDINDICSGCRGHDGFTSSWRSVADTLRQAVDDAVAAHPDYKVVVTGHSLGGALATLAGADLRNNGYDVDLYTYGAPRVGNRAFAEFITVQTGGTLYRVTHTNDVVPRLPPRQFGYSHPSPEYWIKSGTLVPVRRRDIVKIEGIDATGGNNQNNAPDIPAHLWYFGSIGTCI

SEQ ID NO: 9541 - protein, 274 aa, Thermomyces lanuginosus
SPIRRDVSADLLNQFKLFAQYSAAAYCGRNNDAPAGTNINCSANACPLVEAADATFLYSFENSGVGDVTGFLAVDNTNKLIVLSFRGSRSIENWITNLNFDLVDINDICSGCRGHDGFTSSWRSVADTLRQAVDDAVAAHPDYKVVVTGHSLGGALATLAGADLRNNGYDVDLYTYGAPRVGNRAFAEFITVQTGGTLYRVTHTNDVVPRLPPRQFGYSHPSPEYWIKSGTLVPVRRRDIVKIEGIDATGGNNQNNTPDIPAHLWYFGLIGTCI

SEQ ID NO: 9542 - protein, 274 aa, Thermomyces lanuginosus
SPIRRDVSADLLNQFKLFAQYSAAAYCGRNNDAPAGTNITCEANACPLVEAADATFLYSFENSGVGDVTGFLAVDNTNKLIVLSFRGSRSIENWITNLNFDLVDINDICSGCRGHDGFTSSWRSVADTLRQAVDDAVAAHPDYKVVVTGHSLGGALATLAGADLRNNGYDVDLYTYGAPRVGNRAFAEFITVQTGGTLYRVTHTNDVVPRLPPRQFGYSHPSPEYWIKSGTLVPVRRRDIVKIEGIDATGGNNQNNAPDIPAHLWYFGAIGTCI

SEQ ID NO: 9543 - protein, 274 aa, Thermomyces lanuginosus
SPIRRDVSADLLNQFKLFAQYSAAAYCGRNNDAPAGTNITCSANACPLVEAADATFLYSFENSGVGDVTGFLAVDNTNKLIVLSFRGSRSIENWITNLNFDLVDINDICSGCRGHDGFTSSWRSVADTLRQAVDDAVAAHPDYKVVVTGHSLGGALATLAGADLRNNGYDVDLYTYGAPRVGNRAFAEFITVQTGGTLYRVTHTNDVVPRLPPRQFGYSHPSPEYWIKSGTLVPVRRRDIVKIEGIDATGGNNQNNTPSIPAHLWYFGLIGTCI

SEQ ID NO: 9544 - protein, 274 aa, Thermomyces lanuginosus
SPIRRDVSADLLNQFKLFAQYSAAAYCGRNNDAPAGTNITCSANACPLVEAADATFLYSFENSGVGDVTGFLAVDNTNKLIVLSFRGSRSIENWITNLNFDLVDINDICSGCRGHDGFTSSWRSVADTLRQAVDDAVAAHPDYKVVVTGHSLGGALATLAGADLRNNGYDVDLYTYGAPRVGNRAFAEFITVQTGGTLYRVTHTNDVVPRLPPRQAGYSHPSPEYWIKSGTLVPVRRRDIVKIEGIDATGGNNQNNTPDIPAHLWYFGLIGTCI

SEQ ID NO: 9545 - protein, 274 aa, Thermomyces lanuginosus
SPIRRDVSADLLNQFKLFAQYSAAAYCGRNNDAPAGTNITCSANACPLVEAADATFLYSFENSGVGDVTGFLAVDNTNKLIVLSFRGTRSIENWITNLNFDLVDINDICSGCRGHDGFTSSWRSVADTLRQAVDDAVAAHPDYKVVVTGHSLGGALATLAGADLRNNGYDVDLYTYGAPRVGNRAFAEFITVQTGGTLYRVTHTNDVVPRLPPRQFGYSHPSPEYWIKSGTLVPVRRRDIVKIEGIDATGGNNQNNTPDIPAHLWYFGLIGTCI

SEQ ID NO: 9546 - protein, 274 aa, Thermomyces lanuginosus
SPIRRDVSADLLNQFKLFAQYSAAAYCGRNNDAPAGTNITCSANACPLVEAADATFNYSFENSGVGDVTGFLAVDNTNKLIVLSFRGSRSIENWITNLNFDLVDINDICSGCRGHDGFTSSWRSVADTLRQAVDDAVAAHPDYKVVVTGHSLGGALATLAGADLRNNGYDVDLYTYGAPRVGNRAFAEFITVQTGGTLYRVTHTNDVVPRLPPRQFGYSHPSPEYWIKSGTLVPVRRRDIVKIEGIDATGGNNQNNTPDIPAHLWYFGLIGTCI

SEQ ID NO: 9547 - protein, 274 aa, Thermomyces lanuginosus
SPIRRDVSLDLLNQFKLFAQYSAAAYCGRNNDAPAGTNITCSANACPLVEAADATFLYSFENSGVGDVTGFLAVDNTNKLIVLSFRGSRSIENWITNLNFDLVDINDICSGCRGHDGFTSSWRSVADTLRQAVDDAVAAHPDYKVVVTGHSLGGALATLAGADLRNNGYDVDLYTYGAPRVGNRAFAEFITVQTGGTLYRVTHTNDVVPRLPPRQFGYSHPSPEYWIKSGTLVPVRRRDIVKIEGIDATGGNNQNNAPDIPAHLWYFGAIGTCI

SEQ ID NO: 9548 - protein, 274 aa, Thermomyces lanuginosus
SPIRRDVSADLLNQFKLFAQYSAAAYCGRNNDAPAGTNITCSANACPLVEAADATFLYSFENSGVGDVTGFLAVDNTNKLIVLSFRGSRSIENWITNLNFDLVDINDICSGCRGHDGFTSSWRSVADTLRQAVDDAVAAHPDYKVVVTGHSLGGALATLAGADLRNNGYDVDLYTYGAPRVGNRAFAEFITVQTGGTLYRVTHTNDVVPRLPPRQFGYSHPSPEYWIKSGTLVPVRRRDIVKIEGIDATGGNNQNNAPDIPAHLWYFGQIGTCI

SEQ ID NO: 9549 - protein, 274 aa, Thermomyces lanuginosus
SPIRRDVSADLLNQFKLFAQYSAAAYCGRNNDAPAGTNITCSANACPLVEAADATFLYSFENSGVGDVTGFLAVDNTNKLIVLSFRGSRSIENWITNLNFDLVDINDICSGCRGHDGFTSSWRSVADTLRQAVDDAVAAHPDYKVVVTGHSLGGALATLAGADLRNEGYDVDLYTYGAPRVGNRAFAEFITVQTGGTLYRVTHTNDVVPRLPPRQFGYSHPSPEYWIKSGTLVPVRRRDIVKIEGIDATGGNNQNNTPDIPAHLWYFGLIGTCI

SEQ ID NO: 9550 - protein, 274 aa, Thermomyces lanuginosus
SPIRRDVSADLLNQFKLFAQYSAAAYCGRNNDAPAGTNITCSANACPLVEAADATFLYSFENSGVGDVTGFLAVDNTNKLIVLSFRGSRSIENWITNLNFDLVDINDICSGCRGHDGFTSSWRSVADTLRQAVDDAVAAHPDYKVVVTGHSLGGALATLAGADLRNNGYDVDLYTYGAPRVGNRAFAEFITVQTGGTLYRVTHTNDVVPRLPPRQFGYSHPSPEYWIKSGTLVPVRERDIVKIEGIDATGGNNQNNTPDIPAHLWYFGLIGTCI

SEQ ID NO: 9551 - protein, 274 aa, Thermomyces lanuginosus
SPIRRDVSADLLQQFKLFAQYSAAAYCGRNNDAPAGTNITCSANACPLVEAADATFLYSFENSGVGDVTGFLAVDNTNKLIVLSFRGSRSIENWITNLNFDLVDINDICSGCRGHDGFTSSWRSVADTLRQAVDDAVAAHPDYKVVVTGHSLGGALATLAGADLRNNGYDVDLYTYGAPRVGNRAFAEFITVQTGGTLYRVTHTNDVVPRLPPRQFGYSHPSPEYWIKSGTLVPVRRRDIVKIEGIDATGGNNQNNTPDIPAHLWYFGLIGTCI

SEQ ID NO: 9552 - protein, 274 aa, Thermomyces lanuginosus
SPIRRDVSRDLLNQFKLFAQYSAAAYCGRNNDAPAGTNITCSANACPLVEAADATFLYSFENSGVGDVTGFLAVDNTNKLIVLSFRGSRSIENWITNLNFDLVDINDICSGCRGHDGFTSSWRSVADTLRQAVDDAVAAHPDYKVVVTGHSLGGALATLAGADLRNNGYDVDLYTYGAPRVGNRAFAEFITVQTGGTLYRVTHTNDVVPRLPPRQFGYSHPSPEYWIKSGTLVPVRRNDIVKIEGIDATGGNNQNNAPDIPAHLWYFGLIGTCI

SEQ ID NO: 9553 - protein, 274 aa, Thermomyces lanuginosus
SPIRRDVSADLLNQFKLFAQYSAAAYCGRNNDAPAGTNITCSANACPLVEAADATFLYSFENSGVGDVTGFLAVDNTNKLIVLSFRGSRSIENWITNLNFDLVDINDICSGCRGHDGFTSSWRSVADTLRQAVDDAVAAHPDYKVVVTGHSLGGALATLAGADLRNNGYDVDLYTYGAPRVGNRAFAEFITVQTGGTLYRVTHTNDVVPRLPPQQFGYSHPSPEYWIKSGTLVPVRRRDIVKIEGIDATGGNNQNNTPDIPAHLWYFGLIGTCI

SEQ ID NO: 9554 - protein, 274 aa, Thermomyces lanuginosus
SPIRRDVSADLLNQFKLFAQYSAAAYCGRNNDAPAGTNITCSANACPLVERADATFLYSFENSGVGDVTGFLAVDNTNKLIVLSFRGSRSIENWITNLNFDLVDINDICSGCRGHDGFTSSWRSVADTLRQAVDDAVAAHPDYKVVVTGHSLGGALATLAGADLRNNGYDVDLYTYGAPRVGNRAFAEFITVQTGGTLYRVTHTNDVVPRLPPRQFGYSHPSPEYWIKSGTLVPVRRRDIVKIEGIDATGGNNQNNAPDIPAHLWYFGAIGTCI

SEQ ID NO: 9555 - protein, 274 aa, Thermomyces lanuginosus
SPIRRDVSADLLNQFKLFAQYSAAAYCGRNNDAPAGTNITCSANACPLVEAADATFLYSFENSGVGDVTGFLAVDNTNKLIVLSFRGSRSIENWITNLNFDLVDINDICSGCRGHDGFTSSWRSVADTLRQAVDDAVAAHPDYKVVVTGHSLGGALATLAGADLRNNGYDVDLYTYGAPRVGNRAFAEFITVQTGGTLYRVTHTNDVVPRLPPRQFGYSHPSPEYWIKSGTGVPVRRRDIVKIEGIDATGGNNQNNTPDIPAHLWYFGLIGTCI

SEQ ID NO: 9556 - protein, 274 aa, Thermomyces lanuginosus
SPIRRDVSADLLNQFKLFAQYSAAAYCGRNNDAPAGTNITCSAQACPLVEAADATFLYSFENSGVGDVTGFLAVDNTNKLIVLSFRGSRSIENWITNLNFDLVDINDICSGCRGHDGFTSSWRSVADTLRQAVDDAVAAHPDYKVVVTGHSLGGALATLAGADLRNNGYDVDLYTYGAPRVGNRAFAEFITVQTGGTLYRVTHTNDVVPRLPPRQFGYSHPSPEYWIKSGTLVPVRRRDIVKIEGIDATGGNNQNNTPDIPAHLWYFGLIGTCI

SEQ ID NO: 9557 - protein, 274 aa, Thermomyces lanuginosus
SPIRRDVSADLLNQFKLFAQYSAAAYCGRNNDAPAGTNITCSANACPLVEFADATFLYSFENSGVGDVTGFLAVDNTNKLIVLSFRGSRSIENWITNLNFDLVDINDICSGCRGHDGFTSSWRSVADTLRQAVDDAVAAHPDYKVVVTGHSLGGALATLAGADLRNNGYDVDLYTYGAPRVGNRAFAEFITVQTGGTLYRVTHTNDVVPRLPPRQFGYSHPSPEYWIKSGTLVPVRRRDIVKIEGIDATGGNNQNNAPDIPAHLWYFGAIGTCI

SEQ ID NO: 9558 - protein, 274 aa, Thermomyces lanuginosus
SPIRRDVSADLLNQFKLFAQYSAAAYCGRNNDAPAGTNITCSANACPLVEAADATFLYSFENSGVGDVTGFLAVDNTNKLIVLSFRGSRSIENWITNLNFDLVDINDICSGCRGHDGFTSSWRSVADTLRQAVDDAVAAHPDYKVVVTGHSLGGALATLAGADLRNNGYDVDLYTYGAPRVGNRAFAEFITVQTGGTLYRVTHTNDVVPRLPPRQFGYSHPSPEYWIKSGTLVPVRRRDIVKIEGIDATGGNNQNNAPDIPAHLWYFGIIGTCI

SEQ ID NO: 9559 - protein, 274 aa, Thermomyces lanuginosus
SPIRRDVSADLLNQFLLFAQYSAAAYCGRNNDAPAGTNITCSANACPLVEAADATFLYSFENSGVGDVTGFLAVDNTNKLIVLSFRGSRSIENWITNLNFDLVDINDICSGCRGHDGFTSSWRSVADTLRQAVDDAVAAHPDYKVVVTGHSLGGALATLAGADLRNNGYDVDLYTYGAPRVGNRAFAEFITVQTGGTLYRVTHTNDVVPRLPPRQFGYSHPSPEYWIKSGTLVPVRRRDIVKIEGIDATGGNNQNNAPDIPAHLWYFGAIGTCI

SEQ ID NO: 9560 - protein, 274 aa, Thermomyces lanuginosus
SPIRRDVSADLLNQFKLFAQYSAAAYCGRNNDAPAGTNITCSANACPLVEAADATFLYSFENSGVGDVTGFLAVDNTNKLIVLSFRGSRSIENWITNLNFDLVDINDICSGCRGHDGFTSSWRSVADTLRQAVDDAVAAHPDYKVVVTGHSLGGALATLAGADLRNNGYDVDLYTYGAPRVGNRAFAEFITVQTGGTLYRVTHTNDVVPRLPPRQFGYSHPSPEYWIKSGTLEPVRRRDIVKIEGIDATGGNNQNNTPDIPAHLWYFGLIGTCI

SEQ ID NO: 9561 - protein, 274 aa, Thermomyces lanuginosus
SPIRRDVSADLLNQFKLFAQYSAAAYCGRNNDAPAGTNITCSANACPLVEAADATFLYSFENSGVGDVTGFLAVDNTNKLIVLSFRGSRSIENWITNLNFDLVDINDICSGCRGHDGFTSSWRSVADTLRQAVDQAVAAHPDYKVVVTGHSLGGALATLAGADLRNNGYDVDLYTYGAPRVGNRAFAEFITVQTGGTLYRVTHTNDVVPRLPPRQFGYSHPSPEYWIKSGTLVPVRRRDIVKIEGIDATGGNNQNNTPDIPAHLWYFGLIGTCI

SEQ ID NO: 9562 - protein, 274 aa, Thermomyces lanuginosus
SPIRRDVSADLLNQFKLFAQYSAAAYCGRNNDAPAGTNITCSANACPLVEAADATFLYSFENSGVGDVTGFLAVDNTNKLIVLSFRGSRSIENWITNLNFDLVDINDICSGCEGHDGFTSSWRSVADTLRQAVDDAVAAHPDYKVVVTGHSLGGALATLAGADLRNNGYDVDLYTYGAPRVGNRAFAEFITVQTGGTLYRVTHTNDVVPRLPPRQFGYSHPSPEYWIKSGTLVPVRRRDIVKIEGIDATGGNNQNNTPDIPAHLWYFGLIGTCI

SEQ ID NO: 9563 - protein, 274 aa, Thermomyces lanuginosus
SPIRRDVSADLLNQFKLFAQYSAAAYCGRNNDAPAGTNITCSANACPLVEAADATFLYSFENSGVGDVTGFLAVDNTNKLIVLSFRGSRSIENWITNLNFDLVDINDICSGCRGHDGFTSSWRSVADTLRQAVDDAVAAHPDYKVVVTGHSLGGALATLAGADLRNNGYDVDLYTYGAPRVGNRAFAEFITVQTGGTLYRVTHTNDVVPRLPPRQFGYSHPSPEYWIKSGTLVPVRRRDIVKIEGIDATGGNNQNNTPDIPSHLWYFGLIGTCI

SEQ ID NO: 9564 - protein, 274 aa, Thermomyces lanuginosus
SPIRRDVSEDLLNQFKLFAQYSAAAYCGRNNDAPAGTNITCSANACPLVEAADATFLYSFENSGVGDVTGFLAVDNTNKLIVLSFRGSRSIENWITNLNFDLVDINDICSGCRGHDGFTSSWRSVADTLRQAVDDAVAAHPDYKVVVTGHSLGGALATLAGADLRNNGYDVDLYTYGAPRVGNRAFAEFITVQTGGTLYRVTHTNDVVPRLPPRQFGYSHPSPEYWIKSGTGVPVRRRDIVKIEGIDATGGNNQNNTPDIPAHLWYFGLIGTCI

SEQ ID NO: 9565 - protein, 274 aa, Thermomyces lanuginosus
SPIRRCVSADLLNQFKLFAQYSAAAYCGRNNDAPAGTNITCSANACPLVEAADATFLYSFENSGVGDVTGFLAVDNTNKLIVLSFRGSRSIENWITNLNFDLVDINDICSGCRGHDGFTSSWRSVADTLRQAVDDAVAAHPDYKVVVTGHSLGGALATLAGADLRNNGYDVDLYTYGAPRVGNRAFAEFITVQTGGTLYRVTHTNDVVPRLPPRQFGYSHPSPEYWIKSGTLVPVRRRDIVKIEGIDATGGNNQNNAPDIPAHLWYFGAIGTCI

SEQ ID NO: 9566 - protein, 274 aa, Thermomyces lanuginosus
SPIRRDVSADLLNQFKLFAQYSAAAYCGRNNDAPAGTNITCSANACPLVEAADATFLYSFENSGVGDVTGFLAVDNTNKLIVLSFRGSRSIENWITNLNFDLVDINDICSGCRGHDGFTSSWRSVADTLRQAVDDAVAAHPDYKVVVTGHSLGGALATLAGADLRNNGYDVDLYTYGAPRVGNRAFAEFITVQTGGTLYRVTHTNDVVPRLPPRQFGYSHPSPEYWIKSGTLVPVQRRDIVKIEGIDATGGNNQNNTPDIPAHLWYFGLIGTCI

SEQ ID NO: 9567 - protein, 274 aa, Thermomyces lanuginosus
SPIRRDVSADLLNQFKLFAQYSAAAYCGRNNDAPAGTNITCSANACPLVEAADATFLYSFENSGVGDVTGFLAVDNTNKLIVLSFRGSRSIENWITNLNFDLVDINDICSGCQGHDGFTSSWRSVADTLRQAVDDAVAAHPDYKVVVTGHSLGGALATLAGADLRNNGYDVDLYTYGAPRVGNRAFAEFITVQTGGTLYRVTHTNDVVPRLPPRQFGYSHPSPEYWIKSGTLVPVRRRDIVKIEGIDATGGNNQNNTPDIPAHLWYFGLIGTCI

SEQ ID NO: 9568 - protein, 274 aa, Thermomyces lanuginosus
SPIRRDVSADLLNQFKLFAQYSAAAYCGRNNDAPAGTNITCYANACPLVEAADATFLYSFENSGVGDVTGFLAVDNTNKLIVLSFRGSRSIENWITNLNFDLVDINDICSGCRGHDGFTSSWRSVADTLRQAVDDAVAAHPDYKVVVTGHSLGGALATLAGADLRNNGYDVDLYTYGAPRVGNRAFAEFITVQTGGTLYRVTHTNDVVPRLPPRQFGYSHPSPEYWIKSGTLVPVRRRDIVKIEGIDATGGNNQNNAPDIPAHLWYFGAIGTCI

SEQ ID NO: 9569 - protein, 274 aa, Thermomyces lanuginosus
SPIRRDVSADLLNQFKLFAQYSAAAYCGRNNDAPAGTNITCSANACPLVEAADATFLYSFENSGVGDVTGFLAVDNTNKLIVLSFRGSRSIENWITNLNFDLVDINDICSGCRGHDGFTSSWRSVADTLRQAVDDAVAAHPDYKVVVTGHSLGGALATLAGADLRNNGYDVDLYTYGAPRVGNRAFAEFITVQTGGTLYRVTHTNDVVPRLPPRQFGYSHPSPEYWIKSGTLVPVRRRDIVKIEGIDATGGNNQNNTPDIPAHLWYFGAIGTCI

SEQ ID NO: 9570 - protein, 274 aa, Thermomyces lanuginosus
SPIRRDVSADLLNQFKLFAQYSAAAYCGRNNDAPAGTNITCSANACPLVEAADATFLYSFENSGVGDVTGFLAVDNTNKLIVLSFRGSRSIENWITNLNFDLVDINDICSGCRGHDGFTSSWRSVADTLRQAVDDAVAAHPDYKVVVTGHSLGGALATLAGADLRNNGYDVDLYTYGAPRVGNRAFAEFITVQTGGTLYRVTHTNDVVPRLPPRQFGYSHPSPEYWIKSGTLVPVRRRDIVKIEGIDATGGNNQNNTPDIPAHLWYFGVIGTCI

SEQ ID NO: 9571 - protein, 274 aa, Thermomyces lanuginosus
SPIRRDVSADLLNQFKLFAQYSAAAYCGRNQDAPAGTNITCSANACPLVEAADATFLYSFENSGVGDVTGFLAVDNTNKLIVLSFRGSRSIENWITNLNFDLVDINDICSGCRGHDGFTSSWRSVADTLRQAVDDAVAAHPDYKVVVTGHSLGGALATLAGADLRNNGYDVDLYTYGAPRVGNRAFAEFITVQTGGTLYRVTHTNDVVPRLPPRQFGYSHPSPEYWIKSGTLVPVRRRDIVKIEGIDATGGNNQNNTPDIPAHLWYFGLIGTCI

SEQ ID NO: 9572 - protein, 274 aa, Thermomyces lanuginosus
SPIRRDVSADLLNQFKLFAQYSAAAYCGRNNNAPAGTNITCSANACPLVEAADATFLYSFENSGVGDVTGFLAVDNTNKLIVLSFRGSRSIENWITNLNFDLVDINDICSGCRGHDGFTSSWRSVADTLRQAVDDAVAAHPDYKVVVTGHSLGGALATLAGADLRNNGYDVDLYTYGAPRVGNRAFAEFITVQTGGTLYRVTHTNDVVPRLPPRQFGYSHPSPEYWIKSGTLVPVRRRDIVKIEGIDATGGNNQNNTPDIPAHLWYFGLIGTCI

SEQ ID NO: 9573 - protein, 274 aa, Thermomyces lanuginosus
SPIRRDVSADLLNQFKLFAQYSAAAYCGRNNDAPAGTNITCSANACPLVENADATFLYSFENSGVGDVTGFLAVDNTNKLIVLSFRGSRSIENWITNLNFDLVDINDICSGCRGHDGFTSSWRSVADTLRQAVDDAVAAHPDYKVVVTGHSLGGALATLAGADLRNNGYDVDLYTYGAPRVGNRAFAEFITVQTGGTLYRVTHTNDVVPRLPPRQFGYSHPSPEYWIKSGTLVPVRRRDIVKIEGIDATGGNNQNNAPDIPAHLWYFGAIGTCI

SEQ ID NO: 9574 - protein, 274 aa, Thermomyces lanuginosus
SPIRRDVSADLLNQFKLFAQYSAAAYCGRNNDAPAGTNITCSANACPLVEAADATVLYSFENSGVGDVTGFLAVDNTNKLIVLSFRGSRSIENWITNLNFDLVDINDICSGCRGHDGFTSSWRSVADTLRQAVDDAVAAHPDYKVVVTGHSLGGALATLAGADLRNNGYDVDLYTYGAPRVGNRAFAEFITVQTGGTLYRVTHTNDVVPRLPPRQFGYSHPSPEYWIKSGTLVPVRRRDIVKIEGIDATGGNNQNNTPDIPAHLWYFGLIGTCI

SEQ ID NO: 9575 - protein, 274 aa, Thermomyces lanuginosus
SPIRRDVSADLLNQFKLFAQYSAAAYCGRNNDAPAGTNITCSANACPLVEAADATFLYSFENSGVGDVTGFLAQDNTNKLIVLSFRGSRSIENWITNLNFDLVDINDICSGCRGHDGFTSSWRSVADTLRQAVDDAVAAHPDYKVVVTGHSLGGALATLAGADLRNNGYDVDLYTYGAPRVGNRAFAEFITVQTGGTLYRVTHTNDVVPRLPPRQFGYSHPSPEYWIKSGTLVPVRRRDIVKIEGIDATGGNNQNNAPDIPAHLWYFGAIGTCI

SEQ ID NO: 9576 - protein, 274 aa, Thermomyces lanuginosus
SPIRRDVSADLLNQFKLFAQYSAAAYCGRNNDAPAGTNITCSANACPLVEAADATFLYSFENSGVGDVTGFLAVDNTNKLIVLSFRGSRSIENWITNLNFDLVDINDICSGCRGHDGFTSSWRSVADTLRQAVDDAVAAHPDYKVVVTGHSLGGALATLAGADLRNNGYDVDLYTYGAPRVGNRAFAEFITVQTGGTLYRVTHTNDVVPRLPPRQFEYSHPSPEYWIKSGTLVPVRRRDIVKIEGIDATGGNNQNNTPDIPAHLWYFGLIGTCI

SEQ ID NO: 9577 - protein, 274 aa, Thermomyces lanuginosus
SPIRRDVSADLLNQFKLFAQYSAAAYCGRNNDAPAGTNITCSANACPLVEAADATFLYSFKNSGVGDVTGFLAVDNTNKLIVLSFRGSRSIENWITNLNFDLVDINDICSGCRGHDGFTSSWRSVADTLRQAVDDAVAAHPDYKVVVTGHSLGGALATLAGADLRNNGYDVDLYTYGAPRVGNRAFAEFITVQTGGTLYRVTHTNDVVPRLPPRQFGYSHPSPEYWIKSGTLVPVRRRDIVKIEGIDATGGNNQNNTPDIPAHLWYFGLIGTCI

SEQ ID NO: 9578 - protein, 274 aa, Thermomyces lanuginosus
SPIRRDVSADLLNQFKLFAQYSAAAYCGRNNDAPAGTNITCSANACPLVEAADATFLYSFENSGVGDVTGFLAVDNTNKLIVLSFRGSRSIENWITNFNFDLVDINDICSGCRGHDGFTSSWRSVADTLRQAVDDAVAAHPDYKVVVTGHSLGGALATLAGADLRNNGYDVDLYTYGAPRVGNRAFAEFITVQTGGTLYRVTHTNDVVPRLPPRQFGYSHPSPEYWIKSGTLVPVRRRDIVKIEGIDATGGNNQNNTPDIPAHLWYFGLIGTCI

SEQ ID NO: 9579 - protein, 274 aa, Thermomyces lanuginosus
SPIRRDVSADLLNQFKLFAQYSAAAYCGRNNDAPAGTNITCSANACPLVEAADATFLYSFENSGVGDVTGFLAVDNTNKLIVLSFRGSRSIENWITNLNFDLVDIDDICSGCRGHDGFTSSWRSVADTLRQAVDDAVAAHPDYKVVVTGHSLGGALATLAGADLRNNGYDVDLYTYGAPRVGNRAFAEFITVQTGGTLYRVTHTNDVVPRLPPRQFGYSHPSPEYWIKSGTLVPVRRRDIVKIEGIDATGGNNQNNTPDIPAHLWYFGLIGTCI

SEQ ID NO: 9580 - protein, 274 aa, Thermomyces lanuginosus
SPIRRDVSADLLNQFKLFAQYSAAAYCGRNNDAPAGTNITCSANACPLVEAADATFLYSFENSGVGDVTGFLAVDNTNKLIVLSFRGSRSIENWITNLNFDLVDINDICSGCRGHDGFTSSWRSVADTLRQAVDDAVAAHPDYKVVVTGHSLGGALATLAGADLRNNGYDVDLYTYGAPRVGNRAFAEFITVQTGGTLYRVTHTNDVVPRLPPRQVGYSHPSPEYWIKSGTLVPVRRRDIVKIEGIDATGGNNQNNAPDIPAHLWYFGLIGTCI

SEQ ID NO: 9581 - protein, 273 aa, Thermomyces lanuginosus
SPIRRDVSADLLNQFKLFAQYSAAAYCGRNNDAPAGTNITCSANACPLVEAADATFLYSFENSGVGDVTGFLAVDNTNKLIVLSFRGSRSIENWITNLNFDLVDINDICSGCRGHDGFTSSWRSVADTLRQAVDDAVAAHPDYKVVVTGHSLGGALATLAGADLRNNGYDVDLYTYGAPRVGNRAFAEFITVQTGGTLYRVTHTNDVVPRLPPRQVGYSHPSPEYWIKSGTLVPVRRRDIVKIEGIDATGGNNQNNTPDIPAHLWYFGAIGTC

SEQ ID NO: 9582 - protein, 269 aa, Thermomyces lanuginosus
DVSADLLNQFKLFAQYSAAAYCGRNNDAPAGTNITCSANACPLVEAADATFLYSFENSGVGDVTGFLAVDNTNKLIVLSFRGSRSIENWITNLNFDLVDINDICSGCRGHDGFTSSWRSVADTLRQAVDDAVAAHPDYKVVVTGHSLGGALATLAGADLRNNGYDVDLYTYGAPRVGNRAFAEFITVQTGGTLYRVTHTNDVVPRLPPRQFGYSHPSPEYWIKSGTGVPVRRRDIVKIEGIDATGGNNQPNIPDIPAHLWYFGLIGTCI

SEQ ID NO: 9583 - protein, 269 aa, Thermomyces lanuginosus
DVSADLLNQFKLFAQYSAAAYCGRNNDAPAGTNITCSANACPLVEAADATFLYSFENSGVGDVTGFLAVDNTNKLIVLSFRGSRSIENWITNLNFDLVDINDICSGCRGHDGFTSSWRSVADTLRQAVDDAVAAHPDYKVVVTGHSLGGALATLAGADLRNNGYDVDLYTYGAPRVGNRAFAEFITVQTGGTLYRVTHTNDVVPRLPPRQFGYSHPSPEYWIKSGTLPPVRRRDIVKIEGIDATGGNNQPNIPDIPAHLWYFGLIGTCI

SEQ ID NO: 9584 - protein, 269 aa, Thermomyces lanuginosus
EVSQDLFDQFNLFAQYSAAAYCAKNNDAPAGANVTCRENICPEVEKADATFLYSFEDSGVGDVTGFLALDNTNRLIVLSFRGSRSLENWIGNINLDLKGIDDICSGCKGHDGFTSSWRSVANTLTQQVQNAVREHPDYRVVFTGHSLGGALATVAGASLRGNGYDIDVFSYGAPRVGNRAFAEFLTAQTGGTLYRITHTNDIVPRLPPRELGYSHSSPEYWITSGTLVPVTKNDIVKVEGIDSTDGNNQPNTPDIAAHLWYFGLIGTCL

SEQ ID NO: 9585 - protein, 269 aa, Thermomyces dupontii
EVSQDLFDQFNLFAQYSAAAYCAKNNDAPAGANVTCRGNICPEVEKADATFLYSFEDSGVGDVTGFLALDNTNRLIVLSFRGSRSLENWIGNINLDLKGIDDICSGCKGHDGFTSSWRSVANTLTQQVQNAVREHPDYRVVFTGHSLGGALATVAGASLRGNGYDIDVFSYGAPRVGNRAFAVFLTAQTGGTLYRITHTNDIVPRLPPRELGYSHSSPEYWITSGTLVPVTKNDIVKVEGIDSTDGNNQPNTPDIAAHLWYFGLIGTCL

SEQ ID NO: 9586 - protein, 269 aa, Thermomyces dupontii
EVSQDLFDQFNLFAQYSAAAYCAKNNDAPAGANVTCRGSICPEVEKADATFLYSFEDSGVGDVTGFLALDNTNRLIVLSFRGSRSLENWIGNLNLDLKGIDDICSGCKGHDGFTSSWRSVANTLTQQVQNAVREHPDYRVVFTGHSLGGALATVAGASLRGNGYDIDVFSYGAPRVGNRAFAVFLTAQTGGTLYRITHTNDIVPRLPPRELGYSHSSPEYWITSGTLVPVTKNDIVKVEGIDSTDGNNQPNTPDIAAHLWYFGLIGTCL

SEQ ID NO: 9587 - protein, 269 aa, Synthetic construct
EVSQDLFDQFNLFAQYSAAAYCAKNNDAPAGANVTCSENICPEVEKADATFLYSFEDSGVGDVTGFLALDNTNRLIVLSFRGSRSLENWIGNINLDLKGIDDICSGCKGHDGFTSSWRSVANTLTQQVQNAVREHPDYRVVFTGHSLGGALATVAGASLRGNGYDIDVFSYGAPRVGNRAFAEFLTAQTGGTLYRITHTNDIVPRLPPRELGYSHSSPEYWITSGTLVPVTKNDIVKVEGIDSTDGNNQPNTPDIAAHLWYFGLIGTCL

SEQ ID NO: 9588 - protein, 269 aa, Thermomyces dupontii
EVSQDLFDQFNLFAQYSAAAYCAKNNDAPAGANVTCRGSICPEVEKADATFLYSFEDSGVGDVTGFLALDNTNRLIVLSFRGSRSLENWIGNINLDLKEIDDICSGCKGHDGFTSSWRSVANTLTQQVQNAVREHPDYRVVFTGHSLGGALATVAGASLRGNGYDIDVFSYGAPRVGNRAFAVFLTAQTGGTLYRITHTNDIVPRLPPRELGYSHSSPEYWITSGTLVPVTKNDIVKVEGIDSTDGNNQPNTPDIAAHLWYFGLIGTCL

SEQ ID NO: 9589 - protein, 269 aa, Synthetic construct
EVSQDLFDQFNLFAQYSAAAYCAKNNDAPAGANVTCSENVCPEVEKADATFLYSFEDSGVGDVTGFLALDNTNRLIVLSFRGSRSLENWIGNINLDLKGIDDICSGCKGHDGFTSSWRSVANTLTQQVQNAVREHPDYRVVFTGHSLGGALATVAGASLRGNGYDIDVFSYGAPRVGNRAFAEFLTAQTGGTLYRITHTNDIVPRLPPRELGYSHSSPEYWITSGTLVPVTKNDIVKVEGIDSTDGNNQPNTPDIAAHLWYFGLIGTCL

SEQ ID NO: 9590 - protein, 291 aa, Thermomyces lanuginosus
MRSSLVLFFVSAWTALASPIRRDVRADLLNQFKLFAQYSAAAYCGRNNDAPAGTNITCSANACPLVEAADATFLYSFENSGVGDVTGFLAVDNTNKLIVLSFRGSRSIENWITNLNFDLVDINDICSGCRGHDGFTSSWRSVADTLRQAVDDAVAAHPDYKVVVTGHSLGGALATLAGADLRNNGYDVDLYTYGAPRVGNRAFAEFITVQTGGTLYRVTHTNDVVPRLPPRQFGYSHPSPEYWIKSGTLVPVRRRDIVKIEGIDATGGNNQNNAPDIPAHLWYFGAIGTCI

SEQ ID NO: 9591 - protein, 291 aa, Thermomyces lanuginosus
MRSSLVLFFVSAWTALASPIRRDVSADLLNQFKLFAQYSAAAYCGRNNDAPAGTNITCSANACPLVEAADATFLYSFENSGVGDVTGNLAVDNTNKLIVLSFRGSRSIENWITNLNFDLVDINDICSGCRGHDGFTSSWRSVADTLRQAVDDAVAAHPDYKVVVTGHSLGGALATLAGADLRNNGYDVDLYTYGAPRVGNRAFAEFITVQTGGTLYRVTHTNDVVPRLPPRQFGYSHPSPEYWIKSGTLVPVRRRDIVKIEGIDATGGNNQNNAPDIPAHLWYFGAIGTCI

SEQ ID NO: 9592 - protein, 291 aa, Thermomyces lanuginosus
MRSSLVLFFVSAWTALASPIRRDVSADLLNQFKLFAQYSAAAYCGRNNDAPAGTNITCSANACPLVEAADATFLYSFENSGVGGVTGFLAVDNTNKLIVLSFRGSRSIENWITNLNFDLVDINDICSGCRGHDGFTSSWRSVADTLRQAVDDAVAAHPDYKVVVTGHSLGGALATLAGADLRNNGYDVDLYTYGAPRVGNRAFAEFITVQTGGTLYRVTHTNDVVPRLPPRQFGYSHPSPEYWIKSGTLVPVRRRDIVKIEGIDATGGNNQNNAPDIPAHLWYFGAIGTCI

SEQ ID NO: 9593 - protein, 291 aa, Thermomyces lanuginosus
MRSSLVLFFVSAWTALASPIRRDVSADLLNQFKLFAQYSAAAYCGRNNDAPAGTNITCSANACPLVEAGDATFLYSFENSGVGDVTGFLAVDNTNKLIVLSFRGSRSIENWITNLNFDLVDINDICSGCRGHDGFTSSWRSVADTLRQAVDDAVAAHPDYKVVVTGHSLGGALATLAGADLRNNGYDVDLYTYGAPRVGNRAFAEFITVQTGGTLYRVTHTNDVVPRLPPRQFGYSHPSPEYWIKSGTLVPVRRRDIVKIEGIDATGGNNQNNAPDIPAHLWYFGAIGTCI

SEQ ID NO: 9594 - protein, 291 aa, Thermomyces lanuginosus
MRSSLVLFFVSAWTALASPIRRDVSADLLNQFKLFAQYSAAAYCGRNNDAPAGTNITCSANACPLVEAADATFLYSFENSGVGDVTGFLAVDNTNGLIVLSFRGSRSIENWITNLNFDLVDINDICSGCRGHDGFTSSWRSVADTLRQAVDDAVAAHPDYKVVVTGHSLGGALATLAGADLRNNGYDVDLYTYGAPRVGNRAFAEFITVQTGGTLYRVTHTNDVVPRLPPRQFGYSHPSPEYWIKSGTLVPVRRRDIVKIEGIDATGGNNQNNAPDIPAHLWYFGAIGTCI

SEQ ID NO: 9595 - protein, 291 aa, Thermomyces lanuginosus
MRSSLVLFFVSAWTALASPIRRDVSADLLNQFKLFAQYSAAAYCGRNNDAPAGTNITCSANACPLVEAADATFLYSFENSGVGDVTGFLAVDNTNKLIVLSFRGSRSIENWITNLNFDLVDINDICSGCRGHDGFTSSWRSVADTLRQAVDDAVAAHPDYKVVVTGHSLGGALATLAGADLRNNGYNVSLYTYGAPRVGNRAFAEFITVQTGGTLYRVTHTNDVVPRLPPRQFGYSHPSPEYWIKSGTLVPVRRRDIVKIEGIDATGGNNQNNTPDIPAHLWYFGLIGTCI

SEQ ID NO: 9596 - protein, 291 aa, Thermomyces lanuginosus
MRSSLVLFFVSAWTALASPIRRDVSADLLNQFKLFAQYSAAAYCGRNNDAPAGTNITCSANACPLVEAADATFLYSFENSGVGDVTGFLAVRNTNKLIVLSFRGSRSIENWITNLNFDLVDINDICSGCRGHDGFTSSWRSVADTLRQAVDDAVAAHPDYKVVVTGHSLGGALATLAGADLRNNGYDVDLYTYGAPRVGNRAFAEFITVQTGGTLYRVTHTNDVVPRLPPRQFGYSHPSPEYWIKSGTLVPVRRRDIVKIEGIDATGGNNQNNAPDIPAHLWYFGAIGTCI

SEQ ID NO: 9597 - protein, 291 aa, Thermomyces lanuginosus
MRSSLVLFFVSAWTALASPIRRDVSADLLNQFKLFAQYSAAAYCGRNNDAPAGTNITCSANACPLVEAADATLLYSFENSGVGDVTGFLAVDNTNKLIVLSFRGSRSIENWITNLNFDLVDINDICSGCRGHDGFTSSWRSVADTLRQAVDDAVAAHPDYKVVVTGHSLGGALATLAGADLRNNGYDVDLYTYGAPRVGNRAFAEFITVQTGGTLYRVTHTNDVVPRLPPRQFGYSHPSPEYWIKSGTLVPVRRRDIVKIEGIDATGGNNQNNAPDIPAHLWYFGAIGTCI

SEQ ID NO: 9598 - protein, 291 aa, Thermomyces lanuginosus
MRSSLVLFFVSAWTALASPIRRDVSADLLNQFKLFAQYCAAAYCGRNNDAPAGTNITCSANACPLVEAADATFLYSFENSGVGDVTGFLAVDNTNKLIVLSFRGSRSIENWITNLNFDLVDINDICSGCRGHDGFTSSWRSVADTLRQAVDDAVAAHPDYKVVVTGHSLGGALATLAGADLRNNGYDVDLYTYGAPRVGNRAFAEFITVQTGGTLYRVTHTNDVVPRLPPRQFGYSHPSPEYWIKSGTLVPVRRRDIVKIEGIDATGGNNQNNAPDIPAHLWYFGAIGTCI

SEQ ID NO: 9599 - protein, 291 aa, Thermomyces lanuginosus
MRSSLVLFFVSAWTALASPIRRDVSADLLNQFKLFAQYSAAAYCGRNNDAPAGTNITCSANACPLVEAADATFLYSFENSGVGDVTGFLAVDNTNKLIVLSFRGSRSIENWITNLNFDLVDINDICSGCRGHDGFTSSWRSVADNLSQAVDDAVAAHPDYKVVVTGHSLGGALATLAGADLRNNGYDVDLYTYGAPRVGNRAFAEFITVQTGGTLYRVTHTNDVVPRLPPRQFGYSHPSPEYWIKSGTLVPVRRRDIVKIEGIDATGGNNQNNTPDIPAHLWYFGLIGTCI

SEQ ID NO: 9600 - protein, 291 aa, Thermomyces lanuginosus
MRSSLVLFFVSAWTALASPIRRDVSADLLNQFKLFAQYSAAAYCGRNNDAPAGTNITCSANACSLVEAADATFLYSFENSGVGDVTGFLAVDNTNKLIVLSFRGSRSIENWITNLNFDLVDINDICSGCRGHDGFTSSWRSVADTLRQAVDDAVAAHPDYKVVVTGHSLGGALATLAGADLRNNGYDVDLYTYGAPRVGNRAFAEFITVQTGGTLYRVTHTNDVVPRLPPRQFGYSHPSPEYWIKSGTLVPVRRRDIVKIEGIDATGGNNQNNAPDIPAHLWYFGAIGTCI

SEQ ID NO: 9601 - protein, 291 aa, Thermomyces lanuginosus
MRSSLVLFFVSAWTALASPIRRDVSADLLNQFKLFAQYSAAAYCGRNNDAPAGTNITCSANACPLVEAADATFLYSFENSGVGDVTGFLAVDNGNKLIVLSFRGSRSIENWITNLNFDLVDINDICSGCRGHDGFTSSWRSVADTLRQAVDDAVAAHPDYKVVVTGHSLGGALATLAGADLRNNGYDVDLYTYGAPRVGNRAFAEFITVQTGGTLYRVTHTNDVVPRLPPRQFGYSHPSPEYWIKSGTLVPVRRRDIVKIEGIDATGGNNQNNAPDIPAHLWYFGAIGTCI

SEQ ID NO: 9602 - protein, 291 aa, Thermomyces lanuginosus
MRSSLVLFFVSAWTALASPIRRDVSADLLNQFKLFAQYSAAAYCGRNNDAPAGTNITCSANACPLVEAADGTFLYSFENSGVGDVTGFLAVDNTNKLIVLSFRGSRSIENWITNLNFDLVDINDICSGCRGHDGFTSSWRSVADTLRQAVDDAVAAHPDYKVVVTGHSLGGALATLAGADLRNNGYDVDLYTYGAPRVGNRAFAEFITVQTGGTLYRVTHTNDVVPRLPPRQFGYSHPSPEYWIKSGTLVPVRRRDIVKIEGIDATGGNNQNNAPDIPAHLWYFGAIGTCI

SEQ ID NO: 9603 - protein, 291 aa, Thermomyces lanuginosus
MRSSLVLFFVSAWTALASPIRRDVSADLLNQFKLFAQYSAAAYCGRNNDAPAGTNITCSANACPLVEAADATKLYSFENSGVGDVTGFLAVDNTNKLIVLSFRGSRSIENWITNLNFDLVDINDICSGCRGHDGFTSSWRSVADTLRQAVDDAVAAHPDYKVVVTGHSLGGALATLAGADLRNNGYDVDLYTYGAPRVGNRAFAEFITVQTGGTLYRVTHTNDVVPRLPPRQFGYSHPSPEYWIKSGTLVPVRRRDIVKIEGIDATGGNNQNNAPDIPAHLWYFGAIGTCI

SEQ ID NO: 9604 - protein, 291 aa, Thermomyces lanuginosus
MRSSLVLFFVSAWTALASPIRRDVSADLLNQMKLFAQYSAAAYCGRNNDAPAGTNITCSANACPLVEAADATFLYSFENSGVGDVTGFLAVDNTNKLIVLSFRGSRSIENWITNLNFDLVDINDICSGCRGHDGFTSSWRSVADTLRQAVDDAVAAHPDYKVVVTGHSLGGALATLAGADLRNNGYDVDLYTYGAPRVGNRAFAEFITVQTGGTLYRVTHTNDVVPRLPPRQFGYSHPSPEYWIKSGTLVPVRRRDIVKIEGIDATGGNNQNNAPDIPAHLWYFGAIGTCI

SEQ ID NO: 9605 - protein, 291 aa, Thermomyces lanuginosus
MRSSLVLFFVSAWTALASPIRRDVSADLLNQFKLFAQYSAAAYCGRNNDAPAGTNITCSANACPLVEAADATFLYSFENSGMGDVTGFLAVDNTNKLIVLSFRGSRSIENWITNLNFDLVDINDICSGCRGHDGFTSSWRSVADTLRQAVDDAVAAHPDYKVVVTGHSLGGALATLAGADLRNNGYDVDLYTYGAPRVGNRAFAEFITVQTGGTLYRVTHTNDVVPRLPPRQFGYSHPSPEYWIKSGTGVPVRRRDIVKIEGIDATGGNNQNNAPDIPAHLWYFGLIGTCI

SEQ ID NO: 9606 - protein, 291 aa, Thermomyces lanuginosus
MRSSLVLFFVSAWTALASPIRRDVSADLLNQFKLFAQYSAAAYCGRNNDAPAGTNITCSANACPLVEAADATFLYSFENSGVGAVTGFLAVDNTNKLIVLSFRGSRSIENWITNLNFDLVDINDICSGCRGHDGFTSSWRSVADTLRQAVDDAVAAHPDYKVVVTGHSLGGALATLAGADLRNNGYDVDLYTYGAPRVGNRAFAEFITVQTGGTLYRVTHTNDVVPRLPPRQFGYSHPSPEYWIKSGTLVPVRRRDIVKIEGIDATGGNNQNNAPDIPAHLWYFGAIGTCI

SEQ ID NO: 9607 - protein, 291 aa, Thermomyces lanuginosus
MRSSLVLFFVSAWTALASPIRRDVSADLLNQFKLFAQYSAAAYCGRNNDAPAGTNITCSANACPLVEAADATFLYSFENSGVGDVTGFLAVDGTNKLIVLSFRGSRSIENWITNLNFDLVDINDICSGCRGHDGFTSSWRSVADTLRQAVDDAVAAHPDYKVVVTGHSLGGALATLAGADLRNNGYDVDLYTYGAPRVGNRAFAEFITVQTGGTLYRVTHTNDVVPRLPPRQFGYSHPSPEYWIKSGTLVPVRRRDIVKIEGIDATGGNNQNNAPDIPAHLWYFGAIGTCI

SEQ ID NO: 9608 - protein, 291 aa, Thermomyces lanuginosus
MRSSLVLFFVSAWTALASPIRRDVSADLLNQFKLFAQYSAAAYCGRNNDAPAGTNITCSANACPLVEAADATFLYSFENSGVGDVTGFLAVDNTNKLIVLSFRGSRSIENWITNLNFDLVDINDICSGCRGHDGFTSSWRSVADTLRQAVDDAVAAHPDYKVVVTGHSLGGALATLAGADLRNNGYDVDLYTYGAPRVGNRAFAEFITVQTGGTLYRVTHTNDVVPRLPPRQVGYSHPSPEYWIKSGTGVPVRRRDIVKIEGIDATGGNNQNNTPDIPAHLWYFGLIGTCI

SEQ ID NO: 9609 - protein, 291 aa, Thermomyces lanuginosus
MRSSLVLFFVSAWTALASPIRRDVSADLLNQFKLFAQYSAAAYCGRNNDAPAGTNITCSANACPLVEAADATFLYSFENSGMGDVTGFLAVDNTNKLIVLSFRGSRSIENWIANLNFDLVDINDICSGCRGHDGFTSSWRSVADTLRQAVDDAVAAHPDYKVVVTGHSLGGALATLAGADLRNNGYDVDLYTYGAPRVGNRAFAEFITVQTGGTLYRVTHTNDVVPRLPPRQFGYSHPSPEYWIKSGTLVPVRRRDIVKIEGIDATGGNNQNNAPDIPAHLWYFGAIGTCI

SEQ ID NO: 9610 - protein, 291 aa, Thermomyces lanuginosus
MRSSLVLFFVSAWTALASPIRRDVSADLLNQFKLFAQYSAAAYCGRNNDAPAGTNSTCSANACPLVEAADATFLYSFENSGVGDVTGFLAVDNTNKLIVLSFRGSRSIENWITNLNFDLVDINDICSGCRGHDGFTSSWRSVADTLRQAVDDAVAAHPDYKVVVTGHSLGGALATLAGADLRNNGYDVDLYTYGAPRVGNRAFAEFITVQTGGTLYRVTHTNDVVPRLPPRQFGYSHPSPEYWIKSGTLVPVRRRDIVKIEGIDATGGNNQNNAPDIPAHLWYFGAIGTCI

SEQ ID NO: 9611 - protein, 291 aa, Thermomyces lanuginosus
MRSSLVLFFVSAWTALASPIRRDVSADLLNQFKLFAQYSAAAYCGRNNDAPAGTNITCSANACPLVEAADATFLYSFENSGLGDVTGFLAVDNTNKLIVLSFRGSRSIENWITNLNFDLVDINDICSGCRGHDGFTSSWRSVADTLRQAVDDAVAAHPDYKVVVTGHSLGGALATLAGADLRNNGYDVDLYTYGAPRVGNRAFAEFITVQTGGTLYRVTHTNDVVPRLPPRQFGYSHPSPEYWIKSGTLVPVRRRDIVKIEGIDATGGNNQNNAPDIPAHLWYFGAIGTCI

SEQ ID NO: 9612 - protein, 291 aa, Thermomyces lanuginosus
MRSSLVLFFVSAWTALASPIRRDVSADLLNQFKLFAQYSAAAYCGRNNDAPAGTNITCSANACPLVEAADATFLYSFENSGVGDGTGFLAVDNTNKLIVLSFRGSRSIENWITNLNFDLVDINDICSGCRGHDGFTSSWRSVADTLRQAVDDAVAAHPDYKVVVTGHSLGGALATLAGADLRNNGYDVDLYTYGAPRVGNRAFAEFITVQTGGTLYRVTHTNDVVPRLPPRQFGYSHPSPEYWIKSGTLVPVRRRDIVKIEGIDATGGNNQNNAPDIPAHLWYFGAIGTCI

SEQ ID NO: 9613 - protein, 291 aa, Thermomyces lanuginosus
MRSSLVLFFVSAWTALASPIRRDVSADLLNQFKLFAQYSAAAYCGRNNDAPAGTNITCSANACPLVEAADATFLYSFENSGVGDVTGFLAVDNTNKLIVLSFRGSRSIENWITNLNFDLVDINDICSGCRGHDGFTSSWRSVADTLRQAVDDAVAAHPDYKVVVTGHSLGGALATLAGADLRNNGYDVDLYTYGAPRVGNRAFAEFITVQTGGTLYRVTHTNDVVPRLPPRQFGYSHPSPEYWIKSGTLVPVRNRDIVKIEGIDATGGNNQNNAPDIPAHLWYFGAIGTCI

SEQ ID NO: 9614 - protein, 291 aa, Thermomyces lanuginosus
MRSSLVLFFVSAWTALASPIRRDVSADLLNQFKLFAQYSAAAYCGRNNDAPAGTNITCSANACPLVEAADATFLYSFENSGVGDVTGFLAVDTTNKLIVLSFRGSRSIENWITNLNFDLVDINDICSGCRGHDGFTSSWRSVADTLRQAVDDAVAAHPDYKVVVTGHSLGGALATLAGADLRNNGYDVDLYTYGAPRVGNRAFAEFITVQTGGTLYRVTHTNDVVPRLPPRQFGYSHPSPEYWIKSGTLVPVRRRDIVKIEGIDATGGNNQNNAPDIPAHLWYFGAIGTCI

SEQ ID NO: 9615 - protein, 291 aa, Thermomyces lanuginosus
MRSSLVLFFVSAWTALASPIRRDVSADLLNQFKLFAQYSAAAYCGRNNDAPAGTNITCSANACPLVEAADATFLYSFENSGVGDATGFLAVDNTNKLIVLSFRGSRSIENWITNLNFDLVDINDICSGCRGHDGFTSSWRSVADTLRQAVDDAVAAHPDYKVVVTGHSLGGALATLAGADLRNNGYDVDLYTYGAPRVGNRAFAEFITVQTGGTLYRVTHTNDVVPRLPPRQFGYSHPSPEYWIKSGTLVPVRRRDIVKIEGIDATGGNNQNNAPDIPAHLWYFGAIGTCI

SEQ ID NO: 9616 - protein, 291 aa, Thermomyces lanuginosus
MRSSLVLFFVSAWTALASPIRRDVSADLLNQFKLFAQYSAAAYCGRNNDAPAGTNITCSANACPLVEAADATPLYSFENSGVGDVTGFLAVDNTNKLIVLSFRGSRSIENWITNLNFDLVDINDICSGCRGHDGFTSSWRSVADTLRQAVDDAVAAHPDYKVVVTGHSLGGALATLAGADLRNNGYDVDLYTYGAPRVGNRAFAEFITVQTGGTLYRVTHTNDVVPRLPPRQFGYSHPSPEYWIKSGTLVPVRRRDIVKIEGIDATGGNNQNNAPDIPAHLWYFGAIGTCI

SEQ ID NO: 9617 - protein, 291 aa, Thermomyces lanuginosus
MRSSLVLFFVSAWTALASPIRRDVSADLLNQLKLFAQYSAAAYCGRNNDAPAGTNITCSANACPLVEAADATFLYSFENSGVGDVTGFLAVDNTNKLIVLSFRGSRSIENWITNLNFDLVDINDICSGCRGHDGFTSSWRSVADTLRQAVDDAVAAHPDYKVVVTGHSLGGALATLAGADLRNNGYDVDLYTYGAPRVGNRAFAEFITVQTGGTLYRVTHTNDVVPRLPPRQFGYSHPSPEYWIKSGTLVPVRRRDIVKIEGIDATGGNNQNNAPDIPAHLWYFGAIGTCI

SEQ ID NO: 9618 - protein, 291 aa, Thermomyces lanuginosus
MRSSLVLFFVSAWTALASPIRRDVSADLLNQFKLFAQYSAAAYCGRNNDAPAGTNITCSANACPLVEAADATFWYSFENSGVGDVTGFLAVDNTNKLIVLSFRGSRSIENWITNLNFDLVDINDICSGCRGHDGFTSSWRSVADTLRQAVDDAVAAHPDYKVVVTGHSLGGALATLAGADLRNNGYDVDLYTYGAPRVGNRAFAEFITVQTGGTLYRVTHTNDVVPRLPPRQFGYSHPSPEYWIKSGTLVPVRRRDIVKIEGIDATGGNNQNNAPDIPAHLWYFGAIGTCI

SEQ ID NO: 9619 - protein, 291 aa, Thermomyces lanuginosus
MRSSLVLFFVSAWTALASPIRRDVSADLLRQFKLFAQYSAAAYCGRNNDAPAGTNITCSANACPLVEAADATFLYSFENSGVGDVTGFLAVDNTNKLIVLSFRGSRSIENWITNLNFDLVDINDICSGCRGHDGFTSSWRSVADTLRQAVDDAVAAHPDYKVVVTGHSLGGALATLAGADLRNNGYDVDLYTYGAPRVGNRAFAEFITVQTGGTLYRVTHTNDVVPRLPPRQFGYSHPSPEYWIKSGTLVPVRRRDIVKIEGIDATGGNNQNNAPDIPAHLWYFGAIGTCI

SEQ ID NO: 9620 - protein, 291 aa, Thermomyces lanuginosus
MRSSLVLFFVSAWTALASPIRRDVSADLLNQFKLFAQYSAAAYCGRNNDAPAGTNITCSANACPLVEAADATFLYSFENSGVGDITGFLAVDNTNKLIVLSFRGSRSIENWITNLNFDLVDINDICSGCRGHDGFTSSWRSVADTLRQAVDDAVAAHPDYKVVVTGHSLGGALATLAGADLRNNGYDVDLYTYGAPRVGNRAFAEFITVQTGGTLYRVTHTNDVVPRLPPRQFGYSHPSPEYWIKSGTLVPVRRRDIVKIEGIDATGGNNQNNAPDIPAHLWYFGAIGTCI

SEQ ID NO: 9621 - protein, 291 aa, Thermomyces lanuginosus
MRSSLVLFFVSAWTALASPIRRDVSADLLNQFKLFAQYSAAAYCGRNNDAPAGTNITCSANACPLVEAADATFLYSFENSGVGDVTGFLAVDNTGKLIVLSFRGSRSIENWITNLNFDLVDINDICSGCRGHDGFTSSWRSVADTLRQAVDDAVAAHPDYKVVVTGHSLGGALATLAGADLRNNGYDVDLYTYGAPRVGNRAFAEFITVQTGGTLYRVTHTNDVVPRLPPRQFGYSHPSPEYWIKSGTLVPVRRRDIVKIEGIDATGGNNQNNAPDIPAHLWYFGAIGTCI

SEQ ID NO: 9622 - protein, 291 aa, Thermomyces lanuginosus
MRSSLVLFFVSAWTALASPIRRDVSADLLNQFKLFAQYSAAAYCGRNNDAPAGTNITCSANACPLVEAADATFLYSFENSGVGDVSGFLAVDNTNKLIVLSFRGSRSIENWITNLNFDLVDINDICSGCRGHDGFTSSWRSVADTLRQAVDDAVAAHPDYKVVVTGHSLGGALATLAGADLRNNGYDVDLYTYGAPRVGNRAFAEFITVQTGGTLYRVTHTNDVVPRLPPRQFGYSHPSPEYWIKSGTLVPVRRRDIVKIEGIDATGGNNQNNAPDIPAHLWYFGAIGTCI

SEQ ID NO: 9623 - protein, 291 aa, Thermomyces lanuginosus
MRSSLVLFFVSAWTALASPIRRDVSADLLNQFKLFAQYSAAAYCGRNNDAPAGTNITCSANACPLVEAADATFLYSFENSGVGDVTWFLAVDNTNKLIVLSFRGSRSIENWITNLNFDLVDINDICSGCRGHDGFTSSWRSVADTLRQAVDDAVAAHPDYKVVVTGHSLGGALATLAGADLRNNGYDVDLYTYGAPRVGNRAFAEFITVQTGGTLYRVTHTNDVVPRLPPRQFGYSHPSPEYWIKSGTLVPVRRRDIVKIEGIDATGGNNQNNAPDIPAHLWYFGAIGTCI

SEQ ID NO: 9624 - protein, 291 aa, Thermomyces lanuginosus
MRSSLVLFFVSAWTALASPIRRDVSADLLNQFKLFAQYSAAAYCGRNNDAPAGTNITCSANACPLVEAADATFLYSFENSGVGDVTGFLAVDNTNKKIVLSFRGSRSIENWITNLNFDLVDINDICSGCRGHDGFTSSWRSVADTLRQAVDDAVAAHPDYKVVVTGHSLGGALATLAGADLRNNGYDVDLYTYGAPRVGNRAFAEFITVQTGGTLYRVTHTNDVVPRLPPRQFGYSHPSPEYWIKSGTLVPVRRRDIVKIEGIDATGGNNQNNAPDIPAHLWYFGAIGTCI

SEQ ID NO: 9625 - protein, 291 aa, Thermomyces lanuginosus
MRSSLVLFFVSAWTALASPIRRDVSADLLNQFKLFAQYSAAAYCGRNNDAPAGTNITCSANACPLVEAADATFLYSFENSGVGDLTGFLAVDNTNKLIVLSFRGSRSIENWITNLNFDLVDINDICSGCRGHDGFTSSWRSVADTLRQAVDDAVAAHPDYKVVVTGHSLGGALATLAGADLRNNGYDVDLYTYGAPRVGNRAFAEFITVQTGGTLYRVTHTNDVVPRLPPRQFGYSHPSPEYWIKSGTLVPVRRRDIVKIEGIDATGGNNQNNAPDIPAHLWYFGAIGTCI

SEQ ID NO: 9626 - protein, 291 aa, Thermomyces lanuginosus
MRSSLVLFFVSAWTALASPIRRDVSADLLNQFKLFAQYSAAAYCGRNNDAPAGPNITCSANACPLVEAADATFLYSFENSGVGDVTGFLAVDNTNKLIVLSFRGSRSIENWITNLNFDLVDINDICSGCRGHDGFTSSWRSVADTLRQAVDDAVAAHPDYKVVVTGHSLGGALATLAGADLRNNGYDVDLYTYGAPRVGNRAFAEFITVQTGGTLYRVTHTNDVVPRLPPRQFGYSHPSPEYWIKSGTLVPVRRRDIVKIEGIDATGGNNQNNAPDIPAHLWYFGAIGTCI

SEQ ID NO: 9627 - protein, 291 aa, Thermomyces lanuginosus
MRSSLVLFFVSAWTALASPIRRDVSADLLNQFKLFAQYSAAAYCGRNNDAPAGTNITCSANACPLVEAADATFLYSFENSGVGDVTGFLAVDNTNKLIVLSFRGSRSIENWITNLNFDLVDINDICDGCGGHDGFTSSWRSVADTLRQAVDDAVAAHPDYKVVVTGHSLGGALATLAGADLRNNGYDVDLYTYGAPRVGNRAFAEFITVQTGGTLYRVTHTNDVVPRLPPRQFGYSHPSPEYWIKSGTLVPVRRRDIVKIEGIDATGGNNQNNTPDIPAHLWYFGLIGTCI

SEQ ID NO: 9628 - protein, 291 aa, Thermomyces lanuginosus
MRSSLVLFFVSAWTALASPIRRDVSADLLNQFKLFAQYSAAAYCGRNNDAPAGTNITCSANACPLVEAADAAFLYSFENSGVGDVTGFLAVDNTNKLIVLSFRGSRSIENWITNLNFDLVDINDICSGCRGHDGFTSSWRSVADTLRQAVDDAVAAHPDYKVVVTGHSLGGALATLAGADLRNNGYDVDLYTYGAPRVGNRAFAEFITVQTGGTLYRVTHTNDVVPRLPPRQFGYSHPSPEYWIKSGTLVPVRRRDIVKIEGIDATGGNNQNNAPDIPAHLWYFGAIGTCI

SEQ ID NO: 9629 - protein, 291 aa, Thermomyces lanuginosus
MRSSLVLFFVSAWTALASPIRRDVSADLLNQFKLFAQYSAAAYCGRNNDAPAGTNITCSANACPLVEAADATFLYSFENSGAGDVTGFLAVDNTNKLIVLSFRGSRSIENWITNLNFDLVDINDICSGCRGHDGFTSSWRSVADTLRQAVDDAVAAHPDYKVVVTGHSLGGALATLAGADLRNNGYDVDLYTYGAPRVGNRAFAEFITVQTGGTLYRVTHTNDVVPRLPPRQFGYSHPSPEYWIKSGTLVPVRRRDIVKIEGIDATGGNNQNNAPDIPAHLWYFGAIGTCI

SEQ ID NO: 9630 - protein, 291 aa, Thermomyces lanuginosus
MRSSLVLFFVSAWTALASPIRRDVSADLLNQFKLFAQYSAAAYCGRNNDAPAGTNITCSANACPLVEAADATFLYSFENSGVGDVTGFLAVDNTNKLIVLSFRGSRSIENWITNLNFDLVDINDICSGCRGHDGFTSSWRSVADTLRQAVDDAVAAHPDYKVVVTGHSLGGALATLAGADLRNNGYDVDLYTYGAPRVGNRAFAEFITVQTGGTLYRVTHTNDVVPRLPPRQFGYSHPSPEYWIKSGTLRPVRRRDIVKIEGIDATGGNNQNNAPDIPAHLWYFGAIGTCI

SEQ ID NO: 9631 - protein, 291 aa, Thermomyces lanuginosus
MRSSLVLFFVSAWTALASPIRRDVSADLLNQFKLFAQYSAAAYCGRNNDAPAGTNITCSANACPLVEAADALFLYSFENSGVGDVTGFLAVDNTNKLIVLSFRGSRSIENWITNLNFDLVDINDICSGCRGHDGFTSSWRSVADTLRQAVDDAVAAHPDYKVVVTGHSLGGALATLAGADLRNNGYDVDLYTYGAPRVGNRAFAEFITVQTGGTLYRVTHTNDVVPRLPPRQFGYSHPSPEYWIKSGTLVPVRRRDIVKIEGIDATGGNNQNNAPDIPAHLWYFGAIGTCI

SEQ ID NO: 9632 - protein, 291 aa, Thermomyces lanuginosus
MRSSLVLFFVSAWTALASPIRRDVSADLLNQFKLFAQYSAAAYCGRNNDAPAGTNITCSANACPLVEAADATFLYSFENSGVGDVTGFLAVDNTNKYIVLSFRGSRSIENWITNLNFDLVDINDICSGCRGHDGFTSSWRSVADTLRQAVDDAVAAHPDYKVVVTGHSLGGALATLAGADLRNNGYDVDLYTYGAPRVGNRAFAEFITVQTGGTLYRVTHTNDVVPRLPPRQFGYSHPSPEYWIKSGTLVPVRRRDIVKIEGIDATGGNNQNNAPDIPAHLWYFGAIGTCI

SEQ ID NO: 9633 - protein, 291 aa, Thermomyces lanuginosus
MRSSLVLFFVSAWTALASPIRRDVSADLLNQFKLFAQYSASAYCGRNNDAPAGTNITCSANACPLVEAADATFLYSFENSGVGDVTGFLAVDNTNKLIVLSFRGSRSIENWITNLNFDLVDINDICSGCRGHDGFTSSWRSVADTLRQAVDDAVAAHPDYKVVVTGHSLGGALATLAGADLRNNGYDVDLYTYGAPRVGNRAFAEFITVQTGGTLYRVTHTNDVVPRLPPRQFGYSHPSPEYWIKSGTLVPVRRRDIVKIEGIDATGGNNQNNAPDIPAHLWYFGAIGTCI

SEQ ID NO: 9634 - protein, 291 aa, Thermomyces lanuginosus
MRSSLVLFFVSAWTALASPIRRDVSADLLNQFKLFAQYSAAAYCGRNNDAPAGTNITCSANACPLVEAADATFLYSFENSGVGDMTGFLAVDNTNKLIVLSFRGSRSIENWITNLNFDLVDINDICSGCRGHDGFTSSWRSVADTLRQAVDDAVAAHPDYKVVVTGHSLGGALATLAGADLRNNGYDVDLYTYGAPRVGNRAFAEFITVQTGGTLYRVTHTNDVVPRLPPRQFGYSHPSPEYWIKSGTLVPVRRRDIVKIEGIDATGGNNQNNAPDIPAHLWYFGAIGTCI

SEQ ID NO: 9635 - protein, 291 aa, Thermomyces lanuginosus
MRSSLVLFFVSAWTALASPIRRDVSADLLNQFKLFAQYSAATYCGRNNDAPAGTNITCSANACPLVEAADATFLYSFENSGVGDVTGFLAVDNTNKLIVLSFRGSRSIENWITNLNFDLVDINDICSGCRGHDGFTSSWRSVADTLRQAVDDAVAAHPDYKVVVTGHSLGGALATLAGADLRNNGYDVDLYTYGAPRVGNRAFAEFITVQTGGTLYRVTHTNDVVPRLPPRQFGYSHPSPEYWIKSGTLVPVRRRDIVKIEGIDATGGNNQNNAPDIPAHLWYFGAIGTCI

SEQ ID NO: 9636 - protein, 291 aa, Thermomyces lanuginosus
MRSSLVLFFVSAWTALASPIRRDVSADLLNQFKLFAQYSAAAYCGENNDAPAGTNITCSANACPLVEAADATFLYSFENSGVGDVTGFLAVDNTNKLIVLSFRGSRSIENWITNLNFDLVDINDICSGCRGHDGFTSSWRSVADTLRQAVDDAVAAHPDYKVVVTGHSLGGALATLAGADLRNNGYDVDLYTYGAPRVGNREFAEFITVQTGGTLYRVTHTNDVVPRLPPRQFGYSHPSPEYWIKSGTLVPVRRRDIVKIEGIDATGGNNQDNAPDIPAHLWYFGAIGTCI

SEQ ID NO: 9637 - protein, 291 aa, Thermomyces lanuginosus
MRSSLVLFFVSAWTALASPIRRDVSADLLNQFKLFAQYSAAAYCGRNNDAPAGTNITCSANACPLVEAADATFLYSFENSGMGDVTGFLAVDNTNKLIVLSFRGSRSIENWITNLNFDLVDINDICSGCRGHDGFTSSWRSVADTLRQAVDDAVAAHPDYKVVVTGHSLGGALATLAGADLRNNGYDVDLYTYGAPRVGNRAFAEFITVQTGGTLYRVTHTNDVVPRLPPRQFGYSHPSPEYWIKSGTGVPVRRRDIVKIEGIDATGGNNQNNTPDIPAHLWYFGLIGTCI

SEQ ID NO: 9638 - protein, 291 aa, Thermomyces lanuginosus
MRSSLVLFFVSAWTALASPIRRDVSADLLNQFKLFAQYSAAAYCGRNNDAPAGTNITCSANACPLVEAADAMFLYSFENSGVGDVTGFLAVDNTNKLIVLSFRGSRSIENWITNLNFDLVDINDICSGCRGHDGFTSSWRSVADTLRQAVDDAVAAHPDYKVVVTGHSLGGALATLAGADLRNNGYDVDLYTYGAPRVGNRAFAEFITVQTGGTLYRVTHTNDVVPRLPPRQFGYSHPSPEYWIKSGTLVPVRRRDIVKIEGIDATGGNNQNNAPDIPAHLWYFGAIGTCI

SEQ ID NO: 9639 - protein, 291 aa, Thermomyces lanuginosus
MRSSLVLFFVSAWTALASPIRRDVSADLLNQFKLFAQYSATAYCGRNNDAPAGTNITCSANACPLVEAADATFLYSFENSGVGDVTGFLAVDNTNKLIVLSFRGSRSIENWITNLNFDLVDINDICSGCRGHDGFTSSWRSVADTLRQAVDDAVAAHPDYKVVVTGHSLGGALATLAGADLRNNGYDVDLYTYGAPRVGNRAFAEFITVQTGGTLYRVTHTNDVVPRLPPRQFGYSHPSPEYWIKSGTLVPVRRRDIVKIEGIDATGGNNQNNAPDIPAHLWYFGAIGTCI

SEQ ID NO: 9640 - protein, 291 aa, Thermomyces lanuginosus
MRSSLVLFFVSAWTALASPIRRDVSADLLNQFKLFAQYSAAAYCGRNNDAPAGTNITCSANACPLVEAADATFLYSFENSGVGDVTGFLAVDDTNKLIVLSFRGSRSIENWITNLNFDLVDINDICSGCRGHDGFTSSWRSVADTLRQAVDDAVAAHPDYKVVVTGHSLGGALATLAGADLRNNGYDVDLYTYGAPRVGNRAFAEFITVQTGGTLYRVTHTNDVVPRLPPRQFGYSHPSPEYWIKSGTLVPVRRRDIVKIEGIDATGGNNQNNAPDIPAHLWYFGAIGTCI

SEQ ID NO: 9641 - protein, 291 aa, Thermomyces lanuginosus
MRSSLVLFFVSAWTALASPIRRDVSADLLNQFKLFAQYSAAVYCGRNNDAPAGTNITCSANACPLVEAADATFLYSFENSGVGDVTGFLAVDNTNKLIVLSFRGSRSIENWITNLNFDLVDINDICSGCRGHDGFTSSWRSVADTLRQAVDDAVAAHPDYKVVVTGHSLGGALATLAGADLRNNGYDVDLYTYGAPRVGNRAFAEFITVQTGGTLYRVTHTNDVVPRLPPRQFGYSHPSPEYWIKSGTLVPVRRRDIVKIEGIDATGGNNQNNAPDIPAHLWYFGAIGTCI

SEQ ID NO: 9642 - protein, 291 aa, Thermomyces lanuginosus
MRSSLVLFFVSAWTALASPIRRDVSADLLNQFKLFAQYSAAAYCGRNNDAPAGTNITCSANACPLVEAADATFLYSFENSGVGDVTGFLAVDNTNKLIVLSFRGSRSIRNWITNLDFDLVDINDICSGCRGHDGFTSSWRSVADTLRQAVDDAVAAHPDYKVVVTGHSLGGALATLAGADLRNNGYDVDLYTYGAPRVGNRAFAEFITVQTGGTLYRVTHTNDVVPRLPPRQFGYSHPSPEYWIKSGTLVPVRRRDIVKIEGIDATGGNNQNNTPDIPAHLWYFGLIGTCI

SEQ ID NO: 9643 - protein, 291 aa, Thermomyces lanuginosus
MRSSLVLFFVSAWTALASPIRRDVSADLLNQFKLFAQYSAAAYCGRNNDAPAGTNITCSANACPLVEAADATFLYSFENSGVGDVTGFLAVDNTNKLIVLSFRGSRSIENWITNLNFDLVDINDICSGCRGHDGFTSSWRSVADTLRQAVDDAVAAHPDYKVVVTGHSLGGALATLAGADLRNNGYDVDLYTYGAPRVGNRAFAEFITVQTGGTLYRVTITNDVVPRLPPRQFGYSHPSPEYWIKSGTLVPVRRRDIVKIEGIDATGGNNQNNAPDIPAHLWYFGAIGTCI

SEQ ID NO: 9644 - protein, 291 aa, Thermomyces lanuginosus
MRSSLVLFFVSAWTALASPIRRDVSADLLNQFKLFAQYSAAAYCGRNNDAPAGTNITCSANACPLVEAADATFLYSFENSGVGDVTGFLAVDNVNKLIVLSFRGSRSIENWITNLNFDLVDINDICSGCRGHDGFTSSWRSVADTLRQAVDDAVAAHPDYKVVVTGHSLGGALATLAGADLRNNGYDVDLYTYGAPRVGNRAFAEFITVQTGGTLYRVTHTNDVVPRLPPRQFGYSHPSPEYWIKSGTLVPVRRRDIVKIEGIDATGGNNQNNAPDIPAHLWYFGAIGTCI

SEQ ID NO: 9645 - protein, 291 aa, Thermomyces lanuginosus
MRSSLVLFFVSAWTALASPIRRDVSADLLNQFKLFAQYSAAAYCGRNNDAPAGTNITCSANACPLVEAADATFLYSFENSGVGDVTGFLAVDNTNKLIVLSFRGSRSIENWITNLNFDLVDINDICSGCRGHDGFTSSWRSVADTLRQAVDDAVAAHPDYKVVVTGHSLGGALATLAGADLRNNGYDVDLYTYGAPRVGNRAFAEFITVQTGGTLYRVTHTNDVVPRLPPRQVGYSHPSPEYWIKSGTLVPVRRRDIVKIEGIDATGGNNQNNTPDIPAHLWYFGAIGTCI

SEQ ID NO: 9646 - protein, 291 aa, Thermomyces lanuginosus
MRSSLVLFFVSAWTALASPIRRDVSADLLNQFKLFAQYSAAAYCGRNNDAPAGTNITCSANACPLVEAADATFLYSFENSGVGDVTGFLAVDNTNKLIVLSFRGSRSIENWITNLNFDLVDINDICSGCRGHDGFTSSWRSVADTLRQAVDDAVAAHPDYKVVVTGHSLGGALATLAGADLRNNGYDVDLYTYGAPRVGNRAFAEFITVQTGGTLYRVTHTNDVVPRLPPRQVGYSHPSPEYWIKSGTLVPVRRRDIVKIEGIDATGGNNQNNAPDIPAHLWYFGAIGTCI

SEQ ID NO: 9647 - protein, 291 aa, Thermomyces lanuginosus
MRSSLVLFFVSAWTALASPIRRDVSADLLNQFKLFAQYSAAAYCGRNNDAPAVTNITCSANACPLVEAADATFLYSFENSGVGDVTGFLAVDNTNKLIVLSFRGSRSIENWITNLNFDLVDINDICSGCRGHDGFTSSWRSVADTLRQAVDDAVAAHPDYKVVVTGHSLGGALATLAGADLRNNGYDVDLYTYGAPRVGNRAFAEFITVQTGGTLYRVTHTNDVVPRLPPRQFGYSHPSPEYWIKSGTLVPVRRRDIVKIEGIDATGGNNQNNAPDIPAHLWYFGAIGTCI

SEQ ID NO: 9648 - protein, 291 aa, Thermomyces lanuginosus
MRSSLVLFFVSAWTALASPIRRDVSADLLNQFKLFAQYSAAAYCGRNNDAPAGTNITCSANACPLVEAADATFLYSFENSGVGDQTGFLAVDNTNKLIVLSFRGSRSIENWITNLNFDLVDINDICSGCRGHDGFTSSWRSVADTLRQAVDDAVAAHPDYKVVVTGHSLGGALATLAGADLRNNGYDVDLYTYGAPRVGNRAFAEFITVQTGGTLYRVTHTNDVVPRLPPRQFGYSHPSPEYWIKSGTLVPVRRRDIVKIEGIDATGGNNQNNAPDIPAHLWYFGAIGTCI

SEQ ID NO: 9649 - protein, 291 aa, Thermomyces lanuginosus
MRSSLVLFFVSAWTALASPIRRDVSADLLNQFKLFAQYSAAAYCGRNNDAPAGTNITCSANACPLVEAADATFLYSFENSGVGDVTGFLAVDCTNKLIVLSFRGSRSIENWITNLNFDLVDINDICSGCRGHDGFTSSWRSVADTLRQAVDDAVAAHPDYKVVVTGHSLGGALATLAGADLRNNGYDVDLYTYGAPRVGNRAFAEFITVQTGGTLYRVTHTNDVVPRLPPRQFGYSHPSPEYWIKSGTLVPVRRRDIVKIEGIDATGGNNQNNAPDIPAHLWYFGAIGTCI

SEQ ID NO: 9650 - protein, 291 aa, Thermomyces lanuginosus
MRSSLVLFFVSAWTALASPIRRDVSADLLNQFKLFAQYSAAAYCGRNNDAPAGTNITCSANACPLVEAADATFLYSFENSGVGDTTGFLAVDNTNKLIVLSFRGSRSIENWITNLNFDLVDINDICSGCRGHDGFTSSWRSVADTLRQAVDDAVAAHPDYKVVVTGHSLGGALATLAGADLRNNGYDVDLYTYGAPRVGNRAFAEFITVQTGGTLYRVTHTNDVVPRLPPRQFGYSHPSPEYWIKSGTLVPVRRRDIVKIEGIDATGGNNQNNAPDIPAHLWYFGAIGTCI

SEQ ID NO: 9651 - protein, 291 aa, Thermomyces lanuginosus
MRSSLVLFFVSAWTALASPIRRDVSADLLNQFKLFAQYSAAAYCGRNNDAPAGTNITCSANACPLVEAADATFTYSFENSGVGDVTGFLAVDNTNKLIVLSFRGSRSIENWITNLNFDLVDINDICSGCRGHDGFTSSWRSVADTLRQAVDDAVAAHPDYKVVVTGHSLGGALATLAGADLRNNGYDVDLYTYGAPRVGNRAFAEFITVQTGGTLYRVTHTNDVVPRLPPRQFGYSHPSPEYWIKSGTLVPVRRRDIVKIEGIDATGGNNQNNAPDIPAHLWYFGAIGTCI

SEQ ID NO: 9652 - protein, 291 aa, Thermomyces lanuginosus
MRSSLVLFFVSAWTALASPIRRDVSADLLNQFKLFAQYSAAAYCGRNNDAPAGTNITCSANACPLVEAADATFLYSFENSGVGDVTGFLAVDNTNKLIVLSFRGSRSIENWITNLDFDLVDINDICSGCRGHDGFTSSWRSVADTLRQAVDDAVAAHPDYKVVVTGHSLGGALATLAGADLRNNGYDVDLYTYGAPRVGNRAFAEFITVQTGGTLYRVTHTNDVVPRLPPRQFGYSHPSPEYWIKSGTLVPVRRRDIVKIEGIDATGGNNQNNAPDIPAHLWYFGAIGTCI

SEQ ID NO: 9653 - protein, 291 aa, Thermomyces lanuginosus
MRSSLVLFFVSAWTALASPIRRDVSADLLNQFKLFAQYSAAAYCGRNNDAPAGTNITCSANACPLVEAADATFLYDFENSGVGDVTGFLAVDNTNKLIVLSFRGSRSIENWITNLNFDLVDINDICSGCRGHDGFTSSWRSVADTLRQAVDDAVAAHPDYKVVVTGHSLGGALATLAGADLRNNGYDVDLYTYGAPRVGNRAFAEFITVQTGGTLYRVTHTNDVVPRLPPRQFGYSHPSPEYWIKSGTLVPVRRRDIVKIEGIDATGGNNQNNAPDIPAHLWYFGAIGTCI

SEQ ID NO: 9654 - protein, 291 aa, Thermomyces lanuginosus
MRSSLVLFFVSAWTALASPIRRDVSADLLNQFKLFAQYSAAAYCGRNNDAPAGTNITCSANACPLVNASDATFLYSFENSGVGDVTGFLAVDNTNKLIVLSFRGSRSIENWITNLNFDLVDINDICSGCRGHDGFTSSWRSVADTLRQAVDDAVAAHPDYKVVVTGHSLGGALATLAGADLRNNGYDVDLYTYGAPRVGNRAFAEFITVQTGGTLYRVTHTNDVVPRLPPRQFGYSHPSPEYWIKSGTLVPVRRRDIVKIEGIDATGGNNQNNTPDIPAHLWYFGLIGTCI

SEQ ID NO: 9655 - protein, 291 aa, Thermomyces lanuginosus
MRSSLVLFFVSAWTALASPIRRDVSADLLNQFKLFAQYSAAAYCGRNNDAPAGTDITCSANACPLVEAADATFLYSFENSGVGDVTGFLAVDNTNKLIVLSFRGSRSIENWITNLNFDLVDINDICSGCRGHDGFTSSWRSVADTLRQAVDDAVAAHPDYKVVVTGHSLGGALATLAGADLRNNGYDVDLYTYGAPRVGNRAFAEFITVQTGGTLYRVTHTNDVVPRLPPRQFGYSHPSPEYWIKSGTLVPVRRRDIVKIEGIDATGGNNQNNAPDIPAHLWYFGAIGTCI

SEQ ID NO: 9656 - protein, 291 aa, Thermomyces lanuginosus
MRSSLVLFFVSAWTALASPIRRDVSADLLNQFKLFAQYSAAAYCGRNNDAPAGTNITCSANACPLVEAADATFLYSFENSGVGDVTGFLAVDNTNKLIVLSFRGSRSIENWITNLNFDLVDINDICSGCRGHDGFTSSWRSVADTLRQAVDDAVAAHPDYKVVVTGHSLGGALATLAGADLRNNGYDVDLYTYGAPRVGNRAFAEFITVQTGGTLYRVTHTNDVVPRLPPRQFGYSHPSPEYWIKSGTGVPVRRRDIVKIEGIDATGGNNQNNAPDIPAHLWYFGAIGTCI

SEQ ID NO: 9657 - protein, 291 aa, Thermomyces lanuginosus
MRSSLVLFFVSAWTALASPIRRDVSADLLNQFKLFAQYSAAAYCGRNNDAPAGTNITCSANACPLVEAADATFLYSFENSGVGDCTGFLAVDNTNKLIVLSFRGSRSIENWITNLNFDLVDINDICSGCRGHDGFTSSWRSVADTLRQAVDDAVAAHPDYKVVVTGHSLGGALATLAGADLRNNGYDVDLYTYGAPRVGNRAFAEFITVQTGGTLYRVTHTNDVVPRLPPRQFGYSHPSPEYWIKSGTLVPVRRRDIVKIEGIDATGGNNQNNAPDIPAHLWYFGAIGTCI

SEQ ID NO: 9658 - protein, 291 aa, Thermomyces lanuginosus
MRSSLVLFFVSAWTALASPIRRDVSADLLNQFKLFAQYSAAAYCGRNNDAPAGTNITCSASACPLVEAADATFLYSFENSGVGDVTGFLAVDNTNKLIVLSFRGSRSIENWITNLNFDLVDINDICSGCRGHDGFTSSWRSVADTLRQAVDDAVAAHPDYKVVVTGHSLGGALATLAGADLRNNGYDVDLYTYGAPRVGNRAFAEFITVQTGGTLYRVTHTNDVVPRLPPRQFGYSHPSPEYWIKSGTLVPVRRRDIVKIEGIDATGGNNQNNAPDIPAHLWYFGAIGTCI

SEQ ID NO: 9659 - protein, 291 aa, Thermomyces lanuginosus
MRSSLVLFFVSAWTALASPIRRDVSADLLNQFKLFAQYSAAAYCGRNNDAPAGTNITCSANACPLVEAADATFLYSFENSGMGDVTGFLAVDNTNKLIVLSFRGSRSIENWITNLNFDLVDINDICSGCRGHDGFTSSWRSVADTLRQAVDDAVAAHPDYKVVVTGHSLGGALATLAGADLRNNGYDVDLYTYGAPRVGNRAFAEFITVQTGGTLYRVTHTNDVVPRLPPRQFGYSHPSPEYWIKSGTLVPVRRRDIVKIEGIDATGGNNQNNAPDIPAHLWYFGAIGTCI

SEQ ID NO: 9660 - protein, 291 aa, Thermomyces lanuginosus
MRSSLVLFFVSAWTALASPIRRDVSADLLNQFKLFAQYSAAAYCGRNNDAPAGTNITCSANACPLVEAADATFLYSFENYGVGDVTGFLAVDNTNKLIVLSFRGSRSIENWITNLNFDLVDINDICSGCRGHDGFTSSWRSVADTLRQAVDDAVAAHPDYKVVVTGHSLGGALATLAGADLRNNGYDVDLYTYGAPRVGNRAFAEFITVQTGGTLYRVTHTNDVVPRLPPRQFGYSHPSPEYWIKSGTLVPVRRRDIVKIEGIDATGGNNQNNAPDIPAHLWYFGAIGTCI

SEQ ID NO: 9661 - protein, 291 aa, Thermomyces lanuginosus
MRSSLVLFFVSAWTALASPIRRDVSADLLNQFKLFAQYSAAAYCGRNNDAPAGTNITCSANACPLVEAADATFLYSFENSGVGDVTGFLAVDNTNKLIVLSFRGSRSIENWITNLNFDLVDINDICSGCRGHDGFESSWRSVADTLRQAVDDAVAAHPDYKVVVTGHSLGGALATLAGADLRNNGYDVDLYTYGAPRVGNRAFAEFITVQTGGTLYRVTHTNDVVPRLPPRQFGYSHPSPEYWIKSGTLVPVRRRDIVKIEGIDATGGNNQNNAPDIPAHLWYFGAIGTCI

SEQ ID NO: 9662 - protein, 291 aa, Thermomyces lanuginosus
MRSSLVLFFVSAWTALASPIRRDVSADLLNQFKLFAQYSAAAYCGRNNDAPAGTNITCSANACPLVEAADAHFLYSFENSGVGDVTGFLAVDNTNKLIVLSFRGSRSIENWITNLNFDLVDINDICSGCRGHDGFTSSWRSVADTLRQAVDDAVAAHPDYKVVVTGHSLGGALATLAGADLRNNGYDVDLYTYGAPRVGNRAFAEFITVQTGGTLYRVTHTNDVVPRLPPRQFGYSHPSPEYWIKSGTLVPVRRRDIVKIEGIDATGGNNQNNAPDIPAHLWYFGAIGTCI

SEQ ID NO: 9663 - protein, 291 aa, Thermomyces lanuginosus
MRSSLVLFFVSAWTALASPIRRDVSADLLNQFKLFAQYSAAAYCGRNNDAPAGTNITCSANACPLVEAADAYFLYSFENSGVGDVTGFLAVDNTNKLIVLSFRGSRSIENWITNLNFDLVDINDICSGCRGHDGFTSSWRSVADTLRQAVDDAVAAHPDYKVVVTGHSLGGALATLAGADLRNNGYDVDLYTYGAPRVGNRAFAEFITVQTGGTLYRVTHTNDVVPRLPPRQFGYSHPSPEYWIKSGTLVPVRRRDIVKIEGIDATGGNNQNNAPDIPAHLWYFGAIGTCI

SEQ ID NO: 9664 - protein, 291 aa, Thermomyces lanuginosus
MRSSLVLFFVSAWTALASPIRRDVSADLLNQFKLFAQYSAAAYCGRNNDAPAGTNITCSANACPLVEAADATFLYSFENSGVGRVTGFLAVDNTNKLIVLSFRGSRSIENWITNLNFDLVDINDICSGCRGHDGFTSSWRSVADTLRQAVDDAVAAHPDYKVVVTGHSLGGALATLAGADLRNNGYDVDLYTYGAPRVGNRAFAEFITVQTGGTLYRVTHTNDVVPRLPPRQFGYSHPSPEYWIKSGTLVPVRRRDIVKIEGIDATGGNNQNNAPDIPAHLWYFGAIGTCI

SEQ ID NO: 9665 - protein, 291 aa, Thermomyces lanuginosus
MRSSLVLFFVSAWTALASPIRRDVSADLLNQFKLFAQYSAAAYCGRNNDAPAGTNITCSANACPLVEAADATFLYSFENSGVGDVTGFLAVDNTNKAIVLSFRGSRSIENWITNLNFDLVDINDICSGCRGHDGFTSSWRSVADTLRQAVDDAVAAHPDYKVVVTGHSLGGALATLAGADLRNNGYDVDLYTYGAPRVGNRAFAEFITVQTGGTLYRVTHTNDVVPRLPPRQFGYSHPSPEYWIKSGTLVPVRRRDIVKIEGIDATGGNNQNNAPDIPAHLWYFGAIGTCI

SEQ ID NO: 9666 - protein, 291 aa, Thermomyces lanuginosus
MRSSLVLFFVSAWTALASPIRRDVSADLLKQFKLFAQYSAAAYCGRNNDAPAGTNITCSANACPLVEAADATFLYSFENSGVGDVTGFLAVDNTNKLIVLSFRGSRSIENWITNLNFDLVDINDICSGCRGHDGFTSSWRSVADTLRQAVDDAVAAHPDYKVVVTGHSLGGALATLAGADLRNNGYDVDLYTYGAPRVGNRAFAEFITVQTGGTLYRVTHTNDVVPRLPPRQFGYSHPSPEYWIKSGTLVPVRRRDIVKIEGIDATGGNNQNNAPDIPAHLWYFGAIGTCI

SEQ ID NO: 9667 - protein, 291 aa, Thermomyces lanuginosus
MRSSLVLFFVSAWTALASPIRRDVSADLLNQFKLFAQYSAAAYCGRNNDAPAGTNITCSANACPLVEAADVTFLYSFENSGVGDVTGFLAVDNTNKLIVLSFRGSRSIENWITNLNFDLVDINDICSGCRGHDGFTSSWRSVADTLRQAVDDAVAAHPDYKVVVTGHSLGGALATLAGADLRNNGYDVDLYTYGAPRVGNRAFAEFITVQTGGTLYRVTHTNDVVPRLPPRQFGYSHPSPEYWIKSGTLVPVRRRDIVKIEGIDATGGNNQNNAPDIPAHLWYFGAIGTCI

SEQ ID NO: 9668 - protein, 291 aa, Thermomyces lanuginosus
MRSSLVLFFVSAWTALASPIRRDVSADLLNQFKLFAQYSAAAYCGRNNDAPAGTNITCSANACPLVEAADATFLYSFENSGVGDVTGFLVVDNTNKLIVLSFRGSRSIENWITNLNFDLVDINDICSGCRGHDGFTSSWRSVADTLRQAVDDAVAAHPDYKVVVTGHSLGGALATLAGADLRNNGYDVDLYTYGAPRVGNRAFAEFITVQTGGTLYRVTHTNDVVPRLPPRQFGYSHPSPEYWIKSGTLVPVRRRDIVKIEGIDATGGNNQNNAPDIPAHLWYFGAIGTCI

SEQ ID NO: 9669 - protein, 291 aa, Thermomyces lanuginosus
MRSSLVLFFVSAWTALASPIRRDVSADLLNQFKLFAQYSAAAYCGRNNDAPAGTNITCSANACPLVEAADAWFLYSFENSGVGDVTGFLAVDNTNKLIVLSFRGSRSIENWITNLNFDLVDINDICSGCRGHDGFTSSWRSVADTLRQAVDDAVAAHPDYKVVVTGHSLGGALATLAGADLRNNGYDVDLYTYGAPRVGNRAFAEFITVQTGGTLYRVTHTNDVVPRLPPRQFGYSHPSPEYWIKSGTLVPVRRRDIVKIEGIDATGGNNQNNAPDIPAHLWYFGAIGTCI

SEQ ID NO: 9670 - protein, 291 aa, Thermomyces lanuginosus
MRSSLVLFFVSAWTALASPIRRDVSADLLNQFKLFAQYSAAAYCGRNWDAPAGTNITCSANACPLVEAADATFLYSFENSGVGDVTGFLAVDNTNKLIVLSFRGSRSIENWITNLNFDLVDINDICSGCRGHDGFTSSWRSVADTLRQAVDDAVAAHPDYKVVVTGHSLGGALATLAGADLRNNGYDVDLYTYGAPRVGNRAFAEFITVQTGGTLYRVTHTNDVVPRLPPRQFGYSHPSPEYWIKSGTLVPVRRRDIVKIEGIDATGGNNQNNAPDIPAHLWYFGAIGTCI

SEQ ID NO: 9671 - protein, 291 aa, Thermomyces lanuginosus
MRSSLVLFFVSAWTALASPIRRDVSADLLNQFKLFAQYSAAAYCGRNNDAPAGTNITCSANACPLVEAADATFLYSFENSGVGDVTGFLAVDNTNKLIVLSFRGSRSIENWITNLNFDLVDINDICSGCRGHDGFTSSWRSVADTLRQAVDDAVAAHPDYKVVVTGHSLGGALATLAGADLRNNGYDVDLYTYGAPRVGNRAFAEFITVQTGGTLYRVTHTNDVVPRLPPRQFGYSHPSPEYWIKSGTAVPVRRRDIVKIEGIDATGGNNQNNTPDIPAHLWYFGAIGTCI

SEQ ID NO: 9672 - protein, 291 aa, Thermomyces lanuginosus
MRSSLVLFFVSAWTALASPIRRDVSADLLNQFKLFAQYSAAAYCGRNNDAPAGTNITCSANACPLVEAADATFLYSFENSGVGDSTGFLAVDNTNKLIVLSFRGSRSIENWITNLNFDLVDINDICSGCRGHDGFTSSWRSVADTLRQAVDDAVAAHPDYKVVVTGHSLGGALATLAGADLRNNGYDVDLYTYGAPRVGNRAFAEFITVQTGGTLYRVTHTNDVVPRLPPRQFGYSHPSPEYWIKSGTLVPVRRRDIVKIEGIDATGGNNQNNAPDIPAHLWYFGAIGTCI

SEQ ID NO: 9673 - protein, 291 aa, Thermomyces lanuginosus
MRSSLVLFFVSAWTALASPIRRDVSADLLNQFKLFAQYSAAAYCGRNKDAPAGTNITCSANACPLVEAADATFLYSFENSGVGDVTGFLAVDNTNKLIVLSFRGSRSIENWITNLNFDLVDINDICSGCRGHDGFTSSWRSVADTLRQAVDDAVAAHPDYKVVVTGHSLGGALATLAGADLRNNGYDVDLYTYGAPRVGNRAFAEFITVQTGGTLYRVTHTNDVVPRLPPRQFGYSHPSPEYWIKSGTLVPVRRRDIVKIEGIDATGGNNQNNAPDIPAHLWYFGAIGTCI

SEQ ID NO: 9674 - protein, 291 aa, Thermomyces lanuginosus
MRSSLVLFFVSAWTALASPIRRDVSADLLNQFKLFAQYSAAAYCGRNNDAPAGTFITCSANACPLVEAADATFLYSFENSGVGDVTGFLAVDNTNKLIVLSFRGSRSIENWITNLNFDLVDINDICSGCRGHDGFTSSWRSVADTLRQAVDDAVAAHPDYKVVVTGHSLGGALATLAGADLRNNGYDVDLYTYGAPRVGNRAFAEFITVQTGGTLYRVTHTNDVVPRLPPRQFGYSHPSPEYWIKSGTLVPVRRRDIVKIEGIDATGGNNQNNAPDIPAHLWYFGAIGTCI

SEQ ID NO: 9675 - protein, 291 aa, Thermomyces lanuginosus
MRSSLVLFFVSAWTALASPIRRDVSADLLNQFKLFAQYSAAAYCGRNNDAPAGTNITCSANACPLVEAADATFLYSFENSGGGDVTGFLAVDNTNKLIVLSFRGSRSIENWITNLNFDLVDINDICSGCRGHDGFTSSWRSVADTLRQAVDDAVAAHPDYKVVVTGHSLGGALATLAGADLRNNGYDVDLYTYGAPRVGNRAFAEFITVQTGGTLYRVTHTNDVVPRLPPRQFGYSHPSPEYWIKSGTLVPVRRRDIVKIEGIDATGGNNQNNAPDIPAHLWYFGAIGTCI

SEQ ID NO: 9676 - protein, 291 aa, Thermomyces lanuginosus
MRSSLVLFFVSAWTALASPIRRDVSADLLNQFKLFAQYSAAAYCGRNNDAPAGTNITCSANACPLVEAADATFLYSFENSGVGDVTGFLAVDNNNSLIVLSFRGSRSIENWITNLNFDLVDINDICSGCRGHDGFTSSWRSVADTLRQAVDDAVAAHPDYKVVVTGHSLGGALATLAGADLRNNGYDVDLYTYGAPRVGNRAFAEFITVQTGGTLYRVTHTNDVVPRLPPRQFGYSHPSPEYWIKSGTLVPVRRRDIVKIEGIDATGGNNQNNTPDIPAHLWYFGLIGTCI

SEQ ID NO: 9677 - protein, 291 aa, Thermomyces lanuginosus
MRSSLVLFFVSAWTALASPIRRDVSADLLNQFKLFAQYSAAAYCGRNNDAPAGTNITCSANACPLVEAADATFLYSFENSGVGDVTGKLAVDNTNKLIVLSFRGSRSIENWITNLNFDLVDINDICSGCRGHDGFTSSWRSVADTLRQAVDDAVAAHPDYKVVVTGHSLGGALATLAGADLRNNGYDVDLYTYGAPRVGNRAFAEFITVQTGGTLYRVTHTNDVVPRLPPRQFGYSHPSPEYWIKSGTLVPVRRRDIVKIEGIDATGGNNQNNAPDIPAHLWYFGAIGTCI

SEQ ID NO: 9678 - protein, 291 aa, Thermomyces lanuginosus
MRSSLVLFFVSAWTALASPIRRDVSADLLNQFKLFAQYSAAAYCGRNNDAPAGTNITCSANACPLVEAADATFLYCFENSGVGDVTGFLAVDNTNKLIVLSFRGSRSIENWITNLNFDLVDINDICSGCRGHDGFTSSWRSVADTLRQAVDDAVAAHPDYKVVVTGHSLGGALATLAGADLRNNGYDVDLYTYGAPRVGNRAFAEFITVQTGGTLYRVTHTNDVVPRLPPRQFGYSHPSPEYWIKSGTLVPVRRRDIVKIEGIDATGGNNQNNAPDIPAHLWYFGAIGTCI

SEQ ID NO: 9679 - protein, 291 aa, Thermomyces lanuginosus
MRSSLVLFFVSAWTALASPIRRDVSADLLNQFKLFAQYSAAAYCGRNNDAPAGTNITCSANACPLVEAADANFLYSFENSGVGDVTGFLAVDNTNKLIVLSFRGSRSIENWITNLNFDLVDINDICSGCRGHDGFTSSWRSVADTLRQAVDDAVAAHPDYKVVVTGHSLGGALATLAGADLRNNGYDVDLYTYGAPRVGNRAFAEFITVQTGGTLYRVTHTNDVVPRLPPRQFGYSHPSPEYWIKSGTLVPVRRRDIVKIEGIDATGGNNQNNAPDIPAHLWYFGAIGTCI

SEQ ID NO: 9680 - protein, 291 aa, Thermomyces lanuginosus
MRSSLVLFFVSAWTALASPIRRDVSADLLNQFKLFAQYSAAAYCGRNNDAPAGTNITCSANACPLVEAADATFLYSFENSGVGDETGFLAVDNTNKLIVLSFRGSRSIENWITNLNFDLVDINDICSGCRGHDGFTSSWRSVADTLRQAVDDAVAAHPDYKVVVTGHSLGGALATLAGADLRNNGYDVDLYTYGAPRVGNRAFAEFITVQTGGTLYRVTHTNDVVPRLPPRQFGYSHPSPEYWIKSGTLVPVRRRDIVKIEGIDATGGNNQNNAPDIPAHLWYFGAIGTCI

SEQ ID NO: 9681 - protein, 291 aa, Thermomyces lanuginosus
MRSSLVLFFVSAWTALASPIRRDVSADLLNQFKLFAQYSAAAYCGRNNDAPAGTNITCSANACPLVEAADQTFLYSFENSGVGDVTGFLAVDNTNKLIVLSFRGSRSIENWITNLNFDLVDINDICSGCRGHDGFTSSWRSVADTLRQAVDDAVAAHPDYKVVVTGHSLGGALATLAGADLRNNGYDVDLYTYGAPRVGNRAFAEFITVQTGGTLYRVTHTNDVVPRLPPRQFGYSHPSPEYWIKSGTLVPVRRRDIVKIEGIDATGGNNQNNAPDIPAHLWYFGAIGTCI

SEQ ID NO: 9682 - protein, 291 aa, Thermomyces lanuginosus
MRSSLVLFFVSAWTALASPIRRDVSADLLNQFKLFAQYSAAAYCGRNNDAPAGTNITCSANACPLVEAADATFLYSFENSGTGDVTGFLAVDNTNKLIVLSFRGSRSIENWITNLNFDLVDINDICSGCRGHDGFTSSWRSVADTLRQAVDDAVAAHPDYKVVVTGHSLGGALATLAGADLRNNGYDVDLYTYGAPRVGNRAFAEFITVQTGGTLYRVTHTNDVVPRLPPRQFGYSHPSPEYWIKSGTLVPVRRRDIVKIEGIDATGGNNQNNAPDIPAHLWYFGAIGTCI

SEQ ID NO: 9683 - protein, 291 aa, Thermomyces lanuginosus
MRSSLVLFFVSAWTALASPIRRDVSRDLLNQFKLFAQYSAAAYCGRNNDAPAGTNITCSANACPLVEAADATFLYSFENSGMGDVTGFLAVDNTNKLIVLSFRGSRSIENWITNLNFDLVDINDICSGCRGHDGFTSSWRSVADTLRQAVDDAVAAHPDYKVVVTGHSLGGALATLAGADLRNNGYDVDLYTYGAPRVGNRAFAEFITVQTGGTLYRVTHTNDVVPRLPPRQFGYSHPSPEYWIKSGTGVPVRRRDIVKIEGIDATGGNNQNNTPDIPAHLWYFGLIGTCI

SEQ ID NO: 9684 - protein, 291 aa, Thermomyces lanuginosus
MRSSLVLFFVSAWTALASPIRRDVSADLLNQFKLFAQYSAAAYCGRNNDAPAGTVITCSANACPLVEAADATFLYSFENSGVGDVTGFLAVDNTNKLIVLSFRGSRSIENWITNLNFDLVDINDICSGCRGHDGFTSSWRSVADTLRQAVDDAVAAHPDYKVVVTGHSLGGALATLAGADLRNNGYDVDLYTYGAPRVGNRAFAEFITVQTGGTLYRVTHTNDVVPRLPPRQFGYSHPSPEYWIKSGTLVPVRRRDIVKIEGIDATGGNNQNNAPDIPAHLWYFGAIGTCI

SEQ ID NO: 9685 - protein, 291 aa, Thermomyces lanuginosus
MRSSLVLFFVSAWTALASPIRRDVSADLLNQFKLFAQYSAAAYCGRNNEAPAGTNITCSANACPLVEAADATFLYSFENSGVGDVTGFLAVDNTNKLIVLSFRGSRSIENWITNLNFDLVDINDICSGCRGHDGFTSSWRSVADTLRQAVDDAVAAHPDYKVVVTGHSLGGALATLAGADLRNNGYDVDLYTYGAPRVGNRAFAEFITVQTGGTLYRVTHTNDVVPRLPPRQFGYSHPSPEYWIKSGTLVPVRRRDIVKIEGIDATGGNNQNNAPDIPAHLWYFGAIGTCI

SEQ ID NO: 9686 - protein, 291 aa, Thermomyces lanuginosus
MRSSLVLFFVSAWTALASPIRRDVSADLLNQFKLFAQYSAAAYCGRNNDAPAGTNITCSANACPLVEAADATFLYSFENSGVGDVTGFLAVDNTNKLIVLSFRGSRSIENWIADLNFLLQDINDICSGCRGHDGFTSSWRSVADTLRQAVDDAVAAHPDYKVVVTGHSLGGALATLAGADLRNNGYDVDLYTYGAPRVGNRAFAEFITVQTGGTLYRVTHTNDVVPRLPPRQFGYSHPSPEYWIKSGTLVPVRRRDIVKIEGIDATGGNNQNNTPDIPAHLWYFGLIGTCI

SEQ ID NO: 9687 - protein, 291 aa, Thermomyces lanuginosus
MRSSLVLFFVSAWTALASPIRRDVSADLLNQFKLFAQYSAAAYCGRNNDAPAGTNITCSANACPLVEAADATFLYSFENSGVGDVTGFLAVDNTNKLIVLSFRGSRSIKNWITNLNYDLVDINDICSGCRGHDGFTSSWRSVADTLRQAVDDAVAAHPDYKVVVTGHSLGGALATLAGADLRNNGYDVDLYTYGAPRVGNRAFAEFITVQTGGTLYRVTHTNDVVPRLPPRQFGYSHPSPEYWIKSGTLVPVRRRDIVKIEGIDATGGNNQNNTPDIPAHLWYFGLIGTCI

SEQ ID NO: 9688 - protein, 291 aa, Thermomyces lanuginosus
MRSSLVLFFVSAWTALASPIRRDVSADLLNQFKLFAQYSAAAYCGRNNDAPAGTNITCSANACPLVEAADATFLYSFENSGVADVTGFLAVDNTNKLIVLSFRGSRSIENWITNLNFDLVDINDICSGCRGHDGFTSSWRSVADTLRQAVDDAVAAHPDYKVVVTGHSLGGALATLAGADLRNNGYDVDLYTYGAPRVGNRAFAEFITVQTGGTLYRVTHTNDVVPRLPPRQFGYSHPSPEYWIKSGTLVPVRRRDIVKIEGIDATGGNNQNNAPDIPAHLWYFGAIGTCI

SEQ ID NO: 9689 - protein, 291 aa, Thermomyces lanuginosus
MRSSLVLFFVSAWTALASPIRRDVSADLLNQFKLFAQYSAAAYCGRNNDAPAGTNITCSANACPLVEAADATFLYSFENSGVGDVTGFYAVDNTNKLIVLSFRGSRSIENWITNLNFDLVDINDICSGCRGHDGFTSSWRSVADTLRQAVDDAVAAHPDYKVVVTGHSLGGALATLAGADLRNNGYDVDLYTYGAPRVGNRAFAEFITVQTGGTLYRVTHTNDVVPRLPPRQFGYSHPSPEYWIKSGTLVPVRRRDIVKIEGIDATGGNNQNNAPDIPAHLWYFGAIGTCI

SEQ ID NO: 9690 - protein, 291 aa, Thermomyces lanuginosus
MRSSLVLFFVSAWTALASPIRRDVSADLLNQFKLFAQYSAAAYCGRNNDAPAGTNITCSANACPLVEAADSTFLYSFENSGVGDVTGFLAVDNTNKLIVLSFRGSRSIENWITNLNFDLVDINDICSGCRGHDGFTSSWRSVADTLRQAVDDAVAAHPDYKVVVTGHSLGGALATLAGADLRNNGYDVDLYTYGAPRVGNRAFAEFITVQTGGTLYRVTHTNDVVPRLPPRQFGYSHPSPEYWIKSGTLVPVRRRDIVKIEGIDATGGNNQNNAPDIPAHLWYFGAIGTCI

SEQ ID NO: 9691 - protein, 291 aa, Thermomyces lanuginosus
MRSSLVLFFVSAWTALASPIRRDVSADLLNQFKLFAQYSAAAYCGRNNDAPAGTNITCSANACPLVEAADATFLYRFENSGVGDVTGFLAVDNTNKLIVLSFRGSRSIENWITNLNFDLVDINDICSGCRGHDGFTSSWRSVADTLRQAVDDAVAAHPDYKVVVTGHSLGGALATLAGADLRNNGYDVDLYTYGAPRVGNRAFAEFITVQTGGTLYRVTHTNDVVPRLPPRQFGYSHPSPEYWIKSGTLVPVRRRDIVKIEGIDATGGNNQNNAPDIPAHLWYFGAIGTCI

SEQ ID NO: 9692 - protein, 291 aa, Thermomyces lanuginosus
MRSSLVLFFVSAWTALASPIRRDVSADLLNQFKLFAQYSAAAYCGRNNDAPAGTNITCSANACPLVEAADATFLYSFENSGVGDVTGFLAVDNTNKLIVLSFRGSRSIENWITNLNFDLVDINDICSGCRGHDGFTSSWRSVADTLRQAVDDAVAAHPDYKVVVTGHSLGGALATLAAADLRNNGYDVDLYTYGAPRVGNRAFAEFITVQTGGTLYRVTHTNDVVPRLPPRQFGYSHPSPEYWIKSGTLVPVRRRDIVKIEGIDATGGNNQNNAPDIPAHLWYFGAIGTCI

SEQ ID NO: 9693 - protein, 291 aa, Thermomyces lanuginosus
MRSSLVLFFVSAWTALASPIRRDVSADLLNQFKLFAQYSAAAYCGRNADAPAGTNITCSANACPLVEAADATFLYSFENSGVGDVTGFLAVDNTNKLIVLSFRGSRSIENWITNLNFDLVDINDICSGCRGHDGFTSSWRSVADTLRQAVDDAVAAHPDYKVVVTGHSLGGALATLAGADLRNNGYDVDLYTYGAPRVGNRAFAEFITVQTGGTLYRVTHTNDVVPRLPPRQFGYSHPSPEYWIKSGTLVPVRRRDIVKIEGIDATGGNNQNNAPDIPAHLWYFGAIGTCI

SEQ ID NO: 9694 - protein, 291 aa, Thermomyces lanuginosus
MRSSLVLFFVSAWTALASPIRRDVSADLLNQFKLFAQYSAAAYCGRNNDAPAGTNITCSANACPLVEAADATFLYSFENSGVGDVTAFLAVDNTNKLIVLSFRGSRSIENWITNLNFDLVDINDICSGCRGHDGFTSSWRSVADTLRQAVDDAVAAHPDYKVVVTGHSLGGALATLAGADLRNNGYDVDLYTYGAPRVGNRAFAEFITVQTGGTLYRVTHTNDVVPRLPPRQFGYSHPSPEYWIKSGTLVPVRRRDIVKIEGIDATGGNNQNNAPDIPAHLWYFGAIGTCI

SEQ ID NO: 9695 - protein, 291 aa, Thermomyces lanuginosus
MRSSLVLFFVSAWTALASPIRRDVSKDLLNQFKLFAQYSAAAYCGRNNDAPAGTNITCSANACPLVEAADATFLYSFENSGVGDVTGFLAVDNTNKLIVLSFRGSRSIENWITNLNFDLVDINDICSGCRGHDGFTSSWRSVADTLRQAVDDAVAAHPDYKVVVTGHSLGGALATLAGADLRNNGYDVDLYTYGAPRVGNRAFAEFITVQTGGTLYRVTHTNDVVPRLPPRQFGYSHPSPEYWIKSGTLVPVRVRDIVKIEGIDATGGNNQNNAPDIPAHLWYFGAIGTCI

SEQ ID NO: 9696 - protein, 291 aa, Thermomyces lanuginosus
MRSSLVLFFVSAWTALASPIRRDVSADLLNQFKLFAQYSAAAYCGRNNDAPAGTNITCSANNCPLVEAADATFLYSFENSGVGDVTGFLAVDNTNKLIVLSFRGSRSIENWITNLNFDLVDINDICSGCRGHDGFTSSWRSVADTLRQAVDDAVAAHPDYKVVVTGHSLGGALATLAGADLRNNGYDVDLYTYGAPRVGNRAFAEFITVQTGGTLYRVTHTNDVVPRLPPRQFGYSHPSPEYWIKSGTLVPVRRRDIVKIEGIDATGGNNQNNAPDIPAHLWYFGAIGTCI

SEQ ID NO: 9697 - protein, 291 aa, Thermomyces lanuginosus
MRSSLVLFFVSAWTALASPIRRDVSADLLNQFKLFAQYSAAAYCGRNNDAPAGTNITCSANACPLVEAADATFLYSFENSGVGDVTGFLAVDNINKLIVLSFRGSRSIENWITNLNFDLVDINDICSGCRGHDGFTSSWRSVADTLRQAVDDAVAAHPDYKVVVTGHSLGGALATLAGADLRNNGYDVDLYTYGAPRVGNRAFAEFITVQTGGTLYRVTHTNDVVPRLPPRQFGYSHPSPEYWIKSGTLVPVRRRDIVKIEGIDATGGNNQNNAPDIPAHLWYFGAIGTCI

SEQ ID NO: 9698 - protein, 291 aa, Thermomyces lanuginosus
MRSSLVLFFVSAWTALASPIRRDVSADLLNQFKLFAQYSAAAYCGRNNDAPAGTNITCSANACPLVEAADATFLYSFENSGWGDVTGFLAVDNTNKLIVLSFRGSRSIENWITNLNFDLVDINDICSGCRGHDGFTSSWRSVADTLRQAVDDAVAAHPDYKVVVTGHSLGGALATLAGADLRNNGYDVDLYTYGAPRVGNRAFAEFITVQTGGTLYRVTHTNDVVPRLPPRQFGYSHPSPEYWIKSGTLVPVRRRDIVKIEGIDATGGNNQNNAPDIPAHLWYFGAIGTCI

SEQ ID NO: 9699 - protein, 291 aa, Thermomyces lanuginosus
MRSSLVLFFVSAWTALASPIRRDVSADLLNQFKLFAQYSAAAYCGRNNDAPAGTNITCSANACPLVEAADATHLYSFENSGVGDVTGFLAVDNTNKLIVLSFRGSRSIENWITNLNFDLVDINDICSGCRGHDGFTSSWRSVADTLRQAVDDAVAAHPDYKVVVTGHSLGGALATLAGADLRNNGYDVDLYTYGAPRVGNRAFAEFITVQTGGTLYRVTHTNDVVPRLPPRQFGYSHPSPEYWIKSGTLVPVRRRDIVKIEGIDATGGNNQNNAPDIPAHLWYFGAIGTCI

SEQ ID NO: 9700 - protein, 291 aa, Thermomyces lanuginosus
MRSSLVLFFVSAWTALASPIRRDVSADLLNQFKLFAQYSAAAYCGRNNDAPAGTNITCSANACPLVEARDATFLYSFENSGVGDVTGFLAVDNTNKLIVLSFRGSRSIENWITNLNFDLVDINDICSGCRGHDGFTSSWRSVADTLRQAVDDAVAAHPDYKVVVTGHSLGGALATLAGADLRNNGYDVDLYTYGAPRVGNRAFAEFITVQTGGTLYRVTHTNDVVPRLPPRQFGYSHPSPEYWIKSGTLVPVRRRDIVKIEGIDATGGNNQNNAPDIPAHLWYFGAIGTCI

SEQ ID NO: 9701 - protein, 291 aa, Thermomyces lanuginosus
MRSSLVLFFVSAWTALASPIRRDVSARLLNQFKLFAQYSAAAYCGRNNDAPAGTNITCSANACPLVEAADATFLYSFENSGVGDVTGFLAVDNTNKLIVLSFRGSRSIENWITNLNFDLVDINDICSGCRGHDGFTSSWRSVADTLRQAVDDAVAAHPDYKVVVTGHSLGGALATLAGADLRNNGYDVDLYTYGAPRVGNRAFAEFITVQTGGTLYRVTHTNDVVPRLPPRQFGYSHPSPEYWIKSGTLVPVRRRDIVKIEGIDATGGNNQNNAPDIPAHLWYFGAIGTCI

SEQ ID NO: 9702 - protein, 291 aa, Thermomyces lanuginosus
MRSSLVLFFVSAWTALASPIRRDVSADLLNQFKLFAQYSAAAYCGRNNDAPAGTNITCSANACPLVEAADATFLYSFENSGVGDVTGFLAVDNTNKLIVLSFRGSRSIENWITNLNFDLVDINDICSGCRGHDGFTSSWRSVANTSRQAVDDAVAAHPDYKVVVTGHSLGGALATLAGADLRNNGYDVDLYTYGAPRVGNRAFAEFITVQTGGTLYRVTHTNDVVPRLPPRQFGYSHPSPEYWIKSGTLVPVRRRDIVKIEGIDATGGNNQNNTPDIPAHLWYFGLIGTCI

SEQ ID NO: 9703 - protein, 291 aa, Thermomyces lanuginosus
MRSSLVLFFVSAWTALASPIRRDVSADLLNQFKLFAQYSAAAYCGRNNDAPAGTNITCSANHCPLVEAADATFLYSFENSGVGDVTGFLAVDNTNKLIVLSFRGSRSIENWITNLNFDLVDINDICSGCRGHDGFTSSWRSVADTLRQAVDDAVAAHPDYKVVVTGHSLGGALATLAGADLRNNGYDVDLYTYGAPRVGNRAFAEFITVQTGGTLYRVTHTNDVVPRLPPRQFGYSHPSPEYWIKSGTLVPVRRRDIVKIEGIDATGGNNQNNAPDIPAHLWYFGAIGTCI

SEQ ID NO: 9704 - protein, 291 aa, Thermomyces lanuginosus
MRSSLVLFFVSAWTALASPIRRDVSADLLNQFKLFAQYSAAAYCGRNNDAPAGTNITCSANACPLVEAADATFLYSFENSGVGDVTGFLAVDNTNKLIVLSFRGSRSIENWIANLNFDLVDINDICSGCRGHDGFTSSWRSVADTLRQAVDDAVAAHPDYKVVVTGHSLGGALATLAGADLRNNGYDVDLYTYGAPRVGNRAFAEFITVQTGGTLYRVTHTNDVVPRLPPRQFGYSHPSPEYWIKSGTLLPVRRRDIVKIEGIDATGGNNQNNAPDIPAHLWYFGSIGTCI

SEQ ID NO: 9705 - protein, 291 aa, Thermomyces lanuginosus
MRSSLVLFFVSAWTALASPIRRDVSADLLNQFKLFAQYSAAAYCGRNNDAPAGTNITCSANACPLVEAADATYLYSFENSGVGDVTGFLAVDNTNKLIVLSFRGSRSIENWITNLNFDLVDINDICSGCRGHDGFTSSWRSVADTLRQAVDDAVAAHPDYKVVVTGHSLGGALATLAGADLRNNGYDVDLYTYGAPRVGNRAFAEFITVQTGGTLYRVTHTNDVVPRLPPRQFGYSHPSPEYWIKSGTLVPVRRRDIVKIEGIDATGGNNQNNAPDIPAHLWYFGAIGTCI

SEQ ID NO: 9706 - protein, 291 aa, Thermomyces lanuginosus
MRSSLVLFFVSAWTALASPIRRDVSRDLLNQFKLFAQYSAAAYCGRNNDAPAGTNITCSANACPLVEAADATFLYSFENSGVGDVTGFLAVDNTNKLIVLSFRGSRSIENWITNLNFDLVDINDICSGCRGHDGFTSSWRSVADTLRQAVDDAVAAHPDYKVVVTGHSLGGALATLAGADLRNNGYDVDLYTYGAPRVGNRAFAEFITVQTGGTLYRVTHTNDVVPRLPPRQFGYSHPSPEYWIKSGTAVPVRRRDIVKIEGIDATGGNNQNNTPDIPAHLWYFGAIGTCI

SEQ ID NO: 9707 - protein, 291 aa, Thermomyces lanuginosus
MRSSLVLFFVSAWTALASPIRRDVSADLLNQFKLFAQYSAAAYCGRNNDAPAGTNITCSANACPLVEAADATFLYSFENSGVGDVTGFLAVDNTNKLIVLSFRGSRSIENWITNLNFDLVDINDICSGCRGHDGFTSSWRSVADTLRQAVDDAVAAHPDYKVVVTGHSLGGALATLAGADLRNNGYDVDLYTYGAPRVGNRAFAEFITVQTGGTLYRVTHTNDVVPRLPPRQFGYSHPSPEYWIKSGTLVPVRRRDIVKCEGIDATGCNNQNNTPDIPAHLWYFGLIGTCI

SEQ ID NO: 9708 - protein, 291 aa, Thermomyces lanuginosus
MRSSLVLFFVSAWTALASPIRRGVSADLLNQFKLFAQYSAAAYCGRNNDAPAGTNITCSANACPLVEAADATFLYSFENSGVGDVTGFLAVDNTNKLIVLSFRGSRSIENWITNLNFDLVDINDICSGCRGHDGFTSSWRSVADTLRQAVDDAVAAHPDYKVVVTGHSLGGALATLAGADLRNNGYDVDLYTYGAPRVGNRAFAEFITVQTGGTLYRVTHTNDVVPRLPPRQFGYSHPSPEYWIKSGTLVPVRRRDIVKIEGIDATGGNNQNNAPDITAHLWYFGAIGTCI

SEQ ID NO: 9709 - protein, 291 aa, Thermomyces lanuginosus
MRSSLVLFFVSAWTALASPIRRDVSADLLNQFKLFAQYSAAAYCGRNNDAPAGTNITCSANACPLVEAADATGLYSFENSGVGDVTGFLAVDNTNKLIVLSFRGSRSIENWITNLNFDLVDINDICSGCRGHDGFTSSWRSVADTLRQAVDDAVAAHPDYKVVVTGHSLGGALATLAGADLRNNGYDVDLYTYGAPRVGNRAFAEFITVQTGGTLYRVTHTNDVVPRLPPRQFGYSHPSPEYWIKSGTLVPVRRRDIVKIEGIDATGGNNQNNAPDIPAHLWYFGAIGTCI

SEQ ID NO: 9710 - protein, 291 aa, Thermomyces lanuginosus
MRSSLVLFFVSAWTALASPIRRDVSADLLNQFKLFAMYSAAAYCGRNNDAPAGTNITCSANACPLVEAADATFLYSFENSGVGDVTGFLAVDNTNKLIVLSFRGSRSIENWITNLNFDLVDINDICSGCRGHDGFTSSWRSVADTLRQAVDDAVAAHPDYKVVVTGHSLGGALATLAGADLRNNGYDVDLYTYGAPRVGNRAFAEFITVQTGGTLYRVTHTNDVVPRLPPRQFGYSHPSPEYWIKSGTLVPVRRRDIVKIEGIDATGGNNQNNAPDIPAHLWYFGAIGTCI

SEQ ID NO: 9711 - protein, 274 aa, Thermomyces lanuginosus
SPIRRDVSADLLNQFKLFAQYSAAAYCGRNNDAPAGTNITCSANACPLVEAADATFLYSFENSGVGDVTGFLAVDDTNKLIVLSFRGSRSIENWITNLNFDLVDINDICSGCRGHDGFTSSWRSVADTLRQAVDDAVAAHPDYKVVVTGHSLGGALATLAGADLRNNGYDVDLYTYGAPRVGNRAFAEFITVQTGGTLYRVTHTNDVVPRLPPRQFGYSHPSPEYWIKSGTLVPVRRRDIVKIEGIDATGGNNQNNAPDIPAHLWYFGAIGTCI

SEQ ID NO: 9712 - protein, 274 aa, Thermomyces lanuginosus
SPIRRDVSADLLRQFKLFAQYSAAAYCGRNNDAPAGTNITCSANACPLVEAADATFLYSFENSGVGDVTGFLAVDNTNKLIVLSFRGSRSIENWITNLNFDLVDINDICSGCRGHDGFTSSWRSVADTLRQAVDDAVAAHPDYKVVVTGHSLGGALATLAGADLRNNGYDVDLYTYGAPRVGNRAFAEFITVQTGGTLYRVTHTNDVVPRLPPRQFGYSHPSPEYWIKSGTLVPVRRRDIVKIEGIDATGGNNQNNAPDIPAHLWYFGAIGTCI

SEQ ID NO: 9713 - protein, 274 aa, Thermomyces lanuginosus
SPIRRDVSADLLNQFKLFAQYSAAAYCGRNNDAPAGTNITCSANACPLVEAADATFLYSFENSGVGRVTGFLAVDNTNKLIVLSFRGSRSIENWITNLNFDLVDINDICSGCRGHDGFTSSWRSVADTLRQAVDDAVAAHPDYKVVVTGHSLGGALATLAGADLRNNGYDVDLYTYGAPRVGNRAFAEFITVQTGGTLYRVTHTNDVVPRLPPRQFGYSHPSPEYWIKSGTLVPVRRRDIVKIEGIDATGGNNQNNAPDIPAHLWYFGAIGTCI

SEQ ID NO: 9714 - protein, 274 aa, Thermomyces lanuginosus
SPIRRDVSADLLNQFKLFAQYSAAAYCGRNNDAPAGTNITCSANACPLVNASDATFLYSFENSGVGDVTGFLAVDNTNKLIVLSFRGSRSIENWITNLNFDLVDINDICSGCRGHDGFTSSWRSVADTLRQAVDDAVAAHPDYKVVVTGHSLGGALATLAGADLRNNGYDVDLYTYGAPRVGNRAFAEFITVQTGGTLYRVTHTNDVVPRLPPRQFGYSHPSPEYWIKSGTLVPVRRRDIVKIEGIDATGGNNQNNTPDIPAHLWYFGLIGTCI

SEQ ID NO: 9715 - protein, 274 aa, Thermomyces lanuginosus
SPIRRDVSADLLNQFKLFAQYSAAAYCGRNNDAPAGTNITCSANACPLVEAADATFLYSFENSGVGDVTGFLVVDNTNKLIVLSFRGSRSIENWITNLNFDLVDINDICSGCRGHDGFTSSWRSVADTLRQAVDDAVAAHPDYKVVVTGHSLGGALATLAGADLRNNGYDVDLYTYGAPRVGNRAFAEFITVQTGGTLYRVTHTNDVVPRLPPRQFGYSHPSPEYWIKSGTLVPVRRRDIVKIEGIDATGGNNQNNAPDIPAHLWYFGAIGTCI

SEQ ID NO: 9716 - protein, 274 aa, Thermomyces lanuginosus
SPIRRDVSADLLNQFKLFAQYSAAAYCGRNNDAPAGTNITCSANACPLVEAADATFLYSFENSGVGDVTGFLAVDNTNKLIVLSFRGSRSIENWITNLNFDLVDINDICSGCRGHDGFTSSWRSVADTLRQAVDDAVAAHPDYKVVVTGHSLGGALATLAGADLRNNGYNVSLYTYGAPRVGNRAFAEFITVQTGGTLYRVTHTNDVVPRLPPRQFGYSHPSPEYWIKSGTLVPVRRRDIVKIEGIDATGGNNQNNTPDIPAHLWYFGLIGTCI

SEQ ID NO: 9717 - protein, 274 aa, Thermomyces lanuginosus
SPIRRGVSADLLNQFKLFAQYSAAAYCGRNNDAPAGTNITCSANACPLVEAADATFLYSFENSGVGDVTGFLAVDNTNKLIVLSFRGSRSIENWITNLNFDLVDINDICSGCRGHDGFTSSWRSVADTLRQAVDDAVAAHPDYKVVVTGHSLGGALATLAGADLRNNGYDVDLYTYGAPRVGNRAFAEFITVQTGGTLYRVTHTNDVVPRLPPRQFGYSHPSPEYWIKSGTLVPVRRRDIVKIEGIDATGGNNQNNAPDITAHLWYFGAIGTCI

SEQ ID NO: 9718 - protein, 274 aa, Thermomyces lanuginosus
SPIRRDVSADLLNQFKLFAQYSAAAYCGRNNDAPAGTNITCSANACPLVEAADATPLYSFENSGVGDVTGFLAVDNTNKLIVLSFRGSRSIENWITNLNFDLVDINDICSGCRGHDGFTSSWRSVADTLRQAVDDAVAAHPDYKVVVTGHSLGGALATLAGADLRNNGYDVDLYTYGAPRVGNRAFAEFITVQTGGTLYRVTHTNDVVPRLPPRQFGYSHPSPEYWIKSGTLVPVRRRDIVKIEGIDATGGNNQNNAPDIPAHLWYFGAIGTCI

SEQ ID NO: 9719 - protein, 274 aa, Thermomyces lanuginosus
SPIRRDVSADLLNQFKLFAQYSAAAYCGRNNDAPAGTNITCSANACPLVEAADATFLYSFENSGGGDVTGFLAVDNTNKLIVLSFRGSRSIENWITNLNFDLVDINDICSGCRGHDGFTSSWRSVADTLRQAVDDAVAAHPDYKVVVTGHSLGGALATLAGADLRNNGYDVDLYTYGAPRVGNRAFAEFITVQTGGTLYRVTHTNDVVPRLPPRQFGYSHPSPEYWIKSGTLVPVRRRDIVKIEGIDATGGNNQNNAPDIPAHLWYFGAIGTCI

SEQ ID NO: 9720 - protein, 274 aa, Thermomyces lanuginosus
SPIRRDVSRDLLNQFKLFAQYSAAAYCGRNNDAPAGTNITCSANACPLVEAADATFLYSFENSGVGDVTGFLAVDNTNKLIVLSFRGSRSIENWITNLNFDLVDINDICSGCRGHDGFTSSWRSVADTLRQAVDDAVAAHPDYKVVVTGHSLGGALATLAGADLRNNGYDVDLYTYGAPRVGNRAFAEFITVQTGGTLYRVTHTNDVVPRLPPRQFGYSHPSPEYWIKSGTLVPVRRNDIVKIEGIDATGGNNQNNTPDIPAHLWYFGAIGTCI

SEQ ID NO: 9721 - protein, 274 aa, Thermomyces lanuginosus
SPIRRDVSADLLNQFKLFAQYSAAAYCGRNNDAPAGTNITCSANACPLVEAADATFLYSFENSGVGDVTGFLAVDNTNKLIVLSFRGSRSIENWITNLNFDLVDINDICSGCRGHDGFTSSWRSVADTLRQAVDDAVAAHPDYKVVVTGHSLGGALATLAGADLRNNGYDVDLYTYGAPRVGNRAFAEFITVQTGGTLYRVTHTNDVVPRLPPRQFGYSHPSPEYWIKSGTAVPVRRRDIVKIEGIDATGGNNQNNTPDIPAHLWYFGAIGTCI

SEQ ID NO: 9722 - protein, 274 aa, Thermomyces lanuginosus
SPIRRDVSADLLNQFKLFAQYSAAAYCGRNNDAPAGTNITCSASACPLVEAADATFLYSFENSGVGDVTGFLAVDNTNKLIVLSFRGSRSIENWITNLNFDLVDINDICSGCRGHDGFTSSWRSVADTLRQAVDDAVAAHPDYKVVVTGHSLGGALATLAGADLRNNGYDVDLYTYGAPRVGNRAFAEFITVQTGGTLYRVTHTNDVVPRLPPRQFGYSHPSPEYWIKSGTLVPVRRRDIVKIEGIDATGGNNQNNAPDIPAHLWYFGAIGTCI

SEQ ID NO: 9723 - protein, 274 aa, Thermomyces lanuginosus
SPIRRDVSADLLNQFKLFAQYSAAAYCGRNNDAPAGTNITCSANACPLVEAADATFLYSFENSGVGDQTGFLAVDNTNKLIVLSFRGSRSIENWITNLNFDLVDINDICSGCRGHDGFTSSWRSVADTLRQAVDDAVAAHPDYKVVVTGHSLGGALATLAGADLRNNGYDVDLYTYGAPRVGNRAFAEFITVQTGGTLYRVTHTNDVVPRLPPRQFGYSHPSPEYWIKSGTLVPVRRRDIVKIEGIDATGGNNQNNAPDIPAHLWYFGAIGTCI

SEQ ID NO: 9724 - protein, 274 aa, Thermomyces lanuginosus
SPIRRDVSADLLNQFKLFAQYSAAAYCGRNNDAPAGTNITCSANACPLVEAADATFLYSFENSGMGDVTGFLAVDNTNKLIVLSFRGSRSIENWITNLNFDLVDINDICSGCRGHDGFTSSWRSVADTLRQAVDDAVAAHPDYKVVVTGHSLGGALATLAGADLRNNGYDVDLYTYGAPRVGNRAFAEFITVQTGGTLYRVTHTNDVVPRLPPRQFGYSHPSPEYWIKSGTGVPVRRRDIVKIEGIDATGGNNQNNAPDIPAHLWYFGLIGTCI

SEQ ID NO: 9725 - protein, 274 aa, Thermomyces lanuginosus
SPIRRDVSADLLNQFKLFAQYSAAAYCGRNNDAPAGTNITCSANACPLVEAADATFLYSFENSGVGDETGFLAVDNTNKLIVLSFRGSRSIENWITNLNFDLVDINDICSGCRGHDGFTSSWRSVADTLRQAVDDAVAAHPDYKVVVTGHSLGGALATLAGADLRNNGYDVDLYTYGAPRVGNRAFAEFITVQTGGTLYRVTHTNDVVPRLPPRQFGYSHPSPEYWIKSGTLVPVRRRDIVKIEGIDATGGNNQNNAPDIPAHLWYFGAIGTCI

SEQ ID NO: 9726 - protein, 274 aa, Thermomyces lanuginosus
SPIRRDVSADLLNQFKLFAQYSAAAYCGRNNDAPAGTNITCSANACPLVEAADATFLYSFENSGVGDVTGFLAVDNTNKLIVLSFRGSRSIENWITNLNFDLVDINDICSGCRGHDGFTSSWRSVADTLRQAVDDAVAAHPDYKVVVTGHSLGGALATLAGADLRNNGYDVDLYTYGAPRVGNRAFAEFITVQTGGTLYRVTHTNDVVPRLPPRQVGYSHPSPEYWIKSGTGVPVRRRDIVKIEGIDATGGNNQNNTPDIPAHLWYFGLIGTCI

SEQ ID NO: 9727 - protein, 274 aa, Thermomyces lanuginosus
SPIRRCVSADLLNQFKLFAQYSAAAYCGRNNDAPAGTNITCSANACPLVEAADATFLYSFENSGVGDVTGFLAVDNTNKLIVLSFRGSRSIENWITNLNFDLVDINDICSGCRGHDGFTSSWRSVADTLRQAVDDAVAAHPDYKVVVTGHSLGGALATLAGADLRNNGYDVDLYTYGAPRVGNRAFAEFITVQTGGTLYRVTHTNDVVPRLPPRQFGYSHPSPEYWIKSGTLVPVRRCDIVKIEGIDATGGNNQNNAPDIPAHLWYFGAIGTCI

SEQ ID NO: 9728 - protein, 274 aa, Thermomyces lanuginosus
SPIRRDVSADLLNQFKLFAQYSAAAYCGRNNDAPAGTNITCSANACPLVEAADATFLYSFENSGVGDVTGFLAVDNTNKLIVLSFRGSRSIENWITNLNFDLVDINDICSGCRGHDGFTSSWRSVADTLRQAVDDAVAAHPDYKVVVTGHSLGGALATLAGADLRNNGYDVDLYTYGAPRVGNRAFAEFITVQTGGTLYRVTHTNDVVPRLPPRQFGYSHPSPEYWIKSGTGVPVRRRDIVKIEGIDATGGNNQNNAPDIPAHLWYFGAIGTCI

SEQ ID NO: 9729 - protein, 274 aa, Thermomyces lanuginosus
SPIRRDVSADLLNQFKLFAQYSAAAYCGRNNDAPAGTNITCSANACPLVEAADATFLYSFENSGVGDLTGFLAVDNTNKLIVLSFRGSRSIENWITNLNFDLVDINDICSGCRGHDGFTSSWRSVADTLRQAVDDAVAAHPDYKVVVTGHSLGGALATLAGADLRNNGYDVDLYTYGAPRVGNRAFAEFITVQTGGTLYRVTHTNDVVPRLPPRQFGYSHPSPEYWIKSGTLVPVRRRDIVKIEGIDATGGNNQNNAPDIPAHLWYFGAIGTCI

SEQ ID NO: 9730 - protein, 274 aa, Thermomyces lanuginosus
SPIRRDVSKDLLNQFKLFAQYSAAAYCGRNNDAPAGTNITCSANACPLVEAADATFLYSFENSGVGDVTGFLAVDNTNKLIVLSFRGSRSIENWITNLNFDLVDINDICSGCRGHDGFTSSWRSVADTLRQAVDDAVAAHPDYKVVVTGHSLGGALATLAGADLRNNGYDVDLYTYGAPRVGNRAFAEFITVQTGGTLYRVTHTNDVVPRLPPRQFGYSHPSPEYWIKSGTLVPVTRRDIVKIEGIDATGGNNQNNAPDIPAHLWYFGAIGTCI

SEQ ID NO: 9731 - protein, 274 aa, Thermomyces lanuginosus
SPIRRDVSADLLNQFKLFAQYSAAAYCGRNNDAPAGPNITCSANACPLVEAADATFLYSFENSGVGDVTGFLAVDNTNKLIVLSFRGSRSIENWITNLNFDLVDINDICSGCRGHDGFTSSWRSVADTLRQAVDDAVAAHPDYKVVVTGHSLGGALATLAGADLRNNGYDVDLYTYGAPRVGNRAFAEFITVQTGGTLYRVTHTNDVVPRLPPRQFGYSHPSPEYWIKSGTLVPVRRRDIVKIEGIDATGGNNQNNAPDIPAHLWYFGAIGTCI

SEQ ID NO: 9732 - protein, 274 aa, Thermomyces lanuginosus
SPIRRDVSADLLNQFKLFAQYSAAAYCGRNNDAPAGTFITCSANACPLVEAADATFLYSFENSGVGDVTGFLAVDNTNKLIVLSFRGSRSIENWITNLNFDLVDINDICSGCRGHDGFTSSWRSVADTLRQAVDDAVAAHPDYKVVVTGHSLGGALATLAGADLRNNGYDVDLYTYGAPRVGNRAFAEFITVQTGGTLYRVTHTNDVVPRLPPRQFGYSHPSPEYWIKSGTLVPVRRRDIVKIEGIDATGGNNQNNAPDIPAHLWYFGAIGTCI

SEQ ID NO: 9733 - protein, 274 aa, Thermomyces lanuginosus
SPIRRDVRADLLNQFKLFAQYSAAAYCGRNNDAPAGTNITCSANACPLVEAADATFLYSFENSGVGDVTGFLAVDNTNKLIVLSFRGSRSIENWITNLNFDLVDINDICSGCRGHDGFTSSWRSVADTLRQAVDDAVAAHPDYKVVVTGHSLGGALATLAGADLRNNGYDVDLYTYGAPRVGNRAFAEFITVQTGGTLYRVTHTNDVVPRLPPRQFGYSHPSPEYWIKSGTLVPVRRRDIVKIEGIDATGGNNQNNAPDIPAHLWYFGAIGTCI

SEQ ID NO: 9734 - protein, 274 aa, Thermomyces lanuginosus
SPIRRDVSADLLNQFKLFAQYSAAAYCGRNNEAPAGTNITCSANACPLVEAADATFLYSFENSGVGDVTGFLAVDNTNKLIVLSFRGSRSIENWITNLNFDLVDINDICSGCRGHDGFTSSWRSVADTLRQAVDDAVAAHPDYKVVVTGHSLGGALATLAGADLRNNGYDVDLYTYGAPRVGNRAFAEFITVQTGGTLYRVTHTNDVVPRLPPRQFGYSHPSPEYWIKSGTLVPVRRRDIVKIEGIDATGGNNQNNAPDIPAHLWYFGAIGTCI

SEQ ID NO: 9735 - protein, 274 aa, Thermomyces lanuginosus
SPIRRDVSADLLNQFKLFAQYSAAAYCGRNNDAPAGTNITCSANACPLVEAADATKLYSFENSGVGDVTGFLAVDNTNKLIVLSFRGSRSIENWITNLNFDLVDINDICSGCRGHDGFTSSWRSVADTLRQAVDDAVAAHPDYKVVVTGHSLGGALATLAGADLRNNGYDVDLYTYGAPRVGNRAFAEFITVQTGGTLYRVTHTNDVVPRLPPRQFGYSHPSPEYWIKSGTLVPVRRRDIVKIEGIDATGGNNQNNAPDIPAHLWYFGAIGTCI

SEQ ID NO: 9736 - protein, 274 aa, Thermomyces lanuginosus
SPIRRDVSADLLNQFKLFAQYSAAAYCGRNNDAPAGTNITCSANACPLVEAADATFLYSFENSGVGDVTGFLAVDNTNKLIVLSFRGSRSIENWITNLDFDLVDINDICSGCRGHDGFTSSWRSVADTLRQAVDDAVAAHPDYKVVVTGHSLGGALATLAGADLRNNGYDVDLYTYGAPRVGNRAFAEFITVQTGGTLYRVTHTNDVVPRLPPRQFGYSHPSPEYWIKSGTLVPVRRRDIVKIEGIDATGGNNQNNAPDIPAHLWYFGAIGTCI

SEQ ID NO: 9737 - protein, 274 aa, Thermomyces lanuginosus
SPIRRDVSADLLNQFKLFAQYSAAAYCGRNNDAPAGTNITCSANACPLVEAADATFLYSFENSGVGDVTGFLAVDNTNKLIVLSFRGSRSIENWITNLNFDLVDINDICSGCRGHDGFTSSWRSVADNLSQAVDDAVAAHPDYKVVVTGHSLGGALATLAGADLRNNGYDVDLYTYGAPRVGNRAFAEFITVQTGGTLYRVTHTNDVVPRLPPRQFGYSHPSPEYWIKSGTLVPVRRRDIVKIEGIDATGGNNQNNTPDIPAHLWYFGLIGTCI

SEQ ID NO: 9738 - protein, 274 aa, Thermomyces lanuginosus
SPIRRDVSADLLNQFKLFAQYSAAAYCGRNWDAPAGTNITCSANACPLVEAADATFLYSFENSGVGDVTGFLAVDNTNKLIVLSFRGSRSIENWITNLNFDLVDINDICSGCRGHDGFTSSWRSVADTLRQAVDDAVAAHPDYKVVVTGHSLGGALATLAGADLRNNGYDVDLYTYGAPRVGNRAFAEFITVQTGGTLYRVTHTNDVVPRLPPRQFGYSHPSPEYWIKSGTLVPVRRRDIVKIEGIDATGGNNQNNAPDIPAHLWYFGAIGTCI

SEQ ID NO: 9739 - protein, 274 aa, Thermomyces lanuginosus
SPIRRDVSADLLNQFKLFAQYSASAYCGRNNDAPAGTNITCSANACPLVEAADATFLYSFENSGVGDVTGFLAVDNTNKLIVLSFRGSRSIENWITNLNFDLVDINDICSGCRGHDGFTSSWRSVADTLRQAVDDAVAAHPDYKVVVTGHSLGGALATLAGADLRNNGYDVDLYTYGAPRVGNRAFAEFITVQTGGTLYRVTHTNDVVPRLPPRQFGYSHPSPEYWIKSGTLVPVRRRDIVKIEGIDATGGNNQNNAPDIPAHLWYFGAIGTCI

SEQ ID NO: 9740 - protein, 274 aa, Thermomyces lanuginosus
SPIRRDVSADLLNQFKLFAQYSAAAYCGRNNDAPAGTNITCSANACPLVEAADATFLYSFENSGVGDVTGFYAVDNTNKLIVLSFRGSRSIENWITNLNFDLVDINDICSGCRGHDGFTSSWRSVADTLRQAVDDAVAAHPDYKVVVTGHSLGGALATLAGADLRNNGYDVDLYTYGAPRVGNRAFAEFITVQTGGTLYRVTHTNDVVPRLPPRQFGYSHPSPEYWIKSGTLVPVRRRDIVKIEGIDATGGNNQNNAPDIPAHLWYFGAIGTCI

SEQ ID NO: 9741 - protein, 274 aa, Thermomyces lanuginosus
SPIRRDVSADLLNQFKLFAQYSAAAYCGRNNDAPAGTNITCSANACPLVEAADATYLYSFENSGVGDVTGFLAVDNTNKLIVLSFRGSRSIENWITNLNFDLVDINDICSGCRGHDGFTSSWRSVADTLRQAVDDAVAAHPDYKVVVTGHSLGGALATLAGADLRNNGYDVDLYTYGAPRVGNRAFAEFITVQTGGTLYRVTHTNDVVPRLPPRQFGYSHPSPEYWIKSGTLVPVRRRDIVKIEGIDATGGNNQNNAPDIPAHLWYFGAIGTCI

SEQ ID NO: 9742 - protein, 274 aa, Thermomyces lanuginosus
SPIRRDVSADLLNQFKLFAQYSAAAYCGRNNDAPAGTNITCSANACPLVEAADATFLYSFENSGVGDVSGFLAVDNTNKLIVLSFRGSRSIENWITNLNFDLVDINDICSGCRGHDGFTSSWRSVADTLRQAVDDAVAAHPDYKVVVTGHSLGGALATLAGADLRNNGYDVDLYTYGAPRVGNRAFAEFITVQTGGTLYRVTHTNDVVPRLPPRQFGYSHPSPEYWIKSGTLVPVRRRDIVKIEGIDATGGNNQNNAPDIPAHLWYFGAIGTCI

SEQ ID NO: 9743 - protein, 274 aa, Thermomyces lanuginosus
SPIRRDVSADLLNQFKLFAQYSAAAYCGRNNDAPAGTNITCSANACPLVEAADATFLYSFENSGVGDGTGFLAVDNTNKLIVLSFRGSRSIENWITNLNFDLVDINDICSGCRGHDGFTSSWRSVADTLRQAVDDAVAAHPDYKVVVTGHSLGGALATLAGADLRNNGYDVDLYTYGAPRVGNRAFAEFITVQTGGTLYRVTHTNDVVPRLPPRQFGYSHPSPEYWIKSGTLVPVRRRDIVKIEGIDATGGNNQNNAPDIPAHLWYFGAIGTCI

SEQ ID NO: 9744 - protein, 274 aa, Thermomyces lanuginosus
SPIRRDVSADLLNQFKLFAQYSAAAYCGRNNDAPAGTDITCSANACPLVEAADATFLYSFENSGVGDVTGFLAVDNTNKLIVLSFRGSRSIENWITNLNFDLVDINDICSGCRGHDGFTSSWRSVADTLRQAVDDAVAAHPDYKVVVTGHSLGGALATLAGADLRNNGYDVDLYTYGAPRVGNRAFAEFITVQTGGTLYRVTHTNDVVPRLPPRQFGYSHPSPEYWIKSGTLVPVRRRDIVKIEGIDATGGNNQNNAPDIPAHLWYFGAIGTCI

SEQ ID NO: 9745 - protein, 274 aa, Thermomyces lanuginosus
SPIRRDVSADLLNQFKLFAQYSAAAYCGRNNDAPAGTNITCSANACPLVEAADATFLYSFENSGVGDVTGFLAVDNTNKLIVLSFRGSRSIENWITNLNFDLVDINDICDGCGGHDGFTSSWRSVADTLRQAVDDAVAAHPDYKVVVTGHSLGGALATLAGADLRNNGYDVDLYTYGAPRVGNRAFAEFITVQTGGTLYRVTHTNDVVPRLPPRQFGYSHPSPEYWIKSGTLVPVRRRDIVKIEGIDATGGNNQNNTPDIPAHLWYFGLIGTCI

SEQ ID NO: 9746 - protein, 274 aa, Thermomyces lanuginosus
SPIRRDVSADLLNQFKLFAQYSAAAYCGRNNDAPAGTNITCSANACPLVEAADAAFLYSFENSGVGDVTGFLAVDNTNKLIVLSFRGSRSIENWITNLNFDLVDINDICSGCRGHDGFTSSWRSVADTLRQAVDDAVAAHPDYKVVVTGHSLGGALATLAGADLRNNGYDVDLYTYGAPRVGNRAFAEFITVQTGGTLYRVTHTNDVVPRLPPRQFGYSHPSPEYWIKSGTLVPVRRRDIVKIEGIDATGGNNQNNAPDIPAHLWYFGAIGTCI

SEQ ID NO: 9747 - protein, 274 aa, Thermomyces lanuginosus
SPIRRDVSADLLNQFKLFAQYSAAAYCGRNNDAPAGTNITCSANACPLVEAADVTFLYSFENSGVGDVTGFLAVDNTNKLIVLSFRGSRSIENWITNLNFDLVDINDICSGCRGHDGFTSSWRSVADTLRQAVDDAVAAHPDYKVVVTGHSLGGALATLAGADLRNNGYDVDLYTYGAPRVGNRAFAEFITVQTGGTLYRVTHTNDVVPRLPPRQFGYSHPSPEYWIKSGTLVPVRRRDIVKIEGIDATGGNNQNNAPDIPAHLWYFGAIGTCI

SEQ ID NO: 9748 - protein, 274 aa, Thermomyces lanuginosus
SPIRRDVSADLLNQFKLFAQYSAAAYCGRNNDAPAGTNITCSANACPLVEAADATFLYSFENSGVGDVTGFLAVDNTNKLIVLSFRGSRSIENWITNLNFDLVDINDICSGCRGHDGFTSSWRSVADTLRQAVDDAVAAHPDYKVVVTGHSLGGALATLAGADLRNNGYDVDLYTYGAPRVGNRAFAEFITVQTGGTLYRVTHTNDVVPRLPPRQVGYSHPSPEYWIKSGTLVPVRRRDIVKIEGIDATGGNNQNNAPDIPAHLWYFGAIGTCI

SEQ ID NO: 9749 - protein, 274 aa, Thermomyces lanuginosus
SPIRRDVSADLLNQFKLFAQYSAAAYCGRNNDAPAGTNITCSANACPLVEARDATFLYSFENSGVGDVTGFLAVDNTNKLIVLSFRGSRSIENWITNLNFDLVDINDICSGCRGHDGFTSSWRSVADTLRQAVDDAVAAHPDYKVVVTGHSLGGALATLAGADLRNNGYDVDLYTYGAPRVGNRAFAEFITVQTGGTLYRVTHTNDVVPRLPPRQFGYSHPSPEYWIKSGTLVPVRRRDIVKIEGIDATGGNNQNNAPDIPAHLWYFGAIGTCI

SEQ ID NO: 9750 - protein, 274 aa, Thermomyces lanuginosus
SPIRRDVSADLLKQFKLFAQYSAAAYCGRNNDAPAGTNITCSANACPLVEAADATFLYSFENSGVGDVTGFLAVDNTNKLIVLSFRGSRSIENWITNLNFDLVDINDICSGCRGHDGFTSSWRSVADTLRQAVDDAVAAHPDYKVVVTGHSLGGALATLAGADLRNNGYDVDLYTYGAPRVGNRAFAEFITVQTGGTLYRVTHTNDVVPRLPPRQFGYSHPSPEYWIKSGTLVPVRRRDIVKIEGIDATGGNNQNNAPDIPAHLWYFGAIGTCI

SEQ ID NO: 9751 - protein, 274 aa, Thermomyces lanuginosus
SPIRRDVSADLLNQFKLFAQYSAAAYCGRNNDAPAGTNITCSANACPLVEAADATFLYSFENSGAGDVTGFLAVDNTNKLIVLSFRGSRSIENWITNLNFDLVDINDICSGCRGHDGFTSSWRSVADTLRQAVDDAVAAHPDYKVVVTGHSLGGALATLAGADLRNNGYDVDLYTYGAPRVGNRAFAEFITVQTGGTLYRVTHTNDVVPRLPPRQFGYSHPSPEYWIKSGTLVPVRRRDIVKIEGIDATGGNNQNNAPDIPAHLWYFGAIGTCI

SEQ ID NO: 9752 - protein, 274 aa, Thermomyces lanuginosus
SPIRRDVSADLLNQFKLFAQYSAAAYCGRNNDAPAGTNITCSANACPLVEAADATFLYSFENSGVGDITGFLAVDNTNKLIVLSFRGSRSIENWITNLNFDLVDINDICSGCRGHDGFTSSWRSVADTLRQAVDDAVAAHPDYKVVVTGHSLGGALATLAGADLRNNGYDVDLYTYGAPRVGNRAFAEFITVQTGGTLYRVTHTNDVVPRLPPRQFGYSHPSPEYWIKSGTLVPVRRRDIVKIEGIDATGGNNQNNAPDIPAHLWYFGAIGTCI

SEQ ID NO: 9753 - protein, 274 aa, Thermomyces lanuginosus
SPIRRDVSADLLNQFKLFAQYSAAAYCGRNNDAPAGTNITCSANACPLVEAADATFLYSFENSGMGDVTGFLAVDNTNKLIVLSFRGSRSIENWITNLNFDLVDINDICSGCRGHDGFTSSWRSVADTLRQAVDDAVAAHPDYKVVVTGHSLGGALATLAGADLRNNGYDVDLYTYGAPRVGNRAFAEFITVQTGGTLYRVTHTNDVVPRLPPRQFGYSHPSPEYWIKSGTLVPVRRRDIVKIEGIDATGGNNQNNAPDIPAHLWYFGAIGTCI

SEQ ID NO: 9754 - protein, 274 aa, Thermomyces lanuginosus
SPIRRDVSRDLLNQFKLFAQYSAAAYCGRNNDAPAGTNITCSANACPLVEAADATFLYSFENSGVGDVTGFLAVDNTNKLIVLSFRGSRSIENWITNLNFDLVDINDICSGCRGHDGFTSSWRSVADTLRQAVDDAVAAHPDYKVVVTGHSLGGALATLAGADLRNNGYDVDLYTYGAPRVGNRAFAEFITVQTGGTLYRVTHTNDVVPRLPPRQFGYSHPSPEYWIKSGTAVPVRRRDIVKIEGIDATGGNNQNNTPDIPAHLWYFGAIGTCI

SEQ ID NO: 9755 - protein, 274 aa, Thermomyces lanuginosus
SPIRRDVSADLLNQFKLFAQYSAAAYCGRNNDAPAGTNITCSANACPLVEAADATFLYSFENSGVGDVTGFLAVDNTNKLIVLSFRGSRSIENWIANLNFDLVDINDICSGCRGHDGFTSSWRSVADTLRQAVDDAVAAHPDYKVVVTGHSLGGALATLAGADLRNNGYDVDLYTYGAPRVGNRAFAEFITVQTGGTLYRVTHTNDVVPRLPPRQFGYSHPSPEYWIKSGTLLPVRRRDIVKIEGIDATGGNNQNNAPDIPAHLWYFGSIGTCI

SEQ ID NO: 9756 - protein, 274 aa, Thermomyces lanuginosus
SPIRRDVSADLLNQFKLFAQYSAAAYCGRNNDAPAGTNITCSANACPLVEAGDATFLYSFENSGVGDVTGFLAVDNTNKLIVLSFRGSRSIENWITNLNFDLVDINDICSGCRGHDGFTSSWRSVADTLRQAVDDAVAAHPDYKVVVTGHSLGGALATLAGADLRNNGYDVDLYTYGAPRVGNRAFAEFITVQTGGTLYRVTHTNDVVPRLPPRQFGYSHPSPEYWIKSGTLVPVRRRDIVKIEGIDATGGNNQNNAPDIPAHLWYFGAIGTCI

SEQ ID NO: 9757 - protein, 274 aa, Thermomyces lanuginosus
SPIRRDVSRDLLNQFKLFAQYSAAAYCGRNNDAPAGTNITCSANACPLVEAADATFLYSFENSGVGDVTGFLAVDNTNKLIVLSFRGSRSIENWITNLNFDLVDINDICSGCRGHDGFTSSWRSVADTLRQAVDDAVAAHPDYKVVVTGHSLGGALATLAGADLRNNGYDVDLYTYGAPRVGNRAFAEFITVQTGGTLYRVTHTNDVVPRLPPRQFGYSHPSPEYWIKSGTGVPVRRNDIVKIEGIDATGGNNQNNTPDIPAHLWYFGLIGTCI

SEQ ID NO: 9758 - protein, 274 aa, Thermomyces lanuginosus
SPIRRDVSADLLNQFKLFAQYSAAAYCGENNDAPAGTNITCSANACPLVEAADATFLYSFENSGVGDVTGFLAVDNTNKLIVLSFRGSRSIENWITNLNFDLVDINDICSGCRGHDGFTSSWRSVADTLRQAVDDAVAAHPDYKVVVTGHSLGGALATLAGADLRNNGYDVDLYTYGAPRVGNREFAEFITVQTGGTLYRVTHTNDVVPRLPPRQFGYSHPSPEYWIKSGTLVPVRRRDIVKIEGIDATGGNNQDNAPDIPAHLWYFGAIGTCI

SEQ ID NO: 9759 - protein, 274 aa, Thermomyces lanuginosus
SPIRRDVSADLLNQFKLFAQYSAAAYCGRNNDAPAGTNITCSANACPLVEAADATFLYDFENSGVGDVTGFLAVDNTNKLIVLSFRGSRSIENWITNLNFDLVDINDICSGCRGHDGFTSSWRSVADTLRQAVDDAVAAHPDYKVVVTGHSLGGALATLAGADLRNNGYDVDLYTYGAPRVGNRAFAEFITVQTGGTLYRVTHTNDVVPRLPPRQFGYSHPSPEYWIKSGTLVPVRRRDIVKIEGIDATGGNNQNNAPDIPAHLWYFGAIGTCI

SEQ ID NO: 9760 - protein, 274 aa, Thermomyces lanuginosus
SPIRRDVSARLLNQFKLFAQYSAAAYCGRNNDAPAGTNITCSANACPLVEAADATFLYSFENSGVGDVTGFLAVDNTNKLIVLSFRGSRSIENWITNLNFDLVDINDICSGCRGHDGFTSSWRSVADTLRQAVDDAVAAHPDYKVVVTGHSLGGALATLAGADLRNNGYDVDLYTYGAPRVGNRAFAEFITVQTGGTLYRVTHTNDVVPRLPPRQFGYSHPSPEYWIKSGTLVPVRRRDIVKIEGIDATGGNNQNNAPDIPAHLWYFGAIGTCI

SEQ ID NO: 9761 - protein, 274 aa, Thermomyces lanuginosus
SPIRRDVSADLLNQFKLFAQYSAAAYCGRNNDAPAGTNITCSANACPLVEAADATFLYSFENSGVGDVTGFLAVDNTNKYIVLSFRGSRSIENWITNLNFDLVDINDICSGCRGHDGFTSSWRSVADTLRQAVDDAVAAHPDYKVVVTGHSLGGALATLAGADLRNNGYDVDLYTYGAPRVGNRAFAEFITVQTGGTLYRVTHTNDVVPRLPPRQFGYSHPSPEYWIKSGTLVPVRRRDIVKIEGIDATGGNNQNNAPDIPAHLWYFGAIGTCI

SEQ ID NO: 9762 - protein, 274 aa, Thermomyces lanuginosus
SPIRRDVSKDLLNQFKLFAQYSAAAYCGRNNDAPAGTNITCSANACPLVEAADATFLYSFENSGVGDVTGFLAVDNTNKLIVLSFRGSRSIENWITNLNFDLVDINDICSGCRGHDGFTSSWRSVADTLRQAVDDAVAAHPDYKVVVTGHSLGGALATLAGADLRNNGYDVDLYTYGAPRVGNRAFAEFITVQTGGTLYRVTHTNDVVPRLPPRQFGYSHPSPEYWIKSGTLVPVRVRDIVKIEGIDATGGNNQNNAPDIPAHLWYFGAIGTCI

SEQ ID NO: 9763 - protein, 274 aa, Thermomyces lanuginosus
SPIRRDVSADLLNQFKLFAQYSAAAYCGRNNDAPAGTNITCSANACPLVEAADATFLYSFENSGVGDVTGFLAVDGTNKLIVLSFRGSRSIENWITNLNFDLVDINDICSGCRGHDGFTSSWRSVADTLRQAVDDAVAAHPDYKVVVTGHSLGGALATLAGADLRNNGYDVDLYTYGAPRVGNRAFAEFITVQTGGTLYRVTHTNDVVPRLPPRQFGYSHPSPEYWIKSGTLVPVRRRDIVKIEGIDATGGNNQNNAPDIPAHLWYFGAIGTCI

SEQ ID NO: 9764 - protein, 274 aa, Thermomyces lanuginosus
SPIRRDVSADLLNQFKLFAQYSAAAYCGRNNDAPAGTNITCSANACPLVEAADATFLYSFENSGVGAVTGFLAVDNTNKLIVLSFRGSRSIENWITNLNFDLVDINDICSGCRGHDGFTSSWRSVADTLRQAVDDAVAAHPDYKVVVTGHSLGGALATLAGADLRNNGYDVDLYTYGAPRVGNRAFAEFITVQTGGTLYRVTHTNDVVPRLPPRQFGYSHPSPEYWIKSGTLVPVRRRDIVKIEGIDATGGNNQNNAPDIPAHLWYFGAIGTCI

SEQ ID NO: 9765 - protein, 274 aa, Thermomyces lanuginosus
SPIRRDVSADLLNQLKLFAQYSAAAYCGRNNDAPAGTNITCSANACPLVEAADATFLYSFENSGVGDVTGFLAVDNTNKLIVLSFRGSRSIENWITNLNFDLVDINDICSGCRGHDGFTSSWRSVADTLRQAVDDAVAAHPDYKVVVTGHSLGGALATLAGADLRNNGYDVDLYTYGAPRVGNRAFAEFITVQTGGTLYRVTHTNDVVPRLPPRQFGYSHPSPEYWIKSGTLVPVRRRDIVKIEGIDATGGNNQNNAPDIPAHLWYFGAIGTCI

SEQ ID NO: 9766 - protein, 274 aa, Thermomyces lanuginosus
SPIRRDVSADLLNQFKLFAQYSAAAYCGRNNDAPAGTNITCSANACPLVEAADATFLYSFENSGVGDVTGFLAVDNTNKLIVLSFRGSRSIENWITNLNFDLVDINDICSGCRGHDGFTSSWRSVADTLRQAVDDAVAAHPDYKVVVTGHSLGGALATLAGADLRNNGYDVDLYTYGAPRVGNRAFAEFITVQTGGTLYRVTHTNDVVPRLPPRQFGYSHPSPEYWIKSGTLVPVRRNDIVKIEGIDATGGNNQNNAPDIPAHLWYFGAIGTCI

SEQ ID NO: 9767 - protein, 274 aa, Thermomyces lanuginosus
SPIRRDVSADLLNQFKLFAQYSAAAYCGRNNDAPAGTNITCSANACSLVEAADATFLYSFENSGVGDVTGFLAVDNTNKLIVLSFRGSRSIENWITNLNFDLVDINDICSGCRGHDGFTSSWRSVADTLRQAVDDAVAAHPDYKVVVTGHSLGGALATLAGADLRNNGYDVDLYTYGAPRVGNRAFAEFITVQTGGTLYRVTHTNDVVPRLPPRQFGYSHPSPEYWIKSGTLVPVRRRDIVKIEGIDATGGNNQNNAPDIPAHLWYFGAIGTCI

SEQ ID NO: 9768 - protein, 274 aa, Thermomyces lanuginosus
SPIRRDVSADLLNQFKLFAQYSAAAYCGRNNDAPAGTNITCSANACPLVEAADATFLYSFENSGVGDVTAFLAVDNTNKLIVLSFRGSRSIENWITNLNFDLVDINDICSGCRGHDGFTSSWRSVADTLRQAVDDAVAAHPDYKVVVTGHSLGGALATLAGADLRNNGYDVDLYTYGAPRVGNRAFAEFITVQTGGTLYRVTHTNDVVPRLPPRQFGYSHPSPEYWIKSGTLVPVRRRDIVKIEGIDATGGNNQNNAPDIPAHLWYFGAIGTCI

SEQ ID NO: 9769 - protein, 274 aa, Thermomyces lanuginosus
SPIRRDVSADLLNQFKLFAQYSAAAYCGRNNDAPAGTNITCSANACPLVEAADATFLYSFENSGVGDVTGFLAVDNTNKLIVLSFRGSRSIENWITNLNFDLVDINDICSGCRGHDGFTSSWRSVADTLRQAVDDAVAAHPDYKVVVTGHSLGGALATLAGADLRNNGYDVDLYTYGAPRVGNRAFAEFITVQTGGTLYRVTITNDVVPRLPPRQFGYSHPSPEYWIKSGTLVPVRRRDIVKIEGIDATGGNNQNNAPDIPAHLWYFGAIGTCI

SEQ ID NO: 9770 - protein, 274 aa, Thermomyces lanuginosus
SPIRRDVSADLLNQFKLFAQYSAAAYCGRNNDAPAGTNITCSANACPLVEAADATFLYRFENSGVGDVTGFLAVDNTNKLIVLSFRGSRSIENWITNLNFDLVDINDICSGCRGHDGFTSSWRSVADTLRQAVDDAVAAHPDYKVVVTGHSLGGALATLAGADLRNNGYDVDLYTYGAPRVGNRAFAEFITVQTGGTLYRVTHTNDVVPRLPPRQFGYSHPSPEYWIKSGTLVPVRRRDIVKIEGIDATGGNNQNNAPDIPAHLWYFGAIGTCI

SEQ ID NO: 9771 - protein, 274 aa, Thermomyces lanuginosus
SPIRRDVSADLLNQFKLFAQYSAATYCGRNNDAPAGTNITCSANACPLVEAADATFLYSFENSGVGDVTGFLAVDNTNKLIVLSFRGSRSIENWITNLNFDLVDINDICSGCRGHDGFTSSWRSVADTLRQAVDDAVAAHPDYKVVVTGHSLGGALATLAGADLRNNGYDVDLYTYGAPRVGNRAFAEFITVQTGGTLYRVTHTNDVVPRLPPRQFGYSHPSPEYWIKSGTLVPVRRRDIVKIEGIDATGGNNQNNAPDIPAHLWYFGAIGTCI

SEQ ID NO: 9772 - protein, 274 aa, Thermomyces lanuginosus
SPIRRDVSADLLNQFKLFAQYSAAAYCGRNNDAPAGTNITCSANACPLVEAADQTFLYSFENSGVGDVTGFLAVDNTNKLIVLSFRGSRSIENWITNLNFDLVDINDICSGCRGHDGFTSSWRSVADTLRQAVDDAVAAHPDYKVVVTGHSLGGALATLAGADLRNNGYDVDLYTYGAPRVGNRAFAEFITVQTGGTLYRVTHTNDVVPRLPPRQFGYSHPSPEYWIKSGTLVPVRRRDIVKIEGIDATGGNNQNNAPDIPAHLWYFGAIGTCI

SEQ ID NO: 9773 - protein, 274 aa, Thermomyces lanuginosus
SPIRRDVSADLLNQFKLFAQYSAAAYCGRNNDAPAGTNITCSANACPLVEAADATFLYSFENSGVGDVTGFLAVDNTGKLIVLSFRGSRSIENWITNLNFDLVDINDICSGCRGHDGFTSSWRSVADTLRQAVDDAVAAHPDYKVVVTGHSLGGALATLAGADLRNNGYDVDLYTYGAPRVGNRAFAEFITVQTGGTLYRVTHTNDVVPRLPPRQFGYSHPSPEYWIKSGTLVPVRRRDIVKIEGIDATGGNNQNNAPDIPAHLWYFGAIGTCI

SEQ ID NO: 9774 - protein, 274 aa, Thermomyces lanuginosus
SPIRRDVSADLLNQFKLFAQYSAAAYCGRNNDAPAGTNITCSANACPLVEAADGTFLYSFENSGVGDVTGFLAVDNTNKLIVLSFRGSRSIENWITNLNFDLVDINDICSGCRGHDGFTSSWRSVADTLRQAVDDAVAAHPDYKVVVTGHSLGGALATLAGADLRNNGYDVDLYTYGAPRVGNRAFAEFITVQTGGTLYRVTHTNDVVPRLPPRQFGYSHPSPEYWIKSGTLVPVRRRDIVKIEGIDATGGNNQNNAPDIPAHLWYFGAIGTCI

SEQ ID NO: 9775 - protein, 274 aa, Thermomyces lanuginosus
SPIRRDVSADLLNQFKLFAQYSAAAYCGRNNDAPAGTNITCSANACPLVEAADATFLYSFENSGVGDVTGFLAVDNTNKLIVLSFRGSRSIKNWITNLNYDLVDINDICSGCRGHDGFTSSWRSVADTLRQAVDDAVAAHPDYKVVVTGHSLGGALATLAGADLRNNGYDVDLYTYGAPRVGNRAFAEFITVQTGGTLYRVTHTNDVVPRLPPRQFGYSHPSPEYWIKSGTLVPVRRRDIVKIEGIDATGGNNQNNTPDIPAHLWYFGLIGTCI

SEQ ID NO: 9776 - protein, 274 aa, Thermomyces lanuginosus
SPIRRDVSADLLNQFKLFAQYSAAVYCGRNNDAPAGTNITCSANACPLVEAADATFLYSFENSGVGDVTGFLAVDNTNKLIVLSFRGSRSIENWITNLNFDLVDINDICSGCRGHDGFTSSWRSVADTLRQAVDDAVAAHPDYKVVVTGHSLGGALATLAGADLRNNGYDVDLYTYGAPRVGNRAFAEFITVQTGGTLYRVTHTNDVVPRLPPRQFGYSHPSPEYWIKSGTLVPVRRRDIVKIEGIDATGGNNQNNAPDIPAHLWYFGAIGTCI

SEQ ID NO: 9777 - protein, 274 aa, Thermomyces lanuginosus
SPIRRDVSADLLNQFKLFAQYSAAAYCGRNNDAPAGTNITCSANACPLVEAADAYFLYSFENSGVGDVTGFLAVDNTNKLIVLSFRGSRSIENWITNLNFDLVDINDICSGCRGHDGFTSSWRSVADTLRQAVDDAVAAHPDYKVVVTGHSLGGALATLAGADLRNNGYDVDLYTYGAPRVGNRAFAEFITVQTGGTLYRVTHTNDVVPRLPPRQFGYSHPSPEYWIKSGTLVPVRRRDIVKIEGIDATGGNNQNNAPDIPAHLWYFGAIGTCI

SEQ ID NO: 9778 - protein, 274 aa, Thermomyces lanuginosus
SPIRRDVSADLLNQFKLFAQYSAAAYCGRNNDAPAGTNITCSANACPLVEAADATLLYSFENSGVGDVTGFLAVDNTNKLIVLSFRGSRSIENWITNLNFDLVDINDICSGCRGHDGFTSSWRSVADTLRQAVDDAVAAHPDYKVVVTGHSLGGALATLAGADLRNNGYDVDLYTYGAPRVGNRAFAEFITVQTGGTLYRVTHTNDVVPRLPPRQFGYSHPSPEYWIKSGTLVPVRRRDIVKIEGIDATGGNNQNNAPDIPAHLWYFGAIGTCI

SEQ ID NO: 9779 - protein, 274 aa, Thermomyces lanuginosus
SPIRRDVSADLLNQFKLFAQYSAAAYCGRNNDAPAVTNITCSANACPLVEAADATFLYSFENSGVGDVTGFLAVDNTNKLIVLSFRGSRSIENWITNLNFDLVDINDICSGCRGHDGFTSSWRSVADTLRQAVDDAVAAHPDYKVVVTGHSLGGALATLAGADLRNNGYDVDLYTYGAPRVGNRAFAEFITVQTGGTLYRVTHTNDVVPRLPPRQFGYSHPSPEYWIKSGTLVPVRRRDIVKIEGIDATGGNNQNNAPDIPAHLWYFGAIGTCI

SEQ ID NO: 9780 - protein, 274 aa, Thermomyces lanuginosus
SPIRRDVSADLLNQFKLFAQYSAAAYCGRNNDAPAGTNITCSANACPLVEAADATFLYSFENSGLGDVTGFLAVDNTNKLIVLSFRGSRSIENWITNLNFDLVDINDICSGCRGHDGFTSSWRSVADTLRQAVDDAVAAHPDYKVVVTGHSLGGALATLAGADLRNNGYDVDLYTYGAPRVGNRAFAEFITVQTGGTLYRVTHTNDVVPRLPPRQFGYSHPSPEYWIKSGTLVPVRRRDIVKIEGIDATGGNNQNNAPDIPAHLWYFGAIGTCI

SEQ ID NO: 9781 - protein, 274 aa, Thermomyces lanuginosus
SPIRRDVSADLLNQFKLFAQYSAAAYCGRNNDAPAGTNITCSANACPLVEAADATFLYSFENSGVGDATGFLAVDNTNKLIVLSFRGSRSIENWITNLNFDLVDINDICSGCRGHDGFTSSWRSVADTLRQAVDDAVAAHPDYKVVVTGHSLGGALATLAGADLRNNGYDVDLYTYGAPRVGNRAFAEFITVQTGGTLYRVTHTNDVVPRLPPRQFGYSHPSPEYWIKSGTLVPVRRRDIVKIEGIDATGGNNQNNAPDIPAHLWYFGAIGTCI

SEQ ID NO: 9782 - protein, 274 aa, Thermomyces lanuginosus
SPIRRDVSADLLNQFKLFAQYSAAAYCGRNNDAPAGTNSTCSANACPLVEAADATFLYSFENSGVGDVTGFLAVDNTNKLIVLSFRGSRSIENWITNLNFDLVDINDICSGCRGHDGFTSSWRSVADTLRQAVDDAVAAHPDYKVVVTGHSLGGALATLAGADLRNNGYDVDLYTYGAPRVGNRAFAEFITVQTGGTLYRVTHTNDVVPRLPPRQFGYSHPSPEYWIKSGTLVPVRRRDIVKIEGIDATGGNNQNNAPDIPAHLWYFGAIGTCI

SEQ ID NO: 9783 - protein, 274 aa, Thermomyces lanuginosus
SPIRRDVSADLLNQFKLFAQYSAAAYCGRNNDAPAGTNITCSANACPLVEAADAWFLYSFENSGVGDVTGFLAVDNTNKLIVLSFRGSRSIENWITNLNFDLVDINDICSGCRGHDGFTSSWRSVADTLRQAVDDAVAAHPDYKVVVTGHSLGGALATLAGADLRNNGYDVDLYTYGAPRVGNRAFAEFITVQTGGTLYRVTHTNDVVPRLPPRQFGYSHPSPEYWIKSGTLVPVRRRDIVKIEGIDATGGNNQNNAPDIPAHLWYFGAIGTCI

SEQ ID NO: 9784 - protein, 274 aa, Thermomyces lanuginosus
SPIRRDVSADLLNQFKLFAQYSAAAYCGRNNDAPAGTNITCSANACPLVEAADATFLYSFENSGVGGVTGFLAVDNTNKLIVLSFRGSRSIENWITNLNFDLVDINDICSGCRGHDGFTSSWRSVADTLRQAVDDAVAAHPDYKVVVTGHSLGGALATLAGADLRNNGYDVDLYTYGAPRVGNRAFAEFITVQTGGTLYRVTHTNDVVPRLPPRQFGYSHPSPEYWIKSGTLVPVRRRDIVKIEGIDATGGNNQNNAPDIPAHLWYFGAIGTCI

SEQ ID NO: 9785 - protein, 274 aa, Thermomyces lanuginosus
SPIRRDVSADLLNQFKLFAQYSAAAYCGRNNDAPAGTNITCSANACPLVEAADATFLYSFENSGVGDVTGFLAVRNTNKLIVLSFRGSRSIENWITNLNFDLVDINDICSGCRGHDGFTSSWRSVADTLRQAVDDAVAAHPDYKVVVTGHSLGGALATLAGADLRNNGYDVDLYTYGAPRVGNRAFAEFITVQTGGTLYRVTHTNDVVPRLPPRQFGYSHPSPEYWIKSGTLVPVRRRDIVKIEGIDATGGNNQNNAPDIPAHLWYFGAIGTCI

SEQ ID NO: 9786 - protein, 274 aa, Thermomyces lanuginosus
SPIRRDVSADLLNQFKLFAQYSAAAYCGRNNDAPAGTNITCSANACPLVEAADATFLYSFENSGVGDVTGFLAVDNTNKLIVLSFRGSRSIENWIADLNFLLQDINDICSGCRGHDGFTSSWRSVADTLRQAVDDAVAAHPDYKVVVTGHSLGGALATLAGADLRNNGYDVDLYTYGAPRVGNRAFAEFITVQTGGTLYRVTHTNDVVPRLPPRQFGYSHPSPEYWIKSGTLVPVRRRDIVKIEGIDATGGNNQNNTPDIPAHLWYFGLIGTCI

SEQ ID NO: 9787 - protein, 274 aa, Thermomyces lanuginosus
SPIRRDVSADLLNQFKLFAQYSAAAYCGRNNDAPAGTNITCSANACPLVEAADATFLYSFENSGVGDVTWFLAVDNTNKLIVLSFRGSRSIENWITNLNFDLVDINDICSGCRGHDGFTSSWRSVADTLRQAVDDAVAAHPDYKVVVTGHSLGGALATLAGADLRNNGYDVDLYTYGAPRVGNRAFAEFITVQTGGTLYRVTHTNDVVPRLPPRQFGYSHPSPEYWIKSGTLVPVRRRDIVKIEGIDATGGNNQNNAPDIPAHLWYFGAIGTCI

SEQ ID NO: 9788 - protein, 274 aa, Thermomyces lanuginosus
SPIRRDVSADLLNQFKLFAQYSAAAYCGRNNDAPAGTNITCSANACPLVEAADATFLYSFENSGVGDVTGFLAVDNTNKLIVLSFRGSRSIENWITNLNFDLVDINDICSGCRGHDGFESSWRSVADTLRQAVDDAVAAHPDYKVVVTGHSLGGALATLAGADLRNNGYDVDLYTYGAPRVGNRAFAEFITVQTGGTLYRVTHTNDVVPRLPPRQFGYSHPSPEYWIKSGTLVPVRRRDIVKIEGIDATGGNNQNNAPDIPAHLWYFGAIGTCI

SEQ ID NO: 9789 - protein, 274 aa, Thermomyces lanuginosus
SPIRRDVSADLLNQFKLFAQYCAAAYCGRNNDAPAGTNITCSANACPLVEAADATFLYSFENSGVGDVTGFLAVDNTNKLIVLSFRGSRSIENWITNLNFDLVDINDICSGCRGHDGFTSSWRSVADTLRQAVDDAVAAHPDYKVVVTGHSLGGALATLAGADLRNNGYDVDLYTYGAPRVGNRAFAEFITVQTGGTLYRVTHTNDVVPRLPPRQFGYSHPSPEYWIKSGTLVPVRRRDIVKIEGIDATGGNNQNNAPDIPAHLWYFGAIGTCI

SEQ ID NO: 9790 - protein, 274 aa, Thermomyces lanuginosus
SPIRRDVSADLLNQFKLFAQYSAAAYCGRNNDAPAGTNITCSANACPLVEAADATFLYSFENSGVGDTTGFLAVDNTNKLIVLSFRGSRSIENWITNLNFDLVDINDICSGCRGHDGFTSSWRSVADTLRQAVDDAVAAHPDYKVVVTGHSLGGALATLAGADLRNNGYDVDLYTYGAPRVGNRAFAEFITVQTGGTLYRVTHTNDVVPRLPPRQFGYSHPSPEYWIKSGTLVPVRRRDIVKIEGIDATGGNNQNNAPDIPAHLWYFGAIGTCI

SEQ ID NO: 9791 - protein, 274 aa, Thermomyces lanuginosus
SPIRRDVSADLLNQFKLFAQYSAAAYCGRNNDAPAGTNITCSANACPLVEAADATFLYSFENSGMGDVTGFLAVDNTNKLIVLSFRGSRSIENWIANLNFDLVDINDICSGCRGHDGFTSSWRSVADTLRQAVDDAVAAHPDYKVVVTGHSLGGALATLAGADLRNNGYDVDLYTYGAPRVGNRAFAEFITVQTGGTLYRVTHTNDVVPRLPPRQFGYSHPSPEYWIKSGTLVPVRRRDIVKIEGIDATGGNNQNNAPDIPAHLWYFGAIGTCI

SEQ ID NO: 9792 - protein, 274 aa, Thermomyces lanuginosus
SPIRRDVSADLLNQFKLFAQYSAAAYCGRNNDAPAGTNITCSANACPLVEAADATFLYSFENSGVGDVTGFLAVDNGNKLIVLSFRGSRSIENWITNLNFDLVDINDICSGCRGHDGFTSSWRSVADTLRQAVDDAVAAHPDYKVVVTGHSLGGALATLAGADLRNNGYDVDLYTYGAPRVGNRAFAEFITVQTGGTLYRVTHTNDVVPRLPPRQFGYSHPSPEYWIKSGTLVPVRRRDIVKIEGIDATGGNNQNNAPDIPAHLWYFGAIGTCI

SEQ ID NO: 9793 - protein, 274 aa, Thermomyces lanuginosus
SPIRRDVSADLLNQFKLFAQYSAAAYCGRNNDAPAGTNITCSANACPLVEAADATFLYSFENSGVGDVTGFLAVDNTNKLIVLSFRGSRSIRNWITNLDFDLVDINDICSGCRGHDGFTSSWRSVADTLRQAVDDAVAAHPDYKVVVTGHSLGGALATLAGADLRNNGYDVDLYTYGAPRVGNRAFAEFITVQTGGTLYRVTHTNDVVPRLPPRQFGYSHPSPEYWIKSGTLVPVRRRDIVKIEGIDATGGNNQNNTPDIPAHLWYFGLIGTCI

SEQ ID NO: 9794 - protein, 274 aa, Thermomyces lanuginosus
SPIRRDVSADLLNQFKLFAQYSAAAYCGRNNDAPAGTNITCSANACPLVEAADATFLYSFENSGVGDVTGFLAVDNTNKLIVLSFRGSRSIENWITNLNFDLVDINDICSGCRGHDGFTSSWRSVADTLRQAVDDAVAAHPDYKVVVTGHSLGGALATLAGADLRNNGYDVDLYTYGAPRVGNRAFAEFITVQTGGTLYRVTHTNDVVPRLPPRQFGYSHPSPEYWIKSGTLRPVRRRDIVKIEGIDATGGNNQNNAPDIPAHLWYFGAIGTCI

SEQ ID NO: 9795 - protein, 274 aa, Thermomyces lanuginosus
SPIRRDVSADLLNQFKLFAQYSAAAYCGRNNDAPAGTNITCSANACPLVEAADAHFLYSFENSGVGDVTGFLAVDNTNKLIVLSFRGSRSIENWITNLNFDLVDINDICSGCRGHDGFTSSWRSVADTLRQAVDDAVAAHPDYKVVVTGHSLGGALATLAGADLRNNGYDVDLYTYGAPRVGNRAFAEFITVQTGGTLYRVTHTNDVVPRLPPRQFGYSHPSPEYWIKSGTLVPVRRRDIVKIEGIDATGGNNQNNAPDIPAHLWYFGAIGTCI

SEQ ID NO: 9796 - protein, 274 aa, Thermomyces lanuginosus
SPIRRDVSADLLNQFKLFAQYSAAAYCGRNNDAPAGTNITCSANACPLVEAADATFLYSFENSGVADVTGFLAVDNTNKLIVLSFRGSRSIENWITNLNFDLVDINDICSGCRGHDGFTSSWRSVADTLRQAVDDAVAAHPDYKVVVTGHSLGGALATLAGADLRNNGYDVDLYTYGAPRVGNRAFAEFITVQTGGTLYRVTHTNDVVPRLPPRQFGYSHPSPEYWIKSGTLVPVRRRDIVKIEGIDATGGNNQNNAPDIPAHLWYFGAIGTCI

SEQ ID NO: 9797 - protein, 274 aa, Thermomyces lanuginosus
SPIRRDVSADLLNQFKLFAQYSAAAYCGRNNDAPAGTNITCSANACPLVEAADATFLYSFENSGVGDVTGNLAVDNTNKLIVLSFRGSRSIENWITNLNFDLVDINDICSGCRGHDGFTSSWRSVADTLRQAVDDAVAAHPDYKVVVTGHSLGGALATLAGADLRNNGYDVDLYTYGAPRVGNRAFAEFITVQTGGTLYRVTHTNDVVPRLPPRQFGYSHPSPEYWIKSGTLVPVRRRDIVKIEGIDATGGNNQNNAPDIPAHLWYFGAIGTCI

SEQ ID NO: 9798 - protein, 274 aa, Thermomyces lanuginosus
SPIRRDVSADLLNQFKLFAQYSAAAYCGRNNDAPAGTNITCSANACPLVEAADATFLYSFENSGVGDVTGFLAVDNTNKLIVLSFRGSRSIENWITNLNFDLVDINDICSGCRGHDGFTSSWRSVANTSRQAVDDAVAAHPDYKVVVTGHSLGGALATLAGADLRNNGYDVDLYTYGAPRVGNRAFAEFITVQTGGTLYRVTHTNDVVPRLPPRQFGYSHPSPEYWIKSGTLVPVRRRDIVKIEGIDATGGNNQNNTPDIPAHLWYFGLIGTCI

SEQ ID NO: 9799 - protein, 274 aa, Thermomyces lanuginosus
SPIRRDVSADLLNQFKLFAQYSAAAYCGRNNDAPAGTNITCSANACPLVEAADATFLYSFENSGVGDVTGFLAVDNTNGLIVLSFRGSRSIENWITNLNFDLVDINDICSGCRGHDGFTSSWRSVADTLRQAVDDAVAAHPDYKVVVTGHSLGGALATLAGADLRNNGYDVDLYTYGAPRVGNRAFAEFITVQTGGTLYRVTHTNDVVPRLPPRQFGYSHPSPEYWIKSGTLVPVRRRDIVKIEGIDATGGNNQNNAPDIPAHLWYFGAIGTCI

SEQ ID NO: 9800 - protein, 274 aa, Thermomyces lanuginosus
SPIRRDVSADLLNQFKLFAQYSAAAYCGRNNDAPAGTNITCSANACPLVEAADATFLYSFENSGVGDCTGFLAVDNTNKLIVLSFRGSRSIENWITNLNFDLVDINDICSGCRGHDGFTSSWRSVADTLRQAVDDAVAAHPDYKVVVTGHSLGGALATLAGADLRNNGYDVDLYTYGAPRVGNRAFAEFITVQTGGTLYRVTHTNDVVPRLPPRQFGYSHPSPEYWIKSGTLVPVRRRDIVKIEGIDATGGNNQNNAPDIPAHLWYFGAIGTCI

SEQ ID NO: 9801 - protein, 274 aa, Thermomyces lanuginosus
SPIRRDVSADLLNQFKLFAQYSAAAYCGRNNDAPAGTNITCSANACPLVEAADATFLYSFENSGVGDVTGFLAVDCTNKLIVLSFRGSRSIENWITNLNFDLVDINDICSGCRGHDGFTSSWRSVADTLRQAVDDAVAAHPDYKVVVTGHSLGGALATLAGADLRNNGYDVDLYTYGAPRVGNRAFAEFITVQTGGTLYRVTHTNDVVPRLPPRQFGYSHPSPEYWIKSGTLVPVRRRDIVKIEGIDATGGNNQNNAPDIPAHLWYFGAIGTCI

SEQ ID NO: 9802 - protein, 274 aa, Thermomyces lanuginosus
SPIRRDVSADLLNQFKLFAQYSAAAYCGRNNDAPAGTNITCSANNCPLVEAADATFLYSFENSGVGDVTGFLAVDNTNKLIVLSFRGSRSIENWITNLNFDLVDINDICSGCRGHDGFTSSWRSVADTLRQAVDDAVAAHPDYKVVVTGHSLGGALATLAGADLRNNGYDVDLYTYGAPRVGNRAFAEFITVQTGGTLYRVTHTNDVVPRLPPRQFGYSHPSPEYWIKSGTLVPVRRRDIVKIEGIDATGGNNQNNAPDIPAHLWYFGAIGTCI

SEQ ID NO: 9803 - protein, 274 aa, Thermomyces lanuginosus
SPIRRDVSADLLNQFKLFAQYSAAAYCGRNNDAPAGTNITCSANACPLVEAADATFLYSFENSGWGDVTGFLAVDNTNKLIVLSFRGSRSIENWITNLNFDLVDINDICSGCRGHDGFTSSWRSVADTLRQAVDDAVAAHPDYKVVVTGHSLGGALATLAGADLRNNGYDVDLYTYGAPRVGNRAFAEFITVQTGGTLYRVTHTNDVVPRLPPRQFGYSHPSPEYWIKSGTLVPVRRRDIVKIEGIDATGGNNQNNAPDIPAHLWYFGAIGTCI

SEQ ID NO: 9804 - protein, 274 aa, Thermomyces lanuginosus
SPIRRDVSADLLNQFKLFAQYSAAAYCGRNNDAPAGTNITCSANACPLVEAADATFLYSFENYGVGDVTGFLAVDNTNKLIVLSFRGSRSIENWITNLNFDLVDINDICSGCRGHDGFTSSWRSVADTLRQAVDDAVAAHPDYKVVVTGHSLGGALATLAGADLRNNGYDVDLYTYGAPRVGNRAFAEFITVQTGGTLYRVTHTNDVVPRLPPRQFGYSHPSPEYWIKSGTLVPVRRRDIVKIEGIDATGGNNQNNAPDIPAHLWYFGAIGTCI

SEQ ID NO: 9805 - protein, 274 aa, Thermomyces lanuginosus
SPIRRDVSADLLNQFKLFAQYSAAAYCGRNNDAPAGTNITCSANACPLVEAADATFLYSFENSGVGDVTGFLAVDTTNKLIVLSFRGSRSIENWITNLNFDLVDINDICSGCRGHDGFTSSWRSVADTLRQAVDDAVAAHPDYKVVVTGHSLGGALATLAGADLRNNGYDVDLYTYGAPRVGNRAFAEFITVQTGGTLYRVTHTNDVVPRLPPRQFGYSHPSPEYWIKSGTLVPVRRRDIVKIEGIDATGGNNQNNAPDIPAHLWYFGAIGTCI

SEQ ID NO: 9806 - protein, 274 aa, Thermomyces lanuginosus
SPIRRDVSADLLNQFKLFAQYSAAAYCGRNNDAPAGTNITCSANACPLVEAADATFLYSFENSGVGDVTGFLAVDNTNKLIVLSFRGSRSIENWITNLNFDLVDINDICSGCRGHDGFTSSWRSVADTLRQAVDDAVAAHPDYKVVVTGHSLGGALATLAGADLRNNGYDVDLYTYGAPRVGNRAFAEFITVQTGGTLYRVTHTNDVVPRLPPRQFGYSHPSPEYWIKSGTLVPVRNRDIVKIEGIDATGGNNQNNAPDIPAHLWYFGAIGTCI

SEQ ID NO: 9807 - protein, 274 aa, Thermomyces lanuginosus
SPIRRDVSADLLNQFKLFAQYSAAAYCGRNNDAPAGTNITCSANACPLVEAADATFLYSFENSGTGDVTGFLAVDNTNKLIVLSFRGSRSIENWITNLNFDLVDINDICSGCRGHDGFTSSWRSVADTLRQAVDDAVAAHPDYKVVVTGHSLGGALATLAGADLRNNGYDVDLYTYGAPRVGNRAFAEFITVQTGGTLYRVTHTNDVVPRLPPRQFGYSHPSPEYWIKSGTLVPVRRRDIVKIEGIDATGGNNQNNAPDIPAHLWYFGAIGTCI

SEQ ID NO: 9808 - protein, 274 aa, Thermomyces lanuginosus
SPIRRDVSADLLNQFKLFAQYSAAAYCGRNADAPAGTNITCSANACPLVEAADATFLYSFENSGVGDVTGFLAVDNTNKLIVLSFRGSRSIENWITNLNFDLVDINDICSGCRGHDGFTSSWRSVADTLRQAVDDAVAAHPDYKVVVTGHSLGGALATLAGADLRNNGYDVDLYTYGAPRVGNRAFAEFITVQTGGTLYRVTHTNDVVPRLPPRQFGYSHPSPEYWIKSGTLVPVRRRDIVKIEGIDATGGNNQNNAPDIPAHLWYFGAIGTCI

SEQ ID NO: 9809 - protein, 274 aa, Thermomyces lanuginosus
SPIRRDVSADLLNQFKLFAQYSAAAYCGRNNDAPAGTNITCSANACPLVEAADATFLYSFENSGVGDVTGFLAVDNTNKLIVLSFRGSRSIENWITNLNFDLVDINDICSGCRGHDGFTSSWRSVADTLRQAVDDAVAAHPDYKVVVTGHSLGGALATLAAADLRNNGYDVDLYTYGAPRVGNRAFAEFITVQTGGTLYRVTHTNDVVPRLPPRQFGYSHPSPEYWIKSGTLVPVRRRDIVKIEGIDATGGNNQNNAPDIPAHLWYFGAIGTCI

SEQ ID NO: 9810 - protein, 274 aa, Thermomyces lanuginosus
SPIRRDVSADLLNQFKLFAQYSAAAYCGRNNDAPAGTNITCSANACPLVEAADATFTYSFENSGVGDVTGFLAVDNTNKLIVLSFRGSRSIENWITNLNFDLVDINDICSGCRGHDGFTSSWRSVADTLRQAVDDAVAAHPDYKVVVTGHSLGGALATLAGADLRNNGYDVDLYTYGAPRVGNRAFAEFITVQTGGTLYRVTHTNDVVPRLPPRQFGYSHPSPEYWIKSGTLVPVRRRDIVKIEGIDATGGNNQNNAPDIPAHLWYFGAIGTCI

SEQ ID NO: 9811 - protein, 274 aa, Thermomyces lanuginosus
SPIRRDVSADLLNQFKLFAQYSAAAYCGRNNDAPAGTNITCSANACPLVEAADATFLYSFENSGMGDVTGFLAVDNTNKLIVLSFRGSRSIENWITNLNFDLVDINDICSGCRGHDGFTSSWRSVADTLRQAVDDAVAAHPDYKVVVTGHSLGGALATLAGADLRNNGYDVDLYTYGAPRVGNRAFAEFITVQTGGTLYRVTHTNDVVPRLPPRQFGYSHPSPEYWIKSGTGVPVRRRDIVKIEGIDATGGNNQNNTPDIPAHLWYFGLIGTCI

SEQ ID NO: 9812 - protein, 274 aa, Thermomyces lanuginosus
SPIRRDVSADLLNQFKLFAQYSAAAYCGRNNDAPAGTNITCSANACPLVEAADSTFLYSFENSGVGDVTGFLAVDNTNKLIVLSFRGSRSIENWITNLNFDLVDINDICSGCRGHDGFTSSWRSVADTLRQAVDDAVAAHPDYKVVVTGHSLGGALATLAGADLRNNGYDVDLYTYGAPRVGNRAFAEFITVQTGGTLYRVTHTNDVVPRLPPRQFGYSHPSPEYWIKSGTLVPVRRRDIVKIEGIDATGGNNQNNAPDIPAHLWYFGAIGTCI

SEQ ID NO: 9813 - protein, 274 aa, Thermomyces lanuginosus
SPIRRDVSADLLNQFKLFAQYSAAAYCGRNNDAPAGTNITCSANACPLVEAADATFLYSFENSGVGDVTGKLAVDNTNKLIVLSFRGSRSIENWITNLNFDLVDINDICSGCRGHDGFTSSWRSVADTLRQAVDDAVAAHPDYKVVVTGHSLGGALATLAGADLRNNGYDVDLYTYGAPRVGNRAFAEFITVQTGGTLYRVTHTNDVVPRLPPRQFGYSHPSPEYWIKSGTLVPVRRRDIVKIEGIDATGGNNQNNAPDIPAHLWYFGAIGTCI

SEQ ID NO: 9814 - protein, 274 aa, Thermomyces lanuginosus
SPIRRDVSADLLNQFKLFAQYSAAAYCGRNNDAPAGTNITCSANACPLVEAADAMFLYSFENSGVGDVTGFLAVDNTNKLIVLSFRGSRSIENWITNLNFDLVDINDICSGCRGHDGFTSSWRSVADTLRQAVDDAVAAHPDYKVVVTGHSLGGALATLAGADLRNNGYDVDLYTYGAPRVGNRAFAEFITVQTGGTLYRVTHTNDVVPRLPPRQFGYSHPSPEYWIKSGTLVPVRRRDIVKIEGIDATGGNNQNNAPDIPAHLWYFGAIGTCI

SEQ ID NO: 9815 - protein, 274 aa, Thermomyces lanuginosus
SPIRRDVSADLLNQFKLFAQYSAAAYCGRNNDAPAGTNITCSANHCPLVEAADATFLYSFENSGVGDVTGFLAVDNTNKLIVLSFRGSRSIENWITNLNFDLVDINDICSGCRGHDGFTSSWRSVADTLRQAVDDAVAAHPDYKVVVTGHSLGGALATLAGADLRNNGYDVDLYTYGAPRVGNRAFAEFITVQTGGTLYRVTHTNDVVPRLPPRQFGYSHPSPEYWIKSGTLVPVRRRDIVKIEGIDATGGNNQNNAPDIPAHLWYFGAIGTCI

SEQ ID NO: 9816 - protein, 274 aa, Thermomyces lanuginosus
SPIRRDVSADLLNQFKLFAQYSAAAYCGRNNDAPAGTNITCSANACPLVEAADANFLYSFENSGVGDVTGFLAVDNTNKLIVLSFRGSRSIENWITNLNFDLVDINDICSGCRGHDGFTSSWRSVADTLRQAVDDAVAAHPDYKVVVTGHSLGGALATLAGADLRNNGYDVDLYTYGAPRVGNRAFAEFITVQTGGTLYRVTHTNDVVPRLPPRQFGYSHPSPEYWIKSGTLVPVRRRDIVKIEGIDATGGNNQNNAPDIPAHLWYFGAIGTCI

SEQ ID NO: 9817 - protein, 274 aa, Thermomyces lanuginosus
SPIRRDVSADLLNQFKLFAQYSATAYCGRNNDAPAGTNITCSANACPLVEAADATFLYSFENSGVGDVTGFLAVDNTNKLIVLSFRGSRSIENWITNLNFDLVDINDICSGCRGHDGFTSSWRSVADTLRQAVDDAVAAHPDYKVVVTGHSLGGALATLAGADLRNNGYDVDLYTYGAPRVGNRAFAEFITVQTGGTLYRVTHTNDVVPRLPPRQFGYSHPSPEYWIKSGTLVPVRRRDIVKIEGIDATGGNNQNNAPDIPAHLWYFGAIGTCI

SEQ ID NO: 9818 - protein, 274 aa, Thermomyces lanuginosus
SPIRRDVSADLLNQFKLFAQYSAAAYCGRNNDAPAGTNITCSANACPLVEAADATFLYSFENSGVGDVTGFLAVDNVNKLIVLSFRGSRSIENWITNLNFDLVDINDICSGCRGHDGFTSSWRSVADTLRQAVDDAVAAHPDYKVVVTGHSLGGALATLAGADLRNNGYDVDLYTYGAPRVGNRAFAEFITVQTGGTLYRVTHTNDVVPRLPPRQFGYSHPSPEYWIKSGTLVPVRRRDIVKIEGIDATGGNNQNNAPDIPAHLWYFGAIGTCI

SEQ ID NO: 9819 - protein, 274 aa, Thermomyces lanuginosus
SPIRRDVSRDLLNQFKLFAQYSAAAYCGRNNDAPAGTNITCSANACPLVEAADATFLYSFENSGMGDVTGFLAVDNTNKLIVLSFRGSRSIENWITNLNFDLVDINDICSGCRGHDGFTSSWRSVADTLRQAVDDAVAAHPDYKVVVTGHSLGGALATLAGADLRNNGYDVDLYTYGAPRVGNRAFAEFITVQTGGTLYRVTHTNDVVPRLPPRQFGYSHPSPEYWIKSGTLVPVRRNDIVKIEGIDATGGNNQNNTPDIPAHLWYFGLIGTCI

SEQ ID NO: 9820 - protein, 274 aa, Thermomyces lanuginosus
SPIRRDVSADLLNQFKLFAQYSAAAYCGRNNDAPAGTNITCSANACPLVEAADATGLYSFENSGVGDVTGFLAVDNTNKLIVLSFRGSRSIENWITNLNFDLVDINDICSGCRGHDGFTSSWRSVADTLRQAVDDAVAAHPDYKVVVTGHSLGGALATLAGADLRNNGYDVDLYTYGAPRVGNRAFAEFITVQTGGTLYRVTHTNDVVPRLPPRQFGYSHPSPEYWIKSGTLVPVRRRDIVKIEGIDATGGNNQNNAPDIPAHLWYFGAIGTCI

SEQ ID NO: 9821 - protein, 274 aa, Thermomyces lanuginosus
SPIRRDVSADLLNQFKLFAQYSAAAYCGRNNDAPAGTNITCSANACPLVEAADATFLYSFENSGVGDVTGFLAVDNTNKKIVLSFRGSRSIENWITNLNFDLVDINDICSGCRGHDGFTSSWRSVADTLRQAVDDAVAAHPDYKVVVTGHSLGGALATLAGADLRNNGYDVDLYTYGAPRVGNRAFAEFITVQTGGTLYRVTHTNDVVPRLPPRQFGYSHPSPEYWIKSGTLVPVRRRDIVKIEGIDATGGNNQNNAPDIPAHLWYFGAIGTCI

SEQ ID NO: 9822 - protein, 274 aa, Thermomyces lanuginosus
SPIRRDVSADLLNQFKLFAQYSAAAYCGRNNDAPAGTVITCSANACPLVEAADATFLYSFENSGVGDVTGFLAVDNTNKLIVLSFRGSRSIENWITNLNFDLVDINDICSGCRGHDGFTSSWRSVADTLRQAVDDAVAAHPDYKVVVTGHSLGGALATLAGADLRNNGYDVDLYTYGAPRVGNRAFAEFITVQTGGTLYRVTHTNDVVPRLPPRQFGYSHPSPEYWIKSGTLVPVRRRDIVKIEGIDATGGNNQNNAPDIPAHLWYFGAIGTCI

SEQ ID NO: 9823 - protein, 274 aa, Thermomyces lanuginosus
SPIRRDVSRDLLNQFKLFAQYSAAAYCGRNNDAPAGTNITCSANACPLVEAADATFLYSFENSGMGDVTGFLAVDNTNKLIVLSFRGSRSIENWITNLNFDLVDINDICSGCRGHDGFTSSWRSVADTLRQAVDDAVAAHPDYKVVVTGHSLGGALATLAGADLRNNGYDVDLYTYGAPRVGNRAFAEFITVQTGGTLYRVTHTNDVVPRLPPRQFGYSHPSPEYWIKSGTGVPVRRRDIVKIEGIDATGGNNQNNTPDIPAHLWYFGLIGTCI

SEQ ID NO: 9824 - protein, 274 aa, Thermomyces lanuginosus
SPIRRDVSADLLNQFKLFAQYSAAAYCGRNNDAPAGTNITCSANACPLVEAADATFLYSFENSGVGDSTGFLAVDNTNKLIVLSFRGSRSIENWITNLNFDLVDINDICSGCRGHDGFTSSWRSVADTLRQAVDDAVAAHPDYKVVVTGHSLGGALATLAGADLRNNGYDVDLYTYGAPRVGNRAFAEFITVQTGGTLYRVTHTNDVVPRLPPRQFGYSHPSPEYWIKSGTLVPVRRRDIVKIEGIDATGGNNQNNAPDIPAHLWYFGAIGTCI

SEQ ID NO: 9825 - protein, 274 aa, Thermomyces lanuginosus
SPIRRDVSADLLNQFKLFAQYSAAAYCGRNNDAPAGTNITCSANACPLVEAADATFLYSFENSGVGDVTGFLAVDNTNKLIVLSFRGSRSIENWITNLNFDLVDINDICSGCRGHDGFTSSWRSVADTLRQAVDDAVAAHPDYKVVVTGHSLGGALATLAGADLRNNGYDVDLYTYGAPRVGNRAFAEFITVQTGGTLYRVTHTNDVVPRLPPRQFGYSHPSPEYWIKSGTLVPVRRRDIVKCEGIDATGCNNQNNTPDIPAHLWYFGLIGTCI

SEQ ID NO: 9826 - protein, 274 aa, Thermomyces lanuginosus
SPIRRDVSADLLNQFKLFAQYSAAAYCGRNNDAPAGTNITCSANACPLVEAADATFLYCFENSGVGDVTGFLAVDNTNKLIVLSFRGSRSIENWITNLNFDLVDINDICSGCRGHDGFTSSWRSVADTLRQAVDDAVAAHPDYKVVVTGHSLGGALATLAGADLRNNGYDVDLYTYGAPRVGNRAFAEFITVQTGGTLYRVTHTNDVVPRLPPRQFGYSHPSPEYWIKSGTLVPVRRRDIVKIEGIDATGGNNQNNAPDIPAHLWYFGAIGTCI

SEQ ID NO: 9827 - protein, 274 aa, Thermomyces lanuginosus
SPIRRDVSADLLNQFKLFAQYSAAAYCGRNKDAPAGTNITCSANACPLVEAADATFLYSFENSGVGDVTGFLAVDNTNKLIVLSFRGSRSIENWITNLNFDLVDINDICSGCRGHDGFTSSWRSVADTLRQAVDDAVAAHPDYKVVVTGHSLGGALATLAGADLRNNGYDVDLYTYGAPRVGNRAFAEFITVQTGGTLYRVTHTNDVVPRLPPRQFGYSHPSPEYWIKSGTLVPVRRRDIVKIEGIDATGGNNQNNAPDIPAHLWYFGAIGTCI

SEQ ID NO: 9828 - protein, 274 aa, Thermomyces lanuginosus
SPIRRDVSADLLNQFKLFAQYSAAAYCGRNNDAPAGTNITCSANACPLVEAADALFLYSFENSGVGDVTGFLAVDNTNKLIVLSFRGSRSIENWITNLNFDLVDINDICSGCRGHDGFTSSWRSVADTLRQAVDDAVAAHPDYKVVVTGHSLGGALATLAGADLRNNGYDVDLYTYGAPRVGNRAFAEFITVQTGGTLYRVTHTNDVVPRLPPRQFGYSHPSPEYWIKSGTLVPVRRRDIVKIEGIDATGGNNQNNAPDIPAHLWYFGAIGTCI

SEQ ID NO: 9829 - protein, 274 aa, Thermomyces lanuginosus
SPIRRDVSADLLNQFKLFAQYSAAAYCGRNNDAPAGTNITCSANACPLVEAADATFLYSFENSGVGDVTGFLAVDNNNSLIVLSFRGSRSIENWITNLNFDLVDINDICSGCRGHDGFTSSWRSVADTLRQAVDDAVAAHPDYKVVVTGHSLGGALATLAGADLRNNGYDVDLYTYGAPRVGNRAFAEFITVQTGGTLYRVTHTNDVVPRLPPRQFGYSHPSPEYWIKSGTLVPVRRRDIVKIEGIDATGGNNQNNTPDIPAHLWYFGLIGTCI

SEQ ID NO: 9830 - protein, 274 aa, Thermomyces lanuginosus
SPIRRDVSADLLNQFKLFAQYSAAAYCGRNNDAPAGTNITCSANACPLVEAADATHLYSFENSGVGDVTGFLAVDNTNKLIVLSFRGSRSIENWITNLNFDLVDINDICSGCRGHDGFTSSWRSVADTLRQAVDDAVAAHPDYKVVVTGHSLGGALATLAGADLRNNGYDVDLYTYGAPRVGNRAFAEFITVQTGGTLYRVTHTNDVVPRLPPRQFGYSHPSPEYWIKSGTLVPVRRRDIVKIEGIDATGGNNQNNAPDIPAHLWYFGAIGTCI

SEQ ID NO: 9831 - protein, 274 aa, Thermomyces lanuginosus
SPIRRDVSADLLNQFKLFAQYSAAAYCGRNNDAPAGTNITCSANACPLVEAADATFWYSFENSGVGDVTGFLAVDNTNKLIVLSFRGSRSIENWITNLNFDLVDINDICSGCRGHDGFTSSWRSVADTLRQAVDDAVAAHPDYKVVVTGHSLGGALATLAGADLRNNGYDVDLYTYGAPRVGNRAFAEFITVQTGGTLYRVTHTNDVVPRLPPRQFGYSHPSPEYWIKSGTLVPVRRRDIVKIEGIDATGGNNQNNAPDIPAHLWYFGAIGTCI

SEQ ID NO: 9832 - protein, 274 aa, Thermomyces lanuginosus
SPIRRDVSADLLNQFKLFAQYSAAAYCGRNNDAPAGTNITCSANACPLVEAADATFLYSFENSGVGDVTGFLAVDNTNKAIVLSFRGSRSIENWITNLNFDLVDINDICSGCRGHDGFTSSWRSVADTLRQAVDDAVAAHPDYKVVVTGHSLGGALATLAGADLRNNGYDVDLYTYGAPRVGNRAFAEFITVQTGGTLYRVTHTNDVVPRLPPRQFGYSHPSPEYWIKSGTLVPVRRRDIVKIEGIDATGGNNQNNAPDIPAHLWYFGAIGTCI

SEQ ID NO: 9833 - protein, 274 aa, Thermomyces lanuginosus
SPIRRDVSADLLNQMKLFAQYSAAAYCGRNNDAPAGTNITCSANACPLVEAADATFLYSFENSGVGDVTGFLAVDNTNKLIVLSFRGSRSIENWITNLNFDLVDINDICSGCRGHDGFTSSWRSVADTLRQAVDDAVAAHPDYKVVVTGHSLGGALATLAGADLRNNGYDVDLYTYGAPRVGNRAFAEFITVQTGGTLYRVTHTNDVVPRLPPRQFGYSHPSPEYWIKSGTLVPVRRRDIVKIEGIDATGGNNQNNAPDIPAHLWYFGAIGTCI

SEQ ID NO: 9834 - protein, 274 aa, Thermomyces lanuginosus
SPIRRDVSADLLNQFKLFAQYSAAAYCGRNNDAPAGTNITCSANACPLVEAADATFLYSFENSGVGDVTGFLAVDNINKLIVLSFRGSRSIENWITNLNFDLVDINDICSGCRGHDGFTSSWRSVADTLRQAVDDAVAAHPDYKVVVTGHSLGGALATLAGADLRNNGYDVDLYTYGAPRVGNRAFAEFITVQTGGTLYRVTHTNDVVPRLPPRQFGYSHPSPEYWIKSGTLVPVRRRDIVKIEGIDATGGNNQNNAPDIPAHLWYFGAIGTCI

SEQ ID NO: 9835 - protein, 274 aa, Thermomyces lanuginosus
SPIRRDVSADLLNQFKLFAQYSAAAYCGRNNDAPAGTNITCSANACPLVEAADATFLYSFENSGVGDVTGFLAVDNTNKLIVLSFRGSRSIENWITNLNFDLVDINDICSGCRGHDGFTSSWRSVADTLRQAVDDAVAAHPDYKVVVTGHSLGGALATLAGADLRNNGYDVDLYTYGAPRVGNRAFAEFITVQTGGTLYRVTHTNDVVPRLPPRQVGYSHPSPEYWIKSGTLVPVRRRDIVKIEGIDATGGNNQNNTPDIPAHLWYFGAIGTCI

SEQ ID NO: 9836 - protein, 274 aa, Thermomyces lanuginosus
SPIRRDVSADLLNQFKLFAMYSAAAYCGRNNDAPAGTNITCSANACPLVEAADATFLYSFENSGVGDVTGFLAVDNTNKLIVLSFRGSRSIENWITNLNFDLVDINDICSGCRGHDGFTSSWRSVADTLRQAVDDAVAAHPDYKVVVTGHSLGGALATLAGADLRNNGYDVDLYTYGAPRVGNRAFAEFITVQTGGTLYRVTHTNDVVPRLPPRQFGYSHPSPEYWIKSGTLVPVRRRDIVKIEGIDATGGNNQNNAPDIPAHLWYFGAIGTCI

SEQ ID NO: 9837 - protein, 274 aa, Thermomyces lanuginosus
SPIRRDVSADLLNQFKLFAQYSAAAYCGRNNDAPAGTNITCSANACPLVEAADATFLYSFENSGVGDMTGFLAVDNTNKLIVLSFRGSRSIENWITNLNFDLVDINDICSGCRGHDGFTSSWRSVADTLRQAVDDAVAAHPDYKVVVTGHSLGGALATLAGADLRNNGYDVDLYTYGAPRVGNRAFAEFITVQTGGTLYRVTHTNDVVPRLPPRQFGYSHPSPEYWIKSGTLVPVRRRDIVKIEGIDATGGNNQNNAPDIPAHLWYFGAIGTCI

SEQ ID NO: 9838 - protein, 269 aa, Thermomyces lanuginosus
DVSADLLNQFKLFAQYSAAAYCGRNNDAPAGTNITCSANACPLVEAADATFLYSFENSGVGDVTGFLAVDNTNKLIVLSFRGSRSIENWITNLNFDLVDINDICSGCRGHDGFTSSWRSVADTLRQAVDDAVAAHPDYKVVVTGHSLGGALATLAGADLRNNGYDVDLYTYGAPRVGNRAFAEFITVQTGGTLYRVTHTNDVVPRLPPRQFGYSHPSPEYWIKSGTLVPVRRRDIVKIEGIDATGGNNQNNTPDIPAHLWYFGLIGTCI

SEQ ID NO: 9839 - protein, 269 aa, Thermomyces dupontii
EVSQDLFDQFNLFAQYSAAAYCAKNNDAPAGANVTCSGSICPEVEKADATFLYSFEDSGVGDVTGFLALDNTNRLIVLSFRGSRSLENWIGNINLDLKGIDDICSGCKGHDGFTSSWRSVANTLTQQVQNAVREHPDYRVVFTGHSLGGALATVAGASLRGNGYDIDVFSYGAPRVGNRAFAVFLTAQTGGTLYRITHTNDIVPRLPPRELGYSHSSPEYWITSGTLVPVTKNDIVKVEGIDSTDGNNQPNTPDIAAHLWYFGLIGTCL

SEQ ID NO: 9840 - protein, 269 aa, Thermomyces dupontii
EVSQDLFDQFNLFAQYSAAAYCAKNNDAPAGANVTCRGSICPEVEKADATFLYSFEDSGVGDVTGFLALDNTNRLIVLSFRGSRSLENWIGNINLDLKGIDDICSGCKGHDGFTSSWRSVANTLTQQVQNAVREHPDYRVVFTGHSLGGALATVAGASLRGNGYDIDVFSYGAPRVGNRAFAVFLTAQTGGTLYRITHTNDIVPRLPPRELGYSHSSPEYWITSGTLVPVTCNDIVKVEGIDSTDGNNQPNTPDIAAHLWYFGLIGTCL

SEQ ID NO: 9841 - protein, 269 aa, Talaromyces thermophilus
EVSQDLFDQFNLFAQYSAAAYCAKNNDAPAGANVTCRESICPEVEKADATFLYSFEDSGVGDVTGFLALDNTNRLIVLSFRGSRSLENWIGNINLDLKGIDDICSGCKGHDGFTSSWRSVANTLTQQVQNAVREHPDYRVVFTGHSLGGALATVAGASLRGNGYDIDVFSYGAPRVGNRAFAEFLTAQTGGTLYRITHTNDIVPRLPPRELGYSHSSPEYWITSGTLVPVTKNDIVKVEGIDSTDGNNQPNTPDIAAHLWYFGLIGTCL

SEQ ID NO: 9842 - protein, 269 aa, Thermomyces lanuginosus
DVSQDLYDQFKLFAHYAAAAYCGKNNDAPPGTKITCTGNNCPEVEKADATFIYSFEDSGLGDVTGFLALDNTNKLIVLSFRGSRSIENWIANLDFLLTDISDICSGCKAHRGFYNAWRSVRDTLRAKVEDAVREYPDYRVVFTGHSLGGALATVAGADLRGNGYDIDVFSYGAPRVGNRAFAEFLTVQTGGTLYRITHTNDIVPRLPPREFGYSHSSPEYWIKSGTLVPVTRNDIVVCEGIDSTGGNNGTNIPDIPAHLWYFGIIGTCL

SEQ ID NO: 9843 - protein, 269 aa, Thermomyces dupontii
EVSQDLFDQFNLFAQYSAAAYCAKNNDAPAGANVTCRGSICPEVEKADATFLYSFEDSGVGDVTGFLALDNTNRLIVLSFRGSRSLENWIGNIALDLKGIDDICSGCKGHDGFTSSWRSVANTLTQQVQNAVREHPDYRVVFTGHSLGGALATVAGASLRGNGYDIDVFSYGAPRVGNRAFAVFLTAQTGGTLYRITHTNDIVPRLPPRELGYSHSSPEYWITSGTLVPVTKNDIVKVEGIDSTDGNNQPNTPDIAAHLWYFGLIGTCL

SEQ ID NO: 9844 - protein, 269 aa, Thermomyces dupontii
EVSQDLFDQFNLFAQYSAAAYCAKNNDAPAGANVTCRGSVCPEVEKADATFLYSFEDSGVGDVTGFLALDNTNRLIVLSFRGSRSLENWIGNINLDLKGIDDICSGCKGHDGFTSSWRSVANTLTQQVQNAVREHPDYRVVFTGHSLGGALATVAGASLRGNGYDIDVFSYGAPRVGNRAFAVFLTAQTGGTLYRITHTNDIVPRLPPRELGYSHSSPEYWITSGTLVPVTKNDIVKVEGIDSTDGNNQPNTPDIAAHLWYFGLIGTCL

SEQ ID NO: 9845 - protein, 269 aa, Thermomyces dupontii
EVSQDLFDQFNLFAQYSAAAYCAKNNDAPAGANVTCRGSICPEVEKADATFLYSFEDSGVGDVTGFLALDNTNRLIVLSFRGSRSLENWIGNINADLKGIDDICSGCKGHDGFTSSWRSVANTLTQQVQNAVREHPDYRVVFTGHSLGGALATVAGASLRGNGYDIDVFSYGAPRVGNRAFAVFLTAQTGGTLYRITHTNDIVPRLPPRELGYSHSSPEYWITSGTLVPVTKNDIVKVEGIDSTDGNNQPNTPDIAAHLWYFGLIGTCL

SEQ ID NO: 9846 - protein, 291 aa, Thermomyces lanuginosus
MRSSLVLFFVSAWTALASPIRRDVSADLLNQFKLFAQYSAAAYCGRNNDAPAGTNITCSANACPLVEAADATFLYSFENSGMGDVTGFLAVDNTNKLIVLSFRGSRSIENWITNLNFDLVDINDICSGCRGHDGFTSSWRSVADTLNQSVDDAVAAHPDYKVVVTGHSLGGALATLAGADLRNNGYDVDLYTYGAPRVGNRAFAEFITVQTGGTLYRVTHTNDVVPRLPPRQFGYSHPSPEYWIKSGTGVPVRRRDIVKIEGIDATGGNNQNNTPDIPAHLWYFGLIGTCI

SEQ ID NO: 9847 - protein, 291 aa, Thermomyces lanuginosus
MRSSLVLFFVSAWTALASPIRRDVSADLLNQFKLFAQYSAAAYCGRNNDAPAGTNITCSANACPLVEAADATFLYSFENSGMGDVTGFLAVDNTNKLIVLSFRGSRSIENWITNLNFDLVNISDICSGCRGHDGFTSSWRSVADTLRQAVDDAVAAHPDYKVVVTGHSLGGALATLAGADLRNNGYDVDLYTYGAPRVGNRAFAEFITVQTGGTLYRVTHTNDVVPRLPPRQFGYSHPSPEYWIKSGTGVPVRRRDIVKIEGIDATGGNNQNNTPDIPAHLWYFGLIGTCI

SEQ ID NO: 9848 - protein, 291 aa, Thermomyces lanuginosus
MRSSLVLFFVSAWTALASPIRRDVSADLLNQFKLFAQYSAAAYCGRNNDAPAGTNITCSANACPLVEAADATFLYSFENSGMGDVTGFLAVDNTNKLIVLSFRGSRSIENWITNLNFDLVDINDICSGCRGHDGFTSSWRSVADTLRQAVDDAVAAHPDYKVVVTGHSLGGALATLAGADLRNNGYDVDLYTYGAPRVGNRAFAEFITVQTGGTLYRVTHTNDVVPRLPPRQFGYSHPSPEYWIKSGTGVPVRRRDIVKIEGIDATGGNNQNNTPDIPAHLWYFGIIGTCI

SEQ ID NO: 9849 - protein, 291 aa, Thermomyces lanuginosus
MRSSLVLFFVSAWTALASPIRRDVSADLLNQFKLFAQYSAAAYCGRNNDAPAGTNITCSANACPLVEAADATFLYSFENSGMGDVTGFLAVDNTNKLIVLSFRGSRSIENWIANLNFDLVDINDICSGCRGHDGFTSSWRSVADTLRQAVDDAVAAHPDYKVVVTGHSLGGALATLAGADLRNNGYDVDLYTYGAPRVGNRAFAEFITVQTGGTLYRVTHTNDVVPRLPPRQFGYSHPSPEYWIKSGTRVPVRRRDIVKIEGIDATGGNNQNNAPDIPAHLWYFGVIGTCI

SEQ ID NO: 9850 - protein, 291 aa, Thermomyces lanuginosus
MRSSLVLFFVSAWTALASPIRRDVSADLLNQFKLFAQYSAAAYCGRNNDAPAGTNITCSANACPLVEAADATFLYSFENSGMGDVTGFLAVDNTNKLIVLSFRGSRSIENWITNLNFDLVDINDICSGCRGHDGFTSSWRSVADTLRQAVDDAVAAHPDYKVVVTGHSLGGALATLAGADLRNNGYDVDLYTYGAPRVGNRAFAEFITVQTGGTLYRVTHTNDVVPRLPPRQFGYSHPSPEYWIKSGTGVPVRRRDIVKIEGIDATGGNNQNNTPDIPAHLWYFGVIGTCI

SEQ ID NO: 9851 - protein, 291 aa, Thermomyces lanuginosus
MRSSLVLFFVSAWTALASPIRRDVSADLLNQFKLFAQYSAAAYCGRNNDAPAGTNITCSANACPLVEAADATFLYSFENSGVGDVTGFLAVDNTNKLIVLSFRGSRSIENWITNLNFDLVDINDICSGCRGHDGFTSSWRSVADTLRQAVDDAVAAHPDYKVVVTGHSLGGALATLAGADLRNNGYDVDLYTYGAPRVGNRAFAEFITVQTGGTLYRVTNTNDVVPRLPPRQFGYSHPSPEYWIKSGTLVPVRRRDIVKIEGIDATGGNNQNNTPDITIHLWYFGLIGTCI

SEQ ID NO: 9852 - protein, 291 aa, Thermomyces lanuginosus
MRSSLVLFFVSAWTALASPIRRDVSADLLNQFKLFAQYSAAAYCGRNNDAPAGTNITCSANACPLVEAADATFLYSFENSGMGDVTGFLAVDNTNKLIVLSFRGSRSIENWIANLNFDLVDINDICSGCRGHDGFTSSWRSVADTLRQAVDDAVAAHPDYKVVVTGHSLGGALATLAGADLRNNGYDVDLYTYGAPRVGNRAFAEFITVQTGGTLYRVTHTNDVVPRLPPRQFGYSHPSPEYWIKSGTVVPVRRRDIVKIEGIDATGGNNQNNAPDIPAHLWYFGMIGTCI

SEQ ID NO: 9853 - protein, 291 aa, Thermomyces lanuginosus
MRSSLVLFFVSAWTALASPIRRDVSADLLNQFKLFAQYSAAAYCGRNNDAPAGTNITCSANACPLVEAADATFLYSFENSGVGDVTGFLAVDNTNKLIVLSFRGSRSIENWIANLNFDLVDINDICSGCRGHDGFTSSWRSVADTLRQAVDDAVAAHPDYKVVVTGHSLGGALATLAGADLRNNGYDVDLYTYGAPRVGNRAFAEFITVQTGGTLYRVTHTNDVVPRLPPRQFGYSHPSPEYWIKSGTLVPVRRRDIVKIEGIDATGGNNQNNAPDLKAHLWYFGAIGTCI

SEQ ID NO: 9854 - protein, 291 aa, Thermomyces lanuginosus
MRSSLVLFFVSAWTALASPIRRDVSADLLNQFKLFAQYSAAAYCGRNNDAPAGTNITCSANACPLVEAADATFLYSFENSGVGDVTGFLAVDNTNKLIVLSFRGSRSIENWITNLNFDLVDINDICSGCRGHDGFTSSWRSVADTLRQAVDDAVAAHPDYKVVVTGHSLGGALATLAGADLRNNGYDVDLYTYGAPRVGNRAFAEFITVQTGGTLYRVTHTNDVVPRLPPRQFGYSHPSPEYWIKSGTGAPVRRRDIVKIEGIDATGGNNQNNAPDIPAHLWYFGIIGTCI

SEQ ID NO: 9855 - protein, 291 aa, Thermomyces lanuginosus
MRSSLVLFFVSAWTALASPIRRDVSADLLNQFKLFAQYSAAAYCGRNNDAPAGTNITCSANACPLVEAADATFLYSFENSGVGDVTGFLAVDNTNKLIVLSFRGSRSIENWITNLNFDLVDINDICSGCQGHDGFTSSWRSVADTLRQAVDDAVAAHPDYKVVVTGHSLGGALATLAGADLRNNGYDVDLYTYGAPRVGNEAFAEFITVQTGGTLYRVTHTNDVVPRLPPRQFEYSHPSPEYWIKSGTLVPVRRRDIVKIEGIDATGGNNQNNTPDIPAHLWYFGLIGTCI

SEQ ID NO: 9856 - protein, 291 aa, Thermomyces lanuginosus
MRSSLVLFFVSAWTALASPIRRDVSADLLNQFKLFAQYSAAAYCGRNNDAPAGTNITCSANACPLVEAADATFLYSFENSGMGDVTGFLAVDNTNKLIVLSFRGSRSIENWITNLNFDLVDINDICSGCRGHDGFTSSWRSVADTLRQAVDDAVAAHPDYKVVVTGHSLGGALATLAGADLRNNGYDVDLYTYGAPRVGNRAFAEFITVQTGGTLYRVTHTNDVVPRLPPRQFGYSHPSPEYWIKSGTGQPVRRRDIVKIEGIDATGGNNQNNTPDIPAHLWYFGLIGTCI

SEQ ID NO: 9857 - protein, 274 aa, Thermomyces lanuginosus
SPIRRDVSADLLNQFKLFAQYSAAAYCGRNNDAPAGTNITCSANACPLVEAADATFLYSFENSGMGDVTGFLAVDNTNKLIVLSFRGSRSIENWITNLNFDLVDINDICSGCRGHDGFTSSWRSVADTLRQAVDDAVAAHPDYKVVVTGHSLGGALATLAGADLRNNGYDVDLYTYGAPRVGNRAFAEFITVQTGGTLYRVTHTNDVVPRLPPRQFGYSHPSPEYWIKSGTGVPVRRNDIVKIEGIDATGGNNQNNTPDIPAHLWYFGLIGTCI

SEQ ID NO: 9858 - protein, 274 aa, Thermomyces lanuginosus
SPIRRDVSADLLNQFKLFAQYSAAAYCGRNNDAPAGTNITCSANACPLVEAADATFLYSFENSGVGDVTGFLAVDNTNKLIVLSFRGSRSIENWIANLNFDLVDINDICSGCRGHDGFTSSWRSVADTLRQAVDDAVAAHPDYKVVVTGHSLGGALATLAGADLRNNGYDVDLYTYGAPRVGNRAFAEFITVQTGGTLYRVTHTNDVVPRLPPRQFGYSHPSPEYWIKSGTLVPVRRRDIVKIEGIDATGGNNQNNAPDLKAHLWYFGAIGTCI

SEQ ID NO: 9859 - protein, 274 aa, Thermomyces lanuginosus
SPIRRDVSADLLNQFKLFAQYSAAAYCGRNNDAPAGTNITCSANACPLVEAADATFLYSFENSGMGDVTGFLAVDNTNKLIVLSFRGSRSIENWIANLNFDLVDINDICSGCRGHDGFTSSWRSVADTLRQAVDDAVAAHPDYKVVVTGHSLGGALATLAGADLRNNGYDVDLYTYGAPRVGNRAFAEFITVQTGGTLYRVTHTNDVVPRLPPRQFGYSHPSPEYWIKSGTVVPVRRRDIVKIEGIDATGGNNQNNAPDIPAHLWYFGMIGTCI

SEQ ID NO: 9860 - protein, 274 aa, Thermomyces lanuginosus
SPIRRDVSADLLNQFKLFAQYSAAAYCGRNNDAPAGTNITCSANACPLVEAADATFLYSFENSGVGDVTGFLAVDNTNKLIVLSFRGSRSIENWITNLNFDLVDINDICSGCRGHDGFTSSWRSVADTLRQAVDDAVAAHPDYKVVVTGHSLGGALATLAGADLRNNGYDVDLYTYGAPRVGNRAFAEFITVQTGGTLYRVTHTNDVVPRLPPRQFGYSHPSPEYWIKSGTGAPVRRRDIVKIEGIDATGGNNQNNAPDIPAHLWYFGIIGTCI

SEQ ID NO: 9861 - protein, 274 aa, Thermomyces lanuginosus
SPIRRDVSADLLNQFKLFAQYSAAAYCGRNNDAPAGTNITCSANACPLVEAADATFLYSFENSGMGDVTGFLAVDNTNKLIVLSFRGSRSIENWITNLNFDLVDINDICSGCRGHDGFTSSWRSVADTLRQAVDDAVAAHPDYKVVVTGHSLGGALATLAGADLRNNGYDVDLYTYGAPRVGNRAFAEFITVQTGGTLYRVTHTNDVVPRLPPRQFGYSHPSPEYWIKSGTGQPVRRRDIVKIEGIDATGGNNQNNTPDIPAHLWYFGLIGTCI

SEQ ID NO: 9862 - protein, 274 aa, Thermomyces lanuginosus
SPIRRDVSADLLNQFKLFAQYSAAAYCGRNNDAPAGTNITCSANACPLVEAADATFLYSFENSGMGDVTGFLAVDNTNKLIVLSFRGSRSIENWITNLNFDLVDINDICSGCRGHDGFTSSWRSVADTLRQAVDDAVAAHPDYKVVVTGHSLGGALATLAGADLRNNGYDVDLYTYGAPRVGNRAFAEFITVQTGGTLYRVTHTNDVVPRLPPRQFGYSHPSPEYWIKSGTGVPVRRRDIVKIEGIDATGGNNQNNTPDIPAHLWYFGVIGTCI

SEQ ID NO: 9863 - protein, 274 aa, Thermomyces lanuginosus
SPIRRDVSADLLNQFKLFAQYSAAAYCGRNNDAPAGTNITCSANACPLVEAADATFLYSFENSGVGDVTGFLAVDNTNKLIVLSFRGSRSIENWITNLNFDLVDINDICSGCQGHDGFTSSWRSVADTLRQAVDDAVAAHPDYKVVVTGHSLGGALATLAGADLRNNGYDVDLYTYGAPRVGNEAFAEFITVQTGGTLYRVTHTNDVVPRLPPRQFEYSHPSPEYWIKSGTLVPVRRRDIVKIEGIDATGGNNQNNTPDIPAHLWYFGLIGTCI

SEQ ID NO: 9864 - protein, 274 aa, Thermomyces lanuginosus
SPIRRDVSADLLNQFKLFAQYSAAAYCGRNNDAPAGTNITCSANACPLVEAADATFLYSFENSGMGDVTGFLAVDNTNKLIVLSFRGSRSIENWITNLNFDLVNISDICSGCRGHDGFTSSWRSVADTLRQAVDDAVAAHPDYKVVVTGHSLGGALATLAGADLRNNGYDVDLYTYGAPRVGNRAFAEFITVQTGGTLYRVTHTNDVVPRLPPRQFGYSHPSPEYWIKSGTGVPVRRRDIVKIEGIDATGGNNQNNTPDIPAHLWYFGLIGTCI

SEQ ID NO: 9865 - protein, 274 aa, Thermomyces lanuginosus
SPIRRDVSADLLNQFKLFAQYSAAAYCGRNNDAPAGTNITCSANACPLVEAADATFLYSFENSGVGDVTGFLAVDNTNKLIVLSFRGSRSIENWITNLNFDLVDINDICSGCRGHDGFTSSWRSVADTLRQAVDDAVAAHPDYKVVVTGHSLGGALATLAGADLRNNGYDVDLYTYGAPRVGNRAFAEFITVQTGGTLYRVTNTNDVVPRLPPRQFGYSHPSPEYWIKSGTLVPVRRRDIVKIEGIDATGGNNQNNTPDITIHLWYFGLIGTCI

SEQ ID NO: 9866 - protein, 274 aa, Thermomyces lanuginosus
SPIRRDVSADLLNQFKLFAQYSAAAYCGRNNDAPAGTNITCSANACPLVEAADATFLYSFENSGMGDVTGFLAVDNTNKLIVLSFRGSRSIENWIANLNFDLVDINDICSGCRGHDGFTSSWRSVADTLRQAVDDAVAAHPDYKVVVTGHSLGGALATLAGADLRNNGYDVDLYTYGAPRVGNRAFAEFITVQTGGTLYRVTHTNDVVPRLPPRQFGYSHPSPEYWIKSGTRVPVRRRDIVKIEGIDATGGNNQNNAPDIPAHLWYFGVIGTCI

SEQ ID NO: 9867 - protein, 274 aa, Thermomyces lanuginosus
SPIRRDVSADLLNQFKLFAQYSAAAYCGRNNDAPAGTNITCSANACPLVEAADATFLYSFENSGMGDVTGFLAVDNTNKLIVLSFRGSRSIENWITNLNFDLVDINDICSGCRGHDGFTSSWRSVADTLRQAVDDAVAAHPDYKVVVTGHSLGGALATLAGADLRNNGYDVDLYTYGAPRVGNRAFAEFITVQTGGTLYRVTHTNDVVPRLPPRQFGYSHPSPEYWIKSGTGVPVRRRDIVKIEGIDATGGNNQNNTPDIPAHLWYFGIIGTCI

SEQ ID NO: 9868 - protein, 274 aa, Thermomyces lanuginosus
SPIRRDVSADLLNQFKLFAQYSAAAYCGRNNDAPAGTNITCSANACPLVEAADATFLYSFENSGMGDVTGFLAVDNTNKLIVLSFRGSRSIENWITNLNFDLVDINDICSGCRGHDGFTSSWRSVADTLNQSVDDAVAAHPDYKVVVTGHSLGGALATLAGADLRNNGYDVDLYTYGAPRVGNRAFAEFITVQTGGTLYRVTHTNDVVPRLPPRQFGYSHPSPEYWIKSGTGVPVRRRDIVKIEGIDATGGNNQNNTPDIPAHLWYFGLIGTCI

SEQ ID NO: 9869 - protein, 281 aa, Thermomyces dupontii
SATSSATPPTSSEVSQDLFDQFNLFAQYSAAAYCAKNNDAPAGANVTCRGSICPEVEKADATFLYSFEDSGVGDVTGFLALDNTNRLIVLSFRGSRSLENWIGNINLDLKGIDDICSGCKGHDGFTSSWRSVANTLTQQVQNAVREHPDYRVVFTGHSLGGALATVAGASLRGNGYDIDVFSYGAPRVGNRAFAEFLTAQTGGTLYRITHTNDIVPRLPPRELGYSHSSPEYWITSGTLVPVTKNDIVKVEGIDSTDGNNQPNTPDIAAHLWYFGLIGTCL

SEQ ID NO: 9870 - protein, 291 aa, Thermomyces lanuginosus
MRSSLVLFFVSAWTALASPIRRDVSADLLNQFKLFAQYSAAAYCGRNNDAPAGTNITCSANACPLVEAADATFLYSFENSGVGDVTGFLAVDNTNKLIVLSFRGSRSIENWIANLNFDLVDINDICSGCRGHDGFTSSWRSVADTLRQAVDDAVAAHPDYKVVVTGHSLGGALATLAGADLRNNGYDVDLYTYGAPRVGNRAFAEFITVQTGGTLYRVTNTNDVVPRLPPRQFGYSHPSPEYWIKSGTLVPVRRRDIVKIEGIDATGGNNQNNTPSITIHLWYFGLIGTCI

SEQ ID NO: 9871 - protein, 291 aa, Thermomyces lanuginosus
MRSSLVLFFVSAWTALASPIRRDVSADLLNQFKLFAQYSAAAYCGRNNDAPAGTNITCSANACPLVEAADATFLYSFENSGMGDVTGFLAVDNTNKLIVLSFRGSRSIENWITNLNFDLVDINDICSGCRGHDGFTSSWRSVADTLRQAVDDAVAAHPDYKVVVTGHSLGGALATLAGADLRNNGYDVDLYTYGAPRVGNRAFAEFITVQTGGTLYRVTHTNDVVPRLPPRQFGYSHPSPEYWIKSGTGRPVRRRDIVKIEGIDATGGNNQNNTPDIPAHLWYFGTIGTCI

SEQ ID NO: 9872 - protein, 291 aa, Thermomyces lanuginosus
MRSSLVLFFVSAWTALASPIRRDVSADLLNQFKLFAQYSAAAYCGRNNDAPAGTNITCSANACPLVEAADATFLYSFENSGMGDVTGFLAVDNTNKLIVLSFRGSRSIENWITNLNFDLVDINDICSGCRGHDGFTSSWRSVADTLRQAVDDAVAAHPDYKVVVTGHSLGGALATLAGADLRNNGYDVDLYTYGAPRVGNRAFAEFITVQTGGTLYRVTHTNDVVPRLPPRQFGYSHPSPEYWIKSGTGLPVRRRDIVKIEGIDATGGNNQNNAPDIPAHLWYFGYIGTCI

SEQ ID NO: 9873 - protein, 291 aa, Thermomyces lanuginosus
MRSSLVLFFVSAWTALASPIRRDVSRDLLNQFKLFAQYSAAAYCGRNNDAPAGTNITCSANACPLVEAADATFLYSFENSGVGDVTGFLAVDNTNKLIVLSFRGSRSIENWVTNLEFLLVDIPDICSGCRGHDGFTSSWRSVADTLRQAVDDAVAAHPDYKVVVTGHSLGGALATLAGADLRNNGYDVDLYTYGAPRVGNRAFAEFITVQTGGTLYRVTHTNDVVPRLPPRQFGYSHPSPEYWIKSGTLVPVRRNDIVKIEGIDATGGNNQNNAPDIPAHLWYFGAIGTCI

SEQ ID NO: 9874 - protein, 291 aa, Thermomyces lanuginosus
MRSSLVLFFVSAWTALASPIRRDVSADLLNQFKLFAQYSAAAYCGRNNDAPAGTNITCSANACPLVEAADATFLYSFENSGMGDVTGFLAVDNTNKLIVLSFRGSRSIENWITNLNFDLVDINDICSGCRGHDGFTSSWRSVADTLRQAVDDAVAAHPDYKVVVTGHSLGGALATLAGADLRNNGYDVDLYTYGAPRVGNRAFAEFITVQTGGTLYRVTHTNDVVPRLPPRQFGYSHPSPEYWIKSGTVPPVRRRDIVKIEGIDATGGNNQNNAPDIPAHLWYFGIIGTCI

SEQ ID NO: 9875 - protein, 291 aa, Thermomyces lanuginosus
MRSSLVLFFVSAWTALASPIRRDVSADLLNQFKLFAQYSAAAYCGRNNDAPAGTNITCSANACPLVEAADATFLYSFENSGMGDVTGFLAVDNTNKLIVLSFRGSRSIENWITNLNFDLVDINDICSGCRGHDGFTSSWRNVSDTLRQAVDDAVAAHPDYKVVVTGHSLGGALATLAGADLRNNGYDVDLYTYGAPRVGNRAFAEFITVQTGGTLYRVTHTNDVVPRLPPRQFGYSHPSPEYWIKSGTGVPVRRRDIVKIEGIDATGGNNQNNTPDIPAHLWYFGLIGTCI

SEQ ID NO: 9876 - protein, 291 aa, Thermomyces lanuginosus
MRSSLVLFFVSAWTALASPIRRCVSADLLNQFKLFAQYSAAAYCGRNNDAPAGTNITCSANACPLVEAADATFLYSFENSGVGDVTGFLAVDNTNKLIVLSFRGSRSIENWITNLNFDLVDINDICSGCRGHDGFTSSWRSVADTLRQAVDDAVAAHPDYKVVVTGHSLGGALATLAGADLRNNGYDVDLYTYGAPRVGNRAFAEFITVQTGGTLYRVTHTNDCVPRLPPRQFGYSHPSPEYWIKSGTLVPVRRCDIVKCEGIDATCGNNQNNACDIPAHLWYFGAIGTCI

SEQ ID NO: 9877 - protein, 269 aa, Thermomyces dupontii
EVSQDLFDQFNLFAQYSAAAYCAKNNDAPAGANVTCRGSICPEVEKADATFLYSFEDSGVGDVTGFLALDNTNRLIVLSFRGSRSLENWIGNINLDLTGIDDICSGCKGHDGFTSSWRSVANTLTQQVQNAVREHPDYRVVFTGHSLGGALATVAGASLRGNGYDIDVFSYGAPRVGNRAFAVFLTAQTGGTLYRITHTNDIVPRLPPRELGYSHSSPEYWITSGTLVPVTKNDIVKVEGIDSTDGNNQPNTPDIAAHLWYFGLIGTCL

SEQ ID NO: 9878 - protein, 269 aa, Synthetic construct
EVSQDLFDQFNLFAQYSAAAYCAKNNDAPAGANVTCSENVCPEVEKADATFLYSFEDSGVGDVTGFLALDNTNRLIVLSFRGSRSLENWIGNINLDLKGIDDICSGCKGHDGFTSSWRSVANTLTQQVQNAVREHPDYRVVFTGHSLGGALATVAGASLRGNGYDIDVFSYGAPRVGNRAFAVFLTAQTGGTLYRITHTNDIVPRLPPRELGYSHSSPEYWITSGTLVPVTKNDIVKVECIDCTDGNNQPNTPDIAAHLWYFGLIGTCL

SEQ ID NO: 9879 - protein, 269 aa, Thermomyces dupontii
EVSQDLFDQFNLFAQYSAAAYCAKNNDAPAGANVTCRESICPEVEKADATFLYSFEDSGVGDVTGFLALDNTNRLIVLSFRGSRSLENWIGNINLDLKGIDDICSGCKGHDGFTSSWRSVANTLTQQVQNAVREHPDYRVVFTGHSLGGALATVAGASLRGNGYDIDVFSYGAPRVGNRAFAVFLTAQTGGTLYRITHTNDIVPRLPPRELGYSHSSPEYWITSGTLVPVTKNDIVKVEGIDSTDGNNQPNTPDIAAHLWYFGLIGTCL

SEQ ID NO: 9880 - protein, 269 aa, Thermomyces dupontii
EVSQDLCDQFNLFAQYSAAAYCAKNNDAPAGANVTCRGSICPEVEKADATFLYSFEDSGVGDVTGFLALDNTNRLIVLSFRGSRSLENWIGNINLDLKGIDDICSGCKGHDGFTSSWRSVANTLTQQVQNAVREHPDYRVVFTGHSLGGALATVAGASLRGNGYDIDVFSYGAPRVGNRAFAVFLTAQTGGTLYRITHTNDIVPRLPPRELGYSHSSPEYWITSGTLVPVTKNDIVKVEGIDSTDGNNQPNTPDIAAHLWYFGLIGTCL

SEQ ID NO: 9881 - protein, 269 aa, unidentified
EVSQDLFDQFNLFAQYSAAAYCAKNNHAPVGADVTCRGSICPEVEKADATFLYSFEDSGVGDVTGFLALDNTNRLIVLSFRGSRSLENWIGNINLDLKGIDDICSGCKGHDGFTSSWRSVANTLTQQVQNAVREHPDYRVVFTGHSLGGALATVAGASLRGNGYDIDVFSYGAPRVGNRAFAEFLTAQTGGTLYRITHTNDIVPRLPPRELGYSHSSPEYWITSGTLVPVTKNDIVKVEGIDSTDGNNQPNTPDIAAHLWYFGLIGTCL

SEQ ID NO: 9882 - protein, 269 aa, Thermomyces dupontii
EVSQDLCDQFNLFAQYSAAAYCAKNNDAPAGANVTCSENVCPEVEKADATFLYSFEDSGVGDVTGFLALDNTNRLIVLSFRGSRSLENWIGNLAADLTEIDDICSGCKGHDGFTSSWRSVANTLTQQVQNAVREHPDYRVVFTGHSLGGALATVAGASLRGNGYDIDVFSYGAPRVGNRAFAVFLTAQTGGTLYRITHTNDIVPRLPPRELGYSHSSPEYWITSGNLVPVTCNDIVKVEGIDSTDGNNQPNTPDIAAHLWYFGLIGTCL

SEQ ID NO: 9883 - protein, 269 aa, Thermomyces dupontii
EVSQDLFDQFNLFAQYSAAAYCAKNNDAPAGANVTCRGSICPEVEKADATFLYSFEDSGVGDVTGFLALDNTNRLIVLSFRGSRSLENWIGNINLDLKGIDDICSGCKGHDGFTSSWRSVANTLTQQVQNAVREHPDYRVVFTGHSLGGALATVAGASLRGNGYDIDVFSYGAPRVGNRAFAVFLTAQTGGTLYRITHTNDIVPRLPPRELGYSHSSPEYWITSGNLVPVTKNDIVKVEGIDSTDGNNQPNTPDIAAHLWYFGLIGTCL

SEQ ID NO: 9884 - protein, 268 aa, Thermomyces dupontii
EVSQDLCDQFNLFAQYSAAAYCAKNNDAPAGANVTCSENVCPEVEKADATFLYSFEDSGVGDVTGFLALDNTNRLIVLSFRGSRSLENWIGNLAADLTEIDDICSGCKGHDGFTSSWRSVANTLTQQVQNAVREHPDYRVVFTGHSLGGALATVAGASLRGNGYDIDVFSYGAPRVGNRAFAVFLTAQTGGTLYRITHTNDIVPRLPPRELGYSHSSPEYWITSGNLVPVTCNDIVKVEGIDSTDGNNQPNTPDIAAHLWYFGLIGTC

SEQ ID NO: 9885 - protein, 274 aa, Thermomyces lanuginosus
SPIRRDVSADLLNQFKLFAQYSAAAYCGRNNDAPAGTNITCSANACPLVEAADATFLYSFENSGMGDVTGFLAVDNTNKLIVLSFRGSRSIENWITNLNFDLVDINDICSGCRGHDGFTSSWRNVSDTLRQAVDDAVAAHPDYKVVVTGHSLGGALATLAGADLRNNGYDVDLYTYGAPRVGNRAFAEFITVQTGGTLYRVTHTNDVVPRLPPRQFGYSHPSPEYWIKSGTGVPVRRRDIVKIEGIDATGGNNQNNTPDIPAHLWYFGLIGTCI

SEQ ID NO: 9886 - protein, 274 aa, Thermomyces lanuginosus
SPIRRDVSADLLNQFKLFAQYSAAAYCGRNNDAPAGTNITCSANACPLVEAADATFLYSFENSGMGDVTGFLAVDNTNKLIVLSFRGSRSIENWITNLNFDLVDINDICSGCRGHDGFTSSWRSVADTLRQAVDDAVAAHPDYKVVVTGHSLGGALATLAGADLRNNGYDVDLYTYGAPRVGNRAFAEFITVQTGGTLYRVTHTNDVVPRLPPRQFGYSHPSPEYWIKSGTVPPVRRRDIVKIEGIDATGGNNQNNAPDIPAHLWYFGIIGTCI

SEQ ID NO: 9887 - protein, 274 aa, Thermomyces lanuginosus
SPIRRDVSADLLNQFKLFAQYSAAAYCGRNNDAPAGTNITCSANACPLVEAADATFLYSFENSGMGDVTGFLAVDNTNKLIVLSFRGSRSIENWITNLNFDLVDINDICSGCRGHDGFTSSWRSVADTLRQAVDDAVAAHPDYKVVVTGHSLGGALATLAGADLRNNGYDVDLYTYGAPRVGNRAFAEFITVQTGGTLYRVTHTNDVVPRLPPRQFGYSHPSPEYWIKSGTGRPVRRRDIVKIEGIDATGGNNQNNTPDIPAHLWYFGTIGTCI

SEQ ID NO: 9888 - protein, 274 aa, Thermomyces lanuginosus
SPIRRDVSADLLNQFKLFAQYSAAAYCGRNNDAPAGTNITCSANACPLVEAADATFLYSFENSGVGDVTGFLAVDNTNKLIVLSFRGSRSIENWIANLNFDLVDINDICSGCRGHDGFTSSWRSVADTLRQAVDDAVAAHPDYKVVVTGHSLGGALATLAGADLRNNGYDVDLYTYGAPRVGNRAFAEFITVQTGGTLYRVTNTNDVVPRLPPRQFGYSHPSPEYWIKSGTLVPVRRRDIVKIEGIDATGGNNQNNTPSITIHLWYFGLIGTCI

SEQ ID NO: 9889 - protein, 274 aa, Thermomyces lanuginosus
SPIRRDVSADLLNQFKLFAQYSAAAYCGRNNDAPAGTNITCSANACPLVEAADATFLYSFENSGMGDVTGFLAVDNTNKLIVLSFRGSRSIENWITNLNFDLVDINDICSGCRGHDGFTSSWRSVADTLRQAVDDAVAAHPDYKVVVTGHSLGGALATLAGADLRNNGYDVDLYTYGAPRVGNRAFAEFITVQTGGTLYRVTHTNDVVPRLPPRQFGYSHPSPEYWIKSGTGLPVRRRDIVKIEGIDATGGNNQNNAPDIPAHLWYFGYIGTCI

SEQ ID NO: 9890 - protein, 291 aa, Thermomyces lanuginosus
MRSSLVLFFVSAWTALASPIRRDVSADLLNQFKLFAQYSAAAYCGRNNDAPAGTQITCSANACPLVEAADATFLYSFENSGMGDVTGFLAVDNTNKLIVLSFRGSRSIENWITNLNFDLVDINDICSGCRGHDGFTSSWRSVADTLRQAVDDAVAAHPDYKVVVTGHSLGGALATLAGADLRNNNYSVDLYTYGAPRVGNRAFAEFITVQTGGTLYRVTHTNDVVPRLPPRQFGYSHPSPEYWIKSGTGVPVRRRDIVKIEGIDATGGNNQNNTPDIPAHLWYFGLIGTCI

SEQ ID NO: 9891 - protein, 269 aa, Thermomyces lanuginosus
DVSADLLNQFKLFAQYSAAAYCGRNNDAPAGTNITCHANACPLVEAADATFLYSFENSGVGDVTGFLAVDNTNKLIVLSFRGSRSIENWITNLNFDLVDINDICSGCRGHDGFTSSWRSVADTLRQAVDDAVAAHPDYKVVVTGHSLGGALATLAGADLRNNGYDVDLYTYGAPRVGNRAFAEFITVQTGGTLYRVTHTNDVVPRLPPRQFGYSHPSPEYWIKSGTLVPVRRRDIVKIEGIDATGGNNQPNIPDIPAHLWYFGLIGTCI

SEQ ID NO: 9892 - protein, 269 aa, Thermomyces lanuginosus
DVSADLLNQFKLFAQYSAAAYCGRNNDAPAGTNITCSANACPLVEAADATFLYSFENSGVGDVTGFLAVDNTNKLIVLSFRGSRSIENWITNLNFDLVDINDICSGCRGHDGFTSSWRSVADTLRQAVDDAVAAHPDYKVVITGHSLGGALATLAGADLRNNGYDVDLYTYGAPRVGNRAFAEFITVQTGGTLYRVTHTNDVVPRLPPRQFGYSHPSPEYWIKSGTLVPVRRRDIVKIEGIDATGGNNQPNIPDIPAHLWYFGLIGTCI

SEQ ID NO: 9893 - protein, 269 aa, Thermomyces dupontii
EVSQDLFDQFNLFAQYSAAAYCAKNNDAPAGGNVTCRGSICPEVEKADATFLYSFEDSGVGDVTGFLALDNTNRLIVLSFRGSRSLENWIGNINLDLKGIDDICSGCKGHDGFTSSWRSVANTLTQQVQNAVREHPDYRVVFTGHSLGGALATVAGASLRGNGYDIDVFSYGAPRVGNRAFAEFLTAQTGGTLYRITHTNDIVPRLPPRELGYSHSSPEYWITSGTLVPVTKNDIVKVEGIDSTDGNNQPNTPDIAAHLWYFGSMATCL

SEQ ID NO: 9894 - protein, 269 aa, Thermomyces dupontii
EVSQDLFDQFNLFAQYSAAAYCAKNNDAPAGANVTCRGSICPEVEKADATFLYSFEDSGVGDVTGFLALDNTNRLIVLSFRGSRSLENWIGNINLDLKGIDDICSGCKGHDGFTSSWRSVANTLTQQVQNAVREHPDYRVVFTGHSLGGALATVAGASLRCNGYDIDVFSYGAPRVGNRCFAVFLTAQTGGTLYRITHTNDIVPRLPPRELGYSHSSPEYWITSGTLVPVTKNDIVKVEGIDSTDGNNQPNTPDIAAHLWYFGLIGTCL

SEQ ID NO: 9895 - protein, 269 aa, Thermomyces lanuginosus
DVSADLLNQFKLFAQYSAAAYCGRNNDAPAGTNITCSANACPLVEAADATFLYSFENSGVGDVTGFLAVDNTNKLIVLSFRGSRSIENWITNLNFDLVDINDICSGCRGHDGFTSSWRSVADTLRQAVDDAVAAHPDYKVVVTGHSLGGALATLAGADLRNNGYDVDLYTYGAPRVGNRAFAEFITVQTGGTLYRVTHTNDLVPRLPPRQFGYSHPSPEYWIKSGTLVPVRRRDIVKIEGIDATGGNNQPNIPDIPAHLWYFGLIGTCI

SEQ ID NO: 9896 - protein, 269 aa, Thermomyces lanuginosus
DVSRDLLNQFKLFAQYSAAAYCGRNNDAPAGTNITCSANACPLVEAADATFLYSFENSGVGDVTGFLAVDNTNKLIVLSFRGSRSIENWITNLNFDLVDINDICSGCRGHDGFTSSWRSVADTLRQAVDDAVAAHPDYKVVVTGHSLGGALATLAGADLRNNGYDVDLYTYGAPRVGNRAFAEFITVQTGGTLYRVTHTNDVVPRLPPRQFGYSHPSPEYWIKSGTGVPVRRNDIVKIEGIDATGGNNQNNTPDIPAHLWYFGLIGTCI

SEQ ID NO: 9897 - protein, 269 aa, Thermomyces dupontii
EVSQDLFDQFNLFAQYSAAAYCAKNNDAPAGANVTCRGSICPEVEKADATFLYSFEDSGVGDVTGFLALDNTNRLIVLSFRGSRSLENWIGNINLDLKGIDDCCSGCKGHDGFTSSWRSVANTLTQQVQNAVREHPDYRVVFTGHSLGGALATVAGCSLRGNGYDIDVFSYGAPRVGNRAFAVFLTAQTGGTLYRITHTNDIVPRLPPRELGYSHSSPEYWITSGTLVPVTKNDIVKVEGIDSTDGNNQPNTPDIAAHLWYFGLIGTCL

SEQ ID NO: 9898 - protein, 268 aa, Thermomyces lanuginosus
DVSADLLNQFKLFAQYSAAAYCGRNNDAPAGTNITCSANACPLVEAADATFLYSFENSGVGDVTGFLAVDNTNKLIVLSFRGSRSIENWITNLNFDLVDINDICSGCRGHDGFTSSWRSVADTLRQAVDDAVAAHPDYKVVVTGHSLGGALATLAGADLRNNGYDVDLYTYGAPRVGNRAFAEFITVQTGGTLYRVTHTNDVVPRLPPRQFGYSHPSPEYWIKSGTGVPVRRRDIVKIEGIDATGGNNQNNTPDIPAHLWYFGLIGTC

SEQ ID NO: 9899 - protein, 274 aa, Thermomyces lanuginosus
SPIRRDVSADLLNQFKLFAQYSAAAYCGRNNDAPAGTQITCSANACPLVEAADATFLYSFENSGMGDVTGFLAVDNTNKLIVLSFRGSRSIENWITNLNFDLVDINDICSGCRGHDGFTSSWRSVADTLRQAVDDAVAAHPDYKVVVTGHSLGGALATLAGADLRNNNYSVDLYTYGAPRVGNRAFAEFITVQTGGTLYRVTHTNDVVPRLPPRQFGYSHPSPEYWIKSGTGVPVRRRDIVKIEGIDATGGNNQNNTPDIPAHLWYFGLIGTCI

SEQ ID NO: 9900 - protein, 274 aa, Thermomyces lanuginosus
SPIRRCVSADLLNQFKLFAQYSAAAYCGRNNDAPAGTNITCSANACPLVEAADATFLYSFENSGVGDVTGFLAVDNTNKLIVLSFRGSRSIENWITNLNFDLVDINDICSGCRGHDGFTSSWRSVADTLRQAVDDAVAAHPDYKVVVTGHSLGGALATLAGADLRNNGYDVDLYTYGAPRVGNRAFAEFITVQTGGTLYRVTHTNDCVPRLPPRQFGYSHPSPEYWIKSGTLVPVRRCDIVKCEGIDATCGNNQNNACDIPAHLWYFGAIGTCI

SEQ ID NO: 9901 - protein, 269 aa, Thermomyces lanuginosus
DVSADLLNQFKHFAQYSAAAYCGRNNDAPAGTNITCSANACPLVEAADATFLYSFENSGVGDVTGFLAVDNTNKLIVLSFRGSRSIENWITNLNFDLVDINDICSGCRGHDGFTSSWRSVADTLRQAVDDAVAAHPDYKVVVTGHSLGGALATLAGADLRNNGYDVDLYTYGAPRVGNRAFAEFITVQTGGTLYRVTHTNDVVPRLPPRQFGYSHPSPEYWIKSGTLVPVRRRDIVKIEGIDATGGNNQPNIPDIPAHLWYFGLIGTCI

SEQ ID NO: 9902 - protein, 269 aa, Thermomyces lanuginosus
DVSADLLNQFKLFAQYSAAAYCARNNDAPAGTNITCSANACPLVEAADATFLYSFENSGVGDVTGFLAVDNTNKLIVLSFRGSRSIENWITNLNFDLVDINDICSGCRGHDGFTSSWRSVADTLRQAVDDAVAAHPDYKVVVTGHSLGGALATLAGADLRNNGYDVDLYTYGAPRVGNRAFAEFITVQTGGTLYRVTHTNDVVPRLPPRQFGYSHPSPEYWIKSGTLVPVRRRDIVKIEGIDATGGNNQPNIPDIPAHLWYFGLIGTCI

SEQ ID NO: 9903 - protein, 269 aa, Thermomyces lanuginosus
DVSADLLNQFKLFAQYSAAAYCGRNNDAPAGTNITCSANACPLVEAADATFLYSFENSGVGDVTGFLAVDNTNKLIVLSFRGSRSIENWITNLNFDLVDINDICSECRGHDGFTSSWRSVADTLRQAVDDAVAAHPDYKVVVTGHSLGGALATLAGADLRNNGYDVDLYTYGAPRVGNRAFAEFITVQTGGTLYRVTHTNDVVPRLPPRQFGYSHPSPEYWIKSGTLVPVRRRDIVKIEGIDATGGNNQPNIPDIPAHLWYFGLIGTCI

SEQ ID NO: 9904 - protein, 269 aa, Thermomyces lanuginosus
DVSADLLNQFKLFAQYSAAAYCGRNNDAPAGTNITCSANACPLVEAADATFLYSFENSGVGDVTGFLAVDNTNKLIVLSFRGSRSIENWITNLNFDLVDINDICSGCRGHDGFTSSWRSVADTLRQAVDDAVAAHPDYKVVVTGHSLGGALATLAGADLRNNGYDVDLYTYGAPRVGNRAFAEFITVQTGGTLYRVTHTNDVVPRLPPRQFGYSHPSPEYWIKSGTGVPVRRRDIVKIEGIDATGGNNQNNTPDIPAHLWYFGLIGTCI

SEQ ID NO: 9905 - protein, 269 aa, Thermomyces lanuginosus
DVSADLLNQFKLFAQYSAAAYCGRNNDAPAGTNITCSANACPLVEAADATFLYSFENSGVGDVTGFLAVDNTNKLIVLSFRGSRSIENWITNLNFDLVDINDICSGCRGHDGFTSSWRSVADTLRQAVDDAVAAHPDYKVVVTGHSLGGGLATLAGADLRNNGYDVDLYTYGAPRVGNRAFAEFITVQTGGTLYRVTHTNDVVPRLPPRQFGYSHPSPEYWIKSGTLVPVRRRDIVKIEGIDATGGNNQPNIPDIPAHLWYFGLIGTCI

SEQ ID NO: 9906 - protein, 269 aa, Thermomyces lanuginosus
DVSADLLNQFKLFAQYSAAAYCGRNNDAPAGTNITCSANACPLVEAADATFLYSFENSGVGDVTGFLAVDNTNKLIVLSFRGSRSIENWITNLNFDVVDINDICSGCRGHDGFTSSWRSVADTLRQAVDDAVAAHPDYKVVVTGHSLGGALATLAGADLRNNGYDVDLYTYGAPRVGNRAFAEFITVQTGGTLYRVTHTNDVVPRLPPRQFGYSHPSPEYWIKSGTLVPVRRRDIVKIEGIDATGGNNQPNIPDIPAHLWYFGLIGTCI

SEQ ID NO: 9907 - protein, 269 aa, Thermomyces lanuginosus
DVSADLLNQFKLFAQYSAAAYCGRNNDAPAGTNITCSANACPLVEAADATFLYSFENSGVGDVTGFLAVDNTNKLIVLSFRGSRSIENWITNLNFDLVDINDICSGCRGHDGFTSSWRSVADTLRQAVDDAVAAHPDYKVVVTGHSLGGALATLAGADLRNNGYDVDLYTYGAPRVGNRAFAEFITVQTGGTLYRVTHTNDVVPRLPPRQFGYSHPSPEYWIKSGTLVPVRRNDIVKIEGIDATGGNNQNNTPDIPAHLWYFGLIGTCI

SEQ ID NO: 9908 - protein, 269 aa, Thermomyces lanuginosus
DVSADLLNQFKLFAQYSAAAYCGRNNDAPAGTNITCSANACPLVEAADATFLYSFENSGVGDVTGFLAVDNTNKLIVLSFRGSRSIENWITNLNFDLVDINDICSGCRGHDGFTSSWRSVADTLRQAVDDAVAAHPDYKVVVTGHSLGGALATLAGADLRNNGYDVDLYTYGAPRVGNRAFAEFITVQTGGTLYRVTHTNDVVPRLPPREFGYSHPSPEYWIKSGTLVPVRRRDIVKIEGIDATGGNNQNNTPDIPAHLWYFGLIGTCI

SEQ ID NO: 9909 - protein, 269 aa, Thermomyces lanuginosus
DVSEDLLNQFKLFAQYSAAAYCGRNNDAPAGTNITCSANACPLVEAADATFLYSFENSGVGDVTGFLAVDNTNKLIVLSFRGSRSIENWITNLNFDLVDINDICSGCRGHDGFTSSWRSVADTLRQAVDDAVAAHPDYKVVVTGHSLGGALATLAGADLRNNGYDVDLYTYGAPRVGNRAFAEFITVQTGGTLYRVTHTNDVVPRLPPRQFGYSHPSPEYWIKSGTGVPVRRRDIVKIEGIDATGGNNQNNTPDIPAHLWYFGLIGTCI

SEQ ID NO: 9910 - protein, 269 aa, Thermomyces lanuginosus
DVSADLFNQFKLFAQYSAAAYCGRNNDAPAGTNITCSANACPLVEAADATFLYSFENSGVGDVTGFLAVDNTNKLIVLSFRGSRSIENWITNLNFDLVDINDICSGCRGHDGFTSSWRSVADTLRQAVDDAVAAHPDYKVVVTGHSLGGALATLAGADLRNNGYDVDLYTYGAPRVGNRAFAEFITVQTGGTLYRVTHTNDVVPRLPPRQFGYSHPSPEYWIKSGTGVPVRRRDIVKIEGIDATGGNNQNNAPDIPAHLWYFGAIGTCI

SEQ ID NO: 9911 - protein, 269 aa, Thermomyces lanuginosus
DVSADLLNQFKLFAQYSAAAYCGRNNDAPAGTNITCSANACPLVEAADATFLYSFENSGKGDVTGFLAVDNTNKLIVLSFRGSRSIENWITNLNFDLVDINDICSGCRGHDGFTSSWRSVADTLRQAVDDAVAAHPDYKVVVTGHSLGGALATLAGADLRNNGYDVDLYTYGAPRVGNRAFAEFITVQTGGTLYRVTHTNDVVPRLPPRQFGYSHPSPEYWIKSGTLVPVRRRDIVKIEGIDATGGNNQPNIPDIPAHLWYFGLIGTCI

SEQ ID NO: 9912 - protein, 269 aa, Thermomyces lanuginosus
DVSADLLNQFKLFAQYSAAAYCGRNNDAPAGTNITCSANACPLVEAADATFLYSFENSGVGDVTGFLAVDNTNKLIVLSFRGSRSIENWITNLNFDLVDINDICSGCRGHDGFTSSWRSVADTLRQAVDHAVAAHPDYKVVVTGHSLGGALATLAGADLRNNGYDVDLYTYGAPRVGNRAFAEFITVQTGGTLYRVTHTNDVVPRLPPRQFGYSHPSPEYWIKSGTLVPVRRRDIVKIEGIDATGGNNQPNIPDIPAHLWYFGLIGTCI

SEQ ID NO: 9913 - protein, 269 aa, Thermomyces lanuginosus
DVSADLLNQFKLFAQYSAAAYCGRNNDAPAGTNITCSANACPLVEAADATFLYSFENSGVGDVTGFLAVDNTNKLIVLSFRGSRSIENWITNLNFDLVDINDICSGCRGHDGFTSSWRSVADTLRQAVDDAVAAHPDYKVVVTGHSLGGALATLAGADLRNNGYDVDLYTYGAPRVGNRAFAEFITVQTGGTLYRVTHTNDVVPRLPPRQFGYSHPSPEYWIKSGTLVPVRRRDIVKIEGIDATGGNNQPNIPNISAHLWYFGLIGTCI

SEQ ID NO: 9914 - protein, 269 aa, Thermomyces lanuginosus
DVSADLLNQFKLFAQYSAAAYCGRNNDAPAGTNITCSANACPLVEAADATFLYSFENSGVGDVTGFLAVDNTNKLIVLSFRGSRSIENWITNLNFDLVDINDICSGCRGHDGFTSSWRSVADTLRQAVDDAVAAHPDYKVVVTGHSLGGALATLAGADLRNNGYDVDLYTYGAPRVGNRAFAEFITVQTGGTLYRVTHTNDVVPRLPPRQFGYSHPSPEYWIKSGTLVPVRRRDIVKIEGIDATGGNNQPNIPDDPAHLWYFGLIGTCI

SEQ ID NO: 9915 - protein, 269 aa, Thermomyces lanuginosus
DVSADLLNQFKLFAQYSAAAYCGRNNDAPAGTNITCSANACPLVEAADATFLYSFENSGVGDVTGFLAVDNTNKLIVLSFRGSRSIENWITNLNFDLVDINDICSGCRGHDGFTSSWRSVADTLRQAVDDAVAAHPDYKVVVTGHSLGGALATLAGADLRNNGYDVDLYTYGAPRVGNRAFAEFITVQTGGTLYRVTHTNDVVPRLPPRQGGYSHPSPEYWIKSGTLVPVRRRDIVKIEGIDATGGNNQPNIPDIPAHLWYFGLIGTCI

SEQ ID NO: 9916 - protein, 269 aa, Thermomyces lanuginosus
DVSADLLNQFKLFAQYSAAAYCGRNNDAPAGTNITCSANACPLVEAADATFLYSFENSGVGDVTGFLAVDNTNKLIVLSFRGSRSIENWITNLRFDLVDINDICSGCRGHDGFTSSWRSVADTLRQAVDDAVAAHPDYKVVVTGHSLGGALATLAGADLRNNGYDVDLYTYGAPRVGNRAFAEFITVQTGGTLYRVTHTNDVVPRLPPRQFGYSHPSPEYWIKSGTLVPVRRRDIVKIEGIDATGGNNQNNTPDIPAHLWYFGLIGTCI

SEQ ID NO: 9917 - protein, 269 aa, Thermomyces lanuginosus
DVSADLLNQFKLFAQYSAAAYCGRNNDAPAGTNITCSANACPLVEAADATFLYSFENSGVGDVTGFLAVDNTNKLIVLSFRGSRSIENWITNLNFDLVDINDICSGCRGHDGFTSSWRSVADTLRQAVDDAVAAHPDYKVVVTGHSLGGALATLAGADLRNNGYDVDLYTYGAPRVGNRAFAEFITVQTGGTLYRVTHTNDCVPRLPPRQFGYSHPSPEYWIKSGTLVPVRRRDIVKIEGIDATGGNNQPNICDIPAHLWYFGLIGTCI

SEQ ID NO: 9918 - protein, 269 aa, Thermomyces lanuginosus
EVSADLLNQFKLFAQYSAAAYCGRNNDAPAGTNITCSANACPLVEAADATFLYSFENSGVGDVTGFLAVDNTNKLIVLSFRGSRSIENWITNLNFDLVDINDICSGCRGHDGFTSSWRSVADTLRQAVDDAVAAHPDYKVVVTGHSLGGALATLAGADLRNNGYDVDLYTYGAPRVGNRAFAEFITVQTGGTLYRVTHTNDVVPRLPPRQFGYSHPSPEYWIKSGTLVPVRRRDIVKIEGIDATGGNNQNNTPDIPAHLWYFGLIGTCI

SEQ ID NO: 9919 - protein, 269 aa, Thermomyces lanuginosus
DVSADLLNQFKLFAQYSAAAYCGRNNDAPAGTNITCSANACPLVEAADATFLYSFENSGMGDVTGFLAVDNTNKLIVLSFRGSRSIENWITNLNFDLVDINDICSGCRGHDGFTSSWRSVADTLRQAVDDAVAAHPDYKVVVTGHSLGGALATLAGADLRNNGYDVDLYTYGAPRVGNRAFAEFITVQTGGTLYRVTHTNDVVPRLPPRQFGYSHPSPEYWIKSGTGVPVRRNDIVKIEGIDATGGNNQNNTPDIPAHLWYFGLIGTCI

SEQ ID NO: 9920 - protein, 269 aa, Thermomyces lanuginosus
DVSRDLLNQFKLFAQYSAAAYCGRNNDAPAGTNITCSANACPLVEAADATFLYSFENSGVGDVTGFLAVDNTNKLIVLSFRGSRSIENWITNLNFDLVDINDICSGCRGHDGFTSSWRSVADTLRQAVDDAVAAHPDYKVVVTGHSLGGALATLAGADLRNNGYDVDLYTYGAPRVGNRAFAEFITVQTGGTLYRVTHTNDVVPRLPPRQFGYSHPSPEYWIKSGTLVPVRRNDIVKIEGIDATGGNNQNNAPDIPAHLWYFGLIGTCI

SEQ ID NO: 9921 - protein, 268 aa, Thermomyces lanuginosus
VSADLLNQFKLFAQYSAAAYCGRNNDAPAGTNITCSANACPLVEAADATFLYSFENSGVGDVTGFLAVDNTNKLIVLSFRGSRSIENWITNLNFDLVDINDICSGCRGHDGFTSSWRSVADTLRQAVDDAVAAHPDYKVVVTGHSLGGALATLAGADLRNNGYDVDLYTYGAPRVGNRAFAEFITVQTGGTLYRVTHTNDVVPRLPPRQFGYSHPSPEYWIKSGTLVPVRRRDIVKIEGIDATGGNNQNNAPDITAHLWYFGAIGTCI

SEQ ID NO: 9922 - protein, 268 aa, Thermomyces lanuginosus
DVSADLLNQFKLFAQYSAAAYCGRNNDAPAGTNITCSANACPLVEAADATFLYSFENSGVGDVTGFLAVDNTNKLIVLSFRGSRSIENWITNLNFDLVDINDICSGCRGHDGFTSSWRSVADTLRQAVDDAVAAHPDYKVVVTGHSLGGALATLAGADLRNNGYDVDLYTYGAPRVGNRAFAEFITVQTGGTLYRVTHTNDVVPRLPPRQFGYSHPSPEYWIKSGTLVPVRRRDIVKIEGIDATGGNNQNNAPDIPAHLWYFGLIGTC

SEQ ID NO: 9923 - protein, 274 aa, Thermomyces lanuginosus
SPIRRDVSRDLLNQFKLFAQYSAAAYCGRNNDAPAGTNITCSANACPLVEAADATFLYSFENSGVGDVTGFLAVDNTNKLIVLSFRGSRSIENWVTNLEFLLVDIPDICSGCRGHDGFTSSWRSVADTLRQAVDDAVAAHPDYKVVVTGHSLGGALATLAGADLRNNGYDVDLYTYGAPRVGNRAFAEFITVQTGGTLYRVTHTNDVVPRLPPRQFGYSHPSPEYWIKSGTLVPVRRNDIVKIEGIDATGGNNQNNAPDIPAHLWYFGAIGTCI

SEQ ID NO: 9924 - protein, 269 aa, Thermomyces lanuginosus
DVSADLLNQFKLFAQYSAAAYCGQNNDAPAGTNITCSANACPLVEAADATFLYSFENSGVGDVTGFLAVDNTNKLIVLSFRGSRSIENWITNLNFDLVDINDICSGCRGHDGFTSSWRSVADTLRQAVDDAVAAHPDYKVVVTGHSLGGALATLAGADLRNNGYDVDLYTYGAPRVGNRAFAEFITVQTGGTLYRVTHTNDVVPRLPPRQFGYSHPSPEYWIKSGTLVPVRRRDIVKIEGIDATGGNNQNNTPDIPAHLWYFGLIGTCI

SEQ ID NO: 9925 - protein, 269 aa, Thermomyces lanuginosus
DVSADLLNQFKLFAQYSAAAYCGRNNDAPAGTNITCSANACPLVEQADATFLYSFENSGVGDVTGFLAVDNTNKLIVLSFRGSRSIENWITNLNFDLVDINDICSGCRGHDGFTSSWRSVADTLRQAVDDAVAAHPDYKVVVTGHSLGGALATLAGADLRNNGYDVDLYTYGAPRVGNRAFAEFITVQTGGTLYRVTHTNDVVPRLPPRQFGYSHPSPEYWIKSGTLVPVRRRDIVKIEGIDATGGNNQNNTPDIPAHLWYFGLIGTCI

SEQ ID NO: 9926 - protein, 269 aa, Thermomyces lanuginosus
DVSADLLNQFKLFAQYSAAAYCGRNNDAPAGTNITCSANACPLVEAADATFLYSFENSGVGDVTGFLAVDNTNKLIVLSFRGSRSIENWITNLNFDLIDINDICSGCRGHDGFTSSWRSVADTLRQAVDDAVAAHPDYKVVVTGHSLGGALATLAGADLRNNGYDVDLYTYGAPRVGNRAFAEFITVQTGGTLYRVTHTNDVVPRLPPRQFGYSHPSPEYWIKSGTLVPVRRRDIVKIEGIDATGGNNQNNTPDIPAHLWYFGLIGTCI

SEQ ID NO: 9927 - protein, 269 aa, Thermomyces lanuginosus
DVSADLLNQFKLFAQYSAAAYCGRNNDAPAGTNITCSANACPLVEAADATFLYSFENSGVGDVTGFLAVDNTNKLIVLSFRGSRSIENWITNLNFDLVDINDICSGCRGHDGFTSSWRSVADTLRQAVDDAVAAHPDYKVVVTGHSLGGALATLAGADLRNNGYDVDLYTYGAPRVGNRAFAEFITVQTGGTLYRVTHTNDVVPRLPPRQFGYSHPSPEYWIKSGTLVPVRRRDIVKIEGIDATGGNNQDNTPDIPAHLWYFGLIGTCI

SEQ ID NO: 9928 - protein, 269 aa, Thermomyces lanuginosus
DVSADLLNQFKLFAQYSAAAYCGRNNDAPAGTNITCSANACPLVEAADATFLYSFENSGMGDVTGFLAVDNTNKLIVLSFRGSRSIENWITNLNFDLVDINDICSGCRGHDGFTSSWRSVADTLRQAVDDAVAAHPDYKVVVTGHSLGGALATLAGADLRNNGYDVDLYTYGAPRVGNRAFAEFITVQTGGTLYRVTHTNDVVPRLPPRQFGYSHPSPEYWIKSGTGVPVRRRDIVKIEGIDATGGNNQNNAPDIPAHLWYFGLIGTCI

SEQ ID NO: 9929 - protein, 269 aa, Thermomyces lanuginosus
DVSADLLNQFKLFAQYSAAAYCGRNNDAPAGTNITCSANACPLVEAADATFLYSFENSGVGDVTGFLAVDNTNKLIVLSFRGSRSIENWITNLNFDLVDINDICSGCRGHQGFTSSWRSVADTLRQAVDDAVAAHPDYKVVVTGHSLGGALATLAGADLRNNGYDVDLYTYGAPRVGNRAFAEFITVQTGGTLYRVTHTNDVVPRLPPRQFGYSHPSPEYWIKSGTLVPVRRRDIVKIEGIDATGGNNQNNTPDIPAHLWYFGLIGTCI

SEQ ID NO: 9930 - protein, 269 aa, Thermomyces lanuginosus
DVSKDLLNQFKLFAQYSAAAYCGRNNDAPAGTNITCSANACPLVEAADATFLYSFENSGVGDVTGFLAVDNTNKLIVLSFRGSRSIENWITNLNFDLVDINDICSGCRGHDGFTSSWRSVADTLRQAVDDAVAAHPDYKVVVTGHSLGGALATLAGADLRNNGYDVDLYTYGAPRVGNRAFAEFITVQTGGTLYRVTHTNDVVPRLPPRQFGYSHPSPEYWIKSGTLVPVTRRDIVKIEGIDATGGNNQNNAPDIPAHLWYFGAIGTCI

SEQ ID NO: 9931 - protein, 269 aa, Thermomyces lanuginosus
DVSADLLNQFKLFAQYSAAAYCGRNNDAPAGTNITCSANACPLVEAADATFLYSFENSGVGDVTGFLAVDNTNKLIVLSFRGSRSIENWITNLNFDLVDINDICSGCRGHDGFTSSWRSVADTLRQAVDDAVAAHPDYKVVVTGHSLGGALATLAGADLRNNGYDVDLYTYGAPRVGNRAFAEFITVQTGGTLYRVTHTNDVVPRLPPRQFGYSHPSPEYWIKSGTLVPVRRQDIVKIEGIDATGGNNQNNTPDIPAHLWYFGLIGTCI

SEQ ID NO: 9932 - protein, 269 aa, Thermomyces lanuginosus
DVSADLLNQFKLFAQYSAAAYCGRNNDAPAGTNITCSANACPLVEAADATFLYSFENSGVGDVTGFLAVDNTNKLIVLSFRGSRSIENWITNLNFDLVDINDICSGCRGHDGFTSSWRSVADTLRQAVDDAVAAHPDYKVVVTGHSLGGALATLAGADLRNNGYDVDLYTYGAPRVGNRAFAEFITVQTGGTLYRVTHTNDVVPRLPPRQFGYSHPSPEYCIKSGTLVPVRRRDIVKIEGIDATGCNNQPNIPDIPAHLWYFGLIGTCI

SEQ ID NO: 9933 - protein, 269 aa, Thermomyces lanuginosus
QVSADLLNQFKLFAQYSAAAYCGRNNDAPAGTNITCSANACPLVEAADATFLYSFENSGVGDVTGFLAVDNTNKLIVLSFRGSRSIENWITNLNFDLVDINDICSGCRGHDGFTSSWRSVADTLRQAVDDAVAAHPDYKVVVTGHSLGGALATLAGADLRNNGYDVDLYTYGAPRVGNRAFAEFITVQTGGTLYRVTHTNDVVPRLPPRQFGYSHPSPEYWIKSGTLVPVRRRDIVKIEGIDATGGNNQNNTPDIPAHLWYFGLIGTCI

SEQ ID NO: 9934 - protein, 269 aa, Thermomyces lanuginosus
DVSADLLNQFKLFAQYSAAAYCGRNNDAPAGTNITCSANACPLVEAADATFLYSFENSGMGDVTGFLAVDNTNKLIVLSFRGSRSIENWITNLNFDLVDINDICSGCRGHDGFTSSWRSVADTLRQAVDDAVAAHPDYKVVVTGHSLGGALATLAGADLRNNGYDVDLYTYGAPRVGNRAFAEFITVQTGGTLYRVTHTNDVVPRLPPRQFGYSHPSPEYWIKSGTGVPVRRRDIVKIEGIDATGGNNQNNTPDIPAHLWYFGLIGTCI

SEQ ID NO: 9935 - protein, 269 aa, Thermomyces lanuginosus
DVSADLLNQFKLFAQYSAAAYCGRNNQAPAGTNITCSANACPLVEAADATFLYSFENSGVGDVTGFLAVDNTNKLIVLSFRGSRSIENWITNLNFDLVDINDICSGCRGHDGFTSSWRSVADTLRQAVDDAVAAHPDYKVVVTGHSLGGALATLAGADLRNNGYDVDLYTYGAPRVGNRAFAEFITVQTGGTLYRVTHTNDVVPRLPPRQFGYSHPSPEYWIKSGTLVPVRRRDIVKIEGIDATGGNNQNNTPDIPAHLWYFGLIGTCI

SEQ ID NO: 9936 - protein, 269 aa, Thermomyces lanuginosus
DVSEDLLNQFKLFAQYSAAAYCGRNNDAPAGTNITCSANACPLVEAADATFLYSFENSGVGDVTGFLAVDNTNKLIVLSFRGSRSIENWITNLNFDLVDINDICSGCRGHDGFTSSWRSVADTLRQAVDDAVAAHPDYKVVVTGHSLGGALATLAGADLRNNGYDVDLYTYGAPRVGNRAFAEFITVQTGGTLYRVTHTNDVVPRLPPRQFGYSHPSPEYWIKSGTLVPVRRRDIVKIEGIDATGGNNQNNAPDIPAHLWYFGLIGTCI

SEQ ID NO: 9937 - protein, 269 aa, Thermomyces lanuginosus
DVSADLLNQFKLFAQYSAAAYCGRNNDAPAGTNITCSANACPLVEAADATFLYSFENSGVGDVTGFLAVDNTNKLIVLSFRGSRSIENWITNLNFDLVDINDICSGCRGHDGFTSSWRSVADTLRQAVDDAVAAHPDYKVVVTGHSLGGALATLAGADLRNNGYDVDLYTYGAPRVGNRAFAEFITVQTGGTLYRVTHTNDVVPRLPPRQFGYSHPSPEYWIKSGTLVPVRRRDIVKIEGIDATGGNNNPSIPDIPAHLWYFGLIGTCI

SEQ ID NO: 9938 - protein, 269 aa, Thermomyces lanuginosus
DVSADLLNQFKLFAQYSAAAYCGRNNDAPAGTNITCSANACPLVEAADATFLYSFEQSGVGDVTGFLAVDNTNKLIVLSFRGSRSIENWITNLNFDLVDINDICSGCRGHDGFTSSWRSVADTLRQAVDDAVAAHPDYKVVVTGHSLGGALATLAGADLRNNGYDVDLYTYGAPRVGNRAFAEFITVQTGGTLYRVTHTNDVVPRLPPRQFGYSHPSPEYWIKSGTLVPVRRRDIVKIEGIDATGGNNQNNTPDIPAHLWYFGLIGTCI

SEQ ID NO: 9939 - protein, 269 aa, Thermomyces lanuginosus
DVSADLLNQFKLFAQYSAAAYCGENNDAPAGTNITCSANACPLVEAADATFLYSFENSGVGDVTGFLAVDNTNKLIVLSFRGSRSIENWITNLNFDLVDINDICSGCRGHDGFTSSWRSVADTLRQAVDDAVAAHPDYKVVVTGHSLGGALATLAGADLRNNGYDVDLYTYGAPRVGNRAFAEFITVQTGGTLYRVTHTNDVVPRLPPRQFGYSHPSPEYWIKSGTLVPVRRRDIVKIEGIDATGGNNQNNTPDIPAHLWYFGLIGTCI

SEQ ID NO: 9940 - protein, 269 aa, Thermomyces lanuginosus
DVSADLLNQFKLFAQYSAAAYCGRNNNAPAGTNITCSANACPLVEAADATFLYSFENSGVGDVTGFLAVDNTNKLIVLSFRGSRSIENWITNLNFDLVDINDICSGCRGHDGFTSSWRSVADTLRQAVDDAVAAHPDYKVVVTGHSLGGALATLAGADLRNNGYDVDLYTYGAPRVGNRAFAEFITVQTGGTLYRVTHTNDVVPRLPPRQFGYSHPSPEYWIKSGTLVPVRRRDIVKIEGIDATGGNNQNNTPDIPAHLWYFGLIGTCI

SEQ ID NO: 9941 - protein, 269 aa, Thermomyces lanuginosus
DVSRDLLNQFKLFAQYSAAAYCGRNNDAPAGTNITCSANACPLVEAADATFLYSFENSGVGDVTGFLAVDNTNKLIVLSFRGSRSIENWITNLNFDLVDINDICSGCRGHDGFTSSWRSVADTLRQAVDDAVAAHPDYKVVVTGHSLGGALATLAGADLRNNGYDVDLYTYGAPRVGNRAFAEFITVQTGGTLYRVTHTNDVVPRLPPRQFGYSHPSPEYWIKSGTLVPVRRNDIVKIEGIDATGGNNQNNTPDIPAHLWYFGAIGTCI

SEQ ID NO: 9942 - protein, 269 aa, Thermomyces lanuginosus
DVSRDLLNQFKLFAQYSAAAYCGRNNDAPAGTNITCSANACPLVEAADATFLYSFENSGMGDVTGFLAVDNTNKLIVLSFRGSRSIENWITNLNFDLVDINDICSGCRGHDGFTSSWRSVADTLRQAVDDAVAAHPDYKVVVTGHSLGGALATLAGADLRNNGYDVDLYTYGAPRVGNRAFAEFITVQTGGTLYRVTHTNDVVPRLPPRQFGYSHPSPEYWIKSGTLVPVRRNDIVKIEGIDATGGNNQNNTPDIPAHLWYFGLIGTCI

SEQ ID NO: 9943 - protein, 269 aa, Thermomyces lanuginosus
DVSADLLNQFELFAQYSAAAYCGRNNDAPAGTNITCSANACPLVEAADATFLYSFENSGVGDVTGFLAVDNTNKLIVLSFRGSRSIENWITNLNFDLVDINDICSGCRGHDGFTSSWRSVADTLRQAVDDAVAAHPDYKVVVTGHSLGGALATLAGADLRNNGYDVDLYTYGAPRVGNRAFAEFITVQTGGTLYRVTHTNDVVPRLPPRQFGYSHPSPEYWIKSGTLVPVRRRDIVKIEGIDATGGNNQNNTPDIPAHLWYFGLIGTCI

SEQ ID NO: 9944 - protein, 269 aa, Thermomyces lanuginosus
DVSADLLNQFQLFAQYSAAAYCGRNNDAPAGTNITCSANACPLVEAADATFLYSFENSGVGDVTGFLAVDNTNKLIVLSFRGSRSIENWITNLNFDLVDINDICSGCRGHDGFTSSWRSVADTLRQAVDDAVAAHPDYKVVVTGHSLGGALATLAGADLRNNGYDVDLYTYGAPRVGNRAFAEFITVQTGGTLYRVTHTNDVVPRLPPRQFGYSHPSPEYWIKSGTLVPVRRRDIVKIEGIDATGGNNQNNTPDIPAHLWYFGLIGTCI

SEQ ID NO: 9945 - protein, 269 aa, Thermomyces lanuginosus
DVSADLLNQFKLFAQYSAAAYCGRNNDAPAGTNITCSANACPLVEAADATFLYSFENSGVGDVTGFLAVDNTNKLIVLSFRGSRSIENWITNLQFDLVDINDICSGCRGHDGFTSSWRSVADTLRQAVDDAVAAHPDYKVVVTGHSLGGALATLAGADLRNNGYDVDLYTYGAPRVGNRAFAEFITVQTGGTLYRVTHTNDVVPRLPPRQFGYSHPSPEYWIKSGTLVPVRRRDIVKIEGIDATGGNNQNNTPDIPAHLWYFGLIGTCI

SEQ ID NO: 9946 - protein, 269 aa, Thermomyces lanuginosus
DVSADLLNQFKLFAQYSAAAYCGNNNDAPAGTNITCSANACPLVEAADATFLYSFENSGVGDVTGFLAVDNTNKLIVLSFRGSRSIENWITNLNFDLVDINDICSGCRGHDGFTSSWRSVADTLRQAVDDAVAAHPDYKVVVTGHSLGGALATLAGADLRNNGYDVDLYTYGAPRVGNRAFAEFITVQTGGTLYRVTHTNDVVPRLPPRQFGYSHPSPEYWIKSGTLVPVRRRDIVKIEGIDATGGNNQNNTPDIPAHLWYFGLIGTCI

SEQ ID NO: 9947 - protein, 269 aa, Thermomyces lanuginosus
DVSADLLNQFKLFAQYSAAAYCGRNNDAPAGTNITCSANACPLVEKADATFLYSFENSGVGDVTGFLAVDNTNKLIVLSFRGSRSIENWITNLNFDLVDINDICSGCRGHDGFTSSWRSVADTLRQAVDDAVAAHPDYKVVVTGHSLGGALATLAGADLRNNGYDVDLYTYGAPRVGNRAFAEFITVQTGGTLYRVTHTNDVVPRLPPRQFGYSHPSPEYWIKSGTLVPVRRRDIVKIEGIDATGGNNQNNAPDIPAHLWYFGAIGTCI

SEQ ID NO: 9948 - protein, 269 aa, Thermomyces lanuginosus
DVSADLFNQFKLFAQYSAAAYCGRNNDAPAGTNITCSANACPLVEAADATFLYSFENSGVGDVTGFLAVDNTNKLIVLSFRGSRSIENWITNLNFDLVDINDICSGCRGHDGFTSSWRSVADTLRQAVDDAVAAHPDYKVVVTGHSLGGALATLAGADLRNNGYDVDLYTYGAPRVGNRAFAEFITVQTGGTLYRVTHTNDVVPRLPPRQFGYSHPSPEYWIKSGTLVPVRRRDIVKIEGIDATGGNNQNNAPDIPAHLWYFGAIGTCI

SEQ ID NO: 9949 - protein, 269 aa, Thermomyces lanuginosus
DVSADLLNQFKLFAQYSAAAYCGRNNDAPAGTNITCSANACPLVEAADATFLYSFENSGVGDVTGFLAVDNTNKLIVLSFRGSRSIENWITNLNFDLVDINDICSGCRGHDGFTSSWRSVADTLRQAVDDAVAAHPDYKVVVTGHSLGGALATLAGADLRNNGYDVDLYTYGAPRVGNRAFAEFITVQTGGTLYRVTHTNDVVPRLPPRQFGYSHPSPEYWIKSGTLVPVRRNDIVKIEGIDATGGNNQNNAPDIPAHLWYFGAIGTCI

SEQ ID NO: 9950 - protein, 269 aa, Thermomyces lanuginosus
DVSADLLNQFKLFAQYSAAAYCGRNNDAPAGTNITCSANACPLVEAADATFLYSFENSGVGDVTGFLAVDNTNKLIVLSFRGSRSIENWITNLNFDLVDINDICSGCRGHDGFTSSWRSVADTLRQAVDDAVAAHPDYKVVVTGHSLGGALATLAGADLRNNGYDVDLYTYGAPRVGNRAFAEFITVQTGGTLYRVTHTNDVVPRLPPRQFGYSHPSPEYWIKSGTLVPVRRKDIVKIEGIDATGGNNQNNTPDIPAHLWYFGLIGTCI

SEQ ID NO: 9951 - protein, 269 aa, Thermomyces lanuginosus
DVSADLLNQFKLFAQYSAAAYCGRNNDAPAGTNITCSANACPLVEAADATFLYSFENSGVGDVTGFLAVDNTNKLIVLSFRGSRSIENWITNLNFDLVDINDICSGCRGHDGFTSSWRSVADTLRQAVDDAVAAHPDYKVVVTGHSLGGALATLAGADLRNNGYDVDLYTYGAPRVGNRAFAEFITVQTGGTLYRVTHTNDVVPRLPPRQFGYSHPSPEYWIKSGTLVPVRRRDIVKIEGIDANGSNNQPNIPDIPAHLWYFGLIGTCI

SEQ ID NO: 9952 - protein, 269 aa, Thermomyces lanuginosus
DVSADLFNQFKLFAQYSAAAYCGRNNDAPAGTNITCSANACPLVEAADATFLYSFENSGVGDVTGFLAVDNTNKLIVLSFRGSRSIENWIANLNFDLVDINDICSGCRGHDGFTSSWRSVADTLRQAVDDAVAAHPDYKVVVTGHSLGGGLATVAGADLRNNGYDVDLYTYGAPRVGNRAFAEFITVQTGGTLYRVTHTNDVVPRLPPRQFGYSHPSPEYWIKSGTLVPVRRRDIVKIEGIDATGGNNQNNAPDIPAHLWYFGAIGTCI

SEQ ID NO: 9953 - protein, 269 aa, Thermomyces lanuginosus
DVSRDLLNQFKLFAQYSAAAYCGRNNDAPAGTNITCSANACPLVEAADATFLYSFENSGVGDVTGFLAVDNTNKLIVLSFRGSRSIENWITNLNFDLVDINDICSGCRGHDGFTSSWRSVADTLRQAVDDAVAAHPDYKVVVTGHSLGGALATLAGADLRNNGYDVDLYTYGAPRVGNRAFAEFITVQTGGTLYRVTHTNDVVPRLPPRQFGYSHPSPEYWIKSGTLVPVRRRDIVKIEGIDATGGNNQNNTPDIPAHLWYFGLIGTCI

SEQ ID NO: 9954 - protein, 269 aa, Thermomyces lanuginosus
DVSADLYNQFKLFAQYSAAAYCGRNNDAPAGTNITCSANACPLVEAADATFLYSFENSGVGDVTGFLAVDNTNKLIVLSFRGSRSIENWITNLNFDLVDINDICSGCRGHDGFTSSWRSVADTLRQAVDDAVAAHPDYKVVVTGHSLGGALATLAGADLRNNGYDVDLYTYGAPRVGNRAFAEFITVQTGGTLYRVTHTNDVVPRLPPRQFGYSHPSPEYWIKSGTLVPVRRRDIVKIEGIDATGGNNQNNTPDIPAHLWYFGLIGTCI

SEQ ID NO: 9955 - protein, 269 aa, Thermomyces lanuginosus
DVSADLLNQFKLFAQYSAAAYCGRNNDAPAGTNITCSANACPLVEAADATFLYSFENSGVGDVTGFLAVDNTNKLIVLSFRGSRSIENWITNLNFDLVDINDICSGCRGHDGFTSSWRSVADTLRQAVDDAVAAHPDYKVVVTGHSLGGALATLAGADLRNNGYDVDLYTYGAPRVGNRAFAEFITVQTGGTLYRVTHTNDVVPRLPPRQFGYSHPSPEYWIKSGTLVPVQRRDIVKIEGIDATGGNNQNNTPDIPAHLWYFGLIGTCI

SEQ ID NO: 9956 - protein, 269 aa, Thermomyces lanuginosus
DVSADLLNQFKLFAQYSAAAYCGRNNDAPAGTNITCSANACPLVEAADATFLYSFENSGVGDVTGFLAVDNTNKLIVLSFRGSRSIENWITNLNFDLVDINDICSGCRGHDGFTSSWRSVADTLRQAVDDAVAAHPDYKVVVTGHSLGGALATLAGADLRNNGYDVDLYTYGAPRVGNRAFAEFITVQTGGTLYRVTHTNDVVPRLPPRQVGYSHPSPEYWIKSGTGVPVRRRDIVKIEGIDATGGNNQNNTPDIPAHLWYFGLIGTCI

SEQ ID NO: 9957 - protein, 269 aa, Thermomyces lanuginosus
DVSADLLNQFKLFAQYSAAAYCGRNNDAPAGTNITCSANACPLVEAADATFLYSFENSGVGDVTGFLAVDNTNKLIVLSFRGSRSIENWITNLSFDLVDINDICSGCRGHDGFTSSWRSVADTLRQAVDDAVAAHPDYKVVVTGHSLGGALATLAGADLRNNGYDVDLYTYGAPRVGNRAFAEFITVQTGGTLYRVTHTNDVVPRLPPRQFGYSHPSPEYWIKSGTLVPVRRRDIVKIEGIDATGGNNQNNTPDIPAHLWYFGLIGTCI

SEQ ID NO: 9958 - protein, 269 aa, Thermomyces lanuginosus
DVSADLLNQFKLFAQYSAAAYCGRNNDAPAGTNITCSANACPLVEAADATFLYSFENSGVGDVTGFLAVDNTNKLIVLSFRGSRSIENWITNLNFDLVDINDICSGCRGHDGFTSSWRSVADTLRQAVDDAVAAHPDYKVVVTGHSLGGALATLAGADLRNNGYDVDLYTYGAPRVGNRAFAEFITVQTGGTLYRVTHTNDVVPRLPPRQFGYSHPSPEYWIKSGTGVPVRRRDIVKIEGIDATGGNNQNNAPDIPAHLWYFGAIGTCI

SEQ ID NO: 9959 - protein, 269 aa, Thermomyces lanuginosus
DVSRDLLNQFKLFAQYSAAAYCGRNNDAPAGTNITCSANACPLVEAADATFLYSFENSGMGDVTGFLAVDNTNKLIVLSFRGSRSIENWITNLNFDLVDINDICSGCRGHDGFTSSWRSVADTLRQAVDDAVAAHPDYKVVVTGHSLGGALATLAGADLRNNGYDVDLYTYGAPRVGNRAFAEFITVQTGGTLYRVTHTNDVVPRLPPRQFGYSHPSPEYWIKSGTGVPVRRRDIVKIEGIDATGGNNQNNTPDIPAHLWYFGLIGTCI

SEQ ID NO: 9960 - protein, 268 aa, Thermomyces lanuginosus
DVSADLLNQFKLFAQYSAAAYCGRNNDAPAGTNITCSANACPLVEAADATFLYSFENSGVGDVTGFLAVDNTNKLIVLSFRGSRSIENWITNLNFDLVDINDICSGCRGHDGFTSSWRSVADTLRQAVDDAVAAHPDYKVVVTGHSLGGALATLAGADLRNNGYDVDLYTYGAPRVGNRAFAEFITVQTGGTLYRVTHTNDVVPRLPPRQFGYSHPSPEYWIKSGTLVPVRRRDIVKIEGIDATGGNNQNNTPDIPAHLWYFGAIGTC

SEQ ID NO: 9961 - protein, 268 aa, Thermomyces lanuginosus
VSADLLNQFKLFAQYSAAAYCGRNNDAPAGTNITCSANACPLVEAADATFLYSFENSGVGDVTGFLAVDNTNKLIVLSFRGSRSIENWITNLNFDLVDINDICSGCRGHDGFTSSWRSVADTLRQAVDDAVAAHPDYKVVVTGHSLGGALATLAGADLRNNGYDVDLYTYGAPRVGNRAFAEFITVQTGGTLYRVTHTNDVVPRLPPRQFGYSHPSPEYWIKSGTLVPVRRCDIVKIEGIDATGGNNQNNAPDIPAHLWYFGAIGTCI

SEQ ID NO: 9962 - protein, 268 aa, Thermomyces lanuginosus
VSADLLNQFKLFAQYSAAAYCGRNNDAPAGTNITCSANACPLVEAADATFLYSFENSGVGDVTGFLAVDNTNKLIVLSFRGSRSIENWITNLNFDLVDINDICSGCRGHDGFTSSWRSVADTLRQAVDDAVAAHPDYKVVVTGHSLGGALATLAGADLRNNGYDVDLYTYGAPRVGNRAFAEFITVQTGGTLYRVTHTNDVVPRLPPRQFGYSHPSPEYWIKSGTLVPVRRRDIVKIEGIDATGGNNQNNAPDIPAHLWYFGAIGTCI

SEQ ID NO: 9963 - protein, 269 aa, Thermomyces lanuginosus
DVSLDLLNQFKLFAQYSAAAYCGRNNDAPAGTNITCSANACPLVEAADATFLYSFENSGVGDVTGFLAVDNTNKLIVLSFRGSRSIENWITNLNFDLVDINDICSGCRGHDGFTSSWRSVADTLRQAVDDAVAAHPDYKVVVTGHSLGGALATLAGADLRNNGYDVDLYTYGAPRVGNRAFAEFITVQTGGTLYRVTHTNDVVPRLPPRQFGYSHPSPEYWIKSGTLVPVRRRDIVKIEGIDATGGNNQNNAPDIPAHLWYFGAIGTCI

SEQ ID NO: 9964 - protein, 269 aa, Thermomyces lanuginosus
DVSADLLNQFKLFAQYSAAAYCGRNNDAPAGTNITCSANACPLVEAADATFLYSFENSGVGDVTGFLAVDNTNKLIVLSFRGSRSIRNWITNLDFDLVDINDICSGCRGHDGFTSSWRSVADTLRQAVDDAVAAHPDYKVVVTGHSLGGALATLAGADLRNNGYDVDLYTYGAPRVGNRAFAEFITVQTGGTLYRVTHTNDVVPRLPPRQFGYSHPSPEYWIKSGTLVPVRRRDIVKIEGIDATGGNNQNNTPDIPAHLWYFGLIGTCI

SEQ ID NO: 9965 - protein, 269 aa, Thermomyces lanuginosus
DVSADLLNQFKLFAQYSAAAYCGRNNDAPAGTNITCSANACPLVEAADATFLYSFENSGVGDVTGFLAVDNTNKLIVLSFRGSRSIENWITNLNFDLVDINDICSGCRGHDGFTSSWRSVADTLRQAVDDAVAAHPDYKVVVTGHSLGGALATLAGADLRNNGYDVDLYTYGAPRVGNRAFAEFITVQTGGTLYRVTNTNDVVPRLPPRQFGYSHPSPEYWIKSGTLVPVRRRDIVKIEGIDATGGNNQNNTPDITIHLWYFGLIGTCI

SEQ ID NO: 9966 - protein, 269 aa, Thermomyces lanuginosus
DVSADLLNQFKLFAQYSAAAYCGRNNDAPAGTNITCSANACPLVEAADATFLYSFENSGVGDVTGFLAVDNTNKLIVLSFRGSRSIENWITNLNFDLVDINDICSGCRGHDGFTSSWRSVADTLRQAVDDAVAAHPDYKVVVTGHSLGGALATLAGADLRNNGYQVDLYTYGAPRVGNRAFAEFITVQTGGTLYRVTHTNDVVPRLPPRQFGYSHPSPEYWIKSGTLVPVRRRDIVKIEGIDATGGNNQNNTPDIPAHLWYFGLIGTCI

SEQ ID NO: 9967 - protein, 269 aa, Thermomyces lanuginosus
DVSADLLNQFKLFAQYSAAAYCGRNNDAPAGTNITCSAQACPLVEAADATFLYSFENSGVGDVTGFLAVDNTNKLIVLSFRGSRSIENWITNLNFDLVDINDICSGCRGHDGFTSSWRSVADTLRQAVDDAVAAHPDYKVVVTGHSLGGALATLAGADLRNNGYDVDLYTYGAPRVGNRAFAEFITVQTGGTLYRVTHTNDVVPRLPPRQFGYSHPSPEYWIKSGTLVPVRRRDIVKIEGIDATGGNNQNNTPDIPAHLWYFGLIGTCI

SEQ ID NO: 9968 - protein, 269 aa, Thermomyces lanuginosus
DVSADLLNQFKLFAQYSAAAYCGRNNDAPAGTNITCSANACPLVEAADATFLYSFENSGVGDVTGFLAVDNTNKLIVLSFRGSRSIENWITNLNFDLVDINDICSGCRGHDGFTSSWRSVADTLRQAVDDAVAAHPDYKVVVTGHSLGGALATLAGAQLRNNGYDVDLYTYGAPRVGNRAFAEFITVQTGGTLYRVTHTNDVVPRLPPRQFGYSHPSPEYWIKSGTLVPVRRRDIVKIEGIDATGGNNQNNTPDIPAHLWYFGLIGTCI

SEQ ID NO: 9969 - protein, 269 aa, Thermomyces lanuginosus
DVSADLLNQFKLFAQYSAAAYCGRNNDAPAGTNITCSANACPLVEAADATFLYSFENSGVGDVTGFLAVDNTNKLIVLSFRGSRSIENWITNLNFDLVDINDICSGCRGHDGFTSSWRSVADTLRQAVDDAVAAHPDYKVVVTGHSLGGALATLAGADLRNNGYDVQLYTYGAPRVGNRAFAEFITVQTGGTLYRVTHTNDVVPRLPPRQFGYSHPSPEYWIKSGTLVPVRRRDIVKIEGIDATGGNNQNNTPDIPAHLWYFGLIGTCI

SEQ ID NO: 9970 - protein, 269 aa, Thermomyces lanuginosus
DVSADLLNQFKLFAQYSAAAYCGRNNDAPAGTNITCSANACPLVEAADATFLYSFESSGVGDVTGFLAVDNTNKLIVLSFRGSRSIENWITNLNFDLVDINDICSGCRGHDGFTSSWRSVADTLRQAVDDAVAAHPDYKVVVTGHSLGGALATLAGADLRNNGYDVDLYTYGAPRVGNRAFAEFITVQTGGTLYRVTHTNDVVPRLPPRQFGYSHPSPEYWIKSGTLVPVRRRDIVKIEGIDATGGNNQNNAPDIPAHLWYFGAIGTCI

SEQ ID NO: 9971 - protein, 269 aa, Thermomyces lanuginosus
DVSADLLNQFKLFAQYSAAAYCGRNNDAPAGTNITCSANACPLVEAADATVLYSFENSGVGDVTGFLAVDNTNKLIVLSFRGSRSIENWITNLNFDLVDINDICSGCRGHDGFTSSWRSVADTLRQAVDDAVAAHPDYKVVVTGHSLGGALATLAGADLRNNGYDVDLYTYGAPRVGNRAFAEFITVQTGGTLYRVTHTNDVVPRLPPRQFGYSHPSPEYWIKSGTLVPVRRRDIVKIEGIDATGGNNQNNTPDIPAHLWYFGLIGTCI

SEQ ID NO: 9972 - protein, 269 aa, Thermomyces lanuginosus
DVSADLLNQFKLFAQYSAAAYCGRNNDAPAGTNITCSANACPLVEAADATFLYSFENSGVGDVTGFLAVDNTNKLIVLSFRGSRSIENWITNLNFDLVDINDICSGCRGHDGFTSSWRSVADTLRQAVDDAVAAHPDYKVVVTGHSLGGALATLAGADLRNNGYDVDLYTYGAPRVGNRAFAEFITVQTGGTLYRVTHTNDVVPRLPPRQFRYSHPSPEYWIKSGTLVPVRRRDIVKIEGIDATGGNNQNNTPDIPAHLWYFGLIGTCI

SEQ ID NO: 9973 - protein, 269 aa, Thermomyces lanuginosus
DVSADLLNQFKLFAQYSAAAYCGRNNDAPAGTNITCSANACPLVEAADATFLYSFENSGMGDVTGFLAVDNTNKLIVLSFRGSRSIENWITNLNFDLVDINDICSGCRGHDGFTSSWRSVADTLRQAVDDAVAAHPDYKVVVTGHSLGGALATLAGADLRNNGYDVDLYTYGAPRVGNRAFAEFITVQTGGTLYRVTHTNDVVPRLPPRQFGYSHPSPEYWIKSGTGVPVRRRDIVKIEGIDATGGNNQNNTPDIPAHLWYFGIIGTCI

SEQ ID NO: 9974 - protein, 269 aa, Thermomyces lanuginosus
DVSADLLNQFKLFAQYSAAAYCGRNNDAPAGTNITCSANACPLVEAADATFLYSFENSGVGDVTGFLAQDNTNKLIVLSFRGSRSIENWITNLNFDLVDINDICSGCRGHDGFTSSWRSVADTLRQAVDDAVAAHPDYKVVVTGHSLGGALATLAGADLRNNGYDVDLYTYGAPRVGNRAFAEFITVQTGGTLYRVTHTNDVVPRLPPRQFGYSHPSPEYWIKSGTLVPVRRRDIVKIEGIDATGGNNQNNAPDIPAHLWYFGAIGTCI

SEQ ID NO: 9975 - protein, 269 aa, Thermomyces lanuginosus
DVSADLLNQFKLFAQYSAAAYCGRNNDAPAGTNITCSANACPLVEAADATFLYSFENSGVGDVTGFLAVDNTNKLIVLSFRGSRSIENWITNLNFDLVDINDICSGCRGHDGFTSSWRSVADTLRQAVDDAVAAHPDYKVVVTGHSLGGALATLAGADLRNNGYDVDLYTYGAPRVGNRAFAEFITVQTGGTLYRVTHTNDVVPRLPPRQFGYSHPSPEYWIKSGTLVPVRRRDIVKIEGIDATGGNNQNNAPDIPAHLWYFGAIGTCI

SEQ ID NO: 9976 - protein, 269 aa, Thermomyces lanuginosus
DVSADLLNQFKLFAQYSAAAYCGRNNDAPAGTNITCSANACPLVEAADATFLYSFENSGVGDVTGFLAVDNTNKLIVLSFRGSRSPENWITNLNFDLVDINDICSGCRGHDGFTSSWRSVADTLRQAVDDAVAAHPDYKVVVTGHSLGGALATLAGADLRNNGYDVDLYTYGAPRVGNRAFAEFITVQTGGTLYRVTHTNDVVPRLPPRQFGYSHPSPEYWIKSGTLVPVRRRDIVKIEGIDATGGNNQNNTPDIPAHLWYFGLIGTCI

SEQ ID NO: 9977 - protein, 269 aa, Thermomyces lanuginosus
DVSADLLNQFKLFAQYSAAAYCGRNNDAPAGTNITCSANACPLVEAADATFLYSFENSGVGDVTGFLAVDNTNKLIVLSFRGSRSIENWITNLNFDLVDINDICSGCRGHDGFTSSWRSVADTLRQAVDDAVAAHPDYKVVVTGHSLGGALATLAGADLRNNGYDVDLYTYGAPRVGNRAFAEFITVQTGGTLYRVTHTNDVVPRLPPRQFGYSHPSPEYWIKSGTLVPVRRRDIVKIEGIDATGGNNQNNAPDIPAHLWYFGTIGTCI

SEQ ID NO: 9978 - protein, 269 aa, Thermomyces lanuginosus
DVSRDLLNQFKLFAQYSAAAYCGRNNDAPAGTNITCSANACPLVEAADATFLYSFENSGVGDVTGFLAVDNTNKLIVLSFRGSRSIENWITNLNFDLVDINDICSGCRGHDGFTSSWRSVADTLRQAVDDAVAAHPDYKVVVTGHSLGGALATLAGADLRNNGYDVDLYTYGAPRVGNRAFAEFITVQTGGTLYRVTHTNDVVPRLPPRQFGYSHPSPEYWIKSGTAVPVRRRDIVKIEGIDATGGNNQNNTPDIPAHLWYFGAIGTCI

SEQ ID NO: 9979 - protein, 269 aa, Thermomyces lanuginosus
DVSADLLNQFKLFAQYSAAAYCGRNNDAPAGTNITCSANACPLVEAADATFLYSFENSGVGDVTGFLAVDNTNKLIVLSFRGSRSIENWITNLDFDLVDINDICSGCRGHDGFTSSWRSVADTLRQAVDDAVAAHPDYKVVVTGHSLGGALATLAGADLRNNGYDVDLYTYGAPRVGNRAFAEFITVQTGGTLYRVTHTNDVVPRLPPRQFGYSHPSPEYWIKSGTLVPVRRRDIVKIEGIDATGGNNQNNAPDIPAHLWYFGAIGTCI

SEQ ID NO: 9980 - protein, 269 aa, Thermomyces lanuginosus
DVSADLLNQFKLFAQYSAAAYCGRNNDAPAGTNITCSSNACPLVEAADATFLYSFENSGVGDVTGFLAVDNTNKLIVLSFRGSRSIENWITNLNFDLVDINDICSGCRGHDGFTSSWRSVADTLRQAVDDAVAAHPDYKVVVTGHSLGGALATLAGADLRNNGYDVDLYTYGAPRVGNRAFAEFITVQTGGTLYRVTHTNDVVPRLPPRQFGYSHPSPEYWIKSGTLVPVRRRDIVKIEGIDATGGNNQNNAPDIPAHLWYFGAIGTCI

SEQ ID NO: 9981 - protein, 269 aa, Thermomyces lanuginosus
DVSADLLNQFKLFAQYSAAAYCGRNNDAPAGTNITCSANACPLVEAADATFLYSFENSGVGDVTGFLAVDNTNKLIVLSFRGSRSIENWITNLNFDLVDINDICSGCRGHDGFTSSWRSVADTLRQAVDDAVAAHPDYKVVVTGHSLGGALATLAGADLRNNGYDVDLYTYGAPRVGNRAFAEFITVQTGGTLYRVTHTNDVVPRLPPRQNGYSHPSPEYWIKSGTLVPVRRRDIVKIEGIDATGGNNQNNTPDIPAHLWYFGLIGTCI

SEQ ID NO: 9982 - protein, 269 aa, Thermomyces lanuginosus
DVSADLLNQFKLFAQYSAAAYCGRNNDAPAGTNITCSANACPLVEAAQATFLYSFENSGVGDVTGFLAVDNTNKLIVLSFRGSRSIENWITNLNFDLVDINDICSGCRGHDGFTSSWRSVADTLRQAVDDAVAAHPDYKVVVTGHSLGGALATLAGADLRNNGYDVDLYTYGAPRVGNRAFAEFITVQTGGTLYRVTHTNDVVPRLPPRQFGYSHPSPEYWIKSGTLVPVRRRDIVKIEGIDATGGNNQNNTPDIPAHLWYFGLIGTCI

SEQ ID NO: 9983 - protein, 269 aa, Thermomyces lanuginosus
DVSADLLNQFKLFAQYSAAAYCGRNNDAPAGTNITCSANACPLVEAADATFLYSFENSGVGDVTGFLAVDNTNKLIVLSFRGSRSIENWITNLNFDLVDIQDICSGCRGHDGFTSSWRSVADTLRQAVDDAVAAHPDYKVVVTGHSLGGALATLAGADLRNNGYDVDLYTYGAPRVGNRAFAEFITVQTGGTLYRVTHTNDVVPRLPPRQFGYSHPSPEYWIKSGTLVPVRRRDIVKIEGIDATGGNNQNNTPDIPAHLWYFGLIGTCI

SEQ ID NO: 9984 - protein, 269 aa, Thermomyces lanuginosus
DVSADLLNQFKLFAQYSAAAYCGRNNDAPAGTNITCSANACPLVEAADATFLYSFENSGVGDVTGFLAVDNTNKLIVLSFRGSRSIENWITNLNFDLVDINDICSGCRGHDGFTSSWRSVADTLRQAVDDAVAAHPDYKVVVTGHSLGGALATLAGADLRNDGYDVDLYTYGAPRVGNRAFAEFITVQTGGTLYRVTHTNDVVPRLPPRQFGYSHPSPEYWIKSGTLVPVRRRDIVKIEGIDATGGNNQNNTPDIPAHLWYFGLIGTCI

SEQ ID NO: 9985 - protein, 269 aa, Thermomyces lanuginosus
DVSADLLNQFKLFAQYSAAAYCGRNNDAPNGTNITCSANACPLVEAADATFLYSFENSGVGDVTGFLAVDNTNKLIVLSFRGSRSIENWITNLNFDLVDINDICSGCRGHDGFTSSWRSVADTLRQAVDDAVAAHPDYKVVVTGHSLGGALATLAGADLRNNGYDVDLYTYGAPRVGNRAFAEFITVQTGGTLYRVTHTNDVVPRLPPRQFGYSHPSPEYWIKSGTLVPVRRRDIVKIEGIDATGGNNQNNTPDIPAHLWYFGLIGTCI

SEQ ID NO: 9986 - protein, 269 aa, Thermomyces lanuginosus
DVSADLLNQFKLFAQYSAAAYCGRNNDAPAGTNITCSANACPLVEAADATFLYSFENSGVGDVTGFLAVDNTNKLIVLSFRGSRSIENWITNLNFDLVDINDICSGCRGHDGFTSSWRSVADTLRQAVDDAVAAHPDYKVVVTGHSLGGALATLAGADLRNNGYDVDLYTYGAPRVGNRAFAEFITVQTGGTLYRVTHTNDVVPRLPPRQFGYSHPSPEYWIKSGTLPPVRRRDIVKIEGIDATGGNNQNNTPDIPAHLWYFGLIGTCI

SEQ ID NO: 9987 - protein, 269 aa, Thermomyces lanuginosus
DVSADLLNQFKLFAQYSAAAYCGRNNDAPAGTNITCSANACPLVEAADATFLYSFENSGVGDVTGFLAVDNTNKLIVLSFRGSRSIENWITNLNFDLVDINDICSGCRGHDGFTSSWRSVADTLRQAVDDAVAAHPDYKVVVTGHSLGGALATLAGADLRNNGYDVDLYTYGAPRVGNRAFAEFITVQTGGTLYRVTHTNDVVPRLPPRQFGYSHPSPEYWIKSGTLVPVRRRDIVKIEGIDATGGNNQNNTPDIPAHLWYFGAIGTCI

SEQ ID NO: 9988 - protein, 269 aa, Thermomyces lanuginosus
DVSADLLNQFKLFAQYSAAAYCGRNNDAPAGTNITCSANACPLVEAADATILYSFENSGVGDVTGFLAVDNTNKLIVLSFRGSRSIENWITNLNFDLVDINDICSGCRGHDGFTSSWRSVADTLRQAVDDAVAAHPDYKVVVTGHSLGGALATLAGADLRNNGYDVDLYTYGAPRVGNRAFAEFITVQTGGTLYRVTHTNDVVPRLPPRQFGYSHPSPEYWIKSGTLVPVRRRDIVKIEGIDATGGNNQNNTPDIPAHLWYFGLIGTCI

SEQ ID NO: 9989 - protein, 269 aa, Thermomyces lanuginosus
DVSADLLNQFKLFAQYSAAAYCGRNNDAPAGTNITCSANACPLVEAADATFLYSFENSGVGDVTGFLAVDNTNKLIVLSFRGSRSIENWITNLNFILVDINDICSGCRGHDGFTSSWRSVADTLRQAVDDAVAAHPDYKVVVTGHSLGGALATLAGADLRNNGYDVDLYTYGAPRVGNRAFAEFITVQTGGTLYRVTHTNDVVPRLPPRQFGYSHPSPEYWIKSGTLVPVRRRDIVKIEGIDATGGNNQNNTPDIPAHLWYFGLIGTCI

SEQ ID NO: 9990 - protein, 269 aa, Thermomyces lanuginosus
DVSADLLNQFKLFAQYSAAAYCGRNNDAPAGTNITCSANACPLVEAADATFLYSFENSGVGDVTGFLAVDNTNKLIVLSFRGSRSIENWITNLNFDLVDINDICSGCRGHDGFTSSWRSVADTLRQAVDDAVAAHPDYKVVVTGHSLGGALATLAGADLRNNGYDVDLYTYGAPRVGNRAFAEFITVQTGGTLYRVTHTNDVVPRLPPRQFGYSHPSPEYWIKSGTLVPVRRRDIVKIEGIDATGGNNQNNAPDIPAHLWYFGPIGTCI

SEQ ID NO: 9991 - protein, 269 aa, Thermomyces lanuginosus
DVSADLLNQFKLFAQYSAAAYCGRNNDAPAGTNITCSANACPLVEAADATFLYSFENSGVGDVTGFLAVDNTNKLIVLSFRGSRSIENWITNFNFDLVDINDICSGCRGHDGFTSSWRSVADTLRQAVDDAVAAHPDYKVVVTGHSLGGALATLAGADLRNNGYDVDLYTYGAPRVGNRAFAEFITVQTGGTLYRVTHTNDVVPRLPPRQFGYSHPSPEYWIKSGTLVPVRRRDIVKIEGIDATGGNNQNNTPDIPAHLWYFGLIGTCI

SEQ ID NO: 9992 - protein, 269 aa, Thermomyces lanuginosus
DVSADLLNQFKLFAQYSAAAYCGRNNDAPAGTNITCSANACPLVEAADATFLYSFENSGVGDVTGFLAVDNTNKLIVLSFRGSRSIENWITNLNFDLVDINDICSGCRGHDGFTSSWRSVADTLRQAVDDAVAAHPDYKVVVTGHSLGGALATLAGADLRNNGYDVDLYTYGAPRVGNRAFAEFITVQTGGTLYRVTHTNDVVPRLPPRQFGYSHPSPEYWIKSGTLVPVRERDIVKIEGIDATGGNNQNNTPDIPAHLWYFGLIGTCI

SEQ ID NO: 9993 - protein, 269 aa, Thermomyces lanuginosus
DVSADLLNQFKLFAQYSAAAYCGRNNDAPAGTNITCSANACPLVEAADATFLYSFENSGVGDVTGFLAVDNTNKLIVLSFRGSRSIENWITNLNFDLVDINDICSGCRGHDGFTSSWRSVAQTLRQAVDDAVAAHPDYKVVVTGHSLGGALATLAGADLRNNGYDVDLYTYGAPRVGNRAFAEFITVQTGGTLYRVTHTNDVVPRLPPRQFGYSHPSPEYWIKSGTLVPVRRRDIVKIEGIDATGGNNQNNTPDIPAHLWYFGLIGTCI

SEQ ID NO: 9994 - protein, 269 aa, Thermomyces lanuginosus
DVSADLLNQFKLFAQYSAAAYCGRNNDAPAGTNITCSANACPLVEAADATFLYSFENSGVGDVTGFLAVDNTNKLIVLSFRGSRSIENWITNLNFHLVDINDICSGCRGHDGFTSSWRSVADTLRQAVDDAVAAHPDYKVVVTGHSLGGALATLAGADLRNNGYDVDLYTYGAPRVGNRAFAEFITVQTGGTLYRVTHTNDVVPRLPPRQFGYSHPSPEYWIKSGTLVPVRRRDIVKIEGIDATGGNNQNNTPDIPAHLWYFGLIGTCI

SEQ ID NO: 9995 - protein, 269 aa, Thermomyces lanuginosus
DVSADLLNQFLLFAQYSAAAYCGRNNDAPAGTNITCSANACPLVEAADATFLYSFENSGVGDVTGFLAVDNTNKLIVLSFRGSRSIENWITNLNFDLVDINDICSGCRGHDGFTSSWRSVADTLRQAVDDAVAAHPDYKVVVTGHSLGGALATLAGADLRNNGYDVDLYTYGAPRVGNRAFAEFITVQTGGTLYRVTHTNDVVPRLPPRQFGYSHPSPEYWIKSGTLVPVRRRDIVKIEGIDATGGNNQNNAPDIPAHLWYFGAIGTCI

SEQ ID NO: 9996 - protein, 269 aa, Thermomyces lanuginosus
DVSRDLLNQFKLFAQYSAAAYCGRNNDAPAGTNITCSANACPLVEAADATFLYSFENSGVGDVTGFLAVDNTNKLIVLSFRGSRSIENWITNLNFDLVDINDICSGCRGHDGFTSSWRSVADTLRQAVDDAVAAHPDYKVVVTGHSLGGALATLAGADLRNNGYDVDLYTYGAPRVGNRAFAEFITVQTGGTLYRVTHTNDVVPRLPPRQFGYSHPSPEYWIKSGTLVPVRRRDIVKIEGIDATGGNNQNNAPDIPAHLWYFGAIGTCI

SEQ ID NO: 9997 - protein, 269 aa, Thermomyces lanuginosus
DVSADLLNQFKLFAQYSAAAYCGRNNDAPAGTNITCSANACPLVEAADATFLYSFENSGVGDVTGFLAVDNTNKLIVLSFRGSRSIENWITNLNFDLVDINDICSGCRGHDGFTSSWRSVADTLRQAVDDAVAAHPDYKVVVTGHSLGGALATLAGADLRNNGYDVDLYTYGAPRVGNREFAEFITVQTGGTLYRVTHTNDVVPRLPPRQFGYSHPSPEYWIKSGTLVPVRRRDIVKIEGIDATGGNNQNNTPDIPAHLWYFGLIGTCI

SEQ ID NO: 9998 - protein, 269 aa, Thermomyces lanuginosus
DVSADLLEQFKLFAQYSAAAYCGRNNDAPAGTNITCSANACPLVEAADATFLYSFENSGVGDVTGFLAVDNTNKLIVLSFRGSRSIENWITNLNFDLVDINDICSGCRGHDGFTSSWRSVADTLRQAVDDAVAAHPDYKVVVTGHSLGGALATLAGADLRNNGYDVDLYTYGAPRVGNRAFAEFITVQTGGTLYRVTHTNDVVPRLPPRQFGYSHPSPEYWIKSGTLVPVRRRDIVKIEGIDATGGNNQNNTPDIPAHLWYFGLIGTCI

SEQ ID NO: 9999 - protein, 269 aa, Thermomyces lanuginosus
DVSADLLNQFKLFAQYSAAAYCGRNNDAPAGTNITCSANACPLVEAADATFLYSFENSGVGDVTGFLAKDNTNKLIVLSFRGSRSIENWITNLNFDLVDINDICSGCRGHDGFTSSWRSVADTLRQAVDDAVAAHPDYKVVVTGHSLGGALATLAGADLRNNGYDVDLYTYGAPRVGNRAFAEFITVQTGGTLYRVTHTNDVVPRLPPRQFGYSHPSPEYWIKSGTLVPVRRRDIVKIEGIDATGGNNQNNAPDIPAHLWYFGAIGTCI

SEQ ID NO: 10000 - protein, 269 aa, Thermomyces lanuginosus
DVSADLLNQFKLFAQYSAAAYCGRNNDAPAGTNITCSANACPLVEAADATFLYSFENSGMGDVTGFLAVDNTNKLIVLSFRGSRSIENWITNLNFDLVDINDICSGCRGHDGFTSSWRSVADTLRQAVDDAVAAHPDYKVVVTGHSLGGALATLAGADLRNNGYDVDLYTYGAPRVGNRAFAEFITVQTGGTLYRVTHTNDVVPRLPPRQFGYSHPSPEYWIKSGTLVPVRRRDIVKIEGIDATGGNNQNNTPDIPAHLWYFGLIGTCI

SEQ ID NO: 10001 - protein, 269 aa, Thermomyces lanuginosus
DVSADLLNQFKLFAQYSAAAYCGRNNDAPAGTNITCSANACPLVEAADATFLYSFENSGVGDVTGFLAVDNTNKLIVLSFRGSRSIENWITNLNFDLVDINDICSGCRGHDGFTSSWRSVADTLRQAVDDAVAAHPDYKVVVTGHSLGGALATLAGADLRNNGYDVDLYTYGAPRVGNRAFAEFITVQTGGTLYRVTHTNDVVPRLPPRQFGYSHPSPEYWIKSGTLVPVRQRDIVKIEGIDATGGNNQNNTPDIPAHLWYFGLIGTCI

SEQ ID NO: 10002 - protein, 269 aa, Thermomyces lanuginosus
DVSADLLNQFKLFAQYSAAAYCGRNNDAPAGTNITCSANACPLVEAADATFLYSFENSGVGQVTGFLAVDNTNKLIVLSFRGSRSIENWITNLNFDLVDINDICSGCRGHDGFTSSWRSVADTLRQAVDDAVAAHPDYKVVVTGHSLGGALATLAGADLRNNGYDVDLYTYGAPRVGNRAFAEFITVQTGGTLYRVTHTNDVVPRLPPRQFGYSHPSPEYWIKSGTLVPVRRRDIVKIEGIDATGGNNQNNTPDIPAHLWYFGLIGTCI

SEQ ID NO: 10003 - protein, 269 aa, Thermomyces lanuginosus
DVSADLLNQFKLFAQYSAAAYCGRNNDAPAGTNITCSANACPLVEAADATFLYSFENSGVGDVTGFLAVDNTNKLIVLSFRGSRSIENWITNLNFDLVDINDICSGCQGHDGFTSSWRSVADTLRQAVDDAVAAHPDYKVVVTGHSLGGALATLAGADLRNNGYDVDLYTYGAPRVGNRAFAEFITVQTGGTLYRVTHTNDVVPRLPPRQFGYSHPSPEYWIKSGTLVPVRRRDIVKIEGIDATGGNNQNNTPDIPAHLWYFGLIGTCI

SEQ ID NO: 10004 - protein, 269 aa, Thermomyces lanuginosus
DVSADLLNQFKLFAQYSAAAYCGRNNDAPAGTNITCSANACPLVEAADATFLYSFENSGVGDVTGFLAVDNTNKLIVLSFRGSRSIENWITNLNFDLVDINDICSGCRGHDGFTSSWRSVADTLRQAVDDAVAAHPDYKVVVTGHSLGGALATLAGADLRNNGYDVDLYTYGAPRVGNRAFAEFITVQTGGTLYRVTHTNDVVPRLPPRQFGYSHPSPEYWIKSGTLVPVRRRDIVKIEGIDATGGNNQNNAPDIPAHLWYFGQIGTCI

SEQ ID NO: 10005 - protein, 269 aa, Thermomyces lanuginosus
DVSADLLNQFKLFAQYSAAAYCGRNNDAPAGTNITCSANACPLVEAADATFLYSFENSGSGDVTGFLAVDNTNKLIVLSFRGSRSIENWITNLNFDLVDINDICSGCRGHDGFTSSWRSVADTLRQAVDDAVAAHPDYKVVVTGHSLGGALATLAGADLRNNGYDVDLYTYGAPRVGNRAFAEFITVQTGGTLYRVTHTNDVVPRLPPRQFGYSHPSPEYWIKSGTLVPVRRRDIVKIEGIDATGGNNQNNTPDIPAHLWYFGLIGTCI

SEQ ID NO: 10006 - protein, 269 aa, Thermomyces lanuginosus
DVSADLLNQFKLFAQYSAAAYCGRNNDAPAGTNITCSANACPLVEAADATFLYSFENSGVGDVTGFLAVDNTNKLIVLSFRGSRSIENWITNLNFDLVDINDICSGCRGHDGFTSSWRSVADTLRQAVDDAVAAHPDYKVVVTGHSLGGALATLAGADLRNNGYDVDLYTYGAPRVGNRAFAEFITVQTGGTLYRVTHTNDVVPRLPPRQFGYSHPSPEYWIKSGTLVPVRRRDIVKIEGIDATGGNNQNNTPDIPAHLWYFGVIGTCI

SEQ ID NO: 10007 - protein, 269 aa, Thermomyces lanuginosus
DVSADLLNQFKLFAQYSAAAYCGRNNDAPAGTNITCSANACPLVEAADATFLYSFENSGVGDVTGFLAVDNTNKLIVLSFRGSRSIENWITNLNFDLVDINDICSGCRGHDGFTSSWRSVADTLRQAVDDAVAAHPDYKVVVTGHSLGGALATLAGADLRNEGYDVDLYTYGAPRVGNRAFAEFITVQTGGTLYRVTHTNDVVPRLPPRQFGYSHPSPEYWIKSGTLVPVRRRDIVKIEGIDATGGNNQNNTPDIPAHLWYFGLIGTCI

SEQ ID NO: 10008 - protein, 269 aa, Thermomyces lanuginosus
DVSADLLNQFKLFAQYSAAAYCGRNNDAPAGTNITCSANACPLVEAADATFLYSFKNSGVGDVTGFLAVDNTNKLIVLSFRGSRSIENWITNLNFDLVDINDICSGCRGHDGFTSSWRSVADTLRQAVDDAVAAHPDYKVVVTGHSLGGALATLAGADLRNNGYDVDLYTYGAPRVGNRAFAEFITVQTGGTLYRVTHTNDVVPRLPPRQFGYSHPSPEYWIKSGTLVPVRRRDIVKIEGIDATGGNNQNNTPDIPAHLWYFGLIGTCI

SEQ ID NO: 10009 - protein, 269 aa, Thermomyces lanuginosus
DVSADLLNQFKLFAQYSAAAYCGRNNDAPAGTNITCSANACPLVEAADATFLYSFENSGVGDVTGFLAVDNTNKLIVLSFRGSRSIEQWITNLNFDLVDINDICSGCRGHDGFTSSWRSVADTLRQAVDDAVAAHPDYKVVVTGHSLGGALATLAGADLRNNGYDVDLYTYGAPRVGNRAFAEFITVQTGGTLYRVTHTNDVVPRLPPRQFGYSHPSPEYWIKSGTLVPVRRRDIVKIEGIDATGGNNQNNTPDIPAHLWYFGLIGTCI

SEQ ID NO: 10010 - protein, 269 aa, Thermomyces lanuginosus
DVSADLLNQFKLFAQYSAAAYCGRNNDAPAGTNITCEANACPLVEAADATFLYSFENSGVGDVTGFLAVDNTNKLIVLSFRGSRSIENWITNLNFDLVDINDICSGCRGHDGFTSSWRSVADTLRQAVDDAVAAHPDYKVVVTGHSLGGALATLAGADLRNNGYDVDLYTYGAPRVGNRAFAEFITVQTGGTLYRVTHTNDVVPRLPPRQFGYSHPSPEYWIKSGTLVPVRRRDIVKIEGIDATGGNNQNNAPDIPAHLWYFGAIGTCI

SEQ ID NO: 10011 - protein, 269 aa, Thermomyces lanuginosus
DVSADLLNQFKLFAQYSAAAYCGRNNDAPAGTNITCSANACPLVERADATFLYSFENSGVGDVTGFLAVDNTNKLIVLSFRGSRSIENWITNLNFDLVDINDICSGCRGHDGFTSSWRSVADTLRQAVDDAVAAHPDYKVVVTGHSLGGALATLAGADLRNNGYDVDLYTYGAPRVGNRAFAEFITVQTGGTLYRVTHTNDVVPRLPPRQFGYSHPSPEYWIKSGTLVPVRRRDIVKIEGIDATGGNNQNNAPDIPAHLWYFGAIGTCI

SEQ ID NO: 10012 - protein, 269 aa, Thermomyces lanuginosus
DVSADLLNQFKLFAQYSAAAYCGRNNDAPAGTNITCSANACPLVEAADATFLYSFENSGVGDVTGFLAVDNTNKLIVLSFRGSRSIENWITNLNFQLVDINDICSGCRGHDGFTSSWRSVADTLRQAVDDAVAAHPDYKVVVTGHSLGGALATLAGADLRNNGYDVDLYTYGAPRVGNRAFAEFITVQTGGTLYRVTHTNDVVPRLPPRQFGYSHPSPEYWIKSGTLVPVRRRDIVKIEGIDATGGNNQNNTPDIPAHLWYFGLIGTCI

SEQ ID NO: 10013 - protein, 269 aa, Thermomyces lanuginosus
DVSADLLNQFKLFAQYSAAAYCGRNNDAPAGTNITCSANACPLVEAADATFLYSFENSGVGDVTGFLAVDNTNKLIVLSFRGSRSIENWRTNLNFDLVDINDICSGCRGHDGFTSSWRSVADTLRQAVDDAVAAHPDYKVVVTGHSLGGALATLAGADLRNNGYDVDLYTYGAPRVGNRAFAEFITVQTGGTLYRVTHTNDVVPRLPPRQFGYSHPSPEYWIKSGTLVPVRRRDIVKIEGIDATGGNNQNNTPDIPAHLWYFGLIGTCI

SEQ ID NO: 10014 - protein, 269 aa, Thermomyces lanuginosus
DVSADLLNQFKLFAQYSAAAYCGRNNDAPAGTNITCSANACPLVEAADATFLYSFENSGVGDVTGFLAVDNTNKLIVLSFRGSRSIENWITNLNFDLVDINDICSGCRGHDGFTSSWRSVADTLRQAVDDAVAAHPDYKVVVTGHSLGGALATLAGADLRNNGYDVDLYTYGAPRVGNRAFAEFITVQTGGTLYRVTHTNDVVPRLPPRQFGYSHPSPEYWIKSGTLVPVRRRDIVKIEGIDATGGNNQNNTPDIPAHLWYFGIIGTCI

SEQ ID NO: 10015 - protein, 269 aa, Thermomyces lanuginosus
DVSADLLNQFKLFAQYSAAAYCGRNNDAPAGTNITCSANACPLVEAADATFLYSFENSGVGDVTGFLAVDNTNKLIVLSFRGSRSIENWITNLNFDLVDINDICSGCRGHDGFTSSWRSVADTLRQAVDDAVAAHPDYKVVVTGHSLGGALATLAGADLRNNGYDVDLYTYGAPRVGNRAFAEFITVQTGGTLYRVTHTNDVVPRLPPRQFGYSHPSPEYWIKSGTLVPVRRRDIVKIEGIDATGGNNQNNAPDIPAHLWYFGSIGTCI

SEQ ID NO: 10016 - protein, 269 aa, Thermomyces lanuginosus
DVSADLLNQFKLFAQYSAAAYCGRNNDAPAGTNITCSANACPLVEAADATFLYSFENSGVGDVTGFLAVDNTNKLIVLSFRGSRSIENWITNLNFDLVDINDICSGCRGHDGFTSSWRSVADTLRQAVDDAVAAHPDYKVVVTGHSLGGALATLAGADLRNNGYDVDLYTYGAPRVGNRAFAEFITVQTGGTLYRVTHTNDVVPRLPPQQFGYSHPSPEYWIKSGTLVPVRRRDIVKIEGIDATGGNNQNNTPDIPAHLWYFGLIGTCI

SEQ ID NO: 10017 - protein, 269 aa, Thermomyces lanuginosus
DVSADLLNQFKLFAQYSAAAYCGRNNDAPAGTNITCSANACPLVEAADATFLYSFENSGMGDVTGFLAVDNTNKLIVLSFRGSRSIENWITNLNFDLVNISDICSGCRGHDGFTSSWRSVADTLRQAVDDAVAAHPDYKVVVTGHSLGGALATLAGADLRNNGYDVDLYTYGAPRVGNRAFAEFITVQTGGTLYRVTHTNDVVPRLPPRQFGYSHPSPEYWIKSGTGVPVRRRDIVKIEGIDATGGNNQNNTPDIPAHLWYFGLIGTCI

SEQ ID NO: 10018 - protein, 269 aa, Thermomyces lanuginosus
DVSADLLNQFKLFAQYSAAAYCGRNNDAPAGTNITCSANACPLVEAADATFLYSFENSGVGDVTGFLAVDNTNKLIVLSFRGSRSFENWITNLNFDLVDINDICSGCRGHDGFTSSWRSVADTLRQAVDDAVAAHPDYKVVVTGHSLGGALATLAGADLRNNGYDVDLYTYGAPRVGNRAFAEFITVQTGGTLYRVTHTNDVVPRLPPRQFGYSHPSPEYWIKSGTLVPVRRRDIVKIEGIDATGGNNQNNTPDIPAHLWYFGLIGTCI

SEQ ID NO: 10019 - protein, 269 aa, Thermomyces lanuginosus
DVSADLLNQFKLFAQYSAAAYCGRNNDAPAGTNITCSANACPLVEAADATFLYSFENSGVGDVTGFLAVDNTNKLIVLSFRGSRSIENWITNLNFDLVDINDICSGCRGHDGFTSSWRSVADTLRQAVDDAVAAHPDYKVVVTGHSLGGALATLAGADLRNNGYDVDLYTYGAPRVGNRAFAEFITVQTGGTLYRVTHTNDVVPRLPPRQFGYSHPSPEYWIKSGTGAPVRRRDIVKIEGIDATGGNNQNNAPDIPAHLWYFGIIGTCI

SEQ ID NO: 10020 - protein, 269 aa, Thermomyces lanuginosus
DVSEDLLNQFKLFAQYSAAAYCGRNNDAPAGTNITCSANACPLVEAADATFLYSFENSGVGDVTGFLAVDNTNKLIVLSFRGSRSIENWITNLNFDLVDINDICSGCRGHDGFTSSWRSVADTLRQAVDDAVAAHPDYKVVVTGHSLGGALATLAGADLRNNGYDVDLYTYGAPRVGNRAFAEFITVQTGGTLYRVTHTNDVVPRLPPRQVGYSHPSPEYWIKSGTLVPVRRRDIVKIEGIDATGGNNQNNTPDIPAHLWYFGLIGTCI

SEQ ID NO: 10021 - protein, 269 aa, Thermomyces lanuginosus
DVSADLLNQFKLFAQYSAAAYCGRNNDAPAGTNITCSANACPLVEFADATFLYSFENSGVGDVTGFLAVDNTNKLIVLSFRGSRSIENWITNLNFDLVDINDICSGCRGHDGFTSSWRSVADTLRQAVDDAVAAHPDYKVVVTGHSLGGALATLAGADLRNNGYDVDLYTYGAPRVGNRAFAEFITVQTGGTLYRVTHTNDVVPRLPPRQFGYSHPSPEYWIKSGTLVPVRRRDIVKIEGIDATGGNNQNNAPDIPAHLWYFGAIGTCI

SEQ ID NO: 10022 - protein, 269 aa, Thermomyces lanuginosus
DVSADLLNQFKLFAQYSAAAYCGRNNDAPAGTNITCSANACPLVEAADATFLYSFENSGVGDVTGFLAVDNTNKLIVLSFRGSRSIENWITNLNFDLVDINDICSGCRGHDGFTSSWRSVADTLRQAVDDAVAAHPDYKVVVTGHSLGGALATLAGADLRNNGSDVDLYTYGAPRVGNRAFAEFITVQTGGTLYRVTHTNDVVPRLPPRQFGYSHPSPEYWIKSGTLVPVRRRDIVKIEGIDATGGNNQNNTPDIPAHLWYFGLIGTCI

SEQ ID NO: 10023 - protein, 269 aa, Thermomyces lanuginosus
DVSADLLNQFKLFAQYSAAAYCGRNNDAPAGTNITCSANACPLVEAADATFLYSFENSGVGDVTGFLAVDNTNKLIVLSFRGSRSIENWITNLNFDLVDIDDICSGCRGHDGFTSSWRSVADTLRQAVDDAVAAHPDYKVVVTGHSLGGALATLAGADLRNNGYDVDLYTYGAPRVGNRAFAEFITVQTGGTLYRVTHTNDVVPRLPPRQFGYSHPSPEYWIKSGTLVPVRRRDIVKIEGIDATGGNNQNNTPDIPAHLWYFGLIGTCI

SEQ ID NO: 10024 - protein, 269 aa, Thermomyces lanuginosus
DVSADLLNQFKLFAQYSAAAYCGRNNDAPAGTNITCSANACPLVEAADATFLYSFENSGVGDVTGFLAVDNTNKLIVLSFRGSRSIEDWITNLNFDLVDINDICSGCRGHDGFTSSWRSVADTLRQAVDDAVAAHPDYKVVVTGHSLGGALATLAGADLRNNGYDVDLYTYGAPRVGNRAFAEFITVQTGGTLYRVTHTNDVVPRLPPRQFGYSHPSPEYWIKSGTLVPVRRRDIVKIEGIDATGGNNQNNTPDIPAHLWYFGLIGTCI

SEQ ID NO: 10025 - protein, 269 aa, Thermomyces lanuginosus
DVSADLLNQFKLFAQYSAAAYCGRNNDAPAGTNITCSADACPLVEAADATFLYSFENSGVGDVTGFLAVDNTNKLIVLSFRGSRSIENWITNLNFDLVDINDICSGCRGHDGFTSSWRSVADTLRQAVDDAVAAHPDYKVVVTGHSLGGALATLAGADLRNNGYDVDLYTYGAPRVGNRAFAEFITVQTGGTLYRVTHTNDVVPRLPPRQFGYSHPSPEYWIKSGTLVPVRRRDIVKIEGIDATGGNNQNNTPDIPAHLWYFGLIGTCI

SEQ ID NO: 10026 - protein, 269 aa, Thermomyces lanuginosus
DVSADLLNQFKLFAQYSAAAYCGRNNDAPAGTNITCSANACPLVEAADATFLYSFENSGVGDVTGFLAVDNTNKLIVLSFRGSRSIENWITNLNFDLVDIRDICSGCRGHDGFTSSWRSVADTLRQAVDDAVAAHPDYKVVVTGHSLGGALATLAGADLRNNGYDVDLYTYGAPRVGNRAFAEFITVQTGGTLYRVTHTNDVVPRLPPRQFGYSHPSPEYWIKSGTLVPVRRRDIVKIEGIDATGGNNQNNTPDIPAHLWYFGLIGTCI

SEQ ID NO: 10027 - protein, 269 aa, Thermomyces lanuginosus
DVSADLLNQFKLFAQYSAAAYCGRNNDAPAGTNITCSANACPGVEAADATFLYSFENSGVGDVTGFLAVDNTNKLIVLSFRGSRSIENWITNLNFDLVDINDICSGCRGHDGFTSSWRSVADTLRQAVDDAVAAHPDYKVVVTGHSLGGALATLAGADLRNNGYDVDLYTYGAPRVGNRAFAEFITVQTGGTLYRVTHTNDVVPRLPPRQFGYSHPSPEYWIKSGTLVPVRRRDIVKIEGIDATGGNNQNNAPDIPAHLWYFGAIGTCI

SEQ ID NO: 10028 - protein, 269 aa, Thermomyces lanuginosus
DVSADLLNQFKLFAQYSAAAYCGRNNDAPAGTNITCSANACPLVEAADATFLYSFENSGVGDVTGFLAVDNTNKLIVLSFRGSRSIENWITNLNFDLVDINDICSGCRGHDGFTSSWRSVADTLRQAVDDAVAAHPDYKVVVTGHSLGGALATLAGADLRNNGYDVDLYTYGAPRVGNRAFAEFITVQTGGTLYRVTHTNDVVPRLPPRQYGYSHPSPEYWIKSGTLVPVRRRDIVKIEGIDATGGNNQNNTPDIPAHLWYFGLIGTCI

SEQ ID NO: 10029 - protein, 269 aa, Thermomyces lanuginosus
DVSADLLNQFKLFAQYSAAAYCGRNNDAPAGTNITCSANACPLVEAADATFLYSFENSGMGDVTGFLAVDNTNKLIVLSFRGSRSIENWITNLNFDLVDINDICSGCRGHDGFTSSWRSVADTLRQAVDDAVAAHPDYKVVVTGHSLGGALATLAGADLRNNGYDVDLYTYGAPRVGNRAFAEFITVQTGGTLYRVTHTNDVVPRLPPRQFGYSHPSPEYWIKSGTGQPVRRRDIVKIEGIDATGGNNQNNTPDIPAHLWYFGLIGTCI

SEQ ID NO: 10030 - protein, 269 aa, Thermomyces lanuginosus
DVSADLLNQFKLFAQYSAAAYCGRNNDAPAGTNITCSANACPLVEAADATFLYSFENSGVGDVTGFLAVDNTNKLIVLSFRGSRSIENWITNLNFDLVDINDICSGCRGHDGFTSSWRSVADTLRQAVDDAVAAHPDYKVVVTGHSLGGALATLAGADLRNNGYDVDLYTYGAPRVGNRAFAEFITVQTGGTLYRVTHTNDVVPRLPPRQFDYSHPSPEYWIKSGTLVPVRRRDIVKIEGIDATGGNNQNNTPDIPAHLWYFGLIGTCI

SEQ ID NO: 10031 - protein, 269 aa, Thermomyces lanuginosus
DVSADLLNQFKLFAQYSAAAYCGRNNDAPAGTNITCSANACPLVEAADATFLYSFENSGVGDVTGFLAVDNTNKLIVLSFRGSRSIENWITNLNFSLVDINDICSGCRGHDGFTSSWRSVADTLRQAVDDAVAAHPDYKVVVTGHSLGGALATLAGADLRNNGYDVDLYTYGAPRVGNRAFAEFITVQTGGTLYRVTHTNDVVPRLPPRQFGYSHPSPEYWIKSGTLVPVRRRDIVKIEGIDATGGNNQNNTPDIPAHLWYFGLIGTCI

SEQ ID NO: 10032 - protein, 269 aa, Thermomyces lanuginosus
DVSADLLNQFKLFAQYSAAAYCGRNNDAPAGTNITCSANACPLVEAADATFLYSFENSGVGDVTGFLAVDQTNKLIVLSFRGSRSIENWITNLNFDLVDINDICSGCRGHDGFTSSWRSVADTLRQAVDDAVAAHPDYKVVVTGHSLGGALATLAGADLRNNGYDVDLYTYGAPRVGNRAFAEFITVQTGGTLYRVTHTNDVVPRLPPRQFGYSHPSPEYWIKSGTLVPVRRRDIVKIEGIDATGGNNQNNTPDIPAHLWYFGLIGTCI

SEQ ID NO: 10033 - protein, 269 aa, Thermomyces lanuginosus
DVSADLLNQFKLFAQYSAAAYCGRNNDAPAGTNITCSANACPLVEAADATFLYSFENSGMGDVTGFLAVDNTNKLIVLSFRGSRSIENWITNLNFDLVDINDICSGCRGHDGFTSSWRSVADTLNQSVDDAVAAHPDYKVVVTGHSLGGALATLAGADLRNNGYDVDLYTYGAPRVGNRAFAEFITVQTGGTLYRVTHTNDVVPRLPPRQFGYSHPSPEYWIKSGTGVPVRRRDIVKIEGIDATGGNNQNNTPDIPAHLWYFGLIGTCI

SEQ ID NO: 10034 - protein, 269 aa, Thermomyces lanuginosus
DVSADLLNQFKLFAQYSAAAYCGRNNDAPAGTNITCSANACPLVEAADATFLYSFENSGVGDVTGFLAVDNTNKLIVLSFRGSRSIENWITNLNFDLVDINDICSGCRGHDGFTSSWRSVADTLRQAVDQAVAAHPDYKVVVTGHSLGGALATLAGADLRNNGYDVDLYTYGAPRVGNRAFAEFITVQTGGTLYRVTHTNDVVPRLPPRQFGYSHPSPEYWIKSGTLVPVRRRDIVKIEGIDATGGNNQNNTPDIPAHLWYFGLIGTCI

SEQ ID NO: 10035 - protein, 269 aa, Thermomyces lanuginosus
DVSADLLNQFKLFAQYSAAAYCGRNNDAPAGTNITCSANACPLVEAADATFLYSFENSGVGDVTGFLAVDNTNKLIVLSFRGSRSIENWITNLNFDLVDINDICSGCRGHDGFTSSWRSVADTLRQAVDDAVAAHPDYKVVVTGHSLGGALATLAGADLRNNGYDVDLYTYGAPRVGNRAFAEFITVQTGGTLYRVTHTNDVVPRLPPRQFGYSHPSPEYWIKSGTAVPVRRRDIVKIEGIDATGGNNQNNTPDIPAHLWYFGAIGTCI

SEQ ID NO: 10036 - protein, 269 aa, Thermomyces lanuginosus
DVSADLLNQFKLFAQYSAAAYCGRNNDAPAGTNITCSANACPLVEAADATFLYSFENSGMGDVTGFLAVDNTNKLIVLSFRGSRSIENWITNLNFDLVDINDICSGCRGHDGFTSSWRSVADTLRQAVDDAVAAHPDYKVVVTGHSLGGALATLAGADLRNNGYDVDLYTYGAPRVGNRAFAEFITVQTGGTLYRVTHTNDVVPRLPPRQFGYSHPSPEYWIKSGTGVPVRRRDIVKIEGIDATGGNNQNNTPDIPAHLWYFGVIGTCI

SEQ ID NO: 10037 - protein, 269 aa, Thermomyces lanuginosus
DVSADLLNQFKLFAQYSAAAYCGRNNDAPAGTNITCSANACPLVEAADATFLYSFENSGVGDVTGFLAVDNTNKLIVLSFRGSRSIENWITNLNFDLVDINDICSGCRGHDGFTSSWRSVADTLRQAVDDAVAAHPDYKVVVTGHSLGGALATLAGADLRNNGYDVDEYTYGAPRVGNRAFAEFITVQTGGTLYRVTHTNDVVPRLPPRQFGYSHPSPEYWIKSGTLVPVRRRDIVKIEGIDATGGNNQNNAPDIPAHLWYFGAIGTCI

SEQ ID NO: 10038 - protein, 269 aa, Thermomyces lanuginosus
DVSADLLNQFKLFAQYSAAAYCGRNNDAPAGTNITCSANACPLVEAADATFLYSFENSGVGDVTGFLAVDNTNKLIVLSFRGSRSIENWITNLNFNLSDINDICSGCRGHDGFTSSWRSVADTLRQAVDDAVAAHPDYKVVVTGHSLGGALATLAGADLRNNGYDVDLYTYGAPRVGNRAFAEFITVQTGGTLYRVTHTNDVVPRLPPRQFGYSHPSPEYWIKSGTLVPVRRRDIVKIEGIDATGGNNQNNTPDIPAHLWYFGLIGTCI

SEQ ID NO: 10039 - protein, 269 aa, Thermomyces lanuginosus
DVSADLLNQFKLFAQYSAAAYCGRNNDAPAGTNITCSANACPLVEAADATFLYSFENSGVGDVTGFLAVDNTNKLIVLSFRGSRSIENWITNLNFDLVDINDICSGCRGHDGFTSSWRSVADTLRQAVDDAVAAHPDYKVVVTGHSLGGALATLAGADLRNNGYDVDLYTYGAPRVGNRAFAEFITVQTGGTLYRVTHTNDVVPRLPPRQFGYSHPSPEYWIKSGTLVPVRRRDIVKIEGIDATGGNNQNNTPDAPAHLWYFGLIGTCI

SEQ ID NO: 10040 - protein, 269 aa, Thermomyces lanuginosus
DVSADLLNQFKLFAQYSAAAYCGRNNDAPAGTNITCSANACPLVEAADATFLYSFENSSVGDVTGFLAVDNTNKLIVLSFRGSRSIENWITNLNFDLVDINDICSGCRGHDGFTSSWRSVADTLRQAVDDAVAAHPDYKVVVTGHSLGGALATLAGADLRNNGYDVDLYTYGAPRVGNRAFAEFITVQTGGTLYRVTHTNDVVPRLPPRQFGYSHPSPEYWIKSGTLVPVRRRDIVKIEGIDATGGNNQNNTPDIPAHLWYFGLIGTCI

SEQ ID NO: 10041 - protein, 269 aa, Thermomyces lanuginosus
DVSADLLNQFKLFAQYSAAAYCGRNNEAPAGTNITCSANACPLVEAADATFLYSFENSGVGDVTGFLAVDNTNKLIVLSFRGSRSIENWITNLNFDLVDINDICSGCRGHDGFTSSWRSVADTLRQAVDDAVAAHPDYKVVVTGHSLGGALATLAGADLRNNGYDVDLYTYGAPRVGNRAFAEFITVQTGGTLYRVTHTNDVVPRLPPRQFGYSHPSPEYWIKSGTLVPVRRRDIVKIEGIDATGGNNQNNAPDIPAHLWYFGAIGTCI

SEQ ID NO: 10042 - protein, 269 aa, Thermomyces lanuginosus
DVSADLLNQFKLFAQYSAAAYCGRNNDAPAGTNITCSANACPLVEAADATFLYSFNNSGVGDVTGFLAVDNTNKLIVLSFRGSRSIENWITNLNFDLVDINDICSGCRGHDGFTSSWRSVADTLRQAVDDAVAAHPDYKVVVTGHSLGGALATLAGADLRNNGYDVDLYTYGAPRVGNRAFAEFITVQTGGTLYRVTHTNDVVPRLPPRQFGYSHPSPEYWIKSGTLVPVRRRDIVKIEGIDATGGNNQNNTPDIPAHLWYFGLIGTCI

SEQ ID NO: 10043 - protein, 269 aa, Thermomyces lanuginosus
DVSADLLNQFKLFAQYSAAAYCGRNNDAPAGTNITCSANACPLVEAADATFLYSFENSGVGDVTGFLAVDNTNKLIVLSFRGSRSIENWITNLNFDLVDINDICSGCRGHDGFTSSWRSVADTLRQAVDDAVAAHPDYKVVVTGHSLGGALATLAGADLRNNGYDVDLYTYGQPRVGNRAFAEFITVQTGGTLYRVTHTNDVVPRLPPRQFGYSHPSPEYWIKSGTLVPVRRRDIVKIEGIDATGGNNQNNTPDIPAHLWYFGLIGTCI

SEQ ID NO: 10044 - protein, 269 aa, Thermomyces lanuginosus
DVSADLLNQFKLFAQYSAAAYCGRNNDAPAGTNITCSANACPLVEAADATFLYSFENSGVGDVTGFLAVDNTNKLIVLSFRGSRSIENWITNLNFDLVDINDICSGCRGHDGFTSSWRSVADTLRQAVDDAVAAHPDYKVVVTGHSLGGALATLAGADLRNNGYDVDLYTYGAPRVGNRAFAEFITVQTGGTLYRVTHTNDVVPRLPPRQVGYSHPSPEYWIKSGTLVPVRRRDIVKIEGIDATGGNNQNNAPDIPAHLWYFGLIGTCI

SEQ ID NO: 10045 - protein, 269 aa, Thermomyces lanuginosus
DVSADLLNQFKLFAQYSAAAYCGRNNDAPAGTNITCSANACPLVEAADATFLYSFENSGVGDVTGFLAVDNTNKLIVLSFRGSRSIENWITNLNFDLVDINDICSGCRGHDGFTSSWRSVADTLRQAVDDAVAAHPDYKVVVTGHSLGGALATLAGADLRNNGYDVDLYTYGAPRVGNRAFAEFITVQTGGTLYRVTHTNDVVPRLPPRQAGYSHPSPEYWIKSGTLVPVRRRDIVKIEGIDATGGNNQNNTPDIPAHLWYFGLIGTCI

SEQ ID NO: 10046 - protein, 269 aa, Thermomyces lanuginosus
DVSADLLNQFKLFAQYSAAAYCGRNNDAPAGTNITCSANACPLVEAADATFLYSFENSGVGDVTGFLAVDNTNKLIVLSFRGSRSIENWITNLNFDLVDINDICSGCRGHDGFTSSWRSVADTLRQAVDDAVAAHPDYKVVVTGHSLGGALATLAGADLRNNGYDVDLYTYGAPRVGNRAFAEFITVQTGGTLYRVTHTNDVVPRLPPRQSGYSHPSPEYWIKSGTLVPVRRRDIVKIEGIDATGGNNQNNTPDIPAHLWYFGLIGTCI

SEQ ID NO: 10047 - protein, 269 aa, Thermomyces lanuginosus
DVSAQLLNQFKLFAQYSAAAYCGRNNDAPAGTNITCSANACPLVEAADATFLYSFENSGVGDVTGFLAVDNTNKLIVLSFRGSRSIENWITNLNFDLVDINDICSGCRGHDGFTSSWRSVADTLRQAVDDAVAAHPDYKVVVTGHSLGGALATLAGADLRNNGYDVDLYTYGAPRVGNRAFAEFITVQTGGTLYRVTHTNDVVPRLPPRQFGYSHPSPEYWIKSGTLVPVRRRDIVKIEGIDATGGNNQNNTPDIPAHLWYFGLIGTCI

SEQ ID NO: 10048 - protein, 269 aa, Thermomyces lanuginosus
DVSADLLNQFKLFAQYSAAAYCGRNNDAPAGTNITCVANACPLVEAADATFLYSFENSGVGDVTGFLAVDNTNKLIVLSFRGSRSIENWITNLNFDLVDINDICSGCRGHDGFTSSWRSVADTLRQAVDDAVAAHPDYKVVVTGHSLGGALATLAGADLRNNGYDVDLYTYGAPRVGNRAFAEFITVQTGGTLYRVTHTNDVVPRLPPRQFGYSHPSPEYWIKSGTLVPVRRRDIVKIEGIDATGGNNQNNAPDIPAHLWYFGAIGTCI

SEQ ID NO: 10049 - protein, 269 aa, Thermomyces lanuginosus
DVSADLLNQFKLFAQYSAAAYCGRNNDAPAGTNINCSANACPLVEAADATFLYSFENSGVGDVTGFLAVDNTNKLIVLSFRGSRSIENWITNLNFDLVDINDICSGCRGHDGFTSSWRSVADTLRQAVDDAVAAHPDYKVVVTGHSLGGALATLAGADLRNNGYDVDLYTYGAPRVGNRAFAEFITVQTGGTLYRVTHTNDVVPRLPPRQFGYSHPSPEYWIKSGTLVPVRRRDIVKIEGIDATGGNNQNNTPDIPAHLWYFGLIGTCI

SEQ ID NO: 10050 - protein, 269 aa, Thermomyces lanuginosus
DVSADLLNQFKLFAQYSAAAYCGRNNDAPAGTNITCSANACPLVEAADATFLYSFENSGVGDVTGFLAVDNTNKLIVLSFRGSRSIENWITNLNFDLVDINDICSGCRGHDGFTSSWRSVADTLRQAVDDAVAAHPDYKVVVTGHSLGGALATLAGADLRNNGYDVDLYTYGAPRVGNRAFAEFITVQTGGTLYRVTHTNDVVPRLPPRQFGYSHPSPEYWIKSGTLVPVRRRDIVKIEGIDATGGNNQNNAPDIPAHLWYFGIIGTCI

SEQ ID NO: 10051 - protein, 269 aa, Thermomyces lanuginosus
DVSADLLDQFKLFAQYSAAAYCGRNNDAPAGTNITCSANACPLVEAADATFLYSFENSGVGDVTGFLAVDNTNKLIVLSFRGSRSIENWITNLNFDLVDINDICSGCRGHDGFTSSWRSVADTLRQAVDDAVAAHPDYKVVVTGHSLGGALATLAGADLRNNGYDVDLYTYGAPRVGNRAFAEFITVQTGGTLYRVTHTNDVVPRLPPRQFGYSHPSPEYWIKSGTLVPVRRRDIVKIEGIDATGGNNQNNTPDIPAHLWYFGLIGTCI

SEQ ID NO: 10052 - protein, 269 aa, Thermomyces lanuginosus
DVSADLLNQFKLFAQYSAAAYCGRNNDAPAGTNITCSANACPLVEAADATFLYSFENSGVGDVTGFLAVDNTNKLIVLSFRGSRSIENWITNLNFDLVDINDICSGCRGHDGFTSSWRSVADTLRQAVDDAVAAHPDYKVVVTGHSLGGALATLAGADLRNNGYDVDLYTYGAPRVGNRAFAEFITVQTGGTLYRVTHTNDVVPRLPPRQFGYSHPSPEYWIKSGTLVPVRRRDIVKIEGIDATGGNNQNNTPDIPSHLWYFGLIGTCI

SEQ ID NO: 10053 - protein, 269 aa, Thermomyces lanuginosus
DVSADLLNQFKLFAQYSAAAYCGRNNDAPAGTNITCSANACPLVEAADATFLYSFENSGVGDVTGFLAVQNTNKLIVLSFRGSRSIENWITNLNFDLVDINDICSGCRGHDGFTSSWRSVADTLRQAVDDAVAAHPDYKVVVTGHSLGGALATLAGADLRNNGYDVDLYTYGAPRVGNRAFAEFITVQTGGTLYRVTHTNDVVPRLPPRQFGYSHPSPEYWIKSGTLVPVRRRDIVKIEGIDATGGNNQNNTPDIPAHLWYFGLIGTCI

SEQ ID NO: 10054 - protein, 269 aa, Thermomyces lanuginosus
DVSADLLNQFKLFAQYSAAAYCGRNQDAPAGTNITCSANACPLVEAADATFLYSFENSGVGDVTGFLAVDNTNKLIVLSFRGSRSIENWITNLNFDLVDINDICSGCRGHDGFTSSWRSVADTLRQAVDDAVAAHPDYKVVVTGHSLGGALATLAGADLRNNGYDVDLYTYGAPRVGNRAFAEFITVQTGGTLYRVTHTNDVVPRLPPRQFGYSHPSPEYWIKSGTLVPVRRRDIVKIEGIDATGGNNQNNTPDIPAHLWYFGLIGTCI

SEQ ID NO: 10055 - protein, 269 aa, Thermomyces lanuginosus
DVSADLLNQFKLFAQYSAAAYCGRNNDAPAGTNITCSANACPLVEAADATFLYSFENSGVGDVTGFLAVDNTNKLIVLSFRGSRSIENWITNLNFDLVDINDICSGCEGHDGFTSSWRSVADTLRQAVDDAVAAHPDYKVVVTGHSLGGALATLAGADLRNNGYDVDLYTYGAPRVGNRAFAEFITVQTGGTLYRVTHTNDVVPRLPPRQFGYSHPSPEYWIKSGTLVPVRRRDIVKIEGIDATGGNNQNNTPDIPAHLWYFGLIGTCI

SEQ ID NO: 10056 - protein, 269 aa, Thermomyces lanuginosus
DVSADLLNQFKLFAQYSAAAYCGRNNDAPAGTNITCSANACPLVEAADATFLYSFENSGVGDVTGFLAVDNTNKLIVLSFRGSRSIENWITNLNFDLVDINDICSGCRGHDGFTSSWRSVADTLRQAVDDAVAAHPDYKVVVTGHSLGGALATLAGADLRNNGYDVDLYTYGAPRVGNRAFAEFITVQTGGTLYRVTHTNDVVPRLPPRQFGYSHPSPEYWIKSGTLVPVRRRDIVKIEGIDATGGNNQNNTPSIPAHLWYFGLIGTCI

SEQ ID NO: 10057 - protein, 269 aa, Thermomyces lanuginosus
DVSADLLNQFKLFAQYSAAAYCGRNNDAPAGTNITCSANACPLVEAADATFNYSFENSGVGDVTGFLAVDNTNKLIVLSFRGSRSIENWITNLNFDLVDINDICSGCRGHDGFTSSWRSVADTLRQAVDDAVAAHPDYKVVVTGHSLGGALATLAGADLRNNGYDVDLYTYGAPRVGNRAFAEFITVQTGGTLYRVTHTNDVVPRLPPRQFGYSHPSPEYWIKSGTLVPVRRRDIVKIEGIDATGGNNQNNTPDIPAHLWYFGLIGTCI

SEQ ID NO: 10058 - protein, 269 aa, Thermomyces lanuginosus
DVSADLLNQFKLFAQYSAAAYCGRNNDAPAGTNITCSANACPLVEAADATFLYSFENSGVGDVTGFLAVDNTSKLIVLSFRGSRSIENWITNLNFDLVDINDICSGCRGHDGFTSSWRSVADTLRQAVDDAVAAHPDYKVVVTGHSLGGALATLAGADLRNNGYDVDLYTYGAPRVGNRAFAEFITVQTGGTLYRVTHTNDVVPRLPPRQFGYSHPSPEYWIKSGTLVPVRRRDIVKIEGIDATGGNNQNNTPDIPAHLWYFGLIGTCI

SEQ ID NO: 10059 - protein, 269 aa, Thermomyces lanuginosus
DVSADLLNQFKLFAQYSAAAYCGRNNDAPAGTNITCSANACPLVEAADATFLYSFENSGVGDVTGFLAVDNTNKLIVLSFRGSRSIENWITNLNFDLVDINDICSGCRGHDGFTSSWRSVADTLRQAVDDAVAAHPDYKVVVTGHSLGGALATLAGADLRNNGYDVDLYTYGAPRVGDRAFAEFITVQTGGTLYRVTHTNDVVPRLPPRQFGYSHPSPEYWIKSGTLVPVRRRDIVKIEGIDATGGNNQNNTPDIPAHLWYFGLIGTCI

SEQ ID NO: 10060 - protein, 269 aa, Thermomyces lanuginosus
DVSADLLNQFKLFAQYSAAAYCGRNNDAPAGTNITCSANACPLVEAADATFLYSFENSGVGDVTGFLAVDNTNKLIVLSFRGSRSIENWITNLNFDLVDINDICSGCRGHDGFTSSWRSVADTLRQAVDDAVAAHPDYKVVVTGHSLGGALATLAGADLRNNGYDVDLYTYGAPRVGNRAFAEFITVQTGGTLYRVTHTNDVVPRLPPRQTGYSHPSPEYWIKSGTLVPVRRRDIVKIEGIDATGGNNQNNTPDIPAHLWYFGLIGTCI

SEQ ID NO: 10061 - protein, 269 aa, Thermomyces lanuginosus
DVSADLLNQFKLFAQYSAAAYCGRNNDAPAGTNITCSANACPLVEAADATFLYSFENSGVGDVTGFLAVDNTNKLIVLSFRGSRSIENWITNLNFDLVDINDICSGCRGHDGFTSSWRSVADTLRQAVDDAVAAHPDYKVVVTGHSLGGALATLAGADLRNNGYDVDLYTYGAPRVGNRAFAEFITVQTGGTLYRVTHTNDVVPRLPPRQFEYSHPSPEYWIKSGTLVPVRRRDIVKIEGIDATGGNNQNNTPDIPAHLWYFGLIGTCI

SEQ ID NO: 10062 - protein, 269 aa, Thermomyces lanuginosus
DVSADLLNQFKLFAQYSAAAYCGRNNDAPAGTNITCYANACPLVEAADATFLYSFENSGVGDVTGFLAVDNTNKLIVLSFRGSRSIENWITNLNFDLVDINDICSGCRGHDGFTSSWRSVADTLRQAVDDAVAAHPDYKVVVTGHSLGGALATLAGADLRNNGYDVDLYTYGAPRVGNRAFAEFITVQTGGTLYRVTHTNDVVPRLPPRQFGYSHPSPEYWIKSGTLVPVRRRDIVKIEGIDATGGNNQNNAPDIPAHLWYFGAIGTCI

SEQ ID NO: 10063 - protein, 269 aa, Thermomyces lanuginosus
DVSADLLQQFKLFAQYSAAAYCGRNNDAPAGTNITCSANACPLVEAADATFLYSFENSGVGDVTGFLAVDNTNKLIVLSFRGSRSIENWITNLNFDLVDINDICSGCRGHDGFTSSWRSVADTLRQAVDDAVAAHPDYKVVVTGHSLGGALATLAGADLRNNGYDVDLYTYGAPRVGNRAFAEFITVQTGGTLYRVTHTNDVVPRLPPRQFGYSHPSPEYWIKSGTLVPVRRRDIVKIEGIDATGGNNQNNTPDIPAHLWYFGLIGTCI

SEQ ID NO: 10064 - protein, 269 aa, Thermomyces lanuginosus
DVSADLLNQFKLFAQYSAAAYCGRNNDAPAGTNITCSANACPLVEAADATFLYSFENSGVGDVTGFLAVDNTNKLIVLSFRGSRSIENWITNLNFDLVDINDICRGCRGHDGFTSSWRSVADTLRQAVDDAVAAHPDYKVVVTGHSLGGALATLAGADLRNNGYDVDLYTYGAPRVGNRAFAEFITVQTGGTLYRVTHTNDVVPRLPPRQFGYSHPSPEYWIKSGTLVPVRRRDIVKIEGIDATGGNNQNNTPDIPAHLWYFGLIGTCI

SEQ ID NO: 10065 - protein, 269 aa, Thermomyces lanuginosus
DVSADLLNQFKLFAQYSAAAYCGRNNDAPAGTNITCSANACPLVEAADATFLYSFENSGVGDVTGFLAVDNTNKLIVLSFRGTRSIENWITNLNFDLVDINDICSGCRGHDGFTSSWRSVADTLRQAVDDAVAAHPDYKVVVTGHSLGGALATLAGADLRNNGYDVDLYTYGAPRVGNRAFAEFITVQTGGTLYRVTHTNDVVPRLPPRQFGYSHPSPEYWIKSGTLVPVRRRDIVKIEGIDATGGNNQNNTPDIPAHLWYFGLIGTCI

SEQ ID NO: 10066 - protein, 269 aa, Thermomyces lanuginosus
DVSADLLNQFKLFAQYSAAAYCGRNNDAPAGTNITCSANACPLVEAADATFLYSFENSGVGDVTGFLAVDNTNKLIVLSFRGSRSIENWITNLNFDLVDINDICSGCRGHDGFTSSWRSVADTLRQAVDDAVAAHPDYKVVVTGHSLGGALATLAGADLRNNGYDVDLYTYGAPRVGNRAFAEFITVQTGGTLYRVTHTQDVVPRLPPRQFGYSHPSPEYWIKSGTLVPVRRRDIVKIEGIDATGGNNQNNTPDIPAHLWYFGLIGTCI

SEQ ID NO: 10067 - protein, 269 aa, Thermomyces lanuginosus
DVSADLLNQFKLFAQYSAAAYCGRNNDAPAGTNITCSANACPLVENADATFLYSFENSGVGDVTGFLAVDNTNKLIVLSFRGSRSIENWITNLNFDLVDINDICSGCRGHDGFTSSWRSVADTLRQAVDDAVAAHPDYKVVVTGHSLGGALATLAGADLRNNGYDVDLYTYGAPRVGNRAFAEFITVQTGGTLYRVTHTNDVVPRLPPRQFGYSHPSPEYWIKSGTLVPVRRRDIVKIEGIDATGGNNQNNAPDIPAHLWYFGAIGTCI

SEQ ID NO: 10068 - protein, 269 aa, Thermomyces lanuginosus
DVSADLLNQFKLFAQYSAAAYCGRNNDAPAGTNITCSANACPLVEAADATFLYSFENSGVGDVTGFLAVDNTNKLIVLSFRGSRSIENWITNLNFDLVDINDICSGCRGHDGFTSSWRSVADTLRQAVDDAVAAHPDYKVVVTGHSLGGALATLAGADLRNNGYDVDLYTYGAPRVGNRAFAEFITVQTGGTLYRVTHTNDVVPRLPPRQFGYSHPSPEYWIKSGTLVPVRRRDIVKIEGIDAEGGNNQNNTPDIPAHLWYFGLIGTCI

SEQ ID NO: 10069 - protein, 269 aa, Thermomyces lanuginosus
DVSADLLNQFKLFAQYSAAAYCGRNNDAPAGTNITCSANACPLVEGADATFLYSFENSGVGDVTGFLAVDNTNKLIVLSFRGSRSIENWITNLNFDLVDINDICSGCRGHDGFTSSWRSVADTLRQAVDDAVAAHPDYKVVVTGHSLGGALATLAGADLRNNGYDVDLYTYGAPRVGNRAFAEFITVQTGGTLYRVTHTNDVVPRLPPRQFGYSHPSPEYWIKSGTLVPVRRRDIVKIEGIDATGGNNQNNAPDIPAHLWYFGAIGTCI

SEQ ID NO: 10070 - protein, 269 aa, Thermomyces lanuginosus
DVSADLLNQFKLFAQYSAAAYCGRNNDAPAGTNITCSANACPLVEAADATFLYSFENSGVGDVTGFLAEDNTNKLIVLSFRGSRSIENWITNLNFDLVDINDICSGCRGHDGFTSSWRSVADTLRQAVDDAVAAHPDYKVVVTGHSLGGALATLAGADLRNNGYDVDLYTYGAPRVGNRAFAEFITVQTGGTLYRVTHTNDVVPRLPPRQFGYSHPSPEYWIKSGTLVPVRRRDIVKIEGIDATGGNNQNNAPDIPAHLWYFGAIGTCI

SEQ ID NO: 10071 - protein, 269 aa, Thermomyces lanuginosus
DVSADLLNQFKLFAQYSAAAYCGRNNDAPAGTQITCSANACPLVEAADATFLYSFENSGVGDVTGFLAVDNTNKLIVLSFRGSRSIENWITNLNFDLVDINDICSGCRGHDGFTSSWRSVADTLRQAVDDAVAAHPDYKVVVTGHSLGGALATLAGADLRNNGYDVDLYTYGAPRVGNRAFAEFITVQTGGTLYRVTHTNDVVPRLPPRQFGYSHPSPEYWIKSGTLVPVRRRDIVKIEGIDATGGNNQNNTPDIPAHLWYFGLIGTCI

SEQ ID NO: 10072 - protein, 269 aa, Thermomyces lanuginosus
DVSADLLNQFKLFAQYSAAAYCGRNNDAPAGTNITCSANACPLVEAADATFLYSFENSGVGDVTGFLAVDNTNKLIVLSFRGSRSIENWITNLNFDLVDINDICSGCRGHDGFTSSWRSVADTLRQAVDDAVAAHPDYKVVVTGHSLGGALATLAGADLRNNGYDVDLYTYGAPRVGNRAFAEFITVQTGGTLYRVTHTNDVVPRLPPRQFGYSHPSPEYWIKSGTLEPVRRRDIVKIEGIDATGGNNQNNTPDIPAHLWYFGLIGTCI

SEQ ID NO: 10073 - protein, 268 aa, Thermomyces lanuginosus
EVSQDLFNQFNLFAQYSAAAYCGKNIXATXGIXITCTGNACLXVEKADTTFLYSFEXXGLGDVTGFLAIDNTNKLIVLSFRGSRSIKNWIXNFXFXXIXINDICSGCRGHXGFISSWRSVADTLRQKVEDAVREHPDYRVVFTGHSSGGALATVAGADLRGNKYDIDVFSYGAPRVGNRAFAEFLTVQTGGTLYRITHTNDIVPRLPPRDFGYSHSPPEYWIKSGTGVPVRRRKIVKIVGIDATGGNNRPSIPNITAHLWYFQATDAC

SEQ ID NO: 10074 - protein, 268 aa, Thermomyces lanuginosus
DVSADLLNQFKLFAQYSAAAYCGRNNDAPAGTNITCSANACPLVEAADATFLYSFENSGVGDVTGFLAVDNTNKLIVLSFRGSRSIENWITNLNFDLVDINDICSGCRGHDGFTSSWRSVADTLRQAVDDAVAAHPDYKVVVTGHSLGGALATLAGADLRNNGYDVDLYTYGAPRVGNRAFAEFITVQTGGTLYRVTHTNDVVPRLPPRQVGYSHPSPEYWIKSGTLVPVRRRDIVKIEGIDATGGNNQNNTPDIPAHLWYFGAIGTC

SEQ ID NO: 10075 - protein, 269 aa, Thermomyces lanuginosus
DVSADLLNQFKLFAQYSATAYCGRNNDAPAGTNITCSANACPLVEAADATFLYSFENSGVGDVTGFLAVDNTNKLIVLSFRGSRSIENWITNLNFDLVDINDICSGCRGHDGFTSSWRSVADTLRQAVDDAVAAHPDYKVVVTGHSLGGALATLAGADLRNNGYDVDLYTYGAPRVGNRAFAEFITVQTGGTLYRVTHTNDVVPRLPPRQFGYSHPSPEYWIKSGTLVPVRRRDIVKIEGIDATGGNNQNNAPDIPAHLWYFGAIGTCI

SEQ ID NO: 10076 - protein, 269 aa, Thermomyces lanuginosus
DVSADLLNQFKLFAQYSAAAYCGRNNDAPAGTNITCSANACPLVEAADATFLYSFENSGVGDVTGFLAVDNINKLIVLSFRGSRSIENWITNLNFDLVDINDICSGCRGHDGFTSSWRSVADTLRQAVDDAVAAHPDYKVVVTGHSLGGALATLAGADLRNNGYDVDLYTYGAPRVGNRAFAEFITVQTGGTLYRVTHTNDVVPRLPPRQFGYSHPSPEYWIKSGTLVPVRRRDIVKIEGIDATGGNNQNNAPDIPAHLWYFGAIGTCI

SEQ ID NO: 10077 - protein, 269 aa, Thermomyces lanuginosus
DVSADLLNQFKLFAQYSAAAYCGRNNDAPAGTNITCSANACPLVEAADVTFLYSFENSGVGDVTGFLAVDNTNKLIVLSFRGSRSIENWITNLNFDLVDINDICSGCRGHDGFTSSWRSVADTLRQAVDDAVAAHPDYKVVVTGHSLGGALATLAGADLRNNGYDVDLYTYGAPRVGNRAFAEFITVQTGGTLYRVTHTNDVVPRLPPRQFGYSHPSPEYWIKSGTLVPVRRRDIVKIEGIDATGGNNQNNAPDIPAHLWYFGAIGTCI

SEQ ID NO: 10078 - protein, 269 aa, Thermomyces lanuginosus
DVSADLLNQFKLFAQYSAAAYCGRNNDAPAGTNITCSANACPLVEAADATFLYSFENSGVGDVTGFLAVDNTNKLIVLSFRGSRSIENWITNLNFDLVDINDICSGCRGHDGFTSSWRSVADTLRQAVDDAVAAHPDYKVVVTGHSLGGALATLAGADLRNNGYDVDLYTYGAPRVGNRAFAEFITVQTGGTLYRVTHTNDVVPRLPPRQVGYSHPSPEYWIKSGTLVPVRRRDIVKIEGIDATGGNNQNNAPDIPAHLWYFGAIGTCI

SEQ ID NO: 10079 - protein, 269 aa, Thermomyces lanuginosus
DVSADLLNQFKLFAQYSAAAYCGRNNDAPAGTNITCSANACPLVEAADATFLYSFENSGVGDVTGFLAVDNGNKLIVLSFRGSRSIENWITNLNFDLVDINDICSGCRGHDGFTSSWRSVADTLRQAVDDAVAAHPDYKVVVTGHSLGGALATLAGADLRNNGYDVDLYTYGAPRVGNRAFAEFITVQTGGTLYRVTHTNDVVPRLPPRQFGYSHPSPEYWIKSGTLVPVRRRDIVKIEGIDATGGNNQNNAPDIPAHLWYFGAIGTCI

SEQ ID NO: 10080 - protein, 269 aa, Thermomyces lanuginosus
DVSADLLNQFKLFAQYSAAAYCGRNNDAPAGTNITCSANACPLVEAADATFLYSFENSGVGDLTGFLAVDNTNKLIVLSFRGSRSIENWITNLNFDLVDINDICSGCRGHDGFTSSWRSVADTLRQAVDDAVAAHPDYKVVVTGHSLGGALATLAGADLRNNGYDVDLYTYGAPRVGNRAFAEFITVQTGGTLYRVTHTNDVVPRLPPRQFGYSHPSPEYWIKSGTLVPVRRRDIVKIEGIDATGGNNQNNAPDIPAHLWYFGAIGTCI

SEQ ID NO: 10081 - protein, 269 aa, Thermomyces lanuginosus
DVSADLLNQFKLFAQYSAAAYCGRNNDAPAGTNITCSANACPLVEAADATFLYSFENSGVGDSTGFLAVDNTNKLIVLSFRGSRSIENWITNLNFDLVDINDICSGCRGHDGFTSSWRSVADTLRQAVDDAVAAHPDYKVVVTGHSLGGALATLAGADLRNNGYDVDLYTYGAPRVGNRAFAEFITVQTGGTLYRVTHTNDVVPRLPPRQFGYSHPSPEYWIKSGTLVPVRRRDIVKIEGIDATGGNNQNNAPDIPAHLWYFGAIGTCI

SEQ ID NO: 10082 - protein, 269 aa, Thermomyces lanuginosus
DVSADLLNQFKLFAQYSAAAYCGRNNDAPAGTNITCSANACPLVEAADATFLYSFENSGVGDVTGFLAVDNTNGLIVLSFRGSRSIENWITNLNFDLVDINDICSGCRGHDGFTSSWRSVADTLRQAVDDAVAAHPDYKVVVTGHSLGGALATLAGADLRNNGYDVDLYTYGAPRVGNRAFAEFITVQTGGTLYRVTHTNDVVPRLPPRQFGYSHPSPEYWIKSGTLVPVRRRDIVKIEGIDATGGNNQNNAPDIPAHLWYFGAIGTCI

SEQ ID NO: 10083 - protein, 269 aa, Thermomyces lanuginosus
DVSADLLNQFKLFAQYSAAAYCGRNNDAPAGTNITCSANACPLVEAADAYFLYSFENSGVGDVTGFLAVDNTNKLIVLSFRGSRSIENWITNLNFDLVDINDICSGCRGHDGFTSSWRSVADTLRQAVDDAVAAHPDYKVVVTGHSLGGALATLAGADLRNNGYDVDLYTYGAPRVGNRAFAEFITVQTGGTLYRVTHTNDVVPRLPPRQFGYSHPSPEYWIKSGTLVPVRRRDIVKIEGIDATGGNNQNNAPDIPAHLWYFGAIGTCI

SEQ ID NO: 10084 - protein, 269 aa, Thermomyces lanuginosus
DVSADLLNQFKLFAQYSAAAYCGRNNDAPAGTDITCSANACPLVEAADATFLYSFENSGVGDVTGFLAVDNTNKLIVLSFRGSRSIENWITNLNFDLVDINDICSGCRGHDGFTSSWRSVADTLRQAVDDAVAAHPDYKVVVTGHSLGGALATLAGADLRNNGYDVDLYTYGAPRVGNRAFAEFITVQTGGTLYRVTHTNDVVPRLPPRQFGYSHPSPEYWIKSGTLVPVRRRDIVKIEGIDATGGNNQNNAPDIPAHLWYFGAIGTCI

SEQ ID NO: 10085 - protein, 269 aa, Thermomyces lanuginosus
DVSADLLNQFKLFAQYSAAAYCGRNNDAPAGTNITCSANACPLVEAADATGLYSFENSGVGDVTGFLAVDNTNKLIVLSFRGSRSIENWITNLNFDLVDINDICSGCRGHDGFTSSWRSVADTLRQAVDDAVAAHPDYKVVVTGHSLGGALATLAGADLRNNGYDVDLYTYGAPRVGNRAFAEFITVQTGGTLYRVTHTNDVVPRLPPRQFGYSHPSPEYWIKSGTLVPVRRRDIVKIEGIDATGGNNQNNAPDIPAHLWYFGAIGTCI

SEQ ID NO: 10086 - protein, 269 aa, Thermomyces lanuginosus
DVSADLLNQFKLFAQYSAAAYCGRNNDAPAGTNITCSANACPLVEAADATFLYSFENSGVGDVTGFLAVDNTNKLIVLSFRGSRSIENWITNLNFDLVDINDICSGCRGHDGFTSSWRSVADTLRQAVDDAVAAHPDYKVVVTGHSLGGALATLAGADLRNNGYDVDLYTYGAPRVGNRAFAEFITVQTGGTLYRVTITNDVVPRLPPRQFGYSHPSPEYWIKSGTLVPVRRRDIVKIEGIDATGGNNQNNAPDIPAHLWYFGAIGTCI

SEQ ID NO: 10087 - protein, 269 aa, Thermomyces lanuginosus
DVSADLLKQFKLFAQYSAAAYCGRNNDAPAGTNITCSANACPLVEAADATFLYSFENSGVGDVTGFLAVDNTNKLIVLSFRGSRSIENWITNLNFDLVDINDICSGCRGHDGFTSSWRSVADTLRQAVDDAVAAHPDYKVVVTGHSLGGALATLAGADLRNNGYDVDLYTYGAPRVGNRAFAEFITVQTGGTLYRVTHTNDVVPRLPPRQFGYSHPSPEYWIKSGTLVPVRRRDIVKIEGIDATGGNNQNNAPDIPAHLWYFGAIGTCI

SEQ ID NO: 10088 - protein, 269 aa, Thermomyces lanuginosus
DVSADLLNQFKLFAQYSAAAYCGRNNDAPAGTNITCSANACPLVEAADATFLYSFENSGVGDVTGFLAVDNTNKAIVLSFRGSRSIENWITNLNFDLVDINDICSGCRGHDGFTSSWRSVADTLRQAVDDAVAAHPDYKVVVTGHSLGGALATLAGADLRNNGYDVDLYTYGAPRVGNRAFAEFITVQTGGTLYRVTHTNDVVPRLPPRQFGYSHPSPEYWIKSGTLVPVRRRDIVKIEGIDATGGNNQNNAPDIPAHLWYFGAIGTCI

SEQ ID NO: 10089 - protein, 269 aa, Thermomyces lanuginosus
DVSADLLNQFKLFAQYSAAAYCGRNNDAPAGTNITCSANACPLVEAADATFLYSFENSGMGDVTGFLAVDNTNKLIVLSFRGSRSIENWIANLNFDLVDINDICSGCRGHDGFTSSWRSVADTLRQAVDDAVAAHPDYKVVVTGHSLGGALATLAGADLRNNGYDVDLYTYGAPRVGNRAFAEFITVQTGGTLYRVTHTNDVVPRLPPRQFGYSHPSPEYWIKSGTLVPVRRRDIVKIEGIDATGGNNQNNAPDIPAHLWYFGAIGTCI

SEQ ID NO: 10090 - protein, 269 aa, Thermomyces lanuginosus
DVSADLLNQFKLFAQYSAAAYCGRNNDAPAGTNITCSANACPLVEAADATFLYSFENSGMGDVTGFLAVDNTNKLIVLSFRGSRSIENWITNLNFDLVDINDICSGCRGHDGFTSSWRSVADTLRQAVDDAVAAHPDYKVVVTGHSLGGALATLAGADLRNNGYDVDLYTYGAPRVGNRAFAEFITVQTGGTLYRVTHTNDVVPRLPPRQFGYSHPSPEYWIKSGTLVPVRRRDIVKIEGIDATGGNNQNNAPDIPAHLWYFGAIGTCI

SEQ ID NO: 10091 - protein, 269 aa, Thermomyces lanuginosus
DVSADLLNQFKLFAQYSAAAYCGRNNDAPAGTNITCSANACPLVEAADATHLYSFENSGVGDVTGFLAVDNTNKLIVLSFRGSRSIENWITNLNFDLVDINDICSGCRGHDGFTSSWRSVADTLRQAVDDAVAAHPDYKVVVTGHSLGGALATLAGADLRNNGYDVDLYTYGAPRVGNRAFAEFITVQTGGTLYRVTHTNDVVPRLPPRQFGYSHPSPEYWIKSGTLVPVRRRDIVKIEGIDATGGNNQNNAPDIPAHLWYFGAIGTCI

SEQ ID NO: 10092 - protein, 269 aa, Thermomyces lanuginosus
DVSADLLNQFKLFAQYSAAAYCGRNNDAPAGTNITCSANACPLVEAADATFLYSFENSGWGDVTGFLAVDNTNKLIVLSFRGSRSIENWITNLNFDLVDINDICSGCRGHDGFTSSWRSVADTLRQAVDDAVAAHPDYKVVVTGHSLGGALATLAGADLRNNGYDVDLYTYGAPRVGNRAFAEFITVQTGGTLYRVTHTNDVVPRLPPRQFGYSHPSPEYWIKSGTLVPVRRRDIVKIEGIDATGGNNQNNAPDIPAHLWYFGAIGTCI

SEQ ID NO: 10093 - protein, 269 aa, Thermomyces lanuginosus
DVSADLLNQFKLFAQYSAAAYCGRNNDAPAGTNITCSANACPLVEAADATFLYSFENSGVGDVTGFLAVDCTNKLIVLSFRGSRSIENWITNLNFDLVDINDICSGCRGHDGFTSSWRSVADTLRQAVDDAVAAHPDYKVVVTGHSLGGALATLAGADLRNNGYDVDLYTYGAPRVGNRAFAEFITVQTGGTLYRVTHTNDVVPRLPPRQFGYSHPSPEYWIKSGTLVPVRRRDIVKIEGIDATGGNNQNNAPDIPAHLWYFGAIGTCI

SEQ ID NO: 10094 - protein, 269 aa, Thermomyces lanuginosus
DVSADLLNQFKLFAQYSAAAYCGRNNDAPAGTNITCSANACPLVEAADALFLYSFENSGVGDVTGFLAVDNTNKLIVLSFRGSRSIENWITNLNFDLVDINDICSGCRGHDGFTSSWRSVADTLRQAVDDAVAAHPDYKVVVTGHSLGGALATLAGADLRNNGYDVDLYTYGAPRVGNRAFAEFITVQTGGTLYRVTHTNDVVPRLPPRQFGYSHPSPEYWIKSGTLVPVRRRDIVKIEGIDATGGNNQNNAPDIPAHLWYFGAIGTCI

SEQ ID NO: 10095 - protein, 269 aa, Thermomyces lanuginosus
DVSADLLNQFKLFAQYSAAAYCGRNNDAPAGTNITCSANACPLVEAADANFLYSFENSGVGDVTGFLAVDNTNKLIVLSFRGSRSIENWITNLNFDLVDINDICSGCRGHDGFTSSWRSVADTLRQAVDDAVAAHPDYKVVVTGHSLGGALATLAGADLRNNGYDVDLYTYGAPRVGNRAFAEFITVQTGGTLYRVTHTNDVVPRLPPRQFGYSHPSPEYWIKSGTLVPVRRRDIVKIEGIDATGGNNQNNAPDIPAHLWYFGAIGTCI

SEQ ID NO: 10096 - protein, 269 aa, Thermomyces lanuginosus
DVSADLLNQFKLFAQYSAAAYCGRNNDAPAGTNITCSANACPLVEAADATFLYSFENSGMGDVTGFLAVDNTNKLIVLSFRGSRSIENWITNLNFDLVDINDICSGCRGHDGFTSSWRSVADTLRQAVDDAVAAHPDYKVVVTGHSLGGALATLAGADLRNNGYDVDLYTYGAPRVGNRAFAEFITVQTGGTLYRVTHTNDVVPRLPPRQFGYSHPSPEYWIKSGTGLPVRRRDIVKIEGIDATGGNNQNNAPDIPAHLWYFGYIGTCI

SEQ ID NO: 10097 - protein, 269 aa, Thermomyces lanuginosus
DVSADLLNQFKLFAQYSAAAYCGRNNDAPAGTNITCSANACPLVEAADATFLYDFENSGVGDVTGFLAVDNTNKLIVLSFRGSRSIENWITNLNFDLVDINDICSGCRGHDGFTSSWRSVADTLRQAVDDAVAAHPDYKVVVTGHSLGGALATLAGADLRNNGYDVDLYTYGAPRVGNRAFAEFITVQTGGTLYRVTHTNDVVPRLPPRQFGYSHPSPEYWIKSGTLVPVRRRDIVKIEGIDATGGNNQNNAPDIPAHLWYFGAIGTCI

SEQ ID NO: 10098 - protein, 269 aa, Thermomyces lanuginosus
DVSADLLNQFKLFAQYSAAAYCGRNNDAPAGTNITCSANACPLVEAGDATFLYSFENSGVGDVTGFLAVDNTNKLIVLSFRGSRSIENWITNLNFDLVDINDICSGCRGHDGFTSSWRSVADTLRQAVDDAVAAHPDYKVVVTGHSLGGALATLAGADLRNNGYDVDLYTYGAPRVGNRAFAEFITVQTGGTLYRVTHTNDVVPRLPPRQFGYSHPSPEYWIKSGTLVPVRRRDIVKIEGIDATGGNNQNNAPDIPAHLWYFGAIGTCI

SEQ ID NO: 10099 - protein, 269 aa, Thermomyces lanuginosus
DVSADLLNQFKLFAQYSAAAYCGRNNDAPAGTNITCSANACPLVEAADATFLYSFENSGVGDVTGFLAVDNVNKLIVLSFRGSRSIENWITNLNFDLVDINDICSGCRGHDGFTSSWRSVADTLRQAVDDAVAAHPDYKVVVTGHSLGGALATLAGADLRNNGYDVDLYTYGAPRVGNRAFAEFITVQTGGTLYRVTHTNDVVPRLPPRQFGYSHPSPEYWIKSGTLVPVRRRDIVKIEGIDATGGNNQNNAPDIPAHLWYFGAIGTCI

SEQ ID NO: 10100 - protein, 269 aa, Thermomyces lanuginosus
DVSADLLNQFKLFAQYSAAAYCGRNNDAPAGTNITCSANACPLVEAADATFLYSFENSGVGDCTGFLAVDNTNKLIVLSFRGSRSIENWITNLNFDLVDINDICSGCRGHDGFTSSWRSVADTLRQAVDDAVAAHPDYKVVVTGHSLGGALATLAGADLRNNGYDVDLYTYGAPRVGNRAFAEFITVQTGGTLYRVTHTNDVVPRLPPRQFGYSHPSPEYWIKSGTLVPVRRRDIVKIEGIDATGGNNQNNAPDIPAHLWYFGAIGTCI

SEQ ID NO: 10101 - protein, 269 aa, Thermomyces lanuginosus
DVSADLLNQFKLFAQYSAAAYCGRNNDAPAGTNITCSANACPLVEAADAAFLYSFENSGVGDVTGFLAVDNTNKLIVLSFRGSRSIENWITNLNFDLVDINDICSGCRGHDGFTSSWRSVADTLRQAVDDAVAAHPDYKVVVTGHSLGGALATLAGADLRNNGYDVDLYTYGAPRVGNRAFAEFITVQTGGTLYRVTHTNDVVPRLPPRQFGYSHPSPEYWIKSGTLVPVRRRDIVKIEGIDATGGNNQNNAPDIPAHLWYFGAIGTCI

SEQ ID NO: 10102 - protein, 269 aa, Thermomyces lanuginosus
DVSADLLNQFKLFAQYSAAAYCGRNNDAPAGTNITCSANACPLVEAADATFLYSFENSGVGDVTGFLAVDNTNKLIVLSFRGSRSIENWIANLNFDLVDINDICSGCRGHDGFTSSWRSVADTLRQAVDDAVAAHPDYKVVVTGHSLGGALATLAGADLRNNGYDVDLYTYGAPRVGNRAFAEFITVQTGGTLYRVTHTNDVVPRLPPRQFGYSHPSPEYWIKSGTLLPVRRRDIVKIEGIDATGGNNQNNAPDIPAHLWYFGSIGTCI

SEQ ID NO: 10103 - protein, 269 aa, Thermomyces lanuginosus
DVSADLLNQFKLFAQYSAAAYCGRNNDAPAGTNITCSANACPLVEAADATYLYSFENSGVGDVTGFLAVDNTNKLIVLSFRGSRSIENWITNLNFDLVDINDICSGCRGHDGFTSSWRSVADTLRQAVDDAVAAHPDYKVVVTGHSLGGALATLAGADLRNNGYDVDLYTYGAPRVGNRAFAEFITVQTGGTLYRVTHTNDVVPRLPPRQFGYSHPSPEYWIKSGTLVPVRRRDIVKIEGIDATGGNNQNNAPDIPAHLWYFGAIGTCI

SEQ ID NO: 10104 - protein, 269 aa, Thermomyces lanuginosus
DVSADLLNQFKLFAQYSAAVYCGRNNDAPAGTNITCSANACPLVEAADATFLYSFENSGVGDVTGFLAVDNTNKLIVLSFRGSRSIENWITNLNFDLVDINDICSGCRGHDGFTSSWRSVADTLRQAVDDAVAAHPDYKVVVTGHSLGGALATLAGADLRNNGYDVDLYTYGAPRVGNRAFAEFITVQTGGTLYRVTHTNDVVPRLPPRQFGYSHPSPEYWIKSGTLVPVRRRDIVKIEGIDATGGNNQNNAPDIPAHLWYFGAIGTCI

SEQ ID NO: 10105 - protein, 269 aa, Thermomyces lanuginosus
DVSADLLNQFKLFAQYSAAAYCGRNNDAPAGTNITCSANACPLVEAADATFLYSFENSGVGDETGFLAVDNTNKLIVLSFRGSRSIENWITNLNFDLVDINDICSGCRGHDGFTSSWRSVADTLRQAVDDAVAAHPDYKVVVTGHSLGGALATLAGADLRNNGYDVDLYTYGAPRVGNRAFAEFITVQTGGTLYRVTHTNDVVPRLPPRQFGYSHPSPEYWIKSGTLVPVRRRDIVKIEGIDATGGNNQNNAPDIPAHLWYFGAIGTCI

SEQ ID NO: 10106 - protein, 269 aa, Thermomyces lanuginosus
DVSADLLNQFKLFAQYSAAAYCGRNNDAPAGTNITCSANACPLVEAADATFLYSFENSGVGDVTGFLAVDTTNKLIVLSFRGSRSIENWITNLNFDLVDINDICSGCRGHDGFTSSWRSVADTLRQAVDDAVAAHPDYKVVVTGHSLGGALATLAGADLRNNGYDVDLYTYGAPRVGNRAFAEFITVQTGGTLYRVTHTNDVVPRLPPRQFGYSHPSPEYWIKSGTLVPVRRRDIVKIEGIDATGGNNQNNAPDIPAHLWYFGAIGTCI

SEQ ID NO: 10107 - protein, 269 aa, Thermomyces lanuginosus
DVSADLLNQFKLFAQYSAAAYCGRNNDAPAGTNITCSANACPLVEAADATFLYSFENSGVGDVTGFLAVDNTNKLIVLSFRGSRSIENWITNLNFDLVDINDICSGCRGHDGFTSSWRSVADTLRQAVDDAVAAHPDYKVVVTGHSLGGALATLAAADLRNNGYDVDLYTYGAPRVGNRAFAEFITVQTGGTLYRVTHTNDVVPRLPPRQFGYSHPSPEYWIKSGTLVPVRRRDIVKIEGIDATGGNNQNNAPDIPAHLWYFGAIGTCI

SEQ ID NO: 10108 - protein, 269 aa, Thermomyces lanuginosus
DVSADLLNQFKLFAQYSAAAYCGRNNDAPAGTNITCSANACPLVNASDATFLYSFENSGVGDVTGFLAVDNTNKLIVLSFRGSRSIENWITNLNFDLVDINDICSGCRGHDGFTSSWRSVADTLRQAVDDAVAAHPDYKVVVTGHSLGGALATLAGADLRNNGYDVDLYTYGAPRVGNRAFAEFITVQTGGTLYRVTHTNDVVPRLPPRQFGYSHPSPEYWIKSGTLVPVRRRDIVKIEGIDATGGNNQNNTPDIPAHLWYFGLIGTCI

SEQ ID NO: 10109 - protein, 269 aa, Thermomyces lanuginosus
DVSADLLNQFKLFAQYSAAAYCGRNNDAPAGTNITCSANACPLVEAADATFLYSFENSGVGAVTGFLAVDNTNKLIVLSFRGSRSIENWITNLNFDLVDINDICSGCRGHDGFTSSWRSVADTLRQAVDDAVAAHPDYKVVVTGHSLGGALATLAGADLRNNGYDVDLYTYGAPRVGNRAFAEFITVQTGGTLYRVTHTNDVVPRLPPRQFGYSHPSPEYWIKSGTLVPVRRRDIVKIEGIDATGGNNQNNAPDIPAHLWYFGAIGTCI

SEQ ID NO: 10110 - protein, 269 aa, Thermomyces lanuginosus
DVSADLLNQFKLFAQYSAAAYCGENNDAPAGTNITCSANACPLVEAADATFLYSFENSGVGDVTGFLAVDNTNKLIVLSFRGSRSIENWITNLNFDLVDINDICSGCRGHDGFTSSWRSVADTLRQAVDDAVAAHPDYKVVVTGHSLGGALATLAGADLRNNGYDVDLYTYGAPRVGNREFAEFITVQTGGTLYRVTHTNDVVPRLPPRQFGYSHPSPEYWIKSGTLVPVRRRDIVKIEGIDATGGNNQDNAPDIPAHLWYFGAIGTCI

SEQ ID NO: 10111 - protein, 269 aa, Thermomyces lanuginosus
DVSADLLNQFKLFAQYSAAAYCGRNNDAPAGTNITCSANACPLVEAADATFLYSFENSGVGDVTGFLAVDNTNKLIVLSFRGSRSIENWITNLNFDLVDINDICSGCRGHDGFTSSWRSVADTLRQAVDDAVAAHPDYKVVVTGHSLGGALATLAGADLRNNGYDVDLYTYGAPRVGNRAFAEFITVQTGGTLYRVTHTNDVVPRLPPRQVGYSHPSPEYWIKSGTLVPVRRRDIVKIEGIDATGGNNQNNTPDIPAHLWYFGAIGTCI

SEQ ID NO: 10112 - protein, 269 aa, Thermomyces lanuginosus
DVSADLLNQFKLFAQYSAAAYCGRNNDAPAGTNITCSANACPLVEAADATFLYSFENSGVGDVTGFLAVDNTNKLIVLSFRGSRSIENWIANLNFDLVDINDICSGCRGHDGFTSSWRSVADTLRQAVDDAVAAHPDYKVVVTGHSLGGALATLAGADLRNNGYDVDLYTYGAPRVGNRAFAEFITVQTGGTLYRVTHTNDVVPRLPPRQFGYSHPSPEYWIKSGTLVPVRRRDIVKIEGIDATGGNNQNNAPDLKAHLWYFGAIGTCI

SEQ ID NO: 10113 - protein, 269 aa, Thermomyces lanuginosus
DVSADLLNQFKLFAQYSAAAYCGRNNDAPAGTNITCSANACPLVEAADATFLYSFENSGVGDVTGFLAVDNTNKLIVLSFRGSRSIENWITNLNFDLVDINDICSGCRGHDGFTSSWRSVADTLRQAVDDAVAAHPDYKVVVTGHSLGGALATLAGADLRNNGYNVSLYTYGAPRVGNRAFAEFITVQTGGTLYRVTHTNDVVPRLPPRQFGYSHPSPEYWIKSGTLVPVRRRDIVKIEGIDATGGNNQNNTPDIPAHLWYFGLIGTCI

SEQ ID NO: 10114 - protein, 269 aa, Thermomyces lanuginosus
DVSADLLNQFKLFAQYSAAAYCGRNNDAPAGTNITCSANACPLVEAADATFLYSFENSGVGDVTGFLAVDNTNKLIVLSFRGSRSIKNWITNLNYDLVDINDICSGCRGHDGFTSSWRSVADTLRQAVDDAVAAHPDYKVVVTGHSLGGALATLAGADLRNNGYDVDLYTYGAPRVGNRAFAEFITVQTGGTLYRVTHTNDVVPRLPPRQFGYSHPSPEYWIKSGTLVPVRRRDIVKIEGIDATGGNNQNNTPDIPAHLWYFGLIGTCI

SEQ ID NO: 10115 - protein, 269 aa, Thermomyces lanuginosus
DVSADLLNQFKLFAQYSAATYCGRNNDAPAGTNITCSANACPLVEAADATFLYSFENSGVGDVTGFLAVDNTNKLIVLSFRGSRSIENWITNLNFDLVDINDICSGCRGHDGFTSSWRSVADTLRQAVDDAVAAHPDYKVVVTGHSLGGALATLAGADLRNNGYDVDLYTYGAPRVGNRAFAEFITVQTGGTLYRVTHTNDVVPRLPPRQFGYSHPSPEYWIKSGTLVPVRRRDIVKIEGIDATGGNNQNNAPDIPAHLWYFGAIGTCI

SEQ ID NO: 10116 - protein, 269 aa, Thermomyces lanuginosus
DVSADLLNQFKLFAQYSAAAYCGRNNDAPAGTNITCSANACPLVEAADATFLYSFENSGMGDVTGFLAVDNTNKLIVLSFRGSRSIENWIANLNFDLVDINDICSGCRGHDGFTSSWRSVADTLRQAVDDAVAAHPDYKVVVTGHSLGGALATLAGADLRNNGYDVDLYTYGAPRVGNRAFAEFITVQTGGTLYRVTHTNDVVPRLPPRQFGYSHPSPEYWIKSGTVVPVRRRDIVKIEGIDATGGNNQNNAPDIPAHLWYFGMIGTCI

SEQ ID NO: 10117 - protein, 269 aa, Thermomyces lanuginosus
DVSADLLNQFKLFAQYSAAAYCGRNWDAPAGTNITCSANACPLVEAADATFLYSFENSGVGDVTGFLAVDNTNKLIVLSFRGSRSIENWITNLNFDLVDINDICSGCRGHDGFTSSWRSVADTLRQAVDDAVAAHPDYKVVVTGHSLGGALATLAGADLRNNGYDVDLYTYGAPRVGNRAFAEFITVQTGGTLYRVTHTNDVVPRLPPRQFGYSHPSPEYWIKSGTLVPVRRRDIVKIEGIDATGGNNQNNAPDIPAHLWYFGAIGTCI

SEQ ID NO: 10118 - protein, 269 aa, Thermomyces lanuginosus
DVSADLLNQFKLFAQYSAAAYCGRNNDAPAGTNITCSANACPLVEAADATFLYSFENSGVGDVTGFLVVDNTNKLIVLSFRGSRSIENWITNLNFDLVDINDICSGCRGHDGFTSSWRSVADTLRQAVDDAVAAHPDYKVVVTGHSLGGALATLAGADLRNNGYDVDLYTYGAPRVGNRAFAEFITVQTGGTLYRVTHTNDVVPRLPPRQFGYSHPSPEYWIKSGTLVPVRRRDIVKIEGIDATGGNNQNNAPDIPAHLWYFGAIGTCI

SEQ ID NO: 10119 - protein, 269 aa, Thermomyces lanuginosus
DVSADLLNQFKLFAQYSAAAYCGRNNDAPAGTNITCSANACPLVEAADGTFLYSFENSGVGDVTGFLAVDNTNKLIVLSFRGSRSIENWITNLNFDLVDINDICSGCRGHDGFTSSWRSVADTLRQAVDDAVAAHPDYKVVVTGHSLGGALATLAGADLRNNGYDVDLYTYGAPRVGNRAFAEFITVQTGGTLYRVTHTNDVVPRLPPRQFGYSHPSPEYWIKSGTLVPVRRRDIVKIEGIDATGGNNQNNAPDIPAHLWYFGAIGTCI

SEQ ID NO: 10120 - protein, 269 aa, Thermomyces lanuginosus
DVSADLLNQFKLFAQYSAAAYCGRNNDAPAGTNITCSANACPLVEAADATFLYSFENSGVGDVTGFLAVDNNNSLIVLSFRGSRSIENWITNLNFDLVDINDICSGCRGHDGFTSSWRSVADTLRQAVDDAVAAHPDYKVVVTGHSLGGALATLAGADLRNNGYDVDLYTYGAPRVGNRAFAEFITVQTGGTLYRVTHTNDVVPRLPPRQFGYSHPSPEYWIKSGTLVPVRRRDIVKIEGIDATGGNNQNNTPDIPAHLWYFGLIGTCI

SEQ ID NO: 10121 - protein, 269 aa, Thermomyces lanuginosus
DVSADLLNQFKLFAQYSAAAYCGRNNDAPAGTNITCSANACPLVEAADAMFLYSFENSGVGDVTGFLAVDNTNKLIVLSFRGSRSIENWITNLNFDLVDINDICSGCRGHDGFTSSWRSVADTLRQAVDDAVAAHPDYKVVVTGHSLGGALATLAGADLRNNGYDVDLYTYGAPRVGNRAFAEFITVQTGGTLYRVTHTNDVVPRLPPRQFGYSHPSPEYWIKSGTLVPVRRRDIVKIEGIDATGGNNQNNAPDIPAHLWYFGAIGTCI

SEQ ID NO: 10122 - protein, 269 aa, Thermomyces lanuginosus
DVSADLLNQFKLFAQYSAAAYCGRNNDAPAGTNITCSANACPLVEAADATFLYSFENSGVGDVTGFLAVDNTNKLIVLSFRGSRSIENWITNLNFDLVDINDICSGCRGHDGFTSSWRSVADNLSQAVDDAVAAHPDYKVVVTGHSLGGALATLAGADLRNNGYDVDLYTYGAPRVGNRAFAEFITVQTGGTLYRVTHTNDVVPRLPPRQFGYSHPSPEYWIKSGTLVPVRRRDIVKIEGIDATGGNNQNNTPDIPAHLWYFGLIGTCI

SEQ ID NO: 10123 - protein, 269 aa, Thermomyces lanuginosus
DVSADLLNQFKLFAQYSAAAYCGRNNDAPAGTNITCSANACPLVEAADATFLYSFENSGMGDVTGFLAVDNTNKLIVLSFRGSRSIENWIANLNFDLVDINDICSGCRGHDGFTSSWRSVADTLRQAVDDAVAAHPDYKVVVTGHSLGGALATLAGADLRNNGYDVDLYTYGAPRVGNRAFAEFITVQTGGTLYRVTHTNDVVPRLPPRQFGYSHPSPEYWIKSGTRVPVRRRDIVKIEGIDATGGNNQNNAPDIPAHLWYFGVIGTCI

SEQ ID NO: 10124 - protein, 269 aa, Thermomyces lanuginosus
DVSADLLNQFKLFAQYSAAAYCGRNNDAPAGTNITCSANACPLVEAADATFLYSFENSGVGDVTGFLAVDNTNKLIVLSFRGSRSIENWIADLNFLLQDINDICSGCRGHDGFTSSWRSVADTLRQAVDDAVAAHPDYKVVVTGHSLGGALATLAGADLRNNGYDVDLYTYGAPRVGNRAFAEFITVQTGGTLYRVTHTNDVVPRLPPRQFGYSHPSPEYWIKSGTLVPVRRRDIVKIEGIDATGGNNQNNTPDIPAHLWYFGLIGTCI

SEQ ID NO: 10125 - protein, 269 aa, Thermomyces lanuginosus
DVSADLLNQFKLFAQYSAAAYCGRNNDAPAGTNITCSANNCPLVEAADATFLYSFENSGVGDVTGFLAVDNTNKLIVLSFRGSRSIENWITNLNFDLVDINDICSGCRGHDGFTSSWRSVADTLRQAVDDAVAAHPDYKVVVTGHSLGGALATLAGADLRNNGYDVDLYTYGAPRVGNRAFAEFITVQTGGTLYRVTHTNDVVPRLPPRQFGYSHPSPEYWIKSGTLVPVRRRDIVKIEGIDATGGNNQNNAPDIPAHLWYFGAIGTCI

SEQ ID NO: 10126 - protein, 269 aa, Thermomyces lanuginosus
DVSADLLNQFKLFAQYSAAAYCGRNNDAPAGTNITCSANACPLVEAADATFLYSFENSGVGDVTAFLAVDNTNKLIVLSFRGSRSIENWITNLNFDLVDINDICSGCRGHDGFTSSWRSVADTLRQAVDDAVAAHPDYKVVVTGHSLGGALATLAGADLRNNGYDVDLYTYGAPRVGNRAFAEFITVQTGGTLYRVTHTNDVVPRLPPRQFGYSHPSPEYWIKSGTLVPVRRRDIVKIEGIDATGGNNQNNAPDIPAHLWYFGAIGTCI

SEQ ID NO: 10127 - protein, 269 aa, Thermomyces lanuginosus
DVSADLLNQFKLFAQYSAAAYCGRNNDAPAGTNITCSANACPLVEAADATLLYSFENSGVGDVTGFLAVDNTNKLIVLSFRGSRSIENWITNLNFDLVDINDICSGCRGHDGFTSSWRSVADTLRQAVDDAVAAHPDYKVVVTGHSLGGALATLAGADLRNNGYDVDLYTYGAPRVGNRAFAEFITVQTGGTLYRVTHTNDVVPRLPPRQFGYSHPSPEYWIKSGTLVPVRRRDIVKIEGIDATGGNNQNNAPDIPAHLWYFGAIGTCI

SEQ ID NO: 10128 - protein, 269 aa, Thermomyces lanuginosus
DVSADLLNQFKLFAQYSAAAYCGRNNDAPAGTNITCSANACPLVEAADATFLYSFENSGVGDVTGFLAVDNTNKLIVLSFRGSRSIENWITNLNFDLVDINDICSGCRGHDGFTSSWRSVADTLRQAVDDAVAAHPDYKVVVTGHSLGGALATLAGADLRNNGYDVDLYTYGAPRVGNRAFAEFITVQTGGTLYRVTHTNDVVPRLPPRQFGYSHPSPEYWIKSGTLVPVRRRDIVKCEGIDATGCNNQNNTPDIPAHLWYFGLIGTCI

SEQ ID NO: 10129 - protein, 269 aa, Thermomyces lanuginosus
DVSADLLNQFKLFAQYSAAAYCGRNNDAPAGTNITCSANACPLVEAADATFLYSFENSGVGDVTGFLAVDNTGKLIVLSFRGSRSIENWITNLNFDLVDINDICSGCRGHDGFTSSWRSVADTLRQAVDDAVAAHPDYKVVVTGHSLGGALATLAGADLRNNGYDVDLYTYGAPRVGNRAFAEFITVQTGGTLYRVTHTNDVVPRLPPRQFGYSHPSPEYWIKSGTLVPVRRRDIVKIEGIDATGGNNQNNAPDIPAHLWYFGAIGTCI

SEQ ID NO: 10130 - protein, 269 aa, Thermomyces lanuginosus
DVSADLLNQFKLFAQYSAAAYCGRNNDAPAGTNITCSANACPLVEAADATFLYSFENSGVGDVTGFLAVDNTNKLIVLSFRGSRSIENWITNLNFDLVDINDICSGCRGHDGFESSWRSVADTLRQAVDDAVAAHPDYKVVVTGHSLGGALATLAGADLRNNGYDVDLYTYGAPRVGNRAFAEFITVQTGGTLYRVTHTNDVVPRLPPRQFGYSHPSPEYWIKSGTLVPVRRRDIVKIEGIDATGGNNQNNAPDIPAHLWYFGAIGTCI

SEQ ID NO: 10131 - protein, 269 aa, Thermomyces lanuginosus
DVSADLLNQFKLFAQYSAAAYCGRNNDAPAGTNITCSANACPLVEAADATFLYSFENSGVGDITGFLAVDNTNKLIVLSFRGSRSIENWITNLNFDLVDINDICSGCRGHDGFTSSWRSVADTLRQAVDDAVAAHPDYKVVVTGHSLGGALATLAGADLRNNGYDVDLYTYGAPRVGNRAFAEFITVQTGGTLYRVTHTNDVVPRLPPRQFGYSHPSPEYWIKSGTLVPVRRRDIVKIEGIDATGGNNQNNAPDIPAHLWYFGAIGTCI

SEQ ID NO: 10132 - protein, 269 aa, Thermomyces lanuginosus
DVSADLLNQFKLFAQYSAAAYCGRNNDAPAGTNITCSANACPLVEAADATFLYSFENSGVADVTGFLAVDNTNKLIVLSFRGSRSIENWITNLNFDLVDINDICSGCRGHDGFTSSWRSVADTLRQAVDDAVAAHPDYKVVVTGHSLGGALATLAGADLRNNGYDVDLYTYGAPRVGNRAFAEFITVQTGGTLYRVTHTNDVVPRLPPRQFGYSHPSPEYWIKSGTLVPVRRRDIVKIEGIDATGGNNQNNAPDIPAHLWYFGAIGTCI

SEQ ID NO: 10133 - protein, 269 aa, Thermomyces lanuginosus
DVSADLLNQFKLFAQYSAAAYCGRNNDAPAGTNITCSANACPLVEAADATFLYSFENSGVGDATGFLAVDNTNKLIVLSFRGSRSIENWITNLNFDLVDINDICSGCRGHDGFTSSWRSVADTLRQAVDDAVAAHPDYKVVVTGHSLGGALATLAGADLRNNGYDVDLYTYGAPRVGNRAFAEFITVQTGGTLYRVTHTNDVVPRLPPRQFGYSHPSPEYWIKSGTLVPVRRRDIVKIEGIDATGGNNQNNAPDIPAHLWYFGAIGTCI

SEQ ID NO: 10134 - protein, 269 aa, Thermomyces lanuginosus
DVSADLLNQFKLFAQYSAAAYCGRNNDAPAGTNITCSANACPLVEAADATFLYSFENSGVGGVTGFLAVDNTNKLIVLSFRGSRSIENWITNLNFDLVDINDICSGCRGHDGFTSSWRSVADTLRQAVDDAVAAHPDYKVVVTGHSLGGALATLAGADLRNNGYDVDLYTYGAPRVGNRAFAEFITVQTGGTLYRVTHTNDVVPRLPPRQFGYSHPSPEYWIKSGTLVPVRRRDIVKIEGIDATGGNNQNNAPDIPAHLWYFGAIGTCI

SEQ ID NO: 10135 - protein, 269 aa, Thermomyces lanuginosus
DVSADLLNQFKLFAQYSAAAYCGRNNDAPAGTNITCSANACPLVEAADSTFLYSFENSGVGDVTGFLAVDNTNKLIVLSFRGSRSIENWITNLNFDLVDINDICSGCRGHDGFTSSWRSVADTLRQAVDDAVAAHPDYKVVVTGHSLGGALATLAGADLRNNGYDVDLYTYGAPRVGNRAFAEFITVQTGGTLYRVTHTNDVVPRLPPRQFGYSHPSPEYWIKSGTLVPVRRRDIVKIEGIDATGGNNQNNAPDIPAHLWYFGAIGTCI

SEQ ID NO: 10136 - protein, 269 aa, Thermomyces lanuginosus
DVSADLLNQFKLFAQYSAAAYCGRNNDAPAGTNITCSANACPLVEAADATFLYSFENSGGGDVTGFLAVDNTNKLIVLSFRGSRSIENWITNLNFDLVDINDICSGCRGHDGFTSSWRSVADTLRQAVDDAVAAHPDYKVVVTGHSLGGALATLAGADLRNNGYDVDLYTYGAPRVGNRAFAEFITVQTGGTLYRVTHTNDVVPRLPPRQFGYSHPSPEYWIKSGTLVPVRRRDIVKIEGIDATGGNNQNNAPDIPAHLWYFGAIGTCI

SEQ ID NO: 10137 - protein, 269 aa, Thermomyces lanuginosus
DVSADLLNQFKLFAQYSAAAYCGRNNDAPAGTNITCSANACPLVEAADATFLYSFENSGVGDVTGFLAVDDTNKLIVLSFRGSRSIENWITNLNFDLVDINDICSGCRGHDGFTSSWRSVADTLRQAVDDAVAAHPDYKVVVTGHSLGGALATLAGADLRNNGYDVDLYTYGAPRVGNRAFAEFITVQTGGTLYRVTHTNDVVPRLPPRQFGYSHPSPEYWIKSGTLVPVRRRDIVKIEGIDATGGNNQNNAPDIPAHLWYFGAIGTCI

SEQ ID NO: 10138 - protein, 269 aa, Thermomyces lanuginosus
DVSADLLNQFKLFAQYSAAAYCGRNNDAPAGTNITCSASACPLVEAADATFLYSFENSGVGDVTGFLAVDNTNKLIVLSFRGSRSIENWITNLNFDLVDINDICSGCRGHDGFTSSWRSVADTLRQAVDDAVAAHPDYKVVVTGHSLGGALATLAGADLRNNGYDVDLYTYGAPRVGNRAFAEFITVQTGGTLYRVTHTNDVVPRLPPRQFGYSHPSPEYWIKSGTLVPVRRRDIVKIEGIDATGGNNQNNAPDIPAHLWYFGAIGTCI

SEQ ID NO: 10139 - protein, 269 aa, Thermomyces lanuginosus
DVSADLLNQFKLFAQYSAAAYCGRNNDAPAGTNITCSANACPLVEAADATFLYSFENSGVGDVTGFLAVDNTNKLIVLSFRGSRSIENWITNLNFDLVDINDICSGCRGHDGFTSSWRSVANTSRQAVDDAVAAHPDYKVVVTGHSLGGALATLAGADLRNNGYDVDLYTYGAPRVGNRAFAEFITVQTGGTLYRVTHTNDVVPRLPPRQFGYSHPSPEYWIKSGTLVPVRRRDIVKIEGIDATGGNNQNNTPDIPAHLWYFGLIGTCI

SEQ ID NO: 10140 - protein, 269 aa, Thermomyces lanuginosus
DVSADLLNQFKLFAQYSAAAYCGRNNDAPAGTNITCSANHCPLVEAADATFLYSFENSGVGDVTGFLAVDNTNKLIVLSFRGSRSIENWITNLNFDLVDINDICSGCRGHDGFTSSWRSVADTLRQAVDDAVAAHPDYKVVVTGHSLGGALATLAGADLRNNGYDVDLYTYGAPRVGNRAFAEFITVQTGGTLYRVTHTNDVVPRLPPRQFGYSHPSPEYWIKSGTLVPVRRRDIVKIEGIDATGGNNQNNAPDIPAHLWYFGAIGTCI

SEQ ID NO: 10141 - protein, 269 aa, Thermomyces lanuginosus
DVSADLLNQFKLFAQYSAAAYCGRNNDAPAGTNITCSANACPLVEAADATFLYSFENYGVGDVTGFLAVDNTNKLIVLSFRGSRSIENWITNLNFDLVDINDICSGCRGHDGFTSSWRSVADTLRQAVDDAVAAHPDYKVVVTGHSLGGALATLAGADLRNNGYDVDLYTYGAPRVGNRAFAEFITVQTGGTLYRVTHTNDVVPRLPPRQFGYSHPSPEYWIKSGTLVPVRRRDIVKIEGIDATGGNNQNNAPDIPAHLWYFGAIGTCI

SEQ ID NO: 10142 - protein, 269 aa, Thermomyces lanuginosus
DVSADLLNQFKLFAQYSAAAYCGRNNDAPAGTNITCSANACPLVEAADAHFLYSFENSGVGDVTGFLAVDNTNKLIVLSFRGSRSIENWITNLNFDLVDINDICSGCRGHDGFTSSWRSVADTLRQAVDDAVAAHPDYKVVVTGHSLGGALATLAGADLRNNGYDVDLYTYGAPRVGNRAFAEFITVQTGGTLYRVTHTNDVVPRLPPRQFGYSHPSPEYWIKSGTLVPVRRRDIVKIEGIDATGGNNQNNAPDIPAHLWYFGAIGTCI

SEQ ID NO: 10143 - protein, 269 aa, Thermomyces lanuginosus
DVSADLLRQFKLFAQYSAAAYCGRNNDAPAGTNITCSANACPLVEAADATFLYSFENSGVGDVTGFLAVDNTNKLIVLSFRGSRSIENWITNLNFDLVDINDICSGCRGHDGFTSSWRSVADTLRQAVDDAVAAHPDYKVVVTGHSLGGALATLAGADLRNNGYDVDLYTYGAPRVGNRAFAEFITVQTGGTLYRVTHTNDVVPRLPPRQFGYSHPSPEYWIKSGTLVPVRRRDIVKIEGIDATGGNNQNNAPDIPAHLWYFGAIGTCI

SEQ ID NO: 10144 - protein, 269 aa, Thermomyces lanuginosus
DVSADLLNQMKLFAQYSAAAYCGRNNDAPAGTNITCSANACPLVEAADATFLYSFENSGVGDVTGFLAVDNTNKLIVLSFRGSRSIENWITNLNFDLVDINDICSGCRGHDGFTSSWRSVADTLRQAVDDAVAAHPDYKVVVTGHSLGGALATLAGADLRNNGYDVDLYTYGAPRVGNRAFAEFITVQTGGTLYRVTHTNDVVPRLPPRQFGYSHPSPEYWIKSGTLVPVRRRDIVKIEGIDATGGNNQNNAPDIPAHLWYFGAIGTCI

SEQ ID NO: 10145 - protein, 269 aa, Thermomyces lanuginosus
DVSADLLNQFKLFAQYSAAAYCGRNNDAPAGTNITCSANACPLVEAADAWFLYSFENSGVGDVTGFLAVDNTNKLIVLSFRGSRSIENWITNLNFDLVDINDICSGCRGHDGFTSSWRSVADTLRQAVDDAVAAHPDYKVVVTGHSLGGALATLAGADLRNNGYDVDLYTYGAPRVGNRAFAEFITVQTGGTLYRVTHTNDVVPRLPPRQFGYSHPSPEYWIKSGTLVPVRRRDIVKIEGIDATGGNNQNNAPDIPAHLWYFGAIGTCI

SEQ ID NO: 10146 - protein, 269 aa, Thermomyces lanuginosus
DVSADLLNQFKLFAQYSAAAYCGRNNDAPAGTNITCSANACPLVEAADATFLYSFENSGVGDTTGFLAVDNTNKLIVLSFRGSRSIENWITNLNFDLVDINDICSGCRGHDGFTSSWRSVADTLRQAVDDAVAAHPDYKVVVTGHSLGGALATLAGADLRNNGYDVDLYTYGAPRVGNRAFAEFITVQTGGTLYRVTHTNDVVPRLPPRQFGYSHPSPEYWIKSGTLVPVRRRDIVKIEGIDATGGNNQNNAPDIPAHLWYFGAIGTCI

SEQ ID NO: 10147 - protein, 269 aa, Thermomyces lanuginosus
DVSADLLNQFKLFAQYSAAAYCGRNNDAPAGTNITCSANACPLVEAADATFLYSFENSGVGDMTGFLAVDNTNKLIVLSFRGSRSIENWITNLNFDLVDINDICSGCRGHDGFTSSWRSVADTLRQAVDDAVAAHPDYKVVVTGHSLGGALATLAGADLRNNGYDVDLYTYGAPRVGNRAFAEFITVQTGGTLYRVTHTNDVVPRLPPRQFGYSHPSPEYWIKSGTLVPVRRRDIVKIEGIDATGGNNQNNAPDIPAHLWYFGAIGTCI

SEQ ID NO: 10148 - protein, 269 aa, Thermomyces lanuginosus
DVSADLLNQFKLFAQYSAAAYCGRNNDAPAGTNITCSANACPLVEAADATFLYSFENSGAGDVTGFLAVDNTNKLIVLSFRGSRSIENWITNLNFDLVDINDICSGCRGHDGFTSSWRSVADTLRQAVDDAVAAHPDYKVVVTGHSLGGALATLAGADLRNNGYDVDLYTYGAPRVGNRAFAEFITVQTGGTLYRVTHTNDVVPRLPPRQFGYSHPSPEYWIKSGTLVPVRRRDIVKIEGIDATGGNNQNNAPDIPAHLWYFGAIGTCI

SEQ ID NO: 10149 - protein, 269 aa, Thermomyces lanuginosus
DVSADLLNQFKLFAQYSAAAYCGRNNDAPAGTNITCSANACPLVEAADATFLYSFENSGVGDQTGFLAVDNTNKLIVLSFRGSRSIENWITNLNFDLVDINDICSGCRGHDGFTSSWRSVADTLRQAVDDAVAAHPDYKVVVTGHSLGGALATLAGADLRNNGYDVDLYTYGAPRVGNRAFAEFITVQTGGTLYRVTHTNDVVPRLPPRQFGYSHPSPEYWIKSGTLVPVRRRDIVKIEGIDATGGNNQNNAPDIPAHLWYFGAIGTCI

SEQ ID NO: 10150 - protein, 269 aa, Thermomyces lanuginosus
DVSADLLNQFKLFAQYSAAAYCGRNNDAPAGTNITCSANACPLVEAADATFLYSFENSGVGDVTGFLAVDNTNKLIVLSFRGSRSIENWIANLNFDLVDINDICSGCRGHDGFTSSWRSVADTLRQAVDDAVAAHPDYKVVVTGHSLGGALATLAGADLRNNGYDVDLYTYGAPRVGNRAFAEFITVQTGGTLYRVTNTNDVVPRLPPRQFGYSHPSPEYWIKSGTLVPVRRRDIVKIEGIDATGGNNQNNTPSITIHLWYFGLIGTCI

SEQ ID NO: 10151 - protein, 269 aa, Thermomyces lanuginosus
DVSADLLNQFKLFAQYSAAAYCGRNNDAPAGTNITCSANACPLVEAADATFLYSFENSGVGDVTGFLAVDNTNKKIVLSFRGSRSIENWITNLNFDLVDINDICSGCRGHDGFTSSWRSVADTLRQAVDDAVAAHPDYKVVVTGHSLGGALATLAGADLRNNGYDVDLYTYGAPRVGNRAFAEFITVQTGGTLYRVTHTNDVVPRLPPRQFGYSHPSPEYWIKSGTLVPVRRRDIVKIEGIDATGGNNQNNAPDIPAHLWYFGAIGTCI

SEQ ID NO: 10152 - protein, 269 aa, Thermomyces lanuginosus
DVSADLLNQFKLFAQYSAAAYCGRNNDAPAGTNITCSANACPLVEAADATFLYSFENSGMGDVTGFLAVDNTNKLIVLSFRGSRSIENWITNLNFDLVDINDICSGCRGHDGFTSSWRSVADTLRQAVDDAVAAHPDYKVVVTGHSLGGALATLAGADLRNNGYDVDLYTYGAPRVGNRAFAEFITVQTGGTLYRVTHTNDVVPRLPPRQFGYSHPSPEYWIKSGTGRPVRRRDIVKIEGIDATGGNNQNNTPDIPAHLWYFGTIGTCI

SEQ ID NO: 10153 - protein, 269 aa, Thermomyces lanuginosus
DVSADLLNQFKLFAQYSAAAYCGRNNDAPAGTNITCSANACPLVEAADATFLYSFENSGTGDVTGFLAVDNTNKLIVLSFRGSRSIENWITNLNFDLVDINDICSGCRGHDGFTSSWRSVADTLRQAVDDAVAAHPDYKVVVTGHSLGGALATLAGADLRNNGYDVDLYTYGAPRVGNRAFAEFITVQTGGTLYRVTHTNDVVPRLPPRQFGYSHPSPEYWIKSGTLVPVRRRDIVKIEGIDATGGNNQNNAPDIPAHLWYFGAIGTCI

SEQ ID NO: 10154 - protein, 269 aa, Thermomyces lanuginosus
DVSADLLNQFKLFAQYSAAAYCGRNNDAPAGTNITCSANACPLVEAADATFLYSFENSGVGRVTGFLAVDNTNKLIVLSFRGSRSIENWITNLNFDLVDINDICSGCRGHDGFTSSWRSVADTLRQAVDDAVAAHPDYKVVVTGHSLGGALATLAGADLRNNGYDVDLYTYGAPRVGNRAFAEFITVQTGGTLYRVTHTNDVVPRLPPRQFGYSHPSPEYWIKSGTLVPVRRRDIVKIEGIDATGGNNQNNAPDIPAHLWYFGAIGTCI

SEQ ID NO: 10155 - protein, 269 aa, Thermomyces lanuginosus
DVSADLLNQFKLFAQYSAAAYCGRNNDAPAGTNITCSANACPLVEAADATFLYSFENSGVGDVTGFLAVDNTNKLIVLSFRGSRSIENWITNLNFDLVDINDICDGCGGHDGFTSSWRSVADTLRQAVDDAVAAHPDYKVVVTGHSLGGALATLAGADLRNNGYDVDLYTYGAPRVGNRAFAEFITVQTGGTLYRVTHTNDVVPRLPPRQFGYSHPSPEYWIKSGTLVPVRRRDIVKIEGIDATGGNNQNNTPDIPAHLWYFGLIGTCI

SEQ ID NO: 10156 - protein, 269 aa, Thermomyces lanuginosus
DVSADLLNQFKLFAQYSAAAYCGRNNDAPAGTNITCSANACPLVEAADATFLYSFENSGVGDVTWFLAVDNTNKLIVLSFRGSRSIENWITNLNFDLVDINDICSGCRGHDGFTSSWRSVADTLRQAVDDAVAAHPDYKVVVTGHSLGGALATLAGADLRNNGYDVDLYTYGAPRVGNRAFAEFITVQTGGTLYRVTHTNDVVPRLPPRQFGYSHPSPEYWIKSGTLVPVRRRDIVKIEGIDATGGNNQNNAPDIPAHLWYFGAIGTCI

SEQ ID NO: 10157 - protein, 269 aa, Thermomyces lanuginosus
DVSADLLNQFKLFAQYSAAAYCGRNNDAPAGTNITCSANACPLVEAADATFLYSFENSGMGDVTGFLAVDNTNKLIVLSFRGSRSIENWITNLNFDLVDINDICSGCRGHDGFTSSWRNVSDTLRQAVDDAVAAHPDYKVVVTGHSLGGALATLAGADLRNNGYDVDLYTYGAPRVGNRAFAEFITVQTGGTLYRVTHTNDVVPRLPPRQFGYSHPSPEYWIKSGTGVPVRRRDIVKIEGIDATGGNNQNNTPDIPAHLWYFGLIGTCI

SEQ ID NO: 10158 - protein, 269 aa, Thermomyces lanuginosus
DVSADLLNQFKLFAQYSAAAYCGRNNDAPAGTNITCSANACPLVEAADATFLYSFENSGVGDVTGFLAVDGTNKLIVLSFRGSRSIENWITNLNFDLVDINDICSGCRGHDGFTSSWRSVADTLRQAVDDAVAAHPDYKVVVTGHSLGGALATLAGADLRNNGYDVDLYTYGAPRVGNRAFAEFITVQTGGTLYRVTHTNDVVPRLPPRQFGYSHPSPEYWIKSGTLVPVRRRDIVKIEGIDATGGNNQNNAPDIPAHLWYFGAIGTCI

SEQ ID NO: 10159 - protein, 269 aa, Thermomyces lanuginosus
DVSADLLNQFKLFAQYSASAYCGRNNDAPAGTNITCSANACPLVEAADATFLYSFENSGVGDVTGFLAVDNTNKLIVLSFRGSRSIENWITNLNFDLVDINDICSGCRGHDGFTSSWRSVADTLRQAVDDAVAAHPDYKVVVTGHSLGGALATLAGADLRNNGYDVDLYTYGAPRVGNRAFAEFITVQTGGTLYRVTHTNDVVPRLPPRQFGYSHPSPEYWIKSGTLVPVRRRDIVKIEGIDATGGNNQNNAPDIPAHLWYFGAIGTCI

SEQ ID NO: 10160 - protein, 269 aa, Thermomyces lanuginosus
DVRADLLNQFKLFAQYSAAAYCGRNNDAPAGTNITCSANACPLVEAADATFLYSFENSGVGDVTGFLAVDNTNKLIVLSFRGSRSIENWITNLNFDLVDINDICSGCRGHDGFTSSWRSVADTLRQAVDDAVAAHPDYKVVVTGHSLGGALATLAGADLRNNGYDVDLYTYGAPRVGNRAFAEFITVQTGGTLYRVTHTNDVVPRLPPRQFGYSHPSPEYWIKSGTLVPVRRRDIVKIEGIDATGGNNQNNAPDIPAHLWYFGAIGTCI

SEQ ID NO: 10161 - protein, 269 aa, Thermomyces lanuginosus
DVSADLLNQFKLFAQYSAAAYCGRNNDAPAGTNITCSANACPLVEAADATFLYSFENSGVGDVTGFLAVDNTNKLIVLSFRGSRSIENWITNLNFDLVDINDICSGCRGHDGFTSSWRSVADTLRQAVDDAVAAHPDYKVVVTGHSLGGALATLAGADLRNNGYDVDLYTYGAPRVGNRAFAEFITVQTGGTLYRVTHTNDVVPRLPPRQFGYSHPSPEYWIKSGTLRPVRRRDIVKIEGIDATGGNNQNNAPDIPAHLWYFGAIGTCI

SEQ ID NO: 10162 - protein, 269 aa, Thermomyces lanuginosus
DVSADLLNQFKLFAQYSAAAYCGRNNDAPAGTNITCSANACPLVEAADATFLYSFENSGVGDVTGFLAVDNTNKYIVLSFRGSRSIENWITNLNFDLVDINDICSGCRGHDGFTSSWRSVADTLRQAVDDAVAAHPDYKVVVTGHSLGGALATLAGADLRNNGYDVDLYTYGAPRVGNRAFAEFITVQTGGTLYRVTHTNDVVPRLPPRQFGYSHPSPEYWIKSGTLVPVRRRDIVKIEGIDATGGNNQNNAPDIPAHLWYFGAIGTCI

SEQ ID NO: 10163 - protein, 269 aa, Thermomyces lanuginosus
DVSADLLNQFKLFAQYSAAAYCGRNADAPAGTNITCSANACPLVEAADATFLYSFENSGVGDVTGFLAVDNTNKLIVLSFRGSRSIENWITNLNFDLVDINDICSGCRGHDGFTSSWRSVADTLRQAVDDAVAAHPDYKVVVTGHSLGGALATLAGADLRNNGYDVDLYTYGAPRVGNRAFAEFITVQTGGTLYRVTHTNDVVPRLPPRQFGYSHPSPEYWIKSGTLVPVRRRDIVKIEGIDATGGNNQNNAPDIPAHLWYFGAIGTCI

SEQ ID NO: 10164 - protein, 269 aa, Thermomyces lanuginosus
DVSADLLNQFKLFAQYSAAAYCGRNNDAPAGTNITCSANACPLVEAADATFLYSFENSGLGDVTGFLAVDNTNKLIVLSFRGSRSIENWITNLNFDLVDINDICSGCRGHDGFTSSWRSVADTLRQAVDDAVAAHPDYKVVVTGHSLGGALATLAGADLRNNGYDVDLYTYGAPRVGNRAFAEFITVQTGGTLYRVTHTNDVVPRLPPRQFGYSHPSPEYWIKSGTLVPVRRRDIVKIEGIDATGGNNQNNAPDIPAHLWYFGAIGTCI

SEQ ID NO: 10165 - protein, 269 aa, Thermomyces lanuginosus
DVSADLLNQFKLFAQYSAAAYCGRNNDAPAGTNITCSANACPLVEAADATFLYCFENSGVGDVTGFLAVDNTNKLIVLSFRGSRSIENWITNLNFDLVDINDICSGCRGHDGFTSSWRSVADTLRQAVDDAVAAHPDYKVVVTGHSLGGALATLAGADLRNNGYDVDLYTYGAPRVGNRAFAEFITVQTGGTLYRVTHTNDVVPRLPPRQFGYSHPSPEYWIKSGTLVPVRRRDIVKIEGIDATGGNNQNNAPDIPAHLWYFGAIGTCI

SEQ ID NO: 10166 - protein, 269 aa, Thermomyces lanuginosus
DVSADLLNQFKLFAQYSAAAYCGRNNDAPAGTNITCSANACPLVEAADATKLYSFENSGVGDVTGFLAVDNTNKLIVLSFRGSRSIENWITNLNFDLVDINDICSGCRGHDGFTSSWRSVADTLRQAVDDAVAAHPDYKVVVTGHSLGGALATLAGADLRNNGYDVDLYTYGAPRVGNRAFAEFITVQTGGTLYRVTHTNDVVPRLPPRQFGYSHPSPEYWIKSGTLVPVRRRDIVKIEGIDATGGNNQNNAPDIPAHLWYFGAIGTCI

SEQ ID NO: 10167 - protein, 269 aa, Thermomyces lanuginosus
DVSADLLNQFKLFAQYSAAAYCGRNNDAPAGTFITCSANACPLVEAADATFLYSFENSGVGDVTGFLAVDNTNKLIVLSFRGSRSIENWITNLNFDLVDINDICSGCRGHDGFTSSWRSVADTLRQAVDDAVAAHPDYKVVVTGHSLGGALATLAGADLRNNGYDVDLYTYGAPRVGNRAFAEFITVQTGGTLYRVTHTNDVVPRLPPRQFGYSHPSPEYWIKSGTLVPVRRRDIVKIEGIDATGGNNQNNAPDIPAHLWYFGAIGTCI

SEQ ID NO: 10168 - protein, 269 aa, Thermomyces lanuginosus
DVSADLLNQFKLFAQYSAAAYCGRNNDAPAGTNITCSANACPLVEAADATFLYSFENSGVGDVTGFLAVRNTNKLIVLSFRGSRSIENWITNLNFDLVDINDICSGCRGHDGFTSSWRSVADTLRQAVDDAVAAHPDYKVVVTGHSLGGALATLAGADLRNNGYDVDLYTYGAPRVGNRAFAEFITVQTGGTLYRVTHTNDVVPRLPPRQFGYSHPSPEYWIKSGTLVPVRRRDIVKIEGIDATGGNNQNNAPDIPAHLWYFGAIGTCI

SEQ ID NO: 10169 - protein, 269 aa, Thermomyces lanuginosus
DVSADLLNQFKLFAQYSAAAYCGRNNDAPAGTNITCSANACPLVEAADATFTYSFENSGVGDVTGFLAVDNTNKLIVLSFRGSRSIENWITNLNFDLVDINDICSGCRGHDGFTSSWRSVADTLRQAVDDAVAAHPDYKVVVTGHSLGGALATLAGADLRNNGYDVDLYTYGAPRVGNRAFAEFITVQTGGTLYRVTHTNDVVPRLPPRQFGYSHPSPEYWIKSGTLVPVRRRDIVKIEGIDATGGNNQNNAPDIPAHLWYFGAIGTCI

SEQ ID NO: 10170 - protein, 269 aa, Thermomyces lanuginosus
DVSADLLNQFKLFAQYSAAAYCGRNNDAPAVTNITCSANACPLVEAADATFLYSFENSGVGDVTGFLAVDNTNKLIVLSFRGSRSIENWITNLNFDLVDINDICSGCRGHDGFTSSWRSVADTLRQAVDDAVAAHPDYKVVVTGHSLGGALATLAGADLRNNGYDVDLYTYGAPRVGNRAFAEFITVQTGGTLYRVTHTNDVVPRLPPRQFGYSHPSPEYWIKSGTLVPVRRRDIVKIEGIDATGGNNQNNAPDIPAHLWYFGAIGTCI

SEQ ID NO: 10171 - protein, 269 aa, Thermomyces lanuginosus
DVSADLLNQLKLFAQYSAAAYCGRNNDAPAGTNITCSANACPLVEAADATFLYSFENSGVGDVTGFLAVDNTNKLIVLSFRGSRSIENWITNLNFDLVDINDICSGCRGHDGFTSSWRSVADTLRQAVDDAVAAHPDYKVVVTGHSLGGALATLAGADLRNNGYDVDLYTYGAPRVGNRAFAEFITVQTGGTLYRVTHTNDVVPRLPPRQFGYSHPSPEYWIKSGTLVPVRRRDIVKIEGIDATGGNNQNNAPDIPAHLWYFGAIGTCI

SEQ ID NO: 10172 - protein, 269 aa, Thermomyces lanuginosus
DVSADLLNQFKLFAQYSAAAYCGRNNDAPAGTNITCSANACPLVEAADATFLYSFENSGVGDVSGFLAVDNTNKLIVLSFRGSRSIENWITNLNFDLVDINDICSGCRGHDGFTSSWRSVADTLRQAVDDAVAAHPDYKVVVTGHSLGGALATLAGADLRNNGYDVDLYTYGAPRVGNRAFAEFITVQTGGTLYRVTHTNDVVPRLPPRQFGYSHPSPEYWIKSGTLVPVRRRDIVKIEGIDATGGNNQNNAPDIPAHLWYFGAIGTCI

SEQ ID NO: 10173 - protein, 269 aa, Thermomyces lanuginosus
DVSKDLLNQFKLFAQYSAAAYCGRNNDAPAGTNITCSANACPLVEAADATFLYSFENSGVGDVTGFLAVDNTNKLIVLSFRGSRSIENWITNLNFDLVDINDICSGCRGHDGFTSSWRSVADTLRQAVDDAVAAHPDYKVVVTGHSLGGALATLAGADLRNNGYDVDLYTYGAPRVGNRAFAEFITVQTGGTLYRVTHTNDVVPRLPPRQFGYSHPSPEYWIKSGTLVPVRVRDIVKIEGIDATGGNNQNNAPDIPAHLWYFGAIGTCI

SEQ ID NO: 10174 - protein, 269 aa, Thermomyces lanuginosus
DVSADLLNQFKLFAQYSAAAYCGRNNDAPAGTNITCSANACPLVEAADATFLYSFENSGVGDVTGNLAVDNTNKLIVLSFRGSRSIENWITNLNFDLVDINDICSGCRGHDGFTSSWRSVADTLRQAVDDAVAAHPDYKVVVTGHSLGGALATLAGADLRNNGYDVDLYTYGAPRVGNRAFAEFITVQTGGTLYRVTHTNDVVPRLPPRQFGYSHPSPEYWIKSGTLVPVRRRDIVKIEGIDATGGNNQNNAPDIPAHLWYFGAIGTCI

SEQ ID NO: 10175 - protein, 269 aa, Thermomyces lanuginosus
DVSARLLNQFKLFAQYSAAAYCGRNNDAPAGTNITCSANACPLVEAADATFLYSFENSGVGDVTGFLAVDNTNKLIVLSFRGSRSIENWITNLNFDLVDINDICSGCRGHDGFTSSWRSVADTLRQAVDDAVAAHPDYKVVVTGHSLGGALATLAGADLRNNGYDVDLYTYGAPRVGNRAFAEFITVQTGGTLYRVTHTNDVVPRLPPRQFGYSHPSPEYWIKSGTLVPVRRRDIVKIEGIDATGGNNQNNAPDIPAHLWYFGAIGTCI

SEQ ID NO: 10176 - protein, 269 aa, Thermomyces lanuginosus
DVSADLLNQFKLFAMYSAAAYCGRNNDAPAGTNITCSANACPLVEAADATFLYSFENSGVGDVTGFLAVDNTNKLIVLSFRGSRSIENWITNLNFDLVDINDICSGCRGHDGFTSSWRSVADTLRQAVDDAVAAHPDYKVVVTGHSLGGALATLAGADLRNNGYDVDLYTYGAPRVGNRAFAEFITVQTGGTLYRVTHTNDVVPRLPPRQFGYSHPSPEYWIKSGTLVPVRRRDIVKIEGIDATGGNNQNNAPDIPAHLWYFGAIGTCI

SEQ ID NO: 10177 - protein, 269 aa, Thermomyces lanuginosus
DVSADLLNQFKLFAQYSAAAYCGRNNDAPAGTNITCSANACPLVEAADATFLYSFENSGVGDVTGFYAVDNTNKLIVLSFRGSRSIENWITNLNFDLVDINDICSGCRGHDGFTSSWRSVADTLRQAVDDAVAAHPDYKVVVTGHSLGGALATLAGADLRNNGYDVDLYTYGAPRVGNRAFAEFITVQTGGTLYRVTHTNDVVPRLPPRQFGYSHPSPEYWIKSGTLVPVRRRDIVKIEGIDATGGNNQNNAPDIPAHLWYFGAIGTCI

SEQ ID NO: 10178 - protein, 269 aa, Thermomyces lanuginosus
DVSADLLNQFKLFAQYSAAAYCGRNNDAPAGTNITCSANACPLVEAADATFLYRFENSGVGDVTGFLAVDNTNKLIVLSFRGSRSIENWITNLNFDLVDINDICSGCRGHDGFTSSWRSVADTLRQAVDDAVAAHPDYKVVVTGHSLGGALATLAGADLRNNGYDVDLYTYGAPRVGNRAFAEFITVQTGGTLYRVTHTNDVVPRLPPRQFGYSHPSPEYWIKSGTLVPVRRRDIVKIEGIDATGGNNQNNAPDIPAHLWYFGAIGTCI

SEQ ID NO: 10179 - protein, 269 aa, Thermomyces lanuginosus
DVSADLLNQFKLFAQYSAAAYCGRNNDAPAGPNITCSANACPLVEAADATFLYSFENSGVGDVTGFLAVDNTNKLIVLSFRGSRSIENWITNLNFDLVDINDICSGCRGHDGFTSSWRSVADTLRQAVDDAVAAHPDYKVVVTGHSLGGALATLAGADLRNNGYDVDLYTYGAPRVGNRAFAEFITVQTGGTLYRVTHTNDVVPRLPPRQFGYSHPSPEYWIKSGTLVPVRRRDIVKIEGIDATGGNNQNNAPDIPAHLWYFGAIGTCI

SEQ ID NO: 10180 - protein, 269 aa, Thermomyces lanuginosus
DVSADLLNQFKLFAQYSAAAYCGRNNDAPAGTNITCSANACPLVEAADATFWYSFENSGVGDVTGFLAVDNTNKLIVLSFRGSRSIENWITNLNFDLVDINDICSGCRGHDGFTSSWRSVADTLRQAVDDAVAAHPDYKVVVTGHSLGGALATLAGADLRNNGYDVDLYTYGAPRVGNRAFAEFITVQTGGTLYRVTHTNDVVPRLPPRQFGYSHPSPEYWIKSGTLVPVRRRDIVKIEGIDATGGNNQNNAPDIPAHLWYFGAIGTCI

SEQ ID NO: 10181 - protein, 269 aa, Thermomyces lanuginosus
DVSADLLNQFKLFAQYCAAAYCGRNNDAPAGTNITCSANACPLVEAADATFLYSFENSGVGDVTGFLAVDNTNKLIVLSFRGSRSIENWITNLNFDLVDINDICSGCRGHDGFTSSWRSVADTLRQAVDDAVAAHPDYKVVVTGHSLGGALATLAGADLRNNGYDVDLYTYGAPRVGNRAFAEFITVQTGGTLYRVTHTNDVVPRLPPRQFGYSHPSPEYWIKSGTLVPVRRRDIVKIEGIDATGGNNQNNAPDIPAHLWYFGAIGTCI

SEQ ID NO: 10182 - protein, 269 aa, Thermomyces lanuginosus
DVSADLLNQFKLFAQYSAAAYCGRNNDAPAGTNITCSANACPLVEAADATFLYSFENSGVGDVTGKLAVDNTNKLIVLSFRGSRSIENWITNLNFDLVDINDICSGCRGHDGFTSSWRSVADTLRQAVDDAVAAHPDYKVVVTGHSLGGALATLAGADLRNNGYDVDLYTYGAPRVGNRAFAEFITVQTGGTLYRVTHTNDVVPRLPPRQFGYSHPSPEYWIKSGTLVPVRRRDIVKIEGIDATGGNNQNNAPDIPAHLWYFGAIGTCI

SEQ ID NO: 10183 - protein, 269 aa, Thermomyces lanuginosus
DVSADLLNQFKLFAQYSAAAYCGRNNDAPAGTNITCSANACSLVEAADATFLYSFENSGVGDVTGFLAVDNTNKLIVLSFRGSRSIENWITNLNFDLVDINDICSGCRGHDGFTSSWRSVADTLRQAVDDAVAAHPDYKVVVTGHSLGGALATLAGADLRNNGYDVDLYTYGAPRVGNRAFAEFITVQTGGTLYRVTHTNDVVPRLPPRQFGYSHPSPEYWIKSGTLVPVRRRDIVKIEGIDATGGNNQNNAPDIPAHLWYFGAIGTCI

SEQ ID NO: 10184 - protein, 269 aa, Thermomyces lanuginosus
DVSADLLNQFKLFAQYSAAAYCGRNNDAPAGTNSTCSANACPLVEAADATFLYSFENSGVGDVTGFLAVDNTNKLIVLSFRGSRSIENWITNLNFDLVDINDICSGCRGHDGFTSSWRSVADTLRQAVDDAVAAHPDYKVVVTGHSLGGALATLAGADLRNNGYDVDLYTYGAPRVGNRAFAEFITVQTGGTLYRVTHTNDVVPRLPPRQFGYSHPSPEYWIKSGTLVPVRRRDIVKIEGIDATGGNNQNNAPDIPAHLWYFGAIGTCI

SEQ ID NO: 10185 - protein, 269 aa, Thermomyces lanuginosus
DVSADLLNQFKLFAQYSAAAYCGRNNDAPAGTNITCSANACPLVEAADQTFLYSFENSGVGDVTGFLAVDNTNKLIVLSFRGSRSIENWITNLNFDLVDINDICSGCRGHDGFTSSWRSVADTLRQAVDDAVAAHPDYKVVVTGHSLGGALATLAGADLRNNGYDVDLYTYGAPRVGNRAFAEFITVQTGGTLYRVTHTNDVVPRLPPRQFGYSHPSPEYWIKSGTLVPVRRRDIVKIEGIDATGGNNQNNAPDIPAHLWYFGAIGTCI

SEQ ID NO: 10186 - protein, 269 aa, Thermomyces lanuginosus
DVSADLLNQFKLFAQYSAAAYCGRNNDAPAGTNITCSANACPLVEAADATFLYSFENSGVGDVTGFLAVDNTNKLIVLSFRGSRSIENWITNLNFDLVDINDICSGCRGHDGFTSSWRSVADTLRQAVDDAVAAHPDYKVVVTGHSLGGALATLAGADLRNNGYDVDLYTYGAPRVGNRAFAEFITVQTGGTLYRVTHTNDVVPRLPPRQFGYSHPSPEYWIKSGTLVPVRNRDIVKIEGIDATGGNNQNNAPDIPAHLWYFGAIGTCI

SEQ ID NO: 10187 - protein, 269 aa, Thermomyces lanuginosus
DVSADLLNQFKLFAQYSAAAYCGRNNDAPAGTNITCSANACPLVEARDATFLYSFENSGVGDVTGFLAVDNTNKLIVLSFRGSRSIENWITNLNFDLVDINDICSGCRGHDGFTSSWRSVADTLRQAVDDAVAAHPDYKVVVTGHSLGGALATLAGADLRNNGYDVDLYTYGAPRVGNRAFAEFITVQTGGTLYRVTHTNDVVPRLPPRQFGYSHPSPEYWIKSGTLVPVRRRDIVKIEGIDATGGNNQNNAPDIPAHLWYFGAIGTCI

SEQ ID NO: 10188 - protein, 269 aa, Thermomyces lanuginosus
DVSADLLNQFKLFAQYSAAAYCGRNNDAPAGTVITCSANACPLVEAADATFLYSFENSGVGDVTGFLAVDNTNKLIVLSFRGSRSIENWITNLNFDLVDINDICSGCRGHDGFTSSWRSVADTLRQAVDDAVAAHPDYKVVVTGHSLGGALATLAGADLRNNGYDVDLYTYGAPRVGNRAFAEFITVQTGGTLYRVTHTNDVVPRLPPRQFGYSHPSPEYWIKSGTLVPVRRRDIVKIEGIDATGGNNQNNAPDIPAHLWYFGAIGTCI

SEQ ID NO: 10189 - protein, 269 aa, Thermomyces lanuginosus
DVSADLLNQFKLFAQYSAAAYCGRNKDAPAGTNITCSANACPLVEAADATFLYSFENSGVGDVTGFLAVDNTNKLIVLSFRGSRSIENWITNLNFDLVDINDICSGCRGHDGFTSSWRSVADTLRQAVDDAVAAHPDYKVVVTGHSLGGALATLAGADLRNNGYDVDLYTYGAPRVGNRAFAEFITVQTGGTLYRVTHTNDVVPRLPPRQFGYSHPSPEYWIKSGTLVPVRRRDIVKIEGIDATGGNNQNNAPDIPAHLWYFGAIGTCI

SEQ ID NO: 10190 - protein, 269 aa, Thermomyces lanuginosus
DVSADLLNQFKLFAQYSAAAYCGRNNDAPAGTNITCSANACPLVEAADATPLYSFENSGVGDVTGFLAVDNTNKLIVLSFRGSRSIENWITNLNFDLVDINDICSGCRGHDGFTSSWRSVADTLRQAVDDAVAAHPDYKVVVTGHSLGGALATLAGADLRNNGYDVDLYTYGAPRVGNRAFAEFITVQTGGTLYRVTHTNDVVPRLPPRQFGYSHPSPEYWIKSGTLVPVRRRDIVKIEGIDATGGNNQNNAPDIPAHLWYFGAIGTCI

SEQ ID NO: 10191 - protein, 269 aa, Thermomyces lanuginosus
DVSADLLNQFKLFAQYSAAAYCGRNNDAPAGTNITCSANACPLVEAADATFLYSFENSGVGDGTGFLAVDNTNKLIVLSFRGSRSIENWITNLNFDLVDINDICSGCRGHDGFTSSWRSVADTLRQAVDDAVAAHPDYKVVVTGHSLGGALATLAGADLRNNGYDVDLYTYGAPRVGNRAFAEFITVQTGGTLYRVTHTNDVVPRLPPRQFGYSHPSPEYWIKSGTLVPVRRRDIVKIEGIDATGGNNQNNAPDIPAHLWYFGAIGTCI

SEQ ID NO: 10192 - protein, 269 aa, Thermomyces lanuginosus
DVSADLLNQFKLFAQYSAAAYCGRNNDAPAGTNITCSANACPLVEAADATFLYSFENSGMGDVTGFLAVDNTNKLIVLSFRGSRSIENWITNLNFDLVDINDICSGCRGHDGFTSSWRSVADTLRQAVDDAVAAHPDYKVVVTGHSLGGALATLAGADLRNNGYDVDLYTYGAPRVGNRAFAEFITVQTGGTLYRVTHTNDVVPRLPPRQFGYSHPSPEYWIKSGTVPPVRRRDIVKIEGIDATGGNNQNNAPDIPAHLWYFGIIGTCI

SEQ ID NO: 10193 - protein, 269 aa, Thermomyces lanuginosus
DVSRDLLNQFKLFAQYSAAAYCGRNNDAPAGTNITCSANACPLVEAADATFLYSFENSGVGDVTGFLAVDNTNKLIVLSFRGSRSIENWVTNLEFLLVDIPDICSGCRGHDGFTSSWRSVADTLRQAVDDAVAAHPDYKVVVTGHSLGGALATLAGADLRNNGYDVDLYTYGAPRVGNRAFAEFITVQTGGTLYRVTHTNDVVPRLPPRQFGYSHPSPEYWIKSGTLVPVRRNDIVKIEGIDATGGNNQNNAPDIPAHLWYFGAIGTCI

SEQ ID NO: 10194 - protein, 269 aa, Thermomyces lanuginosus
DVSADLLNQFKLFAQYSAAAYCGRNNDAPAGTNITCSANACPLVEAADATFLYSFENSGVGDVTGFLAVDNTNKLIVLSFRGSRSIENWITNLNFDLVDINDICSGCQGHDGFTSSWRSVADTLRQAVDDAVAAHPDYKVVVTGHSLGGALATLAGADLRNNGYDVDLYTYGAPRVGNEAFAEFITVQTGGTLYRVTHTNDVVPRLPPRQFEYSHPSPEYWIKSGTLVPVRRRDIVKIEGIDATGGNNQNNTPDIPAHLWYFGLIGTCI

SEQ ID NO: 10195 - protein, 269 aa, Thermomyces lanuginosus
DVSADLLNQFKLFAQYSAAAYCGRNNDAPAGTQITCSANACPLVEAADATFLYSFENSGMGDVTGFLAVDNTNKLIVLSFRGSRSIENWITNLNFDLVDINDICSGCRGHDGFTSSWRSVADTLRQAVDDAVAAHPDYKVVVTGHSLGGALATLAGADLRNNNYSVDLYTYGAPRVGNRAFAEFITVQTGGTLYRVTHTNDVVPRLPPRQFGYSHPSPEYWIKSGTGVPVRRRDIVKIEGIDATGGNNQNNTPDIPAHLWYFGLIGTCI

SEQ ID NO: 10196 - protein, 268 aa, Thermomyces lanuginosus
VSADLLNQFKLFAQYSAAAYCGRNNDAPAGTNITCSANACPLVEAADATFLYSFENSGVGDVTGFLAVDNTNKLIVLSFRGSRSIENWITNLNFDLVDINDICSGCRGHDGFTSSWRSVADTLRQAVDDAVAAHPDYKVVVTGHSLGGALATLAGADLRNNGYDVDLYTYGAPRVGNRAFAEFITVQTGGTLYRVTHTNDCVPRLPPRQFGYSHPSPEYWIKSGTLVPVRRCDIVKCEGIDATCGNNQNNACDIPAHLWYFGAIGTCI

SEQ ID NO: 10197 - protein, 290 aa, Unidentified
MRSSLVLFFISAWTALARPVRREVSQDLLDLFNLFAQYSAAAYCAENNDAPVGSNVTCSENVCPKVEEADATFLYSFEDSGLGDVTGLLALDNTNKLIVLAFRGSRSIENWIGNLIVGLRDIDDICSGCEGHTGFVASWKSVANTLRGQVENAVKEHPDYRVVFTGHSLGGALATIAGAALRGNGYNIDVFSYGAPRVGNRAFAEFLTAQTGGTLYRITHTNDIVPRLPPRDWGYSHSSPEYWITSGNDAPVTANDIVKVEGIDSTDGNNQPNIPDIPSHLWYFGAIAEC

SEQ ID NO: 10198 - protein, 267 aa, Thermomyces lanuginosus
VSHDLFXHFXLFAQYSAAAYCEKNNIATXGTNITCKXXACPEVEKADATFLYSFENSGVRDRTGFLALDXTYKLTVLSFRGSRSXHNWIXNLQXXLKEIQDICSGCRGHEAFILSXRSVANTLRLKAEHAVREDHDYRVXFTGHSLGGALATXVRADLRXXXYDIDMFSYGAPRVGNRAFAEFMTVQTXGTLYRITHTNDIVPILPPREFGYSHSSPEYWIKSGTLVPVTRNDIVKIELIDATGANNQPXIPDIPAHLWYFGLIGTC

SEQ ID NO: 10199 - protein, 290 aa, Thermomyces dupontii
MRGFLVLFFISAWTALARPVRREVSQDLLDLFNLFAQYSAAAYCAENNDAPVGSNVTCSENVCPKVEEADATFLYSFEDSGLGDVTGLLALDNTNKLIVLAFRGSRSIENWIGNLIVGLRDIDDICSGCEGHTGFVASWKSVANTLRGQVENAVKEHPDYRVVFTGHSLGGALATIAGAALRGNGYNIDVFSYGAPRVGNRAFAEFLTAQTGGTLYRITHTNDIVPRLPPRDWGYSHSSPEYWITSGNDAPVTANDIVKVEGIDSTDGNNQPNIPDIPSHLWYFGAIAEC

SEQ ID NO: 10200 - protein, 272 aa, Unidentified
PVRREVSQDLLDLFNLFAQYSAAAYCAENNDAPVGSNVTCSENVCPKVEEADATFLYSFEDSGLGDVTGLLALDNTNKLIVLAFRGSRSIENWIGNLIVGLRDIDDICSGCEGHTGFVASWKSVANTLRGQVENAVKEHPDYRVVFTGHSLGGALATIAGAALRGNGYNIDVFSYGAPRVGNRAFAEFLTAQTGGTLYRITHTNDIVPRLPPRDWGYSHSSPEYWITSGNDAPVTANDIVKVEGIDSTDGNNQPNIPDIPSHLWYFGAIAEC

SEQ ID NO: 10201 - protein, 268 aa, Unidentified
EVSQDLLDLFNLFAQYSAAAYCAENNDAPVGSNVTCSENVCPKVEEADATFLYSFEDSGLGDVTGLLALDNTNKLIVLAFRGSRSIENWIGNLIVGLRDIDDICSGCEGHTGFVASWKSVANTLRGQVENAVKEHPDYRVVFTGHSLGGALATIAGAALRGNGYNIDVFSYGAPRVGNRAFAEFLTAQTGGTLYRITHTNDIVPRLPPRDWGYSHSSPEYWITSGNDAPVTANDIVKVEGIDSTDGNNQPNIPDIPSHLWYFGAIAEC

SEQ ID NO: 10202 - protein, 290 aa, Thermomyces ibadanensis
MRSSLVLFFLSAWTALARPVRRAVPQDLLDQFELFSQYSAAAYCAANNHAPVGSDVTCSENVCPEVDAADATFLYSFEDSGLGDVTGLLALDNTNKLIVLSFRGSRSVENWIANLAADLTEISDICSGCEGHVGFVTSWRSVADTIREQVQNAVNEHPDYRVVFTGHSLGGALATIAAAALRGNGYNIDVFSYGAPRVGNRAFAEFLTAQTGGTLYRITHTNDIVPRLPPRDWGYSHSSPEYWVTSGNDVPVTANDITVVEGIDSTDGNNQGNIPDIPSHLWYFGPISEC

SEQ ID NO: 10203 - protein, 272 aa, Thermomyces lanuginosus
PVRRAVPQDLLDQFELFSQYSAAAYCAANNHAPVGSDVTCSENVCPEVDAADATFLYSFEDSGLGDVTGLLALDNTNKLIVLSFRGTRSVENWIANLNADLTEISDICSGCEGHDGFVTSWRSVADTIREQVQNAVNEHPDYRVVFTGHSLGGALATIAAAALRGNGYNIDVFSYGAPRVGNRAFAEFLTAQTGGTLYRITHTNDIVPRLPPRDWGYSHSSPEYWVTSGNDVPVTANDITVVEGIDSTDGNNQGNIPDIPSHLWYFGPISEC

SEQ ID NO: 10204 - protein, 272 aa, Thermomyces lanuginosus
PVRRAVPQDLLDQFELFSQYSAAAYCAANNHAPVGSDVTCSENVCPEVDAADATFLYSFEDSGLGDVTGLLALDNTNKLIVLSFRGSRSVENWIVNLAADLTEISDICSGCEGHVGFVTSWRSVADTIRERVQNAVNEHPDYRVVFTGHSLGGALATIAAAALRGNGYNIDVFSYGAPRVGNRAFAEFLTAQTGGTLYRITHTNDIVPRLPPRDWGYSHSSPEYWVTSGNDVPVTANDITVVEGIDSTDGNNQGNIPDIPSHLWYFGPISEC

SEQ ID NO: 10205 - protein, 272 aa, Thermomyces lanuginosus
PVRRAVPQDLLDQFELFSQYSAAAYCAANNHAPVGSDVTCSENVCPEVDAADATFLYSFEDSGLGDVTGLLALDNTNKLIVLSFRGTRSVENWIANLNADLTEISDICSGCEGHVGFVTSWRSVADTIREQVQNAVNEHPDYRVVFTGHSLGGALATIAAAALRGNGYNIDVFSYGAPRVGNRAFAEFLTAQTGGTLYRITHTNDIVPRLPPRDWGYSHSSPEYWVTSGNDVPVTANDITVVEGIDSTDGNNQGNIPDIPSHLWYFGPISEC

SEQ ID NO: 10206 - protein, 272 aa, Thermomyces lanuginosus
PVRRAVPQDLLDQFELFSQYSAAAYCAANNHAPVGSDVTCSENVCPEVDAADATFLYSFEDLGLGDVTGLLALDNTNKLIVLSFRGTRSVENWIANLNADLTEISDICSGCEGHDGFVTSWRSVADTIREQVQNAVNEHPDYRVVFTGHSLGGALATIAAAALRGNGYNIDVFSYGAPRVGNRAFAEFLTAQTGGTLYRITHTNDIVPRLPPRDWGYSHSSPEYWVTSGNAVPVTANDITVVEGIDSTDGNNQGNIPDIPSHLWYFGPISEC

SEQ ID NO: 10207 - protein, 272 aa, Thermomyces lanuginosus
PVRRAVPQDLLDQFELFSQYSAAAYCAANNHAPVGSDVTCSENVCPEVDAADATFLYSFEDSGLGDVTGLLALDNTNKLIVLSFRGSRSVENWIANLAADLTEISDICSGCEGHVGFVTSWRSVADTIREQVQNAVNEHPDYRVVFTGHSLGGALATIAAAALRGNGYNIDVFSYGAPRVGNRAFAEFLTAQTGGTLYRITHTNDIVPRLPPRDWGYSHSSPEYWVTSGNDVPVTANDITVVEGIDSTDGNNQGNIPDIPSHLWYFGPISEC

SEQ ID NO: 10208 - protein, 272 aa, Thermomyces lanuginosus
PVRRAVPQDLLDQFELFSQYSAAAYCAANNHAPVGSDVTCSENVCPEVDAADATFLYSFEDMGLGDVTGLLALDNTNKLIVLSFRGTRSVENWIANLNADLTEISDICSGCEGHDGFVTSWRSVADTIREQVQNAVNEHPDYRVVFTGHSLGGALATIAAAALRGNGYNIDVFSYGAPRVGNRAFAEFLTAQTGGTLYRITHTNDIVPRLPPRDWGYSHSSPEYWVTSGNAVPVTANDITVVEGIDSTDGNNQGNIPDIPSHLWYFGPISEC

SEQ ID NO: 10209 - protein, 272 aa, Thermomyces lanuginosus
PVRRAVPQDLLDQFELFSQYSAAAYCAANNHAPVGSDVTCSENVCPEVDAADATFLYSFEDLGLGDVTGLLALDNTNKLIVLSFRGTRSVENWIANLNADLTEISDICSGCEGHDGFVTSWRSVADTIREQVQNAVNEHPDYRVVFTGHSLGGALATIAAAALRGNGYNIDVFSYGAPRVGNRAFAEFLTAQTGGTLYRITHTNDIVPRLPPRDWGYSHSSPEYWVTSGNDVPVTANDITVVEGIDSTDGNNQGNIPDIPSHLWYFGPISEC

SEQ ID NO: 10210 - protein, 272 aa, Thermomyces lanuginosus
PVRRAVPQDLLDQFELFSQYSAAAYCAANNHAPVGSDVTCSENVCPEVDAADATFLYSFEDSGLGDVTGLLALDNTNKLIVLSFRGSRSVENWIANLAADLTEISDICSGCEGHVGFVTSWRSVADTIREQVQNAVNEHPDYRVVFTGHSLGGALATIAAAALRGNGYNILVFSYGAPRVGNRAFAEFLTAQTGGTLYRITHTNDIVPRLPPRDWGYSHSSPEYWVTSGNDVPVTANDITVVEGIDSTDGNNQGNIPDIPSHLWYFGPISEC

SEQ ID NO: 10211 - protein, 272 aa, Thermomyces lanuginosus
PVRRAVPQDLLDQFELFSQYSAAAYCAANNHAPVGSDVTCSENVCPEVDAADATFLYSFEDSGLGDVTGLLALDNTNKLIVLSFRGTRSVENWIANLAADLTEISDICSGCEGHVGFVTSWRSVADTIREQVQNAVNEHPDYRVVFTGHSLGGALATIAAAALRGNGYNIDVFSYGAPRVGNRAFAEFLTAQTGGTLYRITHTNDIVPRLPPRDWGYSHSSPEYWVTSGNDVPVTANDITVVEGIDSTDGNNQGNIPDIPSHLWYFGPISEC

SEQ ID NO: 10212 - protein, 267 aa, Thermomyces ibadanensis
VPQDLLDQFELFSQYSAAAYCAANNHAPVGSDVTCSENVCPEVDAADATFLYSFEDSGLGDVTGLLALDNTNKLIVLSFRGSRSVENWIANLAADLTGISDICSGCEGHVGFVTSWRSVADTIREQVQNAVNEHPDYRVVFTGHSLGGALATIAAAALRGNGYNIDVFSYGAPRVGNRAFAEFLTAQTGGTLYRITHTNDIVPRLPPRDWGYSHSSPEYWVTSGNDVPVTANDITVVEGIDSTDGNNQGNTPDIPSHLWYFGPISEC

SEQ ID NO: 10213 - protein, 267 aa, Thermomyces lanuginosus
VPQDLLDQFELFSQYSAAAYCAANNHAPVGSDVTCSENVCPEVDAADATFLYSFEDSGLGDVTGLLALDNTNKLIVLSFRGSRSVENWIVNLAADLTEISDICSGCEGHVGFVTSWRSVADTIRERVQNAVNEHPDYRVVFTGHSLGGALATIAAAALRGNGYNIDVFSYGAPRVGNRAFAEFLTAQTGGTLYRITHTNDIVPRLPPRDWGYSHSSPEYWVTSGNDVPVTANDITVVEGIDSTDGNNQGNIPDIPSHLWYFGPISEC

SEQ ID NO: 10214 - protein, 267 aa, Thermomyces lanuginosus
VPQDLLDQFELFSQYSAAAYCAANNHAPVGSDVTCSENVCPEVDAADATFLYSFEDSGLGDVTGLLALDNTNKLIVLSFRGSRSVENWIANLAADLTEISDICSGCEGHVGFVTSWRSVADTIREQVQNAVNEHPDYRVVFTGHSLGGALATIAAAALRGNGYNIDVFSYGAPRVGNRAFAEFLTAQTGGTLYRITHTNDIVPRLPPRDWGYSHSSPEYWVTSGNDVPVTANDITVVEGIDSTDGNNQGNIPDIPSHLWYFGPISEC

SEQ ID NO: 10215 - protein, 267 aa, Thermomyces lanuginosus
VPQDLLDQFELFSQYSAAAYCAANNHAPVGSDVTCSENVCPEVDAADATFLYSFEDSGLGDVTGLLALDNTNKLIVLSFRGTRSVENWIANLAADLTEISDICSGCEGHVGFVTSWRSVADTIREQVQNAVNEHPDYRVVFTGHSLGGALATIAAAALRGNGYNIDVFSYGAPRVGNRAFAEFLTAQTGGTLYRITHTNDIVPRLPPRDWGYSHSSPEYWVTSGNDVPVTANDITVVEGIDSTDGNNQGNIPDIPSHLWYFGPISEC

SEQ ID NO: 10216 - protein, 267 aa, Thermomyces lanuginosus
VPQDLLDQFELFSQYSAAAYCAANNHAPVGSDVTCSENVCPEVDAADATFLYSFEDSGLGDVTGLLALDNTNKLIVLSFRGTRSVENWIANLNADLTEISDICSGCEGHVGFVTSWRSVADTIREQVQNAVNEHPDYRVVFTGHSLGGALATIAAAALRGNGYNIDVFSYGAPRVGNRAFAEFLTAQTGGTLYRITHTNDIVPRLPPRDWGYSHSSPEYWVTSGNDVPVTANDITVVEGIDSTDGNNQGNIPDIPSHLWYFGPISEC

SEQ ID NO: 10217 - protein, 267 aa, Thermomyces lanuginosus
VPQDLLDQFELFSQYSAAAYCAANNHAPVGSDVTCSENVCPEVDAADATFLYSFEDSGLGDVTGLLALDNTNKLIVLSFRGTRSVENWIANLNADLTEISDICSGCEGHDGFVTSWRSVADTIREQVQNAVNEHPDYRVVFTGHSLGGALATIAAAALRGNGYNIDVFSYGAPRVGNRAFAEFLTAQTGGTLYRITHTNDIVPRLPPRDWGYSHSSPEYWVTSGNDVPVTANDITVVEGIDSTDGNNQGNIPDIPSHLWYFGPISEC

SEQ ID NO: 10218 - protein, 267 aa, Thermomyces lanuginosus
VPQDLLDQFELFSQYSAAAYCAANNHAPVGSDVTCSENVCPEVDAADATFLYSFEDSGLGDVTGLLALDNTNKLIVLSFRGSRSVENWIANLAADLTEISDICSGCEGHVGFVTSWRSVADTIREQVQNAVNEHPDYRVVFTGHSLGGALATIAAAALRGNGYNILVFSYGAPRVGNRAFAEFLTAQTGGTLYRITHTNDIVPRLPPRDWGYSHSSPEYWVTSGNDVPVTANDITVVEGIDSTDGNNQGNIPDIPSHLWYFGPISEC

SEQ ID NO: 10219 - protein, 267 aa, Thermomyces lanuginosus
VPQDLLDQFELFSQYSAAAYCAANNHAPVGSDVTCSENVCPEVDAADATFLYSFEDLGLGDVTGLLALDNTNKLIVLSFRGTRSVENWIANLNADLTEISDICSGCEGHDGFVTSWRSVADTIREQVQNAVNEHPDYRVVFTGHSLGGALATIAAAALRGNGYNIDVFSYGAPRVGNRAFAEFLTAQTGGTLYRITHTNDIVPRLPPRDWGYSHSSPEYWVTSGNAVPVTANDITVVEGIDSTDGNNQGNIPDIPSHLWYFGPISEC

SEQ ID NO: 10220 - protein, 267 aa, Thermomyces lanuginosus
VPQDLLDQFELFSQYSAAAYCAANNHAPVGSDVTCSENVCPEVDAADATFLYSFEDLGLGDVTGLLALDNTNKLIVLSFRGTRSVENWIANLNADLTEISDICSGCEGHDGFVTSWRSVADTIREQVQNAVNEHPDYRVVFTGHSLGGALATIAAAALRGNGYNIDVFSYGAPRVGNRAFAEFLTAQTGGTLYRITHTNDIVPRLPPRDWGYSHSSPEYWVTSGNDVPVTANDITVVEGIDSTDGNNQGNIPDIPSHLWYFGPISEC

SEQ ID NO: 10221 - protein, 267 aa, Thermomyces lanuginosus
VPQDLLDQFELFSQYSAAAYCAANNHAPVGSDVTCSENVCPEVDAADATFLYSFEDMGLGDVTGLLALDNTNKLIVLSFRGTRSVENWIANLNADLTEISDICSGCEGHDGFVTSWRSVADTIREQVQNAVNEHPDYRVVFTGHSLGGALATIAAAALRGNGYNIDVFSYGAPRVGNRAFAEFLTAQTGGTLYRITHTNDIVPRLPPRDWGYSHSSPEYWVTSGNAVPVTANDITVVEGIDSTDGNNQGNIPDIPSHLWYFGPISEC

SEQ ID NO: 10222 - protein, 260 aa, Aspergillus niger
PMLQSRATSDPAEWTELHRAAQLSSAAYTGCTGSAFDVTITKQINELVTDTQGFIGYSTEKKRITVAMRGSTSATDIANDVDTTLVEPTLSGVNFPSGAKMMHGIYSPWSSVHDDVISEVKSLVEQYPDYTIESTGHSLGGSLTYISYIALAQNFPGKTIISNALAAYPIGNEAFANFGASQNGTLNRGNNADDGVPNMYVMWPWDFVHYGTEYYSSGTQASTVKCSGERDTSCSAGNGQVGVTAGHFSNFGIAMGMAGC

SEQ ID NO: 10223 - protein, 195 aa, Remersonia thermophila
QLNTIRNDLERGNANECPEAILIFARGTTEPGNMGITTGPILAGALEDSFRRNIWIQGVGGAYTASTAPNFLPRGSSEGAINEAKRLFGLAQSKCPDTPVVAGGYSQGAALIAAAVSDLRGEAQEQVKGVVLFGYTKNRQNDGRIPGYPADRTKVFCNVGDAVCDGTLIITPAHFLYNIEARGEAARFLTGQARA

SEQ ID NO: 10224 - protein, 277 aa, Unidentified
APAPVLRRDVSSSVLSELDLFAQYSAAAYCSSNIGSPGTKLTCSVGNCPRVEAADTETLIEFNESSSFGDVTGYIAVDRTNSLLVLAFRGSSTVSNWEADLDFPLTDASSLCSGCEIHSGFWAAWQTVQASITSTLESAIASYPGYTLVFTGHSYGAALAAIAATTLRNAGYTIQLYDYGQPRLGNLALAQYITAQTQGANYRVTHTDDIVPKLPPELFGYHHFSPEYWITSGDNVTVTTSDVQVVTGIDSTAGNDGTLLDSTSAHDWYIVYIDGCD

SEQ ID NO: 10225 - protein, 296 aa, Evansstolkia leycettana; identical to SEQ ID NO: 26

SEQ ID NO: 10226 - protein, 269 aa, Unidentified
DVSSSVLSELDLFAQYSAAAYCSSNIGSPGTKLTCSVGNCPRVEAADTETLIEFNESSSFGDVTGYIAVDRTNSLLVLAFRGSSTVSNWEADLDFPLTDASSLCSGCEIHSGFWAAWQTVQASITSTLESAIASYPGYTLVFTGHSYGAALAAIAATTLRNAGYTIQLYDYGQPRLGNLALAQYITAQTQGANYRVTHTDDIVPKLPPELFGYHHFSPEYWITSGDNVTVTTSDVQVVTGIDSTAGNDGTLLDSTSAHDWYIVYIDGCD

SEQ ID NO: 10227 - protein, 180 aa, Unidentified
EADLDFPLTDASSLCSGCEIHSGFWAAWQTVQASITSTLESAIASYPGYTLVFTGHSYGAALAAIAATTLRNAGYTIQLYDYGQPRLGNLALAQYITAQTQGANYRVTHTDDIVPKLPPELFGYHHFSPEYWITSGDNVTVTTSDVQVVTGIDSTAGNDGTLLDSTSAHDWYIVYIDGCD

SEQ ID NO: 10228 - protein, 276 aa, Unidentified
APAPILRRDVSASVLNELDLFAQYSAAAYCSSNIGSTGNKLMCNVGNCPRVEASDTVTIDEFNESASYGDVAGYIAVDNTNQLLVLSFRGSSSLSNWIANIDVDLTDASSLCSGCEVHSGFWSAWQTVQGTITSKLESARASYPGYTLVFTGHSYGAALAGLAATTLRDAGWTIQLYNYGQPRLGNLALAQYITSQTQGSNYRVTHTDDIVPKLPPEFLGYDHYSPEYWITSGDNVTVTTSDVQVIEGIDSVAGNDGTSDDSTEAHQWYFIYISEC

SEQ ID NO: 10229 - protein, 277 aa, Penicilium megasporum
PVSVLRRDEDVSASVLSELDFFSQYSAAAYCSTNINSAGTKLTCSEGICPLVENADTETLDEFDESASYGDVAGFIAVDRTNELLVLSFRGSASFSNWLANIDLFLDDASSVCSGCEVHSGFWDAWQTVEGQITTALGSAMETYPGYTLVFTGHSYGAALAAIAATIFRNSGYTVELYNYGQPRIGNLALAEYITNQNKGGNYRVTHTDDIVPKVPPKITGYHHASPEYWITSGNNVTVTTSDVQLITGVDSTSGNDGTSDDSVEAHRWYFVHISMC

SEQ ID NO: 10230 - protein, 276 aa, Aspergillus wentii
APSPVRRDVDSSVLNNLDLFAQYSAASYCLENLNSSNTKLECSVGNCPLVEAASTVTLDEFDESSSFGDVTGFIAADETNKLLVLSFRGSSDIANWIADLDFGLTDGSDLCSGCKVHSGFWEAWGTVSDNITSIIESATAKYPNYELAFTGHSYGAALAAVAAVVFRNSGYTVQLYNYGQPRIGNLALADYITNVTDKGDNYRVTHTDDIVPKLPPKLLGYHHASPEYWITSGNNVTVTTADVDVVTGVDSTDGNDGTTADSRTAHRWYFGYISEC

SEQ ID NO: 10231 - protein, 276 aa, Aspergillus niger
APAPMQRRDISSTVLDNIDLFAQYSAAAYCSSNIESTGTTLTCDVGNCPLVEAAGATTIDEFDDSSSYGDPTGFIAVDPTNELIVLSFRGSSDLSNWIADLDFGLTSVSSICDGCEMHKGFYEAWEVIADTITSKVEAAVSSYPDYTLVFTGHSYGAALAAVAATVLRNAGYTLDLYNFGQPRIGNLALADYITDQNMGSNYRVTHTDDIVPKLPPELLGYHHFSPEYWITSGNDVTVTTSDVTEVVGVDSTAGNDGTLLDSTTAHRWYTIYISEC

SEQ ID NO: 10232 - protein, 276 aa, Aspergillus niger
APAPMQRRDISSTVLDNIDLFAQYSAAAYCSSNIESTGTTLTCDVGNCPLVEAAGATTIDEFDDTSSYGDPTGFIAVDPTNELIVLSFRGSSDLSNWIADLDFGLTSVSSICDGCEMHKGFYEAWEVIADTITSKVEAAVSSYPDYTLVFTGHSYGAALAAVAATVLRNAGYTLDLYNFGQPRIGNLALADYITGQNMGSNYRVTHTDDIVPKLPPELLGYHHFSPEYWITSGNDVTVTTSDVTEVVGVDSTAGNDGTLLDSTTAHRWYTIYISEC

SEQ ID NO: 10233 - protein, 268 aa, Aspergillus niger
DISSTVLDNIDLFAQYSAAAYCSSNIESTGTTLTCDVGNCPLVEAAGATTIDEFDDTSSYGDPTGFIAVDPTNELIVLSFRGSSDLSNWIADLDFGLTSVSSICDGCEMHKGFYEAWEVIADTITSKVEAAVSSYPDYTLVFTGHSYGAALAAVAATVLRNAGYTLDLYNFGQPRIGNLALADYITGQNMGSNYRVTHTDDIVPKLPPELLGYHHFSPEYWITSGNDVTVTTSDVTEVVGVDSTAGNDGTLLDSTTAHRWYTIYISEC

SEQ ID NO: 10234 - protein, 289 aa, Aspergillus niger
AVAALSVLAHAAPAPAPMQRRDISSTVLDNIDLFAQYSAAAYCSSNIESTGTTLTCDVGNCPLVEAAGATTIDEFDDSSSYGDPTGFIAVDPTNELIVLSFRGSSDLSNWIADLDFGLTSVSSICDGCEMHKGFYEAWEVIADTITSKVEAAVSSYPDYTLVFTGHSYGAALAAVAATVLRNAGYTLDLYNFGQPRIGNLALADYITDQNMGSNYRVTHTDDIVPKLPPELLGYHHFSPEYWITSGNDVTVTTSDVTEVVGVDSTAGNDGTLLDSTTAHRWYTIYISEC

SEQ ID NO: 10235 - protein, 276 aa, Aspergillus niger
APAPMQRRDISSTVLDNIDLFAQYSAAAYCSSNIESTGTTLTCDVGNCPLVEAAGATTIDEFDDTSSYGDPTGFIAVDPTNELIVLSFRGSSDLSNWIADLDFGLTSVSSICDGCEMHKGFYEAWEVIADTITSKVEAAVSSYPDYTLVFTGHSYGAALAAVAATVLRNAGYTLDLYNFGQPRIGNLALADYITDQNMGSNYRVTHTDDIVPKLPPELLGYHHFSPEYWITSGNDVTVTTSDVTEVVGVDSTDGNDGTLLDSTTAHRWYTIYISEC

SEQ ID NO: 10236 - protein, 276 aa, Aspergillus niger
APAPMQRRDISSTVLDNIDLFAQYSAAAYCSSNIESTGTTLTCDVGNCPLVEAAGATTIDEFDDTSSYGDPTGFIAVDPTNELIVLSFRGSSDISNWIADLDFGLTSVSSICDGCEMHKGFYEAWEVIADTITSKVEAAVSSYPDYTLVFTGHSYGAALAAVAATVLRNAGYTLDLYNFGQPRIGNLALADYITGQNMGSNYRVTHTDDIVPKLPPKLLGYHHFSPEYWITSGNDVTVTTSDVTEVVGVDSTAGNDGTLLDSTTAHRWYTIYISEC

SEQ ID NO: 10237 - protein, 268 aa, Aspergillus niger
DISSTVLDNIDLFAQYSAAAYCSSNIESTGTTLTCDVGNCPLVEAAGATTIDEFDDTSSYGDPTGFIAVDPTNELIVLSFRGSSDLSNWIADLDFGLTSVSSICDGCEMHKGFYEAWEVIADTITSKVEAAVSSYPDYTLVFTGHSYGAALAAVAATVLRNAGYTLDLYNFGQPRIGNLALADYITGQNMGSNYRVTHTDDIVPKLPPELLGYHHFSPEYWITSGNDVTVTTSDVTEVVGVDSTAGNDGTLLDSITAHRWYTIYISEC

SEQ ID NO: 10238 - protein, 289 aa, Aspergillus niger
AVAALSVLAHAAPAPAPMQRRDISSTVLDNIDLFAQYSAAAYCSSNIESTGTTLTCDVGNCPLVEAAGATTIDEFDDSSSYGDPTGFIAVDPTNELIVLSFRGSSDLSNWIADLDFGLTSVSSICDGCEMHKGFYEAWEVIADTITSKVEAAVSSYPDYTLVFTGHSYGAALAAVAATVLRNAGYTLDLYNFGQPRIGNLALADYITDQNMGSNYRVTHTDDIVPKLPPELLGYHHFSPEYWITSGNDVTVTTSDVTEVVGVDSTDGNDGTLLDSTTAHRWYTIYISEC

SEQ ID NO: 10239 - protein, 289 aa, unidentified
AVAALSVLAHAAPAPAPMQRRDISSTVLDNIDLFAQYSAAAYCSSNIESTGTTLTCDVGNCPLVEAAGATTIDEFDDTSSYGDPTGFIAVDPTNELIVLSFRGSSDLSNWIADLDFGLTSVSSICDGCEMHKGFYEAWEVIADTITSKVEAAVSSYPDYTLVFTGHSYGAALAAVAATVLRNAGYTLDLYNFGQPRIGNLALADYITGQNMGSNYRVTHTDDIVPKLPPELLGYHHFSPEYWITSGNDVTVTTSDVTEVVGVDSTAGNDGTLLDSTTAHRWYTIYISEC

SEQ ID NO: 10240 - protein, 289 aa, Aspergillus niger
AVAALSVLAHAAPAPAPMQRRDISSTVLDNIDLFAQYSAAAYCSSNIESTGTTLTCDVGNCPLVEAAGATTIDEFDDSSSYGDPTGFIAVDPTNELIVLSFRGSSDLSNWIADLDFGLTSVSSICDGCEMHKGFYEAWEVIADTITSKVEAAVSSYPDYTLVFTGHSYGAALAAVAATVLRNAGYTLDLYNFGQPRIGNLALADYITDQNMGGNYRVTHTDDIVPKLPPELLGYHHFSPEYWITSGNDVTVTTSDVTEVVGVDSTDGNDGTLLDSTTAHRWYTIYISEC

SEQ ID NO: 10241 - protein, 276 aa, Aspergillus niger
APAPMQRRDISSTVLDNIDLFAQYSAAAYCSSNIESTGTTLTCDVGNCPLVEAAGATTIDEFDDTSSYGDPTGFIAVDPTNELIVLSFRGSSDISNWIADLDFGLTSVSSICDGCEMHKGFYEAWEVIADTITSKVEAAVSSYPDYTLVFTGHSYGAALAAVAATVLRNAGYTLDLYNFGQPRIGNLALADYITDQNMGSNYRVTHTDDIVPKLPPKLLGYHHFSPEYWITSGNDVTVTTSDVTEVVGVDSTDGNDGTLLDSTTAHRWYTIYISEC

SEQ ID NO: 10242 - protein, 276 aa, Aspergillus tubingensis
APAPMQRRDISSTVLDNIDLFAQYSAAAYCSSNIESTGTTLTCDVGNCPLVEAAGATTIDEFDDSSSYGDPTGFIAVDPTNELIVLALRGSSDISNWIADLDFGLTSVSDICDGCEMHKGFYEAWEVIADTITSKVEAAVSSYPDYSIVFTGHSYGAALAAIAATVLRNAGYTLDLYNFGQPRIGNLALADYITDQNMGSNYRVTHTDDIVPKLPPKLLGYHHFSPEYWITSGNDVTVTTSDVTEVVGVDSTDGNDGTLLDSTTAHRWYTIYISEC

SEQ ID NO: 10243 - protein, 274 aa, Thermomyces lanuginosus; identical to SEQ ID NO: 23

SEQ ID NO: 10244 - protein, 273 aa, Fusarium oxysporum
EVSQDLFNQFNLFAQYSAAAYCGKNNDAPAGTNITCTGNACPEVEKADATFLYSFEDSGVGDVTGFLALDNTNKLIVLSFRGSRSIENWIANLNFWLKKINDICSGCRGHDGFTSSWRSVADTLRQKVEDAVREHPDYRVVFTGHSLGGALATVAGADLRGNGYDIDVFSYGAPRVGNRAFAEFLTVQTGGTLYRITHTNDIVPRLPPREFGYSHSSPEYWIKSGTLVPVTRNDIVKIEGIDATGGNNQPNIPDIAHLWYFQATDACNAGGFS

SEQ ID NO: 10245 - protein, 273 aa, Thermomyces lanuginosus
EVSQDLFNQFNLFAQYSAAAYCGKNNDAPAGTNITCTGNACPEVEKADATFLYSFEDSGVGDVTGFLALDNTNKLIVLSFRGSRSIENWIANLNFWLKKINDICSGCRGHDGFTSSWRSVADTLRQKVEDAVREHPDYRVVFTGHSLGGALATVAGADLRGNGYDIDVFSYGAPRVGNRAFAEFLTVQTGGTLYRITHTNDIVPRLPPREFGYSHSSPEYWIKSGTLVPVTRNDIVKIEGIDATGGNNQPNIPDIPAHLWYFQATDACNAGGF

SEQ ID NO: 10246 - protein, 273 aa, Fusarium oxysporum
EVSQDLFNQFNLFAQYSAAAYCGKNNDAPAGTNITCTGNACPEVEKADATFLYSFEDSGVGDVTGFLALDNTNKLIVLSFRGSSIENWIANLNFWLKKINDICSGCRGHDGFTSSWRSVADTLRQKVEDAVREHPDYRVVFTGHSLGGALATVAGADLRGNGYDIDVFSYGAPRVGNRAFAEFLTVQTGGTLYRITHTNDIVPRLPPREFGYSHSSPEYWIKSGTLVPVTRNDIVKIEGIDATGGNNQPNIPDIPAHLWYFQATDACNAGGFS

SEQ ID NO: 10247 - protein, 269 aa, Thermomyces lanuginosus
EVSQDLFNQFNLFAQYSAAAYCGKNNDAPAGTNITCTGNACPEVEKADATFLYSFEDSGVGDVTGFLALDNTNKLIVLSFRGSRSIENWIANLNFWLKKINDICSGCRGHDGFTSSWRSVADTLRQKVEDAVREHPDYRVVFTGHSLGGALATVAGADLRGNGYDIDVFSYGAPRVGNRAFAEFLTVQTGGTLYRITHTNDIVPRLPPREFGYSHSSPEYWIKSGTLVPVTRNDIVKIEGIDATGGNNQPNIPDIPAHLWYFQATDACN

SEQ ID NO: 10248 - protein, 273 aa, Thermomyces lanuginosus
VSQDLFNQFNLFAQYSAAAYCGKNNDAPAGTNITCTGNACPEVEKADATFLYSFEDSGVGDVTGFLALDNTNKLIVLSFRGSRSIENWIANLNFWLKKINDICSGCRGHDGFTSSWRSVADTLRQKVEDAVREHPDYRVVFTGHSLGGALATVAGADLRGNGYDIDVFSYGAPRVGNRAFAEFLTVQTGGTLYRITHTNDIVPRLPPREFGYSHSSPEYWIKSGTLVPVTRNDIVKIEGIDATGGNNQPNIPDIPAHLWYFQATDACNAGGFS

SEQ ID NO: 10249 - protein, 274 aa, Thermomyces lanuginosus
EVSQDLFNQFNLFAQYSAAAYCGKNNDAPAGTNITCTGNACPEVEKADATFLYSFEDSGVGDVTGFLALDNTNKLIVLSFRGSRSIENWIANLNFWLKKINDICSGCRGHDGFTSSWRSVADTLRQKVEDAVREHPDYRVVFTGHSLGGALATVAGADLRGNGYDIDVFSYGAPRVGNRAFAEFLTVQTGGTLYRITHTNDIVPRLPPREFGYSHSSPEYWIKSGTLVPVTRNDIVKIEGIDATGGNNQNNIPDIPAHLWYFQATDACNAGGFS

SEQ ID NO: 10250 - protein, 274 aa, Thermomyces lanuginosus
EVSQDLFNQFNLFAQYSAAAYCGKNNDAPAGTNITCTGNACPEVEKADATFLYSFEDSGVGDVTGFLALDNTNKLIVLSFRGSRSIENWIANLNFWLKKINDICSGCRGHDGFTSSWRSVADTLRQKVEDAVREHPDYRVVFTGHSLGGALATVAGADLRGNGYDIDVFSYGAPRVGNRAFAEFLTVQTGGTLYRITHTNDIVPRLPPREFGYSHSSPEYWIKSGTLVPVTRNDIVKIEGIDATGGNNQPNIPDIAAHLWYFQATDACNAGGFS

SEQ ID NO: 10251 - protein, 274 aa, Thermomyces lanuginosus
EVSQDLFNQFNLFAQYSAAAYCGKNNDAPAGTNITCTGNACPEVEKADATFLYSFEDSGVGDVTGFLALDNTNKLIVLSFRGSRSIENWIANLNFWLKEINDICSGCRGHDGFTSSWRSVADTLRQKVEDAVREHPDYRVVFTGHSLGGALATVAGADLRGNGYDIDVFSYGAPRVGNRAFAEFLTVQTGGTLYRITHTNDIVPRLPPREFGYSHSSPEYWIKSGTLVPVTRNDIVKIEGIDATGGNNQPNIPDIPAHLWYFQATDACNAGGFS

SEQ ID NO: 10252 - protein, 274 aa, Fusarium oxysporum
EVSQDLFNQFNLFAQYSAAAYCGKNNDAPAGTNITCTGNACPEVEKADATFLYSFEDSGVGDVTGFLALDNTNKLIVLSFRGSQSIENWIANLNFWLKKINDICSGCRGHDGFTSSWRSVADTLRQKVEDAVREHPDYRVVFTGHSLGGALATVAGADLRGNGYDIDVFSYGAPRVGNRAFAEFLTVQTGGTLYRITHTNDIVPRLPPREFGYSHSSPEYWIKSGTLVPVTRNDIVKIEGIDATGGNNQPNIPDIPAHLWYFQATDACNAGGFS

SEQ ID NO: 10253 - protein, 274 aa, Fusarium oxysporum
EVSQDLFNQFNLFAQYSAAAYCGKNNDAPAGTNITCTGNACPEVEKADATFLYSFEDSGVGDVTGFLALDNTNKLIVLSFRGSRSIENWIANLNFWLKKINDICSGCRGHDGFTSSWRSVADTLRQKVEDAVREHPDYRVVFTGHSLGGALATVAGADLRGNGYDIDVFSYGAPRVGNRAFAEFLTVQTGGTLYRITHTNDIVPRLPPREFGYSHSSPEYWIKSGTLVPVTRNDIVKIEGIDATGGNNQPNIPDIWAHLWYFQATDACNAGGFS

SEQ ID NO: 10254 - protein, 274 aa, Fusarium oxysporum
EVSQDLFNQFNLFAQYSAAAYCGKNNDAPAGTNITCTGNACPEVEKADATFLYSFEDSGVGDVTGFLALDNTNKLIVLSFRGSRSIENWIANLNFWLKKINDICSGCRGHDGFTSSWRSVADTLRQKVEDAVREHPDYRVVFTGHSLGGALATVAGADLRGNGYDIDVFSYGAPRVGNRAFAEFLTVQTGGTLYRITHTNDIVPRLPPREFGYSHSSPEYWIKSGTLVPVTRNDIVKIEGIDATGGNNQPNIPDIIAHLWYFQATDACNAGGFS

SEQ ID NO: 10255 - protein, 274 aa, Fusarium oxysporum
EVSQDLFNQFNLFAQYSAAAYCGKNNDAPAGTNITCTGNACPEVEKADATFLYSFEDSGVGDVTGFLALDNTNKLIVLSFRGSRSIENWIANLNFWLKKINDICSGCRGHDGFTSSWRSVADTLRQKVEDAVREHPDYRVVFTGHSLGGALATVAGADLRGNGYDIDVFSYGAPRVGNRAFAEFLTVQTGGTLYRITHTNDIVPRLPPREFGYSHSSPEYWIKSGTLVPVTRNDIVKIEGIDATGGNNQPNIPDIQAHLWYFQATDACNAGGFS

SEQ ID NO: 10256 - protein, 274 aa, Fusarium oxysporum
EVSQDLFNQFNLFAQYSAAAYCGKNNDAPAGTNITCTGNACPEVEKADATFLYSFEDSGVGDVTGFLALDNTNKLIVLSFRGSRSIENWIANLNFWLKKINDICSGCRGHDGFTSSWRSVADTLRQKVEDAVREHPDYRVVFTGHSLGGALATVAGADLRGNGYDIDVFSYGAPRVGNRAFAEFLTVQTGGTLYRITHTNDIVPRLPPREFGYSHSSPEYWIKSGTLVPVTRNDIVKIEGIDATGGNNQPNIPDIVAHLWYFQATDACNAGGFS

SEQ ID NO: 10257 - protein, 274 aa, Thermomyces lanuginosus
EVSQDLFNQFNLFAQYSAAAYCGKNNDAPAGTNITCTGNACPEVEKADATFLYSFEDSGVGDVTGFLALDNTNKLIVLSFRGSRSIENWIANLNFELKKINDICSGCRGHDGFTSSWRSVADTLRQKVEDAVREHPDYRVVFTGHSLGGALATVAGADLRGNGYDIDVFSYGAPRVGNRAFAEFLTVQTGGTLYRITHTNDIVPRLPPREFGYSHSSPEYWIKSGTLVPVTRNDIVKIEGIDATGGNNQPNIPDIPAHLWYFQATDACNAGGFS

SEQ ID NO: 10258 - protein, 274 aa, Thermomyces lanuginosus
EVSQDLFNQFNLFAQYSAAAYCGKNNDAPAGTNITCTGNACPEVEKADATFLYSFEDSGVGDVTGFLALDNTNKLIVLSFRGSRSIENWIANLNFWLKKINDICSGCRGHDGFTSSWRSVADTLRQKVEDAVREHPDYRVVFTGHSLGGALATVAGADLRGNGYDIDVFSYGAPRVGNRAFAEFLTVQTGGTLYRITHTNDIVPRLPPREFGYSHSSPEYWIKSGTLVPVTRNDIVKIEGIDATGGNNQPNIPDIMAHLWYFQATDACNAGGFS

SEQ ID NO: 10259 - protein, 274 aa, Fusarium oxysporum
EVSQDLFNQFNLFAQYSAAAYCGKNNDAPAGTNITCTGNACPEVEKADATFLYSFEDSGVGDVTGFLALDNTNKLIVLSFRGSISIENWIANLNFWLKKINDICSGCRGHDGFTSSWRSVADTLRQKVEDAVREHPDYRVVFTGHSLGGALATVAGADLRGNGYDIDVFSYGAPRVGNRAFAEFLTVQTGGTLYRITHTNDIVPRLPPREFGYSHSSPEYWIKSGTLVPVTRNDIVKIEGIDATGGNNQPNIPDIPAHLWYFQATDACNAGGFS

SEQ ID NO: 10260 - protein, 274 aa, Thermomyces lanuginosus
EVSQDLFNQFNLFAQYSAAAYCGKNNDAPAGTNITCTGNACPEVEKADATFLYSFEDSGVGDVTGFLALDNTNKLIVLSFRGSRSIENWIANLNFWLKKINDICSGCRGHDGFTSSWRSVADTLRQKVEDAVREHPDYRVVFTGHSLGGALATVAGADLRGNGYDIDVFSYGAPRVGNRAFAEFLTVQTGGTLYRITHTNDIVPRLPPREFGYSHSSPEYWIKSGTLVPVTRNDIVKIEGIDATGGNNQPNIPDINAHLWYFQATDACNAGGFS

SEQ ID NO: 10261 - protein, 274 aa, Thermomyces lanuginosus
EVSQDLFNQFNLFAQYSAAAYCGKNNDAPAGTNITCTGNACPEVEKADATFLYSFEDSGVGDVTGFLALDNTNKLIVLSFRGSRSIENWIANLNFWLKKINDICSGCRGHDGFTSSWRSVADTLRQKVEDAVREHPDYRVVFTGHSLGGALATVAGADLRGNGYDIDVFSYGAPRVGNRAFAEFLTVQTGGTLYRITHTNDIVPRLPPREFGYSHSSPEYWIKSGTLVPVTRNDIVKIEGIDATGGNNQPNIPDIDAHLWYFQATDACNAGGFS

SEQ ID NO: 10262 - protein, 274 aa, Thermomyces lanuginosus
EVSQDLFNQFNLFAQYSAAAYCGKNNDAPAGTNITCTGNACPEVEKADATFLYSFEDSGVGDVTGFLALDNTNKLIVLSFRGSRSIENWIANLNFWLKKINDICSGCRGHDGFTSSWRSVADTLRQKVEDAVREHPDYRVVFTGHSLGGALATVAGADLRGNGYDIDVFSYGAPRVGNRAFAEFLTVQTGGTLYRITHTNDIVPRLPPREFGYSHSSPEYWIKSGTLVPVTRNDIVKIEGIDATGGNNQPNIPDIGAHLWYFQATDACNAGGFS

SEQ ID NO: 10263 - protein, 274 aa, Thermomyces lanuginosus
EVSQDLFNQFNLFAQYSAAAYCGKNNDAPAGTNITCTGNACPEVEKADATFLYSFEDSGVGDVTGFLALDNTNKLIVLSFRGSRSIENWIANLNFWLKKINDICSGCRGHDGFTSSWRSVADTLRQKVEDAVREHPDYRVVFTGHSLGGALATVAGADLRGNGYDIDVFSYGAPRVGNRAFAEFLTVQTGGTLYRITHTNDIVPRLPPREFGYSHSSPEYWIKSGTLVPVTRNDIVKIEGIDATGGNNQPNIPDITAHLWYFQATDACNAGGFS

SEQ ID NO: 10264 - protein, 274 aa, Thermomyces lanuginosus
EVSQDLFNQFNLFAQYSAAAYCGKNNDAPAGTNITCTGNACPEVEKADATFLYSFEDSGVGDVTGFLALDNTNKLIVLSFRGSRSIENWIANLNFALKKINDICSGCRGHDGFTSSWRSVADTLRQKVEDAVREHPDYRVVFTGHSLGGALATVAGADLRGNGYDIDVFSYGAPRVGNRAFAEFLTVQTGGTLYRITHTNDIVPRLPPREFGYSHSSPEYWIKSGTLVPVTRNDIVKIEGIDATGGNNQPNIPDIPAHLWYFQATDACNAGGFS

SEQ ID NO: 10265 - protein, 274 aa, Thermomyces lanuginosus
EVSQDLFNQFNLFAQYSAAAYCGKNNDAPAGTNITCTGNACPEVEKADATFLYSFEDSGVGDVTGFLALDNTNKLIVLSFRGSRSIENWIANLNFWLKKINDICSGCRGHDGFTSSWRSVADTLRQKVEDAVREHPDYRVVFTGHSLGGALATVAGADLRGNGYDIDVFSYGAPRVGNRAFAEFLTVQTGGTLYRITHTNDIVPRLPPREFGYSHSSPEYWIKSGTLVPVTRNDIVKIEGIDATGGNNQPNIPDIPAHLWYFQATSACNAGGFS

SEQ ID NO: 10266 - protein, 274 aa, Thermomyces lanuginosus
EVSQDLFNQFNLFAQYSAAAYCGKNNDAPAGTNITCTGNACPEVEKADATFLYSFEDSGVGDVTGFLALDNTNKLIVLSFRGSRSIENWIANLNFWLKKINDICSGCRGHDGFTSSWRSVADTLRQKVEDAVREHPDYRVVFTGHSLGGALATVAGADLRGNGYDIDVFSYGAPRVGNRAFAEFLTVQTGGTLYRITHTNDIVPRLPPREFGYSHSSPEYWIKSGTLVPVTRNDIVKIEGIDATGGNNQPNIPDIKAHLWYFQATDACNAGGFS

SEQ ID NO: 10267 - protein, 274 aa, Thermomyces lanuginosus
EVSQDLFNQFNLFAQYSAAAYCGKNNDAPAGTNITCTGNACPEVEKADATFLYSFEDSGVGDVTGFLALDNTNKLIVLSFRGSRSIENWIANLNFLLKKINDICSGCRGHDGFTSSWRSVADTLRQKVEDAVREHPDYRVVFTGHSLGGALATVAGADLRGNGYDIDVFSYGAPRVGNRAFAEFLTVQTGGTLYRITHTNDIVPRLPPREFGYSHSSPEYWIKSGTLVPVTRNDIVKIEGIDATGGNNQPNIPDIPAHLWYFQATDACNAGGFS

SEQ ID NO: 10268 - protein, 274 aa, Thermomyces lanuginosus
EVSQDLFNQFNLFAQYSAAAYCGKNNDAPAGTNITCTGNACPEVEKADATFLYSFEDSGVGDVTGFLALDNTNKLIVLSFRGSRSIENWIANLNFQLKKINDICSGCRGHDGFTSSWRSVADTLRQKVEDAVREHPDYRVVFTGHSLGGALATVAGADLRGNGYDIDVFSYGAPRVGNRAFAEFLTVQTGGTLYRITHTNDIVPRLPPREFGYSHSSPEYWIKSGTLVPVTRNDIVKIEGIDATGGNNQPNIPDIPAHLWYFQATDACNAGGFS

SEQ ID NO: 10269 - protein, 274 aa, Thermomyces lanuginosus
EVSQDLFNQFNLFAQYSAAAYCGKNNDAPAGTNITCTGNACPEVEKADATFLYSFEDSGVGDVTGFLALDNTNKLIVLSFRGSRSIENWIANLNFNLKKINDICSGCRGHDGFTSSWRSVADTLRQKVEDAVREHPDYRVVFTGHSLGGALATVAGADLRGNGYDIDVFSYGAPRVGNRAFAEFLTVQTGGTLYRITHTNDIVPRLPPREFGYSHSSPEYWIKSGTLVPVTRNDIVKIEGIDATGGNNQPNIPDIPAHLWYFQATDACNAGGFS

SEQ ID NO: 10270 - protein, 274 aa, Thermomyces lanuginosus
EVSQDLFNQFNLFAQYSAAAYCGKNNDAPAGTNITCTGNACPEVEKADATFLYSFEDSGVGDVTGFLALDNTNKLIVLSFRGSRSIENWIANLNFRLKKINDICSGCRGHDGFTSSWRSVADTLRQKVEDAVREHPDYRVVFTGHSLGGALATVAGADLRGNGYDIDVFSYGAPRVGNRAFAEFLTVQTGGTLYRITHTNDIVPRLPPREFGYSHSSPEYWIKSGTLVPVTRNDIVKIEGIDATGGNNQPNIPDIPAHLWYFQATDACNAGGFS

SEQ ID NO: 10271 - protein, 274 aa, Thermomyces lanuginosus
EVSQDLFNQFNLFAQYSAAAYCGKNNDAPAGTNITCTGNACPEVEKADATFLYSFEDSGVGDVTGFLALDNTNKLIVLSFRGSRSIENWIANLNFWLKKINDICSGCRGHDGFTSSWRSVADTLRQKVEDAVREHPDYRVVFTGHSLGGALATVAGADLRGNGYDIDVFSYGAPRVGNRAFAEFLTVQTGGTLYRITHTNDIVPRLPPREFGYSHSSPEYWIKSGTLVPVTRNDIVKIEGIDATGGNNQPNIPDILAHLWYFQATDACNAGGFS

SEQ ID NO: 10272 - protein, 274 aa, Fusarium oxysporum
EVSQDLFNQFNLFAQYSAAAYCGKNNDAPAGTNITCTGNACPEVEKADATFLYSFEDSGVGDVTGFLALDNTNKLIVLSFRGSLSIENWIANLNFWLKKINDICSGCRGHDGFTSSWRSVADTLRQKVEDAVREHPDYRVVFTGHSLGGALATVAGADLRGNGYDIDVFSYGAPRVGNRAFAEFLTVQTGGTLYRITHTNDIVPRLPPREFGYSHSSPEYWIKSGTLVPVTRNDIVKIEGIDATGGNNQPNIPDIPAHLWYFQATDACNAGGFS

SEQ ID NO: 10273 - protein, 274 aa, Thermomyces lanuginosus
EVSQDLFNQFNLFAQYSAAAYCGKNNDAPAGTNITCTGNACPEVEKADATFLYSFEDSGVGDVTGFLALDNTNKLIVLSFRGSRSIENWIANLNFWLKKINDICSGCRGHDGFTSSWRSVADTLRQKVEDAVREHPDYRVVFTGHSLGGALATVAGADLRGNGYDIDVFSYGAPRVGNRAFAEFLTVQTGGTLYRITHTNDIVPRLPPREFGYSHSSPEYWIKSGTLVPVTRNDIVKIEGIDATGGNNQPNIPDIRAHLWYFQATDACNAGGFS

SEQ ID NO: 10274 - protein, 274 aa, Fusarium oxysporum
EVSQDLFNQFNLFAQYSAAAYCGKNNDAPAGTNITCTGNACPEVEKADATFLYSFEDSGVGDVTGFLALDNTNKLIVLSFRGSMSIENWIANLNFWLKKINDICSGCRGHDGFTSSWRSVADTLRQKVEDAVREHPDYRVVFTGHSLGGALATVAGADLRGNGYDIDVFSYGAPRVGNRAFAEFLTVQTGGTLYRITHTNDIVPRLPPREFGYSHSSPEYWIKSGTLVPVTRNDIVKIEGIDATGGNNQPNIPDIPAHLWYFQATDACNAGGFS

SEQ ID NO: 10275 - protein, 274 aa, Fusarium oxysporum
EVSQDLFNQFNLFAQYSAAAYCGKNNDAPAGTNITCTGNACPEVEKADATFLYSFEDSGVGDVTGFLALDNTNKLIVLSFRGSRSIENWIANLNFWLKKINDICSGCRGHDGFTSSWRSVADTLRQKVEDAVREHPDYRVVFTGHSLGGALATVAGADLRGNGYDIDVFSYGAPRVGNRAFAEFLTVQTGGTLYRITHTNDIVPRLPPREFGYSHSSPEYWIKSGTLVPVTRNDIVKIEGIDATGGNNQPNIPDISAHLWYFQATDACNAGGFS

SEQ ID NO: 10276 - protein, 274 aa, Fusarium oxysporum
EVSQDLFNQFNLFAQYSAAAYCGKNNDAPAGTNITCTGNACPEVEKADATFLYSFEDSGVGDVTGFLALDNTNKLIVLSFRGSDSIENWIANLNFWLKKINDICSGCRGHDGFTSSWRSVADTLRQKVEDAVREHPDYRVVFTGHSLGGALATVAGADLRGNGYDIDVFSYGAPRVGNRAFAEFLTVQTGGTLYRITHTNDIVPRLPPREFGYSHSSPEYWIKSGTLVPVTRNDIVKIEGIDATGGNNQPNIPDIPAHLWYFQATDACNAGGFS

SEQ ID NO: 10277 - protein, 274 aa, Thermomyces lanuginosus
EVSQDLFNQFNLFAQYSAAAYCGKNNDAPAGTNITCTGNACPEVEKADATFLYSFEDSGVGDVTGFLALDNTNKLIVLSFRGSRSIENWIANLNFFLKKINDICSGCRGHDGFTSSWRSVADTLRQKVEDAVREHPDYRVVFTGHSLGGALATVAGADLRGNGYDIDVFSYGAPRVGNRAFAEFLTVQTGGTLYRITHTNDIVPRLPPREFGYSHSSPEYWIKSGTLVPVTRNDIVKIEGIDATGGNNQPNIPDIPAHLWYFQATDACNAGGFS

SEQ ID NO: 10278 - protein, 274 aa, Thermomyces lanuginosus
EVSQDLFNQFNLFAQYSAAAYCGKNNDAPAGTNITCTGNACPEVEKADATFLYSFEDSGVGDVTGFLALDNTNKLIVLSFRGSRSIENWIANLNFSLKKINDICSGCRGHDGFTSSWRSVADTLRQKVEDAVREHPDYRVVFTGHSLGGALATVAGADLRGNGYDIDVFSYGAPRVGNRAFAEFLTVQTGGTLYRITHTNDIVPRLPPREFGYSHSSPEYWIKSGTLVPVTRNDIVKIEGIDATGGNNQPNIPDIPAHLWYFQATDACNAGGFS

SEQ ID NO: 10279 - protein, 274 aa, Thermomyces lanuginosus
EVSQDLFNQFNLFAQYSAAAYCGKNNDAPAGTNITCTGNACPEVEKADATFLYSFEDSGVGDVTGFLALDNTNKLIVLSFRGSRSIENWIANLNFGLKKINDICSGCRGHDGFTSSWRSVADTLRQKVEDAVREHPDYRVVFTGHSLGGALATVAGADLRGNGYDIDVFSYGAPRVGNRAFAEFLTVQTGGTLYRITHTNDIVPRLPPREFGYSHSSPEYWIKSGTLVPVTRNDIVKIEGIDATGGNNQPNIPDIPAHLWYFQATDACNAGGFS

SEQ ID NO: 10280 - protein, 269 aa, Thermomyces lanuginosus
EVSQDLFNQFNLFAQYSAAAYCGKNNDAPAGTNITCTGNACPEVEKADATFLYSFEDSGVGDVTGFLALDNTNKLIVLSFRGSRSIENWIANLNFWLKKINDICSGCRGHDGFTSSWRSVADTLRQKVEDAVREHPDYRVVFTGHSLGGALATVAGADLRGNGYDIDVFSYGAPRVGNRAFAEFLTVQTGGTLYRITHTNDIVPRLPPREFGYSHSSPEYWIKSGTGVPVTRNDIVKIEGIDATGGNNQPNIPDIPAHLWYFQATDACN

SEQ ID NO: 10281 - protein, 269 aa, Thermomyces lanuginosus
EVSQDLFNQFNLFAQYSAAAYCGKNNDAPAGTNITCTGNACPEVEKADATFLYSFEDSGVGDVTGFLALDNTNKLIVLSFRGSRSIENWIANLNFKLKKINDICSGCRGHDGFTSSWRSVADTLRQKVEDAVREHPDYRVVFTGHSLGGALATVAGADLRGNGYDIDVFSYGAPRVGNRAFAEFLTVQTGGTLYRITHTNDIVPRLPPREFGYSHSSPEYWIKSGTLVPVTRNDIVKIEGIDATGGNNQPNIPDIPAHLWYFQATDACN

SEQ ID NO: 10282 - protein, 274 aa, Thermomyces lanuginosus
EVSQDLFNQFNLFAQYSAAAYCGKNNDAPAGTNITCTGNACPEVEKADATFLYSFEDSGVGDVTGFLALDNTNKLIVLSFRGSWSIENWIANLNFWLKKINDICSGCRGHDGFTSSWRSVADTLRQKVEDAVREHPDYRVVFTGHSLGGALATVAGADLRGNGYDIDVFSYGAPRVGNRAFAEFLTVQTGGTLYRITHTNDIVPRLPPREFGYSHSSPEYWIKSGTLVPVTRNDIVKIEGIDATGGNNQPNIPDIPAHVWYFQATDACNAGGFS

SEQ ID NO: 10283 - protein, 274 aa, Thermomyces lanuginosus
EVSQDLFNQFNLFAQYSAAAYCGKNNDAPAGTNITCTGNACPEVEKADATFLYSFEDSGVGDVTGFLALDNTNKLIVLSFRGSWSIENWIGNLNFWLKKINDICSGCRGHDGFTSSWRSVADTLRQKVEDAVREHPDYRVVFTGHSLGGALATVAGADLRGNGYDIDVFSYGAPRVGNRAFAEFLTVQTGGTLYRITHTNDIVPRLPPREFGYSHSSPEYWIKSGTLVPVTRNDIVKIEGIDATGGNNQPNIPDIPAHLWYFQATDACNAGGFS

SEQ ID NO: 10284 - protein, 274 aa, Thermomyces lanuginosus
EVSQDLFNQFNLFAQYSAAAYCGKNNDAPAGTNITCTGNACPEVEKADATFLYSFEDSGVGDVTGFLALDNTNKLIVLSFRGSRSIENWIANLNFFLKEINDICSGCRGHDGFTSSWRSVADTLRQKVEDAVREHPDYRVVFTGHSLGGALATVAGADLRGNGYDIDVFSYGAPRVGNRAFAEFLTVQTGGTLYRITHTNDIVPRLPPREFGYSHSSPEYWIKSGTLVPVTRNDIVKIEGIDATGGNNQPNIPDIPAHLWYFQATDACNAGGFS

SEQ ID NO: 10285 - protein, 274 aa, Thermomyces lanuginosus
EVSQDLFNQFNLFAQYSAAAYCGKNNDAPAGTNITCTGNACPEVEKADATFLYSFEDSGVGDVTGFLALDNTNKLIVLSFRGSRSIENWIANLNFWLKEINDICSGCRGHDGFTSSWRSVADTLRQKVEDAVREHPDYRVVFTGHSLGGALATVAGADLRGNGYDIDVFSYGAPRVGNRAFAEFLTVQTGGTLYRITHTNDIVPRLPPREFGYSHSSPEYWIKSGTLVPVTRNDIVKIEGIDATGGNNQPNIPDIPAHLWYFQATSACNAGGFS

SEQ ID NO: 10286 - protein, 274 aa, Thermomyces lanuginosus
EVSQDLFNQFNLFAQYSAAAYCGKNNDAPAGTNITCTGNACPEVEKADATFLYSFEDSGVGDVTGFLALDNTNKLIVLSFRGSWSIENWIANLNFWLKKINDICSGCRGHDGFTSSWRSVADTLRQKVEDAVREHPDYRVVFTGHSLGGALATVAGADLRGNGYDIDVFSYGAPRVGNRAFAEFLTVQTGGTLYRITHTNDIVPRLPPREFGYSHSSPEYWIKSGTLVPVTRNDIVKIEGIDATGGNNQPNIPDIPAHRWYFQATDACNAGGFS

SEQ ID NO: 10287 - protein, 274 aa, Thermomyces lanuginosus
EVSQDLFNQFNLFAQYSAAAYCGKNNDAPAGTNITCTGNACPEVEKADATFLYSFEDSGVGDVTGFLALDNTNKLIVLSFRGSWSIENWIANLNFWLKKINDICSGCRGHDGFTSSWRSVADTLRQKVEDAVREHPDYRVVFTGHSLGGALATVAGADLRGNGYDIDVFSYGAPRVGNRAFAEFLTVQTGGTLYRITHTNDIVPRLPPREFGYSHSSPEYWIKSGTLVPVTRNDIVKIEGIDATGGNNQPNIPDIPAHLWQFQATDACNAGGFS

SEQ ID NO: 10288 - protein, 274 aa, Thermomyces lanuginosus
EVSQDLFNQFNLFAQYSAAAYCGKNNDAPAGTNITCTGNACPEVEKADATFLYSFEDSGVGQVTGFLALDNTNKLIVLSFRGSWSIENWIANLNFWLKKINDICSGCRGHDGFTSSWRSVADTLRQKVEDAVREHPDYRVVFTGHSLGGALATVAGADLRGNGYDIDVFSYGAPRVGNRAFAEFLTVQTGGTLYRITHTNDIVPRLPPREFGYSHSSPEYWIKSGTLVPVTRNDIVKIEGIDATGGNNQPNIPDIPAHLWYFQATDACNAGGFS

SEQ ID NO: 10289 - protein, 274 aa, Thermomyces lanuginosus
EVSQDLFNQFNLFAQYSAAAYCGKNNDAPAGTNITCTGNACPEVEKADATFLYSFEDSGVGDVTGFLALDNTNKLIVLSFRGSWSIENWIANLNFWLKKINDICSGCRGHDGFTSSWRSVADTLRQKVEDAVREHPDYRVVFTGHSLGGALATVAGADLRGNGYDIDVFSYGAPRVGNRAFAEFLTVQTGGTLYRITHTNDIVPRLPPREFGYSHSSPEYWIKSGTLVPVTRNDIVKIEGIDATGGNNQPNIPDIPAHLWYFQATSACNAGGFS

SEQ ID NO: 10290 - protein, 274 aa, Thermomyces lanuginosus
EVSQDLFNQFNLFAQYSAAAYCGKNNDAPAGTNITCTGNACPEVEKADATFLYSFEDSGVGDVTGFLALDNTNKLIVLSFRGSMSIENWIANLNFWLKKINDICSGCRGHDGFTSSWRSVADTLRQKVEDAVREHPDYRVVFTGHSLGGALATVAGADLRGNGYDIDVFSYGAPRVGNRAFAEFLTVQTGGTLYRITHTNDIVPRLPPREFGYSHSSPEYWIKSGTLVPVTRNDIVKIEGIDATGGNNQPNIPDIVAHLWYFQATDACNAGGFS

SEQ ID NO: 10291 - protein, 274 aa, Thermomyces lanuginosus
EVSQDLFNQFNLFAQYSAAAYCGKNNDAPAGTNITCTGNACPEVEKADATFLYSFEDSGVGDVTGFLALDNTNKLIVLSFRGSWSIENWIANLNFFLKKINDICSGCRGHDGFTSSWRSVADTLRQKVEDAVREHPDYRVVFTGHSLGGALATVAGADLRGNGYDIDVFSYGAPRVGNRAFAEFLTVQTGGTLYRITHTNDIVPRLPPREFGYSHSSPEYWIKSGTLVPVTRNDIVKIEGIDATGGNNQPNIPDIPAHLWYFQATDACNAGGFS

SEQ ID NO: 10292 - protein, 274 aa, Thermomyces lanuginosus
EVSQDLFNQFNLFAQYSAAAYCGKNNDAPAGTNITCTGNACPEVEKADATFLYSFEDSGVGDVTGFLALDNTNKLIVLSFRGSESIENWIANLNFWLKKINDICSGCRGHDGFTSSWRSVADTLRQKVEDAVREHPDYRVVFTGHSLGGALATVAGADLRGNGYDIDVFSYGAPRVGNRAFAEFLTVQTGGTLYRITHTNDIVPRLPPREFGYSHSSPEYWIKSGTLVPVTRNDIVKIEGIDATGGNNQPNIPDIVAHLWYFQATDACNAGGFS

SEQ ID NO: 10293 - protein, 274 aa, Thermomyces lanuginosus
EVSQDLFNQFNLFAQYSAAAYCGKNNDAPAGTNITCTGNACPEVEKADATFLYSFEDSGVGDVTGFLALDNTNKLIVLSFRGSWSIENWIANLNFWLKKINDICSGCRGHDGFTSSWRSVADTLRQKVEDAVREHPDYRVVFTGHSLGGALATVAGADLRGNGYDIDVFSYGAPRVGNRAFAEFLTVQTGGTLYRITHTNDITPRLPPREFGYSHSSPEYWIKSGTLVPVTRNDIVKIEGIDATGGNNQPNIPDIPAHLWYFQATDACNAGGFS

SEQ ID NO: 10294 - protein, 274 aa, Thermomyces lanuginosus
EVSQDLFNQFNLFAQYSAAAYCGKNNDAPAGTNITCTGNACPEVEKADATFLYSFEDSGVGDVTGFLALDNTNKLIVLSFRGSSSIENWIANLNFWLKKINDICSGCRGHDGFTSSWRSVADTLRQKVEDAVREHPDYRVVFTGHSLGGALATVAGADLRGNGYDIDVFSYGAPRVGNRAFAEFLTVQTGGTLYRITHTNDIVPRLPPREFGYSHSSPEYWIKSGTLVPVTRNDIVKIEGIDATGGNNQPNIPDIVAHLWYFQATDACNAGGFS

SEQ ID NO: 10295 - protein, 274 aa, Thermomyces lanuginosus
EVSQDLFNQFNLFAQYSAAAYCGKNNDAPAGTNITCTGNACPEVEKADATFLYSFEDSGVGDVTGFLALDNTNKLIVLSFRGSRSIENWIGNLNFWLKEINDICSGCRGHDGFTSSWRSVADTLRQKVEDAVREHPDYRVVFTGHSLGGALATVAGADLRGNGYDIDVFSYGAPRVGNRAFAEFLTVQTGGTLYRITHTNDIVPRLPPREFGYSHSSPEYWIKSGTLVPVTRNDIVKIEGIDATGGNNQPNIPDIPAHLWYFQATDACNAGGFS

SEQ ID NO: 10296 - protein, 274 aa, Thermomyces lanuginosus
EVSQDLFNQFNLFAQYSAAAYCGKNNDAPAGTNITCTGNACPEVEKADATFLYSFEDSGVGDVTGFLALDNTNKLIVLSFRGSRSIENWIANLNFWLKKINDICSGCRGHDGFTSSWRSVADTLRQKVEDAVREHPDYRVVFTGHSLGGALATVAGADLRGNGYDIDVFSYGAPRVGNRAFAEFLTVQTGGTLYRITHTNDIVPRLPPREFGYSHSSPEYWIKSGTLVPVTRNDIVKIEDIDATGGNNQPNIPDICAHLWYFQATDACNAGGFS

SEQ ID NO: 10297 - protein, 274 aa, Thermomyces lanuginosus
EVSQDLFNQFNLFAQYSAAAYCGKNNDAPAGTNITCTGNACPEVEKADATFLYSFEDSGVGDVTGFLALDNTNKLIVLSFRGSWYIENWIANLNFWLKKINDICSGCRGHDGFTSSWRSVADTLRQKVEDAVREHPDYRVVFTGHSLGGALATVAGADLRGNGYDIDVFSYGAPRVGNRAFAEFLTVQTGGTLYRITHTNDIVPRLPPREFGYSHSSPEYWIKSGTLVPVTRNDIVKIEGIDATGGNNQPNIPDIPAHLWYFQATDACNAGGFS

SEQ ID NO: 10298 - protein, 274 aa, Thermomyces lanuginosus
EVSQDLFNQFNLFAQYSAAAYCGKNNDAPAGTNITCTGNACPEVEKADATFLYSFEDSGVGDVTGFLALDNTNKLIVLSFRGSRSIENWIANLNFFLKKINDICSGCRGHDGFTSSWRSVADTLRQKVEDAVREHPDYRVVFTGHSLGGALATVAGADLRGNGYDIDVFSYGAPRVGNRAFAEFLTVQTGGTLYRITHTNDIVPRLPPREFGYSHSSPEYWIKSGTLVPVTRNDIVKIEGIDATGGNNQPNIPDIPAHLWYFQATSACNAGGFS

SEQ ID NO: 10299 - protein, 274 aa, Thermomyces lanuginosus
EVSQDLFNQFNLFAQYSAAAYCGKNNDAPAGTNITCTGNACPEVEKADATFLYSFEDSGVGDVTGFLALDNTNKLIVLSFRGSWSIENWIENLNFWLKKINDICSGCRGHDGFTSSWRSVADTLRQKVEDAVREHPDYRVVFTGHSLGGALATVAGADLRGNGYDIDVFSYGAPRVGNRAFAEFLTVQTGGTLYRITHTNDIVPRLPPREFGYSHSSPEYWIKSGTLVPVTRNDIVKIEGIDATGGNNQPNIPDIPAHLWYFQATDACNAGGFS

SEQ ID NO: 10300 - protein, 274 aa, Thermomyces lanuginosus
EVSQDLFNQFNLFAQYSAAAYCGKNNDAPAGTNITCTGNACPEVEKADATFLYSFEDSGVGDVTGFLALDNTNKLIVLSFRGSPSIENWIANLNFWLKKINDICSGCRGHDGFTSSWRSVADTLRQKVEDAVREHPDYRVVFTGHSLGGALATVAGADLRGNGYDIDVFSYGAPRVGNRAFAEFLTVQTGGTLYRITHTNDIVPRLPPREFGYSHSSPEYWIKSGTLVPVTRNDIVKIEGIDATGGNNQPNIPDIVAHLWYFQATDACNAGGFS

SEQ ID NO: 10301 - protein, 274 aa, Thermomyces lanuginosus
EVSQDLFNQFNLFAQYSAAAYCGKNNDAPAGTNITCTGNACPEVEKADATFLYSFEDSGVGEVTGFLALDNTNKLIVLSFRGSWSIENWIANLNFWLKKINDICSGCRGHDGFTSSWRSVADTLRQKVEDAVREHPDYRVVFTGHSLGGALATVAGADLRGNGYDIDVFSYGAPRVGNRAFAEFLTVQTGGTLYRITHTNDIVPRLPPREFGYSHSSPEYWIKSGTLVPVTRNDIVKIEGIDATGGNNQPNIPDIPAHLWYFQATDACNAGGFS

SEQ ID NO: 10302 - protein, 273 aa, Thermomyces lanuginosus
VSQDLFNQFNLFAQYSAAAYCGKNNDAPAGTNITCTGNACPEVEKADATFLYSFEDSGVGDVTGFLALDNTNKLIVLSFRGSRSIENWIANLNFWLKKINDICSGCRGHDGFTSSWRSVADTLRQKVEDAVREHPDYRVVFTGHSLGGALATVAGADLRGNGYDIDVFSYGAPRVGNRAFAEFLTVQTGGTLYRITHTNDIVPRLPPREFGYSHSSPEYWIKSGTLVPVTRNDIVKIEGIDATGGNNQPNIPDIAAHLHYFQATDACNAGGFS

SEQ ID NO: 10303 - protein, 271 aa, Thermomyces lanuginosus
VSQDLFNQFNLFAQYSAAAYCGKNNDAPAGTNITCTGNACPEVEKADATFLYSFEDSGVGDVTGFLALDNTNKLIVLSFRGSRSIENWIANLNFWLKKINDICSGCRGHDGFTSSWRSVADTLRQKVEDAVREHPDYRVVFTGHSLGGALATVAGADLRGNGYDIDVFSYGAPRVGNRAFAEFLTVQTGGTLYRITHTNDIVPRLPPREFGYSHSSPEYWIKSGTLVPVTRNDIVKIEGIDATGGNNQPNIPDIAAHLHYFQATDACNAGG

SEQ ID NO: 10304 - protein, 270 aa, Thermomyces lanuginosus
VSQDLFNQFNLFAQYSAAAYCGKNNDAPAGTNITCTGNACPEVEKADATFLYSFEDSGVGDVTGFLALDNTNKLIVLSFRGSRSIENWIANLNFWLKKINDICSGCRGHDGFTSSWRSVADTLRQKVEDAVREHPDYRVVFTGHSLGGALATVAGADLRGNGYDIDVFSYGAPRVGNRAFAEFLTVQTGGTLYRITHTNDIVPRLPPREFGYSHSSPEYWIKSGTLVPVTRNDIVKIEGIDATGGNNQPNIPDIAAHLHYFQATDACNAG

SEQ ID NO: 10305 - protein, 269 aa, Thermomyces lanuginosus
EVSQDLFNQFNLFAQYSAAAYCGKNNDAPAGTNITCTGNACPEVEKADATFLYSFEDSGVGDVTGFLALDNTNKLIVLSFRGSWSIENWIANLNFFLKKINDICSGCRGHDGFTSSWRSVADTLRQKVEDAVREHPDYRVVFTGHSLGGALATVAGADLRGNGYDIDVFSYGAPRVGNRAFAEFLTVQTGGTLYRITHTNDIVPRLPPREFGYSHSSPEYWIKSGTLVPVTRNDIVKIEGIDATGGNNQPNIPDIPAHLWYFQATDACN

SEQ ID NO: 10306 - protein, 269 aa, Thermomyces lanuginosus
EVSQDLFNQFNLFAQYSAAAYCGKNNDAPAGTNITCTGNACPEVEKADATFLYSFEDSGVGDVTGFLALDNTNKLIVLSFRGSYSIENWIANLNFFLKKINDICSGCRGHDGFTSSWRSVADTLRQKVEDAVREHPDYRVVFTGHSLGGALATVAGADLRGNGYDIDVFSYGAPRVGNRAFAEFLTVQTGGTLYRITHTNDIVPRLPPREFGYSHSSPEYWIKSGTLVPVTRNDIVKIEGIDATGGNNQPNIPDIPAHLWYFQATDACN

SEQ ID NO: 10307 - protein, 269 aa, Thermomyces lanuginosus
VSQDLFNQFNLFAQYSAAAYCGKNNDAPAGTNITCTGNACPEVEKADATFLYSFEDSGVGDVTGFLALDNTNKLIVLSFRGSRSIENWIANLNFWLKKINDICSGCRGHDGFTSSWRSVADTLRQKVEDAVREHPDYRVVFTGHSLGGALATVAGADLRGNGYDIDVFSYGAPRVGNRAFAEFLTVQTGGTLYRITHTNDIVPRLPPREFGYSHSSPEYWIKSGTLVPVTRNDIVKIEGIDATGGNNQPNIPDIAAHLHYFQATDACNA

SEQ ID NO: 10308 - protein, 268 aa, Thermomyces lanuginosus
VSQDLFNQFNLFAQYSAAAYCGKNNDAPAGTNITCTGNACPEVEKADATFLYSFEDSGVGDVTGFLALDNTNKLIVLSFRGSRSIENWIANLNFWLKKINDICSGCRGHDGFTSSWRSVADTLRQKVEDAVREHPDYRVVFTGHSLGGALATVAGADLRGNGYDIDVFSYGAPRVGNRAFAEFLTVQTGGTLYRITHTNDIVPRLPPREFGYSHSSPEYWIKSGTLVPVTRNDIVKIEGIDATGGNNQPNIPDIAAHLHYFQATDACN

SEQ ID NO: 10309 - protein, 268 aa, Thermomyces lanuginosus; identical to SEQ ID NO: 6655

SEQ ID NO: 10310 - protein, 274 aa, Thermomyces lanuginosus
EVSQDLFNQFNLFAQYSAAAYCGKNNDAPAGTNITCTGNACPEVEKADATFLYSFEDSGVGDVTGFLALDNTNKLIVLSFRGSRSIENWIANLNFGLKKINDICSGCRGHDGFTSSWRSVADTLRQKVEDAVREHPDYRVVFTGHSLGGALATVAGADLRGNGYDIDVFSYGAPRVGNRAFAEFLTVQTGGTLYRITHTNDIVPRLPPREFGYSHSSPEYWIKSGTLVPVTRNDIVKIEGIDATGGNNQPNIPDIPAHLWYFGATDACLAGGFS

SEQ ID NO: 10311 - protein, 274 aa, Thermomyces lanuginosus
EVSQDLFNQFNLFAQYSAAAYCGKNNDAPAGTNITCTGNACPEVEKADATFLYSFEDSGVGDVTGFLALDNTNKLIVLSFRGSWSIENWIANLNFFLKKINDICSGCRGHDGFTSSWRSVADTLRQKVEDAVREHPDYRVVFTGHSLGGALATVAGADLRGNGYDIDVFSYGAPRVGNRAFAEFLTVQTGGTLYRITHTNDIVPRLPPREFGYSHSSPEYWIKSGTLVPVTRNDIVKIEGIDATGGNNQPNIPDIPAHLWYFQATSACNAGGFS

SEQ ID NO: 10312 - protein, 274 aa, Thermomyces lanuginosus
EVSQDLFNQFNLFAQYSAAAYCGKNNDAPAGTNITCTGNACPEVEKADATFLYSFEDSGVGDVTGFLALDNTNKLIVLSFRGSRSIENWIANLNFSLKKINDICSGCRGHDGFTSSWRSVADTLRQKVEDAVREHPDYRVVFTGHSLGGALATVAGADLRGNGYDIDVFSYGAPRVGNRAFAEFLTVQTGGTLYRITHTNDIVPRLPPREFGYSHSSPEYWIKSGTLVPVTRNDIVKIEGIDATGGNNQPNIPDIPAHLWYFGATDACLAGGFS

SEQ ID NO: 10313 - protein, 274 aa, Thermomyces lanuginosus
EVSQDLFNQFNLFAQYSAAAYCGKNNDAPAGTNITCTGNACPEVEKADATFLYSFEDSGVGDVTGFLALDNTNKLIVLSFRGSWSIENWIRNLNFFLKKINDICSGCRGHDGFTSSWRSVADTLRQKVEDAVREHPDYRVVFTGHSLGGALATVAGADLRGNGYDIDVFSYGAPRVGNRAFAEFLTVQTGGTLYRITHTNDIVPRLPPREFGYSHSSPEYWIKSGTLVPVTRNDIVKIEGIDATGGNNQPNIPDIPAHLWYFQATDACNAGGFS

SEQ ID NO: 10314 - protein, 274 aa, Thermomyces lanuginosus
EVSQDLFNQFNLFAQYSAAAYCGKNNDAPAGTNITCTGNACPEVEKADATFLYSFEDSGVGDVTGFLALDNTNKLIVLSFRGSRSIENWIANLNFQLKKINDICSGCRGHDGFTSSWRSVADTLRQKVEDAVREHPDYRVVFTGHSLGGALATVAGADLRGNGYDIDVFSYGAPRVGNRAFAEFLTVQTGGTLYRITHTNDIVPRLPPREFGYSHSSPEYWIKSGTLVPVTRNDIVKIEGIDATGGNNQPNIPDIPAHLWYFGATDACLAGGFS

SEQ ID NO: 10315 - protein, 274 aa, Thermomyces lanuginosus
EVSQDLFNQFNLFAQYSAAAVCGKNNDAPAGTNITCTGNACPEVEKADATFLYSFEDSGVGDVTGFLALDNTNKLIVLSFRGSGSIENWIANLNFFLKKINDICSGCRGHDGFTSSWRSVADTLRQKVEDAVREHPDYRVVFTGHSLGGALATVAGADLRGNGYDIDVFSYGAPRVGNRAFAEFLTVQTGGTLYRITHTNDIVPRLPPREFGYSHSSPEYWIKSGTLVPVTRNDIVKIEGIDATGGNNQPNIPDIPAHLWYFQATDACNAGGFS

SEQ ID NO: 10316 - protein, 274 aa, Thermomyces lanuginosus
EVSQDLFNQFNLFAQYSAAAYCGKNNDAPAGTNITCTGNACPEVEKADATFLYSFEDSGVGDVTGFLALDNTNKLIVLSFRGSRSIENWIGNLNFDLKEINDICSGCRGHDGFTSSWRSVADTLRQKVEDAVREHPDYRVVFTGHSLGGALATVAGADLRGNGYDIDVFSYGAPRVGNRAFAEFLTVQTGGTLYRITHTNDIVPRLPPREFGYSHSSPEYWIKSGTLVPVTRNDIVKIEGIDATGGNNQPNIPDIPAHLWYFQATDACNAGGFS

SEQ ID NO: 10317 - protein, 274 aa, Thermomyces lanuginosus
EVSQDLFNQFNLFAQYSAAAYCGKNNDAPAGTNITCTGNACPEVEKADATFLYSFEDSGAGSVTGFLALDNTNKLIVLSFRGSRSIENWIANLNFWLKKINDICSGCRGHDGFTSSWRSVADTLRQKVEDAVREHPDYRVVFTGHSLGGALATVAGADLRGNGYDIDVFSYGAPRVGNRAFAEFLTVQTGGTLYRITHTNDIVPRLPPREFGYSHSSPEYRIKSGTLVPVTRNDIVKIEGIDATGGNNQPNIPDIPAHLWYFQATDACNAGGFS

SEQ ID NO: 10318 - protein, 274 aa, Thermomyces lanuginosus
EVSQDLFNQFNLFAQYSAAAYCGKNNDAPAGTNITCTGNACPEVEKADATFLYSFEDSGVGDVTGFLALDNTNKLIVLSFRGSRSIENWIANLNFFLKEINDICSGCRGHDGFTSSWRSVADTLRQKVEDAVREHPDYRVVFTGHSLGGALATVAGADLRGNGYDIDVFSYGAPRVGNRAFAEFLTVQTGGTLYRITHTNDIVPRLPPREFGYSHSSPEYWIKSGTLVPVTRNDIVKIEGIDATGGNNQPNIPDIPAHLWYFQATSACNAGGFS

SEQ ID NO: 10319 - protein, 274 aa, Thermomyces lanuginosus
EVSQDLFNQFNLFAQYSAAAYCGKNNDAPAGTNITCTGNACPEVEKADATFLYSFEDSGVGDVTGFLALDNTNKLIVLSFRGSRSIENWIANLNFFLKKINDICSGCRGHDGFTSSWRSVADTLRQKVEDAVREHPDYRVVFTGHSLGGALATVAGADLRGNGYDIDVFSYGAPRVGNRAFAEFLTVQTGGTLYRITHTNDIVPRLPPREFGYSHSSPEYWIKSGTLVPVTRNDIVKIEGIDATGGNNQPNIPDIPAHLWYFGATDACLAGGFS

SEQ ID NO: 10320 - protein, 274 aa, Thermomyces lanuginosus
EVSQDLFNQFNLFAQYSAAAYCGKNNDAPAGTNITCTGNACPEVEKADATFLYSFEDSGVGDVTGFLALDNTNKLIVLSFRGSRSIENWIANLNFWLKKINDICSGCRGHDGFTSSWRSVADTLRQKVEDAVREHPDYRVVFTGHSLGGALATVAGADLRGNGYDIDVFSYGAPRVGNRAFAEFLTVQTGGTLYRITHTNDIVPRLPPREFGYSHSSPEYWIKSGTLVPVRRRDIVKIEGIDATGGNNQPNIPDIPAHLWYFQATSACNAGGFS

SEQ ID NO: 10321 - protein, 274 aa, Thermomyces lanuginosus
EVSQDLFNQFNLFAQYSAAAYCGKNNDAPAGTNITCTGNACPEVEKADATFLYSFEDSGGGFVTGFLALDNTNKLIVLSFRGSWSIENWIANLNFWLKKINDICSGCRGHDGFTSSWRSVADTLRQKVEDAVREHPDYRVVFTGHSLGGALATVAGADLRGNGYDIDVFSYGAPRVGNRAFAEFLTVQTGGTLYRITHTNDIVPRLPPREFGYSHSSPEYWIKSGTLVPVTRNDIVKIEGIDATGGNNQPNIPDIPAHLWYFQATDACNAGGFS

SEQ ID NO: 10322 - protein, 274 aa, Thermomyces lanuginosus
EVSQDLFNQFNLFAQYSAAAYCGKNNDAPAGTNITCTGNACPEVEKADATFLYSFEDSGVGDVTGFLALDNTNKLIVLSFRGSRSIENWIANLNFWLKKINDICSGCRGHDGFTSSWRSVADTLRQKVEDAVREHPDYRVVFTGHSLGGALATVAGADLRGNGYDIDVFSYGAPRVGNRAFAEFLTVQTGGTLYRITHTNDIVPRLPPREFGYSHSSPEYWIKSGTLVPVTRNDIVKIEGIDATGGNNQPNIPDIPAHLWYFGATSACLAGGFS

SEQ ID NO: 10323 - protein, 274 aa, Thermomyces lanuginosus
EVSQDLFNQFNLFAQYSAAAYCGKNNDAPAGTNITCTGNACPEVEKADATFLYSFEDSGVGDVTGFLALDNTNKLIVLSFRGSRSIENWIANLNFRLKKINDICSGCRGHDGFTSSWRSVADTLRQKVEDAVREHPDYRVVFTGHSLGGALATVAGADLRGNGYDIDVFSYGAPRVGNRAFAEFLTVQTGGTLYRITHTNDIVPRLPPREFGYSHSSPEYWIKSGTLVPVTRNDIVKIEGIDATGGNNQPNIPDIPAHLWYFGATDACLAGGFS

SEQ ID NO: 10324 - protein, 273 aa, Thermomyces lanuginosus
VSQDLFNQFNLFAQYSAAAYCGKNNDAPAGTNITCTGNACPEVEKADATFLYSFEDSGVGDVTGFLALDNTNKLIVLSFRGSRSIENWIANLNFWLKKINDICSGCRGHDGFTSSWRSVADTLRQKVEDAVREHPDYRVVFTGHSLGGALATVAGADLRGNGYDIDVFSYGAPRVGNRAFAEFLTVQTGGTLYRITHTNDIVPRLPPREFGYSHSSPEYWIKSGTLVPVTRNDIVKICGIDATGGNNRPNIPDIAAHLWYFQATDACNAGGFS

SEQ ID NO: 10325 - protein, 273 aa, Thermomyces lanuginosus
VSQDLFNQFNLFAQYSAAAYCGKNNDAPAGTNITCTGNACPEVEKADATFLYSFEDSGVGDVTGFLALDNTNKLIVLSFRGSRSIENWIANLNFWLKKINDICSGCRGHDGFTSSWRSVADTLRQKVEDAVREHPDYRVVFTGHSLGGALATVAGADLRGNGYDIDVFSYGAPRVGNRAFAEFLTVQTGGTLYRITHTNDIVPRLPPREFGYSHSSPEYWIKSGTLVPVTRNDIVKIEGIDATGGNTRPNIPDIPAHLQYFQATDACNAGGFS

SEQ ID NO: 10326 - protein, 273 aa, Thermomyces lanuginosus
VSQDLFNQFNLFAQYSAAAYCGKNNDAPAGTNITCTGNACPEVEKADATFLYSFEDSGVGDVTGFLALDNTNKLIVLSFRGSRSIENWIANLNFWLKEINDICSGCRGHDGFTSSWRSVADTLRQKVEDAVREHPDYRVVFTGHSLGGALATVAGADLRGNGYDIDVFSYGAPRVGNRAFAEFLTVQTGGTLYRITHTNDIVPRLPPREFGYSHSSPEYWIKSGTLVPVTRNDIVKIEGIDATGGNNQPNIPDIAAHLHYFQATDACNAGGFS

SEQ ID NO: 10327 - protein, 273 aa, Thermomyces lanuginosus
VSQDLFNQFNLFAQYSAAAYCGKNNDAPAGTNITCTGNACPEVEKADATFLYSFEDSGVGDVTGFLALDNTNKLIVLSFRGSRSIENWIGNLNFWLKKINDICSGCRGHDGFTSSWRSVADTLRQKVEDAVREHPDYRVVFTGHSLGGALATVAGADLRGNGYDIDVFSYGAPRVGNRAFAEFLTVQTGGTLYRITHTNDIVPRLPPREFGYSHSSPEYWIKSGTLVPVTRNDIVKIEGIDATGGNNQPNIPDIAAHLHYFQATDACNAGGFS

SEQ ID NO: 10328 - protein, 269 aa, Thermomyces lanuginosus
EVSQDLFNQFNLFAQYSAAAYCGKNNDAPAGTNITCTGNACPEVEKADATFLYSFEDSGVGDVTGFLALDNTNKLIVLSFRGSRSIENWIANLNFWLKKINDICSGCRGHDGFTSSWRSVADTLRQKVEDAVREHPDYRVVFTGHSLGGALATVAGADLRGNGYDIDVFSYGAPRVGNRAFAEFLTVQTGGTLYRITHTNDIVPRLPPREFGYSHSSPEYWIKSGTLVPVRRRDIVKIEGIDATGGNNQPNIPDIPAHLWYFQATSACN

SEQ ID NO: 10329 - protein, 268 aa, Thermomyces lanuginosus; identical to SEQ ID NO: 8456

SEQ ID NO: 10330 - protein, 262 aa, Thermomyces lanuginosus
EVSQDLFNQFNLFAQYSAAAYCGKNNDAPAGTNITCTGNACPEVEKADATFLYSFEDSGVGDVTGFLALDNTNKLIVLSFRGSRSIENWIGNLNFDLKEINDICSGCRGHDGFTSSWRSVADTLRQKVEDAVREHPDYRVVFTGHSLGGALATVAGADLRGNGYDIDVFSYGAPRVGNRAFAEFLTVQTGGTLYRITHTNDIVPRLPPREFGYSHSSPEYWIKSGTLVPVTRNDIVKIEGIDATGGNNQPNIPDIPAHLWYF

SEQ ID NO: 10331 - protein, 274 aa, Thermomyces lanuginosus
EVSQDLFNQFNLFAQYSAAAYCGKNNDAPAGTNITCTGNACPEVEKADATFLYSFEDSGVGDVTGFLALDNTNKLIVLSFRGSRSIENWIANLNFFLKKINDICSGCRGHDGFTSSWRSVADTLRQKVEDAVREHPDYRVVFTGHSLGGALATVAGADLRGNGYDIDVFSYGAPRVGNRAFAEFLTVQTGGTLYRITHTNDIVPRLPPREFGYSHSSPEYWIKSGTLVPVTRNDIVKIEGIDATGGNNQPNIPDIPAHLWYFGATSACLAGGFS

SEQ ID NO: 10332 - protein, 274 aa, Thermomyces lanuginosus
EVSQDLFNQFNLFAQYSAAAYCGKNNDAPAGTNITCTGNACPEVEKADATFLYSFEDSGLGAVTGFLALDNTNKLIVLSFRGSWSIENWIANLNFWLKKINDICSGCRGHDGFTSSWRSVADTLKQKVEDAVREHPDYRVVFTGHSLGGALATVAGADLRGNGYDIDVFSYGAPRVGNRAFAEFLTVQTGGTLYRITHTNDIVPRLPPREFGYSHSSPEYWIKSGTLVPVTRNDIVKIEGIDATGGNNQPNIPDIPAHLWYFQATDACNAGGFS

SEQ ID NO: 10333 - protein, 274 aa, Thermomyces lanuginosus
EVSQDLFNQFNLFAQYSAAAYCGKNNDAPAGTNITCTGNACPEVEKADATFLYSFEDSGGGGVTGFLALDNTNKLIVLSFRGSWSIENWIANLNFWLKKINDICSGCRGHDGFTSSWRSVADTLRQKVEDAVREHPDYRVVFTGHSLGGALATVAGADLRGNGYDIDVFSYGAPRVGNRAFAEFLTVQTGGTLYRITHTNDIVPRLPPREFGYSHSSPEYWIKSGTLAPVTRNDIVKIEGIDATGGNNQPNIPDIPAHLWYFQATDACNAGGFS

SEQ ID NO: 10334 - protein, 274 aa, Thermomyces lanuginosus
EVSQDLFNQFNLFAQYSAAAYCGKNNDAPAGTNITCTGNACPEVEKADATFLYSFEDSGVGDVTGFLALDNTNKLIVLSFRGSWSIENWIRNKNFGLKKINDICSGCRGHDGFTSSWRSVADTLRQKVEDAVREHPDYRVVFTGHSLGGALATVAGADLRGNGYDIDVFSYGAPRVGNRAFAEFLTVQTGGTLYRITHTNDIVPRLPPREFGYSHSSPEYWIKSGTLVPVTRNDIVKIEGIDATGGNNQPNIPDIPAHLWYFQATDACNAGGFS

SEQ ID NO: 10335 - protein, 270 aa, Thermomyces lanuginosus
EVSQDLFNQFNLFAQYSAAAYCGKNNDAPAGTNITCTGNACPEVEKADATFLYSFEDSGVGDVTGFLALDNTNKLIVLSFRGSRSIENWIGNLNFWLKEINDICSGCRGHDGFTSSWRSVADTLRQKVEDAVREHPDYRVVFTGHSLGGALATVAGADLRGNGYDIDVFSYGAPRVGNRAFAEFLTVQTGGTLYRITHTNDIVPRLPPREFGYSHSSPEYWIKSGTLVPVTRNDIVKIEGIDATGGNNQPNIPDIPAHLWYFQLTDACLA

SEQ ID NO: 10336 - protein, 269 aa, Thermomyces lanuginosus
EVSQDLFNQFNLFAQYSAAAYCGKNNDAPAGTNITCTGNACPEVEKADATFLYSFEDSGGGEVTGFLALDNTNKLIVLSFRGSWSIENWIANLNFFLKKINDICSGCRGHDGFTSSWRSVADTLRQKVEDAVREHPDYRVVFTGHSLGGALATVAGADLRGNGYDIDVFSYGAPRVGNRAFAEFLTVQTGGTLYRITHTNDIVPRLPPREFGYSHSSPEYWIKSGTLVPVTRNDIVKIEGIDATGGNNQPNIPDIPAHLWYFQATDACN

SEQ ID NO: 10337 - protein, 269 aa, Thermomyces lanuginosus
EVSQDLFNQFNLFAQYSAAAYCGKNNDAPAGTNITCTGNACPEVEKADATFLYSFEDSGRGLVTGFLALDNTNKLIVLSFRGSWSIENWIANLNFFLKKINDICSGCRGHDGFTSSWRSVADTLRQKVEDAVREHPDYRVVFTGHSLGGALATVAGADLRGNGYDIDVFSYGAPRVGNRAFAEFLTVQTGGTLYRITHTNDIVPRLPPREFGYSHSSPEYWIKSGTLVPVTRNDIVKIEGIDATGGNNQPNIPDIPAHLWYFQATDACN

SEQ ID NO: 10338 - protein, 269 aa, Thermomyces lanuginosus
EVSQDLFNQFNLFAQYSAAAYCGKNNDAPAGTNITCTGNACPEVEKADATFLYSFEDSGCGHVTGFLALDNTNKLIVLSFRGSWSIENWIANLNFFLKKINDICSGCRGHDGFTSSWRSVADTLRQKVEDAVREHPDYRVVFTGHSLGGALATVAGADLRGNGYDIDVFSYGAPRVGNRAFAEFLTVQTGGTLYRITHTNDIVPRLPPREFGYSHSSPEYWIKSGTLVPVTRNDIVKIEGIDATGGNNQPNIPDIPAHLWYFQATDACN

SEQ ID NO: 10339 - protein, 269 aa, Thermomyces lanuginosus
EVSQDLFNQFNLFAQYSAAAYCGKNNDAPAGTNITCTGNACPEVEKADATFLYSFEDSGGGWVTGFLALDNTNKLIVLSFRGSWSIENWIANLNFFLKKINDICSGCRGHDGFTSSWRSVADTLRQKVEDAVREHPDYRVVFTGHSLGGALATVAGADLRGNGYDIDVFSYGAPRVGNRAFAEFLTVQTGGTLYRITHTNDIVPRLPPREFGYSHSSPEYWIKSGTLVPVTRNDIVKIEGIDATGGNNQPNIPDIPAHLWYFQATDACN

SEQ ID NO: 10340 - protein, 269 aa, Thermomyces lanuginosus
EVSQDLFNQFNLFAQYSAAAYCGKNNDAPAGTNITCTGNACPEVEKADATFLYSFEDSGKGLVTGFLALDNTNKLIVLSFRGSWSIENWIANLNFFLKKINDICSGCRGHDGFTSSWRSVADTLRQKVEDAVREHPDYRVVFTGHSLGGALATVAGADLRGNGYDIDVFSYGAPRVGNRAFAEFLTVQTGGTLYRITHTNDIVPRLPPREFGYSHSSPEYWIKSGTLVPVTRNDIVKIEGIDATGGNNQPNIPDIPAHLWYFQATDACN

SEQ ID NO: 10341 - protein, 269 aa, Thermomyces lanuginosus
EVSQDLFNQFNLFAQYSAAAYCGKNNDAPAGTNITCTGNACPEVEKADATFLYSFEDSGGGVVTGFLALDNTNKLIVLSFRGSWSIENWIANLNFFLKKINDICSGCRGHDGFTSSWRSVADTLRQKVEDAVREHPDYRVVFTGHSLGGALATVAGADLRGNGYDIDVFSYGAPRVGNRAFAEFLTVQTGGTLYRITHTNDIVPRLPPREFGYSHSSPEYWIKSGTLVPVTRNDIVKIEGIDATGGNNQPNIPDIPAHLWYFQATDACN

SEQ ID NO: 10342 - protein, 262 aa, Thermomyces lanuginosus
EVSQDLFNQFNLFAQYSAAAYCGKNNDAPAGTNITCTGNACPEVEKADATFLYSFEDSGVGDVTGFLALDNTNKLIVLSFRGSRSIENWIGNLNFDLKEINDICSGCRGHDGFTSSWRSVADTLRQKVEDAVREHPDYRVVFTGHSLGGALATVAGADLRGNGYDIDVFSYGAPRVGNRAFAEFLTVQTGGTLYRITHTNDIVPRLPPREFGYSHSSPGYWIKSGTLVPVTRNDIVKIEGIDATGGNNQPNIPDIPAHLWYF

SEQ ID NO: 10343 - protein, 262 aa, Thermomyces lanuginosus
EVSQDLFNQFNLFAQYSAAAYTGKNNDAPAGTNITCTGNACPEVEKADATFLYSFEDSGVGDVTGFLALDNTNKLIVLSFRGSRSIENWIGNLNFDLKEINDICSGCRGHDGFTSSWRSVADTLRQKVEDAVREHPDYRVVFTGHSLGGALATVAGADLRGNGYDIDVFSYGAPRVGNRAFAEFLTVQTGGTLYRITHTNDIVPRLPPREFGYSHSSPEYWIKSGTLVPVTRNDIVKIEGIDATGGNNQPNIPDIPAHLWYF

SEQ ID NO: 10344 - protein, 269 aa, Thermomyces lanuginosus
EVSQDLFNQFNLFAQYSAAAYCGKNNDAPAGTNITCTGNACPEVEKADATFLYSFEDSGVGDVTGFLALDNTNKLIVLSFRGSSSIENWIANLNFFLKKINDICSGCRGHDGFTSSWRSVADTLRQKVADAVREHPDYRVVFTGHSLGGALATVAGADLRGNGYDIDVFSYGAPRVGNRAFAEFLTVQTGGTLYRITHTNDIIPRFPPREFGYSHSSPEYWIKSGTLVPVTRNDIVKIEGIDATGGNNQPNIPDIPAHLWYFQATDACN

SEQ ID NO: 10345 - protein, 269 aa, Thermomyces lanuginosus
EVSQDLFNQFNLFAQYSAAAYCGKNNDAPAGTNITCTGNACPEVEKADATFLYSFEGSGQGPVTGFLALDNTNKLIVLSFRGSWSIENWIANLNFFLKKINDICSGCRGHDGFTSSWRSVADTLRQKVEDAVREHPDYRVVFTGHSLGGALATVAGADLRGNGYDIDVFSYGAPRVGNRAFAEFLTVQTGGTLYRITHTNDIVPRLPPREFGYSHSSPEYWIKSGTLVPVTRNDIVKIEGIDATGGNNQPNIPDIPAHLWYFQATDACN

SEQ ID NO: 10346 - protein, 269 aa, Thermomyces lanuginosus
EVSQDLFNQFNLFAQYSAAAYCGKNNDAPAGTNITCTGNACPEVEKADATFLYSFEDSGSGLVTGFLALDNTNKLIVLSFRGSWSIENWIANLNFFLKKINDICSGCRGHDGFTSSWRSVADTLRQKVEDAVREHPDYRVVFTGHSLGGALATVAGADLRGNGYDIDVFSYGAPRVGNRAFAEFLTVQTGGTLYRITHTNDIVPRLPPREFGYSHSSPEYWIKSGTLVPVTRNDIVKIEGIDATGGNNQPNIPDIPAHLWYLQATDACN

SEQ ID NO: 10347 - protein, 269 aa, Thermomyces lanuginosus
VSQDLFNQFNLFAQYSAAAYCGKNNDAPAGTNITCTGNACPEVEKADATFLYSFEDSGVGDVTGFLALDNTNKLIVLSFRGSRSIENWIANLNFWLKKINDICSGCRGHDGFTSSWRSVADTLRQKVEDAVREHPDYRVVFTGHSLGGALATVAGADLRGNGYDIDVFSYGAPRVGNRAFAEFLTVQTGGTLYRITHTNDIVPRLPPREFGYSHSSPEYWIKSGTLVPVTRNDIVKIEGIDATGGNNRPNIPDIPAHLWYFGLIDTCNA

SEQ ID NO: 10348 - protein, 268 aa, Thermomyces lanuginosus
EVSQDLFNQFNLFAQYSAAAYCGKNNDAPAGTNITCTGNACPEVEKADATFLYSFEDSGVGDVTGFLALDNTNKLIVLSFRGSRSIENWIANLNFWLKKINDICSGCRGHDGFTSSWRSVADTLRQKVEDAVREHPDYRVVFTGHSLGGALATVAGADLRGNGYDIDVFSYGAPRVGNRAFAEFLTVQTGGTLYRITHTNDIVPRLPPREFGYSHSSPEYWIKSGTLVPVTRNDIVKIEGIDATGGNNQPNIPDIPAHLWYFGLIGTC

SEQ ID NO: 10349 - protein, 267 aa, Thermomyces lanuginosus; identical to SEQ ID NO: 6089

SEQ ID NO: 10350 - protein, 267 aa, Thermomyces lanuginosus
VSQDLFNQFNLFAQYSAAAYCGKNNDAPAGTNITCTGNACPEVEKADATFLYSFEDSGVGDVTGFLALDNTNKLIVLSFRGSRSIENWIGNLNFDLKEINDICSGCRGHDGFTSSWRSVADTLRQKVEDAVREHPDYRVVFTGHSLGGALATVAGADLRGNGYDIDVFSYGAPRVGNRAFAEFLTVQTGGTLYRITHTNDIVPRLPPREFGYSHSSPEYWIKSGTLVPVTRNDIVKICGIDATGGNNRPNIPDIPAHLWYFQATDAC

SEQ ID NO: 10351 - protein, 262 aa, Thermomyces lanuginosus
EVSQDLFNQFNLFAQYSAAAYCGKNNDAPAGTNITCTGNACPEVEKADATFLYSFEDSGVGDVTGFLALDNTNKLIVLSFRGSRSIENWIGNLNFDLKEINDICSGCRGHDGFTSSWRSVADTLRQKVEDAVREHPDYRVVFTGHSLGGALATVAGADLRGNGYDIDVFSYGAPRVGNRAFAEFLTVQTGGTLYRITHTNDIVPRLPPREFGYSHSSPEYWIKSGTLVPVRRRDIVKIEGIDATGGNNQPNIPDIPAHLWYF

SEQ ID NO: 10352 - protein, 261 aa, Thermomyces lanuginosus
VSQDLFNQFNLFAQYSAAAYCGKNNDAPAGTNITCTGNACPEVEKADATFLYSFEDSGVGDVTGFLALDNTNKLIVLSFRGSRSIENWIGNLNFSLKEINDICSGCRGHDGFTSSWRSVADTLRQKVEDAVREHPDYRVVFTGHSLGGALATVAGADLRGNGYDIDVFSYGAPRVGNRAFAEFLTVQTGGTLYRITHTNDIVPRLPPREFGYSHSSPEYWIKSGTLVPVTRNDIVKICGIDATGGNNRPNIPDIPAHLWYF

SEQ ID NO: 10353 - protein, 273 aa, Thermomyces lanuginosus
EVSQDLFNQFNLFAQYSAAAYCGKNNDAPAGTNITCTGNACPEVEKADATFLYSFEDSGVGDVTGFLALDNTNKLIVLSFRGSRSIENWIANLNFWLKKINDICSGCRGHDGFTSSWRSVADTLRQKVEDAVREHPDYRVVFTGHSLGGALATVAGADLRGNGYDIDVFSYGAPRVGNRAFAEFLTVQTGGTLYRITHTNDIVPRLPPREFGYSHSSPEYWIKSGTLVPVTRNDIVKIEGIDATGGNNQKTFRYLAHLWYFQATDACNAGGFS

SEQ ID NO: 10354 - protein, 272 aa, Thermomyces lanuginosus
VSQDLFNQFNLFAQYSAAAYCGKNNDAPAGTNITCTGNACPEVEKADATFLYSFEDSGVGDVTGFLALDNTNKLIVLSFRGSRSIENWIANLNFWLKKINDICSGCRGHDGFTSSWRSVADTLRQKVEDAVREHPDYRVVFTGHSLGGALATVAGADLRGNGYDIDVFSYGAPRVGNRAFAEFLTVQTGGTLYRITHTNDIVPRLPPREFGYSHSSPEYWIKSGTLVPVTRNDIVKIEGIDATGGNNRPNIPDIPAHLWYFGLIDTCSAGGF

SEQ ID NO: 10355 - protein, 272 aa, Thermomyces lanuginosus
VSQDLFNQFNLFAQYSAAAYCGKNNDAPAGTNITCTGNACPEVEKADATFLYSFEDSGVGDVTGFLALDNTNKLIVLSFRGSRSIENWIANLNFWLKKINDICSGCRGHDGFTSSWRSVADTLRQKVEDAVREHPDYRVVFTGHSLGGALATVAGADLRGNGYDIDVFSYGAPRVGNRAFAEFLTVQTGGTLYRITHTNDIVPRLPPREFGYSHSSPEYWIKSGTLVPVTRNDIVKIEGIDATGGNNRPNIPDIPAHLWYFGLISTCNAGGF

SEQ ID NO: 10356 - protein, 271 aa, Thermomyces lanuginosus
VSQDLFNQFNLFAQYSAAAYCGKNNDAPAGTNITCTGNACPEVEKADATFLYSFEDSGVGDVTGFLALDNTNKLIVLSFRGSRSIENWIANLNFWLKKINDICSGCRGHDGFTSSWRSVADTLRQKVEDAVREHPDYRVVFTGHSLGGALATVAGADLRGNGYDIDVFSYGAPRVGNRAFAEFLTVQTGGTLYRITHTNDIVPRLPPREFGYSHSSPEYWIKSGTLVPVTRNDIVKIEGIDATGGNNRPNIPDIPAHLWYFGFITCLAGGF

SEQ ID NO: 10357 - protein, 268 aa, Thermomyces lanuginosus
VSQDLFNQFNLFAQYSAAAYCGKNNDAPAGTNITCTGNACPEVEKADATFLYSFEDSGVGDVTGFLALDNTNKLIVLSFRGSRSIENWIANLNFWLKKINDICSGCRGHDGFTSSWRSVADTLRQKVEDAVREHPDYRVVFTGHSLGGALATVAGADLRGNGYDIDVFSYGAPRVGNRAFAEFLTVQTGGTLYRITHTNDIVPRLPPREFGYSHSSPEYWIKSGTLVPVTRNDIVKIEGIDATGGNNRPNIPDIPAHLWYFGPIGQCN

SEQ ID NO: 10358 - protein, 268 aa, Thermomyces lanuginosus
VSQDLFNQFNLFAQYSAAAYCGKNNDAPAGTNITCTGNACPEVEKADATFLYSFEDSGVGDVTGFLALDNTNKLIVLSFRGSRSIENWIANLNFWLKKINDICSGCRGHDGFTSSWRSVADTLRQKVEDAVREHPDYRVVFTGHSLGGALATVAGADLRGNGYDIDVFSYGAPRVGNRAFAEFLTVQTGGTLYRITHTNDIVPRLPPREFGYSHSSPEYWIKSGTLVPVTRNDIVKIEGIDATGGNNRPNIPDIPAHLWYFGPIGTCN

SEQ ID NO: 10359 - protein, 268 aa, Thermomyces lanuginosus
VSQDLFNQFNLFAQYSAAAYCGKNNDAPAGTNITCTGNACPEVEKADATFLYSFEDSGVGDVTGFLALDNTNKLIVLSFRGSRSIENWIANLNFWLKKINDICSGCRGHDGFTSSWRSVADTLRQKVEDAVREHPDYRVVFTGHSLGGALATVAGADLRGNGYDIDVFSYGAPRVGNRAFAEFLTVQTGGTLYRITHTNDIVPRLPPREFGYSHSSPEYWIKSGTLVPVTRNDIVKIEGIDATGGNNRPNIPDIPAHLWYFRLLGTCN

SEQ ID NO: 10360 - protein, 267 aa, Thermomyces lanuginosus
VSQDLFNQFNLFAQYSAAAYCGKNNDAPAGTNITCTGNACPEVEKADATFLYSFEDSGVGDVTGFLALDNTNKLIVLSFRGSRSIENWIANLNFWLKKINDICSGCRGHDGFTSSWRSVADTLRQKVEDAVREHPDYRVVFTGHSLGGALATVAGADLRGNGYDIDVFSYGAPRVGNRAFAEFLTVQTGGTLYRITHTNDIVPRLPPREFGYSHSSPEYWIKSGTLVPVTRNDIVKIEGIDATGGNNRPNIPDIPAHLWYFGLIATC

SEQ ID NO: 10361 - protein, 267 aa, Thermomyces lanuginosus
VSQDLFNQFNLFAQYSAAAYCGKNNDAPAGTNITCTGNACPEVEKADATFLYSFEDSGVGDVTGFLALDNTNKLIVLSFRGSRSIENWIANLNFWLKKINDICSGCRGHDGFTSSWRSVADTLRQKVEDAVREHPDYRVVFTGHSLGGALATVAGADLRGNGYDIDVFSYGAPRVGNRAFAEFLTVQTGGTLYRITHTNDIVPRLPPREFGYSHSSPEYWIKSGTLVPVTRNDIVKIEGIDATGGNNRPNIPDIPAHLWYFGLISSC

SEQ ID NO: 10362 - protein, 267 aa, Thermomyces lanuginosus
VSQDLFNQFNLFAQYSAAAYCGKNNDAPAGTNITCTGNACPEVEKADATFLYSFEDSGVGDVTGFLALDNTNKLIVLSFRGSRSIENWIANLNFWLKKINDICSGCRGHDGFTSSWRSVADTLRQKVEDAVREHPDYRVVFTGHSLGGALATVAGADLRGNGYDIDVFSYGAPRVGNRAFAEFLTVQTGGTLYRITHTNDIVPRLPPREFGYSHSSPEYWIKSGTLVPVTRNDIVKIEGIDATGGNNRPNIPDIPAHLWYFGXIGTC

SEQ ID NO: 10363 - protein, 267 aa, Thermomyces lanuginosus
VSQDLFNQFNLFAQYSAAAYCGKNNDAPAGTNITCTGNACPEVEKADATFLYSFEDSGVGDVTGFLALDNTNKLIVLSFRGSRSIENWIANLNFWLKKINDICSGCRGHDGFTSSWRSVADTLRQKVEDAVREHPDYRVVFTGHSLGGALATVAGADLRGNGYDIDVFSYGAPRVGNRAFAEFLTVQTGGTLYRITHTNDIVPRLPPREFGYSHSSPEYWIKSGTLVPVTRNDIVKIEGIDATGGNNRPNIPDIPAHLWYFGCNPXC

SEQ ID NO: 10364 - protein, 267 aa, Thermomyces lanuginosus
VSQDLFNQFNLFAQYSAAAYCGKNNDAPAGTNITCTGNACPEVEKADATFLYSFEDSGVGDVTGFLALDNTNKLIVLSFRGSRSIENWIANLNFWLKKINDICSGCRGHDGFTSSWRSVADTLRQKVEDAVREHPDYRVVFTGHSLGGALATVAGADLRGNGYDIDVFSYGAPRVGNRAFAEFLTVQTGGTLYRITHTNDIVPRLPPREFGYSHSSPEYWIKSGTLVPVTRNDIVKIEGIDATGGNNRPNIPDIPAHLWYFGGGFXC

SEQ ID NO: 10365 - protein, 267 aa, Thermomyces lanuginosus; identical to SEQ ID NO: 6657

SEQ ID NO: 10366 - protein, 272 aa, Thermomyces lanuginosus
VSQDLFNQFNLFAQYSAAAYCGKNNDAPAGTNITCTGNACPEVEKADATFLYSFEDSGVGDVTGFLALDNTNKLIVLSFRGSRSIENWIANLNFWLKKINDICSGCRGHDGFTSSWRSVADTLRQKVEDAVREHPDYRVVFTGHSLGGALATVAGADLRGNGYDIDVFSYGAPRVGNRAFAEFLTVQTGGTLYRITHTNDIVPRLPPREFGYSHSSPEYWIKSGTLVPVTRNDIVKIEGIDATGGNNRPNIPDIPAHLWYFELIDTCNPVGF

SEQ ID NO: 10367 - protein, 272 aa, Thermomyces lanuginosus
VSQDLFNQFNLFAQYSAAAYCGKNNDAPAGTNITCTGNACPEVEKADATFLYSFEDSGVGDVTGFLALDNTNKLIVLSFRGSRSIENWIANLNFWLKKINDICSGCRGHDGFTSSWRSVADTLRQKVEDAVREHPDYRVVFTGHSLGGALATVAGADLRGNGYDIDVFSYGAPRVGNRAFAEFLTVQTGGTLYRITHTNDIVPRLPPREFGYSHSSPEYWIKSGTLVPVTRNDIVKIEGIDATGGNNRPNIPDIPAHLWYFALISTCNAGRF

SEQ ID NO: 10368 - protein, 272 aa, Thermomyces lanuginosus
VSQDLFNQFNLFAQYSAAAYCGKNNGAPAGTNITCTGNACPEVEKADATFLYSFEDSGVGDVTGFLALDNTNKLIVLSFRGSRSIENWIANLNFWLKKINDICSGCRGHDGFTSSWRSVADTLRQKVEDAVREHPDYRVVFTGHSLGGALATVAGADLRGNGYDIDVFSYGAPRVGNRAFAEFLTVQTGGTLYRITHTNDIVPRLPPREFGYSHSSPEYWIKSGTLVPVTRNDIVKIEGIDATGGNNRPNIPDIPAHLWYFGLISTCNAGGF

SEQ ID NO: 10369 - protein, 269 aa, Thermomyces lanuginosus
EVSQDLFNQFNLFAQYSAAAYCGKNNDAPAGTNITCTGNACPEVEKADATFLYSFEDSGVGDVTGFLALDNTNKLIVLSFRGSRSIENWIANLNFWLKKINDICSGCRGHDGFTSSWRSVADTLRQKVEDAVREHPDYRVVFTGHSLGGALATVAGADLRGNGYDIDVFSYGAPRVGNRAFAEFLTVQTGGTLYRITHTNDIVPRLPPREFGYSHSSPEYWIKSGTLVPVTRNDIVKIEGIDATGGSDKPTIMSILAHLWYFQATDACN

SEQ ID NO: 10370 - protein, 268 aa, Thermomyces lanuginosus
EVSQDLFNQFNLFAQYSAAAYCGKNNDAPAGTNITCTGNACPEVEKADATFLYSFEDSGVGDVTGFLALDNTNKLIVLSFRGSRSIENWIANLNFDLKEINDICSGCRGHDGFTSSWRSVADTLRQKVEDAVREHPDYRVVFTGHSLGGALATVAGADLRGNGYDIDVFSYGAPRVGNRAFAEFLTVQTGGTLYRITHTNDIVPRLPPREFGYSHSSPEYWIKSGTLVPVTRNDIVKIEGIDATGGNNQPNIPDIPAHLWYFGLIGTC

SEQ ID NO: 10371 - protein, 268 aa, Thermomyces lanuginosus
EVSQDLFNQFNLFAQYSAAAYCGKNNDAPAGTNITCTGNACPEVEKADATFLYSFEDSGVGDVTGFLALDNTNKLIVLSFRGSRSIENWIGNLNFDLKEINDICSGCRGHDGFTSSWRSVADTLRQKVEDAVREHPDYRVVFTGHSLGGALATVAGADLRGNGYDIDVFSYGAPRVGNRAFAEFLTVQTGGTLYRITHTNDIVPRLPPREFGYSHSSPEYWIKSGTLVPVTRNDIVKIEGIDATGGNNQPNIPDIPAHLWYFFAISEC

SEQ ID NO: 10372 - protein, 268 aa, Thermomyces lanuginosus
EVSQDLFNQFNLFAQYSAAAYCGKNNDAPAGTNITCTGNACPEVEKADATFLYSFEDSGVGDVTGFLALDNTNKLIVLSFRGSRSIENWIGNLNFDLKEINDICSGCRGHDGFTSSWRSVADTLRQKVEDAVREHPDYRVVFTGHSLGGALATVAGADLRGNGYDIDVFSYGAPRVGNRAFAEFLTVQTGGTLYRITHTNDIVPRLPPREFGYSHSSPEYWIKSGTLVPVTRNDIVKIEGIDATGGNNQPNIPDIPAHLWYFGLIDTC

SEQ ID NO: 10373 - protein, 268 aa, Thermomyces lanuginosus
EVSQDLFNQFNLFAQYSAAAYCGKNNDAPAGTNITCTGNACPEVEKADATFLYSFEDSGVGDVTGFLALDNTNKLIVLSFRGSRSIENWIGNLNFDLKKINDICSGCRGHDGFTSSWRSVADTLRQKVEDAVREHPDYRVVFTGHSLGGALATVAGADLRGNGYDIDVFSYGAPRVGNRAFAEFLTVQTGGTLYRITHTNDIVPRLPPREFGYSHSSPEYWIKSGTLVPVTRNDIVKIEGIDATGGNNQPNIPDIPAHLWYFGLIGTC

SEQ ID NO: 10374 - protein, 268 aa, Synthetic construct
EVSQDLFNQFNLFAQYSAAAYCGKNNDAPAGTNITCTGNACPEVEKADATFLYSFEDSGVGDVTGFLALDNTNKLIVLSFRGSRSIENWIGNLNFWLKEINDICSGCRGHDGFTSSWRSVADTLRQKVEDAVREHPDYRVVFTGHSLGGALATVAGADLRGNGYDIDVFSYGAPRVGNRAFAEFLTVQTGGTLYRITHTNDIVPRLPPREFGYSHSSPEYWIKSGTLVPVTRNDIVKIEGIDATGGNNQPNIPDIPAHLWYFGLIGTC

SEQ ID NO: 10375 - protein, 267 aa, Thermomyces lanuginosus
VSQDLFNQFNLFAQYSAAAYCGKNNDAPAGTNITCTGNACPEVEKADATFLYSFEDSGVGDVTGFLALDNTNKLIVLSFRGSRSIENWIANLNFWLKKINDICSGCRGHDGFTSSWRSVADTLRQKVEDAVREHPDYRVVFTGHSLGGALATVAGADLRGNGYDIDVFSYGAPRVGNRAFAEFLTVQTGGTLYRITHTNDIVPRLPPREFGYSHSSPEYWIKSRTLVPVTRNDIVKIEGIDATGGNNRPNIPDIPAHLWYFGLIGTC

SEQ ID NO: 10376 - protein, 267 aa, Thermomyces lanuginosus
VSQDLFNQFNLFAQYSAAAYCGKNNDAPAGTNITCTGNACPEVEKADATFLYSFEDSGVGDVTGFLALDNTNKLIVLSFRGSRSIENWIANLNFWLKEINDICSGCRGHDGFTSSWRSVADTLRQKVEDAVREHPDYRVVFTGHSLGGALATVAGADLRGNGYDIDVFSYGAPRVGNRAFAEFLTVQTGGTLYRITHTNDIVPRLPPREFGYSHSSPEYWIKSGTLVPVTRNDIVKICGIDATGGNNRPNIPDIPAHLWYFGLIDTC

SEQ ID NO: 10377 - protein, 267 aa, Thermomyces lanuginosus
VSQDLFNQFNLFAQYSAAAYCGKNNDAPAGTNITCTGNACPEVEKADATFLYSFEDSGVGDVTGFLALDNTNKLIVLSFRGSRSIENWIANLNFNLKKINDICSGCRGHDGFTSSWRSVADTLRQKVEDAVREHPDYRVVFTGHSLGGALATVAGADLRGNGYDIDVFSYGAPRVGNRAFAEFLTVQTGGTLYRITHTNDIVPRLPPREFGYSHSSPEYWIKSGTLVPVTRNDIVKIEGIDATGGNNRPNIPDIPAHLWYFGLIGTC

SEQ ID NO: 10378 - protein, 271 aa, Thermomyces lanuginosus
VSQDLFNQFNLFAQYSAAAYCGKNNDAPAGTNITCTGNACPEVEKADATFLYSFEDSGVGDVTGFLALDNTNKLIVLSFRGSRSIENWIANLNFWLKKINDICSGCRGHDGFTSSWRSVADTLRQKVEDAVREHPDYRVVFTGHSLGGALATVAGADLRGNGYDIDVFSYGAPRVGNRAFAEFLTVQTGGTLYRITHTNDIVPRLPPREFGYSHSSPEYWIKSGTLVPVTRNDIVKIEGIDATGGNNRPNIPDIPAHLWYFGPITCIPRGF

SEQ ID NO: 10379 - protein, 270 aa, Thermomyces lanuginosus
VSQDLFNQFNLFAQYSAAAYCGKNNDAPAGTNITCTGNACPEVEKADATFLYSFEDSGVGDVTGFLALDNTNKLIVLSFRGSRSIENWIANLNFWLKKINDICSGCRGHDGFTSSWRSVADTLRQKVEDAVREHPDYRVVFTGHSLGGALATVAGADLRGNGYDIDVFSYGAPRVGNRAFAEFLTVQTGGTLYRITHTNDIVPRLPPREFGYSHSSPEYWIKSGTLVPVTRNDIVKIEGIDATGGNNRPNIPDIPAHLWYFGLISTCLDG

SEQ ID NO: 10380 - protein, 270 aa, Thermomyces lanuginosus
VSQDLFNQFNLFAQYSAAAYCGKNNDAPAGTNITCTGNACPEVEKADATFLYSFEDSGVGDVTGFLALDNTNKLIVLSFRGSRSIENWIANLNFWLKKINDICSGCRGHDGFTSSWRSVADTLRQKVEDAVREHPDYRVVFTGHSLGGALATVAGADLRGNGYDIDVFSYGAPRVGNRAFAEFLTVQTGGTLYRITHTNDIVPRLPPREFGYSHSSPEYWIKSGTLVPVTRNDIVKIEGIDATGGNNRPNIPDIPAHLWYFGLIATCLPG

SEQ ID NO: 10381 - protein, 269 aa, Thermomyces lanuginosus
VSQDLFNQFNLFAQYSAAAYCGKNNDAPAGTNITCTGNACPEVEKADATFLYSFEDSGVGDVTGFLALDNTNKLIVLSFRGSRSIENWIANLNFWLKKINDICSGCRGHDGFTSSWRSVADTLRQKVEDAVREHPDYRVVFTGHSLGGALATVAGADLRGNGYDIDVFSYGAPRVGNRAFAEFLTVQTGGTLYRITHTNDIVPRLPPREFGYSHSSPEYWIKSGTLVPVTLNDIVKIEGIDATGGNNRPNIPDIPAHLWYFGLISTCLA

SEQ ID NO: 10382 - protein, 268 aa, Thermomyces lanuginosus; identical to SEQ ID NO: 2797

SEQ ID NO: 10383 - protein, 268 aa, Thermomyces lanuginosus
EVSQDLFNQFNLFAQYSAAAYCGKNNDAPAGTNITCTGNACPEVEKADATFLYSFEDSGVGDVTGFLALDNTNKLIVLSFRGSRSIENWIQNLNFDLKEINDICSGCRGHDGFTSSWRSVADTLRQKVEDAVREHPDYRVVFTGHSLGGALATVAGADLRGNGYDIDVFSYGAPRVGNRAFAEFLTVQTGGTLYRITHTNDIVPRLPPREFGYSHSSPEYWIKSGTLVPVTRNDIVKIEGIDATGGNNQPNIPDIPAHLWYFGLIGTC

SEQ ID NO: 10384 - protein, 268 aa, Thermomyces lanuginosus
EVSQDLFNQFNLFAQYSAAAYCGKNNDAPAGTNITCTGNACPEVEKADATFLYSFEDSGVGDVTGFLALDNTNKLIVLSFRGSRSIENWIGNLNFDLKEINDICSGCRGHDGFTSSWRSVADTLRQKVEDAVREHPDYRVVFTGHSLGGALATVAGADLRGNGYDIDVFSYGAPRVGNRAFAEFLTVQTGGTLYRITHTNDIVPRLPPREFGYSHSSPEYWIKSGTLVPVTRNDIVKIEGIDATGGNNQPNIPDIPAHLWYFGLIVTC

SEQ ID NO: 10385 - protein, 268 aa, Thermomyces lanuginosus
EVSQDLFNQFNLFAQYSAAAYCGKNNDAPAGTNITCTGNACPEVEKADATFLYSFEDSGVGDVTGFLALDNTNKLIVLSFRGSRSIENWIRNLNFDLKEINDICSGCRGHDGFTSSWRSVADTLRQKVEDAVREHPDYRVVFTGHSLGGALATVAGADLRGNGYDIDVFSYGAPRVGNRAFAEFLTVQTGGTLYRITHTNDIVPRLPPREFGYSHSSPEYWIKSGTLVPVTRNDIVKIEGIDATGGNNQPNIPDIPAHLWYFGLIGTC

SEQ ID NO: 10386 - protein, 268 aa, Thermomyces lanuginosus
EVSQDLFNQFNLFAQYSAAAYCGKNNDAPAGTNITCTGNACPEVEKADATFLYSFEDSGVGDVTGFLALDNTNKLIVLSFRGSRSIENWIGNLNFSLKEINDICSGCRGHDGFTSSWRSVADTLRQKVEDAVREHPDYRVVFTGHSLGGALATVAGADLRGNGYDIDVFSYGAPRVGNRAFAEFLTVQTGGTLYRITHTNDIVPRLPPREFGYSHSSPEYWIKSGTLVPVTRNDIVKIEGIDATGGNNQPNIPDIPAHLWYFGLISTC

SEQ ID NO: 10387 - protein, 268 aa, Thermomyces lanuginosus
EVSQDLFNQFNLFAQYSAAAYCGKNNDAPAGTNITCTGNACPEVEKADATFLYSFEDSGVGDVTGFLALDNTNKLIVLSFRGSRSIENWIGNLNFSLKEINDICSGCRGHDGFTSSWRSVADTLRQKVEDAVREHPDYRVVFTGHSLGGALATVAGADLRGNGYDIDVFSYGAPRVGNRAFAEFLTVQTGGTLYRITHTNDIVPRLPPREFGYSHSSPEYWIKSGTLVPVTRNDIVKIEGIDATGGNNQPNIPDIPAHLWYFGLIWTC

SEQ ID NO: 10388 - protein, 268 aa, Thermomyces lanuginosus
EVSQDLFNQFNLFAQYSAAAYCGKNNDAPAGTNITCTGNACPEVEKADATFLYSFEDSGVGDVTGFLALDNTNKLIVLSFRGSRSIENWIGNLNFDLKEINDICSGCRGHDGFTSSWRSVADTLRQKVEDAVREHPDYRVVFTGHSLGGALATVAGADLRGNGYDIDVFSYGAPRVGNRAFAEFLTVQTGGTLYRITHTNDIVPRLPPREFGYSHSSPEYWIKSGTLVPVTRNDIVKIEGIDATGGNNQPNIPDIPAHLWYFMLIGTC

SEQ ID NO: 10389 - protein, 268 aa, Thermomyces lanuginosus
EVSQDLFNQFNLFAQYSAAAYCGKNNDAPAGTNITCTGNACPEVEKADATFLYSFEDSGVGDVTGFLALDNTNKLIVLSFRGSRSIENWIGNLNFDLKKINDICSGCRGHDGFTSSWRSVADTLRQKVEDAVREHPDYRVVFTGHSLGGALATVAGADLRGNGYDIDVFSYGAPRVGNRAFAEFLTVQTGGTLYRITHTNDIVPRLPPREFGYSHSSPEYWIKSGTLVPVTRNDIVKIEGIDATGGNNRPNIPDIPAHLWYFGLIGTC

SEQ ID NO: 10390 - protein, 268 aa, Thermomyces lanuginosus; identical to SEQ ID NO: 7062

SEQ ID NO: 10391 - protein, 268 aa, Thermomyces lanuginosus
EVSQDLFNQFNLFAQYSAAAYCGKNNDAPAGTNITCTGNACPEVEKADATFLYSFEDSGVGDVTGFLALDNTNKLIVLSFRGSRSIENWIGNLNFFLKEINDICSGCRGHDGFTSSWRSVADTLRQKVEDAVREHPDYRVVFTGHSLGGALATVAGADLRGNGYDIDVFSYGAPRVGNRAFAEFLTVQTGGTLYRITHTNDIVPRLPPREFGYSHSSPEYWIKSGTLVPVTRNDIVKIEGIDATGGNNQPNIPDIPAHLWYFGLISTC

SEQ ID NO: 10392 - protein, 268 aa, Thermomyces lanuginosus
EVSQDLFNQFNLFAQYSAAAYCGKNNDAPAGTNITCTGNACPEVEKADATFLYSFEDSGVGDVTGFLALDNTNKLIVLSFRGSRSIENWIGNLNFDLKTINDICSGCRGHDGFTSSWRSVADTLRQKVEDAVREHPDYRVVFTGHSLGGALATVAGADLRGNGYDIDVFSYGAPRVGNRAFAEFLTVQTGGTLYRITHTNDIVPRLPPREFGYSHSSPEYWIKSGTLVPVTRNDIVKIEGIDATGGNNQPNIPDIPAHLWYFGLIGTC

SEQ ID NO: 10393 - protein, 268 aa, Thermomyces lanuginosus
EVSQDLFNQFNLFAQYSAAAYCGKNNDAPAGTNITCTGNACPEVEKADATFLYSFEDSGVGDVTGFLALDNTNKLIVLSFRGSRSIENWIGNLNFDLKEINDICSGCRGHDGFTSSWRSVADTLRQKVEDAVREHPDYRVVFTGHSLGGALATVAGADLRGNGYDIDVFSYGAPRVGNRAFAEFLTVQTGGTLYRITHTNDIVPRLPPREFGYSHSSPEYWIKSGTLVPVTRNDIVKIEGIDATGGNNQPNIPDIPAHLWYFCLIGTC

SEQ ID NO: 10394 - protein, 268 aa, Thermomyces lanuginosus
EVSQDLFNQFNLFAQYSAAAYCGKNNDAPAGTNITCTGNACPEVEKADATFLYSFEDSGVGDVTGFLALDNTNKLIVLSFRGSRSIENWIKNLNFDLKEINDICSGCRGHDGFTSSWRSVADTLRQKVEDAVREHPDYRVVFTGHSLGGALATVAGADLRGNGYDIDVFSYGAPRVGNRAFAEFLTVQTGGTLYRITHTNDIVPRLPPREFGYSHSSPEYWIKSGTLVPVTRNDIVKIEGIDATGGNNQPNIPDIPAHLWYFGLIGTC

SEQ ID NO: 10395 - protein, 268 aa, Thermomyces lanuginosus
EVSQDLFNQFNLFAQYSAAAYCGKNNDAPAGTNITCTGNACPEVEKADATFLYSFEDSGVGDVTGFLALDNTNKLIVLSFRGSRSIENWIGNLNFSLKEINDICSGCRGHDGFTSSWRSVADTLRQKVEDAVREHPDYRVVFTGHSLGGALATVAGADLRGNGYDIDVFSYGAPRVGNRAFAEFLTVQTGGTLYRITHTNDIVPRLPPREFGYSHSSPEYWIKSGTLVPVTRNDIVKIEGIDATGGNNQPNIPDIPAHLWYFGLIATC

SEQ ID NO: 10396 - protein, 268 aa, Thermomyces lanuginosus
EVSQDLFNQFNLFAQYSAAAYCGKNNDAPAGTNITCTGNACPEVEKADATFLYSFEDSGVGDVTGFLALDNTNKLIVLSFRGSRSIENWIGNLNFDLKSINDICSGCRGHDGFTSSWRSVADTLRQKVEDAVREHPDYRVVFTGHSLGGALATVAGADLRGNGYDIDVFSYGAPRVGNRAFAEFLTVQTGGTLYRITHTNDIVPRLPPREFGYSHSSPEYWIKSGTLVPVTRNDIVKIEGIDATGGNNQPNIPDIPAHLWYFGLIGTC

SEQ ID NO: 10397 - protein, 268 aa, Thermomyces lanuginosus
EVSQDLFNQFNLFAQYSAAAYCGKNNDAPAGTNITCTGNACPEVEKADATFLYSFEDSGVGDVTGFLALDNTNKLIVLSFRGSRSIENWIGNLNFDLKWINDICSGCRGHDGFTSSWRSVADTLRQKVEDAVREHPDYRVVFTGHSLGGALATVAGADLRGNGYDIDVFSYGAPRVGNRAFAEFLTVQTGGTLYRITHTNDIVPRLPPREFGYSHSSPEYWIKSGTLVPVTRNDIVKIEGIDATGGNNQPNIPDIPAHLWYFGLIGTC

SEQ ID NO: 10398 - protein, 268 aa, Thermomyces lanuginosus
EVSQDLFNQFNLFAQYSAAAYCGKNNDAPAGTNITCTGNACPEVEKADATFLYSFEDSGVGDVTGFLALDNTNKLIVLSFRGSRSIENWIGNLNFDLKQINDICSGCRGHDGFTSSWRSVADTLRQKVEDAVREHPDYRVVFTGHSLGGALATVAGADLRGNGYDIDVFSYGAPRVGNRAFAEFLTVQTGGTLYRITHTNDIVPRLPPREFGYSHSSPEYWIKSGTLVPVTRNDIVKIEGIDATGGNNQPNIPDIPAHLWYFGLIGTC

SEQ ID NO: 10399 - protein, 268 aa, Thermomyces lanuginosus
EVSQDLFNQFNLFAQYSAAAYCGKNNDAPAGTNITCTGNACPEVEKADATFLYSFEDSGVGDVTGFLALDNTNKLIVLSFRGSRSIENWIGNLNFDLKEINDICSGCRGHDGFTSSWRSVADTLRQKVEDAVREHPDYRVVFTGHSLGGALATVAGADLRGNGYDIDVFSYGAPRVGNRAFAEFLTVQTGGTLYRITHTNDIVPRLPPREFGYSHSSPEYWIKSGTLVPVTRNDIVKIEGIDATGGNNQPNIPDIPAHLWYFGLIGMC

SEQ ID NO: 10400 - protein, 268 aa, Thermomyces lanuginosus
EVSQDLFNQFNLFAQYSAAAYCGKNNDAPAGTNITCTGNACPEVEKADATFLYSFEDSGVGDVTGFLALDNTNKLIVLSFRGSRSIENWIGNLNFDLKKINDICSGCRGHDGFTSSWRSVADTLRQKVEDAVREHPDYRVVFTGHSLGGALATVAGADLRGNGYDIDVFSYGAPRVGNRAFAEFLTVQTGGTLYRITHTNDIVPRLPPREFGYSHSSPEYWIKSGTLVPVTRNDIVKIEGIDATGGNNHPNIPDIPAHLWYFGLIGTC

SEQ ID NO: 10401 - protein, 268 aa, Thermomyces lanuginosus
EVSQDLFNQFNLFAQYSAAAYCGKNNDAPAGTNITCTGNACPEVEKADATFLYSFEDSGVGDVTGFLALDNTNKLIVLSFRGSRSIENWIGNLNFFLKEINDICSGCRGHDGFTSSWRSVADTLRQKVEDAVREHPDYRVVFTGHSLGGALATVAGADLRGNGYDIDVFSYGAPRVGNRAFAEFLTVQTGGTLYRITHTNDIVPRLPPREFGYSHSSPEYWIKSGTLVPVTRNDIVKIEGIDATGGNNQPNIPDIPAHLWYFGLIATC

SEQ ID NO: 10402 - protein, 268 aa, Thermomyces lanuginosus
EVSQDLFNQFNLFAQYSAAAYCGKNNDAPAGTNITCTGNACPEVEKADATFLYSFEDSGVGDVTGFLALDNTNKLIVLSFRGSRSIENWIGNLNFDLKEINDICSGCRGHDGFTSSWRSVADTLRQKVEDAVREHPDYRVVFTGHSLGGALATVAGADLRGNGYDIDVFSYGAPRVGNRAFAEFLTVQTGGTLYRITHTNDIVPRLPPREFGYSHSSPEYWIKSGTLVPVTRNDIVKIEGIDATGGNNQPNIPDIPAHLWYFGQIGTC

SEQ ID NO: 10403 - protein, 268 aa, Thermomyces lanuginosus
EVSQDLFNQFNLFAQYSAAAYCGKNNDAPAGTNITCTGNACPEVEKADATFLYSFEDSGVGDVTGFLALDNTNKLIVLSFRGSRSIENWIGNLNFDLKEINDICSGCRGHDGFTSSWRSVADTLRQKVEDAVREHPDYRVVFTGHSLGGALATVAGADLRGNGYDIDVFSYGAPRVGNRAFAEFLTVQTGGTLYRITHTNDIVPRLPPREFGYSHSSPEYWIKSGTLVPVTRNDIVKIEGIDATGGNNQPNIPDIPAHLWYFALIATC

SEQ ID NO: 10404 - protein, 268 aa, Thermomyces lanuginosus
EVSQDLFNQFNLFAQYSAAAYCGKNNDAPAGTNITCTGNACPEVEKADATFLYSFEDSGVGDVTGFLALDNTNKLIVLSFRGSRSIENWIGNLNFDLKEINDICSGCRGHDGFTSSWRSVADTLRQKVEDAVREHPDYRVVFTGHSLGGALATVAGADLRGNGYDIDVFSYGAPRVGNRAFAEFLTVQTGGTLYRITHTNDIVPRLPPREFGYSHSSPEYWIKSGTLVPVTRNDIVKIEGIDATGGNNQPNIPDIPAHLWYFALIYTC

SEQ ID NO: 10405 - protein, 268 aa, Thermomyces lanuginosus
EVSQDLFNQFNLFAQYSAAAYCGKNNDAPAGTNITCTGNACPEVEKADATFLYSFEDSGVGDVTGFLALDNTNKLIVLSFRGSRSIENWIGNLNFDLKEINDICSGCRGHDGFTSSWRSVADTLRQKVEDAVREHPDYRVVFTGHSLGGALATVAGADLRGNGYDIDVFSYGAPRVGNRAFAEFLTVQTGGTLYRITHTNDIVPRLPPREFGYSHSSPEYWIKSGTLVPVTRNDIVKIEGIDATGGNNQPNIPDIPAHLWYFGTIGTC

SEQ ID NO: 10406 - protein, 268 aa, Thermomyces lanuginosus
EVSQDLFNQFNLFAQYSAAAYCGKNNDAPAGTNITCTGNACPEVEKADATFLYSFEDSGVGDVTGFLALDNTNKLIVLSFRGSRSIENWILNLNFDLKEINDICSGCRGHDGFTSSWRSVADTLRQKVEDAVREHPDYRVVFTGHSLGGALATVAGADLRGNGYDIDVFSYGAPRVGNRAFAEFLTVQTGGTLYRITHTNDIVPRLPPREFGYSHSSPEYWIKSGTLVPVTRNDIVKIEGIDATGGNNQPNIPDIPAHLWYFGLIGTC

SEQ ID NO: 10407 - protein, 268 aa, Thermomyces lanuginosus
EVSQDLFNQFNLFAQYSAAAYCGKNNDAPAGTNITCTGNACPEVEKADATFLYSFEDSGVGDVTGFLALDNTNKLIVLSFRGSRSIENWIGNLNFPLKEINDICSGCRGHDGFTSSWRSVADTLRQKVEDAVREHPDYRVVFTGHSLGGALATVAGADLRGNGYDIDVFSYGAPRVGNRAFAEFLTVQTGGTLYRITHTNDIVPRLPPREFGYSHSSPEYWIKSGTLVPVTRNDIVKIEGIDATGGNNQPNIPDIPAHLWYFGLIGTC

SEQ ID NO: 10408 - protein, 268 aa, Thermomyces lanuginosus
EVSQDLFNQFNLFAQYSAAAYCGKNNDAPAGTNITCTGNACPEVEKADATFLYSFEDSGVGDVTGFLALDNTNKLIVLSFRGSRSIENWIGNLNFDLKEINDICSGCRGHDGFTSSWRSVADTLRQKVEDAVREHPDYRVVFTGHSLGGALATVAGADLRGNGYDIDVFSYGAPRVGNRAFAEFLTVQTGGTLYRITHTNDIVPRLPPREFGYSHSSPEYWIKSGTLVPVTRNDIVKIEGIDATGGNNQPNIPDIPAHLWYFGLIETC

SEQ ID NO: 10409 - protein, 268 aa, Thermomyces lanuginosus
EVSQDLFNQFNLFAQYSAAAYCGKNNDAPAGTNITCTGNACPEVEKADATFLYSFEDSGVGDVTGFLALDNTNKLIVLSFRGSRSIENWIGNLNFDLKEINDICSGCRGHDGFTSSWRSVADTLRQKVEDAVREHPDYRVVFTGHSLGGALATVAGADLRGNGYDIDVFSYGAPRVGNRAFAEFLTVQTGGTLYRITHTNDIVPRLPPREFGYSHSSPEYWIKSGTLVPVTRNDIVKIEGIDATGGNNQPNIPDIPAHLWYFGLIGLC

SEQ ID NO: 10410 - protein, 268 aa, Thermomyces lanuginosus
EVSQDLFNQFNLFAQYSAAAYCGKNNDAPAGTNITCTGNACPEVEKADATFLYSFEDSGVGDVTGFLALDNTNKLIVLSFRGSRSIENWIGNLNFDLKEINDICSGCRGHDGFTSSWRSVADTLRQKVEDAVREHPDYRVVFTGHSLGGALATVAGADLRGNGYDIDVFSYGAPRVGNRAFAEFLTVQTGGTLYRITHTNDIVPRLPPREFGYSHSSPEYWIKSGTLVPVTRNDIVKIEGIDATGGNNQPNIPDIPAHLWYFGLIGWC

SEQ ID NO: 10411 - protein, 268 aa, Thermomyces lanuginosus
EVSQDLFNQFNLFAQYSAAAYCGKNNDAPAGTNITCTGNACPEVEKADATFLYSFEDSGVGDVTGFLALDNTNKLIVLSFRGSRSIENWIGNLNFDLKEINDICSGCRGHDGFTSSWRSVADTLRQKVEDAVREHPDYRVVFTGHSLGGALATVAGADLRGNGYDIDVFSYGAPRVGNRAFAEFLTVQTGGTLYRITHTNDIVPRLPPREFGYSHSSPEYWIKSGTLVPVTRNDIVKIEGIDATGGNNQPNIPDIPAHLWYFGLILTC

SEQ ID NO: 10412 - protein, 268 aa, Thermomyces lanuginosus
EVSQDLFNQFNLFAQYSAAAYCGKNNDAPAGTNITCTGNACPEVEKADATFLYSFEDSGVGDVTGFLALDNTNKLIVLSFRGSRSIENWIGNLNFKLKEINDICSGCRGHDGFTSSWRSVADTLRQKVEDAVREHPDYRVVFTGHSLGGALATVAGADLRGNGYDIDVFSYGAPRVGNRAFAEFLTVQTGGTLYRITHTNDIVPRLPPREFGYSHSSPEYWIKSGTLVPVTRNDIVKIEGIDATGGNNQPNIPDIPAHLWYFGLIGTC

SEQ ID NO: 10413 - protein, 268 aa, Thermomyces lanuginosus
EVSQDLFNQFNLFAQYSAAAYCGKNNDAPAGTNITCTGNACPEVEKADATFLYSFEDSGVGDVTGFLALDNTNKLIVLSFRGSRSIENWIGNLNFDLKEINDICSGCRGHDGFTSSWRSVADTLRQKVEDAVREHPDYRVVFTGHSLGGALATVAGADLRGNGYDIDVFSYGAPRVGNRAFAEFLTVQTGGTLYRITHTNDIVPRLPPREFGYSHSSPEYWIKSGTLVPVTRNDIVKIEGIDATGGNNQPNIPDIPAHLWYFGHIGTC

SEQ ID NO: 10414 - protein, 268 aa, Thermomyces lanuginosus
EVSQDLFNQFNLFAQYSAAAYCGKNNDAPAGTNITCTGNACPEVEKADATFLYSFEDSGVGDVTGFLALDNTNKLIVLSFRGSRSIENWIGNLNFDLKEINDICSGCRGHDGFTSSWRSVADTLRQKVEDAVREHPDYRVVFTGHSLGGALATVAGADLRGNGYDIDVFSYGAPRVGNRAFAEFLTVQTGGTLYRITHTNDIVPRLPPREFGYSHSSPEYWIKSGTLVPVTRNDIVKIEGIDATGGNNQPNIPDIPAHLWYFGLMGTC

SEQ ID NO: 10415 - protein, 268 aa, Thermomyces lanuginosus
EVSQDLFNQFNLFAQYSAAAYCGKNNDAPAGTNITCTGNACPEVEKADATFLYSFEDSGVGDVTGFLALDNTNKLIVLSFRGSRSIENWIGNLNFDLKEINDICSGCRGHDGFTSSWRSVADTLRQKVEDAVREHPDYRVVFTGHSLGGALATVAGADLRGNGYDIDVFSYGAPRVGNRAFAEFLTVQTGGTLYRITHTNDIVPRLPPREFGYSHSSPEYWIKSGTLVPVTRNDIVKIEGIDATGGNNQPNIPDIPAHLWYFGLISTC

SEQ ID NO: 10416 - protein, 268 aa, Thermomyces lanuginosus
EVSQDLFNQFNLFAQYSAAAYCGKNNDAPAGTNITCTGNACPEVEKADATFLYSFEDSGVGDVTGFLALDNTNKLIVLSFRGSRSIENWIGNLNFDLKEINDICSGCRGHDGFTSSWRSVADTLRQKVEDAVREHPDYRVVFTGHSLGGALATVAGADLRGNGYDIDVFSYGAPRVGNRAFAEFLTVQTGGTLYRITHTNDIVPRLPPREFGYSHSSPEYWIKSGTLVPVTRNDIVKIEGIDATGGNNQPNIPDIPAHLWYFGSIGTC

SEQ ID NO: 10417 - protein, 268 aa, Thermomyces lanuginosus
EVSQDLFNQFNLFAQYSAAAYCGKNNDAPAGTNITCTGNACPEVEKADATFLYSFEDSGVGDVTGFLALDNTNKLIVLSFRGSRSIENWINNLNFDLKEINDICSGCRGHDGFTSSWRSVADTLRQKVEDAVREHPDYRVVFTGHSLGGALATVAGADLRGNGYDIDVFSYGAPRVGNRAFAEFLTVQTGGTLYRITHTNDIVPRLPPREFGYSHSSPEYWIKSGTLVPVTRNDIVKIEGIDATGGNNQPNIPDIPAHLWYFGLIGTC

SEQ ID NO: 10418 - protein, 268 aa, Thermomyces lanuginosus
EVSQDLFNQFNLFAQYSAAAYCGKNNDAPAGTNITCTGNACPEVEKADATFLYSFEDSGVGDVTGFLALDNTNKLIVLSFRGSRSIENWIGNLNFDLKEINDICSGCRGHDGFTSSWRSVADTLRQKVEDAVREHPDYRVVFTGHSLGGALATVAGADLRGNGYDIDVFSYGAPRVGNRAFAEFLTVQTGGTLYRITHTNDIVPRLPPREFGYSHSSPEYWIKSGTLVPVTRNDIVKIEGIDATGGNNQPNIPDIPAHLWYFGLIGIC

SEQ ID NO: 10419 - protein, 268 aa, Thermomyces lanuginosus
EVSQDLFNQFNLFAQYSAAAYCGKNNDAPAGTNITCTGNACPEVEKADATFLYSFEDSGVGDVTGFLALDNTNKLIVLSFRGSRSIENWIGNLNFSLKEINDICSGCRGHDGFTSSWRSVADTLRQKVEDAVREHPDYRVVFTGHSLGGALATVAGADLRGNGYDIDVFSYGAPRVGNRAFAEFLTVQTGGTLYRITHTNDIVPRLPPREFGYSHSSPEYWIKSGTLVPVTRNDIVKIEGIDATGGNNQPNIPDIPAHLWYFGLIVTC

SEQ ID NO: 10420 - protein, 268 aa, Thermomyces lanuginosus
EVSQDLFNQFNLFAQYSAAAYCGKNNDAPAGTNITCTGNACPEVEKADATFLYSFEDSGVGDVTGFLALDNTNKLIVLSFRGSRSIENWIGNLNFSLKEINDICSGCRGHDGFTSSWRSVADTLRQKVEDAVREHPDYRVVFTGHSLGGALATVAGADLRGNGYDIDVFSYGAPRVGNRAFAEFLTVQTGGTLYRITHTNDIVPRLPPREFGYSHSSPEYWIKSGTLVPVTRNDIVKIEGIDATGGNNQPNIPDIPAHLWYFGLIRTC

SEQ ID NO: 10421 - protein, 268 aa, Thermomyces lanuginosus
EVSQDLFNQFNLFAQYSAAAYCGKNNDAPAGTNITCTGNACPEVEKADATFLYSFEDSGVGDVTGFLALDNTNKLIVLSFRGSRSIENWIGNLNFRLKEINDICSGCRGHDGFTSSWRSVADTLRQKVEDAVREHPDYRVVFTGHSLGGALATVAGADLRGNGYDIDVFSYGAPRVGNRAFAEFLTVQTGGTLYRITHTNDIVPRLPPREFGYSHSSPEYWIKSGTLVPVTRNDIVKIEGIDATGGNNQPNIPDIPAHLWYFGLIGTC

SEQ ID NO: 10422 - protein, 268 aa, Thermomyces lanuginosus
EVSQDLFNQFNLFAQYSAAAYCGKNNDAPAGTNITCTGNACPEVEKADATFLYSFEDSGVGDVTGFLALDNTNKLIVLSFRGSRSIENWIGNLNFDLKEINDICSGCRGHDGFTSSWRSVADTLRQKVEDAVREHPDYRVVFTGHSLGGALATVAGADLRGNGYDIDVFSYGAPRVGNRAFAEFLTVQTGGTLYRITHTNDIVPRLPPREFGYSHSSPEYWIKSGTLVPVTRNDIVKIEGIDATGGNNQPNIPDIPAHLWYFGLRGTC

SEQ ID NO: 10423 - protein, 268 aa, Thermomyces lanuginosus
EVSQDLFNQFNLFAQYSAAAYCGKNNDAPAGTNITCTGNACPEVEKADATFLYSFEDSGVGDVTGFLALDNTNKLIVLSFRGSRSIENWIENLNFDLKEINDICSGCRGHDGFTSSWRSVADTLRQKVEDAVREHPDYRVVFTGHSLGGALATVAGADLRGNGYDIDVFSYGAPRVGNRAFAEFLTVQTGGTLYRITHTNDIVPRLPPREFGYSHSSPEYWIKSGTLVPVTRNDIVKIEGIDATGGNNQPNIPDIPAHLWYFGLIGTC

SEQ ID NO: 10424 - protein, 268 aa, Thermomyces lanuginosus
EVSQDLFNQFNLFAQYSAAAYCGKNNDAPAGTNITCTGNACPEVEKADATFLYSFEDSGVGDVTGFLALDNTNKLIVLSFRGSRSIENWIGNLNFDLKEINDICSGCRGHDGFTSSWRSVADTLRQKVEDAVREHPDYRVVFTGHSLGGALATVAGADLRGNGYDIDVFSYGAPRVGNRAFAEFLTVQTGGTLYRITHTNDIVPRLPPREFGYSHSSPEYWIKSGTLVPVTRNDIVKIEGIDATGGNNQPNIPDIPAHLWYFGNIGTC

SEQ ID NO: 10425 - protein, 268 aa, Thermomyces lanuginosus
EVSQDLFNQFNLFAQYSAAAYCGKNNDAPAGTNITCTGNACPEVEKADATFLYSFEDSGVGDVTGFLALDNTNKLIVLSFRGSRSIENWIGNLNFDLKEINDICSGCRGHDGFTSSWRSVADTLRQKVEDAVREHPDYRVVFTGHSLGGALATVAGADLRGNGYDIDVFSYGAPRVGNRAFAEFLTVQTGGTLYRITHTNDIVPRLPPREFGYSHSSPEYWIKSGTLVPVTRNDIVKIEGIDATGGNNQPNIPDIPAHLWYFGCIGTC

SEQ ID NO: 10426 - protein, 268 aa, Thermomyces lanuginosus
EVSQDLFNQFNLFAQYSAAAYCGKNNDAPAGTNITCTGNACPEVEKADATFLYSFEDSGVGDVTGFLALDNTNKLIVLSFRGSRSIENWIGNLNFDLKEINDICSGCRGHDGFTSSWRSVADTLRQKVEDAVREHPDYRVVFTGHSLGGALATVAGADLRGNGYDIDVFSYGAPRVGNRAFAEFLTVQTGGTLYRITHTNDIVPRLPPREFGYSHSSPEYWIKSGTLVPVTRNDIVKIEGIDATGGNNQPNIPDIPAHLWYFGGIGTC

SEQ ID NO: 10427 - protein, 268 aa, Thermomyces lanuginosus
EVSQDLFNQFNLFAQYSAAAYCGKNNDAPAGTNITCTGNACPEVEKADATFLYSFEDSGVGDVTGFLALDNTNKLIVLSFRGSRSIENWIGNLNFDLKEINDICSGCRGHDGFTSSWRSVADTLRQKVEDAVREHPDYRVVFTGHSLGGALATVAGADLRGNGYDIDVFSYGAPRVGNRAFAEFLTVQTGGTLYRITHTNDIVPRLPPREFGYSHSSPEYWIKSGTLVPVTRNDIVKIEGIDATGGNNQPNIPDIPAHLWYFGLIWTC

SEQ ID NO: 10428 - protein, 268 aa, Thermomyces lanuginosus
EVSQDLFNQFNLFAQYSAAAYCGKNNDAPAGTNITCTGNACPEVEKADATFLYSFEDSGVGDVTGFLALDNTNKLIVLSFRGSRSIENWIGNLNFDLKEINDICSGCRGHDGFTSSWRSVADTLRQKVEDAVREHPDYRVVFTGHSLGGALATVAGADLRGNGYDIDVFSYGAPRVGNRAFAEFLTVQTGGTLYRITHTNDIVPRLPPREFGYSHSSPEYWIKSGTLVPVTRNDIVKIEGIDATGGNNQPNIPDIPAHLWYFGLWGTC

SEQ ID NO: 10429 - protein, 268 aa, Synthetic construct
EVSQDLFNQFNLFAQYSAAAYCGKNNDAPAGTNITCTGNACPEVEKADATFLYSFEDSGVGDVTGFLALDNTNKLIVLSFRGSRSIKNWIANLNFDLKEINDICSGCRGHDGFTSSWRSVADTLRQKVEDAVREHPDYRVVFTGHSLGGALATVAGADLRGNGYDIDVFSYGAPRVGNRAFAEFLTVQTGGTLYRITHTNDIVPRLPPREFGYSHSSPEYWIKSGTLVPVTRNDIVKIEGIDATGGNNQPNIPDIPAHLWYFGLIGTC

SEQ ID NO: 10430 - protein, 268 aa, Thermomyces lanuginosus
EVSQDLFNQFNLFAQYSAAAYCGKNNDAPAGTNITCTGNACPEVEKADATFLYSFEDSGVGDVTGFLALDNTNKLIVLSFRGSRSIENWIGNLNFDLKEINDICSGCRGHDGFTSSWRSVADTLRQKVEDAVREHPDYRVVFTGHSLGGALATVAGADLRGNGYDIDVFSYGAPRVGNRAFAEFLTVQTGGTLYRITHTNDIVPRLPPREFGYSHSSPEYWIKSGTLVPVTRNDIVKIEGIDATGGNNQPNIPDIPAHLWYFGLIATC

SEQ ID NO: 10431 - protein, 268 aa, Thermomyces lanuginosus
EVSQDLFNQFNLFAQYSAAAYCGKNNDAPAGTNITCTGNACPEVEKADATFLYSFEDSGVGDVTGFLALDNTNKLIVLSFRGSRSIENWIGNLNFDLKEINDICSGCRGHDGFTSSWRSVADTLRQKVEDAVREHPDYRVVFTGHSLGGALATVAGADLRGNGYDIDVFSYGAPRVGNRAFAEFLTVQTGGTLYRITHTNDIVPRLPPREFGYSHSSPEYWIKSGTLVPVTRNDIVKIEGIDATGGNNQPNIPDIPAHLWYFGMIGTC

SEQ ID NO: 10432 - protein, 268 aa, Synthetic construct
EVSQDLFNQFNLFAQYSAAAYCGKNNDAPAGTNITCTGNACPEVEKADATFLYSFEDSGVGDVTGFLALDNTNKLIVLSFRGSRSIKNWIANLNFALKEINDICSGCRGHDGFTSSWRSVADTLRQKVEDAVREHPDYRVVFTGHSLGGALATVAGADLRGNGYDIDVFSYGAPRVGNRAFAEFLTVQTGGTLYRITHTNDIVPRLPPREFGYSHSSPEYWIKSGTLVPVTRNDIVKIEGIDATGGNNQPNIPDIPAHLWYFGLIGTC

SEQ ID NO: 10433 - protein, 268 aa, Thermomyces lanuginosus
EVSQDLFNQFNLFAQYSAAAYCGKNNDAPAGTNITCTGNACPEVEKADATFLYSFEDSGVGDVTGFLALDNTNKLIVLSFRGSRSIENWIFNLNFDLKEINDICSGCRGHDGFTSSWRSVADTLRQKVEDAVREHPDYRVVFTGHSLGGALATVAGADLRGNGYDIDVFSYGAPRVGNRAFAEFLTVQTGGTLYRITHTNDIVPRLPPREFGYSHSSPEYWIKSGTLVPVTRNDIVKIEGIDATGGNNQPNIPDIPAHLWYFGLIGTC

SEQ ID NO: 10434 - protein, 268 aa, Thermomyces lanuginosus
EVSQDLFNQFNLFAQYSAAAYCGKNNDAPAGTNITCTGNACPEVEKADATFLYSFEDSGVGDVTGFLALDNTNKLIVLSFRGSRSIENWIGNLNFDLKDINDICSGCRGHDGFTSSWRSVADTLRQKVEDAVREHPDYRVVFTGHSLGGALATVAGADLRGNGYDIDVFSYGAPRVGNRAFAEFLTVQTGGTLYRITHTNDIVPRLPPREFGYSHSSPEYWIKSGTLVPVTRNDIVKIEGIDATGGNNQPNIPDIPAHLWYFGLIGTC

SEQ ID NO: 10435 - protein, 268 aa, Thermomyces lanuginosus
EVSQDLFNQFNLFAQYSAAAYCGKNNDAPAGTNITCTGNACPEVEKADATFLYSFEDSGVGDVTGFLALDNTNKLIVLSFRGSRSIENWIGNLNFDLKEINDICSGCRGHDGFTSSWRSVADTLRQKVEDAVREHPDYRVVFTGHSLGGALATVAGADLRGNGYDIDVFSYGAPRVGNRAFAEFLTVQTGGTLYRITHTNDIVPRLPPREFGYSHSSPEYWIKSGTLVPVTRNDIVKIEGIDATGGNNQPNIPDIPAHLWYFKLIGTC

SEQ ID NO: 10436 - protein, 268 aa, Thermomyces lanuginosus
EVSQDLFNQFNLFAQYSAAAYCGKNNDAPAGTNITCTGNACPEVEKADATFLYSFEDSGVGDVTGFLALDNTNKLIVLSFRGSRSIENWIMNLNFDLKEINDICSGCRGHDGFTSSWRSVADTLRQKVEDAVREHPDYRVVFTGHSLGGALATVAGADLRGNGYDIDVFSYGAPRVGNRAFAEFLTVQTGGTLYRITHTNDIVPRLPPREFGYSHSSPEYWIKSGTLVPVTRNDIVKIEGIDATGGNNQPNIPDIPAHLWYFGLIGTC

SEQ ID NO: 10437 - protein, 268 aa, Thermomyces lanuginosus
EVSQDLFNQFNLFAQYSAAAYCGKNNDAPAGTNITCTGNACPEVEKADATFLYSFEDSGVGDVTGFLALDNTNKLIVLSFRGSRSIENWIGNLNFDLKEINDICSGCRGHDGFTSSWRSVADTLRQKVEDAVREHPDYRVVFTGHSLGGALATVAGADLRGNGYDIDVFSYGAPRVGNRAFAEFLTVQTGGTLYRITHTNDIVPRLPPREFGYSHSSPEYWIKSGTLVPVTRNDIVKIEGIDATGGNNQPNIPDIPAHLWYFHLIGTC

SEQ ID NO: 10438 - protein, 268 aa, Thermomyces lanuginosus
EVSQDLFNQFNLFAQYSAAAYCGKNNDAPAGTNITCTGNACPEVEKADATFLYSFEDSGVGDVTGFLALDNTNKLIVLSFRGSRSIENWIGNLNFDLKEINDICSGCRGHDGFTSSWRSVADTLRQKVEDAVREHPDYRVVFTGHSLGGALATVAGADLRGNGYDIDVFSYGAPRVGNRAFAEFLTVQTGGTLYRITHTNDIVPRLPPREFGYSHSSPEYWIKSGTLVPVTRNDIVKIEGIDATGGNNQPNIPDIPAHLWYFGLIGGC

SEQ ID NO: 10439 - protein, 268 aa, Thermomyces lanuginosus
EVSQDLFNQFNLFAQYSAAAYCGKNNDAPAGTNITCTGNACPEVEKADATFLYSFEDSGVGDVTGFLALDNTNKLIVLSFRGSRSIENWIGNLNFDLKEINDICSGCRGHDGFTSSWRSVADTLRQKVEDAVREHPDYRVVFTGHSLGGALATVAGADLRGNGYDIDVFSYGAPRVGNRAFAEFLTVQTGGTLYRITHTNDIVPRLPPREFGYSHSSPEYWIKSGTLVPVTRNDIVKIEGIDATGGNNQPNIPDIPAHLWYFGLQGTC

SEQ ID NO: 10440 - protein, 268 aa, Thermomyces lanuginosus
EVSQDLFNQFNLFAQYSAAAYCGKNNDAPAGTNITCTGNACPEVEKADATFLYSFEDSGVGDVTGFLALDNTNKLIVLSFRGSRSIENWIGNLNFDLKPINDICSGCRGHDGFTSSWRSVADTLRQKVEDAVREHPDYRVVFTGHSLGGALATVAGADLRGNGYDIDVFSYGAPRVGNRAFAEFLTVQTGGTLYRITHTNDIVPRLPPREFGYSHSSPEYWIKSGTLVPVTRNDIVKIEGIDATGGNNQPNIPDIPAHLWYFGLIGTC

SEQ ID NO: 10441 - protein, 268 aa, Thermomyces lanuginosus
EVSQDLFNQFNLFAQYSAAAYCGKNNDAPAGTNITCTGNACPEVEKADATFLYSFEDSGVGDVTGFLALDNTNKLIVLSFRGSRSIENWIGNLNFALKEINDICSGCRGHDGFTSSWRSVADTLRQKVEDAVREHPDYRVVFTGHSLGGALATVAGADLRGNGYDIDVFSYGAPRVGNRAFAEFLTVQTGGTLYRITHTNDIVPRLPPREFGYSHSSPEYWIKSGTLVPVTRNDIVKIEGIDATGGNNQPNIPDIPAHLWYFGLIGTC

SEQ ID NO: 10442 - protein, 268 aa, Thermomyces lanuginosus
EVSQDLFNQFNLFAQYSAAAYCGKNNDAPAGTNITCTGNACPEVEKADATFLYSFEDSGVGDVTGFLALDNTNKLIVLSFRGSRSIENWIGNLNFDLKEINDICSGCRGHDGFTSSWRSVADTLRQKVEDAVREHPDYRVVFTGHSLGGALATVAGADLRGNGYDIDVFSYGAPRVGNRAFAEFLTVQTGGTLYRITHTNDIVPRLPPREFGYSHSSPEYWIKSGTLVPVTRNDIVKIEGIDATGGNNQPNIPDIPAHLWYFGPIGTC

SEQ ID NO: 10443 - protein, 268 aa, Thermomyces lanuginosus
EVSQDLFNQFNLFAQYSAAAYCGKNNDAPAGTNITCTGNACPEVEKADATFLYSFEDSGVGDVTGFLALDNTNKLIVLSFRGSRSIENWIGNLNFDLKEINDICSGCRGHDGFTSSWRSVADTLRQKVEDAVREHPDYRVVFTGHSLGGALATVAGADLRGNGYDIDVFSYGAPRVGNRAFAEFLTVQTGGTLYRITHTNDIVPRLPPREFGYSHSSPEYWIKSGTLVPVTRNDIVKIEGIDATGGNNQPNIPDIPAHLWYFGEIGTC

SEQ ID NO: 10444 - protein, 268 aa, Thermomyces lanuginosus
EVSQDLFNQFNLFAQYSAAAYCGKNNDAPAGTNITCTGNACPEVEKADATFLYSFEDSGVGDVTGFLALDNTNKLIVLSFRGSRSIENWIGNLNFDLKEINDICSGCRGHDGFTSSWRSVADTLRQKVEDAVREHPDYRVVFTGHSLGGALATVAGADLRGNGYDIDVFSYGAPRVGNRAFAEFLTVQTGGTLYRITHTNDIVPRLPPREFGYSHSSPEYWIKSGTLVPVTRNDIVKIEGIDATGGNNQPNIPDIPAHLWYFGLLGTC

SEQ ID NO: 10445 - protein, 268 aa, Thermomyces lanuginosus
EVSQDLFNQFNLFAQYSAAAYCGKNNDAPAGTNITCTGNACPEVEKADATFLYSFEDSGVGDVTGFLALDNTNKLIVLSFRGSRSIENWIGNLNFDLKEINDICSGCRGHDGFTSSWRSVADTLRQKVEDAVREHPDYRVVFTGHSLGGALATVAGADLRGNGYDIDVFSYGAPRVGNRAFAEFLTVQTGGTLYRITHTNDIVPRLPPREFGYSHSSPEYWIKSGTLVPVTRNDIVKIEGIDATGGNNQPNIPDIPAHLWYFILIGTC

SEQ ID NO: 10446 - protein, 268 aa, Thermomyces lanuginosus
EVSQDLFNQFNLFAQYSAAAYCGKNNDAPAGTNITCTGNACPEVEKADATFLYSFEDSGVGDVTGFLALDNTNKLIVLSFRGSRSIENWIGNLNFDLKKINDICSGCRGHDGFTSSWRSVADTLRQKVEDAVREHPDYRVVFTGHSLGGALATVAGADLRGNGYDIDVFSYGAPRVGNRAFAEFLTVQTGGTLYRITHTNDIVPRLPPREFGYSHSSPEYWIKSGTLVPVTRNDIVKIEGIDATGGNNKPNIPDIPAHLWYFGLIGTC

SEQ ID NO: 10447 - protein, 268 aa, Thermomyces lanuginosus
EVSQDLFNQFNLFAQYSAAAYCGKNNDAPAGTNITCTGNACPEVEKADATFLYSFEDSGVGDVTGFLALDNTNKLIVLSFRGSRSIENWIGNLNFDLKEINDICSGCRGHDGFTSSWRSVADTLRQKVEDAVREHPDYRVVFTGHSLGGALATVAGADLRGNGYDIDVFSYGAPRVGNRAFAEFLTVQTGGTLYRITHTNDIVPRLPPREFGYSHSSPEYWIKSGTLVPVTRNDIVKIEGIDATGGNNQPNIPDIPAHLWYFGLIGPC

SEQ ID NO: 10448 - protein, 268 aa, Thermomyces lanuginosus
EVSQDLFNQFNLFAQYSAAAYCGKNNDAPAGTNITCTGNACPEVEKADATFLYSFEDSGVGDVTGFLALDNTNKLIVLSFRGSRSIENWIGNLNFDLKEINDICSGCRGHDGFTSSWRSVADTLRQKVEDAVREHPDYRVVFTGHSLGGALATVAGADLRGNGYDIDVFSYGAPRVGNRAFAEFLTVQTGGTLYRITHTNDIVPRLPPREFGYSHSSPEYWIKSGTLVPVTRNDIVKIEGIDATGGNNQPNIPDIPAHLWYFVLIGTC

SEQ ID NO: 10449 - protein, 268 aa, Thermomyces lanuginosus
EVSQDLFNQFNLFAQYSAAAYCGKNNDAPAGTNITCTGNACPEVEKADATFLYSFEDSGVGDVTGFLALDNTNKLIVLSFRGSRSIENWIANLNFDLKKINDICSGCRGHDGFTSSWRSVADTLRQKVEDAVREHPDYRVVFTGHSLGGALATVAGADLRGNGYDIDVFSYGAPRVGNRAFAEFLTVQTGGTLYRITHTNDIVPRLPPREFGYSHSSPEYWIKSGTLVPVRRRDIVKIEGIDATGGNNQPNIPDIPAHLWYFGLIGTC

SEQ ID NO: 10450 - protein, 268 aa, Thermomyces lanuginosus
EVSQDLFNQFNLFAQYSAAAYCGKNNDAPAGTNITCTGNACPEVEKADATFLYSFEDSGVGDVTGFLALDNTNKLIVLSFRGSRSIENWIGNLNFDLKEINDICSGCRGHDGFTSSWRSVADTLRQKVEDAVREHPDYRVVFTGHSLGGALATVAGADLRGNGYDIDVFSYGAPRVGNRAFAEFLTVQTGGTLYRITHTNDIVPRLPPREFGYSHSSPEYWIKSGTLVPVTRNDIVKIEGIDATGGNNQPNIPDIPAHLWYFGRIGTC

SEQ ID NO: 10451 - protein, 269 aa, Thermomyces lanuginosus
EVSQDLFNQFNLFAQYSAAAYCGKNNDAPAGTNITCTGNACPEVEKADATFLYSFEDSGVGDVTGFLALDNTNKLIVLSFRGSRSIENWIGNLNFDLKEINDICSGCRGHDGFTSSWRSVADTLRQKVEDAVREHPDYRVVFTGHSLGGALATVAGADLRGNGYDIDVFSYGAPRVGNRAFAEFLTVQTGGTLYRITHTNDIVPRLPPREFGYSHSSPEYWIKSGTRLVPVTRNDIVKIEGIDATGGNNQPNIPDIPAHLWYFGLIGTC

SEQ ID NO: 10452 - protein, 269 aa, Thermomyces lanuginosus
EVSQDLFNQFNLFAQYSAAAYCGKNNDAPAGTNITCTGNACPEVEKADATFLYSFEDSGVGDVTGFLALDNTNKLIVLSFRGSRSIENWIGNLNFDLKEINDICSGCRGHDGFTSSWRSVADTLRQKVEDAVREHPDYRVVFTGHSLGGALATVAGADLRGNGYDIDVFSYGAPRVGNRAFAEFLTVQTGGTLYRITHTNDIVPRLPPREFGYSHSSPEYWIKSGTLVPVTRNDIVKIEGIDATGGNNQPNIPDIPAHLWYFDINEGSC

SEQ ID NO: 10453 - protein, 269 aa, Thermomyces lanuginosus
EVSQDLFNQFNLFAQYSAAAYCGKNNDAPAGTNITCTGNACPEVEKADATFLYSFEDSGVGDVTGFLALDNTNKLIVLSFRGSRSIENWIGNLNFDLKEINDICSGCRGHDGFTSSWRSVADTLRQKVEDAVREHPDYRVVFTGHSLGGALATVAGADLRGNGYDIDVFSYGAPRVGNRAFAEFLTVQTGGTLYRITHTNDIVPRLPPREFGYSHSSPEYWIKSGTLVPRVTRNDIVKIEGIDATGGNNQPNIPDIPAHLWYFGLIGTC

SEQ ID NO: 10454 - protein, 269 aa, Thermomyces lanuginosus
EVSQDLFNQFNLFAQYSAAAYCGKNNDAPAGTNITCTGNACPEVEKADATFLYSFEDSGVGDVTGFLALDNTNKLIVLSFRGSRSIENWIGNLNFDLKEINDICSGCRGHDGFTSSWRSVADTLRQKVEDAVREHPDYRVVFTGHSLGGALATVAGADLRGNGYDIDVFSYGAPRVGNRAFAEFLTVQTGGTLYRITHTNDIVPRLPPREFGYSHSSPEYWIKSRGTLVPVTRNDIVKIEGIDATGGNNQPNIPDIPAHLWYFGLIGTC

SEQ ID NO: 10455 - protein, 269 aa, Thermomyces lanuginosus
EVSQDLFNQFNLFAQYSAAAYCGKNNDAPAGTNITCTGNACPEVEKADATFLYSFEDSGVGDVTGFLALDNTNKLIVLSFRGSRSIENWIGNLNFDLKEINDICSGCRGHDGFTSSWRSVADTLRQKVEDAVREHPDYRVVFTGHSLGGALATVAGADLRGNGYDIDVFSYGAPRVGNRAFAEFLTVQTGGTLYRITHTNDIVPRLPPREFGYSHSSPEYWIKSGTLVPVTRRNDIVKIEGIDATGGNNQPNIPDIPAHLWYFGLIGTC

SEQ ID NO: 10456 - protein, 269 aa, Thermomyces lanuginosus
EVSQDLFNQFNLFAQYSAAAYCGKNNDAPAGTNITCTGNACPEVEKADATFLYSFEDSGVGDVTGFLALDNTNKLIVLSFRGSRSIENWIGNLNFDLKEINDICSGCRGHDGFTSSWRSVADTLRQKVEDAVREHPDYRVVFTGHSLGGALATVAGADLRGNGYDIDVFSYGAPRVGNRAFAEFLTVQTGGTLYRITHTNDIVPRLPPREFGYSHSSPEYWIKSGTLRVPVTRNDIVKIEGIDATGGNNQPNIPDIPAHLWYFGLIGTC

SEQ ID NO: 10457 - protein, 269 aa, Thermomyces lanuginosus
EVSQDLFNQFNLFAQYSAAAYCGKNNDAPAGTNITCTGNACPEVEKADATFLYSFEDSGVGDVTGFLALDNTNKLIVLSFRGSRSIENWIGNLNFDLKEINDICSGCRGHDGFTSSWRSVADTLRQKVEDAVREHPDYRVVFTGHSLGGALATVAGADLRGNGYDIDVFSYGAPRVGNRAFAEFLTVQTGGTLYRITHTNDIVPRLPPREFGYSHSSPEYWIKSGTLVPVTRNDIVKIEGIDATGGNNQPNIPIIPAHLWYFDLNTGLC

SEQ ID NO: 10458 - protein, 269 aa, Thermomyces lanuginosus
EVSQDLFNQFNLFAQYSAAAYCGKNNDAPAGTNITCTGNACPEVEKADATFLYSFEDSGVGDVTGFLALDNTNKLIVLSFRGSRSIENWIGNLNFDLKEINDICSGCRGHDGFTSSWRSVADTLRQKVEDAVREHPDYRVVFTGHSLGGALATVAGADLRGNGYDIDVFSYGAPRVGNRAFAEFLTVQTGGTLYRITHTNDIVPRLPPREFGYSHSSPEYWIKSGTLVPVTRNDIVKIEGIDATRGGNNQPNIPDIPAHLWYFGLIGTC

SEQ ID NO: 10459 - protein, 269 aa, Thermomyces lanuginosus
EVSQDLFNQFNLFAQYSAAAYCGKNNDAPAGTNITCTGNACPEVEKADATFLYSFEDSGVGDVTGFLALDNTNKLIVLSFRGSRSIENWIGNLNFDLKEINDICSGCRGHDGFTSSWRSVADTLRQKVEDAVREHPDYRVVFTGHSLGGALATVAGADLRGNGYDIDVFSYGAPRVGNRAFAEFLTVQTGGTLYRITHTNDIVPRLPPREFGYSHSSPEYWIKSGTLVRPVTRNDIVKIEGIDATGGNNQPNIPDIPAHLWYFGLIGTC

SEQ ID NO: 10460 - protein, 270 aa, Thermomyces lanuginosus
EVSQDLFNQFNLFAQYSAAAYCGKNNDAPAGTNITCTGNACPEVEKADATFLYSFEDSGVGDVTGFLALDNTNKLIVLSFRGSRSIENWIGNLNFDLKEINDICSGCRGHDGFTSSWRSVADTLRQKVEDAVREHPDYRVVFTGHSLGGALATVAGADLRGNGYDIDVFSYGAPRVGNRAFAEFLTVQTGGTLYRITHTNDIVPRLPPREFGYSHSSPEYWIKSGTLVPVTRNDIVKIEGIDATRRGGNNQPNIPDIPAHLWYFGLIGTC

SEQ ID NO: 10461 - protein, 270 aa, Thermomyces lanuginosus
EVSQDLFNQFNLFAQYSAAAYCGKNNDAPAGTNITCTGNACPEVEKADATFLYSFEDSGVGDVTGFLALDNTNKLIVLSFRGSRSIENWIGNLNFDLKEINDICSGCRGHDGFTSSWRSVADTLRQKVEDAVREHPDYRVVFTGHSLGGALATVAGADLRGNGYDIDVFSYGAPRVGNRAFAEFLTVQTGGTLYRITHTNDIVPRLPPREFGYSHSSPEYWIKSGTLVPVTRRRNDIVKIEGIDATGGNNQPNIPDIPAHLWYFGLIGTC

SEQ ID NO: 10462 - protein, 270 aa, Thermomyces lanuginosus
EVSQDLFNQFNLFAQYSAAAYCGKNNDAPAGTNITCTGNACPEVEKADATFLYSFEDSGVGDVTGFLALDNTNKLIVLSFRGSRSIENWIGNLNFDLKEINDICSGCRGHDGFTSSWRSVADTLRQKVEDAVREHPDYRVVFTGHSLGGALATVAGADLRGNGYDIDVFSYGAPRVGNRAFAEFLTVQTGGTLYRITHTNDIVPRLPPREFGYSHSSPEYWIKSRGTLVRPVTRNDIVKIEGIDATGGNNQPNIPDIPAHLWYFGLIGTC

SEQ ID NO: 10463 - protein, 270 aa, Thermomyces lanuginosus
EVSQDLFNQFNLFAQYSAAAYCGKNNDAPAGTNITCTGNACPEVEKADATFLYSFEDSGVGDVTGFLALDNTNKLIVLSFRGSRSIENWIGNLNFDLKEINDICSGCRGHDGFTSSWRSVADTLRQKVEDAVREHPDYRVVFTGHSLGGALATVAGADLRGNGYDIDVFSYGAPRVGNRAFAEFLTVQTGGTLYRITHTNDIVPRLPPREFGYSHSSPEYWIKSGTLVPRVTRRNDIVKIEGIDATGGNNQPNIPDIPAHLWYFGLIGTC

SEQ ID NO: 10464 - protein, 268 aa, Synthetic construct
EVSQDLFNQFNLFAQYSAAAYCGKNNDAPAGTNITCTGNACPEVEKADATFLYSFEDSGVGDVTGFLALDNTNKLIVLSFRGSRSIENWIGNLNFGLKEINDICSGCRGHDGFTSSWRSVADTLRQKVEDAVREHPDYRVVFTGHSLGGALATVAGADLRGNGYDIDVFSYGAPRVGNRAFAEFLTVQTGGTLYRITHTNDIVPRLPPREFGYSHSSPEYWIKSGTLVPVTRNDIVKIEGIDATGGNNQPNIPDIPAHLWYFGLIGTC

SEQ ID NO: 10465 - protein, 268 aa, Thermomyces lanuginosus
EVSQDLFNQFNLFAQYSAAAYCGKNNDAPAGTNITCTGNACPEVEKADATFLYSFEDSGVGDVTGFLALDNTNKLIVLSFRGSRSIENWIINLNFDLKEINDICSGCRGHDGFTSSWRSVADTLRQKVEDAVREHPDYRVVFTGHSLGGALATVAGADLRGNGYDIDVFSYGAPRVGNRAFAEFLTVQTGGTLYRITHTNDIVPRLPPREFGYSHSSPEYWIKSGTLVPVTRNDIVKIEGIDATGGNNQPNIPDIPAHLWYFGLIGTC

SEQ ID NO: 10466 - protein, 268 aa, Synthetic construct
EVSQDLFNQFNLFAQYSAAAYCGKNNDAPAGTNITCTGNACPEVEKADATFLYSFEDSGVGDVTGFLALDNTNKLIVLSFRGSRSIENWIGNLNFVLKEINDICSGCRGHDGFTSSWRSVADTLRQKVEDAVREHPDYRVVFTGHSLGGALATVAGADLRGNGYDIDVFSYGAPRVGNRAFAEFLTVQTGGTLYRITHTNDIVPRLPPREFGYSHSSPEYWIKSGTLVPVTRNDIVKIEGIDATGGNNQPNIPDIPAHLWYFGLIGTC

SEQ ID NO: 10467 - protein, 268 aa, Synthetic construct
EVSQDLFNQFNLFAQYSAAAYCGKNNDAPAGTNITCTGNACPEVEKADATFLYSFEDSGVGDVTGFLALDNTNKLIVLSFRGSRSIENWIGNLNFILKEINDICSGCRGHDGFTSSWRSVADTLRQKVEDAVREHPDYRVVFTGHSLGGALATVAGADLRGNGYDIDVFSYGAPRVGNRAFAEFLTVQTGGTLYRITHTNDIVPRLPPREFGYSHSSPEYWIKSGTLVPVTRNDIVKIEGIDATGGNNQPNIPDIPAHLWYFGLIGTC

SEQ ID NO: 10468 - protein, 268 aa, Thermomyces lanuginosus
EVSQDLFNQFNLFAQYSAAAYCGKNNDAPAGTNITCTGNACPEVEKADATFLYSFEDSGVGDVTGFLALDNTNKLIVLSFRGSRSIENWIPNLNFDLKEINDICSGCRGHDGFTSSWRSVADTLRQKVEDAVREHPDYRVVFTGHSLGGALATVAGADLRGNGYDIDVFSYGAPRVGNRAFAEFLTVQTGGTLYRITHTNDIVPRLPPREFGYSHSSPEYWIKSGTLVPVTRNDIVKIEGIDATGGNNQPNIPDIPAHLWYFGLIGTC

SEQ ID NO: 10469 - protein, 268 aa, Thermomyces lanuginosus
EVSQDLFNQFNLFAQYSAAAYCGKNNDAPAGTNITCTGNACPEVEKADATFLYSFEDSGVGDVTGFLALDNTNKLIVLSFRGSRSIENWITNLNFDLKEINDICSGCRGHDGFTSSWRSVADTLRQKVEDAVREHPDYRVVFTGHSLGGALATVAGADLRGNGYDIDVFSYGAPRVGNRAFAEFLTVQTGGTLYRITHTNDIVPRLPPREFGYSHSSPEYWIKSGTLVPVTRNDIVKIEGIDATGGNNQPNIPDIPAHLWYFGLIGTC

SEQ ID NO: 10470 - protein, 268 aa, Thermomyces lanuginosus
EVSQDLFNQFNLFAQYSAAAYCGKNNDAPAGTNITCTGNACPEVEKADATFLYSFEDSGVGDVTGFLALDNTNKLIVLSFRGSRSIENWIADLNFDLKEINDICSGCRGHDGFTSSWRSVADTLRQKVEDAVREHPDYRVVFTGHSLGGALATVAGADLRGNGYDIDVFSYGAPRVGNRAFAEFLTVQTGGTLYRITHTNDIVPRLPPREFGYSHSSPEYWIKSGTLVPVTRNDIVKIEGIDATGGNNQPNIPDIPAHLWYFGLIGTC

SEQ ID NO: 10471 - protein, 268 aa, Synthetic construct
EVSQDLFNQFNLFAQYSAAAYCGKNNDAPAGTNITCTGNACPEVEKADATFLYSFEDSGVGDVTGFLALDNTNKLIVLSFRGSRSIENWIGNLNFCLKEINDICSGCRGHDGFTSSWRSVADTLRQKVEDAVREHPDYRVVFTGHSLGGALATVAGADLRGNGYDIDVFSYGAPRVGNRAFAEFLTVQTGGTLYRITHTNDIVPRLPPREFGYSHSSPEYWIKSGTLVPVTRNDIVKIEGIDATGGNNQPNIPDIPAHLWYFGLIGTC

SEQ ID NO: 10472 - protein, 268 aa, Synthetic construct
EVSQDLFNQFNLFAQYSAAAYCGKNNDAPAGTNITCTGNACPEVEKADATFLYSFEDSGVGDVTGFLALDNTNKLIVLSFRGSRSIENWIGNLNFMLKEINDICSGCRGHDGFTSSWRSVADTLRQKVEDAVREHPDYRVVFTGHSLGGALATVAGADLRGNGYDIDVFSYGAPRVGNRAFAEFLTVQTGGTLYRITHTNDIVPRLPPREFGYSHSSPEYWIKSGTLVPVTRNDIVKIEGIDATGGNNQPNIPDIPAHLWYFGLIGTC

SEQ ID NO: 10473 - protein, 268 aa, Synthetic construct
EVSQDLFNQFNLFAQYSAAAYCGKNNDAPAGTNITCTGNACPEVEKADATFLYSFEDSGVGDVTGFLALDNTNKLIVLSFRGSRSIENWIGNLNFFLKEINDICSGCRGHDGFTSSWRSVADTLRQKVEDAVREHPDYRVVFTGHSLGGALATVAGADLRGNGYDIDVFSYGAPRVGNRAFAEFLTVQTGGTLYRITHTNDIVPRLPPREFGYSHSSPEYWIKSGTLVPVTRNDIVKIEGIDATGGNNQPNIPDIPAHLWYFGLIGTC

SEQ ID NO: 10474 - protein, 268 aa, Synthetic construct
EVSQDLFNQFNLFAQYSAAAYCGKNNDAPAGTNITCTGNACPEVEKADATFLYSFEDSGVGDVTGFLALDNTNKLIVLSFRGSRSIENWIGNLNFHLKEINDICSGCRGHDGFTSSWRSVADTLRQKVEDAVREHPDYRVVFTGHSLGGALATVAGADLRGNGYDIDVFSYGAPRVGNRAFAEFLTVQTGGTLYRITHTNDIVPRLPPREFGYSHSSPEYWIKSGTLVPVTRNDIVKIEGIDATGGNNQPNIPDIPAHLWYFGLIGTC

SEQ ID NO: 10475 - protein, 268 aa, Synthetic construct
EVSQDLFNQFNLFAQYSAAAYCGKNNDAPAGTNITCTGNACPEVEKADATFLYSFEDSGVGDVTGFLALDNTNKLIVLSFRGSRSIENWIGNLNFELKEINDICSGCRGHDGFTSSWRSVADTLRQKVEDAVREHPDYRVVFTGHSLGGALATVAGADLRGNGYDIDVFSYGAPRVGNRAFAEFLTVQTGGTLYRITHTNDIVPRLPPREFGYSHSSPEYWIKSGTLVPVTRNDIVKIEGIDATGGNNQPNIPDIPAHLWYFGLIGTC

SEQ ID NO: 10476 - protein, 268 aa, Thermomyces lanuginosus
EVSQDLFNQFNLFAQYSAAAYCGKNNDAPAGTNITCTGNACPEVEKADATFLYSFEDSGVGDVTGFLALDNTNKLIVLSFRGSRSIENWIHNLNFDLKEINDICSGCRGHDGFTSSWRSVADTLRQKVEDAVREHPDYRVVFTGHSLGGALATVAGADLRGNGYDIDVFSYGAPRVGNRAFAEFLTVQTGGTLYRITHTNDIVPRLPPREFGYSHSSPEYWIKSGTLVPVTRNDIVKIEGIDATGGNNQPNIPDIPAHLWYFGLIGTC

SEQ ID NO: 10477 - protein, 268 aa, Thermomyces lanuginosus
EVSQDLFNQFNLFAQYSAAAYCGKNNDAPAGTNITCTGNACPEVEKADATFLYSFEDSGVGDVTGFLALDNTNKLIVLSFRGSRSIENWIWNLNFDLKEINDICSGCRGHDGFTSSWRSVADTLRQKVEDAVREHPDYRVVFTGHSLGGALATVAGADLRGNGYDIDVFSYGAPRVGNRAFAEFLTVQTGGTLYRITHTNDIVPRLPPREFGYSHSSPEYWIKSGTLVPVTRNDIVKIEGIDATGGNNQPNIPDIPAHLWYFGLIGTC

SEQ ID NO: 10478 - protein, 268 aa, Thermomyces lanuginosus
EVSQDLFNQFNLFAQYSAAAYCGKNNDAPAGTNITCTGNACPEVEKADATFLYSFEDSGVGDVTGFLALDNTNKLIVLSFRGSRSIENWISNLNFDLKEINDICSGCRGHDGFTSSWRSVADTLRQKVEDAVREHPDYRVVFTGHSLGGALATVAGADLRGNGYDIDVFSYGAPRVGNRAFAEFLTVQTGGTLYRITHTNDIVPRLPPREFGYSHSSPEYWIKSGTLVPVTRNDIVKIEGIDATGGNNQPNIPDIPAHLWYFGLIGTC

SEQ ID NO: 10479 - protein, 268 aa, Synthetic construct
EVSQDLFNQFNLFAQYSAAAYCGKNNDAPAGTNITCTGNACPEVEKADATFLYSFEDSGVGDVTGFLALDNTNKLIVLSFRGSRSIENWIGNLNFYLKEINDICSGCRGHDGFTSSWRSVADTLRQKVEDAVREHPDYRVVFTGHSLGGALATVAGADLRGNGYDIDVFSYGAPRVGNRAFAEFLTVQTGGTLYRITHTNDIVPRLPPREFGYSHSSPEYWIKSGTLVPVTRNDIVKIEGIDATGGNNQPNIPDIPAHLWYFGLIGTC

SEQ ID NO: 10480 - protein, 268 aa, Thermomyces lanuginosus
EVSQDLFNQFNLFAQYSAAAYCGKNNDAPAGTNITCTGNACPEVEKADATFLYSFEDSGVGDVTGFLALDNTNKLIVLSFRGSRSIENWICNLNFDLKEINDICSGCRGHDGFTSSWRSVADTLRQKVEDAVREHPDYRVVFTGHSLGGALATVAGADLRGNGYDIDVFSYGAPRVGNRAFAEFLTVQTGGTLYRITHTNDIVPRLPPREFGYSHSSPEYWIKSGTLVPVTRNDIVKIEGIDATGGNNQPNIPDIPAHLWYFGLIGTC

SEQ ID NO: 10481 - protein, 268 aa, Thermomyces lanuginosus
EVSQDLFNQFNLFAQYSAAAYCGKNNDAPAGTNITCTGNACPEVEKADATFLYSFEDSGVGDVTGFLALDNTNKLIVLSFRGSRSIENWIDNLNFDLKEINDICSGCRGHDGFTSSWRSVADTLRQKVEDAVREHPDYRVVFTGHSLGGALATVAGADLRGNGYDIDVFSYGAPRVGNRAFAEFLTVQTGGTLYRITHTNDIVPRLPPREFGYSHSSPEYWIKSGTLVPVTRNDIVKIEGIDATGGNNQPNIPDIPAHLWYFGLIGTC

SEQ ID NO: 10482 - protein, 268 aa, Bacillus sp.
EVSQDLFNQFNLFAQYSAAAYCGKNNDAPAGTNITCTGNACPEVEKADATFLYSFEDSGVGDVTGFLALDNTNKLIVLSFRGSRSIENWIGNLNFLLKEINDICSGCRGHDGFTSSWRSVADTLRQKVEDAVREHPDYRVVFTGHSLGGALATVAGADLRGNGYDIDVFSYGAPRVGNRAFAEFLTVQTGGTLYRITHTNDIVPRLPPREFGYSHSSPEYWIKSGTLVPVTRNDIVKIEGIDATGGNNQPNIPDIPAHLWYFGLIGTC

SEQ ID NO: 10483 - protein, 268 aa, Synthetic construct
EVSQDLFNQFNLFAQYSAAAYCGKNNDAPAGTNITCTGNACPEVEKADATFLYSFEDSGVGDVTGFLALDNTNKLIVLSFRGSRSIENWIGNLNFWLKEINDICSGCRGHDGFTSSWRSVADTLRQKVEDAVREHPDYRVVFTGHSLGGALATVAGADLRGNGYDIDVFSYGAPRVGNRAFAEFLTVQTGGTLYRITHTNDIVPRLPPRNFGYSHSSPEYWIKSGTLVPVTRNDIVKIEGIDATGGNNQPNIPDIPAHLWYFGLIGTC

SEQ ID NO: 10484 - protein, 268 aa, Synthetic construct
EVSQDLFNQFNLFAQYSAAAYCGKNNDAPAGTNITCTGNACPEVEKADATFLYSFEDSGVGDVTGFLALDNTNKLIVLSFRGSRSIENWIGNLNFWLKEINNICSGCRGHDGFTSSWRSVADTLRQKVEDAVREHPDYRVVFTGHSLGGALATVAGADLRGNGYDIDVFSYGAPRVGNRAFAEFLTVQTGGTLYRITHTNDIVPRLPPREFGYSHSSPEYWIKSGTLVPVTRNDIVKIEGIDATGGNNQPNIPDIPAHLWYFGLIGTC

SEQ ID NO: 10485 - protein, 267 aa, Thermomyces lanuginosus
VSQDLFNQFNLFAQYSAAAYCGKNNDAPAGTNITCTGNACPEVEKADATFLYSFEDSGVGDVTGFLALDNTNKLIVLSFRGSRSIENWIGNLNFDLKEINDICSGCRGHDGFTSSWRSVADTLRQKVEDAVREHPDYRVVFTGHSLGGALATVAGADLRGNGYDIDVFSYGAPRVGNRAFAEFLTVQTGGTLYRITHTNDIVPRLPPREFGYSHSSPEYWIKSGTLVPVTRNDIVKIEGIDATGGNNQPNIPDIPAHLWYFGLIGTC

SEQ ID NO: 10486 - protein, 267 aa, Thermomyces lanuginosus
VSQDLFNQFNLFAQYSAAAYCGKNNDAPAGTNITCTGNACPEVEKADATFLYSFEDSGVGDVTGFLALDNTNKLIVLSFRGSRSIENWIGNLNFDLKEINDICSGCRGHDGFTSSWRSVADTLRQKVEDAVREHPDYRVVFTGHSLGGALATVAGADLRGNGYDIDVFSYGAPRVGNRAFAEFLTVQTGGTLYRITHTNDIVPRLPPREFGYSHSSPEYWIKSRTLVPVTRNDIVKIEGIDATGGNNQPNIPDIPAHLWYFALIGAC

SEQ ID NO: 10487 - protein, 267 aa, Thermomyces lanuginosus
VSQDLFNQFNLFAQYSAAAYCGKNNDAPAGTNITCTGNACPEVEKADATFLYSFEDSGVGDVTGFLALDNTNKLIVLSFRGSRSIENWIGNLNFDLKEINDICSGCRGHDGFTSSWRSVADTLRQKVEDAVREHPDYRVVFTGHSLGGALATVAGADLRGNGYDIDVFSYGAPRVGNRAFAEFLTVQTGGTLYRITHTNDIVPRLPPREFGYSHSSPEYWIKSRTLVPVTRNDIVKIEGIDATGGNNQPNIPDIPAHLWYFGLIDTC

SEQ ID NO: 10488 - protein, 267 aa, Synthetic construct
VSQDLFNQFNLFAQYSAAAYCGKNNDAPAGTNITCTGNACPEVEKADATFLYSFEDSGVGDVTGFLALDNTNKLIVLSFRGSRSIENWIGNLKFLLKKINDICSGCRGHDGFTSSWRSVADTLRQKVEDAVREHPDYRVVFTGHSLGGALATVAGADLRGNGYDIDVFSYGAPRVGNRAFAEFLTVQTGGTLYRITHTNDIVPRLPPREFGYSHSSPEYWIKSGTLVPVTRNDIVKIEGIDATGGNNQPNIPDIPAHLWYFGLIGTC

SEQ ID NO: 10489 - protein, 267 aa, Thermomyces lanuginosus
EVSQDLFNQFNLFAQYSAAAYCGKNNDAPAGTNITCTGNACPEVEKADATFLYSFEDSGVGDVTGFLALDNTNKLIVLSFRGSRSIENWIGNLNFDLKEINDICSGCRGHDGFTSSWRSVADTLRQKVEDAVREHPDYRVVFTGHSLGGALATVAGADLRGNGYDIDVFSYGAPRVGNRAFAEFLTVQTGGTLYRITHTNDIVPRLPPREFGYSHSSPEYWIKSGTLVVTRNDIVKIEGIDATGGNNQPNIPDIPAHLWYFGLIGTC

SEQ ID NO: 10490 - protein, 267 aa, Thermomyces lanuginosus
VSQDLFNQFNLFAQYSAAAYCGKNNDAPAGTNITCTGNACPEVEKADATFLYSFEDSGVGDVTGFLALDNTNKLIVLSFRGSRSIENWIANLNFWLKEINDICSGCRGHDGFTSSWRSVADTLRQKVEDAVREHPDYRVVFTGHSLGGALATVAGADLRGNGYDIDVFSYGAPRVGNRAFAEFLTVQTGGTLYRITHTNDIVPRLPPREFGYSHSSPEYWIKSGTLVPVTRNDIVKICGIDATGGNNRPNIPDIPAHLWYFGPISTC

SEQ ID NO: 10491 - protein, 267 aa, Thermomyces lanuginosus
VSQDLFNQFNLFAQYSAAAYCGKNNDAPAGTNITCTGNACPEVEKADATFLYSFEDSGVGDVTGFLALDNTNKLIVLSFRGSRSIENWIANLNFWLKEINDICSGCRGHDGFTSSWRSVADTLRQKVEDAVREHPDYRVVFTGHSLGGALATVAGADLRGNGYDIDVFSYGAPRVGNRAFAEFLTVQTGGTLYRITHTNDIVPRLPPREFGYSHSSPEYWIKSGTLVPVTRNDIVKICGIDATGGNNRPNIPDIPAHLWYFGLISTC

SEQ ID NO: 10492 - protein, 267 aa, Thermomyces lanuginosus; identical to SEQ ID NO: 8511

SEQ ID NO: 10493 - protein, 267 aa, Thermomyces lanuginosus
VSQDLFNQFNLFAQYSAAAYCGKNNDAPAGTNITCTGNACPEVEKADATFLYSFEDSGVGDVTGFLALDNTNKLIVLSFRGSRSIENWIANLNFWLKEINDICSGCRGHDGFTSSWRSVADTLRQKVEDAVREHPDYRVVFTGHSLGGALATVAGADLRGNGYDIDVFSYGAPRVGNRAFAEFLTVQTGGTLYRITHTNDIVPRLPPREFGYSHSSPEYWIKSGTLVPVTRNDIVKICGIDATGGNNRPNIPDITAHLWYFGLIDTC

SEQ ID NO: 10494 - protein, 267 aa, Thermomyces lanuginosus
VSQDLFNQFNLFAQYSAAAYCGKNNDAPAGTNITCTGNACPEVEKADATFLYSFEDSGVGDVTGFLALDNTNKLIVLSFRGSRSIENWIGNLNFDLKKINDICSGCRGHDGFTSSWRSVADTLRQKVEDAVREHPDYRVVFTGHSLGGALATVAGADLRGNGYDIDVFSYGAPRVGNRAFAEFLTVQTGGTLYRITHTNDIVPRLPPREFGYSHSSPEYWIKSGTLVPVTRNDIVKICGIDATGGNNRPNIPDIPAHLWYFGLIDTC

SEQ ID NO: 10495 - protein, 267 aa, Thermomyces lanuginosus; identical to SEQ ID NO: 8510

SEQ ID NO: 10496 - protein, 267 aa, Thermomyces lanuginosus
VSQDLFNQFNLFAQYSAAAYCGKNNDAPAGTNITCTGNACPEVEKADATFLYSFEDSGVGDVTGFLALDNTNKLIVLSFRGSRSIENWIGNLNFDLKKINDICSGCRGHDGFTSSWRSVADTLRQKVEDAVREHPDYRVVFTGHSLGGALATVAGADLRGNGYDIDVFSYGAPRVGNRAFAEFLTVQTGGTLYRITHTNDIVPRLPPREFGYSHSSPEYWIKSGTLVPVTRNDIVKIEGIDATGGNNRPNIPDIPAHLWYFGLIGTC

SEQ ID NO: 10497 - protein, 266 aa, Thermomyces lanuginosus
SQDLFNQFNLFAQYSAAAYCGKNNDAPAGTNITCTGNACPEVEKADATFLYSFEDSGVGDVTGFLALDNTNKLIVLSFRGSRSIENWIGNLNFDLKEINDICSGCRGHDGFTSSWRSVADTLRQKVEDAVREHPDYRVVFTGHSLGGALATVAGADLRGNGYDIDVFSYGAPRVGNRAFAEFLTVQTGGTLYRITHTNDIVPRLPPREFGYSHSSPEYWIKSGTLVPVTRNDIVKIEGIDATGGNNQPNIPDIPAHLWYFGLIGTC

SEQ ID NO: 10498 - protein, 266 aa, Thermomyces lanuginosus
EVSQDLFNQFNLFAQYSAAAYCGKNNDAPAGTNITCTGNACPEVEKADATFLYSFEDSGVGDVTGFLALDNTNKLIVLSFRGSRSIENWIGNLNFDLKEINDICSGCRGHDGFTSSWRSVADTLRQKVEDAVREHPDYRVVFTGHSLGGALATVAGADLRGNGYDIDVFSYGAPRVGNRAFAEFLTVQTGGTLYRITHTNDIVPRLPPREGSHSSPEYWIKSGTLVPVTRNDIVKIEGIDATGGNNQPNIPDIPAHLWYFGLIGTC

SEQ ID NO: 10499 - protein, 266 aa, Thermomyces lanuginosus
EVSQDLFNQFNLFAQYSAAAYCGKNNDAPAGTNITCTGNACPEVEKADATFLYSFEDSGVGDVTGFLALDNTNKLIVLSFRGSRSIENWIGNLNFDLKEINDICSGCRGHDGFTSSWRSVADTLRQKVEDAVREHPDYRVVFTGHSLGGALATVAGADLRGNGYDIDVFSYGAPRVGNRAFAEFLTVQTGGTLYRITHTNDIVPRLPPFGYSHSSPEYWIKSGTLVPVTRNDIVKIEGIDATGGNNQPNIPDIPAHLWYFGLIGTC

SEQ ID NO: 10500 - protein, 265 aa, Thermomyces lanuginosus
QDLFNQFNLFAQYSAAAYCGKNNDAPAGTNITCTGNACPEVEKADATFLYSFEDSGVGDVTGFLALDNTNKLIVLSFRGSRSIENWIGNLNFDLKEINDICSGCRGHDGFTSSWRSVADTLRQKVEDAVREHPDYRVVFTGHSLGGALATVAGADLRGNGYDIDVFSYGAPRVGNRAFAEFLTVQTGGTLYRITHTNDIVPRLPPREFGYSHSSPEYWIKSGTLVPVTRNDIVKIEGIDATGGNNQPNIPDIPAHLWYFGLIGTC

SEQ ID NO: 10501 - protein, 265 aa, Thermomyces lanuginosus
EVSQDLFNQFNLFAQYSAAAYCGKNNDAPAGTNITCTGNACPEVEKADATFLYSFEDSGVGDVTGFLALDNTNKLIVLSFRGSRSIENWIGNLNFDLKEINDICSGCRGHDGFTSSWRSVADTLRQKVEDAVREHPDYRVVFTGHSLGGALATVAGADLRGNGYDIDVFSYGAPRVGNRAFAEFLTVQTGGTLYRITHTNDIVPRLPPREFGYSHSSPEYWIKSGTLVPVTRNDIVKIGATGGNNQPNIPDIPAHLWYFGLIGTC

SEQ ID NO: 10502 - protein, 270 aa, Synthetic construct
EVSQDLFNQFNLFAQYSAAAYCGKNNDAPAGTNITCTGNACPEVEKADATFLYSFEDSGVGDVTGFLALDNTNKLIVLSFRGSRSIENWIGNLNFDLKEINDICSGCRGHDGFTSSWRSVADTLRQKVEDAVREHPDYRVVFTGHSLGGALATVAGADLRGNGYDIDVFSYGAPRVGNRAFAEFLTVQTGGTLYRITHTNDIVPRLPPREFGYSHSSPEYWIKSGTLVPVTRNDIVKIEGIDATGGNNQPNIPDIPAHLWYFGLIGTCLA

SEQ ID NO: 10503 - protein, 269 aa, Thermomyces lanuginosus
EVSQDLFNQFNLFAQYSAAAYCGKNNDAPAGTNITCTGNACPEVEKADATFLYSFEDSGVGDVTGFLALDNTNKLIVLSFRGSRSIENWIANLNFWLKKINDICSGCRGHDGFTSSWRSVADTLRQKVEDAVREHPDYRVVFTGHSLGGALATVAGADLRGNGYDIDVFSYGAPRVGNRAFAEFLTVQTGGTLYRITHTNDIVPRLPPREFGYSHSSPEYWIKSGTLVPVTRNDIVKIEGIDATGGSDRTTIMWIVGHLWYFQATDACN

SEQ ID NO: 10504 - protein, 269 aa, Thermomyces lanuginosus
EVSQDLFNQFNLFAQYSAAAYCGKNNDAPAGTNITCTGNACPEVEKADATFLYSFEDSGVGDVTGFLALDNTNKLIVLSFRGSRSIENWIGNLNFDLKEINDICSGCRGHDGFTSSWRSVADTLRQKVEDAVREHPDYRVVFTGHSLGGALATVAGADLRGNGYDIDVFSYGAPRVGNRAFAEFLTVQTGGTLYRITHTNDIVPRLPPREFGYSHSSPEYWIKSGTLVPVTRNDIVKIEGIDATGGNNQPNIPDIPAHLWYFGPISECD

SEQ ID NO: 10505 - protein, 269 aa, Thermomyces lanuginosus
VSQDLFNQFNLFAQYSAAAYCGKNNDAPAGTNITCTGNACPEVEKADATFLYSFEDSGVGDVTGFLALDNTNKLIVLSFRGSRSIENWIANLNFWLKEINDICSGCRGHDGFTSSWRSVADTLRQKVEDAVREHPDYRVVFTGHSLGGALATVAGADLRGNGYDIDVFSYGAPRVGNRAFAEFLTVQTGGTLYRITHTNDIVPRLPPREFGYSHSSPEYWIKSGTLVPVTRNDIVKICGIDATGGNNRPNIPDIPAHLWYFELISTCLA

SEQ ID NO: 10506 - protein, 268 aa, Thermomyces lanuginosus
EVSQDLFNQFNLFAQYSAAAYCGKNNDAPAGTNITCTGNACPEVEKADATFLYSFEDSGVGDVTGFLALDNTNKLIVLSFRGSRSIENWIGNLNFDLKEINDICSGCRGHDGFTSSWRSVADTLRQKVEDAVREHPDYRVVFTGHSLGGALATVAGADLRGNGYDIDVFSYGAPRVGNRAFAEFLTVQTGGTLYRITHTNDIVPRLPPREFGYSHSSPEYWIKSRTLVPVTRNDIVKIEGIDATGGNNQPNIPDIPAHLWYFGLIGTC

SEQ ID NO: 10507 - protein, 268 aa, Thermomyces lanuginosus
EVSQDLFNQFNLFAQYSAAAYCGKNNDAPAGTFITCTGNACPEVEKADATFLYSFEDSGVGDVTGFLALDNTNKLIVLSFRGSRSIENWIGNLNFDLKEINDICSGCRGHDGFTSSWRSVADTLRQKVEDAVREHPDYRVVFTGHSLGGALATVAGADLRGNGYDIDVFSYGAPRVGNRAFAEFLTVQTGGTLYRITHTNDIVPRLPPREFGYSHSSPEYWIKSGTLVPVTRNDIVKIEGIDATGGNNQPNIPDIPAHLWYFGLIGTC

SEQ ID NO: 10508 - protein, 268 aa, Thermomyces lanuginosus
EVSQDLFNQFNLFAQYSAAAYCGKNNDAPAGTNITCTGNACPEVEKADATFLYSFEDSGVGDVTGFLALDNTNKLIVLSFRGSRSIENWIGNLNFDLKEINDICSGCRGHDGFTSSWRSVADTLRQKVEDCVREHPDYRVVFTGHSLGGALATVAGADLRGNGYDIDVFSYGAPRVGNRAFAEFLTVQTGGTLYRITHTNDIVPRLPPREFGYSHSSPEYWIKSGTLVPVTRNDIVKIEGIDATGGNNQPNIPDIPAHLWYFGLIGTC

SEQ ID NO: 10509 - protein, 268 aa, Thermomyces lanuginosus
EVSQDLFNQFNLFAQYSAAAYCGKNNDAPAGTNITCTGNACPEVEKADATFLYSFEDSGVGDVTGFLALDNTNKYIVLSFRGSRSIENWIGNLNFDLKEINDICSGCRGHDGFTSSWRSVADTLRQKVEDAVREHPDYRVVFTGHSLGGALATVAGADLRGNGYDIDVFSYGAPRVGNRAFAEFLTVQTGGTLYRITHTNDIVPRLPPREFGYSHSSPEYWIKSGTLVPVTRNDIVKIEGIDATGGNNQPNIPDIPAHLWYFGLIGTC

SEQ ID NO: 10510 - protein, 268 aa, Thermomyces lanuginosus
EVSQDLFNQFNLFAQYSAAAYCGKNNDAPAGTNITCTGNACPEVVKADATFLYSFEDSGVGDVTGFLALDNTNKLIVLSFRGSRSIENWIGNLNFDLKEINDICSGCRGHDGFTSSWRSVADTLRQKVEDAVREHPDYRVVFTGHSLGGALATVAGADLRGNGYDIDVFSYGAPRVGNRAFAEFLTVQTGGTLYRITHTNDIVPRLPPREFGYSHSSPEYWIKSGTLVPVTRNDIVKIEGIDATGGNNQPNIPDIPAHLWYFGLIGTC

SEQ ID NO: 10511 - protein, 268 aa, Thermomyces lanuginosus
EVSQDLFNQFNLFAQYSAAGYCGKNNDAPAGTNITCTGNACPEVEKADATFLYSFEDSGVGDVTGFLALDNTNKLIVLSFRGSRSIENWIGNLNFDLKEINDICSGCRGHDGFTSSWRSVADTLRQKVEDAVREHPDYRVVFTGHSLGGALATVAGADLRGNGYDIDVFSYGAPRVGNRAFAEFLTVQTGGTLYRITHTNDIVPRLPPREFGYSHSSPEYWIKSGTLVPVTRNDIVKIEGIDATGGNNQPNIPDIPAHLWYFGLIGTC

SEQ ID NO: 10512 - protein, 268 aa, Thermomyces lanuginosus
EVSQDLFNQFNLFAQYSAAAYCGKNNDAPAGTNITCTENACPEVEKADATFLYSFEDSGVGDVTGFLALDNTNKLIVLSFRGSRSIENWIGNLNFDLKEINDICSGCRGHDGFTSSWRSVADTLRQKVEDAVREHPDYRVVFTGHSLGGALATVAGADLRGNGYDIDVFSYGAPRVGNRAFAEFLTVQTGGTLYRITHTNDIVPRLPPREFGYSHSSPEYWIKSGTLVPVTRNDIVKIEGIDATGGNNQPNIPDIPAHLWYFGLIGTC

SEQ ID NO: 10513 - protein, 268 aa, Thermomyces lanuginosus
EVSQDLFNQFNLFAQYSAAAYCGKNNDAPAGTNITCTGNACPEVEKADATFLYSFEDSGVGDVTGFLALDNTNKLIVLSFRGSRSIENWIGNLNFDLKEINDICSGCRGHDGFTSSWRSVADTLRQKVEDAVREHPDYRVVFTGHSLGGALATVAGADLRGNGYDIDVFSYGAPRVGNRAFAEFLTVQTGGTLYRITHTNDIVPRLPPREFGYSHSSPEYWIKSGTLVPVTRNDIVYIEGIDATGGNNQPNIPDIPAHLWYFGLIGTC

SEQ ID NO: 10514 - protein, 268 aa, Thermomyces lanuginosus
EVSQDLFNQFNLFAQYSAAAYCGKNNDATAGTNITCTGNACPEVEKADATFLYSFEDSGVGDVTGFLALDNTNKLIVLSFRGSRSIENWIGNLNFDLKEINDICSGCRGHDGFTSSWRSVADTLRQKVEDAVREHPDYRVVFTGHSLGGALATVAGADLRGNGYDIDVFSYGAPRVGNRAFAEFLTVQTGGTLYRITHTNDIVPRLPPREFGYSHSSPEYWIKSGTLVPVTRNDIVKIEGIDATGGNNQPNIPDIPAHLWYFGLIGTC

SEQ ID NO: 10515 - protein, 268 aa, Thermomyces lanuginosus
EVSQDLFNQFNLFAQYSAAAYCGKNNDAPAGTNITCTGNACPEVEKADATFLYSFEDSGVGDVTGFLALDNTNKLIVLSFRGSRSIENWIGNLNFDLKEINDICSGCRGHDGFTSSWRSVADTLRQKVEDAVREHPDYRVVFTGHSLGGALATVAGADLRGNGYDIDVFSYGAPRVGNRAFAEFLTVQTGGTLYRITHTNDIVPRLPPREFGYSHSSPEYWIKSGTLVPVTRRDIVKIEGIDATGGNNQPNIPDIPAHLWYFGLIGTC

SEQ ID NO: 10516 - protein, 268 aa, Thermomyces lanuginosus
EVSQDLFNQFNLFAQYSAAAYCGKNNDAPAGTNITCTGNACPEVEKADATFLYSFEDSGVGDVTGFLALDNTNGLIVLSFRGSRSIENWIGNLNFDLKEINDICSGCRGHDGFTSSWRSVADTLRQKVEDAVREHPDYRVVFTGHSLGGALATVAGADLRGNGYDIDVFSYGAPRVGNRAFAEFLTVQTGGTLYRITHTNDIVPRLPPREFGYSHSSPEYWIKSGTLVPVTRNDIVKIEGIDATGGNNQPNIPDIPAHLWYFGLIGTC

SEQ ID NO: 10517 - protein, 268 aa, Thermomyces lanuginosus
EVSQDLFNQFNLFAQYSAAAYCGKNNDAPAGTNITCTGNACPEVEKADATFLYSFEDSGVGDVTGFLALDNTNKLIVLSFRGSRFIENWIGNLNFDLKEINDICSGCRGHDGFTSSWRSVADTLRQKVEDAVREHPDYRVVFTGHSLGGALATVAGADLRGNGYDIDVFSYGAPRVGNRAFAEFLTVQTGGTLYRITHTNDIVPRLPPREFGYSHSSPEYWIKSGTLVPVTRNDIVKIEGIDATGGNNQPNIPDIPAHLWYFGLIGTC

SEQ ID NO: 10518 - protein, 268 aa, Thermomyces lanuginosus
EVSQDLFNQFNLFAQYSAAAYCGKNNDAPAGTNITCTGNACPEVEKADATFLYSFEDSGVGDVTGFLALDNTNKLIVLSFRGSRSIENWIGNLNFDLKEINDICSGCRGHDGFTSSWRSVADTLRQKVEDAVREHPDYRVVFTGHSLGGALATVAGADLRGNGYDIDVFSYGAPRVGNRAFAEFLTVQTGGTLYRITHTNDMVPRLPPREFGYSHSSPEYWIKSGTLVPVTRNDIVKIEGIDATGGNNQPNIPDIPAHLWYFGLIGTC

SEQ ID NO: 10519 - protein, 268 aa, Thermomyces lanuginosus
EVSQDLFYQFNLFAQYSAAAYCGKNNDAPAGTNITCTGNACPEVEKADATFLYSFEDSGVGDVTGFLALDNTNKLIVLSFRGSRSIENWIGNLNFDLKEINDICSGCRGHDGFTSSWRSVADTLRQKVEDAVREHPDYRVVFTGHSLGGALATVAGADLRGNGYDIDVFSYGAPRVGNRAFAEFLTVQTGGTLYRITHTNDIVPRLPPREFGYSHSSPEYWIKSGTLVPVTRNDIVKIEGIDATGGNNQPNIPDIPAHLWYFGLIGTC

SEQ ID NO: 10520 - protein, 268 aa, Synthetic construct
EVSQDLFNQFNLFAQYSAAAYCGKNNDAPAGTNITCTGNACPEVEKADATFLYSFEDSGVGDVTGFLALDNTNKLIVLSFRGSRSIENWIGNLNFLLKKINDICSGCRGHDGFTSSWRSVADTLRQKVEDAVREHPDYRVVFTGHSLGGALATVAGADLRGNGYDIDVFSYGAPRVGNRAFAEFLTAQTGGTLYRITHTNDIVPRLPPREFGYSHSSPEYWIKSGTLVPVTRNDIVKIEGIDATGGNNRPNIPDIPAHLWYFGLIGTC

SEQ ID NO: 10521 - protein, 268 aa, Thermomyces lanuginosus
EVSQDLFNQFNLFAQYSAAAYCGKNNDAPAGTNITCTGNACPEVEKADATFLYSFEDSGVGDVTGFLALDNTNALIVLSFRGSRSIENWIGNLNFDLKEINDICSGCRGHDGFTSSWRSVADTLRQKVEDAVREHPDYRVVFTGHSLGGALATVAGADLRGNGYDIDVFSYGAPRVGNRAFAEFLTVQTGGTLYRITHTNDIVPRLPPREFGYSHSSPEYWIKSGTLVPVTRNDIVKIEGIDATGGNNQPNIPDIPAHLWYFGLIGTC

SEQ ID NO: 10522 - protein, 268 aa, Thermomyces lanuginosus
EVSQDLFNQFNLFAQYSAAAYCGKNNDAPAGTNITCTGNACPEVEDADATFLYSFEDSGVGDVTGFLALDNTNKLIVLSFRGSRSIENWIGNLNFDLKEINDICSGCRGHDGFTSSWRSVADTLRQKVEDAVREHPDYRVVFTGHSLGGALATVAGADLRGNGYDIDVFSYGAPRVGNRAFAEFLTVQTGGTLYRITHTNDIVPRLPPREFGYSHSSPEYWIKSGTLVPVTRNDIVKIEGIDATGGNNQPNIPDIPAHLWYFGLIGTC

SEQ ID NO: 10523 - protein, 268 aa, Thermomyces lanuginosus
EVSQDLFNQFNLFAQYSAAAYCGKNNDAPAGTNITCTGNACPEVEKADATFLYSFEDSGVGDVTGFLALDNTNKLIVLSFRGSRSIENWIGNLNFDLKEINDICSGCRGHDGFTSSWRSVADTLRQKVEDAVREHPDYRVVFTGHSLGGALATVAGADLRGNGYDIDVFSYGAPRVGNRAFAEFLTVQSGGTLYRITHTNDIVPRLPPREFGYSHSSPEYWIKSGTLVPVTRNDIVKIEGIDATGGNNQPNIPDIPAHLWYFGLIGTC

SEQ ID NO: 10524 - protein, 268 aa, Thermomyces lanuginosus
EVSQDLFNQFNLFAQYSMAAYCGKNNDAPAGTNITCTGNACPEVEKADATFLYSFEDSGVGDVTGFLALDNTNKLIVLSFRGSRSIENWIGNLNFDLKEINDICSGCRGHDGFTSSWRSVADTLRQKVEDAVREHPDYRVVFTGHSLGGALATVAGADLRGNGYDIDVFSYGAPRVGNRAFAEFLTVQTGGTLYRITHTNDIVPRLPPREFGYSHSSPEYWIKSGTLVPVTRNDIVKIEGIDATGGNNQPNIPDIPAHLWYFGLIGTC

SEQ ID NO: 10525 - protein, 268 aa, Thermomyces lanuginosus
EVSQDLFNQFNLFAQYSAAAYCGKNNDAPAGTNITCTGNACPEVEKADATFAYSFEDSGVGDVTGFLALDNTNKLIVLSFRGSRSIENWIGNLNFDLKEINDICSGCRGHDGFTSSWRSVADTLRQKVEDAVREHPDYRVVFTGHSLGGALATVAGADLRGNGYDIDVFSYGAPRVGNRAFAEFLTVQTGGTLYRITHTNDIVPRLPPREFGYSHSSPEYWIKSGTLVPVTRNDIVKIEGIDATGGNNQPNIPDIPAHLWYFGLIGTC

SEQ ID NO: 10526 - protein, 268 aa, Thermomyces lanuginosus
EVSQDLFNQFNLFAQYSAAAYCGKNNDAPAGTNITCTGNACPEVEKADATFLYSFEDSGVGDVTGFLALDNTNKLIVLSFRGSRSIENWIGNLNFDLKEINDICSGCRGHDGFTSSWRSVADTLRQKVEDAVREHPDYRVVFTGHSLGGALATVAGADLRGNGYDIDVFSYGAPRVGNRAFAEFLTVQTGGTLYRITHTNDIVPRLPPREFGYSHSSPEYWIVSGTLVPVTRNDIVKIEGIDATGGNNQPNIPDIPAHLWYFGLIGTC

SEQ ID NO: 10527 - protein, 268 aa, Thermomyces lanuginosus
EVSADLFNQFNLFAQYSAAAYCGKNNDAPAGTNITCTGNACPEVEKADATFLYSFEDSGVGDVTGFLALDNTNKLIVLSFRGSRSIENWIGNLNFDLKEINDICSGCRGHDGFTSSWRSVADTLRQKVEDAVREHPDYRVVFTGHSLGGALATVAGADLRGNGYDIDVFSYGAPRVGNRAFAEFLTVQTGGTLYRITHTNDIVPRLPPREFGYSHSSPEYWIKSGTLVPVTRNDIVKIEGIDATGGNNQPNIPDIPAHLWYFGLIGTC

SEQ ID NO: 10528 - protein, 268 aa, Thermomyces lanuginosus
EVSQDLFNQFNLFAQYSAAAYCGKNNDAPAGTNITCTGNACPEVEKADATFLYSFEDSGVGDVTGFLALDNTNKLIVLSFRGSRSIENWIGNLNFDLKEMNDICSGCRGHDGFTSSWRSVADTLRQKVEDAVREHPDYRVVFTGHSLGGALATVAGADLRGNGYDIDVFSYGAPRVGNRAFAEFLTVQTGGTLYRITHTNDIVPRLPPREFGYSHSSPEYWIKSGTLVPVTRNDIVKIEGIDATGGNNQPNIPDIPAHLWYFGLIGTC

SEQ ID NO: 10529 - protein, 268 aa, Thermomyces lanuginosus
EVSQDLFNQFNLFAQYSAAAYCGKNNDAPAGTNITCTGNACPEVEKADATFLYSFEDSGVGDVTGFLALDNTNKLIVLSFRGSRSIENWIGNLNFDLKEINDICSGCRGHDGFTSSWRSVADTLRQKVEDAVREHPDYRVVFTGHSLGGALATVAGADLRGNGYDIDVFSYGAPRVGNRAFAEFLTVQTGGTLYRITHTNDIVPRLPPREFGYSHSSPEYWIKSGTMVPVTRNDIVKIEGIDATGGNNQPNIPDIPAHLWYFGLIGTC

SEQ ID NO: 10530 - protein, 268 aa, Thermomyces lanuginosus
EVSQDLFNQFNLFAQYSAAAYCGKNNDAPAGTNITCTGNACPEVEKADATFLYSFEDSGVGDVTGFLALDNTNKLIVLSFRGSRSIENWIGNLNFDLKEINDICSGCRGHDGFTSSWRSVADTLRQKVEDAVREHPLYRVVFTGHSLGGALATVAGADLRGNGYDIDVFSYGAPRVGNRAFAEFLTVQTGGTLYRITHTNDIVPRLPPREFGYSHSSPEYWIKSGTLVPVTRNDIVKIEGIDATGGNNQPNIPDIPAHLWYFGLIGTC

SEQ ID NO: 10531 - protein, 268 aa, Thermomyces lanuginosus
EVSQDLFNQFNLFAQYSAAAYCGKNNDAPAGTNITCTGNACPEVEKADATFLYSFEDSGVGDVTGFLALDNTNKLIVLSFRGSRSIENWIGNLNFDLKEINDICSGCRGHDGFTSSWRSVADTLRQKVEDAVREHPDYRVVFTGHSLGGALATVAGADLRGNGYDIDVFSYGAPRVGNRAFAEFLTVQTGGTLYRITHTNDLVPRLPPREFGYSHSSPEYWIKSGTLVPVTRNDIVKIEGIDATGGNNQPNIPDIPAHLWYFGLIGTC

SEQ ID NO: 10532 - protein, 268 aa, Thermomyces lanuginosus
EVSQDLFNQFNLFAQYSAAAYCGKNNDAPAGTNITCTGNACPEVEKADATFLYSFEDSGVGDVTGFLALDNTNKLIVLSFRGSRSIENWIGNLNFXLKEINDICSGCRGHDGFTSSWRSVADTLRQKVEDAVREHPDYRVVFTGHSLGGALATVAGADLRGNGYDIDVFSYGAPRVGNRAFAEFLTVQTGGTLYRITHTNDIVPRLPPREFGYSHSSPEYWIKSGTLVPVTRNDIVKIEGIDATGGNNRPNIPDIPAHLWYFGLIGTC

SEQ ID NO: 10533 - protein, 268 aa, Thermomyces lanuginosus
EVSQDLFNQFNLFAQYSAAAYCGKNNDAPAGTNITCTGNACPEVEKADATFLYSFEDWGVGDVTGFLALDNTNKLIVLSFRGSRSIENWIGNLNFDLKEINDICSGCRGHDGFTSSWRSVADTLRQKVEDAVREHPDYRVVFTGHSLGGALATVAGADLRGNGYDIDVFSYGAPRVGNRAFAEFLTVQTGGTLYRITHTNDIVPRLPPREFGYSHSSPEYWIKSGTLVPVTRNDIVKIEGIDATGGNNQPNIPDIPAHLWYFGLIGTC

SEQ ID NO: 10534 - protein, 268 aa, Thermomyces lanuginosus
EVSQDLFNQFNLFAQYSAAAYCGKNNDAPAGTNITCTGNACPEVEKADATFLYSFEDSGVGDVTGFLALDNINKLIVLSFRGSRSIENWIGNLNFDLKEINDICSGCRGHDGFTSSWRSVADTLRQKVEDAVREHPDYRVVFTGHSLGGALATVAGADLRGNGYDIDVFSYGAPRVGNRAFAEFLTVQTGGTLYRITHTNDIVPRLPPREFGYSHSSPEYWIKSGTLVPVTRNDIVKIEGIDATGGNNQPNIPDIPAHLWYFGLIGTC

SEQ ID NO: 10535 - protein, 268 aa, Thermomyces lanuginosus
EVQQDLFNQFNLFAQYSAAAYCGKNNDAPAGTNITCTGNACPEVEKADATFLYSFEDSGVGDVTGFLALDNTNKLIVLSFRGSRSIENWIGNLNFDLKEINDICSGCRGHDGFTSSWRSVADTLRQKVEDAVREHPDYRVVFTGHSLGGALATVAGADLRGNGYDIDVFSYGAPRVGNRAFAEFLTVQTGGTLYRITHTNDIVPRLPPREFGYSHSSPEYWIKSGTLVPVTRNDIVKIEGIDATGGNNQPNIPDIPAHLWYFGLIGTC

SEQ ID NO: 10536 - protein, 268 aa, Thermomyces lanuginosus
EVSQDLFNQFNLFAQYSAAAYCGKNNDAPAGTNITCTGNACPEVEKADHTFLYSFEDSGVGDVTGFLALDNTNKLIVLSFRGSRSIENWIGNLNFDLKEINDICSGCRGHDGFTSSWRSVADTLRQKVEDAVREHPDYRVVFTGHSLGGALATVAGADLRGNGYDIDVFSYGAPRVGNRAFAEFLTVQTGGTLYRITHTNDIVPRLPPREFGYSHSSPEYWIKSGTLVPVTRNDIVKIEGIDATGGNNQPNIPDIPAHLWYFGLIGTC

SEQ ID NO: 10537 - protein, 268 aa, Thermomyces lanuginosus
EVSQDLFNQFNLFAQYSAAAYCGKNNDAPAGTNITCTGNACPEVEKADADFLYSFEDSGVGDVTGFLALDNTNKLIVLSFRGSRSIENWIGNLNFDLKEINDICSGCRGHDGFTSSWRSVADTLRQKVEDAVREHPDYRVVFTGHSLGGALATVAGADLRGNGYDIDVFSYGAPRVGNRAFAEFLTVQTGGTLYRITHTNDIVPRLPPREFGYSHSSPEYWIKSGTLVPVTRNDIVKIEGIDATGGNNQPNIPDIPAHLWYFGLIGTC

SEQ ID NO: 10538 - protein, 268 aa, Thermomyces lanuginosus
EVSQDLFNQFNLFAQYSAAAYCGKNNDAPAGTNITCTGNACPEVEKADATFLYSFEDSGVGDVTGFLALDNTNKLIVLSFRGSRSIENWIGNLNFDLKEINDICSGCRGHDGFTSSWRSVADTLRQKVEDAVREHPDYRVVFTGHSLGGALATVAGADLRGNGYDIDVFSYGAPRVGNRAFAEFLTVQTGGTLYRITHTNDVVPRLPPREFGYSHSSPEYWIKSGTLVPVTRNDIVKIEGIDATGGNNQPNIPDIPAHLWYFGLIGTC

SEQ ID NO: 10539 - protein, 268 aa, Thermomyces lanuginosus
EVSQDLFNQFNLFAQYSAAAYCGKNNDAPAGTNITCTGNACPEVEKADATFLYSFEDSGVGDVTGFLASDNTNKLIVLSFRGSRSIENWIGNLNFDLKEINDICSGCRGHDGFTSSWRSVADTLRQKVEDAVREHPDYRVVFTGHSLGGALATVAGADLRGNGYDIDVFSYGAPRVGNRAFAEFLTVQTGGTLYRITHTNDIVPRLPPREFGYSHSSPEYWIKSGTLVPVTRNDIVKIEGIDATGGNNQPNIPDIPAHLWYFGLIGTC

SEQ ID NO: 10540 - protein, 268 aa, Thermomyces lanuginosus
EVSQDLFNQFNLFAQYSAAAYCGKNNDAPAGTNITCTGNACPEVEKADATFLYSFEDSGVGDVTGFLALDNTNKLIVLSFRGSRSIENWIGNLNFDLKEINDICSGCRGHDGFTSSWRSVADTLRQKVEDAVREHPDYRVVFTGHSLGGALATVAGADLRGNGYDIDVFSYGAPRVGNRAFAEFLTVQTGGTLYRITHTNDIVPRLPPREFGYSHSSPEYWIKSGTLVPVTRNDIVWIEGIDATGGNNQPNIPDIPAHLWYFGLIGTC

SEQ ID NO: 10541 - protein, 268 aa, Thermomyces lanuginosus
EVSQDLFNQFNLFAQYSAAAYCGKNNDAPAGTNITCTGNACPEVEKADATFLYSFEDSGVGDVTGFLALDNTNKLIVLSFRGSRSIENWIGNLNFDLKEINDICSGCRGHDGFTSSWRSHADTLRQKVEDAVREHPDYRVVFTGHSLGGALATVAGADLRGNGYDIDVFSYGAPRVGNRAFAEFLTVQTGGTLYRITHTNDIVPRLPPREFGYSHSSPEYWIKSGTLVPVTRNDIVKIEGIDATGGNNQPNIPDIPAHLWYFGLIGTC

SEQ ID NO: 10542 - protein, 268 aa, Thermomyces lanuginosus
EVSQDLFNQFNLFAQYSAAAYCGKNNDAPAGTNITCTGNACPEVEKADATFLYSFEDSGVGDVTGHLALDNTNKLIVLSFRGSRSIENWIGNLNFDLKEINDICSGCRGHDGFTSSWRSVADTLRQKVEDAVREHPDYRVVFTGHSLGGALATVAGADLRGNGYDIDVFSYGAPRVGNRAFAEFLTVQTGGTLYRITHTNDIVPRLPPREFGYSHSSPEYWIKSGTLVPVTRNDIVKIEGIDATGGNNQPNIPDIPAHLWYFGLIGTC

SEQ ID NO: 10543 - protein, 268 aa, Thermomyces lanuginosus
EVSQDLFNQFNLFAQYSAAAYCGKNNDAPAGTNITCTGNACPEVEKADATFLYSFEDSGVGDVTGFLALDNTNKLIVLSFRGSRSIENWIGNLNFDLKEINDICSGCRGHDGFTSSWRSVADTLRQKVEDRVREHPDYRVVFTGHSLGGALATVAGADLRGNGYDIDVFSYGAPRVGNRAFAEFLTVQTGGTLYRITHTNDIVPRLPPREFGYSHSSPEYWIKSGTLVPVTRNDIVKIEGIDATGGNNQPNIPDIPAHLWYFGLIGTC

SEQ ID NO: 10544 - protein, 268 aa, Thermomyces lanuginosus
EVSQDLFNQFNLFAQYSAAAYCGKNNDAPAGTNITCTGNACPEVEKADATFLYSFEDSGVGDVTGFLALDNTNKLIVLSFRGSRSIENWIGNLNFDLKEINDICSGCRGHDGFTSSWRSVADTLRQKVEDAVQEHPDYRVVFTGHSLGGALATVAGADLRGNGYDIDVFSYGAPRVGNRAFAEFLTVQTGGTLYRITHTNDIVPRLPPREFGYSHSSPEYWIKSGTLVPVTRNDIVKIEGIDATGGNNQPNIPDIPAHLWYFGLIGTC

SEQ ID NO: 10545 - protein, 268 aa, Thermomyces lanuginosus
EVSQDLFNQFNLFAQYSAAAYCGKNNDAPAGTSITCTGNACPEVEKADATFLYSFEDSGVGDVTGFLALDNTNKLIVLSFRGSRSIENWIGNLNFDLKEINDICSGCRGHDGFTSSWRSVADTLRQKVEDAVREHPDYRVVFTGHSLGGALATVAGADLRGNGYDIDVFSYGAPRVGNRAFAEFLTVQTGGTLYRITHTNDIVPRLPPREFGYSHSSPEYWIKSGTLVPVTRNDIVKIEGIDATGGNNQPNIPDIPAHLWYFGLIGTC

SEQ ID NO: 10546 - protein, 268 aa, Thermomyces lanuginosus
EVSQDLFNQFNLFAQYSAAAYCGKNNDAPAGTNITCTGNACPEVEKADATFLYSFEDSGVGDVTGFLALDNTNKLIVLSFRGSRSIENWIGNLNFDLKEINDICSGCRGHDGFTSSWRSVADTLRQKVEDAVREHPDYRVVFTGHSLGGALATVAGADLRGNGYDIDVFSYGAPRVGNRAFAEFLTVQTGVTLYRITHTNDIVPRLPPREFGYSHSSPEYWIKSGTLVPVTRNDIVKIEGIDATGGNNQPNIPDIPAHLWYFGLIGTC

SEQ ID NO: 10547 - protein, 268 aa, Thermomyces lanuginosus
EVSQDLFNQFNLFAQYSAAAYCGKNNDAPAGTNITCTGNACPEVEKADATFLYSFEDSGVGDVTGFLALDNTNKLIVLSFRGSRSIENWIGNLNFDLKEINDICSGCRGHDGFTSSWRSVADTLRQKVEDAVRETPDYRVVFTGHSLGGALATVAGADLRGNGYDIDVFSYGAPRVGNRAFAEFLTVQTGGTLYRITHTNDIVPRLPPREFGYSHSSPEYWIKSGTLVPVTRNDIVKIEGIDATGGNNQPNIPDIPAHLWYFGLIGTC

SEQ ID NO: 10548 - protein, 268 aa, Thermomyces lanuginosus
EVSQDLFNQFNLFAQYSAAAYCGKNNDAPAGTNITCTGNACPEVEKADATFLYSFEDSGVGDVTGFLALDNTNKLSVLSFRGSRSIENWIGNLNFDLKEINDICSGCRGHDGFTSSWRSVADTLRQKVEDAVREHPDYRVVFTGHSLGGALATVAGADLRGNGYDIDVFSYGAPRVGNRAFAEFLTVQTGGTLYRITHTNDIVPRLPPREFGYSHSSPEYWIKSGTLVPVTRNDIVKIEGIDATGGNNQPNIPDIPAHLWYFGLIGTC

SEQ ID NO: 10549 - protein, 268 aa, Thermomyces lanuginosus
EVSQDLFNQFNLFAQYSAAAYCGKNNDAPAGTNITCTGNACPEVEKADATFLYSFEDSGVGDVTGFLALDNTNKLIVLSFRGSRSIENWIGNLNFDLKEINDICSGCRGHDGFTSSWRSVADTLRQKVEDAVREHPDYRVVFTGHSLGGALATVAGADLRGNGYDIDVFSYGAPRVGNRAFAEFLTVQTGGTLYRITHTNDIVPRLPPREFGYSHSSPEYWIKSGTLVPVTLNDIVKIEGIDATGGNNQPNIPDIPAHLWYFGLIGTC

SEQ ID NO: 10550 - protein, 268 aa, Thermomyces lanuginosus
EVSQDLFNQFNLFAQYSAAAYCGKNNRAPAGTNITCTGNACPEVEKADATFLYSFEDSGVGDVTGFLALDNTNKLIVLSFRGSRSIENWIGNLNFDLKEINDICSGCRGHDGFTSSWRSVADTLRQKVEDAVREHPDYRVVFTGHSLGGALATVAGADLRGNGYDIDVFSYGAPRVGNRAFAEFLTVQTGGTLYRITHTNDIVPRLPPREFGYSHSSPEYWIKSGTLVPVTRNDIVKIEGIDATGGNNQPNIPDIPAHLWYFGLIGTC

SEQ ID NO: 10551 - protein, 268 aa, Thermomyces lanuginosus
EVSQDLFNQFNLFAQYSAAAYCGKNNDAPAGTNITCTGNACPEVEKADATFLYSFEDSGVGDVTGFLALDNTHKLIVLSFRGSRSIENWIGNLNFDLKEINDICSGCRGHDGFTSSWRSVADTLRQKVEDAVREHPDYRVVFTGHSLGGALATVAGADLRGNGYDIDVFSYGAPRVGNRAFAEFLTVQTGGTLYRITHTNDIVPRLPPREFGYSHSSPEYWIKSGTLVPVTRNDIVKIEGIDATGGNNQPNIPDIPAHLWYFGLIGTC

SEQ ID NO: 10552 - protein, 268 aa, Thermomyces lanuginosus
EVSQDLFNQFNLFAQYSAAAYCGKNNDAKAGTNITCTGNACPEVEKADATFLYSFEDSGVGDVTGFLALDNTNKLIVLSFRGSRSIENWIGNLNFDLKEINDICSGCRGHDGFTSSWRSVADTLRQKVEDAVREHPDYRVVFTGHSLGGALATVAGADLRGNGYDIDVFSYGAPRVGNRAFAEFLTVQTGGTLYRITHTNDIVPRLPPREFGYSHSSPEYWIKSGTLVPVTRNDIVKIEGIDATGGNNQPNIPDIPAHLWYFGLIGTC

SEQ ID NO: 10553 - protein, 268 aa, Thermomyces lanuginosus
EVSQDLFNQFNLFAQYSAAAYCGKNNDAHAGTNITCTGNACPEVEKADATFLYSFEDSGVGDVTGFLALDNTNKLIVLSFRGSRSIENWIGNLNFDLKEINDICSGCRGHDGFTSSWRSVADTLRQKVEDAVREHPDYRVVFTGHSLGGALATVAGADLRGNGYDIDVFSYGAPRVGNRAFAEFLTVQTGGTLYRITHTNDIVPRLPPREFGYSHSSPEYWIKSGTLVPVTRNDIVKIEGIDATGGNNQPNIPDIPAHLWYFGLIGTC

SEQ ID NO: 10554 - protein, 268 aa, Thermomyces lanuginosus
EVSQDLFNQFNLFAQYSAAAYCGKNNDAPAGTNITCTGNACPEVEKADATFLYSFEDSGVGDVTGFLALDNTNKLIVLSFRGSRSIENWIGNLNFDLKEINDICSGCRGHDGFTSSWRSVADTLRQKVEDAVREHPDYRVVFTGHSLGGALATVAGADLRGNGYDIDVFSYGAPRVGNRAFAEFLTVQTGGTLYRITHTNDIVPRLPPREFGYSHSSPEYWIKSGTLVPVRRNDIVKIEGIDATGGNNQPNIPDIPAHLWYFGLIGTC

SEQ ID NO: 10555 - protein, 268 aa, Thermomyces lanuginosus
EVSQDLFNQFNLFAQYSAAAYCGKNNDAPAGTNITCTGNACPEVEKADATFLYSFEDKGVGDVTGFLALDNTNKLIVLSFRGSRSIENWIGNLNFDLKEINDICSGCRGHDGFTSSWRSVADTLRQKVEDAVREHPDYRVVFTGHSLGGALATVAGADLRGNGYDIDVFSYGAPRVGNRAFAEFLTVQTGGTLYRITHTNDIVPRLPPREFGYSHSSPEYWIKSGTLVPVTRNDIVKIEGIDATGGNNQPNIPDIPAHLWYFGLIGTC

SEQ ID NO: 10556 - protein, 268 aa, Synthetic construct
EVSQDLFNQFNLFAQYSAAAYCGKNNDAPAGTNITCTGNACPEVEKADATFLYSFEDSGVGDVTGFLALDNTNKLIVLSFRGSRSIKNWIANLNFRLKEVNDICSGCRGHDGFTSSWRSVADTLRQKVEDAVREHPDYRVVFTGHSLGGALATVAGADLRGNGYDIDVFSYGAPRVGNRAFAEFLTVQTGGTLYRITHTNDIVPRLPPREFGYSHSSPEYWIKSGTLVPVTRNDIVKIEGIDATGGNNQPNIPDIPAHLWYFGLIGTC

SEQ ID NO: 10557 - protein, 268 aa, Thermomyces lanuginosus
EVSQDLFNQFNLFAQYSAAAYCGKNNDAPAGTNITCTGNACPEVEKADATFLYSFEDSGVGDVTGFLALDNTNKLIVLSFRGTRSIENWIGNLNFDLKEINDICSGCRGHDGFTSSWRSVADTLRQKVEDAVREHPDYRVVFTGHSLGGALATVAGADLRGNGYDIDVFSYGAPRVGNRAFAEFLTVQTGGTLYRITHTNDIVPRLPPREFGYSHSSPEYWIKSGTLVPVTRNDIVKIEGIDATGGNNQPNIPDIPAHLWYFGLIGTC

SEQ ID NO: 10558 - protein, 268 aa, Thermomyces lanuginosus
EVSQDLFNQFNLFAQYSAAAYCGKNNDAPAGTNITCTGNACPEVEKADATFLYSFEDSGVGDVTGFLALDNTNKLIVLSFRGSRSIENWIGNLNFDLKEINDICSGCRGHDGFTSSWRSVADTLRQKVEDAVREHPDYRVVFTGHSLGGALATVAGADLRGNGYDIDVFSYGAPRVGNRAFAEFLTVQTGGTLYRITHTNDIVPRLPPREFGYSHSSPEYWIKSGTLVPVTRNDIVKIEGIDATGGNNQPNIPDIPAHLWDFGLIGTC

SEQ ID NO: 10559 - protein, 268 aa, Thermomyces lanuginosus
EVSQDLFNQFNLFAQYSAAAYCGKNNDAPAGTNITCTGNACPEVEKADATFLYSFEDSGVGDVTGFLALDNTNKLIVLSFRGSRSIENWIGNLNFDLKEINDICSGCRGHDGFTSSWRSVADTLRQKVEDAVREHPDYRVVFTGHSLGGALATVAGADLRGNGYDIDVFSYGAPRVGNRAFAEFLTVQTGGTLYRITHTNDIVPRLPPREFGYSHSSPEYWIKSGTLVPVGRNDIVKIEGIDATGGNNQPNIPDIPAHLWYFGLIGTC

SEQ ID NO: 10560 - protein, 268 aa, Thermomyces lanuginosus
EVSQDLFNQFNLFAQYSAAAYCGKNNDAPAGTNITCTGNACPEVEKADATFLYSFEDSGVGDVTGFLALDNTNKLIVLSFRGSRHIENWIGNLNFDLKEINDICSGCRGHDGFTSSWRSVADTLRQKVEDAVREHPDYRVVFTGHSLGGALATVAGADLRGNGYDIDVFSYGAPRVGNRAFAEFLTVQTGGTLYRITHTNDIVPRLPPREFGYSHSSPEYWIKSGTLVPVTRNDIVKIEGIDATGGNNQPNIPDIPAHLWYFGLIGTC

SEQ ID NO: 10561 - protein, 268 aa, Thermomyces lanuginosus
EVSQDLFNQFNLFAQYSAAAYCGKNNDAPAGTMITCTGNACPEVEKADATFLYSFEDSGVGDVTGFLALDNTNKLIVLSFRGSRSIENWIGNLNFDLKEINDICSGCRGHDGFTSSWRSVADTLRQKVEDAVREHPDYRVVFTGHSLGGALATVAGADLRGNGYDIDVFSYGAPRVGNRAFAEFLTVQTGGTLYRITHTNDIVPRLPPREFGYSHSSPEYWIKSGTLVPVTRNDIVKIEGIDATGGNNQPNIPDIPAHLWYFGLIGTC

SEQ ID NO: 10562 - protein, 268 aa, Thermomyces lanuginosus
EVSQDLFNQFNLFAQYSAAAYCGKNNDAPAGTNITCTGNACPEVEKADATFLYSFEDSGVGDVTGFLALDNTNKLIVLSFRGSRSVENWIGNLNFDLKEINDICSGCRGHDGFTSSWRSVADTLRQKVEDAVREHPDYRVVFTGHSLGGALATVAGADLRGNGYDIDVFSYGAPRVGNRAFAEFLTVQTGGTLYRITHTNDIVPRLPPREFGYSHSSPEYWIKSGTLVPVTRNDIVKIEGIDATGGNNQPNIPDIPAHLWYFGLIGTC

SEQ ID NO: 10563 - protein, 268 aa, Thermomyces lanuginosus
EVSQDLFNQFNLFAQYSAAAYCGKNNDAPAGTNITCTGNACPEVEKADATFLYSFEDSGVGDVTGFLALDNTNKLIVLSFRGSRSIENWIGNLNFDLKEINDICSGCRGHDGFTSSWRSIADTLRQKVEDAVREHPDYRVVFTGHSLGGALATVAGADLRGNGYDIDVFSYGAPRVGNRAFAEFLTVQTGGTLYRITHTNDIVPRLPPREFGYSHSSPEYWIKSGTLVPVTRNDIVKIEGIDATGGNNQPNIPDIPAHLWYFGLIGTC

SEQ ID NO: 10564 - protein, 268 aa, Thermomyces lanuginosus
EVSQDLFNQFNLFAQYSAAAYCGKNNDAPAGTNITCTGNACPEVEKADATFLYSFEDSGVGDVTGFLALDNTNKLIVLSFRGSRSIENWIGNLNFDLKEINDICSGCRGHDGFTSSWRSVADTLRQKVEDAVREHPDYRVVFTGHSLGGALATVAGADLRGNGYDIDVFSYGAPRVGNRAFAEFLTVQTGGTLYRITHTNDIVPRLPPREFGYSHSSTEYWIKSGTLVPVTRNDIVKIEGIDATGGNNQPNIPDIPAHLWYFGLIGTC

SEQ ID NO: 10565 - protein, 268 aa, Thermomyces lanuginosus
EVSQDLFNQFNLFAQYSAAAYCGKNNDAPAGTNITCTGNACPEVEKADATFLYSFEDSGVGAVTGFLALDNTNKLIVLSFRGSRSIENWIGNLNFDLKEINDICSGCRGHDGFTSSWRSVADTLRQKVEDAVREHPDYRVVFTGHSLGGALATVAGADLRGNGYDIDVFSYGAPRVGNRAFAEFLTVQTGGTLYRITHTNDIVPRLPPREFGYSHSSPEYWIKSGTLVPVTRNDIVKIEGIDATGGNNQPNIPDIPAHLWYFGLIATC

SEQ ID NO: 10566 - protein, 268 aa, Thermomyces lanuginosus
EISQDLFNQFNLFAQYSAAAYCGKNNDAPAGTNITCTGNACPEVEKADATFLYSFEDSGVGDVTGFLALDNTNKLIVLSFRGSRSIENWIGNLNFDLKEINDICSGCRGHDGFTSSWRSVADTLRQKVEDAVREHPDYRVVFTGHSLGGALATVAGADLRGNGYDIDVFSYGAPRVGNRAFAEFLTVQTGGTLYRITHTNDIVPRLPPREFGYSHSSPEYWIKSGTLVPVTRNDIVKIEGIDATGGNNQPNIPDIPAHLWYFGLIGTC

SEQ ID NO: 10567 - protein, 268 aa, Thermomyces lanuginosus
EVSQDLFNQFNLFAQYSAAAYCGKNNDAPAGTNITCTGNACPEVEKADATFLYSFEDSGVGDVTGFLALDNTNKLIVLSFRGSRSIENWIGNLNFDLKEINDICSGCRGHDGFTSSWRSVADTLRQKVEDAVREHPDYRVVFTGHSLGGALATVAGADLRGNGYDIDVFSYGAPRVGNRAFAEFLTVQTGGTLYRITHTNDIVPRLPPREFGYSHSSPEYWIKSGTLVPVTRNDIVKIEGIDATGGNNQPNEPDIPAHLWYFGLIGTC

SEQ ID NO: 10568 - protein, 268 aa, Thermomyces lanuginosus
EVSQDLFNQFNLFAQYSAAAYCGKNNDAPAGTNITCTGNACPEVEKADATFLYSFEDSGVGDVTGFLALDNTNKLIVLSFRGSRSIENWIGNLNFDLKEINDICSGCRGHDGFISSWRSVADTLRQKVEDAVREHPDYRVVFTGHSLGGALATVAGADLRGNGYDIDVFSYGAPRVGNRAFAEFLTVQTGGTLYRITHTNDIVPRLPPREFGYSHSSPEYWIKSGTLVPVTRNDIVKIEGIDATGGNNQPNIPDIPAHLWYFGLIGTC

SEQ ID NO: 10569 - protein, 268 aa, Thermomyces lanuginosus
EVSQDLFNQFNLFAQYSAAAYCGKNNDAPAGTNITCTGNACPEVEKADATFLYSFEDSGVGDVTGFLALDNTNKLIVLSFRGSRSIENWIGNLNFDLKEINDICSGCRGHDGFTSSWRSVADTLRQKVEDAVREHPDYRVVFTGHSLGGALASVAGADLRGNGYDIDVFSYGAPRVGNRAFAEFLTVQTGGTLYRITHTNDIVPRLPPREFGYSHSSPEYWIKSGTLVPVTRNDIVKIEGIDATGGNNQPNIPDIPAHLWYFGLIGTC

SEQ ID NO: 10570 - protein, 268 aa, Thermomyces lanuginosus
EVSQDLFNQFNLFAQYSAAAYCGKNNDAPAGTNITCTGNACPEVEKFDATFLYSFEDSGVGDVTGFLALDNTNKLIVLSFRGSRSIENWIGNLNFDLKEINDICSGCRGHDGFTSSWRSVADTLRQKVEDAVREHPDYRVVFTGHSLGGALATVAGADLRGNGYDIDVFSYGAPRVGNRAFAEFLTVQTGGTLYRITHTNDIVPRLPPREFGYSHSSPEYWIKSGTLVPVTRNDIVKIEGIDATGGNNQPNIPDIPAHLWYFGLIGTC

SEQ ID NO: 10571 - protein, 268 aa, Thermomyces lanuginosus
EVSQDLFNQFNLFAQYSAAAYCGKNNDAPAGTNITCTGNACPEVEKADATFLYSFEDSGVGDVTGFLALDNTNKQIVLSFRGSRSIENWIGNLNFDLKEINDICSGCRGHDGFTSSWRSVADTLRQKVEDAVREHPDYRVVFTGHSLGGALATVAGADLRGNGYDIDVFSYGAPRVGNRAFAEFLTVQTGGTLYRITHTNDIVPRLPPREFGYSHSSPEYWIKSGTLVPVTRNDIVKIEGIDATGGNNQPNIPDIPAHLWYFGLIGTC

SEQ ID NO: 10572 - protein, 268 aa, Thermomyces lanuginosus
EVSQDLFNQFNLFAQYSAAAYCGKNNDAPAGTNITCTGNACPEVEKADATFLYSFEDSGVGDVTGFLALDNTNKLIVLSFRGSRSIENWIGNLNFDLKEINDICSGCRGHDGFTSSWRSVADTLRQKVEDAVREHPDYRVVFTGHSLGGALATVAGADLRGNWYDIDVFSYGAPRVGNRAFAEFLTVQTGGTLYRITHTNDIVPRLPPREFGYSHSSPEYWIKSGTLVPVTRNDIVKIEGIDATGGNNQPNIPDIPAHLWYFGLIGTC

SEQ ID NO: 10573 - protein, 268 aa, Thermomyces lanuginosus
EVSQDLFNQFNLFAQYSAAAYCGKNNDAPAGTNITCTGNACPEVEKADATFLYSFEDSGVGDVTGFLALDNTNKLIVLSFRGSRSIENWIGNLRFDLKEINDICSGCRGHDGFTSSWRSVADTLRQKVEDAVREHPDYRVVFTGHSLGGALATVAGADLRGNGYDIDVFSYGAPRVGNRAFAEFLTVQTGGTLYRITHTNDIVPRLPPREFGYSHSSPEYWIKSGTLVPVTRNDIVKIEGIDATGGNNQPNIPDIPAHLWYFGLIGTC

SEQ ID NO: 10574 - protein, 268 aa, Thermomyces lanuginosus
EVSQDLFNQFNLFAQYSAAAYCGKNNDAPAGTNITCTGNACPEVEKADAWFLYSFEDSGVGDVTGFLALDNTNKLIVLSFRGSRSIENWIGNLNFDLKEINDICSGCRGHDGFTSSWRSVADTLRQKVEDAVREHPDYRVVFTGHSLGGALATVAGADLRGNGYDIDVFSYGAPRVGNRAFAEFLTVQTGGTLYRITHTNDIVPRLPPREFGYSHSSPEYWIKSGTLVPVTRNDIVKIEGIDATGGNNQPNIPDIPAHLWYFGLIGTC

SEQ ID NO: 10575 - protein, 268 aa, Thermomyces lanuginosus
EVSQDLFNQFNLFAQYSAAAYCGKNNDAPAGTNITCTGNACPEVEKADATFLYSFEDSGVGDVTGFLALDNTNKLIVLSFRGSRSIENWIGNLNFDLKKINDICSGCRGHDGFTSSWRSVADTLRQKVEDAVREHPDYRVVFTGHSLGGALATVAGADLRGNGYDIDVFSYGAPRVGNRAFAEFLTVQTGGTLYRITHTNDIVPRLPPXEFGYSHSSPEYWIKSGTLVPVTRNDIVKIEGIDATGGNNHPNIPDIPAHLWYFGLIGTC

SEQ ID NO: 10576 - protein, 268 aa, Thermomyces lanuginosus
EVSQDVFNQFNLFAQYSAAAYCGKNNDAPAGTNITCTGNACPEVEKADATFLYSFEDSGVGDVTGFLALDNTNKLIVLSFRGSRSIENWIGNLNFDLKEINDICSGCRGHDGFTSSWRSVADTLRQKVEDAVREHPDYRVVFTGHSLGGALATVAGADLRGNGYDIDVFSYGAPRVGNRAFAEFLTVQTGGTLYRITHTNDIVPRLPPREFGYSHSSPEYWIKSGTLVPVTRNDIVKIEGIDATGGNNQPNIPDIPAHLWYFGLIGTC

SEQ ID NO: 10577 - protein, 268 aa, Thermomyces lanuginosus
EVSQDLFNQFNLFAQYSAAAYCGKNNDAPAGTNITCTGNACPEVEKADATFLYSFEDSGVGDVTGFLALDNTNKLIVLSFRGSRSIENWIGNLNFDLKEINDICSGCRGHDGFTSSWRSVASTLRQKVEDAVREHPDYRVVFTGHSLGGALATVAGADLRGNGYDIDVFSYGAPRVGNRAFAEFLTVQTGGTLYRITHTNDIVPRLPPREFGYSHSSPEYWIKSGTLVPVTRNDIVKIEGIDATGGNNQPNIPDIPAHLWYFGLIGTC

SEQ ID NO: 10578 - protein, 268 aa, Thermomyces lanuginosus
EVSQDLFNQFNLFAQYSAAAYCGKNNDAPAGTNITCTGNACPEVEKADATFLYSFEDSGVGDVTGFLALDNTNKLIVLSFRGSRSIENWIGNLNFDLKEINDICSGCRGHDGFTSSWRSVADTLRQKVEDAVREHPDYRVVFTGHSLGGALATVAGADLRGNGYDIDVFSYGAPRVGNRAFAEFLTVQTGGTLYRITHTNDIVPRLPPREFGYSHSKPEYWIKSGTLVPVTRNDIVKIEGIDATGGNNQPNIPDIPAHLWYFGLIGTC

SEQ ID NO: 10579 - protein, 268 aa, Thermomyces lanuginosus
EVSQDLFNNFNLFAQYSAAAYCGKNNDAPAGTNITCTGNACPEVEKADATFLYSFEDSGVGDVTGFLALDNTNKLIVLSFRGSRSIENWIGNLNFDLKEINDICSGCRGHDGFTSSWRSVADTLRQKVEDAVREHPDYRVVFTGHSLGGALATVAGADLRGNGYDIDVFSYGAPRVGNRAFAEFLTVQTGGTLYRITHTNDIVPRLPPREFGYSHSSPEYWIKSGTLVPVTRNDIVKIEGIDATGGNNQPNIPDIPAHLWYFGLIGTC

SEQ ID NO: 10580 - protein, 268 aa, Thermomyces lanuginosus
EVSQDLFNQFNLFAQYSAAAICGKNNDAPAGTNITCTGNACPEVEKADATFLYSFEDSGVGDVTGFLALDNTNKLIVLSFRGSRSIENWIGNLNFDLKEINDICSGCRGHDGFTSSWRSVADTLRQKVEDAVREHPDYRVVFTGHSLGGALATVAGADLRGNGYDIDVFSYGAPRVGNRAFAEFLTVQTGGTLYRITHTNDIVPRLPPREFGYSHSSPEYWIKSGTLVPVTRNDIVKIEGIDATGGNNQPNIPDIPAHLWYFGLIGTC

SEQ ID NO: 10581 - protein, 268 aa, Thermomyces lanuginosus
EVSQDLFNQFNLFAQYSAAAYCGKNNDAPAGTNITCTGNACPEVEKADATFLYSFEDQGVGDVTGFLALDNTNKLIVLSFRGSRSIENWIGNLNFDLKEINDICSGCRGHDGFTSSWRSVADTLRQKVEDAVREHPDYRVVFTGHSLGGALATVAGADLRGNGYDIDVFSYGAPRVGNRAFAEFLTVQTGGTLYRITHTNDIVPRLPPREFGYSHSSPEYWIKSGTLVPVTRNDIVKIEGIDATGGNNQPNIPDIPAHLWYFGLIGTC

SEQ ID NO: 10582 - protein, 268 aa, Thermomyces lanuginosus
EVSQDLFNQFNLFAQYSAAAYCGKNNDAPAGTNITCTGNACPEVEKADATFIYSFEDSGVGDVTGFLALDNTNKLIVLSFRGSRSIENWIGNLNFDLKEINDICSGCRGHDGFTSSWRSVADTLRQKVEDAVREHPDYRVVFTGHSLGGALATVAGADLRGNGYDIDVFSYGAPRVGNRAFAEFLTVQTGGTLYRITHTNDIVPRLPPREFGYSHSSPEYWIKSGTLVPVTRNDIVKIEGIDATGGNNQPNIPDIPAHLWYFGLIGTC

SEQ ID NO: 10583 - protein, 268 aa, Thermomyces lanuginosus
EVSQDLFNQFNLFAQYSAAAYCGKNNDAPAGTNITCTGWACPEVEKADATFLYSFEDSGVGDVTGFLALDNTNKLIVLSFRGSRSIENWIGNLNFDLKEINDICSGCRGHDGFTSSWRSVADTLRQKVEDAVREHPDYRVVFTGHSLGGALATVAGADLRGNGYDIDVFSYGAPRVGNRAFAEFLTVQTGGTLYRITHTNDIVPRLPPREFGYSHSSPEYWIKSGTLVPVTRNDIVKIEGIDATGGNNQPNIPDIPAHLWYFGLIGTC

SEQ ID NO: 10584 - protein, 268 aa, Thermomyces lanuginosus
EVSQDLFNQFNLFAQYSAAAYCGKNNDAPAGTNITCTGNACPEVEKADATFLYSFEDSGVGDVTGFLALDNTNKLIVLSFRGSRSIENWIGTLNFDLKEINDICSGCRGHDGFTSSWRSVADTLRQKVEDAVREHPDYRVVFTGHSLGGALATVAGADLRGNGYDIDVFSYGAPRVGNRAFAEFLTVQTGGTLYRITHTNDIVPRLPPREFGYSHSSPEYWIKSGTLVPVTRNDIVKIEGIDATGGNNQPNIPDIPAHLWYFGLIGTC

SEQ ID NO: 10585 - protein, 268 aa, Thermomyces lanuginosus
EVSQDLFNQFNLFAQYSAAAYCGKNNDAPAGTNITCTGNACPEVEKADATFLYSFEDSGVGDVTGFLALDNTNKLIVLSFRGSRSIENWIGNINFDLKEINDICSGCRGHDGFTSSWRSVADTLRQKVEDAVREHPDYRVVFTGHSLGGALATVAGADLRGNGYDIDVFSYGAPRVGNRAFAEFLTVQTGGTLYRITHTNDIVPRLPPREFGYSHSSPEYWIKSGTLVPVTRNDIVKIEGIDATGGNNQPNIPDIPAHLWYFGLIGTC

SEQ ID NO: 10586 - protein, 268 aa, Thermomyces lanuginosus
EVSQDLFNEFNLFAQYSAAAYCGKNNDAPAGTNITCTGNACPEVEKADATFLYSFEDSGVGDVTGFLALDNTNKLIVLSFRGSRSIENWIGNLNFDLKEINDICSGCRGHDGFTSSWRSVADTLRQKVEDAVREHPDYRVVFTGHSLGGALATVAGADLRGNGYDIDVFSYGAPRVGNRAFAEFLTVQTGGTLYRITHTNDIVPRLPPREFGYSHSSPEYWIKSGTLVPVTRNDIVKIEGIDATGGNNQPNIPDIPAHLWYFGLIGTC

SEQ ID NO: 10587 - protein, 268 aa, Synthetic construct
EVSQDLFNQFNLFAQYSAAAYCGKNNDAPAGTNITCTGNACPEVEKADATFLYSFEDSGVGDVTGFLALDNTNKLIVLSFRGSRSIKNWIGNLNFELKEINDICSGCRGHDGFTSSWRSVADTLRQKVEDAVREHPDYRVVFTGHSLGGALATVAGADLRGNGYDIDVFSYGAPRVGNRAFAEFLTVQTGGTLYRITHTNDIVPRLPPREFGYSHSSPEYWIKSGTLVPVTRNDIVKIEGIDATGGNNQPNIPDIPAHLWYFGLIGTC

SEQ ID NO: 10588 - protein, 268 aa, Thermomyces lanuginosus
EVKQDLFNQFNLFAQYSAAAYCGKNNDAPAGTNITCTGNACPEVEKADATFLYSFEDSGVGDVTGFLALDNTNKLIVLSFRGSRSIENWIGNLNFDLKEINDICSGCRGHDGFTSSWRSVADTLRQKVEDAVREHPDYRVVFTGHSLGGALATVAGADLRGNGYDIDVFSYGAPRVGNRAFAEFLTVQTGGTLYRITHTNDIVPRLPPREFGYSHSSPEYWIKSGTLVPVTRNDIVKIEGIDATGGNNQPNIPDIPAHLWYFGLIGTC

SEQ ID NO: 10589 - protein, 268 aa, Thermomyces lanuginosus
EVSQDLFNQFNLFAQYSAAAYCGKNNDAPAGTNITCTGNACPEVEKADATFLYSFEDSGVGDVTGFLALDNTNKLIVLSFRGSRSIENWIGNLNFDLKEINDICSGCRGHDGFTSSWRSVADTLRQKVEDAVREHPDYRVVFTGHSLGGALATVAGADLRGNGYDIDVFSYGAPRVGNRAFAEFLTVQTGGTLYRITHTNDIVPRLPPREFGYSHSSPEYWIKPGTLVPVTRNDIVKIEGIDATGGNNQPNIPDIPAHLWYFGLIGTC

SEQ ID NO: 10590 - protein, 268 aa, Thermomyces lanuginosus
EVSQDLFNQFNLFAQYSAAAYCGKNNDAPAGTNITCTGNACPEVEEADATFLYSFEDSGVGDVTGFLALDNTNKLIVLSFRGSRSIENWIGNLNFDLKEINDICSGCRGHDGFTSSWRSVADTLRQKVEDAVREHPDYRVVFTGHSLGGALATVAGADLRGNGYDIDVFSYGAPRVGNRAFAEFLTVQTGGTLYRITHTNDIVPRLPPREFGYSHSSPEYWIKSGTLVPVTRNDIVKIEGIDATGGNNQPNIPDIPAHLWYFGLIGTC

SEQ ID NO: 10591 - protein, 268 aa, Thermomyces lanuginosus
EVSQDLFNQFNLFAQYSAAAYCGKNNDAPAGTNITCTGNACPEVEKADATFLYEFEDSGVGDVTGFLALDNTNKLIVLSFRGSRSIENWIGNLNFDLKEINDICSGCRGHDGFTSSWRSVADTLRQKVEDAVREHPDYRVVFTGHSLGGALATVAGADLRGNGYDIDVFSYGAPRVGNRAFAEFLTVQTGGTLYRITHTNDIVPRLPPREFGYSHSSPEYWIKSGTLVPVTRNDIVKIEGIDATGGNNQPNIPDIPAHLWYFGLIGTC

SEQ ID NO: 10592 - protein, 268 aa, Thermomyces lanuginosus
EVSQDLFNQFNLFAQYSAAAYCGKNNDAPAGTNITCTGNACPEVEKADATFLYSFEDSGVGDVTGFLALDNTNKLIVLSFRGSRSMENWIGNLNFDLKEINDICSGCRGHDGFTSSWRSVADTLRQKVEDAVREHPDYRVVFTGHSLGGALATVAGADLRGNGYDIDVFSYGAPRVGNRAFAEFLTVQTGGTLYRITHTNDIVPRLPPREFGYSHSSPEYWIKSGTLVPVTRNDIVKIEGIDATGGNNQPNIPDIPAHLWYFGLIGTC

SEQ ID NO: 10593 - protein, 268 aa, Thermomyces lanuginosus
EVSQDLFNQFNLFAQYSAAAYCGKNNDAPAGTNITCTGNACPEVEKADATFLYSFEDSGVGDVTGFLALDNTNKLIVLSFRGSRSIENWIGNLNFDLKEINDICSGCRGHDGFTSSWRSVADTLRQKVEDAVREHPDYRVVFTGHSLGGALATVAGADLRGNGYDIDVFSYGAPRVGNRAFAEFLTVQTGGTLYRITHTNDIVPRLPPREFGYSHSSPEYWIKSPTLVPVTRNDIVKIEGIDATGGNNQPNIPDIPAHLWYFGLIGTC

SEQ ID NO: 10594 - protein, 268 aa, Thermomyces lanuginosus
EVSQDLFNQFNLFAQYSAAAYCGKNNDAPAGTNITCTGNACPEVEKADATFLYSFEDSGVGDVTGFLALDNTNKLIVLSFRGSRSIENWIGNLNFDLKEINDICSGCRTHDGFTSSWRSVADTLRQKVEDAVREHPDYRVVFTGHSLGGALATVAGADLRGNGYDIDVFSYGAPRVGNRAFAEFLTVQTGGTLYRITHTNDIVPRLPPREFGYSHSSPEYWIKSGTLVPVTRNDIVKIEGIDATGGNNQPNIPDIPAHLWYFGLIGTC

SEQ ID NO: 10595 - protein, 268 aa, Thermomyces lanuginosus
EVSQDLFNQFNLFAQYSAAAYCGKNNDAPAGTNITCTGNACPEVEKADATFLYSFEDSGVGDVTGFLALDNTNKLIVLSFRGSRSIENWIGNLNFDLKEINDICSGCRGHDGFTSSWRSVADTLRQKVEDAVREHPDYRVVFTGHSLGGALATVAGADLRGNGYDIDVFSYGAPRVGNRAFAEFLTVQTGGTLYRITHTNDIVPRLPPREFGYSHSSPEYWIMSGTLVPVTRNDIVKIEGIDATGGNNQPNIPDIPAHLWYFGLIGTC

SEQ ID NO: 10596 - protein, 268 aa, Thermomyces lanuginosus
EVSQDLFNQFNLFAQYSAAAYCGKNNDAPAGTNITCTGNACPEVEKADARFLYSFEDSGVGDVTGFLALDNTNKLIVLSFRGSRSIENWIGNLNFDLKEINDICSGCRGHDGFTSSWRSVADTLRQKVEDAVREHPDYRVVFTGHSLGGALATVAGADLRGNGYDIDVFSYGAPRVGNRAFAEFLTVQTGGTLYRITHTNDIVPRLPPREFGYSHSSPEYWIKSGTLVPVTRNDIVKIEGIDATGGNNQPNIPDIPAHLWYFGLIGTC

SEQ ID NO: 10597 - protein, 268 aa, Thermomyces lanuginosus
EVSQDLFNQFNLFAQYSAAAYCGKNNDAPAGTNITCTANACPEVEKADATFLYSFEDSGVGDVTGFLALDNTNKLIVLSFRGSRSIENWIGNLNFDLKEINDICSGCRGHDGFTSSWRSVADTLRQKVEDAVREHPDYRVVFTGHSLGGALATVAGADLRGNGYDIDVFSYGAPRVGNRAFAEFLTVQTGGTLYRITHTNDIVPRLPPREFGYSHSSPEYWIKSGTLVPVTRNDIVKIEGIDATGGNNQPNIPDIPAHLWYFGLIGTC

SEQ ID NO: 10598 - protein, 268 aa, Thermomyces lanuginosus
EVSQDLFNQFNLFAQYSAAAYCGKNNDAPAGTNITCTGNACPEVEKADATFLYSFEDSGVGDVTGFLALDNTNKLIVLSFRGSRSIENWIGNLNFDLKEINDICSGCRGHDGFTSSWRSVADTLRQKVEDAVREHPDYRVVFTGHSLGGALATVAGADLRGNGYDIDVFSYGAPRVGNRAFAEFLTVQTGGTLYRITHTNDIVPRLPPREFGYSHSSPEYWIKSGTLVPVTRNDIVKIEGIDATGGNNQPNIPDIPXHLWYFGLIGTC

SEQ ID NO: 10599 - protein, 268 aa, Thermomyces lanuginosus
EVSQDLFNQFNLFAQYSAAAYCGKNNDAPAGTNITCTGNACPEVEKADATFLYMFEDSGVGDVTGFLALDNTNKLIVLSFRGSRSIENWIGNLNFDLKEINDICSGCRGHDGFTSSWRSVADTLRQKVEDAVREHPDYRVVFTGHSLGGALATVAGADLRGNGYDIDVFSYGAPRVGNRAFAEFLTVQTGGTLYRITHTNDIVPRLPPREFGYSHSSPEYWIKSGTLVPVTRNDIVKIEGIDATGGNNQPNIPDIPAHLWYFGLIGTC

SEQ ID NO: 10600 - protein, 268 aa, Thermomyces lanuginosus
EVSQDLFNQFNLFAQYSAAAYCGKNNDAPAGTNITCTGNACPEVEKADATFLYSFEDSGVGDVTGFLALDNTNKLIVLSFRGSRSPENWIGNLNFDLKEINDICSGCRGHDGFTSSWRSVADTLRQKVEDAVREHPDYRVVFTGHSLGGALATVAGADLRGNGYDIDVFSYGAPRVGNRAFAEFLTVQTGGTLYRITHTNDIVPRLPPREFGYSHSSPEYWIKSGTLVPVTRNDIVKIEGIDATGGNNQPNIPDIPAHLWYFGLIGTC

SEQ ID NO: 10601 - protein, 268 aa, Thermomyces lanuginosus
EVSQDLFNQFNLFAQYSAAAYCGKNNDAPAGTNITCTGNACPEVEKADATFLYSFEDSGVGDVTGFLALDNTNKLIVLSFRGSRSIENWIGNLNFDLKEINDICSGCRGHDGFTSSWRSVADTLRQKVEDAVREHPDYRVVFTGHSLGGALATVAGADLRGNGYDIDVFSYGAPRVGNRAFAEFLTVQTGGTLYRITHTNDIVPRLPPREFGYSHSSPEYWIKSGTLVPVTRNDIVHIEGIDATGGNNQPNIPDIPAHLWYFGLIGTC

SEQ ID NO: 10602 - protein, 268 aa, Thermomyces lanuginosus
EVSQDLFNQFNLFAQYSAAAYCGKNNDAPAGTNITCTGNACPEVEKADATFLYSFEDSGVGDVTGFLALDNANKLIVLSFRGSRSIENWIGNLNFDLKEINDICSGCRGHDGFTSSWRSVADTLRQKVEDAVREHPDYRVVFTGHSLGGALATVAGADLRGNGYDIDVFSYGAPRVGNRAFAEFLTVQTGGTLYRITHTNDIVPRLPPREFGYSHSSPEYWIKSGTLVPVTRNDIVKIEGIDATGGNNQPNIPDIPAHLWYFGLIGTC

SEQ ID NO: 10603 - protein, 268 aa, Thermomyces lanuginosus
EVSQDLFNQFNLFAQYSAAAYCDKNNDAPAGTNITCTGNACPEVEKADATFLYSFEDSGVGDVTGFLALDNTNKLIVLSFRGSRSIENWIGNLNFDLKEINDICSGCRGHDGFTSSWRSVADTLRQKVEDAVREHPDYRVVFTGHSLGGALATVAGADLRGNGYDIDVFSYGAPRVGNRAFAEFLTVQTGGTLYRITHTNDIVPRLPPREFGYSHSSPEYWIKSGTLVPVTRNDIVKIEGIDATGGNNQPNIPDIPAHLWYFGLIGTC

SEQ ID NO: 10604 - protein, 268 aa, Thermomyces lanuginosus
EVSQDLFNQFNLFAQYSAAAYCGKNNDAPAGTNITCTGNACPEVEKADATFLYSFEDSGVGDVTGFLALDNTNKLIVLSFRGSRSIENWIGNLNFDLKEINDICSGCRGHDGFTSSWRSVADTLRQKVEDAVREHPDYRVVFTGHSLGGALATVAGADLRGNGYDIDVFSYGAPRVGNRAFAEFLTVQTGGTLYRITHTNDIVPRLPPREFGYSHSSPEYWIKSGTGVPVTRNDIVKIEGIDATGGNNQPNIPDIPAHLWYFGLIGTC

SEQ ID NO: 10605 - protein, 268 aa, Thermomyces lanuginosus
EVSQDLFNQFNLFAQYSAAAYCGKNNDAPAGTNITCTGNACPEVEKADATFLYSFEDSGVGDVTGFLALDNTNKLIVLSFRGSRSIENWIGNLNFDLKEINDICSGCRGHDGFTSSWRSVADTLRQKVEDAVREHPDYRVVFTGHSLGGALATVTGADLRGNGYDIDVFSYGAPRVGNRAFAEFLTVQTGGTLYRITHTNDIVPRLPPREFGYSHSSPEYWIKSGTLVPVTRNDIVKIEGIDATGGNNQPNIPDIPAHLWYFGLIGTC

SEQ ID NO: 10606 - protein, 268 aa, Thermomyces lanuginosus
EVSQVLFNQFNLFAQYSAAAYCGKNNDAPAGTNITCTGNACPEVEKADATFLYSFEDSGVGDVTGFLALDNTNKLIVLSFRGSRSIENWIGNLNFDLKEINDICSGCRGHDGFTSSWRSVADTLRQKVEDAVREHPDYRVVFTGHSLGGALATVAGADLRGNGYDIDVFSYGAPRVGNRAFAEFLTVQTGGTLYRITHTNDIVPRLPPREFGYSHSSPEYWIKSGTLVPVTRNDIVKIEGIDATGGNNQPNIPDIPAHLWYFGLIGTC

SEQ ID NO: 10607 - protein, 268 aa, Thermomyces lanuginosus
EVYQDLFNQFNLFAQYSAAAYCGKNNDAPAGTNITCTGNACPEVEKADATFLYSFEDSGVGDVTGFLALDNTNKLIVLSFRGSRSIENWIGNLNFDLKEINDICSGCRGHDGFTSSWRSVADTLRQKVEDAVREHPDYRVVFTGHSLGGALATVAGADLRGNGYDIDVFSYGAPRVGNRAFAEFLTVQTGGTLYRITHTNDIVPRLPPREFGYSHSSPEYWIKSGTLVPVTRNDIVKIEGIDATGGNNQPNIPDIPAHLWYFGLIGTC

SEQ ID NO: 10608 - protein, 268 aa, Thermomyces lanuginosus
EVSQDLFNQFNLFAQYSAAAYCGKNNDAPAGTNITCTGNACPEVEKADATFLYSFEDSGVGDVTGFLALDNTEKLIVLSFRGSRSIENWIGNLNFDLKEINDICSGCRGHDGFTSSWRSVADTLRQKVEDAVREHPDYRVVFTGHSLGGALATVAGADLRGNGYDIDVFSYGAPRVGNRAFAEFLTVQTGGTLYRITHTNDIVPRLPPREFGYSHSSPEYWIKSGTLVPVTRNDIVKIEGIDATGGNNQPNIPDIPAHLWYFGLIGTC

SEQ ID NO: 10609 - protein, 268 aa, Thermomyces lanuginosus
EVSQDLFNQFNLFAQYSAAAYCGKNNDAPAGTNITCTGNACPEVEKADATFLYSFEDSGVGDVTGFLALDNTNKLIVLSFRGSRSIENWIGNLNFDLKEINDICSGCRGHDGFTSSWRSVADTLRQKVECAVREHPDYRVVFTGHSLGGALATVAGADLRGNGYDIDVFSYGAPRVGNRAFAEFLTVQTGGTLYRITHTNDIVPRLPPREFGYSHSSPEYWIKSGTLVPVTRNDIVKIEGIDATGGNNQPNIPDIPAHLWYFGLIGTC

SEQ ID NO: 10610 - protein, 268 aa, Thermomyces lanuginosus
EVSQDLFNQFNLFAQYSAAAYCGKNNDAPAGTNITCTGNACPEVEKADATFLYSFEDSGVGDVTGFLALDNENKLIVLSFRGSRSIENWIGNLNFDLKEINDICSGCRGHDGFTSSWRSVADTLRQKVEDAVREHPDYRVVFTGHSLGGALATVAGADLRGNGYDIDVFSYGAPRVGNRAFAEFLTVQTGGTLYRITHTNDIVPRLPPREFGYSHSSPEYWIKSGTLVPVTRNDIVKIEGIDATGGNNQPNIPDIPAHLWYFGLIGTC

SEQ ID NO: 10611 - protein, 268 aa, Thermomyces lanuginosus
EVSQDLFNQFNFFAQYSAAAYCGKNNDAPAGTNITCTGNACPEVEKADATFLYSFEDSGVGDVTGFLALDNTNKLIVLSFRGSRSIENWIGNLNFDLKEINDICSGCRGHDGFTSSWRSVADTLRQKVEDAVREHPDYRVVFTGHSLGGALATVAGADLRGNGYDIDVFSYGAPRVGNRAFAEFLTVQTGGTLYRITHTNDIVPRLPPREFGYSHSSPEYWIKSGTLVPVTRNDIVKIEGIDATGGNNQPNIPDIPAHLWYFGLIGTC

SEQ ID NO: 10612 - protein, 268 aa, Thermomyces lanuginosus
EVSQDLFNQFNLFAQYSAAAYCGKNNDAPAGTNITCTGNACPEVEKADATFLYSFEDSGVGDVTGFLALDNTNKLIVLSFRGSRSIENWIGNLNFDLKEINDICSGCRGHDGFTSSWRSVADTLRQKVEDAVREHPDYRVVFTGHSLGGALATVATADLRGNGYDIDVFSYGAPRVGNRAFAEFLTVQTGGTLYRITHTNDIVPRLPPREFGYSHSSPEYWIKSGTLVPVTRNDIVKIEGIDATGGNNQPNIPDIPAHLWYFGLIGTC

SEQ ID NO: 10613 - protein, 268 aa, Thermomyces lanuginosus
EVSQDLFNQFNLFAQYSAAAYCGKNNDAPAGTNITCTGNACPEVEKADATFLSSFEDSGVGDVTGFLALDNTNKLIVLSFRGSRSIENWIGNLNFDLKEINDICSGCRGHDGFTSSWRSVADTLRQKVEDAVREHPDYRVVFTGHSLGGALATVAGADLRGNGYDIDVFSYGAPRVGNRAFAEFLTVQTGGTLYRITHTNDIVPRLPPREFGYSHSSPEYWIKSGTLVPVTRNDIVKIEGIDATGGNNQPNIPDIPAHLWYFGLIGTC

SEQ ID NO: 10614 - protein, 268 aa, Thermomyces lanuginosus
EVSQDLFNQFNLFAQYSAAAYCGKNNDAPAGTNITCTGNACPEVEKADATFLYSFEDSGVGDVTGFLALDNTNKLIVLSFRGSRSIENWIGNLNFDLKEINDICSGCRGHDGFTSSWRSVADTLRQKVEDAVREHPDYRVVFTGHSLGGALATVAGADLRGNGYDIDVFSYGAPRFGNRAFAEFLTVQTGGTLYRITHTNDIVPRLPPREFGYSHSSPEYWIKSGTLVPVTRNDIVKIEGIDATGGNNQPNIPDIPAHLWYFGLIGTC

SEQ ID NO: 10615 - protein, 268 aa, Thermomyces lanuginosus
EVSQDLFNQFNLFAQYSAAAYCGKNNDAPAGTNITCTGNACPEVEKADATFLYSFEDSGVGDVTGFLALDNTNKLIVLSFRGSRSIENWIGNLNFDLKEINDICSGCRGHDGFTSSWRSVADTLRQKVEDAVREHPDYRVVFTGHSLGGALATVAGADLRGNGYDIDVFSYGAPRVGNRAFAEFLTVQTGGTLYRITHTNDIVPRLPPREFGYSHSSPEYWIKSGDLVPVTRNDIVKIEGIDATGGNNQPNIPDIPAHLWYFGLIGTC

SEQ ID NO: 10616 - protein, 268 aa, Thermomyces lanuginosus
EVSQDLFNQFKLFAQYSAAAYCGKNNDAPAGTNITCTGNACPEVEKADATFLYSFEDSGVGDVTGFLALDNTNKLIVLSFRGSRSIENWIGNLNFDLKEINDICSGCRGHDGFTSSWRSVADTLRQKVEDAVREHPDYRVVFTGHSLGGALATVAGADLRGNGYDIDVFSYGAPRVGNRAFAEFLTVQTGGTLYRITHTNDIVPRLPPREFGYSHSSPEYWIKSGTLVPVTRNDIVKIEGIDATGGNNQPNIPDIPAHLWYFGLIGTC

SEQ ID NO: 10617 - protein, 268 aa, Thermomyces lanuginosus
EVSQDLFNQFNLFAQYSAAAYCGKNNDAPAGTNITCTGNACPEVEKADWTFLYSFEDSGVGDVTGFLALDNTNKLIVLSFRGSRSIENWIGNLNFDLKEINDICSGCRGHDGFTSSWRSVADTLRQKVEDAVREHPDYRVVFTGHSLGGALATVAGADLRGNGYDIDVFSYGAPRVGNRAFAEFLTVQTGGTLYRITHTNDIVPRLPPREFGYSHSSPEYWIKSGTLVPVTRNDIVKIEGIDATGGNNQPNIPDIPAHLWYFGLIGTC

SEQ ID NO: 10618 - protein, 268 aa, Thermomyces lanuginosus
EVSQDLFNQFNLFAQYSAAAYCGKNNDAPAGTNITCTGNACPEVEKADATFLYSFEDSGVGDVTGFLALDNTNKLIVLSFRGSRSIENWIGNLNFDLKEINDICSGCRGHDGFTSSWRSVADTLRQKVEDAVREHPWYRVVFTGHSLGGALATVAGADLRGNGYDIDVFSYGAPRVGNRAFAEFLTVQTGGTLYRITHTNDIVPRLPPREFGYSHSSPEYWIKSGTLVPVTRNDIVKIEGIDATGGNNQPNIPDIPAHLWYFGLIGTC

SEQ ID NO: 10619 - protein, 268 aa, Thermomyces lanuginosus
EVSQDLFNQFNLFAQYSAAAYCGKNNDAPAGTNITCTGNACPEVEKADATFLKSFEDSGVGDVTGFLALDNTNKLIVLSFRGSRSIENWIGNLNFDLKEINDICSGCRGHDGFTSSWRSVADTLRQKVEDAVREHPDYRVVFTGHSLGGALATVAGADLRGNGYDIDVFSYGAPRVGNRAFAEFLTVQTGGTLYRITHTNDIVPRLPPREFGYSHSSPEYWIKSGTLVPVTRNDIVKIEGIDATGGNNQPNIPDIPAHLWYFGLIGTC

SEQ ID NO: 10620 - protein, 268 aa, Thermomyces lanuginosus
EVSQDLFNQFNLFAQYSAAAYCGKNNDAPAGTNITCTGNACPEVEKADATFLYSFEDSGVGDVTGFLALDNTNKLIVLSFRGSRSIENWIGNLNFDLHEINDICSGCRGHDGFTSSWRSVADTLRQKVEDAVREHPDYRVVFTGHSLGGALATVAGADLRGNGYDIDVFSYGAPRVGNRAFAEFLTVQTGGTLYRITHTNDIVPRLPPREFGYSHSSPEYWIKSGTLVPVTRNDIVKIEGIDATGGNNQPNIPDIPAHLWYFGLIGTC

SEQ ID NO: 10621 - protein, 268 aa, Thermomyces lanuginosus
EVSQDLFNQFNLFAQYSAAAYCGKNNDAPAGTNIECTGNACPEVEKADATFLYSFEDSGVGDVTGFLALDNTNKLIVLSFRGSRSIENWIGNLNFDLKEINDICSGCRGHDGFTSSWRSVADTLRQKVEDAVREHPDYRVVFTGHSLGGALATVAGADLRGNGYDIDVFSYGAPRVGNRAFAEFLTVQTGGTLYRITHTNDIVPRLPPREFGYSHSSPEYWIKSGTLVPVTRNDIVKIEGIDATGGNNQPNIPDIPAHLWYFGLIGTC

SEQ ID NO: 10622 - protein, 268 aa, Thermomyces lanuginosus
EVSQDLFNQFNLFAQYSAAAYCGKNNDAPAGTNITCTGNACPEVEKADATFLYSFEDSGVGDVTGFLALDNTNKLIVLSFRGSRSIENWIGNLNFDLKEINDICSGCRGHDGFTSSWRSVADTLRQKVEDAVREHPDYRVVFTGHSLGGALATVAGADLRGNGYDIDVFSYGAPRVGNRAFAEFLTVQQGGTLYRITHTNDIVPRLPPREFGYSHSSPEYWIKSGTLVPVTRNDIVKIEGIDATGGNNQPNIPDIPAHLWYFGLIGTC

SEQ ID NO: 10623 - protein, 268 aa, Thermomyces lanuginosus
EVSQDLFNQFNLFAQYSAAAYCGKNNDAPAGTNITCTGNACPEVEKADATFLHSFEDSGVGDVTGFLALDNTNKLIVLSFRGSRSIENWIGNLNFDLKEINDICSGCRGHDGFTSSWRSVADTLRQKVEDAVREHPDYRVVFTGHSLGGALATVAGADLRGNGYDIDVFSYGAPRVGNRAFAEFLTVQTGGTLYRITHTNDIVPRLPPREFGYSHSSPEYWIKSGTLVPVTRNDIVKIEGIDATGGNNQPNIPDIPAHLWYFGLIGTC

SEQ ID NO: 10624 - protein, 268 aa, Thermomyces lanuginosus
EVSQDLFNQFNLFAQYSAAAYCGKNNDAPAGTNITCTGNACPEVEKADATFLYSFEDSGVGDVTGFLALDNTNNLIVLSFRGSRSIENWIGNLNFDLKEINDICSGCRGHDGFTSSWRSVADTLRQKVEDAVREHPDYRVVFTGHSLGGALATVAGADLRGNGYDIDVFSYGAPRVGNRAFAEFLTVQTGGTLYRITHTNDIVPRLPPREFGYSHSSPEYWIKSGTLVPVTRNDIVKIEGIDATGGNNQPNIPDIPAHLWYFGLIGTC

SEQ ID NO: 10625 - protein, 268 aa, Thermomyces lanuginosus
EVSQDLFNQFNLFAQYSAAAYCGKNNDAPAGTNITCTFNACPEVEKADATFLYSFEDSGVGDVTGFLALDNTNKLIVLSFRGSRSIENWIGNLNFDLKEINDICSGCRGHDGFTSSWRSVADTLRQKVEDAVREHPDYRVVFTGHSLGGALATVAGADLRGNGYDIDVFSYGAPRVGNRAFAEFLTVQTGGTLYRITHTNDIVPRLPPREFGYSHSSPEYWIKSGTLVPVTRNDIVKIEGIDATGGNNQPNIPDIPAHLWYFGLIGTC

SEQ ID NO: 10626 - protein, 268 aa, Thermomyces lanuginosus
EVSQDLFNQFNLFAQYSAAAYCGKNNDAPAGTNITCTGNACPEVEKADATFLYSFEDSGVGDVTGFLALDNTNKLIVLSFRGSRSIENWIGNLNQDLKEINDICSGCRGHDGFTSSWRSVADTLRQKVEDAVREHPDYRVVFTGHSLGGALATVAGADLRGNGYDIDVFSYGAPRVGNRAFAEFLTVQTGGTLYRITHTNDIVPRLPPREFGYSHSSPEYWIKSGTLVPVTRNDIVKIEGIDATGGNNQPNIPDIPAHLWYFGLIGTC

SEQ ID NO: 10627 - protein, 268 aa, Thermomyces lanuginosus
EVSQDLFNQFNLFAQYSAAAYCGKNNDAPRGTNITCTGNACPEVEKADATFLYSFEDSGVGDVTGFLALDNTNKLIVLSFRGSRSIENWIGNLNFDLKEINDICSGCRGHDGFTSSWRSVADTLRQKVEDAVREHPDYRVVFTGHSLGGALATVAGADLRGNGYDIDVFSYGAPRVGNRAFAEFLTVQTGGTLYRITHTNDIVPRLPPREFGYSHSSPEYWIKSGTLVPVTRNDIVKIEGIDATGGNNQPNIPDIPAHLWYFGLIGTC

SEQ ID NO: 10628 - protein, 268 aa, Thermomyces lanuginosus
EVSQDLFNQFNLFAQYSAAAYCGKNNDAPAGTNITCTGNACPEVEKADATFLYSFEDSGVGDVTGFLALDNTNKLIVLSFRGSRSIENWIGNLNFDLKEINDICKGCRGHDGFTSSWRSVADTLRQKVEDAVREHPDYRVVFTGHSLGGALATVAGADLRGNGYDIDVFSYGAPRVGNRAFAEFLTVQTGGTLYRITHTNDIVPRLPPREFGYSHSSPEYWIKSGTLVPVTRNDIVKIEGIDATGGNNQPNIPDIPAHLWYFGLIGTC

SEQ ID NO: 10629 - protein, 268 aa, Thermomyces lanuginosus
EVSQDLFNQFNLFAQYSAAAYCGKNNDAPAGTNITCTGNACPEVEKADATFLYSFEDSGVGDVTGFLALDNTNKLIVLSFRGSRSIENWIGNLNFDLKEINDICSGCRGHDGFTSSWRSVADTLRQKVEDAVREHPDYRVVFTGHSLGGALATVAGADLRGNGYDIDVFSYGAPRVGNRAFAEFLTVQTGGTLYRITHTNDIVPRLPPREFGYSHSSPEYWIKSGTLEPVTRNDIVKIEGIDATGGNNQPNIPDIPAHLWYFGLIGTC

SEQ ID NO: 10630 - protein, 268 aa, Thermomyces lanuginosus
EVSQDLFNQFNLFAQYSAAAYCGKNNDAPAGTNITCTGNACPEVEKADATFLYSFEDSGVGDVTGFLALDNTNKLIVLSFRGSRSIENWIGNLNFDLKEINDICSGCRGHDGFTSSWRSVADTLRQKVEDAVREHPDYRVVFTGHSLGGALATVAGADLRGNGYDIDVFSYGAPRVGNRAFAEFLTVCTGGTLYRITHTNDIVPRLPPREFGYSHSSPEYWIKSGTLVPVTRNDIVKIEGIDATGGNNQPNIPDIPAHLWYFGLIGTC

SEQ ID NO: 10631 - protein, 268 aa, Thermomyces lanuginosus
EVSQDLFNQFNLFAQYSAAAYCGKNNDAPAGTNITCTGNACPEVEKADATFLYSFEDSGVGDVTGFLALDNTNKLIVLSFRGSRSIENWIGNLNFDLKEINDICSGCRGHDGFTSSWRSVADTLRQKVEDAVREHPDYTVVFTGHSLGGALATVAGADLRGNGYDIDVFSYGAPRVGNRAFAEFLTVQTGGTLYRITHTNDIVPRLPPREFGYSHSSPEYWIKSGTLVPVTRNDIVKIEGIDATGGNNQPNIPDIPAHLWYFGLIGTC

SEQ ID NO: 10632 - protein, 268 aa, Thermomyces lanuginosus
EVSQDLFNQFNLFAQYSAVAYCGKNNDAPAGTNITCTGNACPEVEKADATFLYSFEDSGVGDVTGFLALDNTNKLIVLSFRGSRSIENWIGNLNFDLKEINDICSGCRGHDGFTSSWRSVADTLRQKVEDAVREHPDYRVVFTGHSLGGALATVAGADLRGNGYDIDVFSYGAPRVGNRAFAEFLTVQTGGTLYRITHTNDIVPRLPPREFGYSHSSPEYWIKSGTLVPVTRNDIVKIEGIDATGGNNQPNIPDIPAHLWYFGLIGTC

SEQ ID NO: 10633 - protein, 268 aa, Thermomyces lanuginosus
EVSQDLFNQFNLFAQYSAAAYCGKNNDAPAGTNITCYGNACPEVEKADATFLYSFEDSGVGDVTGFLALDNTNKLIVLSFRGSRSIENWIGNLNFDLKEINDICSGCRGHDGFTSSWRSVADTLRQKVEDAVREHPDYRVVFTGHSLGGALATVAGADLRGNGYDIDVFSYGAPRVGNRAFAEFLTVQTGGTLYRITHTNDIVPRLPPREFGYSHSSPEYWIKSGTLVPVTRNDIVKIEGIDATGGNNQPNIPDIPAHLWYFGLIGTC

SEQ ID NO: 10634 - protein, 268 aa, Thermomyces lanuginosus
EVSQDLFNQFNLFAQYSAAAYCGKNNDAPAGTNITCTGNACPEVEKADATFLYSFEDSGVGDVTGFQALDNTNKLIVLSFRGSRSIENWIGNLNFDLKEINDICSGCRGHDGFTSSWRSVADTLRQKVEDAVREHPDYRVVFTGHSLGGALATVAGADLRGNGYDIDVFSYGAPRVGNRAFAEFLTVQTGGTLYRITHTNDIVPRLPPREFGYSHSSPEYWIKSGTLVPVTRNDIVKIEGIDATGGNNQPNIPDIPAHLWYFGLIGTC

SEQ ID NO: 10635 - protein, 268 aa, Thermomyces lanuginosus
EVSQDLFNQFNLFAQYSAAAYCGKNNDAPAGTNITCTGNACPEVEKADATFLYSFEDSGVGDVTGFLALDNTNKLIVLSFRGSRSIENWIGNLNFDLKEINDICSGCFGHDGFTSSWRSVADTLRQKVEDAVREHPDYRVVFTGHSLGGALATVAGADLRGNGYDIDVFSYGAPRVGNRAFAEFLTVQTGGTLYRITHTNDIVPRLPPREFGYSHSSPEYWIKSGTLVPVTRNDIVKIEGIDATGGNNQPNIPDIPAHLWYFGLIGTC

SEQ ID NO: 10636 - protein, 268 aa, Thermomyces lanuginosus
EVSQDLFNQFNLFAQYSAAAYCGKNNDAPAGTNITCTGNACPEVEKADATFLYSFEDSGVGDVTGFLALDNTNKLHVLSFRGSRSIENWIGNLNFDLKEINDICSGCRGHDGFTSSWRSVADTLRQKVEDAVREHPDYRVVFTGHSLGGALATVAGADLRGNGYDIDVFSYGAPRVGNRAFAEFLTVQTGGTLYRITHTNDIVPRLPPREFGYSHSSPEYWIKSGTLVPVTRNDIVKIEGIDATGGNNQPNIPDIPAHLWYFGLIGTC

SEQ ID NO: 10637 - protein, 268 aa, Thermomyces lanuginosus
EVSQDLFNQFNLFAQYSAAAYCGKNNDAPAGTNITCHGNACPEVEKADATFLYSFEDSGVGDVTGFLALDNTNKLIVLSFRGSRSIENWIGNLNFDLKEINDICSGCRGHDGFTSSWRSVADTLRQKVEDAVREHPDYRVVFTGHSLGGALATVAGADLRGNGYDIDVFSYGAPRVGNRAFAEFLTVQTGGTLYRITHTNDIVPRLPPREFGYSHSSPEYWIKSGTLVPVTRNDIVKIEGIDATGGNNQPNIPDIPAHLWYFGLIGTC

SEQ ID NO: 10638 - protein, 268 aa, Thermomyces lanuginosus
EVSQDLFNQFNLFAQYSAAAYCGKNNDAPAGTNITCTGNACPEVEKAQATFLYSFEDSGVGDVTGFLALDNTNKLIVLSFRGSRSIENWIGNLNFDLKEINDICSGCRGHDGFTSSWRSVADTLRQKVEDAVREHPDYRVVFTGHSLGGALATVAGADLRGNGYDIDVFSYGAPRVGNRAFAEFLTVQTGGTLYRITHTNDIVPRLPPREFGYSHSSPEYWIKSGTLVPVTRNDIVKIEGIDATGGNNQPNIPDIPAHLWYFGLIGTC

SEQ ID NO: 10639 - protein, 268 aa, Thermomyces lanuginosus
EVSQDLFNQFNLFAQYSAAAYCGKNNDAPAGTNITCTGNACPEVEKADATFLYSFEDSGVGDVTGFLALDNTNKLIVLSFRGSRSIENWIGNLNFDLKEINDICSGCRGHDGFTSSWRSVADTLRQKVEDAVREHPDYRVVFTGHSLGGALATVAGADLRGNGYDIDVFSYGAPRVGNLAFAEFLTVQTGGTLYRITHTNDIVPRLPPREFGYSHSSPEYWIKSGTLVPVTRNDIVKIEGIDATGGNNQPNIPDIPAHLWYFGLIGTC

SEQ ID NO: 10640 - protein, 268 aa, Thermomyces lanuginosus
EVSQDLFNQFNLFAQYSAAAYCGKLNDAPAGTNITCTGNACPEVEKADATFLYSFEDSGVGDVTGFLALDNTNKLIVLSFRGSRSIENWIGNLNFDLKEINDICSGCRGHDGFTSSWRSVADTLRQKVEDAVREHPDYRVVFTGHSLGGALATVAGADLRGNGYDIDVFSYGAPRVGNRAFAEFLTVQTGGTLYRITHTNDIVPRLPPREFGYSHSSPEYWIKSGTLVPVTRNDIVKIEGIDATGGNNQPNIPDIPAHLWYFGLIGTC

SEQ ID NO: 10641 - protein, 268 aa, Thermomyces lanuginosus
EVSQDLFNQFNLFAQYSAAAYCGKNNDAPAGTNITCTGNACPEVEKADATFLYSFEDSGVGDVTGFLALDNTNKLIVLSFRGSRSIENWIGNLNFDLKEINDICSGCRGHDGFTSSWRSVADTLGQKVEDAVREHPDYRVVFTGHSLGGALATVAGADLRGNGYDIDVFSYGAPRVGNRAFAEFLTVQTGGTLYRITHTNDIVPRLPPREFGYSHSSPEYWIKSGTLVPVTRNDIVKIEGIDATGGNNQPNIPDIPAHLWYFGLIGTC

SEQ ID NO: 10642 - protein, 268 aa, Thermomyces lanuginosus
EVSQDLFNQFNLFAQYSAAAYCGKNNDAPAGTNITCTGNACPEVEKADATFLYSFEDSGVGDVTGFLALDNTNKLIVLSFRGSRSIENWIGNLNFDLKEINDICSGCRGHDGFTSSWRSVADTLTQKVEDAVREHPDYRVVFTGHSLGGALATVAGADLRGNGYDIDVFSYGAPRVGNRAFAEFLTVQTGGTLYRITHTNDIVPRLPPREFGYSHSSPEYWIKSGTLVPVTRNDIVKIEGIDATGGNNQPNIPDIPAHLWYFGLIGTC

SEQ ID NO: 10643 - protein, 268 aa, Thermomyces lanuginosus
EVSQDLFNQFNLFAQYSAAAYCGKNNDAPAGTNITCTGNACPEVEKADALFLYSFEDSGVGDVTGFLALDNTNKLIVLSFRGSRSIENWIGNLNFDLKEINDICSGCRGHDGFTSSWRSVADTLRQKVEDAVREHPDYRVVFTGHSLGGALATVAGADLRGNGYDIDVFSYGAPRVGNRAFAEFLTVQTGGTLYRITHTNDIVPRLPPREFGYSHSSPEYWIKSGTLVPVTRNDIVKIEGIDATGGNNQPNIPDIPAHLWYFGLIGTC

SEQ ID NO: 10644 - protein, 268 aa, Thermomyces lanuginosus
EKSQDLFNQFNLFAQYSAAAYCGKNNDAPAGTNITCTGNACPEVEKADATFLYSFEDSGVGDVTGFLALDNTNKLIVLSFRGSRSIENWIGNLNFDLKEINDICSGCRGHDGFTSSWRSVADTLRQKVEDAVREHPDYRVVFTGHSLGGALATVAGADLRGNGYDIDVFSYGAPRVGNRAFAEFLTVQTGGTLYRITHTNDIVPRLPPREFGYSHSSPEYWIKSGTLVPVTRNDIVKIEGIDATGGNNQPNIPDIPAHLWYFGLIGTC

SEQ ID NO: 10645 - protein, 268 aa, Thermomyces lanuginosus
EVSQSLFNQFNLFAQYSAAAYCGKNNDAPAGTNITCTGNACPEVEKADATFLYSFEDSGVGDVTGFLALDNTNKLIVLSFRGSRSIENWIGNLNFDLKEINDICSGCRGHDGFTSSWRSVADTLRQKVEDAVREHPDYRVVFTGHSLGGALATVAGADLRGNGYDIDVFSYGAPRVGNRAFAEFLTVQTGGTLYRITHTNDIVPRLPPREFGYSHSSPEYWIKSGTLVPVTRNDIVKIEGIDATGGNNQPNIPDIPAHLWYFGLIGTC

SEQ ID NO: 10646 - protein, 268 aa, Thermomyces lanuginosus
EVSQDLFNQFNLFAQYSAAAYCGKNNDAPAGTNITCTGNACPEVEKADATFLYSFEDSGVGDVTGFLALSNTNKLIVLSFRGSRSIENWIGNLNFDLKEINDICSGCRGHDGFTSSWRSVADTLRQKVEDAVREHPDYRVVFTGHSLGGALATVAGADLRGNGYDIDVFSYGAPRVGNRAFAEFLTVQTGGTLYRITHTNDIVPRLPPREFGYSHSSPEYWIKSGTLVPVTRNDIVKIEGIDATGGNNQPNIPDIPAHLWYFGLIGTC

SEQ ID NO: 10647 - protein, 268 aa, Thermomyces lanuginosus
EVSQDLFNQFNLFAQYSAAAYCGKNNDAPAGTQITCTGNACPEVEKADATFLYSFEDSGVGDVTGFLALDNTNKLIVLSFRGSRSIENWIGNLNFDLKEINDICSGCRGHDGFTSSWRSVADTLRQKVEDAVREHPDYRVVFTGHSLGGALATVAGADLRGNGYDIDVFSYGAPRVGNRAFAEFLTVQTGGTLYRITHTNDIVPRLPPREFGYSHSSPEYWIKSGTLVPVTRNDIVKIEGIDATGGNNQPNIPDIPAHLWYFGLIGTC

SEQ ID NO: 10648 - protein, 268 aa, Thermomyces lanuginosus
EVSQDLFNQFNLFAQYSAAAYCGKNNDAPAGTNITCTGNACPEVEKADATFLYSFEDSGVGDVTGFLALDNTNKRIVLSFRGSRSIENWIGNLNFDLKEINDICSGCRGHDGFTSSWRSVADTLRQKVEDAVREHPDYRVVFTGHSLGGALATVAGADLRGNGYDIDVFSYGAPRVGNRAFAEFLTVQTGGTLYRITHTNDIVPRLPPREFGYSHSSPEYWIKSGTLVPVTRNDIVKIEGIDATGGNNQPNIPDIPAHLWYFGRIGTC

SEQ ID NO: 10649 - protein, 268 aa, Thermomyces lanuginosus
EVSQDLFNQFNLFAGYSAAAYCGKNNDAPAGTNITCTGNACPEVEKADATFLYSFEDSGVGDVTGFLALDNTNKLIVLSFRGSRSIENWIGNLNFDLKEINDICSGCRGHDGFTSSWRSVADTLRQKVEDAVREHPDYRVVFTGHSLGGALATVAGADLRGNGYDIDVFSYGAPRVGNRAFAEFLTVQTGGTLYRITHTNDIVPRLPPREFGYSHSSPEYWIKSGTLVPVTRNDIVKIEGIDATGGNNQPNIPDIPAHLWYFGLIGTC

SEQ ID NO: 10650 - protein, 268 aa, Thermomyces lanuginosus
EVSQDLFNQFNLFAQYSAAAYCGKNNDAPAGTNITCTGNACPEVEKADATFLYSFEDSGVGDVTGFLALDNTNKLIVLSFRGSRSIENWIGNLNFDLKEINDICSGCRGHDGFTSSWRSVADWLRQKVEDAVREHPDYRVVFTGHSLGGALATVAGADLRGNGYDIDVFSYGAPRVGNRAFAEFLTVQTGGTLYRITHTNDIVPRLPPREFGYSHSSPEYWIKSGTLVPVTRNDIVKIEGIDATGGNNQPNIPDIPAHLWYFGLIGTC

SEQ ID NO: 10651 - protein, 268 aa, Thermomyces lanuginosus
EVSQDLFNQFNLFAQYSAAAYCGKNNDAPAGTNITCTGNACPEVEKADATFLYSFEDSGVGDVTGFLALDNTNQLIVLSFRGSRSIENWIGNLNFDLKEINDICSGCRGHDGFTSSWRSVADTLRQKVEDAVREHPDYRVVFTGHSLGGALATVAGADLRGNGYDIDVFSYGAPRVGNRAFAEFLTVQTGGTLYRITHTNDIVPRLPPREFGYSHSSPEYWIKSGTLVPVTRNDIVKIEGIDATGGNNQPNIPDIPAHLWYFGLIGTC

SEQ ID NO: 10652 - protein, 268 aa, Thermomyces lanuginosus
EVSQDLFNQFNLFAQYSAAAYCGKNNDAPAGTNITCTGNFCPEVEKADATFLYSFEDSGVGDVTGFLALDNTNKLIVLSFRGSRSIENWIGNLNFDLKEINDICSGCRGHDGFTSSWRSVADTLRQKVEDAVREHPDYRVVFTGHSLGGALATVAGADLRGNGYDIDVFSYGAPRVGNRAFAEFLTVQTGGTLYRITHTNDIVPRLPPREFGYSHSSPEYWIKSGTLVPVTRNDIVKIEGIDATGGNNQPNIPDIPAHLWYFGLIGTC

SEQ ID NO: 10653 - protein, 268 aa, Thermomyces lanuginosus
EVSQDLFNQFNLFAQYSAAAYCGKNNDAPAGTNITCTGNACPEVEKADATFLYSFEDSGVGDVTGFLALDNTNKLIVLSFRGSRSIENWIGNLNFDLKEINDICSGCRGHDGFTSSWRSVADTLRQKVEDAVREHPDYRVVFTGHSLGGALATYAGADLRGNGYDIDVFSYGAPRVGNRAFAEFLTVQTGGTLYRITHTNDIVPRLPPREFGYSHSSPEYWIKSGTLVPVTRNDIVKIEGIDATGGNNQPNIPDIPAHLWYFGLIGTC

SEQ ID NO: 10654 - protein, 268 aa, Thermomyces lanuginosus
EVSQDLFNQFNLFAQYSAAAYCGKNNDAPAGTNITCTGNACPEVEKADATFLYSFEDSGVGDVTGFLALDNTKKLIVLSFRGSRSIENWIGNLNFDLKEINDICSGCRGHDGFTSSWRSVADTLRQKVEDAVREHPDYRVVFTGHSLGGALATVAGADLRGNGYDIDVFSYGAPRVGNRAFAEFLTVQTGGTLYRITHTNDIVPRLPPREFGYSHSSPEYWIKSGTLVPVTRNDIVKIEGIDATGGNNQPNIPDIPAHLWYFGLIGTC

SEQ ID NO: 10655 - protein, 268 aa, Thermomyces lanuginosus
EVSQDLFNQFNLFAQYSAAAYCGKNKDAPAGTNITCTGNACPEVEKADATFLYSFEDSGVGDVTGFLALDNTNKLIVLSFRGSRSIENWIGNLNFDLKEINDICSGCRGHDGFTSSWRSVADTLRQKVEDAVREHPDYRVVFTGHSLGGALATVAGADLRGNGYDIDVFSYGAPRVGNRAFAEFLTVQTGGTLYRITHTNDIVPRLPPREFGYSHSSPEYWIKSGTLVPVTRNDIVKIEGIDATGGNNQPNIPDIPAHLWYFGLIGTC

SEQ ID NO: 10656 - protein, 268 aa, Thermomyces lanuginosus
EVSQDLFNQFNLFAQYSAAAYCGKNNDAPAGTNITCTGNACPEVEKADATFLYSFEDSGVGDVTGFLALDNTNKRIVLSFRGSRSIENWIGNLNFDLKEINDICSGCRGHDGFTSSWRSVADTLRQKVEDAVREHPDYRVVFTGHSLGGALATVAGADLRGNGYDIDVFSYGAPRVGNRAFAEFLTVQTGGTLYRITHTNDIVPRLPPREFGYSHSSPEYWIKSGTLVPVTRNDIVKIEGIDATGGNNQPNIPDIPAHLWYFGLIGTC

SEQ ID NO: 10657 - protein, 268 aa, Thermomyces lanuginosus
EVSQDLFNQFNLFAQYSAAAYCGKNNDAPAGTNITCTGNACPEVEKADATFTYSFEDSGVGDVTGFLALDNTNKLIVLSFRGSRSIENWIGNLNFDLKEINDICSGCRGHDGFTSSWRSVADTLRQKVEDAVREHPDYRVVFTGHSLGGALATVAGADLRGNGYDIDVFSYGAPRVGNRAFAEFLTVQTGGTLYRITHTNDIVPRLPPREFGYSHSSPEYWIKSGTLVPVTRNDIVKIEGIDATGGNNQPNIPDIPAHLWYFGLIGTC

SEQ ID NO: 10658 - protein, 268 aa, Thermomyces lanuginosus
EVSQDLFNQFNLFAQYSAAAYCGKNNDIPAGTNITCTGNACPEVEKADATFLYSFEDSGVGDVTGFLALDNTNKLIVLSFRGSRSIENWIGNLNFDLKEINDICSGCRGHDGFTSSWRSVADTLRQKVEDAVREHPDYRVVFTGHSLGGALATVAGADLRGNGYDIDVFSYGAPRVGNRAFAEFLTVQTGGTLYRITHTNDIVPRLPPREFGYSHSSPEYWIKSGTLVPVTRNDIVKIEGIDATGGNNQPNIPDIPAHLWYFGLIGTC

SEQ ID NO: 10659 - protein, 268 aa, Thermomyces lanuginosus
EVSQDLFNQFNLFAQYSIAAYCGKNNDAPAGTNITCTGNACPEVEKADATFLYSFEDSGVGDVTGFLALDNTNKLIVLSFRGSRSIENWIGNLNFDLKEINDICSGCRGHDGFTSSWRSVADTLRQKVEDAVREHPDYRVVFTGHSLGGALATVAGADLRGNGYDIDVFSYGAPRVGNRAFAEFLTVQTGGTLYRITHTNDIVPRLPPREFGYSHSSPEYWIKSGTLVPVTRNDIVKIEGIDATGGNNQPNIPDIPAHLWYFGLIGTC

SEQ ID NO: 10660 - protein, 268 aa, Thermomyces lanuginosus
EVSQDLFNQFNLFAQYSAAAYCGKNNDAPAGTNITCTGNACPEVEKADATFLYSFEDSGVGDVTGFLALDNTNKLIVLSFRGSRSIENWIGNVNFDLKEINDICSGCRGHDGFTSSWRSVADTLRQKVEDAVREHPDYRVVFTGHSLGGALATVAGADLRGNGYDIDVFSYGAPRVGNRAFAEFLTVQTGGTLYRITHTNDIVPRLPPREFGYSHSSPEYWIKSGTLVPVTRNDIVKIEGIDATGGNNQPNIPDIPAHLWYFGLIGTC

SEQ ID NO: 10661 - protein, 268 aa, Thermomyces lanuginosus
EVSQDLFNQFNLFAQYSAAAYCGKNNDAPAGTNITCTGNACPEVEKADATFLYSFEDSGVGDVTGFLALDNTNKLIVLAFRGSRSIENWIGNLNFDLKEINDICSGCRGHDGFTSSWRSVADTLRQKVEDAVREHPDYRVVFTGHSLGGALATVAGADLRGNGYDIDVFSYGAPRVGNRAFAEFLTVQTGGTLYRITHTNDIVPRLPPREFGYSHSSPEYWIKSGTLVPVTRNDIVKIEGIDATGGNNQPNIPDIPAHLWYFGLIGTC

SEQ ID NO: 10662 - protein, 268 aa, Thermomyces lanuginosus
EVSQDLFNQFNLFAQYSAAAYCGKNNDAPAGTNITCTGNACPEVEKADATFLYSFEDSGVGDVTGFLALDNTNKLIVLSFRGSRSIENWIGNLNFDLKEINDICSGCRGHDGFTSSWRSVAYTLRQKVEDAVREHPDYRVVFTGHSLGGALATVAGADLRGNGYDIDVFSYGAPRVGNRAFAEFLTVQTGGTLYRITHTNDIVPRLPPREFGYSHSSPEYWIKSGTLVPVTRNDIVKIEGIDATGGNNQPNIPDIPAHLWYFGLIGTC

SEQ ID NO: 10663 - protein, 268 aa, Thermomyces lanuginosus
EVSQDLFNQFNLFAQYSAAAYCGKNNDAPAGTNITCTGNACPEVEKADATFLYSFEDSGVGDVTGFLALDRTNKLIVLSFRGSRSIENWIGNLNFDLKEINDICSGCRGHDGFTSSWRSVADTLRQKVEDAVREHPDYRVVFTGHSLGGALATVAGADLRGNGYDIDVFSYGAPRVGNRAFAEFLTVQTGGTLYRITHTNDIVPRLPPREFGYSHSSPEYWIKSGTLVPVTRNDIVKIEGIDATGGNNQPNIPDIPAHLWYFGLIGTC

SEQ ID NO: 10664 - protein, 268 aa, Thermomyces lanuginosus
EVSQDLFNQFNLFAQYSAAAYCGVNNDAPAGTNITCTGNACPEVEKADATFLYSFEDSGVGDVTGFLALDNTNKLIVLSFRGSRSIENWIGNLNFDLKEINDICSGCRGHDGFTSSWRSVADTLRQKVEDAVREHPDYRVVFTGHSLGGALATVAGADLRGNGYDIDVFSYGAPRVGNRAFAEFLTVQTGGTLYRITHTNDIVPRLPPREFGYSHSSPEYWIKSGTLVPVTRNDIVKIEGIDATGGNNQPNIPDIPAHLWYFGLIGTC

SEQ ID NO: 10665 - protein, 268 aa, Thermomyces lanuginosus
EVSQDLFNQFNLFAQYSAAAYCGKNNDAPAGTNITCTGNACPEVEKADATFLYSFEDSGVGDVTGFLALDNTNKLIVLSFRGSRSIENWIANLNFDLKEINDICSGCRGHDGFTSSWRSVADTLRQKVEDAVREHPDYRVVFTGHSLGGALATVAGADLRGNGYDIDVFSYGAPRVGNRAFAEFLTVQTGGTLYRITHTNDIVPRLPPREFGYSHSSPEYWIKSGTLVPVRRRDIVKIEGIDATGGNNQPNIPDIPAHLWYFGLIGTC

SEQ ID NO: 10666 - protein, 268 aa, Thermomyces lanuginosus
EVSQDLFNQFNLFAQYSAAAYCGKNNDAPAGTNITCTGNACPEVEKADATFLYSFEDSGVGDVTGFLALDNTNKLIVLSFRGSRSIENWIGNLNFDLKEINDICSGCRGHDGFTSSWRSVADTLRQKVEDAVREHPDYRVVFTGHSLGGALATVAGADLRGNGYDIDVFSYGAPRVGNRAFAEFLTVQTGGTLYRITHTNDIVPRLPPREFGYSHSSPEYWIKSGTLVPVTRNDIVKIEGIDATGGNNQQNIPDIPAHLWYFGLIGTC

SEQ ID NO: 10667 - protein, 268 aa, Thermomyces lanuginosus
EVSQDLFNQFNLFAQYSAAAYCGKNNDAPAGTNITCTGNACPEVEKADATFLYSFEDSGVGDVTGFLALDNTNKLIVLSFRGSRSIENWIGNLNFDLKEIHDICSGCRGHDGFTSSWRSVADTLRQKVEDAVREHPDYRVVFTGHSLGGALATVAGADLRGNGYDIDVFSYGAPRVGNRAFAEFLTVQTGGTLYRITHTNDIVPRLPPREFGYSHSSPEYWIKSGTLVPVTRNDIVKIEGIDATGGNNQPNIPDIPAHLWYFGLIGTC

SEQ ID NO: 10668 - protein, 268 aa, Thermomyces lanuginosus
EVSQDLFNQFNLFAQYSAAAYCGKNNDAPAGTNITCTGNACPEVEKADATFLYSFEDSGVGDVTGFLALDNTNKLIVLSFRGSRSIENWIGNLNFDLKEINDICSGCRGHDGFVSSWRSVADTLRQKVEDAVREHPDYRVVFTGHSLGGALATVAGADLRGNGYDIDVFSYGAPRVGNRAFAEFLTVQTGGTLYRITHTNDIVPRLPPREFGYSHSSPEYWIKSGTLVPVTRNDIVKIEGIDATGGNNQPNIPDIPAHLWYFGLIGTC

SEQ ID NO: 10669 - protein, 268 aa, Thermomyces lanuginosus
EVSQDLFNQFNLFAQYSAAAYCGKNNDAPAGTNITCTGNACPEVEKADATFLYSFEDSGVGDVTGFLADDNTNKLIVLSFRGSRSIENWIGNLNFDLKEINDICSGCRGHDGFTSSWRSVADTLRQKVEDAVREHPDYRVVFTGHSLGGALATVAGADLRGNGYDIDVFSYGAPRVGNRAFAEFLTVQTGGTLYRITHTNDIVPRLPPREFGYSHSSPEYWIKSGTLVPVTRNDIVKIEGIDATGGNNQPNIPDIPAHLWYFGLIGTC

SEQ ID NO: 10670 - protein, 268 aa, Thermomyces lanuginosus
EVSQDLFNQFNLFAQYSAAAYCGKNNDAPAGTNITCTGNACPEVEKADATFLYSFEDSGVGDVTGFLALDNTNKLIVLSFRGSRSIENWIGNLNFDLKEINDICSGCRGHDGFTSSWRSVADTLRQKVEDAVREHPDYRVVFTGHSLGGALATVAGADLRGNGYDIDVFSYGAPRIGNRAFAEFLTVQTGGTLYRITHTNDIVPRLPPREFGYSHSSPEYWIKSGTLVPVTRNDIVKIEGIDATGGNNQPNIPDIPAHLWYFGLIGTC

SEQ ID NO: 10671 - protein, 268 aa, Thermomyces lanuginosus
EGSQDLFNQFNLFAQYSAAAYCGKNNDAPAGTNITCTGNACPEVEKADATFLYSFEDSGVGDVTGFLALDNTNKLIVLSFRGSRSIENWIGNLNFDLKEINDICSGCRGHDGFTSSWRSVADTLRQKVEDAVREHPDYRVVFTGHSLGGALATVAGADLRGNGYDIDVFSYGAPRVGNRAFAEFLTVQTGGTLYRITHTNDIVPRLPPREFGYSHSSPEYWIKSGTLVPVTRNDIVKIEGIDATGGNNQPNIPDIPAHLWYFGLIGTC

SEQ ID NO: 10672 - protein, 268 aa, Thermomyces lanuginosus
EVSQDLFNQFNLFAQYSAAAYCGKNNDAPAGTNITCTGNACPEVEKADATFLYSFEDSGVGDVTGFLALDNTNKLIVLSFRGSRSIENWIGNLNFDLKEINDICSGCRGHDGFTSSWRSVADTLRQKVEDAVREHPDYRVVFTGHSLGGALATIAGADLRGNGYDIDVFSYGAPRVGNRAFAEFLTVQTGGTLYRITHTNDIVPRLPPREFGYSHSSPEYWIKSGTLVPVTRNDIVKIEGIDATGGNNQPNIPDIPAHLWYFGLIGTC

SEQ ID NO: 10673 - protein, 268 aa, Thermomyces lanuginosus
EVSQDLFNQFNLFAQYSAAAYCGKNNDAPAGTNITCTGNACPEVEKADATFLYSFEDSGVGDVTGFLALDNTNKLIVLSFRGSRSIENWIGNKNFGLKEINDICSGCRGHDGFTSSWRSVADTLRQKVEDAVREHPDYRVVFTGHSLGGALATVAGADLRGNGYDIDVFSYGAPRVGNRAFAEFLTVQTGGTLYRITHTNDIVPRLPPREFGYSHSSPEYWIKSGTLVPVTRNDIVKIEGIDATGGNNQPNIPDIPAHLWYFGLIGTC

SEQ ID NO: 10674 - protein, 268 aa, Thermomyces lanuginosus
EVSQDLFNQFNLFAQYSAAAYCGKNNDAIAGTNITCTGNACPEVEKADATFLYSFEDSGVGDVTGFLALDNTNKLIVLSFRGSRSIENWIGNLNFDLKEINDICSGCRGHDGFTSSWRSVADTLRQKVEDAVREHPDYRVVFTGHSLGGALATVAGADLRGNGYDIDVFSYGAPRVGNRAFAEFLTVQTGGTLYRITHTNDIVPRLPPREFGYSHSSPEYWIKSGTLVPVTRNDIVKIEGIDATGGNNQPNIPDIPAHLWYFGLIGTC

SEQ ID NO: 10675 - protein, 268 aa, Thermomyces lanuginosus
EVSQDLFNQFNLFAQYSAAAYCGKNNDAPAGTNITCTGNACPEVEKADATLLYSFEDSGVGDVTGFLALDNTNKLIVLSFRGSRSIENWIGNLNFDLKEINDICSGCRGHDGFTSSWRSVADTLRQKVEDAVREHPDYRVVFTGHSLGGALATVAGADLRGNGYDIDVFSYGAPRVGNRAFAEFLTVQTGGTLYRITHTNDIVPRLPPREFGYSHSSPEYWIKSGTLVPVTRNDIVKIEGIDATGGNNQPNIPDIPAHLWYFGLIGTC

SEQ ID NO: 10676 - protein, 268 aa, Thermomyces lanuginosus
EVSQDLFNQFNLFAQYSAAAYCGKNNDAPAGTNITCTGNACPEVEKDDATFLYSFEDSGVGDVTGFLALDNTNKLIVLSFRGSRSIENWIGNLNFDLKEINDICSGCRGHDGFTSSWRSVADTLRQKVEDAVREHPDYRVVFTGHSLGGALATVAGADLRGNGYDIDVFSYGAPRVGNRAFAEFLTVQTGGTLYRITHTNDIVPRLPPREFGYSHSSPEYWIKSGTLVPVTRNDIVKIEGIDATGGNNQPNIPDIPAHLWYFGLIGTC

SEQ ID NO: 10677 - protein, 268 aa, Thermomyces lanuginosus
EVSQDLFNQFNLFAQYSAAAYCGKNNDAPAGTNITCTGNACPEVEKADATFLYSFEDSGVGDVTGFLALDNTNKLIVLSFRGSRSIENWIGNLNFDLKEINDICSGCEGHDGFTSSWRSVADTLRQKVEDAVREHPDYRVVFTGHSLGGALATVAGADLRGNGYDIDVFSYGAPRVGNRAFAEFLTVQTGGTLYRITHTNDIVPRLPPREFGYSHSSPEYWIKSGTLVPVTRNDIVKIEGIDATGGNNQPNIPDIPAHLWYFGLIGTC

SEQ ID NO: 10678 - protein, 268 aa, Thermomyces lanuginosus
EVSQDLFNQFNLFAQYSAAAYCGKNNDAPAGTNITCTGNACPEVEKADATFLYSFVDSGVGDVTGFLALDNTNKLIVLSFRGSRSIENWIGNLNFDLKEINDICSGCRGHDGFTSSWRSVADTLRQKVEDAVREHPDYRVVFTGHSLGGALATVAGADLRGNGYDIDVFSYGAPRVGNRAFAEFLTVQTGGTLYRITHTNDIVPRLPPREFGYSHSSPEYWIKSGTLVPVTRNDIVKIEGIDATGGNNQPNIPDIPAHLWYFGLIGTC

SEQ ID NO: 10679 - protein, 268 aa, Thermomyces lanuginosus
EVSQDLFNQFNLFAQYSAAAYCGKNNDAPAGTNITCTYNACPEVEKADATFLYSFEDSGVGDVTGFLALDNTNKLIVLSFRGSRSIENWIGNLNFDLKEINDICSGCRGHDGFTSSWRSVADTLRQKVEDAVREHPDYRVVFTGHSLGGALATVAGADLRGNGYDIDVFSYGAPRVGNRAFAEFLTVQTGGTLYRITHTNDIVPRLPPREFGYSHSSPEYWIKSGTLVPVTRNDIVKIEGIDATGGNNQPNIPDIPAHLWYFGLIGTC

SEQ ID NO: 10680 - protein, 268 aa, Thermomyces lanuginosus
EVSQDLFNQFNLFAQYSAAAYCGKNNDAPAGTNITCTGNACPEVEKADATFLYSFEDSGVGDVTGFLALDNTNKLIVLSFRGSRSIENWIGNLNFDLKEINDICSGCRGHDGFTSSWRSVADTLRQKVEDAVREHPDYRVVFTGHSLGGALATVAGADLRGNGYDDDVFSYGAPRVGNRAFAEFLTVQTGGTLYRITHTNDIVPRLPPREFGYSHSSPEYWIKSGTLVPVTRNDIVKIEGIDATGGNNQPNIPDIPAHLWYFGLIGTC

SEQ ID NO: 10681 - protein, 268 aa, Thermomyces lanuginosus
EVSQDLFNQFNLFAQYSAAAYCGKNNDAPAGTNITCTGNACPEVEKADATFLYSFEDSGVGDVTGFLALDNTNKLIVLSFRGSRSIENWIGNWNFDLKEINDICSGCRGHDGFTSSWRSVADTLRQKVEDAVREHPDYRVVFTGHSLGGALATVAGADLRGNGYDIDVFSYGAPRVGNRAFAEFLTVQTGGTLYRITHTNDIVPRLPPREFGYSHSSPEYWIKSGTLVPVTRNDIVKIEGIDATGGNNQPNIPDIPAHLWYFGLIGTC

SEQ ID NO: 10682 - protein, 268 aa, Thermomyces lanuginosus
EVSQDLFNQFNLFAQYSAAAYCGKNNDAPAGTNITCTGNACPEVEKADATFLYSFEDSGVGDVTGFLALDNTNKLIVLSFRGSRSIENWIGNLNFDLKEINDICSGCRGHDGFTSSWRSVADTLRQKVEDAVREHPDYRVVFTGHSLGGALATVAGADLRGNGYDIDVFSYGAPRVGNRAFAEFLTVQTGGTLYRITHTNDIVPRLPPREFGYSHSSPEYWIKSGTLVPVTRNDIVKIEGIDATGGNNQENIPDIPAHLWYFGLIGTC

SEQ ID NO: 10683 - protein, 268 aa, Thermomyces lanuginosus
EVSQDLFNQFNLFAQYSAAAYCGKNNDAPAGTNITCTGNACPEVEKADATFLYSFEDSGVGDVTGFLALDNTNKLIVLSFRGSRSIENWIGNQNFDLKEINDICSGCRGHDGFTSSWRSVADTLRQKVEDAVREHPDYRVVFTGHSLGGALATVAGADLRGNGYDIDVFSYGAPRVGNRAFAEFLTVQTGGTLYRITHTNDIVPRLPPREFGYSHSSPEYWIKSGTLVPVTRNDIVKIEGIDATGGNNQPNIPDIPAHLWYFGLIGTC

SEQ ID NO: 10684 - protein, 268 aa, Thermomyces lanuginosus
EVSQDLFNQFNLFAQYSAAAYCGKNNDAPAGTNITCTTNACPEVEKADATFLYSFEDSGVGDVTGFLALDNTNKLIVLSFRGSRSIENWIGNLNFDLKEINDICSGCRGHDGFTSSWRSVADTLRQKVEDAVREHPDYRVVFTGHSLGGALATVAGADLRGNGYDIDVFSYGAPRVGNRAFAEFLTVQTGGTLYRITHTNDIVPRLPPREFGYSHSSPEYWIKSGTLVPVTRNDIVKIEGIDATGGNNQPNIPDIPAHLWYFGLIGTC

SEQ ID NO: 10685 - protein, 268 aa, Thermomyces lanuginosus
EVSQILFNQFNLFAQYSAAAYCGKNNDAPAGTNITCTGNACPEVEKADATFLYSFEDSGVGDVTGFLALDNTNKLIVLSFRGSRSIENWIGNLNFDLKEINDICSGCRGHDGFTSSWRSVADTLRQKVEDAVREHPDYRVVFTGHSLGGALATVAGADLRGNGYDIDVFSYGAPRVGNRAFAEFLTVQTGGTLYRITHTNDIVPRLPPREFGYSHSSPEYWIKSGTLVPVTRNDIVKIEGIDATGGNNQPNIPDIPAHLWYFGLIGTC

SEQ ID NO: 10686 - protein, 268 aa, Thermomyces lanuginosus
EVSQDLFNQFNLFAQYSAAAYCGKNNDAPAGTNITCTGNACPEVEKADATFLYSFEDSGVGDVTGFLALDNTNKLIVLSFRGSRSIENWIGNLNFDLKEINDICSGCRGHDGFTSSWRSVADTLRQKVEDAVREHPDYRVVFTGHSLGGALATVAGADLRGNGYPIDVFSYGAPRVGNRAFAEFLTVQTGGTLYRITHTNDIVPRLPPREFGYSHSSPEYWIKSGTLVPVTRNDIVKIEGIDATGGNNQPNIPDIPAHLWYFGLIGTC

SEQ ID NO: 10687 - protein, 268 aa, Thermomyces lanuginosus
EVSQDLFNQFNLFAQYSAAAYCGKNNDAPAGTNITCTGNACPEVEKADATFLYSFEDSGVGDVTGFLALDNTNKLIVLSFRGSRSIENWIGNLNFDLKEINDICSGCRGHDGFTSSWRSVADTLRQKVEDAVREHPDYRVVFTGHSLGGALATVAGADLRGNGYDIDVFSYGAPRVGNRAFAEFLTVQTGGTLYRITHTNDIVPRLPPSEFGYSHSSPEYWIKSGTLVPVTRNDIVKIEGIDATGGNNQPNIPDIPAHLWYFGLIGTC

SEQ ID NO: 10688 - protein, 268 aa, Thermomyces lanuginosus
EVSQDLFNQFNLFAQYSAAAYCGKNNAAPAGTNITCTGNACPEVEKADATFLYSFEDSGVGDVTGFLALDNTNKLIVLSFRGSRSIENWIGNLNFDLKEINDICSGCRGHDGFTSSWRSVADTLRQKVEDAVREHPDYRVVFTGHSLGGALATVAGADLRGNGYDIDVFSYGAPRVGNRAFAEFLTVQTGGTLYRITHTNDIVPRLPPREFGYSHSSPEYWIKSGTLVPVTRNDIVKIEGIDATGGNNQPNIPDIPAHLWYFGLIGTC

SEQ ID NO: 10689 - protein, 268 aa, Thermomyces lanuginosus
EVSQDLFNQFNLVAQYSAAAYCGKNNDAPAGTNITCTGNACPEVEKADATFLYSFEDSGVGDVTGFLALDNTNKLIVLSFRGSRSIENWIGNLNFDLKEINDICSGCRGHDGFTSSWRSVADTLRQKVEDAVREHPDYRVVFTGHSLGGALATVAGADLRGNGYDIDVFSYGAPRVGNRAFAEFLTVQTGGTLYRITHTNDIVPRLPPREFGYSHSSPEYWIKSGTLVPVTRNDIVKIEGIDATGGNNQPNIPDIPAHLWYFGLIGTC

SEQ ID NO: 10690 - protein, 268 aa, Thermomyces lanuginosus
EVSQDLFNQFNLFAQYSAAAYCGKNNDAPAGTNITCTGNACPEVEKADATFLYSFEDSGVGDVTGFLALDNTNKLIVLSFRGSRSIENWIGNLNFDLKEINDICSGCRGHDGFTSSWRSVADTLRQKVEDAVREHPDYRVVFTGHSLGGALATVAGADLRGNGYDIDVFSYGAPRVGNRAFAEFLTVQTGGTLYRITHTNDIVPRLPPREFGYSHSSPEYWIKSGTLVPVTRNDIVKIEGIDATGGNNQGNIPDIPAHLWYFGLIGTC

SEQ ID NO: 10691 - protein, 268 aa, Thermomyces lanuginosus
EVSQDLFNQFNLFAQYSAAAYCGKNNDAPAGTNITCTGNACPEVEKADATFLYSFEDSGVGDVTGFLALDNTNKLIVLSFRGSRSIENWIGNLNFDLKEINDICSGCRGHDGFTSSWRSVANTLRQKVEDAVREHPDYRVVFTGHSLGGALATVAGADLRGNGYDIDVFSYGAPRVGNRAFAEFLTVQTGGTLYRITHTNDIVPRLPPREFGYSHSSPEYWIKSGTLVPVTRNDIVKIEGIDATGGNNQPNIPDIPAHLWYFGLIGTC

SEQ ID NO: 10692 - protein, 268 aa, Thermomyces lanuginosus
EVSQWLFNQFNLFAQYSAAAYCGKNNDAPAGTNITCTGNACPEVEKADATFLYSFEDSGVGDVTGFLALDNTNKLIVLSFRGSRSIENWIGNLNFDLKEINDICSGCRGHDGFTSSWRSVADTLRQKVEDAVREHPDYRVVFTGHSLGGALATVAGADLRGNGYDIDVFSYGAPRVGNRAFAEFLTVQTGGTLYRITHTNDIVPRLPPREFGYSHSSPEYWIKSGTLVPVTRNDIVKIEGIDATGGNNQPNIPDIPAHLWYFGLIGTC

SEQ ID NO: 10693 - protein, 268 aa, Thermomyces lanuginosus
EVSQDQFNQFNLFAQYSAAAYCGKNNDAPAGTNITCTGNACPEVEKADATFLYSFEDSGVGDVTGFLALDNTNKLIVLSFRGSRSIENWIGNLNFDLKEINDICSGCRGHDGFTSSWRSVADTLRQKVEDAVREHPDYRVVFTGHSLGGALATVAGADLRGNGYDIDVFSYGAPRVGNRAFAEFLTVQTGGTLYRITHTNDIVPRLPPREFGYSHSSPEYWIKSGTLVPVTRNDIVKIEGIDATGGNNQPNIPDIPAHLWYFGLIGTC

SEQ ID NO: 10694 - protein, 268 aa, Thermomyces lanuginosus
EVSVDLFNQFNLFAQYSAAAYCGKNNDAPAGTNITCTGNACPEVEKADATFLYSFEDSGVGDVTGFLALDNTNKLIVLSFRGSRSIENWIGNLNFDLKEINDICSGCRGHDGFTSSWRSVADTLRQKVEDAVREHPDYRVVFTGHSLGGALATVAGADLRGNGYDIDVFSYGAPRVGNRAFAEFLTVQTGGTLYRITHTNDIVPRLPPREFGYSHSSPEYWIKSGTLVPVTRNDIVKIEGIDATGGNNQPNIPDIPAHLWYFGLIGTC

SEQ ID NO: 10695 - protein, 268 aa, Thermomyces lanuginosus
EVSQDLFNQFNLFAQYSAAAYCGKNNDAPAGTNITCTGNACPEVEKADATFLYSFEDSGVGDVTGFLALDNTNKLIVLSFRGSRSIENWIGNLNFDLKEINDICSGCRGHDGFTSSWRSVADTLRQKVEDAVREHPDYRVVFTGHSLGGALATVAGADLRGNGYDIDVFSYGAPRVGNRAFAEFLTVQTGGTLYRITHTNDIVPRLPPREFGYSHSSPEYWIKSGTLVPVTWNDIVKIEGIDATGGNNQPNIPDIPAHLWYFGLIGTC

SEQ ID NO: 10696 - protein, 268 aa, Thermomyces lanuginosus
EVSQDLFNQFNLFAQYSAAAYCGKNNDAPAGTNITCTGNACPEVEKADATGLYSFEDSGVGDVTGFLALDNTNKLIVLSFRGSRSIENWIGNLNFDLKEINDICSGCRGHDGFTSSWRSVADTLRQKVEDAVREHPDYRVVFTGHSLGGALATVAGADLRGNGYDIDVFSYGAPRVGNRAFAEFLTVQTGGTLYRITHTNDIVPRLPPREFGYSHSSPEYWIKSGTLVPVTRNDIVKIEGIDATGGNNQPNIPDIPAHLWYFGLIGTC

SEQ ID NO: 10697 - protein, 268 aa, Thermomyces lanuginosus
EVSQDLFNQFNLFAQYSAAAYCGKNNDAPAGTNITCTGNACPEVEKADATFLYSFEDSGVGDVTGFLALDNTNKLIVLSFRGSRSIENWIGNLNFDLKEINDICSGCRGHDGFTSSWRSGADTLRQKVEDAVREHPDYRVVFTGHSLGGALATVAGADLRGNGYDIDVFSYGAPRVGNRAFAEFLTVQTGGTLYRITHTNDIVPRLPPREFGYSHSSPEYWIKSGTLVPVTRNDIVKIEGIDATGGNNQPNIPDIPAHLWYFGLIGTC

SEQ ID NO: 10698 - protein, 268 aa, Thermomyces lanuginosus
EVSQDLFNQFNLFAQYSAAAYCGKNNDAPAGTNITCTGNACPEVEKADATFLYSFEDSGVGDVTGFLALDNTNKLIVLSFRGSRSIENWIGNLNFDLKEINDICSGCRGHDGFTSSWRSVATTLRQKVEDAVREHPDYRVVFTGHSLGGALATVAGADLRGNGYDIDVFSYGAPRVGNRAFAEFLTVQTGGTLYRITHTNDIVPRLPPREFGYSHSSPEYWIKSGTLVPVTRNDIVKIEGIDATGGNNQPNIPDIPAHLWYFGLIGTC

SEQ ID NO: 10699 - protein, 268 aa, Thermomyces lanuginosus
EVSQDLFNQFNLYAQYSAAAYCGKNNDAPAGTNITCTGNACPEVEKADATFLYSFEDSGVGDVTGFLALDNTNKLIVLSFRGSRSIENWIGNLNFDLKEINDICSGCRGHDGFTSSWRSVADTLRQKVEDAVREHPDYRVVFTGHSLGGALATVAGADLRGNGYDIDVFSYGAPRVGNRAFAEFLTVQTGGTLYRITHTNDIVPRLPPREFGYSHSSPEYWIKSGTLVPVTRNDIVKIEGIDATGGNNQPNIPDIPAHLWYFGLIGTC

SEQ ID NO: 10700 - protein, 268 aa, Thermomyces lanuginosus
EVSQDLFNQFNLFAQYSAAAYCGKNNDAPAGTNITCTGNACPEVEKADATFLYSFEDSGVGDVTGFLALDNTNKLIVLSFRGSRSIENWIGNLNFDLKEINDICSGCRGHDGFTSSWRSVADTLRQKVEDAVREHPDYRVVFTGHSLGGALVTVAGADLRGNGYDIDVFSYGAPRVGNRAFAEFLTVQTGGTLYRITHTNDIVPRLPPREFGYSHSSPEYWIKSGTLVPVTRNDIVKIEGIDATGGNNQPNIPDIPAHLWYFGLIGTC

SEQ ID NO: 10701 - protein, 268 aa, Thermomyces lanuginosus
EVSQDLFNQFNLFAQYSAAAYCGKNNDAPAGTNITCTGNACPEVEKADATFLYSFEDSGVGDVTGFLALDNTNKLIVLSFRGSRSIENWIGNLNFDLKEINDICSGCRGHDGFTSSWRSVADTLRQKVEDAVREHPDYRVVFTGHSLGGALATVAGADLRGNGYDIDVYSYGAPRVGNRAFAEFLTVQTGGTLYRITHTNDIVPRLPPREFGYSHSSPEYWIKSGTLVPVTRNDIVKIEGIDATGGNNQPNIPDIPAHLWYFGLIGTC

SEQ ID NO: 10702 - protein, 268 aa, Thermomyces lanuginosus
EVSQDLFNQFNLFAQYSAAAYCGKNNDAPAGTNITCTGNACPEVEKADATFLYSFEDSGVGDVTGFLALDNTNKLVVLSFRGSRSIENWIGNLNFDLKEINDICSGCRGHDGFTSSWRSVADTLRQKVEDAVREHPDYRVVFTGHSLGGALATVAGADLRGNGYDIDVFSYGAPRVGNRAFAEFLTVQTGGTLYRITHTNDIVPRLPPREFGYSHSSPEYWIKSGTLVPVTRNDIVKIEGIDATGGNNQPNIPDIPAHLWYFGLIGTC

SEQ ID NO: 10703 - protein, 268 aa, Thermomyces lanuginosus
EVSQDLFVQFNLFAQYSAAAYCGKNNDAPAGTNITCTGNACPEVEKADATFLYSFEDSGVGDVTGFLALDNTNKLIVLSFRGSRSIENWIGNLNFDLKEINDICSGCRGHDGFTSSWRSVADTLRQKVEDAVREHPDYRVVFTGHSLGGALATVAGADLRGNGYDIDVFSYGAPRVGNRAFAEFLTVQTGGTLYRITHTNDIVPRLPPREFGYSHSSPEYWIKSGTLVPVTRNDIVKIEGIDATGGNNQPNIPDIPAHLWYFGLIGTC

SEQ ID NO: 10704 - protein, 268 aa, Thermomyces lanuginosus
EVSQDLFNQFNLFAQYSAAAYCGKNNDAPAGTNITCTGNACPEVEKADATFLYSFEDSGVGDVTGFLALDNTNKLIVLSFRGSRSIENWIGNLNFDLKEINDICSGCRGHDGFTSSWRSVADTLRQKVEDAVREHPDYRVVFTGHSLGGALATVAGADLRGRGYDIDVFSYGAPRVGNRAFAEFLTVQTGGTLYRITHTNDIVPRLPPREFGYSHSSPEYWIKSGTLVPVTRNDIVKIEGIDATGGNNQPNIPDIPAHLWYFGLIGTC

SEQ ID NO: 10705 - protein, 268 aa, Thermomyces lanuginosus
EVSQDLFNQFNLFAQYSAAAYCGKNNDAPAGTNITCTGNACPEVEKADATFLYSFEDSGVGDVTGFLALDNTNKLIVLSFRGSRSIENWIGNLNFDLKEINDICSGCRGHDGFTSSWRSWADTLRQKVEDAVREHPDYRVVFTGHSLGGALATVAGADLRGNGYDIDVFSYGAPRVGNRAFAEFLTVQTGGTLYRITHTNDIVPRLPPREFGYSHSSPEYWIKSGTLVPVTRNDIVKIEGIDATGGNNQPNIPDIPAHLWYFGLIGTC

SEQ ID NO: 10706 - protein, 268 aa, Thermomyces lanuginosus
EVSQDLFNQFNLFAQYSAAAYCGKNNDAPAGTNITCTGNACPEVEKADATFLYSFEDSGVGDVTGFLALDNTNKLIVLSFRGSRSIENWIGNLNFDLKEINDICSGCRGHDGFTSSWRSVADTLRQKVEDAVREHPDYRVVFTGHSLGGALATVAGADLRGNGYDIDVFSYGAPRVGNRAFAEFLTVQTGGTLYRITHTNDIVPRLPPREFGYMHSSPEYWIKSGTLVPVTRNDIVKIEGIDATGGNNQPNIPDIPAHLWYFGLIGTC

SEQ ID NO: 10707 - protein, 268 aa, Thermomyces lanuginosus
EVSQDLFNQFNLFAQYSAAAYCGKNNDAPAGTNITCTGNACPEVEKADATFLYSFEDSGVGDVTGFLTLDNTNKLIVLSFRGSRSIENWIGNLNFDLKEINDICSGCRGHDGFTSSWRSVADTLRQKVEDAVREHPDYRVVFTGHSLGGALATVAGADLRGNGYDIDVFSYGAPRVGNRAFAEFLTVQTGGTLYRITHTNDIVPRLPPREFGYSHSSPEYWIKSGTLVPVTRNDIVKIEGIDATGGNNQPNIPDIPAHLWYFGLIGTC

SEQ ID NO: 10708 - protein, 268 aa, Thermomyces lanuginosus
EVSQDLFNQFNLFAQYSAAAYCGKNNDAPAGTNITCTGNACPEVEKADATFLYSFEDSGVGDVTGFLALDNTNKLIVLSFRGSRSIENWIGNLNFDLKEINDICSGCRGHDGFTSSWRSVADTLRQKVEDAVREHPDYRVVFTGHSLGGALATVAGADLRGNGYDIDVFSYGAPRVGNRAFAEFLTVQTGGTLYRITHTNDIVPRLPPREFGYSHSSPEYWIHSGTLVPVTRNDIVKIEGIDATGGNNQPNIPDIPAHLWYFGLIGTC

SEQ ID NO: 10709 - protein, 268 aa, Thermomyces lanuginosus
EVSQDLFNQFNLFAQYSAAAYCGKNNDAPAGTNITCTGNACPEVEKADATFLYSFEDSGVGDVYGFLALDNTNKLIVLSFRGSRSIENWIGNLNFDLKEINDICSGCRGHDGFTSSWRSVADTLRQKVEDAVREHPDYRVVFTGHSLGGALATVAGADLRGNGYDIDVFSYGAPRVGNRAFAEFLTVQTGGTLYRITHTNDIVPRLPPREFGYSHSSPEYWIKSGTLVPVTRNDIVKIEGIDATGGNNQPNIPDIPAHLWYFGLIGTC

SEQ ID NO: 10710 - protein, 268 aa, Thermomyces lanuginosus
EVSQDLFNQFNLFAQYSAAAYCGKNNDAPAGTNITCTGNACPEVEKADATFLYSFEDSGVGDVTGFLALDNTNKLIVLSFRGSRSIENWIGNLNFDLKEINDICSGCRGHDGFTSSWRSVADTLRQKVEDAVREHPDYRVVFTGHSLGGALATVAGADLRGNGYDIDVSSYGAPRVGNRAFAEFLTVQTGGTLYRITHTNDIVPRLPPREFGYSHSSPEYWIKSGTLVPVTRNDIVKIEGIDATGGNNQPNIPDIPAHLWYFGLIGTC

SEQ ID NO: 10711 - protein, 268 aa, Thermomyces lanuginosus
EVSQDLFNQFNLFAQYSAAAYCGKNNDAPAGTEITCTGNACPEVEKADATFLYSFEDSGVGDVTGFLALDNTNKLIVLSFRGSRSIENWIGNLNFDLKEINDICSGCRGHDGFTSSWRSVADTLRQKVEDAVREHPDYRVVFTGHSLGGALATVAGADLRGNGYDIDVFSYGAPRVGNRAFAEFLTVQTGGTLYRITHTNDIVPRLPPREFGYSHSSPEYWIKSGTLVPVTRNDIVKIEGIDATGGNNQPNIPDIPAHLWYFGLIGTC

SEQ ID NO: 10712 - protein, 268 aa, Thermomyces lanuginosus
EVSQDLFNQFNLFAQYSAAAYCGKNNDAPAGTNITCTGNACPEVEKADATFLYSFEDSGVGDVTGFLALDNTNKLIVLSFRGSRSIENWIGNLNFDLKEINDICSGCRGHDGFTSSWRSVADTLRQKVEDAVREHPDYRVVFTGHSLGGALATVAGADLRGNGYDIDVFSYGAPRVGNRAFAEFLTVQTGGTLYRITHTNDIVPRLPPREFGYSHSSPEYWIKSGTLVPVTRNDIVKIEGIDATGGNNQPNIPKIPAHLWYFGLIGTC

SEQ ID NO: 10713 - protein, 268 aa, Thermomyces lanuginosus
EVSQDLFNQFNLFAQYSAAAYCGKNNDAPAGTNITCTGNACPEVEKADATFLYSFEDSGVGDVTGFLALDNTNKLIVLSFRGSRSIENWIGNLNFDLKEINDICSGCRGHDGFTSSWRSVADTLRQKVEDAVREHPDYRVVFTGHSLGGALATVAGADLRGNGYDIDVFSYGAPRVGNRAFAMFLTVQTGGTLYRITHTNDIVPRLPPREFGYSHSSPEYWIKSGTLVPVTRNDIVKIEGIDATGGNNQPNIPDIPAHLWYFGLIGTC

SEQ ID NO: 10714 - protein, 268 aa, Thermomyces lanuginosus
EVSQDLFNQFNLFAQYSAAAYCGKNNDAPAGTNITCTGNACPEVEKADATFLYSFEDSGVGDVTGFLALDNTNKLIVLSFRGSRSIENWIGNLNFDLKEINDICSGCRGHDGFTSSWRSVADGLRQKVEDAVREHPDYRVVFTGHSLGGALATVAGADLRGNGYDIDVFSYGAPRVGNRAFAEFLTVQTGGTLYRITHTNDIVPRLPPREFGYSHSSPEYWIKSGTLVPVTRNDIVKIEGIDATGGNNQPNIPDIPAHLWYFGLIGTC

SEQ ID NO: 10715 - protein, 268 aa, Thermomyces lanuginosus
EVSQDLFNQFNLFAQYSAAAYCGKNNDAPAGTNITCTGNACPEVEKADATFLYSFEDSGVGDVTGFLALDNTNKLIVLSFRGSRSIENWIGNLNFDLKEINDICSGCRGHDGFTSSWRSVADTLRQKVEDAVREHPDYRVVFTGHSLGGALATVAGADLRGNGYDIDVFSYGAPRVGNRAFAEFLTVQTGGTLYRITHTNDIVPRLPPREFGYSHSSPEYWIKSGTLVPVTRNDIVKIEGIDATGGNNGPNIPDIPAHLWYFGLIGTC

SEQ ID NO: 10716 - protein, 268 aa, Thermomyces lanuginosus
EVSQDLFNQFNLFAQYSAAAYCGKNNYAPAGTNITCTGNACPEVEKADATFLYSFEDSGVGDVTGFLALDNTNKLIVLSFRGSRSIENWIGNLNFDLKEINDICSGCRGHDGFTSSWRSVADTLRQKVEDAVREHPDYRVVFTGHSLGGALATVAGADLRGNGYDIDVFSYGAPRVGNRAFAEFLTVQTGGTLYRITHTNDIVPRLPPREFGYSHSSPEYWIKSGTLVPVTRNDIVKIEGIDATGGNNQPNIPDIPAHLWYFGLIGTC

SEQ ID NO: 10717 - protein, 268 aa, Thermomyces lanuginosus
EVSQDLFNQFNLFAQYSAAAYCGKNNDAPAGTNITCTGNACPEVEKADATFLYSFEDSGVGDVTGFLALDNTNKLIVLSFRGSRSIENWIGNLNFDLKEIDDICSGCRGHDGFTSSWRSVADTLRQKVEDAVREHPDYRVVFTGHSLGGALATVAGADLRGNGYDIDVFSYGAPRVGNRAFAEFLTVQTGGTLYRITHTNDIVPRLPPREFGYSHSSPEYWIKSGTLVPVTRNDIVKIEGIDATGGNNQPNIPDIPAHLWYFGLIGTC

SEQ ID NO: 10718 - protein, 268 aa, Thermomyces lanuginosus
EVSQDLFNQFNLFAQYSAAAYCGKNNDAPAGTNITCTGNACPEVEKADATFLYSFEDSGVGDVTGFLALDNTNKLIVLSFRGSRNIENWIGNLNFDLKEINDICSGCRGHDGFTSSWRSVADTLRQKVEDAVREHPDYRVVFTGHSLGGALATVAGADLRGNGYDIDVFSYGAPRVGNRAFAEFLTVQTGGTLYRITHTNDIVPRLPPREFGYSHSSPEYWIKSGTLVPVTRNDIVKIEGIDATGGNNQPNIPDIPAHLWYFGLIGTC

SEQ ID NO: 10719 - protein, 268 aa, Thermomyces lanuginosus
EVSQDLFNQFNLFAQYSAAAYCGKNNDAPAGTNITCTGNACPEVEKADATFLYSFEDSGVGDVTGFLALDNTNKLIVLSFRGSRSIENWIGNLNFDLKEINDICWGCRGHDGFTSSWRSVADTLRQKVEDAVREHPDYRVVFTGHSLGGALATVAGADLRGNGYDIDVFSYGAPRVGNRAFAEFLTVQTGGTLYRITHTNDIVPRLPPREFGYSHSSPEYWIKSGTLVPVTRNDIVKIEGIDATGGNNQPNIPDIPAHLWYFGLIGTC

SEQ ID NO: 10720 - protein, 268 aa, Thermomyces lanuginosus
EVSDDLFNQFNLFAQYSAAAYCGKNNDAPAGTNITCTGNACPEVEKADATFLYSFEDSGVGDVTGFLALDNTNKLIVLSFRGSRSIENWIGNLNFDLKEINDICSGCRGHDGFTSSWRSVADTLRQKVEDAVREHPDYRVVFTGHSLGGALATVAGADLRGNGYDIDVFSYGAPRVGNRAFAEFLTVQTGGTLYRITHTNDIVPRLPPREFGYSHSSPEYWIKSGTLVPVTRNDIVKIEGIDATGGNNQPNIPDIPAHLWYFGLIGTC

SEQ ID NO: 10721 - protein, 268 aa, Thermomyces lanuginosus
EVSQDLFNQFNLFAQYSAAAYCGKNNDAPAHTNITCTGNACPEVEKADATFLYSFEDSGVGDVTGFLALDNTNKLIVLSFRGSRSIENWIGNLNFDLKEINDICSGCRGHDGFTSSWRSVADTLRQKVEDAVREHPDYRVVFTGHSLGGALATVAGADLRGNGYDIDVFSYGAPRVGNRAFAEFLTVQTGGTLYRITHTNDIVPRLPPREFGYSHSSPEYWIKSGTLVPVTRNDIVKIEGIDATGGNNQPNIPDIPAHLWYFGLIGTC

SEQ ID NO: 10722 - protein, 268 aa, Thermomyces lanuginosus
EVSQDLFNQFNLFAQYSAAAYCGKNTDAPAGTNITCTGNACPEVEKADATFLYSFEDSGVGDVTGFLALDNTNKLIVLSFRGSRSIENWIGNLNFDLKEINDICSGCRGHDGFTSSWRSVADTLRQKVEDAVREHPDYRVVFTGHSLGGALATVAGADLRGNGYDIDVFSYGAPRVGNRAFAEFLTVQTGGTLYRITHTNDIVPRLPPREFGYSHSSPEYWIKSGTLVPVTRNDIVKIEGIDATGGNNQPNIPDIPAHLWYFGLIGTC

SEQ ID NO: 10723 - protein, 268 aa, Thermomyces lanuginosus
EVSQDLFNQFNLFAQYSAAAYCGKNNDAPAGTNITCTGNACPEVEKADATFLYSFEDSGVGDVTGFLALDNTNKLIVLSFRGSRSIENWIGNLNFDLKEINDICSGCRGHDGFTSSWRSVADTLRQKVEDAVREHPDYRVVFTGHSLGGALATVAGADLRGNGNDIDVFSYGAPRVGNRAFAEFLTVQTGGTLYRITHTNDIVPRLPPREFGYSHSSPEYWIKSGTLVPVTRNDIVKIEGIDATGGNNQPNIPDIPAHLWYFGLIGTC

SEQ ID NO: 10724 - protein, 268 aa, Thermomyces lanuginosus
EVSQDLFNQFNLFAQYSAAAYCGKNNGAPAGTNITCTGNACPEVEKADATFLYSFEDSGVGDVTGFLALDNTNKLIVLSFRGSRSIENWIGNLNFDLKEINDICSGCRGHDGFTSSWRSVADTLRQKVEDAVREHPDYRVVFTGHSLGGALATVAGADLRGNGYDIDVFSYGAPRVGNRAFAEFLTVQTGGTLYRITHTNDIVPRLPPREFGYSHSSPEYWIKSGTLVPVTRNDIVKIEGIDATGGNNQPNIPDIPAHLWYFGLIGTC

SEQ ID NO: 10725 - protein, 268 aa, Thermomyces lanuginosus
EVSQDLFNQFNLFAQYSAAAYCGKNNDAPVGTNITCTGNACPEVEKADATFLYSFEDSGVGDVTGFLALDNTNKLIVLSFRGSRSIENWIGNLNFDLKEINDICSGCRGHDGFTSSWRSVADTLRQKVEDAVREHPDYRVVFTGHSLGGALATVAGADLRGNGYDIDVFSYGAPRVGNRAFAEFLTVQTGGTLYRITHTNDIVPRLPPREFGYSHSSPEYWIKSGTLVPVTRNDIVKIEGIDATGGNNQPNIPDIPAHLWYFGLIGTC

SEQ ID NO: 10726 - protein, 268 aa, Thermomyces lanuginosus
EFSQDLFNQFNLFAQYSAAAYCGKNNDAPAGTNITCTGNACPEVEKADATFLYSFEDSGVGDVTGFLALDNTNKLIVLSFRGSRSIENWIGNLNFDLKEINDICSGCRGHDGFTSSWRSVADTLRQKVEDAVREHPDYRVVFTGHSLGGALATVAGADLRGNGYDIDVFSYGAPRVGNRAFAEFLTVQTGGTLYRITHTNDIVPRLPPREFGYSHSSPEYWIKSGTLVPVTRNDIVKIEGIDATGGNNQPNIPDIPAHLWYFGLIGTC

SEQ ID NO: 10727 - protein, 268 aa, Thermomyces lanuginosus
EVSQDLFNQFNLFAQYSAAAYCGKNNDAPAGTNITCTGNACPEVEKADATFLYSFEDSGVGDVTGFLALDNTNKLIVLSFRGSRSIENWIGNLNKDLKEINDICSGCRGHDGFTSSWRSVADTLRQKVEDAVREHPDYRVVFTGHSLGGALATVAGADLRGNGYDIDVFSYGAPRVGNRAFAEFLTVQTGGTLYRITHTNDIVPRLPPREFGYSHSSPEYWIKSGTLVPVTRNDIVKIEGIDATGGNNQPNIPDIPAHLWYFGLIGTC

SEQ ID NO: 10728 - protein, 268 aa, Thermomyces lanuginosus
EVSGDLFNQFNLFAQYSAAAYCGKNNDAPAGTNITCTGNACPEVEKADATFLYSFEDSGVGDVTGFLALDNTNKLIVLSFRGSRSIENWIGNLNFDLKEINDICSGCRGHDGFTSSWRSVADTLRQKVEDAVREHPDYRVVFTGHSLGGALATVAGADLRGNGYDIDVFSYGAPRVGNRAFAEFLTVQTGGTLYRITHTNDIVPRLPPREFGYSHSSPEYWIKSGTLVPVTRNDIVKIEGIDATGGNNQPNIPDIPAHLWYFGLIGTC

SEQ ID NO: 10729 - protein, 268 aa, Thermomyces lanuginosus
EVSQDLFNQFNLFAQYSAAAYCGKNNDAPAGTNITCQGNACPEVEKADATFLYSFEDSGVGDVTGFLALDNTNKLIVLSFRGSRSIENWIGNLNFDLKEINDICSGCRGHDGFTSSWRSVADTLRQKVEDAVREHPDYRVVFTGHSLGGALATVAGADLRGNGYDIDVFSYGAPRVGNRAFAEFLTVQTGGTLYRITHTNDIVPRLPPREFGYSHSSPEYWIKSGTLVPVTRNDIVKIEGIDATGGNNQPNIPDIPAHLWYFGLIGTC

SEQ ID NO: 10730 - protein, 268 aa, Synthetic construct
EVSQDLFNQFNLFAQYSAAAYCGKNNDAPAGTNITCTGNACPEVEKADATFLYSFEDSGVGDVTGFLALDNTNKLIVLSFRGSRSIENWIGNLNFDLKEINDICSGCRGHDGFTSSWRSVADTLRQKVEDAVREHPDYRVVFTGHSLGGALATVAGADLRGNGYDIGVFSYGAPRVGNRAFAEFLTVQTGGTLYRITHTNDIVPRLPPREFGYSHSSPEYWIKSGTLVPVTRNDIVKIEGIDATGGNNQPNIPDIPAHLWYFGLIGTC

SEQ ID NO: 10731 - protein, 268 aa, Thermomyces lanuginosus
EVSQDLFNQFNLFSQYSAAAYCGKNNDAPAGTNITCTGNACPEVEKADATFLYSFEDSGVGDVTGFLALDNTNKLIVLSFRGSRSIENWIGNLNFDLKEINDICSGCRGHDGFTSSWRSVADTLRQKVEDAVREHPDYRVVFTGHSLGGALATVAGADLRGNGYDIDVFSYGAPRVGNRAFAEFLTVQTGGTLYRITHTNDIVPRLPPREFGYSHSSPEYWIKSGTLVPVTRNDIVKIEGIDATGGNNQPNIPDIPAHLWYFGLIGTC

SEQ ID NO: 10732 - protein, 268 aa, Thermomyces lanuginosus
EVSQDLFNQFNLFAQYSAAAYCGKNNDAPAGTNITCMGNACPEVEKADATFLYSFEDSGVGDVTGFLALDNTNKLIVLSFRGSRSIENWIGNLNFDLKEINDICSGCRGHDGFTSSWRSVADTLRQKVEDAVREHPDYRVVFTGHSLGGALATVAGADLRGNGYDIDVFSYGAPRVGNRAFAEFLTVQTGGTLYRITHTNDIVPRLPPREFGYSHSSPEYWIKSGTLVPVTRNDIVKIEGIDATGGNNQPNIPDIPAHLWYFGLIGTC

SEQ ID NO: 10733 - protein, 268 aa, Thermomyces lanuginosus
EVSQDLFNQFNLFAQYSAAAYCGKNNDAPAGTNITCTGNACPEVELADATFLYSFEDSGVGDVTGFLALDNTNKLIVLSFRGSRSIENWIGNLNFDLKEINDICSGCRGHDGFTSSWRSVADTLRQKVEDAVREHPDYRVVFTGHSLGGALATVAGADLRGNGYDIDVFSYGAPRVGNRAFAEFLTVQTGGTLYRITHTNDIVPRLPPREFGYSHSSPEYWIKSGTLVPVTRNDIVKIEGIDATGGNNQPNIPDIPAHLWYFGLIGTC

SEQ ID NO: 10734 - protein, 268 aa, Thermomyces lanuginosus
EVSQDLFNQFNLFAQYSAAAYCGKNNDAPAGTNITCTGNACPEVEKADATFLYSFEDSGVGDVTGFLALDVTNKLIVLSFRGSRSIENWIGNLNFDLKEINDICSGCRGHDGFTSSWRSVADTLRQKVEDAVREHPDYRVVFTGHSLGGALATVAGADLRGNGYDIDVFSYGAPRVGNRAFAEFLTVQTGGTLYRITHTNDIVPRLPPREFGYSHSSPEYWIKSGTLVPVTRNDIVKIEGIDATGGNNQPNIPDIPAHLWYFGLIGTC

SEQ ID NO: 10735 - protein, 268 aa, Thermomyces lanuginosus
EVSQDLFNQFNLFAQYSAAAYCGKNNDAPAGTNITCTGNACPEVEKADATFLYSFEDSGVGDVTGFLALDNTNKLIVLSFRGSRSIENWIGNLNFDLKEINDICSGCRGHDGFTSSWRSVADTLRQKVEDAVREHPDYRVVFTGHSLGAALATVAGADLRGNGYDIDVFSYGAPRVGNRAFAEFLTVQTGGTLYRITHTNDIVPRLPPREFGYSHSSPEYWIKSGTLVPVTRNDIVKIEGIDATGGNNQPNIPDIPAHLWYFGLIGTC

SEQ ID NO: 10736 - protein, 268 aa, Thermomyces lanuginosus
EVSQDLFNQFNLFAQYSAAAYCGKNNDAPAGTNITCTGNACPEVEKADATFLYSFEDSGVGDVTGFLALDNTNKHIVLSFRGSRSIENWIGNLNFDLKEINDICSGCRGHDGFTSSWRSVADTLRQKVEDAVREHPDYRVVFTGHSLGGALATVAGADLRGNGYDIDVFSYGAPRVGNRAFAEFLTVQTGGTLYRITHTNDIVPRLPPREFGYSHSSPEYWIKSGTLVPVTRNDIVKIEGIDATGGNNQPNIPDIPAHLWYFGLIGTC

SEQ ID NO: 10737 - protein, 268 aa, Thermomyces lanuginosus
EVSQDLFNQFNLFAQYSAAAYCGKNNDAPAGTNITCTGNACPEVEKADATFLYSFEDSGVGDVTGFLALDNTNKLIVLSFRGSRSIENWIGNLNFDLKEINDICSGCRGHDGFTSSWRSVADTLRQKVEDKVREHPDYRVVFTGHSLGGALATVAGADLRGNGYDIDVFSYGAPRVGNRAFAEFLTVQTGGTLYRITHTNDIVPRLPPREFGYSHSSPEYWIKSGTLVPVTRNDIVKIEGIDATGGNNQPNIPDIPAHLWYFGLIGTC

SEQ ID NO: 10738 - protein, 268 aa, Thermomyces lanuginosus
EVSQDLFNQFNLFAQYSAAAYCGKNNDAPAGTNITCTGNACPEVEKADATFLYKFEDSGVGDVTGFLALDNTNKLIVLSFRGSRSIENWIGNLNFDLKEINDICSGCRGHDGFTSSWRSVADTLRQKVEDAVREHPDYRVVFTGHSLGGALATVAGADLRGNGYDIDVFSYGAPRVGNRAFAEFLTVQTGGTLYRITHTNDIVPRLPPREFGYSHSSPEYWIKSGTLVPVTRNDIVKIEGIDATGGNNQPNIPDIPAHLWYFGLIGTC

SEQ ID NO: 10739 - protein, 268 aa, Thermomyces lanuginosus
EVSQDLFNQFNLFAQYSAAAYCGKNNDAPAGTNITCTGNACPEVEKADATFLYSFEDSGVGDVTGFLALDNTNKLIVLSFRGSRSIENWIGNLNFDLKEINDICSGCRGHDGFTSSWRSVADTLRQKVEDAVREHPDYRVVFTGHSLGGALATVAGADLRGNMYDIDVFSYGAPRVGNRAFAEFLTVQTGGTLYRITHTNDIVPRLPPREFGYSHSSPEYWIKSGTLVPVTRNDIVKIEGIDATGGNNQPNIPDIPAHLWYFGLIGTC

SEQ ID NO: 10740 - protein, 268 aa, Thermomyces lanuginosus
EVSQDLFNQFNLFAQYSAAAYCGKNNDAPAGTNITCTGNACPEVEKADATFLYSFEDSGVGDVTGFLALDNTNKLIVLSFRGSRSIENWIGNLNFDLKEINDICSGCRGHDGFTSSWRSVADTLRQKVEDAVREHPDYRVVFTGHSLGGALATVAGADLRGNGYDIDVFSYGAPRVGNRAFAEFLTLQTGGTLYRITHTNDIVPRLPPREFGYSHSSPEYWIKSGTLVPVTRNDIVKIEGIDATGGNNQPNIPDIPAHLWYFGLIGTC

SEQ ID NO: 10741 - protein, 268 aa, Thermomyces lanuginosus
EVSQDLFNQFNLFAQYSHAAYCGKNNDAPAGTNITCTGNACPEVEKADATFLYSFEDSGVGDVTGFLALDNTNKLIVLSFRGSRSIENWIGNLNFDLKEINDICSGCRGHDGFTSSWRSVADTLRQKVEDAVREHPDYRVVFTGHSLGGALATVAGADLRGNGYDIDVFSYGAPRVGNRAFAEFLTVQTGGTLYRITHTNDIVPRLPPREFGYSHSSPEYWIKSGTLVPVTRNDIVKIEGIDATGGNNQPNIPDIPAHLWYFGLIGTC

SEQ ID NO: 10742 - protein, 268 aa, Thermomyces lanuginosus
EVSQDLFNQFNLFAQYSAAAYCGKNNDAPAGTNITCTGNACPEVEKADATFLYSFEDSGVGDVTGFLALDNTNKLIVLSFRGSRSIENWIGNNNFDLKEINDICSGCRGHDGFTSSWRSVADTLRQKVEDAVREHPDYRVVFTGHSLGGALATVAGADLRGNGYDIDVFSYGAPRVGNRAFAEFLTVQTGGTLYRITHTNDIVPRLPPREFGYSHSSPEYWIKSGTLVPVTRNDIVKIEGIDATGGNNQPNIPDIPAHLWYFGLIGTC

SEQ ID NO: 10743 - protein, 268 aa, Thermomyces lanuginosus
EVSQDLFNQFNLFAQYSAAAYCGKNNDAPAGTNITCTGNACPEVEKADATFLYSFEDSGVGDVTGFLALDNTNKLIVLSFRGSRSIENWIGNLNFDLKEINDICSGCRGHDGFTSSWRSVADTLRQKVEDAVREHPDYRVVFTGHSLGGALATVAGADLRGNGYDIDVFSYGAPRVGNRAFAEFLTVQTGGTLYRITHTNDIVPRLPPREFGYSHSSPEYWIKSGTLVIVTRNDIVKIEGIDATGGNNQPNIPDIPAHLWYFGLIGTC

SEQ ID NO: 10744 - protein, 268 aa, Thermomyces lanuginosus
EVSQDLFNQFNLFAQYSAAAYCGKNNDAPAGTNITCTGNACPEVEKADATFLYSFEDSGVGDVTGFLALDNTNKLIVLSFRGSRSIENWIGNLNFDLKEINDICSGCRGHDGFTSSWRSVADTLCQKVEDAVREHPDYRVVFTGHSLGGALATVAGADLRGNGYDIDVFSYGAPRVGNRAFAEFLTVQTGGTLYRITHTNDIVPRLPPREFGYSHSSPEYWIKSGTLVPVTRNDIVKIEGIDATGGNNQPNIPDIPAHLWYFGLIGTC

SEQ ID NO: 10745 - protein, 268 aa, Thermomyces lanuginosus
EVSQDLFNQFNLFAQYSAAAYCGKNNDAPAGTNITCTGNACPEVEKADATFLYSFEDSGVGDVTGFLALDNTNKLIVLSFRGSRSIENWIGNLNFDLKEINDICSGCRGHDGFTSSWRSVADTLRQKVEDAVREHPDYRVVFTGHSLGGALATVAGADLRGNGYDIDVFSYGAPRVGNRAFAEFLTVQTGGTLYRITHTNDIVPRLPPREFGYSHSSPEYWIKSGTLVPVTRNDIVKIEGIDATGGNNQPNDPDIPAHLWYFGLIGTC

SEQ ID NO: 10746 - protein, 268 aa, Thermomyces lanuginosus
EVSQDLFNQFNLFAQYSSAAYCGKNNDAPAGTNITCTGNACPEVEKADATFLYSFEDSGVGDVTGFLALDNTNKLIVLSFRGSRSIENWIGNLNFDLKEINDICSGCRGHDGFTSSWRSVADTLRQKVEDAVREHPDYRVVFTGHSLGGALATVAGADLRGNGYDIDVFSYGAPRVGNRAFAEFLTVQTGGTLYRITHTNDIVPRLPPREFGYSHSSPEYWIKSGTLVPVTRNDIVKIEGIDATGGNNQPNIPDIPAHLWYFGLIGTC

SEQ ID NO: 10747 - protein, 268 aa, Thermomyces lanuginosus
EVSQDLFNQFNLFAQYSAAAYCGKNNDAPAGTNITCTGNACPEVEKADATFLYSFEDSGVGDVTGFLALDNTNKLIVLSFRGSRSIENWIGNLNFDLKEINDICSGCRGHDGFTSSWRSVADTLRQKVEDAVREHPDYRVVFTGHSLGGALATVAGADLRGNGYDIDVFSYGAPRVGNRAFAEFLTVHTGGTLYRITHTNDIVPRLPPREFGYSHSSPEYWIKSGTLVPVTRNDIVKIEGIDATGGNNQPNIPDIPAHLWYFGLIGTC

SEQ ID NO: 10748 - protein, 268 aa, Thermomyces lanuginosus
EVSQDLFNQFNLFAQYEAAAYCGKNNDAPAGTNITCTGNACPEVEKADATFLYSFEDSGVGDVTGFLALDNTNKLIVLSFRGSRSIENWIGNLNFDLKEINDICSGCRGHDGFTSSWRSVADTLRQKVEDAVREHPDYRVVFTGHSLGGALATVAGADLRGNGYDIDVFSYGAPRVGNRAFAEFLTVQTGGTLYRITHTNDIVPRLPPREFGYSHSSPEYWIKSGTLVPVTRNDIVKIEGIDATGGNNQPNIPDIPAHLWYFGLIGTC

SEQ ID NO: 10749 - protein, 268 aa, Thermomyces lanuginosus
EVSQDLFNQFNLFAQYSAAAYCGKNNDAPAGTNITCTGNACPEVEKADATFLYSFEDSGVGDVTGFLALDNTNKLIVLSFRGSRSIENWIGNLNFDLKEINDICSGCRGHDGFTSSWRSVADTLRQKVEDAVREHPDYRVVFTGHSLGGALATVAGADLRGNGYDIDVFSYGAPRVGNRAFAEFLTVQTGGTLYRITHTNDIVPRLPPREFGYSHSSPEYWIKSGTLVPVTRNDIVKIEGIDATGGNNQPNIPDIPAHSWYFGLIGTC

SEQ ID NO: 10750 - protein, 268 aa, Thermomyces lanuginosus
EVSQDLFNQFNLFAQYSAAAYCGKNNDAPAGTNITCTGNACPEVEKADATFLYSFEDSGVGDVTGVLALDNTNKLIVLSFRGSRSIENWIGNLNFDLKEINDICSGCRGHDGFTSSWRSVADTLRQKVEDAVREHPDYRVVFTGHSLGGALATVAGADLRGNGYDIDVFSYGAPRVGNRAFAEFLTVQTGGTLYRITHTNDIVPRLPPREFGYSHSSPEYWIKSGTLVPVTRNDIVKIEGIDATGGNNQPNIPDIPAHLWYFGLIGTC

SEQ ID NO: 10751 - protein, 268 aa, Thermomyces lanuginosus
EVSQDLFNQFNLFAQYSAAAYCGKNNDAPAGTNITCTGNACPEVEKADATFLYSFEDSGVGDVTGFLALDNTNKLIVLSFRGSRSIENWIGNLNFDLKEINDICSGCRGHDGFTSSWRSVADTLRQKVEDAVREHPDYRVVFTGHSLGGAPATVAGADLRGNGYDIDVFSYGAPRVGNRAFAEFLTVQTGGTLYRITHTNDIVPRLPPREFGYSHSSPEYWIKSGTLVPVTRNDIVKIEGIDATGGNNQPNIPDIPAHLWYFGLIGTC

SEQ ID NO: 10752 - protein, 268 aa, Thermomyces lanuginosus
EVSQDLFNQFNLFAQYSAAAYCGKNNDAPAGTNITCTGNACPEVEKADATFLYSFEDSGVGDVTGFLALDNTNKLIVLSFRGSRSIENWIGNLNFDLKEINDICSGCRGHDGFTSSWRSVADTLRQKVEDAVREHPDYRVVFTGHSLGGALATVAGADLRGNGYDIDVFSYGAPRVGNRAFAEFLTVQTGGTLYRITHTNDIVPRLPPREFGYSHSSPEYWIKSGTLVPVTRNDIVKIEGIDATGGNNQPNIHDIPAHLWYFGLIGTC

SEQ ID NO: 10753 - protein, 268 aa, Thermomyces lanuginosus
EVSQDLFNQFNLFAQYSAAAYCGKNNDAPAGTNITCTGCACPEVEKADATFLYSFEDSGVGDVTGFLALDNTNKLIVLSFRGSRSIENWIGNLNFDLKEINDICSGCRGHDGFTSSWRSVADTLRQKVEDAVREHPDYRVVFTGHSLGGALATVAGADLRGNGYDIDVFSYGAPRVGNRAFAEFLTVQTGGTLYRITHTNDIVPRLPPREFGYSHSSPEYWIKSGTLVPVTRNDIVKIEGIDATGGNNQPNIPDIPAHLWYFGLIGTC

SEQ ID NO: 10754 - protein, 268 aa, Thermomyces lanuginosus
EVSQDLFNQFNLFAQYSAAAYCGKNNDAPAGTNITCTGNACPEVEKADATFLYSFEDSGVGDVTGFLALDNTNKLIVLSFRGSRSIENWIGNLNFDLKEINDICSGCRGHDGFTSSWRSVADTLRQKVEDAVREHPDYRVVFTGHSLGGALATVAGADLRGNGYDINVFSYGAPRVGNRAFAEFLTVQTGGTLYRITHTNDIVPRLPPREFGYSHSSPEYWIKSGTLVPVTRNDIVKIEGIDATGGNNQPNIPDIPAHLWYFGLIGTC

SEQ ID NO: 10755 - protein, 268 aa, Thermomyces lanuginosus
EVSQDLFKQFNLFAQYSAAAYCGKNNDAPAGTNITCTGNACPEVEKADATFLYSFEDSGVGDVTGFLALDNTNKLIVLSFRGSRSIENWIGNLNFDLKEINDICSGCRGHDGFTSSWRSVADTLRQKVEDAVREHPDYRVVFTGHSLGGALATVAGADLRGNGYDIDVFSYGAPRVGNRAFAEFLTVQTGGTLYRITHTNDIVPRLPPREFGYSHSSPEYWIKSGTLVPVTRNDIVKIEGIDATGGNNQPNIPDIPAHLWYFGLIGTC

SEQ ID NO: 10756 - protein, 268 aa, Thermomyces lanuginosus
EVSQDLFNQFNLFAQYSAAAYCGKNNDAPAGTNITCTGNACPEVEKADATFLYSFEDSGVGDVTGFLALDNTRKLIVLSFRGSRSIENWIGNLNFDLKEINDICSGCRGHDGFTSSWRSVADTLRQKVEDAVREHPDYRVVFTGHSLGGALATVAGADLRGNGYDIDVFSYGAPRVGNRAFAEFLTVQTGGTLYRITHTNDIVPRLPPREFGYSHSSPEYWIKSGTLVPVTRNDIVKIEGIDATGGNNQPNIPDIPAHLWYFGLIGTC

SEQ ID NO: 10757 - protein, 268 aa, Thermomyces lanuginosus
EVSIDLFNQFNLFAQYSAAAYCGKNNDAPAGTNITCTGNACPEVEKADATFLYSFEDSGVGDVTGFLALDNTNKLIVLSFRGSRSIENWIGNLNFDLKEINDICSGCRGHDGFTSSWRSVADTLRQKVEDAVREHPDYRVVFTGHSLGGALATVAGADLRGNGYDIDVFSYGAPRVGNRAFAEFLTVQTGGTLYRITHTNDIVPRLPPREFGYSHSSPEYWIKSGTLVPVTRNDIVKIEGIDATGGNNQPNIPDIPAHLWYFGLIGTC

SEQ ID NO: 10758 - protein, 268 aa, Thermomyces lanuginosus
EVSQDLFNQFNLFAQYSAAAYCGKNNDARAGTNITCTGNACPEVEKADATFLYSFEDSGVGDVTGFLALDNTNKLIVLSFRGSRSIENWIGNLNFDLKEINDICSGCRGHDGFTSSWRSVADTLRQKVEDAVREHPDYRVVFTGHSLGGALATVAGADLRGNGYDIDVFSYGAPRVGNRAFAEFLTVQTGGTLYRITHTNDIVPRLPPREFGYSHSSPEYWIKSGTLVPVTRNDIVKIEGIDATGGNNQPNIPDIPAHLWYFGLIGTC

SEQ ID NO: 10759 - protein, 268 aa, Thermomyces lanuginosus
EVSQDLFNQFNLFAQYSAAAYCGKNNDAPAGTNITCTGNACPEVEKADATFLYSFEDSGVGDVTGFLALDNTNKLIVLSFRGSRSIENWIGNLNFDLKEINDICSGCRGHDGFTSSWRSVADTLRQKVEDAVREHPDYRVVFTGHSLGGALATVAGADLRGIGYDIDVFSYGAPRVGNRAFAEFLTVQTGGTLYRITHTNDIVPRLPPREFGYSHSSPEYWIKSGTLVPVTRNDIVKIEGIDATGGNNQPNIPDIPAHLWYFGLIGTC

SEQ ID NO: 10760 - protein, 268 aa, Thermomyces lanuginosus
EVSQDLFNQFNLFAQYSAAAYCGKNNDAPAGTNITCTGNACPEVEKADATFLYSFEDSGVGDVTVFLALDNTNKLIVLSFRGSRSIENWIGNLNFDLKEINDICSGCRGHDGFTSSWRSVADTLRQKVEDAVREHPDYRVVFTGHSLGGALATVAGADLRGNGYDIDVFSYGAPRVGNRAFAEFLTVQTGGTLYRITHTNDIVPRLPPREFGYSHSSPEYWIKSGTLVPVTRNDIVKIEGIDATGGNNQPNIPDIPAHLWYFGLIGTC

SEQ ID NO: 10761 - protein, 268 aa, Thermomyces lanuginosus
EVSQDLFNQFNLFAQYSACAYCGKNNDAPAGTNITCTGNACPEVEKADATFLYSFEDSGVGDVTGFLALDNTNKLIVLSFRGSRSIENWIGNLNFDLKEINDICSGCRGHDGFTSSWRSVADTLRQKVEDAVREHPDYRVVFTGHSLGGALATVAGADLRGNGYDIDVFSYGAPRVGNRAFAEFLTVQTGGTLYRITHTNDIVPRLPPREFGYSHSSPEYWIKSGTLVPVTRNDIVKIEGIDATGGNNQPNIPDIPAHLWYFGLIGTC

SEQ ID NO: 10762 - protein, 268 aa, Thermomyces lanuginosus
EVSQDLFNQFNLFAQYSAAAYCGKNNDAPAGTNITCTMNACPEVEKADATFLYSFEDSGVGDVTGFLALDNTNKLIVLSFRGSRSIENWIGNLNFDLKEINDICSGCRGHDGFTSSWRSVADTLRQKVEDAVREHPDYRVVFTGHSLGGALATVAGADLRGNGYDIDVFSYGAPRVGNRAFAEFLTVQTGGTLYRITHTNDIVPRLPPREFGYSHSSPEYWIKSGTLVPVTRNDIVKIEGIDATGGNNQPNIPDIPAHLWYFGLIGTC

SEQ ID NO: 10763 - protein, 268 aa, Thermomyces lanuginosus
EVSQDLFNQFNLFAQYSAWAYCGKNNDAPAGTNITCTGNACPEVEKADATFLYSFEDSGVGDVTGFLALDNTNKLIVLSFRGSRSIENWIGNLNFDLKEINDICSGCRGHDGFTSSWRSVADTLRQKVEDAVREHPDYRVVFTGHSLGGALATVAGADLRGNGYDIDVFSYGAPRVGNRAFAEFLTVQTGGTLYRITHTNDIVPRLPPREFGYSHSSPEYWIKSGTLVPVTRNDIVKIEGIDATGGNNQPNIPDIPAHLWYFGLIGTC

SEQ ID NO: 10764 - protein, 268 aa, Thermomyces lanuginosus
EVSQDLFNIFNLFAQYSAAAYCGKNNDAPAGTNITCTGNACPEVEKADATFLYSFEDSGVGDVTGFLALDNTNKLIVLSFRGSRSIENWIGNLNFDLKEINDICSGCRGHDGFTSSWRSVADTLRQKVEDAVREHPDYRVVFTGHSLGGALATVAGADLRGNGYDIDVFSYGAPRVGNRAFAEFLTVQTGGTLYRITHTNDIVPRLPPREFGYSHSSPEYWIKSGTLVPVTRNDIVKIEGIDATGGNNQPNIPDIPAHLWYFGLIGTC

SEQ ID NO: 10765 - protein, 268 aa, Thermomyces lanuginosus
EVSQDLFNQFNLFAQYSAAAYCGKNNDAPAGTNITCTGNACPEVEKADATFLYSFEDSGVGDVTGFLALDNTNKLIVLSFRGSRSIENWIGNLNFDLKEINDICSGCRGHDGFTSSWRSVADTLRQKVEDAVREHPDYRVVFTGHSLGGALATVAGADLRGNGYDIDVFSYGAPRVGNRAFAEFLTVQTGGTLYRITHTNDIVPRLPPREFGYSHSSPEYWIKSGTLVPVTRNDIVKIEGIDATGGNNQPNIPDIPYHLWYFGLIGTC

SEQ ID NO: 10766 - protein, 268 aa, Thermomyces lanuginosus
EVSQDLFNQFNLFAQYSAAAYCGKNNDAPAGTNITCTGNACPEVEKADATFLYSFEDSGVGDVTGFLALDNTNKLIVLSFRGSRSIENWIGNLNFDAKEINDICSGCRGHDGFTSSWRSVADTLRQKVEDAVREHPDYRVVFTGHSLGGALATVAGADLRGNGYDIDVFSYGAPRVGNRAFAEFLTVQTGGTLYRITHTNDIVPRLPPREFGYSHSSPEYWIKSGTLVPVTRNDIVKIEGIDATGGNNQPNIPDIPAHLWYFGLIGTC

SEQ ID NO: 10767 - protein, 268 aa, Thermomyces lanuginosus
EVSQDLFNQFNLFVQYSAAAYCGKNNDAPAGTNITCTGNACPEVEKADATFLYSFEDSGVGDVTGFLALDNTNKLIVLSFRGSRSIENWIGNLNFDLKEINDICSGCRGHDGFTSSWRSVADTLRQKVEDAVREHPDYRVVFTGHSLGGALATVAGADLRGNGYDIDVFSYGAPRVGNRAFAEFLTVQTGGTLYRITHTNDIVPRLPPREFGYSHSSPEYWIKSGTLVPVTRNDIVKIEGIDATGGNNQPNIPDIPAHLWYFGLIGTC

SEQ ID NO: 10768 - protein, 268 aa, Thermomyces lanuginosus
EVSQDLFNQFNLFAQYSAAAYCGKNNDAPAGTNITCTGNACPEVEKADATFLYSFEDSGVGDVTGFLSLDNTNKLIVLSFRGSRSIENWIGNLNFDLKEINDICSGCRGHDGFTSSWRSVADTLRQKVEDAVREHPDYRVVFTGHSLGGALATVAGADLRGNGYDIDVFSYGAPRVGNRAFAEFLTVQTGGTLYRITHTNDIVPRLPPREFGYSHSSPEYWIKSGTLVPVTRNDIVKIEGIDATGGNNQPNIPDIPAHLWYFGLIGTC

SEQ ID NO: 10769 - protein, 268 aa, Thermomyces lanuginosus
EVSQDLFNQFNLFAQYSAAAYCGKNNDAPAGTNITCTGNACPEVEKADATFLYSFEDSGVGDVTGFLVLDNTNKLIVLSFRGSRSIENWIGNLNFDLKEINDICSGCRGHDGFTSSWRSVADTLRQKVEDAVREHPDYRVVFTGHSLGGALATVAGADLRGNGYDIDVFSYGAPRVGNRAFAEFLTVQTGGTLYRITHTNDIVPRLPPREFGYSHSSPEYWIKSGTLVPVTRNDIVKIEGIDATGGNNQPNIPDIPAHLWYFGLIGTC

SEQ ID NO: 10770 - protein, 268 aa, Thermomyces lanuginosus
EVSQDLFNQFNLFAQYSAAAYCGKNNDAPAGTNITCTGNACPEVEKADATFLYSFEDSGVGDVTGFLALDNTNKLIVLSFRGSRSIENWIGNLNFDLKEINDICSGCRGSDGFTSSWRSVADTLRQKVEDAVREHPDYRVVFTGHSLGGALATVAGADLRGNGYDIDVFSYGAPRVGNRAFAEFLTVQTGGTLYRITHTNDIVPRLPPREFGYSHSSPEYWIKSGTLVPVTRNDIVKIEGIDATGGNNQPNIPDIPAHLWYFGLIGTC

SEQ ID NO: 10771 - protein, 268 aa, Thermomyces lanuginosus
EVSQDLFNQFNLFAQYSAAAYCGKNNDAPAGTNITCTGNACPEVEKADATFLYSFEDSGVGDVTGFLALDNTNKLIVLSFRGSRSIENWIGNLNFDLKEINDICSGCRGHDGFTSSWRSVADTLRQKVEDAVREHPDYRVVFTGHSLGGALATVAGADLRGNGYDIDVFSYGAPRVGNRAFAEFLTVQTGGTLYRITHTNDIVPRLPPREFGYSHSSPEYWIKSGTLVPVTRNDIVKIEGIDATGGNNQPNIPDIDAHLWYFGLIGTC

SEQ ID NO: 10772 - protein, 268 aa, Thermomyces lanuginosus
EVSQDLFNQFNLFAQYSAAAYCGKNNDAPAGTNITCTGNACPEVEKADATFLYSFEDSGVGDVTGFLALDNTNKLIVLSFRGSRSIENWIGNLNFDLKEINDICSGCRGHDGFTSSWRSVADTLRQKVEDAVREHPDYRVVFTGHSLGGALATVAGADLRGNGYDIDVFSYGAPRVGNRAFAEFLTGQTGGTLYRITHTNDIVPRLPPREFGYSHSSPEYWIKSGTLVPVTRNDIVKIEGIDATGGNNQPNIPDIPAHLWYFGLIGTC

SEQ ID NO: 10773 - protein, 268 aa, Thermomyces lanuginosus
EVSQDLFNQFNLFAQYSAAAYCGKNNDAPAGTNITCTGNACPEVEKADATFLYSFEDSGVGDVTGFLALDNTNKLIVLSFRGSRSIENWIGNLNFDLKEINDICSGCRGHFGFTSSWRSVADTLRQKVEDAVREHPDYRVVFTGHSLGGALATVAGADLRGNGYDIDVFSYGAPRVGNRAFAEFLTVQTGGTLYRITHTNDIVPRLPPREFGYSHSSPEYWIKSGTLVPVTRNDIVKIEGIDATGGNNQPNIPDIPAHLWYFGLIGTC

SEQ ID NO: 10774 - protein, 268 aa, Thermomyces lanuginosus
EVSQDLFNQFNLFAQYSAAAYCGKNNDAPAGTNITCTGNACPEVEKADATFLYSFEDSGVGDVTGFLALDNTNKLIVLSFRGSRSIENWIGNLNFDLKEINDICSGCRGHDGFTSSWRSVADTLRQKVEDAVREHPDYRVVFTGHSLGGALATVAGADLRGNGYDIDVFSYGAPRVGNRAFAEFLTVQTGGTLYRITHTNDIVPRLPPREFGYSHSSPEYWITSGTLVPVTRNDIVKIEGIDATGGNNQPNIPDIPAHLWYFGLIGTC

SEQ ID NO: 10775 - protein, 268 aa, Thermomyces lanuginosus
EVSQDLFNQFNLFAQYSAAAYCGKNNDAPAGTNITCTGNACPEVEKADATFLYSFEDSGVGDVTGFLALDNTNKLIVLSFRGSRSIENWIGNLNFDLKEINDICSGCRGHDGFTSSWRSVADTLRQKVEDAVREHPDYRVVFTGHSLGGALATVAGADLRGNGYDIDVFSYGAPRVGNRAFAEFLTVQTGGTLYRITHTNDIVPRLPPREFGYSHSSPEYWIKSGTLVPVTRNDIVKIKGIDATGGNNQPNIPDIPAHLWYFGLIGTC

SEQ ID NO: 10776 - protein, 268 aa, Thermomyces lanuginosus
EVSQDLFNQFNLFAQYSAAAYCGKNNSAPAGTNITCTGNACPEVEKADATFLYSFEDSGVGDVTGFLALDNTNKLIVLSFRGSRSIENWIGNLNFDLKEINDICSGCRGHDGFTSSWRSVADTLRQKVEDAVREHPDYRVVFTGHSLGGALATVAGADLRGNGYDIDVFSYGAPRVGNRAFAEFLTVQTGGTLYRITHTNDIVPRLPPREFGYSHSSPEYWIKSGTLVPVTRNDIVKIEGIDATGGNNQPNIPDIPAHLWYFGLIGTC

SEQ ID NO: 10777 - protein, 268 aa, Thermomyces lanuginosus
EVSQDLFNQFNLFAQYSAAAYCGKNNDAPAGTNITCTGNACPEVEKADATFLYSFEDSGVGDVTGFLALDNTNKLIVLSFRGSRSIENWIGNLNFDLKEINDICSGCRGHDGFTSSWRSVADTLRQKVEDAVREHPDYRVVFTGHSLGGALATVAGADLRGNGYDIDVFSYGAPRVGNRAFAEFLTVQTGGTLYRITHTNDIVPRLPPREFGYSHSSPEYWIKSGTLVPVTRNDIVKIEGIDATGGNNQPNIPDIPAHLWYDGLIGTC

SEQ ID NO: 10778 - protein, 268 aa, Thermomyces lanuginosus
EVSQDLFNQFNLFAQYSAAAYCGKNNDAPAGTNITCTGNACPEVEKADATFLYSFEDSGVGDVTGFLALDNTNKLIVLSFRGSRSIENWIGNLNHDLKEINDICSGCRGHDGFTSSWRSVADTLRQKVEDAVREHPDYRVVFTGHSLGGALATVAGADLRGNGYDIDVFSYGAPRVGNRAFAEFLTVQTGGTLYRITHTNDIVPRLPPREFGYSHSSPEYWIKSGTLVPVTRNDIVKIEGIDATGGNNQPNIPDIPAHLWYFGLIGTC

SEQ ID NO: 10779 - protein, 268 aa, Thermomyces lanuginosus
EVSQDLFNQFNLFAQYSAAAYCGKNNDAPAGTNITCTGNACPEVEKADATFLYSFEDSGVGDVTGFLALDNTNKLIVLSFRGSQSIENWIGNLNFDLKEINDICSGCRGHDGFTSSWRSVADTLRQKVEDAVREHPDYRVVFTGHSLGGALATVAGADLRGNGYDIDVFSYGAPRVGNRAFAEFLTVQTGGTLYRITHTNDIVPRLPPREFGYSHSSPEYWIKSGTLVPVTRNDIVKIEGIDATGGNNQPNIPDIPAHLWYFGLIGTC

SEQ ID NO: 10780 - protein, 268 aa, Thermomyces lanuginosus
EVSQDLFNQFNLFAQYSAAAYCGKNNDAPAGTNITCTGNACPEVEKADATFLYSFEDSGVGDVTGFLALDNTNKLIVLSFRGSRSIENWIGNLNFDLKEINDICSGCRGHDGFTSSWRSVADTLRQKVEDAVREHPDYRVVFTGHSLGGALATVAGADLRGNGYDIDVFSYGAPRVGNRAFAEFLTVQTGGTLYRITHTNDIVPRLPPREFGYSHWSPEYWIKSGTLVPVTRNDIVKIEGIDATGGNNQPNIPDIPAHLWYFGLIGTC

SEQ ID NO: 10781 - protein, 268 aa, Thermomyces lanuginosus
EVSQDLFNQFNLFAQYSAAAYCGKNNDAPAGTNITCTGNACPEVEKADATFLYSFEDSGVGDVTGFLALDNTNKLIVLSFRGSRSIENWIGNLNFDLKEINDICSGCRGHDGFTSSWRSVADTLRQKVEDAVREHPDYRVVFTGHSLGGALATVAGADLRGNGYDIDVFSYGAPRVGNRAFAEFLTVQTGGTLYRITHTNDIVPRLPPREFGYSHSSPEYWIKSGTLVPVTRNDIVKIEGIDATGGNNQPNIPDIPAHLWIFGLIGTC

SEQ ID NO: 10782 - protein, 268 aa, Thermomyces lanuginosus
EVSQDLFNQFNLFAQYSAAAYCGKNNDAPAGTNITCTGNACPEVEVADATFLYSFEDSGVGDVTGFLALDNTNKLIVLSFRGSRSIENWIGNLNFDLKEINDICSGCRGHDGFTSSWRSVADTLRQKVEDAVREHPDYRVVFTGHSLGGALATVAGADLRGNGYDIDVFSYGAPRVGNRAFAEFLTVQTGGTLYRITHTNDIVPRLPPREFGYSHSSPEYWIKSGTLVPVTRNDIVKIEGIDATGGNNQPNIPDIPAHLWYFGLIGTC

SEQ ID NO: 10783 - protein, 268 aa, Thermomyces lanuginosus
EVSQDLFNQFNLFAQYSAAAYCGKNNDMPAGTNITCTGNACPEVEKADATFLYSFEDSGVGDVTGFLALDNTNKLIVLSFRGSRSIENWIGNLNFDLKEINDICSGCRGHDGFTSSWRSVADTLRQKVEDAVREHPDYRVVFTGHSLGGALATVAGADLRGNGYDIDVFSYGAPRVGNRAFAEFLTVQTGGTLYRITHTNDIVPRLPPREFGYSHSSPEYWIKSGTLVPVTRNDIVKIEGIDATGGNNQPNIPDIPAHLWYFGLIGTC

SEQ ID NO: 10784 - protein, 268 aa, Thermomyces lanuginosus
EVSQDLFNQFNLFAQYSAAAYCGKNNDAPAGTNITCTGNACPEVEKADATFLYSFEDSGVGAVTGFLALDNTNKLIVLSFRGSRSIENWIGNLNFDLKEINDICSGCRGHDGFTSSWRSVADTLRQKVEDAVREHPDYRVVFTGHSLGGALATVAGADLRGNGYDIDVFSYGAPRVGNRAFAEFLTVQTGGTLYRITHTNDIVPRLPPREFGYSHSSPEYWIKSGTLVPVTRNDIVKIEGIDATGGNNQPNIPDIPAHLWYFGLISTC

SEQ ID NO: 10785 - protein, 268 aa, Thermomyces lanuginosus
EVSQDLFNQFNLFAQYSAAAYCGKNNDAPAGTNITCTGNACPEVEKADATFLYSFEDSGVGDVTGFLALDNTNKLIVLSFRGSRSIENWIGNLNFDLKEINDICSGCRGHDGFTSSWRSVADTLRQKVEDAVREHPDYRVVFTGHSLGGALATVAGADLRGNGYDIDVFSYGAPRVGNRAFAEFLTVQTGGTLYRITHTNDIVPRLPPREFGYSHSSPEYWIKSGTLVPVTRNDIVKIEGIDATGGNNQPNIPXIPAHLWYFGLIGTC

SEQ ID NO: 10786 - protein, 268 aa, Thermomyces lanuginosus
EVSQDLFNQFNLFAQYSAAAYCGKNNDAPAGTNITCTGNACPEVEKADATFLYSFEDSGVGDVTGFLALDNTNKLIVLSFRGSRSIENWIGNLNFDLKEINDICSGCRGHDGFTSSWRSVADTLRQKVEDAVREHPDYRVVFTGHSLGGALATVAGADLRGNGYDIDVFSYGAPRVGNRAFAEFLTVQTGGTLYRITHTNDIVPRLPPREFGYSHSSPEYWIKSGTLVPVTRNDIVKIEGIDAPGGNNQPNIPDIPAHLWYFGLIGTC

SEQ ID NO: 10787 - protein, 268 aa, Thermomyces lanuginosus
EVSQDLFNQFNLFAQYSAAAYCGKNNDAPAGTNITCTGNACPEVEKADATTLYSFEDSGVGDVTGFLALDNTNKLIVLSFRGSRSIENWIGNLNFDLKEINDICSGCRGHDGFTSSWRSVADTLRQKVEDAVREHPDYRVVFTGHSLGGALATVAGADLRGNGYDIDVFSYGAPRVGNRAFAEFLTVQTGGTLYRITHTNDIVPRLPPREFGYSHSSPEYWIKSGTLVPVTRNDIVKIEGIDATGGNNQPNIPDIPAHLWYFGLIGTC

SEQ ID NO: 10788 - protein, 268 aa, Thermomyces lanuginosus
EVSQDLFNQFNLFAQYSAAAYCGKNNDAPAGTNITCTGNACPEVEKADATFLYSFEDSGVGDVTGFLALDNTNKLIVLSFRGSRSIENWIGNLNFDLKEINDICSGCRGHDGFTSSWRSVADTLRQKVEDAVREHPDYRVVFTGHSLGGALATVAGADLRGNYYDIDVFSYGAPRVGNRAFAEFLTVQTGGTLYRITHTNDIVPRLPPREFGYSHSSPEYWIKSGTLVPVTRNDIVKIEGIDATGGNNQPNIPDIPAHLWYFGLIGTC

SEQ ID NO: 10789 - protein, 268 aa, Thermomyces lanuginosus
EVSQDLFNQFNLFAQYSAAAYCGKNNDAPAGTNITCTGNACPEVEKADATFLYSFEDSGVGDVTGFLALDNTNKLIVLSFRGSRSTENWIGNLNFDLKEINDICSGCRGHDGFTSSWRSVADTLRQKVEDAVREHPDYRVVFTGHSLGGALATVAGADLRGNGYDIDVFSYGAPRVGNRAFAEFLTVQTGGTLYRITHTNDIVPRLPPREFGYSHSSPEYWIKSGTLVPVTRNDIVKIEGIDATGGNNQPNIPDIPAHLWYFGLIGTC

SEQ ID NO: 10790 - protein, 268 aa, Thermomyces lanuginosus
EVSQDLFNQFNLFAQYSAAAYCGKNNDAPAGTNITCTGNACPEVEKADATFLYSFEDSGVGDVTGFLALDNTNKLIVLSFRGSRSIENWIGNLNFDLKEINDICSGCRGHDGFTSSWRSVADTLNQKVEDAVREHPDYRVVFTGHSLGGALATVAGADLRGNGYDIDVFSYGAPRVGNRAFAEFLTVQTGGTLYRITHTNDIVPRLPPREFGYSHSSPEYWIKSGTLVPVTRNDIVKIEGIDATGGNNQPNIPDIPAHLWYFGLIGTC

SEQ ID NO: 10791 - protein, 268 aa, Thermomyces lanuginosus
EVSQDLFNQFNLFAQYSAAAYCGKNNDAPAGTNITCTGNACPEVEKAGATFLYSFEDSGVGDVTGFLALDNTNKLIVLSFRGSRSIENWIGNLNFDLKEINDICSGCRGHDGFTSSWRSVADTLRQKVEDAVREHPDYRVVFTGHSLGGALATVAGADLRGNGYDIDVFSYGAPRVGNRAFAEFLTVQTGGTLYRITHTNDIVPRLPPREFGYSHSSPEYWIKSGTLVPVTRNDIVKIEGIDATGGNNQPNIPDIPAHLWYFGLIGTC

SEQ ID NO: 10792 - protein, 268 aa, Thermomyces lanuginosus
EVSQDLFNQFNLFAQYSAAAYCGKNNDAPAGTNITCTGNACPEVEKADATFLYSFEDSGVGDVTGFLALDNTNKLIVLSFRGSRSIENWIGNLNFDLKRINDICSGCRGHDGFTSSWRSVADTLRQKVEDAVREHPDYRVVFTGHSLGGALATVAGADLRGNGYDIDVFSYGAPRVGNRAFAEFLTVQTGGTLYRITHTNDIVPRLPPREFGYSHSSPEYWIKSGTLVPVTRNDIVKIEGIDATGGNNHPNIPDIPAHLWYFGLIGTC

SEQ ID NO: 10793 - protein, 268 aa, Thermomyces lanuginosus
EVSQDLFNQFNLFAQYSAAAYCGKNNDAPAGTNITCTGNACPEVEKADATFLYSFEDSGVGDVTGFLALDNTNKLIVLSFRGSRSIENWIGNLNFDLKEINDICSGCYGHDGFTSSWRSVADTLRQKVEDAVREHPDYRVVFTGHSLGGALATVAGADLRGNGYDIDVFSYGAPRVGNRAFAEFLTVQTGGTLYRITHTNDIVPRLPPREFGYSHSSPEYWIKSGTLVPVTRNDIVKIEGIDATGGNNQPNIPDIPAHLWYFGLIGTC

SEQ ID NO: 10794 - protein, 268 aa, Synthetic construct
EVSQDLFNQFNLFAQYSAAAYCGKNNDAPAGTNITCTGNACPEVEKADATFLYSFEDSGVGDVTGFLALDNTNKLIVLSFRGSRSIENWIGNLKFALKEINDICSGCRGHDGFTSSWRSVADTLRQKVEDAVREHPDYRVVFTGHSLGGALATVAGADLRGNGYDIDVFSYGAPRVGNRAFAEFLTVQTGGTLYRITHTNDIVPRLPPREFGYSHSSPEYWIKSGTLVPVTRNDIVKIEGIDATGGNNQPNIPDIPAHLWYFGLIGTC

SEQ ID NO: 10795 - protein, 268 aa, Thermomyces lanuginosus
EVSQDLFNQFNLFAQYSAAAYCKKNNDAPAGTNITCTGNACPEVEKADATFLYSFEDSGVGDVTGFLALDNTNKLIVLSFRGSRSIENWIGNLNFDLKEINDICSGCRGHDGFTSSWRSVADTLRQKVEDAVREHPDYRVVFTGHSLGGALATVAGADLRGNGYDIDVFSYGAPRVGNRAFAEFLTVQTGGTLYRITHTNDIVPRLPPREFGYSHSSPEYWIKSGTLVPVTRNDIVKIEGIDATGGNNQPNIPDIPAHLWYFGLIGTC

SEQ ID NO: 10796 - protein, 268 aa, Thermomyces lanuginosus
EVSQDLFNQFNLFAQYSAAAYCGKNNDAPAGTNITCTGNACPEVEKADATFLYSFEDSGVGDVTGFLALDNTNKLIVLSFRGSRSIENWIGNLNFDLKEINDICSGCRGHDGFTSSWRSVADTLRQKVEDAVREHPYYRVVFTGHSLGGALATVAGADLRGNGYDIDVFSYGAPRVGNRAFAEFLTVQTGGTLYRITHTNDIVPRLPPREFGYSHSSPEYWIKSGTLVPVTRNDIVKIEGIDATGGNNQPNIPDIPAHLWYFGLIGTC

SEQ ID NO: 10797 - protein, 268 aa, Thermomyces lanuginosus
EVSQDLFNQFNLFAQYSAAAYCGKNNDAPAGTNITCTGNACPEVEKADATFLYSFEDSGVGDVTGFLALDNTNKLIVLSFRGSRSIENWIGNLNFDLKEINDICSGCRGHDGFTSSWRSVADTLRQKVEDAVREHPDYRVVFTGHSLGGALATVAGADLRGNGYDIDVFSYGAPRVGNRAFAEFLTVQTGGTLYRITHTNDIVPRLPPREFGYSHSSPEYWIKSGTLVPVTRNDIVKIEGIDATGGNNQPNIPDIPWHLWYFGLIGTC

SEQ ID NO: 10798 - protein, 268 aa, Thermomyces lanuginosus
EVSQDLFNQFNLFAQYSAAAYCGKNNDAPAGTNITCTGNACPEVEKADATFLYSFEDSGVGDVTGFLALDNTNKLIVLSFRGSRSIENWIGNLNFDLKEINDICSGCRGHDGFTSSWRSVADTLRQKVEDAVREHPDYRVVFTGHSLGGALATVAGADLRGNGYDIDVFSYGAPRVGNRAFAEFLTVQDGGTLYRITHTNDIVPRLPPREFGYSHSSPEYWIKSGTLVPVTRNDIVKIEGIDATGGNNQPNIPDIPAHLWYFGLIGTC

SEQ ID NO: 10799 - protein, 268 aa, Thermomyces lanuginosus
EVSQDLFNQFNLFAQYSAAAYCGKNNDAPAGTNITCTGNACPEVEKADATALYSFEDSGVGDVTGFLALDNTNKLIVLSFRGSRSIENWIGNLNFDLKEINDICSGCRGHDGFTSSWRSVADTLRQKVEDAVREHPDYRVVFTGHSLGGALATVAGADLRGNGYDIDVFSYGAPRVGNRAFAEFLTVQTGGTLYRITHTNDIVPRLPPREFGYSHSSPEYWIKSGTLVPVTRNDIVKIEGIDATGGNNQPNIPDIPAHLWYFGLIGTC

SEQ ID NO: 10800 - protein, 268 aa, Thermomyces lanuginosus
EVSQDLFNQFNLFAQYSAAAYCGKNNDAPAGTNITCTGNACPEVEKADATFLYSFEDSGVGDVTGFLALDNTNKLIVLSFRGSRSIENWVGNLNFDLKEINDICSGCRGHDGFTSSWRSVADTLRQKVEDAVREHPDYRVVFTGHSLGGALATVAGADLRGNGYDIDVFSYGAPRVGNRAFAEFLTVQTGGTLYRITHTNDIVPRLPPREFGYSHSSPEYWIKSGTLVPVTRNDIVKIEGIDATGGNNQPNIPDIPAHLWYFGLIGTC

SEQ ID NO: 10801 - protein, 268 aa, Synthetic construct
EVSQDLFNQFNLFAQYSAAAYCGKNNDAPAGTNITCTGNACPEVEKADATFLYSFEDSGVGDVTGFLALDNTNKLIVLSFRGSRSIENWIGNLKFLLKKINDICSGCRGHDGFTSSWRSVADTLRQKVEDAVREHPDYRVVFTGHSLGGALATVAGADLRGNGYDIDVFSYGAPRVGNRAFAEFLTVQTGGTLYRITHTNDIVPRLPPREFGYSHSSPEYWIKSGTLVPVTRNDIVKIEGIDATGGNNRPNIPDIPAHLWYFGLIGTC

SEQ ID NO: 10802 - protein, 268 aa, Thermomyces lanuginosus
EVSQDLFNQFNLFAQYSAAAYCGKNNDAPAGTNITCTGNACPEVEKADATFLYSFEDSGVGDVTGFLALDNTNKLIVLSFRGSRSIENWIGNLNFDLKEINDICSGCRGHDGFTSSWRSVADTLRQKVEDAVREHPDYRVVFTGHSLGGALATVAGADLRGNGYDIDVFSYGAPRVGNRAFAEFLTVQTGGTLYRITHTNDIVPRLPPREFGSSHSSPEYWIKSGTLVPVTRNDIVKIEGIDATGGNNQPNIPDIPAHLWYFGLIGTC

SEQ ID NO: 10803 - protein, 268 aa, Thermomyces lanuginosus
EVSQDLFNQFNLFAQYSAAAYCGKNNDAPAGTNITCTGNACPEVQKADATFLYSFEDSGVGDVTGFLALDNTNKLIVLSFRGSRSIENWIGNLNFDLKEINDICSGCRGHDGFTSSWRSVADTLRQKVEDAVREHPDYRVVFTGHSLGGALATVAGADLRGNGYDIDVFSYGAPRVGNRAFAEFLTVQTGGTLYRITHTNDIVPRLPPREFGYSHSSPEYWIKSGTLVPVTRNDIVKIEGIDATGGNNQPNIPDIPAHLWYFGLIGTC

SEQ ID NO: 10804 - protein, 268 aa, Thermomyces lanuginosus
EVSQDLFNYFNLFAQYSAAAYCGKNNDAPAGTNITCTGNACPEVEKADATFLYSFEDSGVGDVTGFLALDNTNKLIVLSFRGSRSIENWIGNLNFDLKEINDICSGCRGHDGFTSSWRSVADTLRQKVEDAVREHPDYRVVFTGHSLGGALATVAGADLRGNGYDIDVFSYGAPRVGNRAFAEFLTVQTGGTLYRITHTNDIVPRLPPREFGYSHSSPEYWIKSGTLVPVTRNDIVKIEGIDATGGNNQPNIPDIPAHLWYFGLIGTC

SEQ ID NO: 10805 - protein, 268 aa, Thermomyces lanuginosus
EVSQDLFNQFNLFAQYSAAAYCGKNNDAPAGTNITCTGNACPEVEKADATFLYSFEDSGVGDVTGFLALDNTNKLIVLSFRGSRSIENWIGNLNFDLKEINDICSGCRGHDGFTSSWRSVADTLRQKVEDAVREHPDYRVVFTGHSLGGALATVAGADLRGNGYDIDVFSYGAPRVGNRAFAEFLTVQTGGTLYRITHTNDIVPRLPPREFGYSHPSPEYWIKSGTLVPVTRNDIVKIEGIDATGGNNQPNIPDIPAHLWYFGLIGTC

SEQ ID NO: 10806 - protein, 268 aa, Thermomyces lanuginosus
EVSQDLFNQFNLFAQYSAAAYCGKNNDAPAGTNITCPGNACPEVEKADATFLYSFEDSGVGDVTGFLALDNTNKLIVLSFRGSRSIENWIGNLNFDLKEINDICSGCRGHDGFTSSWRSVADTLRQKVEDAVREHPDYRVVFTGHSLGGALATVAGADLRGNGYDIDVFSYGAPRVGNRAFAEFLTVQTGGTLYRITHTNDIVPRLPPREFGYSHSSPEYWIKSGTLVPVTRNDIVKIEGIDATGGNNQPNIPDIPAHLWYFGLIGTC

SEQ ID NO: 10807 - protein, 268 aa, Thermomyces lanuginosus
EVSQDLFNQFNLFAQYSAAAYCGKNNDAPAGTNITCTGNACPEVEKADATFLYSFEDSGVGDVTGFLALDNTNKLIVLSFRGSRSIENWIGNLNFDLKEINDICSGCRGHDGFTSSWRSVADTLRQKVEDAVREHPDYRVVFTGHSLGGALATVAGADLRGKGYDIDVFSYGAPRVGNRAFAEFLTVQTGGTLYRITHTNDIVPRLPPREFGYSHSSPEYWIKSGTLVPVTRNDIVKIEGIDATGGNNQPNIPDIPAHLWYFGLIGTC

SEQ ID NO: 10808 - protein, 268 aa, Thermomyces lanuginosus
EVSQDLFNQFNLFAQYSAAAYCGKNNDAPAGTNPTCTGNACPEVEKADATFLYSFEDSGVGDVTGFLALDNTNKLIVLSFRGSRSIENWIGNLNFDLKEINDICSGCRGHDGFTSSWRSVADTLRQKVEDAVREHPDYRVVFTGHSLGGALATVAGADLRGNGYDIDVFSYGAPRVGNRAFAEFLTVQTGGTLYRITHTNDIVPRLPPREFGYSHSSPEYWIKSGTLVPVTRNDIVKIEGIDATGGNNQPNIPDIPAHLWYFGLIGTC

SEQ ID NO: 10809 - protein, 268 aa, Thermomyces lanuginosus
EVSWDLFNQFNLFAQYSAAAYCGKNNDAPAGTNITCTGNACPEVEKADATFLYSFEDSGVGDVTGFLALDNTNKLIVLSFRGSRSIENWIGNLNFDLKEINDICSGCRGHDGFTSSWRSVADTLRQKVEDAVREHPDYRVVFTGHSLGGALATVAGADLRGNGYDIDVFSYGAPRVGNRAFAEFLTVQTGGTLYRITHTNDIVPRLPPREFGYSHSSPEYWIKSGTLVPVTRNDIVKIEGIDATGGNNQPNIPDIPAHLWYFGLIGTC

SEQ ID NO: 10810 - protein, 268 aa, Thermomyces lanuginosus
EVSQDLFNQFNLFAQYSKAAYCGKNNDAPAGTNITCTGNACPEVEKADATFLYSFEDSGVGDVTGFLALDNTNKLIVLSFRGSRSIENWIGNLNFDLKEINDICSGCRGHDGFTSSWRSVADTLRQKVEDAVREHPDYRVVFTGHSLGGALATVAGADLRGNGYDIDVFSYGAPRVGNRAFAEFLTVQTGGTLYRITHTNDIVPRLPPREFGYSHSSPEYWIKSGTLVPVTRNDIVKIEGIDATGGNNQPNIPDIPAHLWYFGLIGTC

SEQ ID NO: 10811 - protein, 268 aa, Thermomyces lanuginosus
EVSQDLFNQFNLFAQYSAAAYCGKNNDAPAGTNITCTGNACPEVEKADAFFLYSFEDSGVGDVTGFLALDNTNKLIVLSFRGSRSIENWIGNLNFDLKEINDICSGCRGHDGFTSSWRSVADTLRQKVEDAVREHPDYRVVFTGHSLGGALATVAGADLRGNGYDIDVFSYGAPRVGNRAFAEFLTVQTGGTLYRITHTNDIVPRLPPREFGYSHSSPEYWIKSGTLVPVTRNDIVKIEGIDATGGNNQPNIPDIPAHLWYFGLIGTC

SEQ ID NO: 10812 - protein, 268 aa, Thermomyces lanuginosus
EVSQDLFNQFNLFAQYSAAAYCGKNNDAPAGTNITCTGNACPEVEKADATFLYSFEDSGVGDVTGFLALDNTNKLIVLSFRGSRSIENWIGNLNFDLKEINDICSGCRGHDGFTSSWRSVADTLRQKVEDAVREHPDYRVVFTGHSLGGALATVAGADLRGNGYDIDVFSYGAPRVGNRAFAEFLTVQTGGTLYRITHTNDIVPRLPPREFGYSHSSPEYWIKSGTLVPVTRNDIVKIEGIDSTGGNNQPNIPDIPAHLWYFGLIGTC

SEQ ID NO: 10813 - protein, 268 aa, Thermomyces lanuginosus
EVSQDLFNQFNLFAQYSAAAYCGKNNDAPAGTNITCTGNACPEVEKADATFLYSFEDSGVGDVTGFLALDNTNKLIVLSFRGSRSIENWIGNLNFDLKEINDICSGCRGHDGFTSSWRSVADTLRQKVEDAVREHPDYRVVFTGHSLGGALATVAGADLRGNGYDIDVFSYGAPRVGNRAFAEFLTVQTGGTLYRITHTNDIVPRLPPREFGYSHSSPEYWIKSGTLVPVTRNDIVKIEGIDATGGNNQSNIPDIPAHLWYFGLIGTC

SEQ ID NO: 10814 - protein, 268 aa, Thermomyces lanuginosus
EVSQDLFNQFNLFAQYSAAAYCGKNNDAPAGTNITCTGNAVPEVEKADATFLYSFEDSGVGDVTGFLALDNTNKLIVLSFRGSRSIENWIGNLNFDLKEINDICSGCRGHDGFTSSWRSVADTLRQKVEDAVREHPDYRVVFTGHSLGGALATVAGADLRGNGYDIDVFSYGAPRVGNRAFAEFLTVQTGGTLYRITHTNDIVPRLPPREFGYSHSSPEYWIKSGTLVPVTRNDIVKIEGIDATGGNNQPNIPDIPAHLWYFGLIGTC

SEQ ID NO: 10815 - protein, 268 aa, Thermomyces lanuginosus
EVSQDLFNQFNLFAQYSAAAYCGKNNDAPAGTNITCTGNACPEVEKADATFLYSFEDSGVGDVTGFLALDNTNKLIVLSFRGSRSIENWIGNLNFDLKEINDICSGCRGHDGFTSSWRSVADTLRQKVEDAVREHPDYRVVFTGHSLGGALATVAGADLRGNGYDIDVFSYGAPRVGNRAFAEFLTVQTGGTLYRITHTNDIVPRLPPRETGYSHSSPEYWIKSGTLVPVTRNDIVKIEGIDATGGNNQPNIPDIPAHLWYFGLIGTC

SEQ ID NO: 10816 - protein, 268 aa, Thermomyces lanuginosus
EVSQDLFNQFNLFAQYSAAAYCGKNNDAPAGTNITCTGNACPEVEKADATFLYSFEDSGVGDVTGNLALDNTNKLIVLSFRGSRSIENWIGNLNFDLKEINDICSGCRGHDGFTSSWRSVADTLRQKVEDAVREHPDYRVVFTGHSLGGALATVAGADLRGNGYDIDVFSYGAPRVGNRAFAEFLTVQTGGTLYRITHTNDIVPRLPPREFGYSHSSPEYWIKSGTLVPVTRNDIVKIEGIDATGGNNQPNIPDIPAHLWYFGLIGTC

SEQ ID NO: 10817 - protein, 268 aa, Thermomyces lanuginosus
EVSQDLFNQFNLFAQYSAAAYCGKNNDAPAGTNITCTGNACPEVEKADATFLYSFEDSGVGDVTGFLALDNTNKLIVLSFRGSRSIENWIGNLNFDLKEINDICSGCRGHDGFTSSWRSVADTLRQKVEDAVREHPDYRVVFTGHSLGGALATVAGADLRGNGYDIDVFSYGAPRWGNRAFAEFLTVQTGGTLYRITHTNDIVPRLPPREFGYSHSSPEYWIKSGTLVPVTRNDIVKIEGIDATGGNNQPNIPDIPAHLWYFGLIGTC

SEQ ID NO: 10818 - protein, 268 aa, Thermomyces lanuginosus
ETSQDLFNQFNLFAQYSAAAYCGKNNDAPAGTNITCTGNACPEVEKADATFLYSFEDSGVGDVTGFLALDNTNKLIVLSFRGSRSIENWIGNLNFDLKEINDICSGCRGHDGFTSSWRSVADTLRQKVEDAVREHPDYRVVFTGHSLGGALATVAGADLRGNGYDIDVFSYGAPRVGNRAFAEFLTVQTGGTLYRITHTNDIVPRLPPREFGYSHSSPEYWIKSGTLVPVTRNDIVKIEGIDATGGNNQPNIPDIPAHLWYFGLIGTC

SEQ ID NO: 10819 - protein, 268 aa, Thermomyces lanuginosus
EVSQDLFNQFNLFAQYSAAAYCGKNNDAPAGTNITCTGNACPEVEKADATFWYSFEDSGVGDVTGFLALDNTNKLIVLSFRGSRSIENWIGNLNFDLKEINDICSGCRGHDGFTSSWRSVADTLRQKVEDAVREHPDYRVVFTGHSLGGALATVAGADLRGNGYDIDVFSYGAPRVGNRAFAEFLTVQTGGTLYRITHTNDIVPRLPPREFGYSHSSPEYWIKSGTLVPVTRNDIVKIEGIDATGGNNQPNIPDIPAHLWYFGLIGTC

SEQ ID NO: 10820 - protein, 268 aa, Thermomyces lanuginosus
EVSQDLFNQFNLFAQYSAAAYCGKNNDAPAGTNITCTGNACPEVEKADATFLYSFEDSGVGDVTGFLALDNTNKLIVLSFRGSRSIENWIGNLNFDLKEINDICSGCRGHDGFTTSWRSVADTLRQKVEDAVREHPDYRVVFTGHSLGGALATVAGADLRGNGYDIDVFSYGAPRVGNRAFAEFLTVQTGGTLYRITHTNDIVPRLPPREFGYSHSSPEYWIKSGTLVPVTRNDIVKIEGIDATGGNNQPNIPDIPAHLWYFGLIGTC

SEQ ID NO: 10821 - protein, 268 aa, Thermomyces lanuginosus
EVSQDLFNQFNLFAQYSAAAYCGKNNDAPAGTNITCTGNACPEVEKADATFLYSFEDSGVGDVTGFLALDNTNKLIVLSFRGSRSIENWIGNLNFDLKEINDICSGCRGHDGFTSSWRSVADTLRQKVEDAVREHPDYRVVFTGHSLGGALATVAGADWRGNGYDIDVFSYGAPRVGNRAFAEFLTVQTGGTLYRITHTNDIVPRLPPREFGYSHSSPEYWIKSGTLVPVTRNDIVKIEGIDATGGNNQPNIPDIPAHLWYFGLIGTC

SEQ ID NO: 10822 - protein, 268 aa, Synthetic construct
EVSQDLFNQFNLFAQYSAAAYCGKNNDAPAGTNITCTGNACPEVEKADATFLYSFEDSGVGDVTGFLALDNTNKLIVLSFRGSRSIENWIGNLNCNLKEINDICSGCRGHDGFTSSWRSVADTLRQKVEDAVREHPDYRVVFTGHSLGGALATVAGADLRGNGYDIDVFSYGAPRVGNRAFAEFLTVQTGGTLYRITHTNDIVPRLPPREFGYSHSSPEYWIKSGTLVPVTRNDIVKIEGIDATGGNNQPNIPDIPAHLWYFGLIGTC

SEQ ID NO: 10823 - protein, 268 aa, Thermomyces lanuginosus
EVSQDLFNQFNLFAQYSAAAYCGKNNDAPAGTNITCTGNACPEVEKADATFLYSFEDSGVGDVTGFLALDNTNKLIVLSFRGSRSIENWIGNLNFDLKEINDICSGCRGHDGFTSSWRSVADTLRQKVEDAVREHPDYRVVFTGHSLGGALATVAGADLRGNGYDIDVFSYGAPRVGNRAFAEFLTVQTRGTLYRITHTNDIVPRLPPREFGYSHSSPEYWIKSGTLVPVTRNDIVKIEGIDATGGNNQPNIPDIPAHLWYFGLIGTC

SEQ ID NO: 10824 - protein, 268 aa, Thermomyces lanuginosus
EVSQDLFNQFNLFAQYSAAAYCIKNNDAPAGTNITCTGNACPEVEKADATFLYSFEDSGVGDVTGFLALDNTNKLIVLSFRGSRSIENWIGNLNFDLKEINDICSGCRGHDGFTSSWRSVADTLRQKVEDAVREHPDYRVVFTGHSLGGALATVAGADLRGNGYDIDVFSYGAPRVGNRAFAEFLTVQTGGTLYRITHTNDIVPRLPPREFGYSHSSPEYWIKSGTLVPVTRNDIVKIEGIDATGGNNQPNIPDIPAHLWYFGLIGTC

SEQ ID NO: 10825 - protein, 268 aa, Thermomyces lanuginosus
EMSQDLFNQFNLFAQYSAAAYCGKNNDAPAGTNITCTGNACPEVEKADATFLYSFEDSGVGDVTGFLALDNTNKLIVLSFRGSRSIENWIGNLNFDLKEINDICSGCRGHDGFTSSWRSVADTLRQKVEDAVREHPDYRVVFTGHSLGGALATVAGADLRGNGYDIDVFSYGAPRVGNRAFAEFLTVQTGGTLYRITHTNDIVPRLPPREFGYSHSSPEYWIKSGTLVPVTRNDIVKIEGIDATGGNNQPNIPDIPAHLWYFGLIGTC

SEQ ID NO: 10826 - protein, 268 aa, Thermomyces lanuginosus
EVSQDLFNQFNLFAQYSAAAYCGKNNDAPAGTNITCTGNACIEVEKADATFLYSFEDSGVGDVTGFLALDNTNKLIVLSFRGSRSIENWIGNLNFDLKEINDICSGCRGHDGFTSSWRSVADTLRQKVEDAVREHPDYRVVFTGHSLGGALATVAGADLRGNGYDIDVFSYGAPRVGNRAFAEFLTVQTGGTLYRITHTNDIVPRLPPREFGYSHSSPEYWIKSGTLVPVTRNDIVKIEGIDATGGNNQPNIPDIPAHLWYFGLIGTC

SEQ ID NO: 10827 - protein, 268 aa, Thermomyces lanuginosus
EVSQDLFNQFNLFAQYSAAAYCGKNNDAPAGTNITCTGNACPEVEKADATFLYSFEDSGVGDVTGFLALDNTNKLIVLSFRGSRSIENWIGNLNFDLKEINDICSGCRGHDGFTSSWRSVADTLRQKVEDAVREHPDYRVVFTGHSLGGALATVAGADLRGNGYDIDVFSYGAPRVGNHAFAEFLTVQTGGTLYRITHTNDIVPRLPPREFGYSHSSPEYWIKSGTLVPVTRNDIVKIEGIDATGGNNQPNIPDIPAHLWYFGLIGTC

SEQ ID NO: 10828 - protein, 268 aa, Thermomyces lanuginosus
EVSQDLFNQFNLFAQYSAAAYCGKNNDAPAGTNITCTGNACPEVEKADATFLYSFEDSGVGDVTGFLALDNTNKLIVLSFRGSRSIENWIGNLNFDLKEINDICSGCRGHDGFTSSWRSVADTLRQKVEDAVREHPDYRVVFTGHSLGGALATVAGADLRGNGYDIDVFSYGAPRVGNRAFAEFLTVQTGGTLYRITHTNDIVPRLPPREFGYSHSSPEYWIKSGTLVPVTRNDIVKIEGIDATGGNNQPNINDIPAHLWYFGLIGTC

SEQ ID NO: 10829 - protein, 268 aa, Thermomyces lanuginosus
EVSQDLFGQFNLFAQYSAAAYCGKNNDAPAGTNITCTGNACPEVEKADATFLYSFEDSGVGDVTGFLALDNTNKLIVLSFRGSRSIENWIGNLNFDLKEINDICSGCRGHDGFTSSWRSVADTLRQKVEDAVREHPDYRVVFTGHSLGGALATVAGADLRGNGYDIDVFSYGAPRVGNRAFAEFLTVQTGGTLYRITHTNDIVPRLPPREFGYSHSSPEYWIKSGTLVPVTRNDIVKIEGIDATGGNNQPNIPDIPAHLWYFGLIGTC

SEQ ID NO: 10830 - protein, 268 aa, Thermomyces lanuginosus
EVSQDLFNQFNLFAQYSAAAYCGKNNDAPAGTKITCTGNACPEVEKADATFLYSFEDSGVGDVTGFLALDNTNKLIVLSFRGSRSIENWIGNLNFDLKEINDICSGCRGHDGFTSSWRSVADTLRQKVEDAVREHPDYRVVFTGHSLGGALATVAGADLRGNGYDIDVFSYGAPRVGNRAFAEFLTVQTGGTLYRITHTNDIVPRLPPREFGYSHSSPEYWIKSGTLVPVTRNDIVKIEGIDATGGNNQPNIPDIPAHLWYFGLIGTC

SEQ ID NO: 10831 - protein, 268 aa, Thermomyces lanuginosus
EVSQDLFNQFNLFAQYSAAAYCGKNNDAPAGTNITCTGNACPEVEKADATFLYSFEDSGVGDVTGFLALDNTNKLIVLSFRGSRSIENWIGNLNFDLKEINDICSGCRGHDGFTSSWRSVADTLRQKVEDAVREHPDYRVVFTGHSLGGALATVAGADLRGNGYDIDVFSYGAPRVGNRAFAEFLTVQTGGTLYRITHTNDIVPRLPPREFGYSHSSPEYWIKAGTLVPVTRNDIVKIEGIDATGGNNQPNIPDIPAHLWYFGLIGTC

SEQ ID NO: 10832 - protein, 268 aa, Thermomyces lanuginosus
EVSNDLFNQFNLFAQYSAAAYCGKNNDAPAGTNITCTGNACPEVEKADATFLYSFEDSGVGDVTGFLALDNTNKLIVLSFRGSRSIENWIGNLNFDLKEINDICSGCRGHDGFTSSWRSVADTLRQKVEDAVREHPDYRVVFTGHSLGGALATVAGADLRGNGYDIDVFSYGAPRVGNRAFAEFLTVQTGGTLYRITHTNDIVPRLPPREFGYSHSSPEYWIKSGTLVPVTRNDIVKIEGIDATGGNNQPNIPDIPAHLWYFGLIGTC

SEQ ID NO: 10833 - protein, 268 aa, Thermomyces lanuginosus
EVSQDLFNQFNLFAQYSAAAYCGKNNDAPAGTNITCTGNACPEVEKADATFLYSFEDSGVGDVTGFLALDNTNKLIVLSFRGSRSIENWIGNLNFDLDEINDICSGCRGHDGFTSSWRSVADTLRQKVEDAVREHPDYRVVFTGHSLGGALATVAGADLRGNGYDIDVFSYGAPRVGNRAFAEFLTVQTGGTLYRITHTNDIVPRLPPREFGYSHSSPEYWIKSGTLVPVTRNDIVKIEGIDATGGNNQPNIPDIPAHLWYFGLIGTC

SEQ ID NO: 10834 - protein, 268 aa, Thermomyces lanuginosus
EVSQDLFNQFNLFAQYSAGAYCGKNNDAPAGTNITCTGNACPEVEKADATFLYSFEDSGVGDVTGFLALDNTNKLIVLSFRGSRSIENWIGNLNFDLKEINDICSGCRGHDGFTSSWRSVADTLRQKVEDAVREHPDYRVVFTGHSLGGALATVAGADLRGNGYDIDVFSYGAPRVGNRAFAEFLTVQTGGTLYRITHTNDIVPRLPPREFGYSHSSPEYWIKSGTLVPVTRNDIVKIEGIDATGGNNQPNIPDIPAHLWYFGLIGTC

SEQ ID NO: 10835 - protein, 268 aa, Thermomyces lanuginosus
EVSQDLFNQFNLFAQYSAAAYCGKNNDAPAGTNIKCTGNACPEVEKADATFLYSFEDSGVGDVTGFLALDNTNKLIVLSFRGSRSIENWIGNLNFDLKEINDICSGCRGHDGFTSSWRSVADTLRQKVEDAVREHPDYRVVFTGHSLGGALATVAGADLRGNGYDIDVFSYGAPRVGNRAFAEFLTVQTGGTLYRITHTNDIVPRLPPREFGYSHSSPEYWIKSGTLVPVTRNDIVKIEGIDATGGNNQPNIPDIPAHLWYFGLIGTC

SEQ ID NO: 10836 - protein, 268 aa, Thermomyces lanuginosus
EVSQDLFNQFNLFAQYSAAAYCGKNNDAPAGTNITCTGNACPEVEKADATFLYSFEDSGVGDVTGFLALDNTNKLIVLSFRGSRSIENWIGNLNFDLKEINDICSGCRGHDGFTSSWRSVADTLRQKVEDACREHPDYRVVFTGHSLGGALATVAGADLRGNGYDIDVFSYGAPRVGNRAFAEFLTVQTGGTLYRITHTNDIVPRLPPREFGYSHSSPEYWIKSGTLVPVTRNDIVKIEGIDATGGNNQPNIPDIPAHLWYFGLIGTC

SEQ ID NO: 10837 - protein, 268 aa, Thermomyces lanuginosus
EVSQDLFNQFNLFAQYSAAAYCGKNNDAPAGTNITCTGNACPEVEKADATFLYSFEDSGVGDVTGFLALDNTNKLIVLSFRGSRSIENWIGNLNFDLKEINDICSGCRGHDGFTSSWRSVADTLRQKVEDAVREHPDYRVVFTGHSLGGALATVAGADLRGNGYDIDVFSYGAPRVGNRAFAEFLTVQTGGTLYRITHTNDIVPRLPPREFGYSHSSPEYWIKSGTFVPVTRNDIVKIEGIDATGGNNQPNIPDIPAHLWYFGLIGTC

SEQ ID NO: 10838 - protein, 268 aa, Thermomyces lanuginosus
EVSQDLFNQFNLFAQYSAAAYCGKNNDAPAGTNITCTGNACPEVEKADATFLYSFEDSGVGDVTGFLALDNTNKLIVLSFRGSRSIENWIGNLNFDLKEINDICSGCRGHDGFTSSWRSVADTLRQKVEDAVREHPDYRVVFTGHSLGGALATVAGADERGNGYDIDVFSYGAPRVGNRAFAEFLTVQTGGTLYRITHTNDIVPRLPPREFGYSHSSPEYWIKSGTLVPVTRNDIVKIEGIDATGGNNQPNIPDIPAHLWYFGLIGTC

SEQ ID NO: 10839 - protein, 268 aa, Thermomyces lanuginosus
EVSQDLFNQFNLFAQYSAAAYCGKNNDAPAGTNITCTGNACPEVEKADATFLYSFEDSGVGDVTGFLALDNTNKLIVLSFRGSRSIENWIGNLNFDLKEINDICSGCRGHDGFTSSWRSVADTLRQKVEDAVREHPDYRVVFTGHSLGGALATVAGADLRGNGYDIDVFSYGAPRVGNRAFAEFLTVQTGGTLYRITHTNDIVPRLPEREFGYSHSSPEYWIKSGTLVPVTRNDIVKIEGIDATGGNNQPNIPDIPAHLWYFGLIGTC

SEQ ID NO: 10840 - protein, 268 aa, Thermomyces lanuginosus
EVSQDLFNQFNLFAQYSAAAYCGKNNDAPAGTNITCTGNACPEVEKADATFLYSFEDSGVGDVTGFLALDNTNKLIVLSFRGSRSIENWIGNLNFDLKEINDICSGCRGHDGFTSSWRSVADTLRQKVEDAVREHPDYRVVFTGHSLGGALATVAGADLRGNGYDIDVFSYGAPRVGNRAFAEFLTVQTGGTLYRITSTNDIVPRLPPREFGYSHSSPEYWIKSGTLVPVTRNDIVKIEGIDATGGNNQPNIPDIPAHLWYFGLIGTC

SEQ ID NO: 10841 - protein, 268 aa, Thermomyces lanuginosus
EVSQDLFNQFNLFAQYSAAAYCGKNNDAPAGTNITCTGNACPEVEKADATFLYSFEDSGVGDVTGFLALDWTNKLIVLSFRGSRSIENWIGNLNFDLKEINDICSGCRGHDGFTSSWRSVADTLRQKVEDAVREHPDYRVVFTGHSLGGALATVAGADLRGNGYDIDVFSYGAPRVGNRAFAEFLTVQTGGTLYRITHTNDIVPRLPPREFGYSHSSPEYWIKSGTLVPVTRNDIVKIEGIDATGGNNQPNIPDIPAHLWYFGLIGTC

SEQ ID NO: 10842 - protein, 268 aa, Thermomyces lanuginosus
EVSQDLFNQFNLFAQYSAAAYCGKNNDAPAGTNITCTGNACPEVEKADATFLYSFEDSGVGDVTGFLALDNTNKLIVLSFRGSRSIENWIGNLNFDLKEINDICSGCRGHDGFTSSWRSVADTLRQKVEDAVREHPDYRVVFTGHSLGGALATVAGADLRGNGYDIDVFSYGAPRVGNRAFAHFLTVQTGGTLYRITHTNDIVPRLPPREFGYSHSSPEYWIKSGTLVPVTRNDIVKIEGIDATGGNNQPNIPDIPAHLWYFGLIGTC

SEQ ID NO: 10843 - protein, 268 aa, Thermomyces lanuginosus
EVSQDLFNQFNLFAQYSAAAYCGKNNDAPAGTNITCTGNACPEVEKADATFLYSFEDSGVGDVTGFLALDNTNKLIVLSFRGSRSIENWIGNLNFDLKEINDICSGCRGHDGFTSSWRSVADTLRQKVEDAVREHPDYRVVFTGHSLGGALATVAGADLRGNGYDIDVFSYGAPRVGNRAFAEFLTVQTGGTLYRITHTNDIVPRLPPREFGYSHSSPEYWIKSGTLVPVTRNDIVKIEGIDATGGNNQKNIPDIPAHLWYFGLIGTC

SEQ ID NO: 10844 - protein, 268 aa, Thermomyces lanuginosus
EVSQDLFNQFNLFAQYSAAAYCGKNNDAPAGTNITCTGNACPEVEKADATFLYWFEDSGVGDVTGFLALDNTNKLIVLSFRGSRSIENWIGNLNFDLKEINDICSGCRGHDGFTSSWRSVADTLRQKVEDAVREHPDYRVVFTGHSLGGALATVAGADLRGNGYDIDVFSYGAPRVGNRAFAEFLTVQTGGTLYRITHTNDIVPRLPPREFGYSHSSPEYWIKSGTLVPVTRNDIVKIEGIDATGGNNQPNIPDIPAHLWYFGLIGTC

SEQ ID NO: 10845 - protein, 268 aa, Thermomyces lanuginosus
EVSQDLFNQFNLFAQYSAAAYCGKNNDAPAGTNITCTGNACPEVEKADATFLYSFEDSGVGDVTGFLALDNTNKLIVLSFRGSRSIENWIGNLNFDLKEINDICSGCRGHDGFTSSWRSVADTLRQKVEDAVREHPDYRVVFTGHSLGGALATVAGADLRGNGYDIDVFSYGAPRVGNRAFAEFLTVQTGGTLYRITHTNDIVPRLPPREFGYSHSVPEYWIKSGTLVPVTRNDIVKIEGIDATGGNNQPNIPDIPAHLWYFGLIGTC

SEQ ID NO: 10846 - protein, 268 aa, Thermomyces lanuginosus
EVSQDLFNQFNLFAQYSAAAYCGKNNDAPAGTNITCTGNACPEVEKADATFLYSFEDSGVGDVTGFLALDNTNKLIVLSFRGSRSIENWIGNLNFDLKEINDICSGCRGHDGFTSSWRSVADTLRQKVEDAVREHPDYRVVFTGHSLGGALATVAGADLRGNGYDIDVFSYGAPRVGNRAFAEFLTVQTGGTLYRITHTNDIVPRLPPREFGYSHSSPEYWIKSGTLRPVTRNDIVKIEGIDATGGNNQPNIPDIPAHLWYFGLIGTC

SEQ ID NO: 10847 - protein, 268 aa, Thermomyces lanuginosus
EVSQDLFNQFNLFAQYSAAAYCGKNNDAPAGTNITCTGNACPEVEKADATFLYSFEDSGVGDVTGFLALDNTNKLIVLSFRGSRSIENWIGNLNFDLKEINDICSGCRGHDGFTSSWRSVADTLRQKVEDAVREHPDYRVVFTGHSLGGALATVAGADLRGNGYDIDVFSYGAPRVGNRAFAEFLTHQTGGTLYRITHTNDIVPRLPPREFGYSHSSPEYWIKSGTLVPVTRNDIVKIEGIDATGGNNQPNIPDIPAHLWYFGLIGTC

SEQ ID NO: 10848 - protein, 268 aa, Thermomyces lanuginosus
EVSQDLFNQFNLFAQYSAAAYCGKNNDAPAGTNITCTGNACPEVEKADATSLYSFEDSGVGDVTGFLALDNTNKLIVLSFRGSRSIENWIGNLNFDLKEINDICSGCRGHDGFTSSWRSVADTLRQKVEDAVREHPDYRVVFTGHSLGGALATVAGADLRGNGYDIDVFSYGAPRVGNRAFAEFLTVQTGGTLYRITHTNDIVPRLPPREFGYSHSSPEYWIKSGTLVPVTRNDIVKIEGIDATGGNNQPNIPDIPAHLWYFGLIGTC

SEQ ID NO: 10849 - protein, 268 aa, Thermomyces lanuginosus
EVSQDLFNQFNLFAQYSAAAYCGKNNDAPAGTNITCTGNACPEVEKADATFLYSFEDSGVGDVTGFLALDNTNKMIVLSFRGSRSIENWIGNLNFDLKEINDICSGCRGHDGFTSSWRSVADTLRQKVEDAVREHPDYRVVFTGHSLGGALATVAGADLRGNGYDIDVFSYGAPRVGNRAFAEFLTVQTGGTLYRITHTNDIVPRLPPREFGYSHSSPEYWIKSGTLVPVTRNDIVKIEGIDATGGNNQPNIPDIPAHLWYFGLIGTC

SEQ ID NO: 10850 - protein, 268 aa, Thermomyces lanuginosus
EVSQDLFNQFNLFAQYSAAAYCGKNNDAPAGTNITCTGNACPEVEKADATFLYFFEDSGVGDVTGFLALDNTNKLIVLSFRGSRSIENWIGNLNFDLKEINDICSGCRGHDGFTSSWRSVADTLRQKVEDAVREHPDYRVVFTGHSLGGALATVAGADLRGNGYDIDVFSYGAPRVGNRAFAEFLTVQTGGTLYRITHTNDIVPRLPPREFGYSHSSPEYWIKSGTLVPVTRNDIVKIEGIDATGGNNQPNIPDIPAHLWYFGLIGTC

SEQ ID NO: 10851 - protein, 268 aa, Thermomyces lanuginosus
EVSQDLFNQFNLFAQYSAAAYCGKNNDAPAGTNITCTGNACPEVEKADATFLYSFEDSGVGDVTGFLALDNTNKLIVLSFRGSRSIENWIGNLTFDLKEINDICSGCRGHDGFTSSWRSVADTLRQKVEDAVREHPDYRVVFTGHSLGGALATVAGADLRGNGYDIDVFSYGAPRVGNRAFAEFLTVQTGGTLYRITHTNDIVPRLPPREFGYSHSSPEYWIKSGTLVPVTRNDIVKIEGIDATGGNNQPNIPDIPAHLWYFGLIGTC

SEQ ID NO: 10852 - protein, 268 aa, Thermomyces lanuginosus
EVSQDLFNQFNLFAQYSAAAYCGKNNNAPAGTNITCTGNACPEVEKADATFLYSFEDSGVGDVTGFLALDNTNKLIVLSFRGSRSIENWIGNLNFDLKEINDICSGCRGHDGFTSSWRSVADTLRQKVEDAVREHPDYRVVFTGHSLGGALATVAGADLRGNGYDIDVFSYGAPRVGNRAFAEFLTVQTGGTLYRITHTNDIVPRLPPREFGYSHSSPEYWIKSGTLVPVTRNDIVKIEGIDATGGNNQPNIPDIPAHLWYFGLIGTC

SEQ ID NO: 10853 - protein, 268 aa, Thermomyces lanuginosus
EVSQDLFNQFNLFAQYSAAAYCGKNNDAPAGTNITCTGNACPEVEKADATFLYSFEDSGVGDVTGFLALDNTNKLIVLSFRGSRSIENWIGNLNFDLMEINDICSGCRGHDGFTSSWRSVADTLRQKVEDAVREHPDYRVVFTGHSLGGALATVAGADLRGNGYDIDVFSYGAPRVGNRAFAEFLTVQTGGTLYRITHTNDIVPRLPPREFGYSHSSPEYWIKSGTLVPVTRNDIVKIEGIDATGGNNQPNIPDIPAHLWYFGLIGTC

SEQ ID NO: 10854 - protein, 268 aa, Thermomyces lanuginosus
EVSQDLFNQFNLFAQYSAAAYCGKNNDAPAGTNITCTGNACPEVEKADATFLYSFEDSGVGDVTGFLALDNTNKLIVLSFRGSRSIENWIGNLNFDLKEINDICSGCRGHDGFTSSWRSVADTLRQKVETAVREHPDYRVVFTGHSLGGALATVAGADLRGNGYDIDVFSYGAPRVGNRAFAEFLTVQTGGTLYRITHTNDIVPRLPPREFGYSHSSPEYWIKSGTLVPVTRNDIVKIEGIDATGGNNQPNIPDIPAHLWYFGLIGTC

SEQ ID NO: 10855 - protein, 268 aa, Thermomyces lanuginosus
EVSQDLFNQFNLFAQYSAAAYCGKNNDAEAGTNITCTGNACPEVEKADATFLYSFEDSGVGDVTGFLALDNTNKLIVLSFRGSRSIENWIGNLNFDLKEINDICSGCRGHDGFTSSWRSVADTLRQKVEDAVREHPDYRVVFTGHSLGGALATVAGADLRGNGYDIDVFSYGAPRVGNRAFAEFLTVQTGGTLYRITHTNDIVPRLPPREFGYSHSSPEYWIKSGTLVPVTRNDIVKIEGIDATGGNNQPNIPDIPAHLWYFGLIGTC

SEQ ID NO: 10856 - protein, 268 aa, Thermomyces lanuginosus
EVSQDLFNQFNLFAQYSAAAYCGKNNDAPAGTNITCTGNACPEVEKADATFLYSFEDSGVGDVTGFLALDNTNKLIVLSFRGSRSIENWIGNLNFDLKEINDICSGCRGHDGFTSSWRSVADTLRQKVEDAVREHPDYRVVFTGHSLGGALATVAGADLRGNGYDIDVFSYGAPRVGNRAFAEFLTVQTGGTLYRITHTNDIVPRLPPREFGYSHSSPEYWIKSGTLVPVTRNDIVKIEGIDALGGNNQPNIPDIPAHLWYFGLIGTC

SEQ ID NO: 10857 - protein, 268 aa, Thermomyces lanuginosus
EVSQDLFNQFNLFAQYSAAAYCGKNNDAPAGTNITCTGNACPEVEKADATFLYSFEDSGVGDVTGFLALDNTNKLIVLSFRGSRSIENWIGNLNFDLKEINDICSGCRGHDGFTRSWRSVADTLRQKVEDAVREHPDYRVVFTGHSLGGALATVAGADLRGNGYDIDVFSYGAPRVGNRAFAEFLTVQTGGTLYRITHTNDIVPRLPPREFGYSHSSPEYWIKSGTLVPVTRNDIVKIEGIDATGGNNQPNIPDIPAHLWYFGLIGTC

SEQ ID NO: 10858 - protein, 268 aa, Thermomyces lanuginosus
EVSQDLFNQFNLFAQYSAAAYCGKNNDAPAGTNITCTGNACPEVEKADATFLYSFEDSGVGDVTGFLALDNTNKLIVLSFRGSRSIENWIGNLNFDLKEINDICSGCRGHDGFTSSWRSVADTLRQKVEDAVREHPDYRVVFTGHSLGGALATVAGADLRGNGYDIDVFSYGAPRVGNRAFAEFLTVQTGGTLYRITHTNDIVPRLPPREFGYSHSSPEYWIKSKTLVPVTRNDIVKIEGIDATGGNNQPNIPDIPAHLWYFGLIGTC

SEQ ID NO: 10859 - protein, 268 aa, Thermomyces lanuginosus
EVSQDLFNQFNLFAQYSAAAYCGKNNDAPAGTNITCTGNACPEVEKADATFLYSFEDDGVGDVTGFLALDNTNKLIVLSFRGSRSIENWIGNLNFDLKEINDICSGCRGHDGFTSSWRSVADTLRQKVEDAVREHPDYRVVFTGHSLGGALATVAGADLRGNGYDIDVFSYGAPRVGNRAFAEFLTVQTGGTLYRITHTNDIVPRLPPREFGYSHSSPEYWIKSGTLVPVTRNDIVKIEGIDATGGNNQPNIPDIPAHLWYFGLIGTC

SEQ ID NO: 10860 - protein, 268 aa, Thermomyces lanuginosus
EVSQDLFNQFNLFAQYSAAAYCGKNNDAPAGTNITCTGNACPEVEKADATFLYSFEDSGVGDVTGFLALDNNNKLIVLSFRGSRSIENWIGNLNFDLKEINDICSGCRGHDGFTSSWRSVADTLRQKVEDAVREHPDYRVVFTGHSLGGALATVAGADLRGNGYDIDVFSYGAPRVGNRAFAEFLTVQTGGTLYRITHTNDIVPRLPPREFGYSHSSPEYWIKSGTLVPVTRNDIVKIEGIDATGGNNQPNIPDIPAHLWYFGLIGTC

SEQ ID NO: 10861 - protein, 268 aa, Thermomyces lanuginosus
EVSQDLFNQFNLFAQYSAAAYCGKNNDAPAGTNITCTGNACPEVEKADATFLYSFEDSGVGDVTGFLALDNTNKLIVLMFRGSRSIENWIGNLNFDLKEINDICSGCRGHDGFTSSWRSVADTLRQKVEDAVREHPDYRVVFTGHSLGGALATVAGADLRGNGYDIDVFSYGAPRVGNRAFAEFLTVQTGGTLYRITHTNDIVPRLPPREFGYSHSSPEYWIKSGTLVPVTRNDIVKIEGIDATGGNNQPNIPDIPAHLWYFGLIGTC

SEQ ID NO: 10862 - protein, 268 aa, Thermomyces lanuginosus
EVSQDLFNQFNLFAQYSAAAYCGKNNDAPAGTNITCTGNACPEVEKADATFLYSFEDSGVGDVTGFLALDNTNKLIVLSFRGSRSIENWIGNLNFDLKEINDICSGCRGHDGFTSSWRSVADTLRQKVEDAVREKPDYRVVFTGHSLGGALATVAGADLRGNGYDIDVFSYGAPRVGNRAFAEFLTVQTGGTLYRITHTNDIVPRLPPREFGYSHSSPEYWIKSGTLVPVTRNDIVKIEGIDATGGNNQPNIPDIPAHLWYFGLIGTC

SEQ ID NO: 10863 - protein, 268 aa, Thermomyces lanuginosus
EVSQDLFNQFNLFAQYSAAAYCGKNNDAPAGTNITCTGNACPEVEKADATFLYSFEDMGVGDVTGFLALDNTNKLIVLSFRGSRSIENWIGNLNFDLKEINDICSGCRGHDGFTSSWRSVADTLRQKVEDAVREHPDYRVVFTGHSLGGALATVAGADLRGNGYDIDVFSYGAPRVGNRAFAEFLTVQTGGTLYRITHTNDIVPRLPPREFGYSHSSPEYWIKSGTLVPVTRNDIVKIEGIDATGGNNQPNIPDIPAHLWYFGRIGTC

SEQ ID NO: 10864 - protein, 268 aa, Thermomyces lanuginosus
EVSQDLFNQFNLFAQYSAAAYCGKNNDAPAGTNITCTGNACPEVEKADATFLYSFEDSGVGDVTGFLALDQTNKLIVLSFRGSRSIENWIGNLNFDLKEINDICSGCRGHDGFTSSWRSVADTLRQKVEDAVREHPDYRVVFTGHSLGGALATVAGADLRGNGYDIDVFSYGAPRVGNRAFAEFLTVQTGGTLYRITHTNDIVPRLPPREFGYSHSSPEYWIKSGTLVPVTRNDIVKIEGIDATGGNNQPNIPDIPAHLWYFGLIGTC

SEQ ID NO: 10865 - protein, 268 aa, Thermomyces lanuginosus
EVSQDLFNQFNLFAQYSAAAYCGKNNDAPAGTNITCTGNACPEVEKADATFLYSFEDSGVGDVTGFLALDNTNKLIVLSFRGSRSIENWIGNLNFDLKEINDICSGCRGHDGFTSSWRSVADTLRQKVEDAVREHPDYRVVFTGHSLGGALATVAGADLRGNGYDIDVFSYGAPRVGNRAFAEFLTWQTGGTLYRITHTNDIVPRLPPREFGYSHSSPEYWIKSGTLVPVTRNDIVKIEGIDATGGNNQPNIPDIPAHLWYFGLIGTC

SEQ ID NO: 10866 - protein, 268 aa, Thermomyces lanuginosus
EVSQDLFNQFNLFAQYSAAAYCGKNNDAPAGTNITCTGNACPEVEKADATFLYSFEDSGVGDVTGFLALDNTNKSIVLSFRGSRSIENWIGNLNFDLKEINDICSGCRGHDGFTSSWRSVADTLRQKVEDAVREHPDYRVVFTGHSLGGALATVAGADLRGNGYDIDVFSYGAPRVGNRAFAEFLTVQTGGTLYRITHTNDIVPRLPPREFGYSHSSPEYWIKSGTLVPVTRNDIVKIEGIDATGGNNQPNIPDIPAHLWYFGLIGTC

SEQ ID NO: 10867 - protein, 268 aa, Thermomyces lanuginosus
EVSQDLFNQFNLFAQYSAAAYCGKNNDAPAGTNITCTGNACPEVEKADATFLYSFEDSGVGDVTGFLALDNTNKLIVLSFRGSRSIENWIGNLNFDLKEINDICSGCRGHDGFTSSWRSVADTLRQKVEDAVREHPDYRVVFTGHSLGGALATVAGADLRGNNYDIDVFSYGAPRVGNRAFAEFLTVQTGGTLYRITHTNDIVPRLPPREFGYSHSSPEYWIKSGTLVPVTRNDIVKIEGIDATGGNNQPNIPDIPAHLWYFGLIGTC

SEQ ID NO: 10868 - protein, 268 aa, Thermomyces lanuginosus
EVSQDLFNQFNLFAQYSAAAYCGKNNDAPAGTNITCTGNACPEVEKADATFLYSFEDSGVGDVTGFLALDNTNKLIVLSFRGSRSIENWIGNLNFDLKEINDICSGCRGHDGFTSSWRSVADTLRQKVEDAIREHPDYRVVFTGHSLGGALATVAGADLRGNGYDIDVFSYGAPRVGNRAFAEFLTVQTGGTLYRITHTNDIVPRLPPREFGYSHSSPEYWIKSGTLVPVTRNDIVKIEGIDATGGNNQPNIPDIPAHLWYFGLIGTC

SEQ ID NO: 10869 - protein, 268 aa, Thermomyces lanuginosus
EVSQDLFNQFNLFAQYSAAAYCGKNNDAPAGTNITCTGNACPEVEKADATFLYSFEDSGVGDVTGFLALDNTNKLIVLSFRGSRSIENWIGNLNFXLKEINDICSGCRGHDGFTSSWRSVADTLRQKVEDAVREHPDYRVVFTGHSLGGALATVAGADLRGNGYDIDVFSYGAPRVGNRAFAEFLTVQTGGTLYRITHTNDIVPRLPPREFGYSHSSPEYWIKSGTLVPVTRNDIVKIEGIDATGGNNHPNIPDIPAHLWYFGLIGTC

SEQ ID NO: 10870 - protein, 268 aa, Thermomyces lanuginosus
EVSQDLFNQFNLFAQYSAAAYCGKNNDAPAGTNITCTGNACPEVEKADATFLYSFHDSGVGDVTGFLALDNTNKLIVLSFRGSRSIENWIGNLNFDLKEINDICSGCRGHDGFTSSWRSVADTLRQKVEDAVREHPDYRVVFTGHSLGGALATVAGADLRGNGYDIDVFSYGAPRVGNRAFAEFLTVQTGGTLYRITHTNDIVPRLPPREFGYSHSSPEYWIKSGTLVPVTRNDIVKIEGIDATGGNNQPNIPDIPAHLWYFGLIGTC

SEQ ID NO: 10871 - protein, 268 aa, Thermomyces lanuginosus
EVSQDLFNQFNLFAQYSAAAYCGKNNDAPAGTNITCTGNACPEVEKADATFLYSFEDSGVGDVTGFLALDNTNKLIVLSFRGSRSIENWIGNLNFDLKEINDICSGCRGHDGFTSSWRSVADTLRQKVEDAVREHPDYRVVFTGHSLGGALATVAGADLRGNGYDIDVFSYGAPRVGNRAFAEFLTVQTGGTLYRITHTNDPVPRLPPREFGYSHSSPEYWIKSGTLVPVTRNDIVKIEGIDATGGNNQPNIPDIPAHLWYFGLIGTC

SEQ ID NO: 10872 - protein, 268 aa, Thermomyces lanuginosus
EVSQDLFNQFNLFAQYSAAAYCGKNNDAPAGTNITCTGNACPEVEKADATFLYSFEDSGVGDVTGFLALDNTNKLIVLSFRGSRSIENWIGNLNFDLKEINDICSGCRGHDGFTSSWRSVADTLRQKVEDAVREHPDYRVVFTGHSLGGALATVAGADLRGNGYDIDVFSYGAPRVGNRAFAEFLTVQTGGTLYRITHTADIVPRLPPREFGYSHSSPEYWIKSGTLVPVTRNDIVKIEGIDATGGNNQPNIPDIPAHLWYFGLIGTC

SEQ ID NO: 10873 - protein, 268 aa, Thermomyces lanuginosus
EVSQDLFNQFNLFAQYSAAAYCGKNNDAPAGTNITCEGNACPEVEKADATFLYSFEDSGVGDVTGFLALDNTNKLIVLSFRGSRSIENWIGNLNFDLKEINDICSGCRGHDGFTSSWRSVADTLRQKVEDAVREHPDYRVVFTGHSLGGALATVAGADLRGNGYDIDVFSYGAPRVGNRAFAEFLTVQTGGTLYRITHTNDIVPRLPPREFGYSHSSPEYWIKSGTLVPVTRNDIVKIEGIDATGGNNQPNIPDIPAHLWYFGLIGTC

SEQ ID NO: 10874 - protein, 268 aa, Thermomyces lanuginosus
EVSQDLFNQFNLFAQYSAAAYCGKNNDAPAGTNITCTGNACPEVEKADATFLYSFEDSGVGDVTGFLALDNTNKLIVLSFRGSRSIENWIGNLNFDLKEINDICSGCRGHDGFTSSWRSVADELRQKVEDAVREHPDYRVVFTGHSLGGALATVAGADLRGNGYDIDVFSYGAPRVGNRAFAEFLTVQTGGTLYRITHTNDIVPRLPPREFGYSHSSPEYWIKSGTLVPVTRNDIVKIEGIDATGGNNQPNIPDIPAHLWYFGLIGTC

SEQ ID NO: 10875 - protein, 268 aa, Thermomyces lanuginosus
EVSQDLFNQFNLFAQYSAAAVCGKNNDAPAGTNITCTGNACPEVEKADATFLYSFEDSGVGDVTGFLALDNTNKLIVLSFRGSRSIENWIGNLNFDLKEINDICSGCRGHDGFTSSWRSVADTLRQKVEDAVREHPDYRVVFTGHSLGGALATVAGADLRGNGYDIDVFSYGAPRVGNRAFAEFLTVQTGGTLYRITHTNDIVPRLPPREFGYSHSSPEYWIKSGTLVPVTRNDIVKIEGIDATGGNNQPNIPDIPAHLWYFGLIGTC

SEQ ID NO: 10876 - protein, 268 aa, Thermomyces lanuginosus
EVSQDLFNQFNLFAQYSAAAYCGKNNDAPAGTNITCTGNACPEVEKADATFLYSFEDSGVGDVTGFLALDNTNKLIVLSFRGSRSIENWIGNLNFDLKEINDICSGCRGHDGFTSSWRSVADTLRQKVEDAVREHPDYRVVFTGHSLGGALATVAGAYLRGNGYDIDVFSYGAPRVGNRAFAEFLTVQTGGTLYRITHTNDIVPRLPPREFGYSHSSPEYWIKSGTLVPVTRNDIVKIEGIDATGGNNQPNIPDIPAHLWYFGLIGTC

SEQ ID NO: 10877 - protein, 268 aa, Thermomyces lanuginosus
EVSQDLFNQFNLFAQYSAAAYCSKNNDAPAGTNITCTGNACPEVEKADATFLYSFEDSGVGDVTGFLALDNTNKLIVLSFRGSRSIENWIGNLNFDLKEINDICSGCRGHDGFTSSWRSVADTLRQKVEDAVREHPDYRVVFTGHSLGGALATVAGADLRGNGYDIDVFSYGAPRVGNRAFAEFLTVQTGGTLYRITHTNDIVPRLPPREFGYSHSSPEYWIKSGTLVPVTRNDIVKIEGIDATGGNNQPNIPDIPAHLWYFGLIGTC

SEQ ID NO: 10878 - protein, 268 aa, Thermomyces lanuginosus
EVSQDLFNQFNLFAQYSAAAYCGKNNDAPAGTNITCTGNACPRVEKADATFLYSFEDSGVGDVTGFLALDNTNKLIVLSFRGSRSIENWIGNLNFDLKEINDICSGCRGHDGFTSSWRSVADTLRQKVEDAVREHPDYRVVFTGHSLGGALATVAGADLRGNGYDIDVFSYGAPRVGNRAFAEFLTVQTGGTLYRITHTNDIVPRLPPREFGYSHSSPEYWIKSGTLVPVTRNDIVKIEGIDATGGNNQPNIPDIPAHLWYFGLIGTC

SEQ ID NO: 10879 - protein, 268 aa, Thermomyces lanuginosus
EVSQDLFNQFNLFAQYSAAAYCGKNNDAPAGTNITCTGNACPEVEKADATFLYSFEDSGVGDVTGFLALDNTNKLIVLSFRGSRSIENWIGNLNFDLKEINDICSGCRGHDGFTSSWRSVADTLRQKYEDAVREHPDYRVVFTGHSLGGALATVAGADLRGNGYDIDVFSYGAPRVGNRAFAEFLTVQTGGTLYRITHTNDIVPRLPPREFGYSHSSPEYWIKSGTLVPVTRNDIVKIEGIDATGGNNQPNIPDIPAHLWYFGLIGTC

SEQ ID NO: 10880 - protein, 268 aa, Thermomyces lanuginosus
EVSQDLFNQFNLFAQYSAAAYCGKNNDAPAGTNITCTGNACPEVEKADATFLYSFEDSGVGDVTGFLALDNTNKLIVLSFRGSRSIENWIGNLNFDLKEINDICSGCRGHDGFTSSWRSVAITLRQKVEDAVREHPDYRVVFTGHSLGGALATVAGADLRGNGYDIDVFSYGAPRVGNRAFAEFLTVQTGGTLYRITHTNDIVPRLPPREFGYSHSSPEYWIKSGTLVPVTRNDIVKIEGIDATGGNNQPNIPDIPAHLWYFGLIGTC

SEQ ID NO: 10881 - protein, 268 aa, Thermomyces lanuginosus
EVSQDLFNQFNLFAQYSAAAYCGKNNDAPAGTNITCTGNACPEVEKADATFLYSFEDSGVGDVTGFLALDKTNKLIVLSFRGSRSIENWIGNLNFDLKEINDICSGCRGHDGFTSSWRSVADTLRQKVEDAVREHPDYRVVFTGHSLGGALATVAGADLRGNGYDIDVFSYGAPRVGNRAFAEFLTVQTGGTLYRITHTNDIVPRLPPREFGYSHSSPEYWIKSGTLVPVTRNDIVKIEGIDATGGNNQPNIPDIPAHLWYFGLIGTC

SEQ ID NO: 10882 - protein, 268 aa, Thermomyces lanuginosus
EVSQDLFNQFNLFAQYSAAAYCGKNNDAPAGTNITCTGNACPDVEKADATFLYSFEDSGVGDVTGFLALDNTNKLIVLSFRGSRSIENWIGNLNFDLKEINDICSGCRGHDGFTSSWRSVADTLRQKVEDAVREHPDYRVVFTGHSLGGALATVAGADLRGNGYDIDVFSYGAPRVGNRAFAEFLTVQTGGTLYRITHTNDIVPRLPPREFGYSHSSPEYWIKSGTLVPVTRNDIVKIEGIDATGGNNQPNIPDIPAHLWYFGLIGTC

SEQ ID NO: 10883 - protein, 268 aa, Thermomyces lanuginosus
EVSQDLFNQFNLFAQYSAAAYCGKNNDAPAGTNITCTGNACPEVEKADATFLYSFEDSGVGDVTGFLALDNTNKLIVLSFRGSRSIENWIGNLNFDLKRINDICSGCRGHDGFTSSWRSVADTLRQKVEDAVREHPDYRVVFTGHSLGGALATVAGADLRGNGYDIDVFSYGAPRVGNRAFAEFLTVQTGGTLYRITHTNDIVPRLPPREFGYSHSSPEYWIKSGTLVPVTRNDIVKIEGIDATGGNNRPNIPDIPAHLWYFGLIGTC

SEQ ID NO: 10884 - protein, 268 aa, Thermomyces lanuginosus
EVSQDLFNQFNLFAQYSAAAYCGKNNDAPAGTNITCTGNACPEVEKADATFLYSFEDSGVGDVDGFLALDNTNKLIVLSFRGSRSIENWIGNLNFDLKEINDICSGCRGHDGFTSSWRSVADTLRQKVEDAVREHPDYRVVFTGHSLGGALATVAGADLRGNGYDIDVFSYGAPRVGNRAFAEFLTVQTGGTLYRITHTNDIVPRLPPREFGYSHSSPEYWIKSGTLVPVTRNDIVKIEGIDATGGNNQPNIPDIPAHLWYFGLIGTC

SEQ ID NO: 10885 - protein, 268 aa, Thermomyces lanuginosus
EVSQDLFNQFNLFAQYSAAAYCGKNNDAPAGTNITCTHNACPEVEKADATFLYSFEDSGVGDVTGFLALDNTNKLIVLSFRGSRSIENWIGNLNFDLKEINDICSGCRGHDGFTSSWRSVADTLRQKVEDAVREHPDYRVVFTGHSLGGALATVAGADLRGNGYDIDVFSYGAPRVGNRAFAEFLTVQTGGTLYRITHTNDIVPRLPPREFGYSHSSPEYWIKSGTLVPVTRNDIVKIEGIDATGGNNQPNIPDIPAHLWYFGLIGTC

SEQ ID NO: 10886 - protein, 268 aa, Thermomyces lanuginosus
EVSQDLFNQFNLFAQYSAAAYCGKNNDALAGTNITCTGNACPEVEKADATFLYSFEDSGVGDVTGFLALDNTNKLIVLSFRGSRSIENWIGNLNFDLKEINDICSGCRGHDGFTSSWRSVADTLRQKVEDAVREHPDYRVVFTGHSLGGALATVAGADLRGNGYDIDVFSYGAPRVGNRAFAEFLTVQTGGTLYRITHTNDIVPRLPPREFGYSHSSPEYWIKSGTLVPVTRNDIVKIEGIDATGGNNQPNIPDIPAHLWYFGLIGTC

SEQ ID NO: 10887 - protein, 268 aa, Thermomyces lanuginosus
EVSQDLFNQFNLFAQYSAAAYCGKNNDAPAGTNITCIGNACPEVEKADATFLYSFEDSGVGDVTGFLALDNTNKLIVLSFRGSRSIENWIGNLNFDLKEINDICSGCRGHDGFTSSWRSVADTLRQKVEDAVREHPDYRVVFTGHSLGGALATVAGADLRGNGYDIDVFSYGAPRVGNRAFAEFLTVQTGGTLYRITHTNDIVPRLPPREFGYSHSSPEYWIKSGTLVPVTRNDIVKIEGIDATGGNNQPNIPDIPAHLWYFGLIGTC

SEQ ID NO: 10888 - protein, 268 aa, Thermomyces lanuginosus
EVSQDLFNQFNLFAQYSAAAYCGKNCDAPAGTNITCTGNACPEVEKADATFLYSFEDSGVGDVTGFLALDNTNKLIVLSFRGSRSIENWIGNLNFDLKEINDICSGCRGHDGFTSSWRSVADTLRQKVEDAVREHPDYRVVFTGHSLGGALATVAGADLRGNGYDIDVFSYGAPRVGNRAFAEFLTVQTGGTLYRITHTNDIVPRLPPREFGYSHSSPEYWIKSGTLVPVTRNDIVKIEGIDATGGNNQPNIPDIPAHLWYFGLIGTC

SEQ ID NO: 10889 - protein, 268 aa, Thermomyces lanuginosus
EVSQDLFNQFNLFAQYSAAAYCGKNNDAPAGTNITCTGNACPEVEKADATFLYSFEDSGVGDVTGFLALDNTNKLIVLSFRGSRSIENWIGNLNFDLKEINDICSGCRGHDGFTSSWRSVADTLRQKVEDAVREHPDYRVVFTGHSLGGALATVAGADLRGNGYDIDVFSYGAPRVGNRAFAEFLTVQTGGTLYRITHTNDIVPRLPPREFGYSHSSPEYWIKSGTLVPVTMNDIVKIEGIDATGGNNQPNIPDIPAHLWYFGLIGTC

SEQ ID NO: 10890 - protein, 268 aa, Thermomyces lanuginosus
EVSQDLFNQFNLFAQYSAAAYCGKNNDAPAGTNITCTGKACPEVEKADATFLYSFEDSGVGDVTGFLALDNTNKLIVLSFRGSRSIENWIGNLNFDLKEINDICSGCRGHDGFTSSWRSVADTLRQKVEDAVREHPDYRVVFTGHSLGGALATVAGADLRGNGYDIDVFSYGAPRVGNRAFAEFLTVQTGGTLYRITHTNDIVPRLPPREFGYSHSSPEYWIKSGTLVPVTRNDIVKIEGIDATGGNNQPNIPDIPAHLWYFGLIGTC

SEQ ID NO: 10891 - protein, 268 aa, Thermomyces lanuginosus
EVSQDLFNQFNLFAQYSAAAYCGKNNDSPAGTNITCTGNACPEVEKADATFLYSFEDSGVGDVTGFLALDNTNKLIVLSFRGSRSIENWIGNLNFDLKEINDICSGCRGHDGFTSSWRSVADTLRQKVEDAVREHPDYRVVFTGHSLGGALATVAGADLRGNGYDIDVFSYGAPRVGNRAFAEFLTVQTGGTLYRITHTNDIVPRLPPREFGYSHSSPEYWIKSGTLVPVTRNDIVKIEGIDATGGNNQPNIPDIPAHLWYFGLIGTC

SEQ ID NO: 10892 - protein, 268 aa, Thermomyces lanuginosus
EVSQDAFNQFNLFAQYSAAAYCGKNNDAPAGTNITCTGNACPEVEKADATFLYSFEDSGVGDVTGFLALDNTNKLIVLSFRGSRSIENWIGNLNFDLKEINDICSGCRGHDGFTSSWRSVADTLRQKVEDAVREHPDYRVVFTGHSLGGALATVAGADLRGNGYDIDVFSYGAPRVGNRAFAEFLTVQTGGTLYRITHTNDIVPRLPPREFGYSHSSPEYWIKSGTLVPVTRNDIVKIEGIDATGGNNQPNIPDIPAHLWYFGLIGTC

SEQ ID NO: 10893 - protein, 268 aa, Thermomyces lanuginosus
EVSQDLFNQFNLFAQYSAAAYCGKNNDAPAGTNITCTGNACPEVEKADATFLYSFEDSGVGDVTGFLALDNTNKLIVLSFRGSRSIENWIGNLNFDLKEINDICSGCRGHDGFTSSWRSVADTLRQKVEDAVREHPDYRVVFTGHSLGGALATLAGADLRGNGYDIDVFSYGAPRVGNRAFAEFLTVQTGGTLYRITHTNDIVPRLPPREFGYSHSSPEYWIKSGTLVPVTRNDIVKIEGIDATGGNNQPNIPDIPAHLWYFGLIGTC

SEQ ID NO: 10894 - protein, 268 aa, Thermomyces lanuginosus
EVSQDLFNQFNLFAQYSAAAYCGKVNDAPAGTNITCTGNACPEVEKADATFLYSFEDSGVGDVTGFLALDNTNKLIVLSFRGSRSIENWIGNLNFDLKEINDICSGCRGHDGFTSSWRSVADTLRQKVEDAVREHPDYRVVFTGHSLGGALATVAGADLRGNGYDIDVFSYGAPRVGNRAFAEFLTVQTGGTLYRITHTNDIVPRLPPREFGYSHSSPEYWIKSGTLVPVTRNDIVKIEGIDATGGNNQPNIPDIPAHLWYFGLIGTC

SEQ ID NO: 10895 - protein, 268 aa, Thermomyces lanuginosus
EVSQDLFNQFNLFAQYSWAAYCGKNNDAPAGTNITCTGNACPEVEKADATFLYSFEDSGVGDVTGFLALDNTNKLIVLSFRGSRSIENWIGNLNFDLKEINDICSGCRGHDGFTSSWRSVADTLRQKVEDAVREHPDYRVVFTGHSLGGALATVAGADLRGNGYDIDVFSYGAPRVGNRAFAEFLTVQTGGTLYRITHTNDIVPRLPPREFGYSHSSPEYWIKSGTLVPVTRNDIVKIEGIDATGGNNQPNIPDIPAHLWYFGLIGTC

SEQ ID NO: 10896 - protein, 268 aa, Synthetic construct
EVSQDLFNQFNLFAQYSAAAYCGKNNDAPAGTNITCTGNACPEVEKADATFLYSFEDSGVGDVTGFLALDNTNKLIVLSFRGSRSIENWIGNLNFDLKEINDICSGCRGHDGFTSSWRSVADTLRQKVEDAVREHPDYRVVFTGHSLGGALATVAGADLRGNGYDIDVFSYGAPRVGNRAFAEFLTVQTGGTLYRITHTNDIVPRLPPRWFGYSHSSPEYWIKSGTLVPVTRNDIVKIEGIDATGGNNQPNIPDIPAHLWYFGLIGTC

SEQ ID NO: 10897 - protein, 268 aa, Thermomyces lanuginosus
EVSQDLFNQFNLFAQYSAAAYCGKNNDAPAGTNITCTGNACPEVEKADATFLYSFEDSGVGDVTGFLALDNTNKLIVLSFRGSRSIENWEGNLNFDLKEINDICSGCRGHDGFTSSWRSVADTLRQKVEDAVREHPDYRVVFTGHSLGGALATVAGADLRGNGYDIDVFSYGAPRVGNRAFAEFLTVQTGGTLYRITHTNDIVPRLPPREFGYSHSSPEYWIKSGTLVPVTRNDIVKIEGIDATGGNNQPNIPDIPAHLWYFGLIGTC

SEQ ID NO: 10898 - protein, 268 aa, Thermomyces lanuginosus
EVSQDLFNQFNLFAQYSAAAYCGKNNDAPAGTNITCTGNACPEVEKADATFLYTFEDSGVGDVTGFLALDNTNKLIVLSFRGSRSIENWIGNLNFDLKEINDICSGCRGHDGFTSSWRSVADTLRQKVEDAVREHPDYRVVFTGHSLGGALATVAGADLRGNGYDIDVFSYGAPRVGNRAFAEFLTVQTGGTLYRITHTNDIVPRLPPREFGYSHSSPEYWIKSGTLVPVTRNDIVKIEGIDATGGNNQPNIPDIPAHLWYFGLIGTC

SEQ ID NO: 10899 - protein, 268 aa, Thermomyces lanuginosus
EVSQDLFNQFNLFAQYSAAAYCGKNNDAPAGTNITCTGNACPEVEKADATFLYSFEDSGVGDVTGFLAIDNTNKLIVLSFRGSRSIENWIGNLNFDLKEINDICSGCRGHDGFTSSWRSVADTLRQKVEDAVREHPDYRVVFTGHSLGGALATVAGADLRGNGYDIDVFSYGAPRVGNRAFAEFLTVQTGGTLYRITHTNDIVPRLPPREFGYSHSSPEYWIKSGTLVPVTRNDIVKIEGIDATGGNNQPNIPDIPAHLWYFGLIGTC

SEQ ID NO: 10900 - protein, 268 aa, Thermomyces lanuginosus
EVSQDLFNQFNLFAQYSAAAYCGKNNDAPAGTNITCTGNACPEVEKADATFLYSFRDSGVGDVTGFLALDNTNKLIVLSFRGSRSIENWIGNLNFDLKEINDICSGCRGHDGFTSSWRSVADTLRQKVEDAVREHPDYRVVFTGHSLGGALATVAGADLRGNGYDIDVFSYGAPRVGNRAFAEFLTVQTGGTLYRITHTNDIVPRLPPREFGYSHSSPEYWIKSGTLVPVTRNDIVKIEGIDATGGNNQPNIPDIPAHLWYFGLIGTC

SEQ ID NO: 10901 - protein, 268 aa, Thermomyces lanuginosus
EVSQDLFNQFNLFAQYSAAAYCGKNNDAPAGTNITCTGNACPEVEKHDATFLYSFEDSGVGDVTGFLALDNTNKLIVLSFRGSRSIENWIGNLNFDLKEINDICSGCRGHDGFTSSWRSVADTLRQKVEDAVREHPDYRVVFTGHSLGGALATVAGADLRGNGYDIDVFSYGAPRVGNRAFAEFLTVQTGGTLYRITHTNDIVPRLPPREFGYSHSSPEYWIKSGTLVPVTRNDIVKIEGIDATGGNNQPNIPDIPAHLWYFGLIGTC

SEQ ID NO: 10902 - protein, 268 aa, Thermomyces lanuginosus
EVSQDLFNQFNLFAQYSAAAYCGKNNDAPAGTNITCTGNACPEVEKAEATFLYSFEDSGVGDVTGFLALDNTNKLIVLSFRGSRSIENWIGNLNFDLKEINDICSGCRGHDGFTSSWRSVADTLRQKVEDAVREHPDYRVVFTGHSLGGALATVAGADLRGNGYDIDVFSYGAPRVGNRAFAEFLTVQTGGTLYRITHTNDIVPRLPPREFGYSHSSPEYWIKSGTLVPVTRNDIVKIEGIDATGGNNQPNIPDIPAHLWYFGLIGTC

SEQ ID NO: 10903 - protein, 268 aa, Thermomyces lanuginosus
EVSQDLFNQFNLFAQYSAAAYCGKNNDAPAGTNITCTGNACPEVEKADATFLYSFEDSGVGDVTGFLALDNTNKLIVLSFRGSRSIENWIGNLNFDLKEINDICSGCRGHDGFTSSWRSVADTLRQKVERAVREHPDYRVVFTGHSLGGALATVAGADLRGNGYDIDVFSYGAPRVGNRAFAEFLTVQTGGTLYRITHTNDIVPRLPPREFGYSHSSPEYWIKSGTLVPVTRNDIVKIEGIDATGGNNQPNIPDIPAHLWYFGLIGTC

SEQ ID NO: 10904 - protein, 268 aa, Thermomyces lanuginosus
EVSQDLFNQFNLFAQYSAAAYCGKNNDAPAGTNITCTGNACPEVEKADATFLYSFEDSGVGDVTGFLALDNTNKLIVLSFRGSRSIENWIGNLNFDLKEINDICSGCRGHDGFTSSWRSVADTLRQKVEWAVREHPDYRVVFTGHSLGGALATVAGADLRGNGYDIDVFSYGAPRVGNRAFAEFLTVQTGGTLYRITHTNDIVPRLPPREFGYSHSSPEYWIKSGTLVPVTRNDIVKIEGIDATGGNNQPNIPDIPAHLWYFGLIGTC

SEQ ID NO: 10905 - protein, 268 aa, Thermomyces lanuginosus
EVSQDLFNQFNLFAQYSAAAYCGKNNDAPAGTNITCTGNACPEVEKADATFLYSFEDSGVGDVTGFLALDNTNKLIVLSFRGSRSIENWIGNLNFDLKEINDICSGCRGHDGFTSSWRSVADTLRQKVEDAVREHPDYRVVFTGHSLGGALATVAGADLRGNGYDIDVFSYGAPRVGNRAFAEFLTVQTGGTLYRITHTNDIVPRLPPREFGYSHSSPEYWIKSGTDVPVTRNDIVKIEGIDATGGNNQPNIPDIPAHLWYFGLIGTC

SEQ ID NO: 10906 - protein, 268 aa, Thermomyces lanuginosus
EVSQDLFNQFNLFAQYSAAAYCGKNNDAPAGTNITCTGNACPEVEKADATFLYSFEDSGVGDVTGFLALDNTNKLIVLSFRGSRSIENWIGNLNXDLKEINDICSGCRGHDGFTSSWRSVADTLRQKVEDAVREHPDYRVVFTGHSLGGALATVAGADLRGNGYDIDVFSYGAPRVGNRAFAEFLTVQTGGTLYRITHTNDIVPRLPPREFGYSHSSPEYWIKSGTLVPVTRNDIVKIEGIDATGGNNQPNIPDIPAHLWYFGLIGTC

SEQ ID NO: 10907 - protein, 268 aa, Thermomyces lanuginosus
EVSRDLFNQFNLFAQYSAAAYCGKNNDAPAGTNITCTGNACPEVEKADATFLYSFEDSGVGDVTGFLALDNTNKLIVLSFRGSRSIENWIGNLNFDLKEINDICSGCRGHDGFTSSWRSVADTLRQKVEDAVREHPDYRVVFTGHSLGGALATVAGADLRGNGYDIDVFSYGAPRVGNRAFAEFLTVQTGGTLYRITHTNDIVPRLPPREFGYSHSSPEYWIKSGTLVPVTRNDIVKIEGIDATGGNNQPNIPDIPAHLWYFGLIGTC

SEQ ID NO: 10908 - protein, 268 aa, Thermomyces lanuginosus
EVSQDLFNQFNLFAQYSAAAYCGKNNDAPAGTNITCTGNACPEVEKADATFLYSFEDSGVGDVTGFLALDNTNKLIVLSFRGSRSIENWIGNLNFDLKEINDICSGCRGHDGFTSSWRSVADTLRQKVEDAVREHPDYRVVFTGHSLGGALATVAGADLRGNGYDIDVFSYGAPRVGNRAFAEFLTVQTGGTLYRITHTNDIVPRLPPRERGYSHSSPEYWIKSGTLVPVTRNDIVKIEGIDATGGNNQPNIPDIPAHLWYFGLIGTC

SEQ ID NO: 10909 - protein, 268 aa, Thermomyces lanuginosus
EVSQDLFNQFNLFAQYSAAAYCGKNNDAPAGTNITCTGNACPEVEKADATFLYSFEDSGVGDVTGFLALDNTNKLIVLSFRGSRSIENWIGNLNFDLKEINDICSGCRGHDGFTSSWRSVADTLRQKVEDAVREHPDYRVVFTGHSLGGALATVAGADLRGNGYDIDVFSYGAPRVGNRAFAEFLTVQTGGTLYRITHTNDIVPRLPPREFGYSHSSPEYWIKSGTLVPVTINDIVKIEGIDATGGNNQPNIPDIPAHLWYFGLIGTC

SEQ ID NO: 10910 - protein, 268 aa, Thermomyces lanuginosus
EVSQDLFNQFNLFAQYSAAAYCGKNNDAPAGTNITCTGNACPEVEKADATFLYSGEDSGVGDVTGFLALDNTNKLIVLSFRGSRSIENWIGNLNFDLKEINDICSGCRGHDGFTSSWRSVADTLRQKVEDAVREHPDYRVVFTGHSLGGALATVAGADLRGNGYDIDVFSYGAPRVGNRAFAEFLTVQTGGTLYRITHTNDIVPRLPPREFGYSHSSPEYWIKSGTLVPVTRNDIVKIEGIDATGGNNQPNIPDIPAHLWYFGLIGTC

SEQ ID NO: 10911 - protein, 268 aa, Thermomyces lanuginosus
EVSQDLFNQFNLFAQYSAAAYCGKNNDAPAGTNITCTGNACPEVEKADATFLYSFEDSGVGDVTGFLALDNTNKLIVLSFRGSRSIENWIGNLNFDLKEINDICSGCRGHDGFTSSWRSVADTLRQKVEDAVREHPAYRVVFTGHSLGGALATVAGADLRGNGYDIDVFSYGAPRVGNRAFAEFLTVQTGGTLYRITHTNDIVPRLPPREFGYSHSSPEYWIKSGTLVPVTRNDIVKIEGIDATGGNNQPNIPDIPAHLWYFGLIGTC

SEQ ID NO: 10912 - protein, 268 aa, Thermomyces lanuginosus
EVSQDLFNQFNLFAQYSAAAYCGKNNDAPAGTNITCTGNACPEVEKADATFLYSFEDSGKGDVTGFLALDNTNKLIVLSFRGSRSIENWIGNLNFDLKEINDICSGCRGHDGFTSSWRSVADTLRQKVEDAVREHPDYRVVFTGHSLGGALATVAGADLRGNGYDIDVFSYGAPRVGNRAFAEFLTVQTGGTLYRITHTNDIVPRLPPREFGYSHSSPEYWIKSGTLVPVTRNDIVKIEGIDATGGNNQPNIPDIPAHLWYFGLIGTC

SEQ ID NO: 10913 - protein, 268 aa, Thermomyces lanuginosus
EVSQDLFNQFNLFAQYSAAAYCGKNNDAPAGTNITCTGNACPEVEKADATFLYSFEDSGVGDVTGFLALDNTNKLIVLSFRGSRSIENWIGNLNFDLKEINDICSGCRGHDGFTSSWRSVADTLRQKVEDAVREHPDYRVVFTGHSLGGALATVAGADLRGNGYDIDVFSYGAPRVGNRAFAEFLTVQTGGTLYRITHTNDIVPRLPPREFGYSHSSPEYWIKFGTLVPVTRNDIVKIEGIDATGGNNQPNIPDIPAHLWYFGLIGTC

SEQ ID NO: 10914 - protein, 268 aa, Thermomyces lanuginosus
EVSQDLFNQFNLFAQYSAAAYCGKNNDPPAGTNITCTGNACPEVEKADATFLYSFEDSGVGDVTGFLALDNTNKLIVLSFRGSRSIENWIGNLNFDLKEINDICSGCRGHDGFTSSWRSVADTLRQKVEDAVREHPDYRVVFTGHSLGGALATVAGADLRGNGYDIDVFSYGAPRVGNRAFAEFLTVQTGGTLYRITHTNDIVPRLPPREFGYSHSSPEYWIKSGTLVPVTRNDIVKIEGIDATGGNNQPNIPDIPAHLWYFGLIGTC

SEQ ID NO: 10915 - protein, 268 aa, Thermomyces lanuginosus
EVSQDLFNQFNLFAQYSAAAYCGKNNDAPAGTNITCTGNACPEVEKADATFLYSFEDSGVGDVTGFLALDNTNKLIVLSFRGSRSIENWIGNLNFDLKEINDICSGCRGHDGFTSSWRSVADTLRQKVEDAVREHPDYRVVFTGHSLGGALATVAGADLRGNGYDIDVFSYGAPRVGNRAFAEFLTTQTGGTLYRITHTNDIVPRLPPREFGYSHSSPEYWIKSGTLVPVTRNDIVKIEGIDATGGNNQPNIPDIPAHLWYFGLIGTC

SEQ ID NO: 10916 - protein, 268 aa, Thermomyces lanuginosus
EVSQDLFNQFNLFAQYSAAAYCGKDNDAPAGTNITCTGNACPEVEKADATFLYSFEDSGVGDVTGFLALDNTNKLIVLSFRGSRSIENWIGNLNFDLKEINDICSGCRGHDGFTSSWRSVADTLRQKVEDAVREHPDYRVVFTGHSLGGALATVAGADLRGNGYDIDVFSYGAPRVGNRAFAEFLTVQTGGTLYRITHTNDIVPRLPPREFGYSHSSPEYWIKSGTLVPVTRNDIVKIEGIDATGGNNQPNIPDIPAHLWYFGLIGTC

SEQ ID NO: 10917 - protein, 268 aa, Thermomyces lanuginosus
EVSQDLFNQFNLFAQYSAAAYCGKNNDAPAGTNITCTGNACPEVEKADATFLYSFEDSGVGDVTGFLALDNTNKLIVLSFRGSWSIENWIGNLNFDLKEINDICSGCRGHDGFTSSWRSVADTLRQKVEDAVREHPDYRVVFTGHSLGGALATVAGADLRGNGYDIDVFSYGAPRVGNRAFAEFLTVQTGGTLYRITHTNDIVPRLPPREFGYSHSSPEYWIKSGTLVPVTRNDIVKIEGIDATGGNNQPNIPDIPAHLWYFGLIGTC

SEQ ID NO: 10918 - protein, 268 aa, Thermomyces lanuginosus
EVSQDLFNQFNLFAQYSAAAYCGKNNDAPAGTNITCTGNACPEVEKADATFLYSFEDSGVGDVTGALALDNTNKLIVLSFRGSRSIENWIGNLNFDLKEINDICSGCRGHDGFTSSWRSVADTLRQKVEDAVREHPDYRVVFTGHSLGGALATVAGADLRGNGYDIDVFSYGAPRVGNRAFAEFLTVQTGGTLYRITHTNDIVPRLPPREFGYSHSSPEYWIKSGTLVPVTRNDIVKIEGIDATGGNNQPNIPDIPAHLWYFGLIGTC

SEQ ID NO: 10919 - protein, 268 aa, Thermomyces lanuginosus
EVSQDLFNQFNLFAQYSAAAYCGKNNDAPAGTNITCTGNACPEVEKADATFLYSFEDSGVGDVTGFLALDNTNKLIVLSFRGSRSIENWIGNLNFDLKEINDICSGCRGHDGFTSSWRSVADTLRQKVEDAVREHPDYRVVFTGHSLGGALATVAGADLRGNGYDIDVFSYGAPRVGNRAFAEFLTVQTGGTLYRITHTNDIVPRLPPREFGYSHSSPEYWIKSGTLVPVTRNDIVKIEGIDATGGNNQPWIPDIPAHLWYFGLIGTC

SEQ ID NO: 10920 - protein, 268 aa, Thermomyces lanuginosus
EVSQDLFNQFNLKAQYSAAAYCGKNNDAPAGTNITCTGNACPEVEKADATFLYSFEDSGVGDVTGFLALDNTNKLIVLSFRGSRSIENWIGNLNFDLKEINDICSGCRGHDGFTSSWRSVADTLRQKVEDAVREHPDYRVVFTGHSLGGALATVAGADLRGNGYDIDVFSYGAPRVGNRAFAEFLTVQTGGTLYRITHTNDIVPRLPPREFGYSHSSPEYWIKSGTLVPVTRNDIVKIEGIDATGGNNQPNIPDIPAHLWYFGLIGTC

SEQ ID NO: 10921 - protein, 268 aa, Thermomyces lanuginosus
EVSQDLFNQFNLFAQYSAAAYCGKNNDAPAGTNITCTGNACPEVEKADATFLYSFEDSGVGDVTGFLALDNTNKLIVLSFRGSRSIENWIGNLNFDLKEINDICSGCRGHDGFTSSWRSVADTLRQKVEDAVREHPDYRVVFTGHSLGGALATVAGADLRGNGYDIDVFSYGAPRVGNRAFAEWLTVQTGGTLYRITHTNDIVPRLPPREFGYSHSSPEYWIKSGTLVPVTRNDIVKIEGIDATGGNNQPNIPDIPAHLWYFGLIGTC

SEQ ID NO: 10922 - protein, 268 aa, Thermomyces lanuginosus
EVSQDLFNQFNLFAQYSAAAYCGKNNDAPAGTNITCTGNACPEVEKADATFLYSFEDSGVGDVTGFLALDNTNKLIVLSFRGSRSIENWIGNLNFDLKEINDICSGCRGHDGFTSSWRSVADTLRQKVEDADREHPDYRVVFTGHSLGGALATVAGADLRGNGYDIDVFSYGAPRVGNRAFAEFLTVQTGGTLYRITHTNDIVPRLPPREFGYSHSSPEYWIKSGTLVPVTRNDIVKIEGIDATGGNNQPNIPDIPAHLWYFGLIGTC

SEQ ID NO: 10923 - protein, 268 aa, Thermomyces lanuginosus
EVSQDLFNQFNLTAQYSAAAYCGKNNDAPAGTNITCTGNACPEVEKADATFLYSFEDSGVGDVTGFLALDNTNKLIVLSFRGSRSIENWIGNLNFDLKEINDICSGCRGHDGFTSSWRSVADTLRQKVEDAVREHPDYRVVFTGHSLGGALATVAGADLRGNGYDIDVFSYGAPRVGNRAFAEFLTVQTGGTLYRITHTNDIVPRLPPREFGYSHSSPEYWIKSGTLVPVTRNDIVKIEGIDATGGNNQPNIPDIPAHLWYFGLIGTC

SEQ ID NO: 10924 - protein, 268 aa, Thermomyces lanuginosus
EVSQDLFNQFNLFAQYSAAAYCGKNNDAPAGTNITCTGNACPEVEKADATFLYSFEDSGVGDVTGFLALDNTNKLIVLSFRGSRSIENWIGNLNFDLKEINDICSGCRGHDGFTSSWRSVADTLRQKVEDAVREHPDYRVVFTGHSLGGAVATVAGADLRGNGYDIDVFSYGAPRVGNRAFAEFLTVQTGGTLYRITHTNDIVPRLPPREFGYSHSSPEYWIKSGTLVPVTRNDIVKIEGIDATGGNNQPNIPDIPAHLWYFGLIGTC

SEQ ID NO: 10925 - protein, 268 aa, Synthetic construct
EVSQDLFNQFNLFAQYSAAAYCGKNNDAPAGTNITCTGNACPEVEKADATFLYSFEDSGVGDVTGFLALDNTNKLIVLSFRGSRSIENWFGNLNFLLKKINDICSGCRGHDGFTSSWRSVADTLRQKVEDAVREHPDYRVVFTGHSLGGALATVAGADLRGNGYDIDVFSYGAPRVGNRAFAEFLTAQTGGTLYRITHTNDIVPRLPPREFGYSHSSPEYWIKSGTLVPVTRNDIVKIEGIDATGGNNQPNIPDIPAHLWYFGLIGTC

SEQ ID NO: 10926 - protein, 268 aa, Thermomyces lanuginosus
EVSQDLFNQFNLFAQYSAAAYCGKNNDRPAGTNITCTGNACPEVEKADATFLYSFEDSGVGDVTGFLALDNTNKLIVLSFRGSRSIENWIGNLNFDLKEINDICSGCRGHDGFTSSWRSVADTLRQKVEDAVREHPDYRVVFTGHSLGGALATVAGADLRGNGYDIDVFSYGAPRVGNRAFAEFLTVQTGGTLYRITHTNDIVPRLPPREFGYSHSSPEYWIKSGTLVPVTRNDIVKIEGIDATGGNNQPNIPDIPAHLWYFGLIGTC

SEQ ID NO: 10927 - protein, 268 aa, Thermomyces lanuginosus
EVSQDLFNQFNLFAQYSAAAYCGKNNDAPAGTNITCTGNACPEVEKADATFLYSFEDHGVGDVTGFLALDNTNKLIVLSFRGSRSIENWIGNLNFDLKEINDICSGCRGHDGFTSSWRSVADTLRQKVEDAVREHPDYRVVFTGHSLGGALATVAGADLRGNGYDIDVFSYGAPRVGNRAFAEFLTVQTGGTLYRITHTNDIVPRLPPREFGYSHSSPEYWIKSGTLVPVTRNDIVKIEGIDATGGNNQPNIPDIPAHLWYFGLIGTC

SEQ ID NO: 10928 - protein, 268 aa, Thermomyces lanuginosus
EVSQDLFNQFNLFAQYSNAAYCGKNNDAPAGTNITCTGNACPEVEKADATFLYSFEDSGVGDVTGFLALDNTNKLIVLSFRGSRSIENWIGNLNFDLKEINDICSGCRGHDGFTSSWRSVADTLRQKVEDAVREHPDYRVVFTGHSLGGALATVAGADLRGNGYDIDVFSYGAPRVGNRAFAEFLTVQTGGTLYRITHTNDIVPRLPPREFGYSHSSPEYWIKSGTLVPVTRNDIVKIEGIDATGGNNQPNIPDIPAHLWYFGLIGTC

SEQ ID NO: 10929 - protein, 268 aa, Thermomyces lanuginosus
EVSQDLFNQFNLFAQYSAAAYCGKNNDAPAGTNITCTGNACPEVEKADATFLYSFEDSGVGDVTGFLALDNTNKLIVLSFRGSRSIENWIGNLNFDLKEINDICSGCRGHDGFTSSWRSVADTLRQKVEDAVREHPDYRVVFTGHSLGGALATVAGADLRGNGYDIDVFSYGAPRVGNRAFAEFLTVQTGGTLYRITHTNDIVPRLPPREFGYSHSSPEYWIKSGTLVPVTRNDIVKIEGIDATGINNQPNIPDIPAHLWYFGLIGTC

SEQ ID NO: 10930 - protein, 268 aa, Thermomyces lanuginosus
EVSQDLFNQFNLFAQYSAAAYCGKNNDAPAGTNITCTGNACPEVEKADATFLYSFEDSGVGDVTLFLALDNTNKLIVLSFRGSRSIENWIGNLNFDLKEINDICSGCRGHDGFTSSWRSVADTLRQKVEDAVREHPDYRVVFTGHSLGGALATVAGADLRGNGYDIDVFSYGAPRVGNRAFAEFLTVQTGGTLYRITHTNDIVPRLPPREFGYSHSSPEYWIKSGTLVPVTRNDIVKIEGIDATGGNNQPNIPDIPAHLWYFGLIGTC

SEQ ID NO: 10931 - protein, 268 aa, Thermomyces lanuginosus
EVSQDLFNQFNLFAQYSAAAYCGKNNDAVAGTNITCTGNACPEVEKADATFLYSFEDSGVGDVTGFLALDNTNKLIVLSFRGSRSIENWIGNLNFDLKEINDICSGCRGHDGFTSSWRSVADTLRQKVEDAVREHPDYRVVFTGHSLGGALATVAGADLRGNGYDIDVFSYGAPRVGNRAFAEFLTVQTGGTLYRITHTNDIVPRLPPREFGYSHSSPEYWIKSGTLVPVTRNDIVKIEGIDATGGNNQPNIPDIPAHLWYFGLIGTC

SEQ ID NO: 10932 - protein, 268 aa, Thermomyces lanuginosus
EVSQDLFNQFNLFAQYSAAAYCGKNNDAPAGTNITCTGNACPEVEKADATFLYSFEDSGVGDVTGFLALDNTNKLIVLSFRGSRSIENWIGNLNFDLKEINDICSGCRGHDGFTSSWRSVADTLRQKVEDAVREHPDYRVVFTGHSLGGALATVAGADLRGNGYDIDVFSYGAPRVGNRAFAEFLTVQTGGTLYRITHTNDIVPRLPPREFGYSHSSPEYGIKSGTLVPVTRNDIVKIEGIDATGGNNQPNIPDIPAHLWYFGLIGTC

SEQ ID NO: 10933 - protein, 268 aa, Thermomyces lanuginosus
EVSQDLFNQFNLFAQYSAAAYCGKNNDAPAGTNITCTGNACPEVEKADATFLYSFEDSGVGDVTGFLALDNTNKLIVLSFRGSRSIENWIGNLNFDLKEINDICSGCRGHDGFTSSWRSVAATLRQKVEDAVREHPDYRVVFTGHSLGGALATVAGADLRGNGYDIDVFSYGAPRVGNRAFAEFLTVQTGGTLYRITHTNDIVPRLPPREFGYSHSSPEYWIKSGTLVPVTRNDIVKIEGIDATGGNNQPNIPDIPAHLWYFGLIGTC

SEQ ID NO: 10934 - protein, 268 aa, Thermomyces lanuginosus
EVSQDLFNQFNLFAQYSAAACCGKNNDAPAGTNITCTGNACPEVEKADATFLYSFEDSGVGDVTGFLALDNTNKLIVLSFRGSRSIENWIGNLNFDLKEINDICSGCRGHDGFTSSWRSVADTLRQKVEDAVREHPDYRVVFTGHSLGGALATVAGADLRGNGYDIDVFSYGAPRVGNRAFAEFLTVQTGGTLYRITHTNDIVPRLPPREFGYSHSSPEYWIKSGTLVPVTRNDIVKIEGIDATGGNNQPNIPDIPAHLWYFGLIGTC

SEQ ID NO: 10935 - protein, 268 aa, Thermomyces lanuginosus
EVSQDLFNQFNLFAQYSAAAYCGKNNDAPAGTNITCTGNACPEVEKADATFLYSFEDSGVGDVTGFLALDNTNKLIVLSFRGSRSIENWIGNLNFDLKEINDICSGCRGHDGFTSSWRSVADTLRQKVEFAVREHPDYRVVFTGHSLGGALATVAGADLRGNGYDIDVFSYGAPRVGNRAFAEFLTVQTGGTLYRITHTNDIVPRLPPREFGYSHSSPEYWIKSGTLVPVTRNDIVKIEGIDATGGNNQPNIPDIPAHLWYFGLIGTC

SEQ ID NO: 10936 - protein, 268 aa, Thermomyces lanuginosus
EVSQDLFNQFNLFAQYSAAAYCGKNNDAPAGTNITCTGNACPEVEKADATFLYSWEDSGVGDVTGFLALDNTNKLIVLSFRGSRSIENWIGNLNFDLKEINDICSGCRGHDGFTSSWRSVADTLRQKVEDAVREHPDYRVVFTGHSLGGALATVAGADLRGNGYDIDVFSYGAPRVGNRAFAEFLTVQTGGTLYRITHTNDIVPRLPPREFGYSHSSPEYWIKSGTLVPVTRNDIVKIEGIDATGGNNQPNIPDIPAHLWYFGLIGTC

SEQ ID NO: 10937 - protein, 268 aa, Thermomyces lanuginosus
EVSQDLFNQFNLFAQYSAAAYCGKNNDAPAGTNITCTGNACPEVEKADATFLYSFEDSGVGDVTGFLALDNTNKLIVLSFRGSRSIENWIGNLNFDLKEINDICSGCRGHDGFTSSWRSVADTLRQKVEDAVREHPDYRVVFTGHSLGGALATVAGADLRGNGYDIDVFSYGAPRVGNRAFAEFLTVQTGGTLYRITHTNDIVPRLPPREFGYSHSSPEYWIKSGTLVPVTRNDIVKIEGIDAAGGNNQPNIPDIPAHLWYFGLIGTC

SEQ ID NO: 10938 - protein, 268 aa, Thermomyces lanuginosus
EVSQDLFNQFNLFAQYSAAAYCGKNNDAPAGTNITCTGNACPEVEKADATFLYSFEDSGVGDVTGFLALDNTNKLIVLSFRGSRSIENWIGNLNFDLKEINDICSGCRGHDGFTSSWRSVADTLRQKVEDAVREHPDYRVVFTGHSLGGANATVAGADLRGNGYDIDVFSYGAPRVGNRAFAEFLTVQTGGTLYRITHTNDIVPRLPPREFGYSHSSPEYWIKSGTLVPVTRNDIVKIEGIDATGGNNQPNIPDIPAHLWYFGLIGTC

SEQ ID NO: 10939 - protein, 268 aa, Thermomyces lanuginosus
EVSQDLFNQFNLFAQYSAAAYCGKNNDAPAGTNITCTGNACPTVEKADATFLYSFEDSGVGDVTGFLALDNTNKLIVLSFRGSRSIENWIGNLNFDLKEINDICSGCRGHDGFTSSWRSVADTLRQKVEDAVREHPDYRVVFTGHSLGGALATVAGADLRGNGYDIDVFSYGAPRVGNRAFAEFLTVQTGGTLYRITHTNDIVPRLPPREFGYSHSSPEYWIKSGTLVPVTRNDIVKIEGIDATGGNNQPNIPDIPAHLWYFGLIGTC

SEQ ID NO: 10940 - protein, 268 aa, Thermomyces lanuginosus
EVSQDLFNQFNLFAQYSAAAYCGKNNDAPAGTNITCTGNACPEVEKADATFLYSFEDSGVGDVTGFLALDNTNKLIVLSFRGSRSIENWIGNLNFDLKEINDICSGCRGHDGFTSSWRSVADTLRQKVEDAVREHPDYREVFTGHSLGGALATVAGADLRGNGYDIDVFSYGAPRVGNRAFAEFLTVQTGGTLYRITHTNDIVPRLPPREFGYSHSSPEYWIKSGTLVPVTRNDIVKIEGIDATGGNNQPNIPDIPAHLWYFGLIGTC

SEQ ID NO: 10941 - protein, 268 aa, Thermomyces lanuginosus
EVSQDLFNQFNLFAQYSAAAYCGKNNDAPAGTNITCTGNACPEVEKADATFLYSFEDSGVGDVTGFLALDNTNKLIVLSFRGSRSIENWIGNLNFDLKEINDICSGCRGHDGFTSSWRSVADTLRQKVEDAVREHPDYRVVFTGHSLGGALATVAGADLRGNGYDIDVFSYGAPRVGNRAFAEFLTVQTDGTLYRITHTNDIVPRLPPREFGYSHSSPEYWIKSGTLVPVTRNDIVKIEGIDATGGNNQPNIPDIPAHLWYFGLIGTC

SEQ ID NO: 10942 - protein, 268 aa, Thermomyces lanuginosus
EVSQDLFNQFNLFAQYSAAAYCGKNNDAPAGTNITCTGNACPEVEKADATFLYSFEDSGVGDVTGFLALDNTNKLIVLSFRGSRSIENWIGNLNFDLKEINDICSGCRGHDGFTSSWRSVADTLRQKVEDAVREHPDYRVVFTGHSLGGALATVAGADLRGNGYDIDVFSYGAPRVGNRAFAEFLTVTTGGTLYRITHTNDIVPRLPPREFGYSHSSPEYWIKSGTLVPVTRNDIVKIEGIDATGGNNQPNIPDIPAHLWYFGLIGTC

SEQ ID NO: 10943 - protein, 268 aa, Thermomyces lanuginosus
EVSQDLFNQFNLFAQYSAAAYCGKNNDAPAGTNITCTGNACPEVEKADATFLYSFEDSGVGDVTGFLALDNTNKLIVLSFRGSRSIENWIGNLNFDLKEINDICSGCRGHDGFTSSWRSVADTLRQKVEDAVREHPDYRVVFTGHSLGGALATVAGADLRGNGYDIDVFSYGAPRVGNRAFAEFLTVQTGGTLYRITHTNDIXPRLPPREFGYSHSSPEYWIKSGTLVPVTRNDIVKIEGIDATGGNNQPNIPDIPAHLWYFGLIGTC

SEQ ID NO: 10944 - protein, 268 aa, Thermomyces lanuginosus
EVSQDLFNQFNLFAQYSAAQYCGKNNDAPAGTNITCTGNACPEVEKADATFLYSFEDSGVGDVTGFLALDNTNKLIVLSFRGSRSIENWIGNLNFDLKEINDICSGCRGHDGFTSSWRSVADTLRQKVEDAVREHPDYRVVFTGHSLGGALATVAGADLRGNGYDIDVFSYGAPRVGNRAFAEFLTVQTGGTLYRITHTNDIVPRLPPREFGYSHSSPEYWIKSGTLVPVTRNDIVKIEGIDATGGNNQPNIPDIPAHLWYFGLIGTC

SEQ ID NO: 10945 - protein, 268 aa, Thermomyces lanuginosus
EVRQDLFNQFNLFAQYSAAAYCGKNNDAPAGTNITCTGNACPEVEKADATFLYSFEDSGVGDVTGFLALDNTNKLIVLSFRGSRSIENWIGNLNFDLKEINDICSGCRGHDGFTSSWRSVADTLRQKVEDAVREHPDYRVVFTGHSLGGALATVAGADLRGNGYDIDVFSYGAPRVGNRAFAEFLTVQTGGTLYRITHTNDIVPRLPPREFGYSHSSPEYWIKSGTLVPVTRNDIVKIEGIDATGGNNQPNIPDIPAHLWYFGLIGTC

SEQ ID NO: 10946 - protein, 268 aa, Thermomyces lanuginosus
EVSQDLFNQFNLFAQYSAAAYCGKNNDAPAGTNITCTGNACPEVEKADATFLYSFEDSGVGDVTGFLALDNTNKLIVLSFRGSRSIENWIGNLNFDLKEINDICSGCRGHDGFTSSWRSVADTLRQKVEDAVREHPDYRVVFTGHSLGGALATVAGADLRGNGYDIDVFSYGAPRVGNRAFAEFLTVQTGGTLYRITHTNDIVPRLPPREFGYSHSSPEYWIKSGTLVPVTRNDIWKIEGIDATGGNNQPNIPDIPAHLWYFGLIGTC

SEQ ID NO: 10947 - protein, 268 aa, Thermomyces lanuginosus
EVSQDLFNQFNLFAQYSAAAYCGKNNDAPAGTNITCTGNACPEVEKADATFLYSFEDSGVGDVTGFLALDNTNKLIVLSFRGSRSIENWIGNLNFDLKEINDICSGCRGHDGFTSSWRSVADTLRQKVEDAVREHPDYRCVFTGHSLGGALATVAGADLRGNGYDIDVFSYGAPRVGNRAFAEFLTVQTGGTLYRITHTNDIVPRLPPREFGYSHSSPEYWIKSGTLVPVTRNDIVKIEGIDATGGNNQPNIPDIPAHLWYFGLIGTC

SEQ ID NO: 10948 - protein, 268 aa, Thermomyces lanuginosus
EVSQDLFNQFNLFAQYSAAAYCGKNNDAPAGTNITCTGNACPEVEKADATFLYSFEDSGVGDVTGFLALDNTNKLIVLSFRGSRSIENWIGNLNFDLKEINDICSHCRGHDGFTSSWRSVADTLRQKVEDAVREHPDYRVVFTGHSLGGALATVAGADLRGNGYDIDVFSYGAPRVGNRAFAEFLTVQTGGTLYRITHTNDIVPRLPPREFGYSHSSPEYWIKSGTLVPVTRNDIVKIEGIDATGGNNQPNIPDIPAHLWYFGLIGTC

SEQ ID NO: 10949 - protein, 268 aa, Thermomyces lanuginosus
EVSQDLFNQFNLFAQYSAAAYCGKNNDAPAGTNITCTGNACPEVEKADATFLYSFEDSGVGDVTGFLALDNTNKLIVLSFRGSRSIENWIGNLNFDLKEINDICSGCRGHDGFTSSWRSVADTLRQKVEDAVREHPMYRVVFTGHSLGGALATVAGADLRGNGYDIDVFSYGAPRVGNRAFAEFLTVQTGGTLYRITHTNDIVPRLPPREFGYSHSSPEYWIKSGTLVPVTRNDIVKIEGIDATGGNNQPNIPDIPAHLWYFGLIGTC

SEQ ID NO: 10950 - protein, 268 aa, Thermomyces lanuginosus
EVSQDLFNQFNLFAQYSAAAYCGKNNDAPAGTNITCTGNACPEVEKADATFLYSFEDSGVGDVTGFLALDNTNKLIVLSFRGSRSIENWIGNLNFDLKEINDICSGCRGHDGFTSSWRSVADTLRQKVEDAVREHPDYRVVFTGHSLGGALATVAGADLRGNGYDIDVFSYGAPRVGNRAFAEFLTVQTGGTLYRITHTNDIVPRLPPHEFGYSHSSPEYWIKSGTLVPVTRNDIVKIEGIDATGGNNQPNIPDIPAHLWYFGLIGTC

SEQ ID NO: 10951 - protein, 268 aa, Thermomyces lanuginosus
EVSQDLFNQFNLFAQYSAAAYCGKNNDAPAGTNITCTGNACPEVEKADATFLYSFEDSGVGDVTGFLALDNTNKLIVLSFRGSRSIENWIGNLNFDLKEINDICSGCRGHDGFTSSWRSVADTLRQKVEDAVREHPDYRVVFTGHSLGGALATVAGADLRGNGYDIDVFSYGAPRVGNVAFAEFLTVQTGGTLYRITHTNDIVPRLPPREFGYSHSSPEYWIKSGTLVPVTRNDIVKIEGIDATGGNNQPNIPDIPAHLWYFGLIGTC

SEQ ID NO: 10952 - protein, 268 aa, Thermomyces lanuginosus
EVSQDLFNQFNLFAQYSAIAYCGKNNDAPAGTNITCTGNACPEVEKADATFLYSFEDSGVGDVTGFLALDNTNKLIVLSFRGSRSIENWIGNLNFDLKEINDICSGCRGHDGFTSSWRSVADTLRQKVEDAVREHPDYRVVFTGHSLGGALATVAGADLRGNGYDIDVFSYGAPRVGNRAFAEFLTVQTGGTLYRITHTNDIVPRLPPREFGYSHSSPEYWIKSGTLVPVTRNDIVKIEGIDATGGNNQPNIPDIPAHLWYFGLIGTC

SEQ ID NO: 10953 - protein, 268 aa, Thermomyces lanuginosus
EVSQDLFNQFNLFAQYSAAAYCGKNNDAPAGTNITCTGNACPEVEKADATFLYSFEDSGVGDVTGFLALDNTNKLIVLSFRGSRSIENWFGNLNFDLKEINDICSGCRGHDGFTSSWRSVADTLRQKVEDAVREHPDYRVVFTGHSLGGALATVAGADLRGNGYDIDVFSYGAPRVGNRAFAEFLTVQTGGTLYRITHTNDIVPRLPPREFGYSHSSPEYWIKSGTLVPVTRNDIVKIEGIDATGGNNQPNIPDIPAHLWYFGLIGTC

SEQ ID NO: 10954 - protein, 268 aa, Thermomyces lanuginosus
EVSQDLFNQFNLFAQYSAAAYCGKNNDAPAGTNITCTGNACPEVEKADATFLYSFEDSGVGDVTGFLALDNTNKLIVLSFRGSRSIENWIGNLNFDLKEINDICSGCRGHDGFTSSWRSVADTLRQKVEDAVREHPDYRVVFTGHSLGGALATVAGADLRGNGYDIDVFSYGAPRVGNRAFAEFLTVQTGGTLYRITHTNDIVPRLPPREFGYSHSSPEYWIKSGTLVPVTRNDIVKIEGIDATGGNNQPNIPDISAHLWYFGLIGTC

SEQ ID NO: 10955 - protein, 268 aa, Thermomyces lanuginosus
EVSQDLFNQFNLFAQYSAAAYCGKNNDAPAGTNITCTGNACPEVEKADATFLYSFEDSGVGDVTGFLALDNTNKLIVLSFRGSRSIGNWIGNLNFDLKEINDICSGCRGHDGFTSSWRSVADTLRQKVEDAVREHPDYRVVFTGHSLGGALATVAGADLRGNGYDIDVFSYGAPRVGNRAFAEFLTVQTGGTLYRITHTNDIVPRLPPREFGYSHSSPEYWIKSGTLVPVTRNDIVKIEGIDATGGNNQPNIPDIPAHLWYFGLIGTC

SEQ ID NO: 10956 - protein, 268 aa, Thermomyces lanuginosus
EVSQDLFNQFNLFAQYSAAAYCGKNNDAPAGTNITCTGNACPEVEKADATFLYSFEDSGVGDVTGFLALDNTNKLIVLSFRGSRSIENWIGNLNFDLKEINDICSGCRGHDGFTSSWRSVADTLRQKVEDAVREHPDYRVVFTGHSLGGALATVAGADLRGNGYDGDVFSYGAPRVGNRAFAEFLTVQTGGTLYRITHTNDIVPRLPPREFGYSHSSPEYWIKSGTLVPVTRNDIVKIEGIDATGGNNQPNIPDIPAHLWYFGLIGTC

SEQ ID NO: 10957 - protein, 268 aa, Thermomyces lanuginosus
EVSQDLFNQFNLFAQYSAAAYCGKNNDAPAGTNITCTGNACPEVEKADATFLYSFEDSGVGDVTGFLALDNTNKLIVLSFRGSRSIENWIGNLNFDLKEINDICSGCRGHDGFTSSWRSVADTLRQKVEDAVREHPDFRVVFTGHSLGGALATVAGADLRGNGYDIDVFSYGAPRVGNRAFAEFLTVQTGGTLYRITHTNDIVPRLPPREFGYSHSSPEYWIKSGTLVPVTRNDIVKIEGIDATGGNNQPNIPDIPAHLWYFGLIGTC

SEQ ID NO: 10958 - protein, 268 aa, Synthetic construct
EVSQDLFNQFNLFAQYSAAAYCGKNNDAPAGTNITCTGNACPEVEKADATFLYSFEDSGVGDVTGFLALDNTNKLIVLSFRGSRSIENWIGNLNFDLKEINKICSGCRGHDGFTSSWRSVADTLRQKVEDAVREHPDYRVVFTGHSLGGALATVAGADLRGNGYDIDVFSYGAPRVGNRAFAEFLTVQTGGTLYRITHTNDIVPRLPPREFGYSHSSPEYWIKSGTLVPVTRNDIVKIEGIDATGGNNQPNIPDIPAHLWYFGLIGTC

SEQ ID NO: 10959 - protein, 268 aa, Thermomyces lanuginosus
EVSQDLFNQFNLFAQYSAAAYCGKNNDAPAGTNITCTGNACPEVEKADATFLYSFEDSGVGDVTGFLALDNTNKLIVLSFRGSRSIENWIGNLNFDLKEINDICAGCRGHDGFTSSWRSVADTLRQKVEDAVREHPDYRVVFTGHSLGGALATVAGADLRGNGYDIDVFSYGAPRVGNRAFAEFLTVQTGGTLYRITHTNDIVPRLPPREFGYSHSSPEYWIKSGTLVPVTRNDIVKIEGIDATGGNNQPNIPDIPAHLWYFGLIGTC

SEQ ID NO: 10960 - protein, 268 aa, Thermomyces lanuginosus
EVSQDLFNQFNLFAQYSAAAYCGKNNDAPAGTNITCTGNACPEVEKADATFLYSFEDSGVGDVTGFLALDNTNKLIVLSFRGSRSIENWIGNLNFDLKEINDICSGCRGHDGFTSSWRSVADTLRQKVEDAVREHPDYRVVFAGHSLGGALATVAGADLRGNGYDIDVFSYGAPRVGNRAFAEFLTVQTGGTLYRITHTNDIVPRLPPREFGYSHSSPEYWIKSGTLVPVTRNDIVKIEGIDATGGNNQPNIPDIPAHLWYFGLIGTC

SEQ ID NO: 10961 - protein, 268 aa, Thermomyces lanuginosus
EVSQDLFNQFNLFAQYSAAAYCGKNNDAPAGTNITCTGNACPEVEKADATFLYSFEDSGVGDVTGFLALDNTNKLIVLSFRGSRSIENWIGNLNFDLKEINDICSGCRGHDGFTSSWRSVADTLRQKVEDQVREHPDYRVVFTGHSLGGALATVAGADLRGNGYDIDVFSYGAPRVGNRAFAEFLTVQTGGTLYRITHTNDIVPRLPPREFGYSHSSPEYWIKSGTLVPVTRNDIVKIEGIDATGGNNQPNIPDIPAHLWYFGLIGTC

SEQ ID NO: 10962 - protein, 268 aa, Thermomyces lanuginosus
EVSQDLFNQFNLFAQYSAAAYCGKNNDAPAGTNITCTGNACPEVEKADATFLYSFEDSGVGDVTGFLALDNTNKLIVLSFRGSRSIENWIGNLNFXLKEINDICSGCRGHDGFTSSWRSVADTLRQKVEDAVREHPDYRVVFTGHSLGGALATVAGADLRGNGYDIDVFSYGAPRVGNRAFAEFLTVQTGGTLYRITHTNDIVPRLPPREFGYSHSSPEYWIKSGTLVPVTRNDIVKIEGIDATGGNNKPNIPDIPAHLWYFGLIGTC

SEQ ID NO: 10963 - protein, 268 aa, Thermomyces lanuginosus
EVSQDLFNQFNLFAQYSAAAYCGKNNDAPAGTNITCTGNACPEVEKADATFLYSFEDSGVGAVTGFLALDNTNKLIVLSFRGTRSIENWIGNLNFWLKEINDICSGCRGHDGFTSSWRSVADTLRQKVEDAVREHPDYRVVFTGHSLGGALATVAGADLRGNGYDIDVFSYGAPRVGNRAFAEFLTVQTGGTLYRITHTNDIVPRLPPREFGYSHSSPEYWIKSGTLVPVTRNDIVKIEGIDATGGNNQPNIPDIPAHLWYFGLISTC

SEQ ID NO: 10964 - protein, 268 aa, Thermomyces lanuginosus
EVSQDLFNQFNLFAQYSAAAYCGKNNDAPAGTNITCTGNACPEVEKADATFLYSFEDSGVGDVTGFLALDNTNKLIVLSFRGSRSIENWIGNLNFDLKEINDICSGCRGHDGFTSSWRSVADTLRQKVEDAVREHPDYRVVFTGHSLGGALATVAGADLRGNGYDIDVFSYGAPRVGNRAFAEFLTVQTGGTLYRITHTNDIVPRLPPREFGYSHSSPEYWIKSGTLVPVTRNDIVKIEGIDATGGNLQPNIPDIPAHLWYFGLIGTC

SEQ ID NO: 10965 - protein, 268 aa, Thermomyces lanuginosus
EVSQDLFNQFNLFAQYSAAAYCGKNNDAPAGTNITCTGNACPEVEKADATFLYSFEDSGVGDVTGFLAWDNTNKLIVLSFRGSRSIENWIGNLNFDLKEINDICSGCRGHDGFTSSWRSVADTLRQKVEDAVREHPDYRVVFTGHSLGGALATVAGADLRGNGYDIDVFSYGAPRVGNRAFAEFLTVQTGGTLYRITHTNDIVPRLPPREFGYSHSSPEYWIKSGTLVPVTRNDIVKIEGIDATGGNNQPNIPDIPAHLWYFGLIGTC

SEQ ID NO: 10966 - protein, 268 aa, Thermomyces lanuginosus
EVSQDLFNQFNLFAQYSAAAYCGKNNDAPAGTNITCTGNACPEVEKADATFLYSFEDSGVGDVTGFLALDNTNKLIVLSFRGSRSIENWIGNLNFDLKEINDICSGCRGHDGFTSSWRSVADTLRQKVEDAVREHRDYRVVFTGHSLGGALATVAGADLRGNGYDIDVFSYGAPRVGNRAFAEFLTVQTGGTLYRITHTNDIVPRLPPREFGYSHSSPEYWIKSGTLVPVTRNDIVKIEGIDATGGNNQPNIPDIPAHLWYFGLIGTC

SEQ ID NO: 10967 - protein, 268 aa, Thermomyces lanuginosus
EVSQDLFNQFNLFAQYSAAAYCGKNNDAPAGTNITCTGNACPEVEKADATFLYSFEDSGVGDVTGFLALDNTNKLIVLSFRGSRSIENWIGNLNFDLKEINDICSGCRGHDGFTSSWRSVADTLRQKVEDAVREHPDYRVVFTGHSLGGALATVAGADLRGNGYDIDVFSYGAPRVGNRAFAEFLTVQTGGTLYRITHTNDIVPRLPPREFGYSHSSPEYWIKSGTLVPVLRNDIVKIEGIDATGGNNQPNIPDIPAHLWYFGLIGTC

SEQ ID NO: 10968 - protein, 268 aa, Thermomyces lanuginosus
EVSQDLFNQFNLMAQYSAAAYCGKNNDAPAGTNITCTGNACPEVEKADATFLYSFEDSGVGDVTGFLALDNTNKLIVLSFRGSRSIENWIGNLNFDLKEINDICSGCRGHDGFTSSWRSVADTLRQKVEDAVREHPDYRVVFTGHSLGGALATVAGADLRGNGYDIDVFSYGAPRVGNRAFAEFLTVQTGGTLYRITHTNDIVPRLPPREFGYSHSSPEYWIKSGTLVPVTRNDIVKIEGIDATGGNNQPNIPDIPAHLWYFGLIGTC

SEQ ID NO: 10969 - protein, 268 aa, Thermomyces lanuginosus
EVSQDLFNQFNLFAQYSAAAYCGKNNDAPAGTNITCTGNACPEVEKADATFLYSFEDSGGGAVTGFLALDNTNKLIVLSFRGTRSIENWIGNLNFWLKEINDICSGCRGHDGFTSSWRSVADTLRQKVEDAVREHPDYRVVFTGHSLGGALATVAGADLRGNGYDIDVFSYGAPRVGNRAFAEFLTVQTGGTLYRITHTNDIVPRLPPREFGYSHSSPEYWIKSGTLVPVTRNDIVKIEGIDATGGNNQPNIPDIPAHLWYFGLIDTC

SEQ ID NO: 10970 - protein, 268 aa, Thermomyces lanuginosus
EVSQDLFNQFNLFAQYSAAAYCGKNNDAPAGTNITCTGNACPEVEKADATFLYSFEDSGVGDVTGFLALDNTNKLIVLSFRGSRSIENWIGNLNFDLKEINDICSGCRGHDGFTSSWRSVADTLQQKVEDAVREHPDYRVVFTGHSLGGALATVAGADLRGNGYDIDVFSYGAPRVGNRAFAEFLTVQTGGTLYRITHTNDIVPRLPPREFGYSHSSPEYWIKSGTLVPVTRNDIVKIEGIDATGGNNQPNIPDIPAHLWYFGLIGTC

SEQ ID NO: 10971 - protein, 268 aa, Thermomyces lanuginosus
EVSQDLFNQFNLFAQYSAAAYCGKNNDAPAGTNITCTGNACPEVEKADATFLYSFEDSGVGDVTGFLALDNTNKLIVLSFRGSRSIENWIGNLNFDLKEINDICSGCRGHDGFTSSWRSVADTLRQKHEDAVREHPDYRVVFTGHSLGGALATVAGADLRGNGYDIDVFSYGAPRVGNRAFAEFLTVQTGGTLYRITHTNDIVPRLPPREFGYSHSSPEYWIKSGTLVPVTRNDIVKIEGIDATGGNNQPNIPDIPAHLWYFGLIGTC

SEQ ID NO: 10972 - protein, 268 aa, Thermomyces lanuginosus
EVSQDLFNQFNLFAQYSAAAYCGKNNDAPAGTNITCTGNACGEVEKADATFLYSFEDSGVGDVTGFLALDNTNKLIVLSFRGSRSIENWIGNLNFDLKEINDICSGCRGHDGFTSSWRSVADTLRQKVEDAVREHPDYRVVFTGHSLGGALATVAGADLRGNGYDIDVFSYGAPRVGNRAFAEFLTVQTGGTLYRITHTNDIVPRLPPREFGYSHSSPEYWIKSGTLVPVTRNDIVKIEGIDATGGNNQPNIPDIPAHLWYFGLIGTC

SEQ ID NO: 10973 - protein, 268 aa, Thermomyces lanuginosus
EVSQDLFNQFNLFAQYSAAAYCGKNNDAPAGTNITCTGNACPEVEKADATFLYSFEDSGVGDVTGFLALDNTNKLIVLSFRGSRSIENWIGNLNFDLKEINDICSGCRGHDGFTSSWRSVADTLRQKSEDAVREHPDYRVVFTGHSLGGALATVAGADLRGNGYDIDVFSYGAPRVGNRAFAEFLTVQTGGTLYRITHTNDIVPRLPPREFGYSHSSPEYWIKSGTLVPVTRNDIVKIEGIDATGGNNQPNIPDIPAHLWYFGLIGTC

SEQ ID NO: 10974 - protein, 268 aa, Thermomyces lanuginosus
EVSQDLFNQFNLFAQYSAAAYCGKNNDAPAGTNITCTGNACPEVEKADATFLYSFEDSGVGDVTGFLALDNTNKLIVLSFRGSRSIENWIGNLNFDLKKINDICSGCRGHDGFTSSWRSVADTLRQKVEDAVREHPDYRVVFTGHSLGGALATVAGADLRGNGYDIDVFSYGAPRVGNRAFAEFLTVQTGGTLYRITHTNDIVPRLPPXEFGYSHSSPEYWIKSGTLVPVTRNDIVKIEGIDATGGNNKPNIPDIPAHLWYFGLIGTC

SEQ ID NO: 10975 - protein, 268 aa, Thermomyces lanuginosus
EVSQDLFNQFNLFAQYSAAAYCGKNNDAPAGTNITCTGNACPEVEKADATFLYSFEDSGVGDVTGFLALDNTNKLIVLSFRGSRSIENWIGNLNFDLKEINDICSGCRGHDGFTSSWRSVADTLRQKVEDAVREHPDYRVVFTGHSLGGALATVAGADLRGYGYDIDVFSYGAPRVGNRAFAEFLTVQTGGTLYRITHTNDIVPRLPPREFGYSHSSPEYWIKSGTLVPVTRNDIVKIEGIDATGGNNQPNIPDIPAHLWYFGLIGTC

SEQ ID NO: 10976 - protein, 268 aa, Thermomyces lanuginosus
EVSQDLFNQFNLFAQYSAAAYCGKNNDAPAGTNITCTGNACPEVEKADATFLYSFEDSGVGDVTGFLALDNTNKLIVLSFRGSRSIENWIGNLNFDLKEINDICSGCRGHDGFTSSWRSVADTLRQKVEDAVREHPDYRVVFTGHSLGGALATVAGADLRGNGRDIDVFSYGAPRVGNRAFAEFLTVQTGGTLYRITHTNDIVPRLPPREFGYSHSSPEYWIKSGTLVPVTRNDIVKIEGIDATGGNNQPNIPDIPAHLWYFGLIGTC

SEQ ID NO: 10977 - protein, 268 aa, Thermomyces lanuginosus
EVSQDLFNQFNLFAQYSAAAYCGKNNDAPAGTNITCTGNACPEVEKADATFLYSFEDSGVGDVTGFLALDNTNKLIVLSFRGSRSIENWIGNLNFDLKEINDICSGCRGHDGFTSSWRSVADTLRQKVEDAVREHPDYRVVFTGHSLGGALATVAGADLRGNGYDIDVFSYGAPRVGNRAFAEFLTVQTGGTLYRITHTNDIVPRLPPREFGYSHSSPEYWIKSGTLVPVTRNDIVKIEGIDATGGNNQPNAPDIPAHLWYFGLIGTC

SEQ ID NO: 10978 - protein, 268 aa, Thermomyces lanuginosus
EVSQDLFNQFNLFAQYSAAAYCGMNNDAPAGTNITCTGNACPEVEKADATFLYSFEDSGVGDVTGFLALDNTNKLIVLSFRGSRSIENWIGNLNFDLKEINDICSGCRGHDGFTSSWRSVADTLRQKVEDAVREHPDYRVVFTGHSLGGALATVAGADLRGNGYDIDVFSYGAPRVGNRAFAEFLTVQTGGTLYRITHTNDIVPRLPPREFGYSHSSPEYWIKSGTLVPVTRNDIVKIEGIDATGGNNQPNIPDIPAHLWYFGLIGTC

SEQ ID NO: 10979 - protein, 268 aa, Thermomyces lanuginosus
EVSQDLFHQFNLFAQYSAAAYCGKNNDAPAGTNITCTGNACPEVEKADATFLYSFEDSGVGDVTGFLALDNTNKLIVLSFRGSRSIENWIGNLNFDLKEINDICSGCRGHDGFTSSWRSVADTLRQKVEDAVREHPDYRVVFTGHSLGGALATVAGADLRGNGYDIDVFSYGAPRVGNRAFAEFLTVQTGGTLYRITHTNDIVPRLPPREFGYSHSSPEYWIKSGTLVPVTRNDIVKIEGIDATGGNNQPNIPDIPAHLWYFGLIGTC

SEQ ID NO: 10980 - protein, 268 aa, Thermomyces lanuginosus
EVSQDLFNQFNLFAQYSAAAYCGKNNDAPAGTNITCTGNACPIVEKADATFLYSFEDSGVGDVTGFLALDNTNKLIVLSFRGSRSIENWIGNLNFDLKEINDICSGCRGHDGFTSSWRSVADTLRQKVEDAVREHPDYRVVFTGHSLGGALATVAGADLRGNGYDIDVFSYGAPRVGNRAFAEFLTVQTGGTLYRITHTNDIVPRLPPREFGYSHSSPEYWIKSGTLVPVTRNDIVKIEGIDATGGNNQPNIPDIPAHLWYFGLIGTC

SEQ ID NO: 10981 - protein, 268 aa, Thermomyces lanuginosus
EVSQDLFNQFNLFAQYSAAAYCGKNNDAPAGTNITCTGNACPEVEKADATFLYSFEDSGVGDVTGFLALDNTNKLIVLSFRGSRSIENWIGNLNFDLKEINDICSGCRGHDGFTSSWRSVADTLRQKVEDAVREHPDYRVVFTGHSLGGALATVAGADLRGHGYDIDVFSYGAPRVGNRAFAEFLTVQTGGTLYRITHTNDIVPRLPPREFGYSHSSPEYWIKSGTLVPVTRNDIVKIEGIDATGGNNQPNIPDIPAHLWYFGLIGTC

SEQ ID NO: 10982 - protein, 268 aa, Thermomyces lanuginosus
EVSQDLFNQFNLFAQYSAAAYCGKNNDAPAGTNITCTGNACPEVEKADATFLYSFEDSGVGDVTGFLALDNTNKLIVLSFRGSRSIENWIGNLNFDLKEINDICSGCRGHDGFTSSWRSVADTLRQKVEDAVREHPDYRVVFTGHSLGGALATVAGADLRGNGYDIDVFSYGAPRVGNRAFAEFLTVQTGGTLYRITHTNDIVPRLPPREFGYSHSSPEYWIKSGTLVPVTRNDIVIIEGIDATGGNNQPNIPDIPAHLWYFGLIGTC

SEQ ID NO: 10983 - protein, 268 aa, Thermomyces lanuginosus
EVSQDLFNQFNLFAQYSAAAYCGKNNDAPAGTNITCTGNACPEVEKADATFLYSFEDSGVGDVTGFLALDNTNKLIVLSFRGSRSIENWIGNLNFDLKEINDICSGCRGHDGFTSSWRSVADTLRQKVEDAVREHPDYRVVFTGHSLGGALATVAGADLRGNGYDIDVFSYGAPRVGNRAFAEFLTVQTGGTLYRITHTNDIVPRLPPREFGYSHSSPEYWIKSGTLVPVTRNDIVKIEGIDATGGNYQPNIPDIPAHLWYFGLIGTC

SEQ ID NO: 10984 - protein, 268 aa, Thermomyces lanuginosus
EVSQDLFNQFNLFAQYSAAAYCGKNNDAPAGTNITCTGNACPEVEKADATFLYSFEDSGVGDVTGFLALDNTNKLIVLSFRGSRSIENWIGNLNFDLKEINDICSGCRGHDGFTSSWRSVADTLRQKVEDAVREHPDYRNVFTGHSLGGALATVAGADLRGNGYDIDVFSYGAPRVGNRAFAEFLTVQTGGTLYRITHTNDIVPRLPPREFGYSHSSPEYWIKSGTLVPVTRNDIVKIEGIDATGGNNQPNIPDIPAHLWYFGLIGTC

SEQ ID NO: 10985 - protein, 268 aa, Thermomyces lanuginosus
EVSQDLFNQFNLFAQYSAAAYCGKNNDAPAGTNITCTGNACPEVEKADATFLYSFEDSGVGDVTGFLALDNTNKLIVLSFRGSRSIENWIGNLNFDLKEINDICSGCRGHDGFTSSWRSVADTLRQKVEDAVREHPDYRVVFTGHSLGGALATVAGADLRGNGYDIDVFSYGAPRVGNRAFAEFLTVQTGGTLYRITHTNDIVPRLPPREFGYSHSSPEYWIKSGTLVPVTRNDIVKIEGIDATGGNNQPNKPDIPAHLWYFGLIGTC

SEQ ID NO: 10986 - protein, 268 aa, Thermomyces lanuginosus
EVSQDLFNQFNLFAQYSAAAYCGKNNDAPAGTNITCTGTACPEVEKADATFLYSFEDSGVGDVTGFLALDNTNKLIVLSFRGSRSIENWIGNLNFDLKEINDICSGCRGHDGFTSSWRSVADTLRQKVEDAVREHPDYRVVFTGHSLGGALATVAGADLRGNGYDIDVFSYGAPRVGNRAFAEFLTVQTGGTLYRITHTNDIVPRLPPREFGYSHSSPEYWIKSGTLVPVTRNDIVKIEGIDATGGNNQPNIPDIPAHLWYFGLIGTC

SEQ ID NO: 10987 - protein, 268 aa, Thermomyces lanuginosus
EVSQDLFNQFNLFAQYSAAAYCGKNNDAPAGTNITCTNNACPEVEKADATFLYSFEDSGVGDVTGFLALDNTNKLIVLSFRGSRSIENWIGNLNFDLKEINDICSGCRGHDGFTSSWRSVADTLRQKVEDAVREHPDYRVVFTGHSLGGALATVAGADLRGNGYDIDVFSYGAPRVGNRAFAEFLTVQTGGTLYRITHTNDIVPRLPPREFGYSHSSPEYWIKSGTLVPVTRNDIVKIEGIDATGGNNQPNIPDIPAHLWYFGLIGTC

SEQ ID NO: 10988 - protein, 268 aa, Thermomyces lanuginosus
EVSQDLFNQFNLFAQYSAAAYCGKNNDAPAGTNITCTGHACPEVEKADATFLYSFEDSGVGDVTGFLALDNTNKLIVLSFRGSRSIENWIGNLNFDLKEINDICSGCRGHDGFTSSWRSVADTLRQKVEDAVREHPDYRVVFTGHSLGGALATVAGADLRGNGYDIDVFSYGAPRVGNRAFAEFLTVQTGGTLYRITHTNDIVPRLPPREFGYSHSSPEYWIKSGTLVPVTRNDIVKIEGIDATGGNNQPNIPDIPAHLWYFGLIGTC

SEQ ID NO: 10989 - protein, 268 aa, Thermomyces lanuginosus
EVSQDLFNQFNLFAQYSAAAYCGKNNDAPAGTNITCTGNACPEVEKADATFLYSFEDSGVGDVTGFLALDNTNKLIVLSFRGSRSIENWIGNLNFDLKEINDICSGCRGHDGFTSSWRSVADTLRQKVEDAVREHPDYRVVFTGHSLGGALATVAGADLRGNGYYIDVFSYGAPRVGNRAFAEFLTVQTGGTLYRITHTNDIVPRLPPREFGYSHSSPEYWIKSGTLVPVTRNDIVKIEGIDATGGNNQPNIPDIPAHLWYFGLIGTC

SEQ ID NO: 10990 - protein, 268 aa, Thermomyces lanuginosus
EVSQDLFNQFNLFAQYSAAAYCGKNNDAPAGTNITCTGNACPEVEKADATFLYSFEDSGVGDVTGFLALDNTNKLIVLSFRGSRSIENWIGNLNFDLKEINDICSGCRGHDGFTSSWRSVADTLRQKVEDAVREHPDYRVVFTGHSLGGALATVAGADLRGNGYDIDVFSYGAPRVGNRAFAEFLTVQTHGTLYRITHTNDIVPRLPPREFGYSHSSPEYWIKSGTLVPVTRNDIVKIEGIDATGGNNQPNIPDIPAHLWYFGLIGTC

SEQ ID NO: 10991 - protein, 268 aa, Thermomyces lanuginosus
EVSQDLFNQFNLFAQYSAAAYCGKNNDAPAGTNITCTGNACPEVEKADATFLESFEDSGVGDVTGFLALDNTNKLIVLSFRGSRSIENWIGNLNFDLKEINDICSGCRGHDGFTSSWRSVADTLRQKVEDAVREHPDYRVVFTGHSLGGALATVAGADLRGNGYDIDVFSYGAPRVGNRAFAEFLTVQTGGTLYRITHTNDIVPRLPPREFGYSHSSPEYWIKSGTLVPVTRNDIVKIEGIDATGGNNQPNIPDIPAHLWYFGLIGTC

SEQ ID NO: 10992 - protein, 268 aa, Thermomyces lanuginosus
EVSQDLFNQFNLFAQYSAAAYCGKNNDAPAGTNITCTGNACPEVEKADATFLYSFEDSGVGDVTGFLALDNTNKLIVLSFRGSRSIENWIGNLNFDLKEINDICSGCRGHDGFTSSWRSVADTLRQKVEDAVREHPDYRVVFTGHSLGGALATVAGADLRGNGYDIDVFSYGAPRVGNRAFAEFLTVQTGGTLYRITHTNDIVPRLPPREFGYSHSSPEYWIKSGTLVPVTRNDIVKIEGIDATGGNNQPNIPDIPAHNWYFGLIGTC

SEQ ID NO: 10993 - protein, 268 aa, Thermomyces lanuginosus
ELSQDLFNQFNLFAQYSAAAYCGKNNDAPAGTNITCTGNACPEVEKADATFLYSFEDSGVGDVTGFLALDNTNKLIVLSFRGSRSIENWIGNLNFDLKEINDICSGCRGHDGFTSSWRSVADTLRQKVEDAVREHPDYRVVFTGHSLGGALATVAGADLRGNGYDIDVFSYGAPRVGNRAFAEFLTVQTGGTLYRITHTNDIVPRLPPREFGYSHSSPEYWIKSGTLVPVTRNDIVKIEGIDATGGNNQPNIPDIPAHLWYFGLIGTC

SEQ ID NO: 10994 - protein, 268 aa, Thermomyces lanuginosus
EVSQDLFNQFNLFAQYSAAAYCGKNNDAPAGTNITCTGNACPEVEKADATFLYSFEDSGVGDVTGFLALDNTNKLIVLSFRGSRSIENWITNLNFDLKRIRDICSGCRGHDGFTSSWRSVADTLRQKVEDAVREHPDYRVVFTGHSLGGALATVAGADLRGNGYDIDVFSYGAPRVGNRAFAEFLTVQTGGTLYRITHTNDIVPRLPPREFGYSHSSPEYWIKSGTLVPVTRNDIVKIEGIDATGGNNQPNIPDIPAHLWYFGLIGTC

SEQ ID NO: 10995 - protein, 268 aa, Thermomyces lanuginosus
EVSQDLFNQFNLFAQYSAAAYCGKNNDAPAGTNITCTGNACPEVEKADATFLYSFEDSGVGDVTGFLALDNTNKLIVLSFRGSRQIENWIGNLNFDLKEINDICSGCRGHDGFTSSWRSVADTLRQKVEDAVREHPDYRVVFTGHSLGGALATVAGADLRGNGYDIDVFSYGAPRVGNRAFAEFLTVQTGGTLYRITHTNDIVPRLPPREFGYSHSSPEYWIKSGTLVPVTRNDIVKIEGIDATGGNNQPNIPDIPAHLWYFGLIGTC

SEQ ID NO: 10996 - protein, 268 aa, Thermomyces lanuginosus
EVSQDLFNQFNLFAQYSAAAYCGKNNDAPAGTNITCTGNACPEVEKADATFLYSFEDSGVGDVTGFHALDNTNKLIVLSFRGSRSIENWIGNLNFDLKEINDICSGCRGHDGFTSSWRSVADTLRQKVEDAVREHPDYRVVFTGHSLGGALATVAGADLRGNGYDIDVFSYGAPRVGNRAFAEFLTVQTGGTLYRITHTNDIVPRLPPREFGYSHSSPEYWIKSGTLVPVTRNDIVKIEGIDATGGNNQPNIPDIPAHLWYFGLIGTC

SEQ ID NO: 10997 - protein, 268 aa, Thermomyces lanuginosus
EVSQDLFNQFNLFAQYSAAAYCGKNNDAPAGTNITCTGNACPEVEKADATFLYSFEDSGVGDVTGFLALDNTNKLIVLSFRGSRSIENWIGNLNFDLKEINDICSGCRGHDGFTSSWRSVADTLRQKVEDAVREHPDYRVVFTGHSLGGALATVAGADLRGNSYDIDVFSYGAPRVGNRAFAEFLTVQTGGTLYRITHTNDIVPRLPPREFGYSHSSPEYWIKSGTLVPVTRNDIVKIEGIDATGGNNQPNIPDIPAHLWYFGLIGTC

SEQ ID NO: 10998 - protein, 268 aa, Thermomyces lanuginosus
EVSQDLFNQFNLFAQYSAAAYCGKNNDAPAGTNITCTGNACPEVEKADATVLYSFEDSGVGDVTGFLALDNTNKLIVLSFRGSRSIENWIGNLNFELKEINDICSGCRGHDGFTSSWRSVADTLRQKVEDAVREHPDYRVVFTGHSLGGALATVAGADLRGNGYDIDVFSYGAPRVGNRAFAEFLTVQTGGTLYRITHTNDIVPRLPPREFGYSHSSPEYWIKSGTLVPVTRNDIVKIEGIDATGGNNQPNIPDIPAHLWYFGLIGTC

SEQ ID NO: 10999 - protein, 268 aa, Thermomyces lanuginosus
EVSQDLFNQFNLFAQYSAAAYCGKNNDAPAGTNITCTGNACPEVEKADATFLYSFEDSGVGDVTGFLALDNTNKLIVLSFRGSRSIENWIGNLNFDLKEINDICSGCRGHDGFTSSWRSVADTLRQKVEDYVREHPDYRVVFTGHSLGGALATVAGADLRGNGYDIDVFSYGAPRVGNRAFAEFLTVQTGGTLYRITHTNDIVPRLPPREFGYSHSSPEYWIKSGTLVPVTRNDIVKIEGIDATGGNNQPNIPDIPAHLWYFGLIGTC

SEQ ID NO: 11000 - protein, 268 aa, Thermomyces lanuginosus
EVSQDLFNQFNLFAQYSAAAYCGKNNDAPAGTNITCTGNACPEVEKADATFLYSFEDSGVGDVTGSLALDNTNKLIVLSFRGSRSIENWIGNLNFDLKEINDICSGCRGHDGFTSSWRSVADTLRQKVEDAVREHPDYRVVFTGHSLGGALATVAGADLRGNGYDIDVFSYGAPRVGNRAFAEFLTVQTGGTLYRITHTNDIVPRLPPREFGYSHSSPEYWIKSGTLVPVTRNDIVKIEGIDATGGNNQPNIPDIPAHLWYFGLIGTC

SEQ ID NO: 11001 - protein, 268 aa, Thermomyces lanuginosus
EVSQDLFNQFNLFAQYSAAAYCGKNNDAPAGTNITCTGNACPEVEKADATFLYSFEDSGVGDTTGFLALDNTNKLIVLSFRGSRSIENWIGNLNFDLKEINDICSGCRGHDGFTSSWRSVADTLRQKVEDAVREHPDYRVVFTGHSLGGALATVAGADLRGNGYDIDVFSYGAPRVGNRAFAEFLTVQTGGTLYRITHTNDIVPRLPPREFGYSHSSPEYWIKSGTLVPVTRNDIVKIEGIDATGGNNQPNIPDIPAHLWYFGLIGTC

SEQ ID NO: 11002 - protein, 268 aa, Thermomyces lanuginosus
EVSQDLFNQFNLFAQYSAAAYCGKNNDAPAGTNITCTGNACPEVEKADATFLYSFEDSGVGDVTGFLALDNTNKLIVLSFRGSRSIENWIGNLNFDLKEINDICSGCRGHDGFTSSWRSVADTLRQKVEDAVREHPDYRVVFTGHSLGGALATVAGADLRGNGYDIDVFSYGAPRVGNRAFAEFLTVQTGGTLYRITHTNDIVPRLPPREFGYSHSSPEYWIKSGTLVPVTRNDIVKIEGIDATGGNNQPMIPDIPAHLWYFGLIGTC

SEQ ID NO: 11003 - protein, 268 aa, Thermomyces lanuginosus
EVSQDLFLQFNLFAQYSAAAYCGKNNDAPAGTNITCTGNACPEVEKADATFLYSFEDSGVGDVTGFLALDNTNKLIVLSFRGSRSIENWIGNLNFDLKEINDICSGCRGHDGFTSSWRSVADTLRQKVEDAVREHPDYRVVFTGHSLGGALATVAGADLRGNGYDIDVFSYGAPRVGNRAFAEFLTVQTGGTLYRITHTNDIVPRLPPREFGYSHSSPEYWIKSGTLVPVTRNDIVKIEGIDATGGNNQPNIPDIPAHLWYFGLIGTC

SEQ ID NO: 11004 - protein, 268 aa, Thermomyces lanuginosus
EVSQDLFNQFNLFAQYSAAAYCGKNNDAPAGTNITCTGNACPEVEKADATFLYSFEDSGVGDVTGFLALDNTNKLIVLSFRGSRSIENWIGNLNFDLKEINDICSGCRGHDGFTSSWRSVADTLRQKVEDAQREHPDYRVVFTGHSLGGALATVAGADLRGNGYDIDVFSYGAPRVGNRAFAEFLTVQTGGTLYRITHTNDIVPRLPPREFGYSHSSPEYWIKSGTLVPVTRNDIVKIEGIDATGGNNQPNIPDIPAHLWYFGLIGTC

SEQ ID NO: 11005 - protein, 268 aa, Thermomyces lanuginosus
EVSQDLFNQFNLFAQYSAAAYCGKNNDAPAGTNITCTGNACPEVEKADATFLYSFEDSGVGDVTGFLALDNTNKLIVLSFRGSRSIENWIGNLNFDLKEINDICSGCRGHDGFTSSWRSVADTLRQKVEDAVREHPDYRVVFTGHSLGGALATVAGADLRGNGYDIDVFSYGAPRVGNRAFAEFLTVQTGGTLYRITHTNDIVPRLPPREFGYSHSSPEYWIKSGTLVPVTRNDIVKIEGIDATGGNNQPNHPDIPAHLWYFGLIGTC

SEQ ID NO: 11006 - protein, 268 aa, Thermomyces lanuginosus
EVSQDLFNQFNLFAQYSAAAYCGKNNDAPAGTNITCTGNACPEVEKADATFLYSFEDSGVGDVTGFLALDNTNKLIVLSFRGSRSIENWIGNLNFDLKEINDICSGCRGHDGFTSSWRSVADTLRQDVEDAVREHPDYRVVFTGHSLGGALATVAGADLRGNGYDIDVFSYGAPRVGNRAFAEFLTVQTGGTLYRITHTNDIVPRLPPREFGYSHSSPEYWIKSGTLVPVTRNDIVKIEGIDATGGNNQPNIPDIPAHLWYFGLIGTC

SEQ ID NO: 11007 - protein, 268 aa, Thermomyces lanuginosus
EVSQDLFNQFNLFAQYSAAAYCGKNNDAPAGTNITCTGNACPEVEKADATFLYSFEDSGVGDVTGFLALDNTNKLIVLSFRGSRSIENWIGNLNFDLKEINDICSGCRGHDGFTSSWRSVADTLRQKVEDAVREHPDYRVVFTGHSLGGALATVAGADQRGNGYDIDVFSYGAPRVGNRAFAEFLTVQTGGTLYRITHTNDIVPRLPPREFGYSHSSPEYWIKSGTLVPVTRNDIVKIEGIDATGGNNQPNIPDIPAHLWYFGLIGTC

SEQ ID NO: 11008 - protein, 268 aa, Thermomyces lanuginosus
EVSQDLFNQFNLFAQYSAAAYCGKNNDAPAGTNITCTGNACPEVEKADATFLYSFEDSGVGDVTGFLALDNTNKLIVLSFRGSRSIENWIGNLNFDLKEINDICSGCRGHDGFTSSWRSVADTLRQKVEDAVREHPDYRVVFTGHSLGGALATVAGADLRGNGYDIDVFSYGAPRVGNRAFAEFLTVQTGGTLYRITHTNDIVPDLPPREFGYSHSSPEYWIKSGTLVPVTRNDIVKIEGIDATGGNNQPNIPDIPAHLWYFGLIGTC

SEQ ID NO: 11009 - protein, 268 aa, Thermomyces lanuginosus
EVSQDLFNQFNLFAQYSAAAYCGNNNDAPAGTNITCTGNACPEVEKADATFLYSFEDSGVGDVTGFLALDNTNKLIVLSFRGSRSIENWIGNLNFDLKEINDICSGCRGHDGFTSSWRSVADTLRQKVEDAVREHPDYRVVFTGHSLGGALATVAGADLRGNGYDIDVFSYGAPRVGNRAFAEFLTVQTGGTLYRITHTNDIVPRLPPREFGYSHSSPEYWIKSGTLVPVTRNDIVKIEGIDATGGNNQPNIPDIPAHLWYFGLIGTC

SEQ ID NO: 11010 - protein, 268 aa, Thermomyces lanuginosus
EVSQDLFNQFNLFAQYSAAAYCGKNNDAPAGTNITCTGNACPEVEKADATFLYSFEDSGVGDVTGFLALDNTNKLIVLSFRGSRSIENWIGNLNFDLKEINDICSGCRGHDGFTSSWRSVADTLRQKVEDAVRLHPDYRVVFTGHSLGGALATVAGADLRGNGYDIDVFSYGAPRVGNRAFAEFLTVQTGGTLYRITHTNDIVPRLPPREFGYSHSSPEYWIKSGTLVPVTRNDIVKIEGIDATGGNNQPNIPDIPAHLWYFGLIGTC

SEQ ID NO: 11011 - protein, 268 aa, Thermomyces lanuginosus
EVSQDLFNQFNLFAQYSAAAYCGKNNDAPAGTNITCTGNACPEVEKADATFLYSFEDSGVGDVVGFLALDNTNKLIVLSFRGSRSIENWIGNLNFDLKEINDICSGCRGHDGFTSSWRSVADTLRQKVEDAVREHPDYRVVFTGHSLGGALATVAGADLRGNGYDIDVFSYGAPRVGNRAFAEFLTVQTGGTLYRITHTNDIVPRLPPREFGYSHSSPEYWIKSGTLVPVTRNDIVKIEGIDATGGNNQPNIPDIPAHLWYFGLIGTC

SEQ ID NO: 11012 - protein, 268 aa, Thermomyces lanuginosus
EVSQDLFNQFNLFAQYSAAAYCGKNNDAPAGTNITCTGNACPEVEKADATFLYSFEDSGVGDVTGFVALDNTNKLIVLSFRGSRSIENWIGNLNFDLKEINDICSGCRGHDGFTSSWRSVADTLRQKVEDAVREHPDYRVVFTGHSLGGALATVAGADLRGNGYDIDVFSYGAPRVGNRAFAEFLTVQTGGTLYRITHTNDIVPRLPPREFGYSHSSPEYWIKSGTLVPVTRNDIVKIEGIDATGGNNQPNIPDIPAHLWYFGLIGTC

SEQ ID NO: 11013 - protein, 268 aa, Thermomyces lanuginosus
EVSQDLFNQFNLFAQYSAAAYCGKNNDFPAGTNITCTGNACPEVEKADATFLYSFEDSGVGDVTGFLALDNTNKLIVLSFRGSRSIENWIGNLNFDLKEINDICSGCRGHDGFTSSWRSVADTLRQKVEDAVREHPDYRVVFTGHSLGGALATVAGADLRGNGYDIDVFSYGAPRVGNRAFAEFLTVQTGGTLYRITHTNDIVPRLPPREFGYSHSSPEYWIKSGTLVPVTRNDIVKIEGIDATGGNNQPNIPDIPAHLWYFGLIGTC

SEQ ID NO: 11014 - protein, 268 aa, Thermomyces lanuginosus
EVSQDLFNQFNLFAQYSAAAYCGKNNDAPAGTNITCTGNACPEVEKADATFLYSFEDSGVGDVTGFLALDNTNKLIVLSFRGSRSIENWIGNLNFDLKEINDICSGCRGHDGFTSSWRSVADMLRQKVEDAVREHPDYRVVFTGHSLGGALATVAGADLRGNGYDIDVFSYGAPRVGNRAFAEFLTVQTGGTLYRITHTNDIVPRLPPREFGYSHSSPEYWIKSGTLVPVTRNDIVKIEGIDATGGNNQPNIPDIPAHLWYFGLIGTC

SEQ ID NO: 11015 - protein, 268 aa, Thermomyces lanuginosus
EVSLDLFNQFNLFAQYSAAAYCGKNNDAPAGTNITCTGNACPEVEKADATFLYSFEDSGVGDVTGFLALDNTNKLIVLSFRGSRSIENWIGNLNFDLKEINDICSGCRGHDGFTSSWRSVADTLRQKVEDAVREHPDYRVVFTGHSLGGALATVAGADLRGNGYDIDVFSYGAPRVGNRAFAEFLTVQTGGTLYRITHTNDIVPRLPPREFGYSHSSPEYWIKSGTLVPVTRNDIVKIEGIDATGGNNQPNIPDIPAHLWYFGLIGTC

SEQ ID NO: 11016 - protein, 268 aa, Thermomyces lanuginosus
EVSQDLFNQFNLAAQYSAAAYCGKNNDAPAGTNITCTGNACPEVEKADATFLYSFEDSGVGDVTGFLALDNTNKLIVLSFRGSRSIENWIGNLNFDLKEINDICSGCRGHDGFTSSWRSVADTLRQKVEDAVREHPDYRVVFTGHSLGGALATVAGADLRGNGYDIDVFSYGAPRVGNRAFAEFLTVQTGGTLYRITHTNDIVPRLPPREFGYSHSSPEYWIKSGTLVPVTRNDIVKIEGIDATGGNNQPNIPDIPAHLWYFGLIGTC

SEQ ID NO: 11017 - protein, 268 aa, Thermomyces lanuginosus
EVSQDLFNQFNLFAQYSAAAYCGINNDAPAGTNITCTGNACPEVEKADATFLYSFEDSGVGDVTGFLALDNTNKLIVLSFRGSRSIENWIGNLNFDLKEINDICSGCRGHDGFTSSWRSVADTLRQKVEDAVREHPDYRVVFTGHSLGGALATVAGADLRGNGYDIDVFSYGAPRVGNRAFAEFLTVQTGGTLYRITHTNDIVPRLPPREFGYSHSSPEYWIKSGTLVPVTRNDIVKIEGIDATGGNNQPNIPDIPAHLWYFGLIGTC

SEQ ID NO: 11018 - protein, 268 aa, Thermomyces lanuginosus
EVSQDLFNRFNLFAQYSAAAYCGKNNDAPAGTNITCTGNACPEVEKADATFLYSFEDSGVGDVTGFLALDNTNKLIVLSFRGSRSIENWIGNLNFDLKEINDICSGCRGHDGFTSSWRSVADTLRQKVEDAVREHPDYRVVFTGHSLGGALATVAGADLRGNGYDIDVFSYGAPRVGNRAFAEFLTVQTGGTLYRITHTNDIVPRLPPREFGYSHSSPEYWIKSGTLVPVTRNDIVKIEGIDATGGNNQPNIPDIPAHLWYFGLIGTC

SEQ ID NO: 11019 - protein, 268 aa, Thermomyces lanuginosus
EVSQDLFNQFNLFAQYSAAAYCGKNNDAPAGTNITCTGNACPEVEKADATFLYSFEDSGVGDVTGFLALDNTNKLIVLSFRGSRSIENWIGNLNFDLKEINDICSGCRGHDGFTSSWRSVADTLRQKVEDAVREHPDYRVVFTGHSLGGALATVAGADLRGNGYDIDVFSYGAPRVGNRAFAEFLTVQKGGTLYRITHTNDIVPRLPPREFGYSHSSPEYWIKSGTLVPVTRNDIVKIEGIDATGGNNQPNIPDIPAHLWYFGLIGTC

SEQ ID NO: 11020 - protein, 268 aa, Thermomyces lanuginosus
EVSQDLFNQFNLFAQYSAAAYCGKNNDAPAGTNITCTGNACPEVEKADATFLYSFEDSGVGDVTGFLALDNTNKLIVLSFRGSRSIENWIGNLNFDLKEINDICSGCRGHDGFTSSWRSVADTLRQKVEDAVREHPDYRVVFTGHSLGGALATVAGADLRGNGYDIDVFSYGAPRVGNRAFAEFLTVQTGGTLYRITHTNDIVPRLPPREFGYSHSSPEYWIKSGTLVPVTRHDIVKIEGIDATGGNNQPNIPDIPAHLWYFGLIGTC

SEQ ID NO: 11021 - protein, 268 aa, Thermomyces lanuginosus
EVSQDLFNQFNLFAQYSAAAYCGKNNDAPAGTNITCTGNACPEVEKADATFLYSFEDSGVGDVTGFLALDNTNKLIVLSFRGSRSIENWIGNLNFDLKEINDICSGCRGHDGFTSSWRSVADTLRQKNEDAVREHPDYRVVFTGHSLGGALATVAGADLRGNGYDIDVFSYGAPRVGNRAFAEFLTVQTGGTLYRITHTNDIVPRLPPREFGYSHSSPEYWIKSGTLVPVTRNDIVKIEGIDATGGNNQPNIPDIPAHLWYFGLIGTC

SEQ ID NO: 11022 - protein, 268 aa, Thermomyces lanuginosus
EVSQDLFNQFNLFAQYSAAAYCGKNNDAPAGTNITCTGNACPEVEKADATFLYSFEDSGVGDVTGFLALDNTNKLIVLSFRGSRIIENWIGNLNFDLKEINDICSGCRGHDGFTSSWRSVADTLRQKVEDAVREHPDYRVVFTGHSLGGALATVAGADLRGNGYDIDVFSYGAPRVGNRAFAEFLTVQTGGTLYRITHTNDIVPRLPPREFGYSHSSPEYWIKSGTLVPVTRNDIVKIEGIDATGGNNQPNIPDIPAHLWYFGLIGTC

SEQ ID NO: 11023 - protein, 268 aa, Thermomyces lanuginosus
EVSQDLFNQFNLFAQYSAAAYCGKNNDAPAGTNITCTGNACPEVEKADATFLYSFEDSGVGDVTGFLALDNTNKLIVLSFRGSRSIENWIGNLNFDLKEINDICSGCRGHDGFTSSWRSVADTLRQKVEDAVREHPDYRVVFTGHSLGGALATVAGADLRGNGYDIDVFSYGAPRVGNRAFASFLTVQTGGTLYRITHTNDIVPRLPPREFGYSHSSPEYWIKSGTLVPVTRNDIVKIEGIDATGGNNQPNIPDIPAHLWYFGLIGTC

SEQ ID NO: 11024 - protein, 268 aa, Thermomyces lanuginosus
EVSQDLFNQFNLFAQYSAAAYCGKNNDAPAGTNITCTGNACPEVEKADATFLYSFEDSGVGDVTGFLALDNTNKLIVLSFRGSRSIENWIGNLNFDLKEINDICSGCRGHDGFTSSWRSVADTLRQKVEDAVREHPDYRVVFTGHSLGGALATVAGADLRGNGYDIDVFSYGAPRVGNRAFAEFLTVQTGGTLYRITHTNDIVPRLPPREFGYSHSSPEYWIKSGNLVPVTRNDIVKIEGIDATGGNNQPNIPDIPAHLWYFGLIGTC

SEQ ID NO: 11025 - protein, 268 aa, Thermomyces lanuginosus
EVSQDLFNQFNLFAQYSAAAYCGKNNDAWAGTNITCTGNACPEVEKADATFLYSFEDSGVGDVTGFLALDNTNKLIVLSFRGSRSIENWIGNLNFDLKEINDICSGCRGHDGFTSSWRSVADTLRQKVEDAVREHPDYRVVFTGHSLGGALATVAGADLRGNGYDIDVFSYGAPRVGNRAFAEFLTVQTGGTLYRITHTNDIVPRLPPREFGYSHSSPEYWIKSGTLVPVTRNDIVKIEGIDATGGNNQPNIPDIPAHLWYFGLIGTC

SEQ ID NO: 11026 - protein, 268 aa, Thermomyces lanuginosus
EVSQDLFNQFNLFAQYSAAAYCGKNNDAPAGTNITCTGNACPEVEKADATFLYPFEDSGVGDVTGFLALDNTNKLIVLSFRGSRSIENWIGNLNFDLKEINDICSGCRGHDGFTSSWRSVADTLRQKVEDAVREHPDYRVVFTGHSLGGALATVAGADLRGNGYDIDVFSYGAPRVGNRAFAEFLTVQTGGTLYRITHTNDIVPRLPPREFGYSHSSPEYWIKSGTLVPVTRNDIVKIEGIDATGGNNQPNIPDIPAHLWYFGLIGTC

SEQ ID NO: 11027 - protein, 268 aa, Thermomyces lanuginosus
EVSQDLFNQFNLFAQYSAAAYCGKNNDAPAGTNITCTGNACPEVEKADATFLYSFEDSGVGDVTGFLALDNTNKLIVLSFRGSRSIENWIGNLNFDLKEINDICSGCRGHDGFTSSWRSVADTLRQKVEDAVREHPDYRVVFTGHSLGGALATVAGADLRGDGYDIDVFSYGAPRVGNRAFAEFLTVQTGGTLYRITHTNDIVPRLPPREFGYSHSSPEYWIKSGTLVPVTRNDIVKIEGIDATGGNNQPNIPDIPAHLWYFGLIGTC

SEQ ID NO: 11028 - protein, 268 aa, Thermomyces lanuginosus
EVSQDLFNQFNLFAQYSAAAYCGKNNDAPAGTNITCTGNACPEVFKADATFLYSFEDSGVGDVTGFLALDNTNKLIVLSFRGSRSIENWIGNLNFDLKEINDICSGCRGHDGFTSSWRSVADTLRQKVEDAVREHPDYRVVFTGHSLGGALATVAGADLRGNGYDIDVFSYGAPRVGNRAFAEFLTVQTGGTLYRITHTNDIVPRLPPREFGYSHSSPEYWIKSGTLVPVTRNDIVKIEGIDATGGNNQPNIPDIPAHLWYFGLIGTC

SEQ ID NO: 11029 - protein, 268 aa, Thermomyces lanuginosus
EVSQDLFNQFNLFAQYSAAAYCGKNNDAPAGTNITCTGNACPEVEKADATFLYSFEDSGVGDVTGFLALDNTNKLIVLSFRGSRSIENWIGNLNWDLKEINDICSGCRGHDGFTSSWRSVADTLRQKVEDAVREHPDYRVVFTGHSLGGALATVAGADLRGNGYDIDVFSYGAPRVGNRAFAEFLTVQTGGTLYRITHTNDIVPRLPPREFGYSHSSPEYWIKSGTLVPVTRNDIVKIEGIDATGGNNQPNIPDIPAHLWYFGLIGTC

SEQ ID NO: 11030 - protein, 268 aa, Thermomyces lanuginosus
EVSQDLFNQFNLFAQYSAAAYCGKNNDAPAGTNITCTGNACPEVEKADVTFLYSFEDSGVGDVTGFLALDNTNKLIVLSFRGSRSIENWIGNLNFDLKEINDICSGCRGHDGFTSSWRSVADTLRQKVEDAVREHPDYRVVFTGHSLGGALATVAGADLRGNGYDIDVFSYGAPRVGNRAFAEFLTVQTGGTLYRITHTNDIVPRLPPREFGYSHSSPEYWIKSGTLVPVTRNDIVKIEGIDATGGNNQPNIPDIPAHLWYFGLIGTC

SEQ ID NO: 11031 - protein, 268 aa, Thermomyces lanuginosus
EVSQDLFNQFNLFAQYSAAAYCGKNNDAPAGTNITCTGNACPEVEKADATFLYSFEDSGVGDVTGFLALDNTNKLIVLSFRGSRSIENWIGNLNLDLKEINDICSGCRGHDGFTSSWRSVADTLRQKVEDAVREHPDYRVVFTGHSLGGALATVAGADLRGNGYDIDVFSYGAPRVGNRAFAEFLTVQTGGTLYRITHTNDIVPRLPPREFGYSHSSPEYWIKSGTLVPVTRNDIVKIEGIDATGGNNQPNIPDIPAHLWYFGLIGTC

SEQ ID NO: 11032 - protein, 268 aa, Thermomyces lanuginosus
EVSQDLFNQFNLFAQYSAAAYCGKNNDAMAGTNITCTGNACPEVEKADATFLYSFEDSGVGDVTGFLALDNTNKLIVLSFRGSRSIENWIGNLNFDLKEINDICSGCRGHDGFTSSWRSVADTLRQKVEDAVREHPDYRVVFTGHSLGGALATVAGADLRGNGYDIDVFSYGAPRVGNRAFAEFLTVQTGGTLYRITHTNDIVPRLPPREFGYSHSSPEYWIKSGTLVPVTRNDIVKIEGIDATGGNNQPNIPDIPAHLWYFGLIGTC

SEQ ID NO: 11033 - protein, 268 aa, Thermomyces lanuginosus
EVSQDLFNQFNLFAQYSAAAYCGKNGDAPAGTNITCTGNACPEVEKADATFLYSFEDSGVGDVTGFLALDNTNKLIVLSFRGSRSIENWIGNLNFDLKEINDICSGCRGHDGFTSSWRSVADTLRQKVEDAVREHPDYRVVFTGHSLGGALATVAGADLRGNGYDIDVFSYGAPRVGNRAFAEFLTVQTGGTLYRITHTNDIVPRLPPREFGYSHSSPEYWIKSGTLVPVTRNDIVKIEGIDATGGNNQPNIPDIPAHLWYFGLIGTC

SEQ ID NO: 11034 - protein, 268 aa, Thermomyces lanuginosus
EVTQDLFNQFNLFAQYSAAAYCGKNNDAPAGTNITCTGNACPEVEKADATFLYSFEDSGVGDVTGFLALDNTNKLIVLSFRGSRSIENWIGNLNFDLKEINDICSGCRGHDGFTSSWRSVADTLRQKVEDAVREHPDYRVVFTGHSLGGALATVAGADLRGNGYDIDVFSYGAPRVGNRAFAEFLTVQTGGTLYRITHTNDIVPRLPPREFGYSHSSPEYWIKSGTLVPVTRNDIVKIEGIDATGGNNQPNIPDIPAHLWYFGLIGTC

SEQ ID NO: 11035 - protein, 268 aa, Thermomyces lanuginosus
EVSQDLFNQFNLFAQYSAAAYCGKGNDAPAGTNITCTGNACPEVEKADATFLYSFEDSGVGDVTGFLALDNTNKLIVLSFRGSRSIENWIGNLNFDLKEINDICSGCRGHDGFTSSWRSVADTLRQKVEDAVREHPDYRVVFTGHSLGGALATVAGADLRGNGYDIDVFSYGAPRVGNRAFAEFLTVQTGGTLYRITHTNDIVPRLPPREFGYSHSSPEYWIKSGTLVPVTRNDIVKIEGIDATGGNNQPNIPDIPAHLWYFGLIGTC

SEQ ID NO: 11036 - protein, 268 aa, Thermomyces lanuginosus
EVSQDLFNQFNLFAQYSAAAYCGKNNDAPAGTNITCTGNACPEVEKADATFLYSFEDSGVGDVTGFLALDNTNKLIVLSFRGSRSIENWIGNLNFDLKEINDICSGCRGHDGFTSSWRSVADTLRQKIEDAVREHPDYRVVFTGHSLGGALATVAGADLRGNGYDIDVFSYGAPRVGNRAFAEFLTVQTGGTLYRITHTNDIVPRLPPREFGYSHSSPEYWIKSGTLVPVTRNDIVKIEGIDATGGNNQPNIPDIPAHLWYFGLIGTC

SEQ ID NO: 11037 - protein, 268 aa, Thermomyces lanuginosus
EVSQDLFNQFNLFAQYSAAAYCGKNNDAPAGTNITCTGNACPEVEKADATFLYSFEDSGVGDVTGFLALDNTNKLIVLSFRGSRSIENWIGNLNFDLKEINDICSGCRGHDGFTSSWRSVADTLRQKWEDAVREHPDYRVVFTGHSLGGALATVAGADLRGNGYDIDVFSYGAPRVGNRAFAEFLTVQTGGTLYRITHTNDIVPRLPPREFGYSHSSPEYWIKSGTLVPVTRNDIVKIEGIDATGGNNQPNIPDIPAHLWYFGLIGTC

SEQ ID NO: 11038 - protein, 268 aa, Thermomyces lanuginosus
EVSQDLFNQFNLFAQYSAAAYCGKNNDAPAGTNITCTGNACPEVEKADATFLYSFEDSGVGDVTGFLALDNTNKLIVLSFRGSRSIENWIGNLNFDLKEINDICSGCRGHDGFTSSWRSVADTLRQKLEDAVREHPDYRVVFTGHSLGGALATVAGADLRGNGYDIDVFSYGAPRVGNRAFAEFLTVQTGGTLYRITHTNDIVPRLPPREFGYSHSSPEYWIKSGTLVPVTRNDIVKIEGIDATGGNNQPNIPDIPAHLWYFGLIGTC

SEQ ID NO: 11039 - protein, 268 aa, Thermomyces lanuginosus
EVSQDLFNQFNLFAQYSAAAYCGKNNDAPAGTNITCTGNACPEVEKADATFLYHFEDSGVGDVTGFLALDNTNKLIVLSFRGSRSIENWIGNLNFDLKEINDICSGCRGHDGFTSSWRSVADTLRQKVEDAVREHPDYRVVFTGHSLGGALATVAGADLRGNGYDIDVFSYGAPRVGNRAFAEFLTVQTGGTLYRITHTNDIVPRLPPREFGYSHSSPEYWIKSGTLVPVTRNDIVKIEGIDATGGNNQPNIPDIPAHLWYFGLIGTC

SEQ ID NO: 11040 - protein, 268 aa, Thermomyces lanuginosus
EVSQDLFNQFNLFAQYSAAAYCGKNNDAPAGTNITCTGNACPEVEKADATFLYSFEDSGVGDVTGFLALDNTNKLIVLSFRGSRSIENWIGNLNFDLKEINDICSGCRGHVGFTSSWRSVADTLRQKVEDAVREHPDYRVVFTGHSLGGALATVAGADLRGNGYDIDVFSYGAPRVGNRAFAEFLTVQTGGTLYRITHTNDIVPRLPPREFGYSHSSPEYWIKSGTLVPVTRNDIVKIEGIDATGGNNQPNIPDIPAHLWYFGLIGTC

SEQ ID NO: 11041 - protein, 268 aa, Thermomyces lanuginosus
EVSQDLFNQFNLFAQYSAAAYCGKNYDAPAGTNITCTGNACPEVEKADATFLYSFEDSGVGDVTGFLALDNTNKLIVLSFRGSRSIENWIGNLNFDLKEINDICSGCRGHDGFTSSWRSVADTLRQKVEDAVREHPDYRVVFTGHSLGGALATVAGADLRGNGYDIDVFSYGAPRVGNRAFAEFLTVQTGGTLYRITHTNDIVPRLPPREFGYSHSSPEYWIKSGTLVPVTRNDIVKIEGIDATGGNNQPNIPDIPAHLWYFGLIGTC

SEQ ID NO: 11042 - protein, 268 aa, Thermomyces lanuginosus
EVSQDLFNQFNLFAQYSAAAYCGKNNDAPAGTNITCTGNACPEVEKADATFLYSFEDSGVGDVTGFLALDNTNKGIVLSFRGSRSIENWIGNLNFDLKEINDICSGCRGHDGFTSSWRSVADTLRQKVEDAVREHPDYRVVFTGHSLGGALATVAGADLRGNGYDIDVFSYGAPRVGNRAFAEFLTVQTGGTLYRITHTNDIVPRLPPREFGYSHSSPEYWIKSGTLVPVTRNDIVKIEGIDATGGNNQPNIPDIPAHLWYFGLIGTC

SEQ ID NO: 11043 - protein, 268 aa, Thermomyces lanuginosus
EVSQDLFNQFNLFAQYSAAAYCGKNNDAPAGTNITCTGNACPEVEKADAKFLYSFEDSGVGDVTGFLALDNTNKLIVLSFRGSRSIENWIGNLNFDLKEINDICSGCRGHDGFTSSWRSVADTLRQKVEDAVREHPDYRVVFTGHSLGGALATVAGADLRGNGYDIDVFSYGAPRVGNRAFAEFLTVQTGGTLYRITHTNDIVPRLPPREFGYSHSSPEYWIKSGTLVPVTRNDIVKIEGIDATGGNNQPNIPDIPAHLWYFGLIGTC

SEQ ID NO: 11044 - protein, 268 aa, Thermomyces lanuginosus
EVSQDLFNQFNLFAQYSAAAYCGKNNDAPAGTNITCTGNACPEVEKADATFLYSFEDSGVGDVTGFLALDNTNKLIVLSFRGSRSIENWIGNLNFDLKEINDICSGCRGHDGFTSSWRSVADTLRQKVEDAVREHPDYRVVFTGHSLGGALATVAGADLRGNGYDIDVFSYGAPRVGNRAFAEFLTVQTGGTLYRITHTNDIVPRLPPREWGYSHSSPEYWIKSGTLVPVTRNDIVKIEGIDATGGNNQPNIPDIPAHLWYFGLIGTC

SEQ ID NO: 11045 - protein, 268 aa, Thermomyces lanuginosus
EVSQDLFNQFNLFAQYSAAAYCGKNNDAPAGTNITCTGNACPEVEKADATFLYSFEDSGVGDVTGFLALDNTNKLIVLSFRGSRSYENWIGNLNFDLKEINDICSGCRGHDGFTSSWRSVADTLRQKVEDAVREHPDYRVVFTGHSLGGALATVAGADLRGNGYDIDVFSYGAPRVGNRAFAEFLTVQTGGTLYRITHTNDIVPRLPPREFGYSHSSPEYWIKSGTLVPVTRNDIVKIEGIDATGGNNQPNIPDIPAHLWYFGLIGTC

SEQ ID NO: 11046 - protein, 268 aa, Thermomyces lanuginosus
EVSQDLFNQFNLFAQYSAAAYCGKNNDAPAGTNITCTGNACPEVEKADATFLYSFEDSGVGDVTGFLALDNTNKLIVLSFRGSRSIENWIGNLNFDLKHINDICSGCRGHDGFTSSWRSVADTLRQKVEDAVREHPDYRVVFTGHSLGGALATVAGADLRGNGYDIDVFSYGAPRVGNRAFAEFLTVQTGGTLYRITHTNDIVPRLPPREFGYSHSSPEYWIKSGTLVPVTRNDIVKIEGIDATGGNNRPNIPDIPAHLWYFGLIGTC

SEQ ID NO: 11047 - protein, 268 aa, Thermomyces lanuginosus
EVSQDLFNQFNLFAQYSAAAYCGKNNDAPAGTNITCTGNACPEVEKADATFLYSFEDSGVGDVTGFLALDNTNKLIVLSFRGSRSIENWIGNLNFDLKEINDICSGCRGHDGFTSSWRSVADTLRQKVEDAVREHPDYRVVFTGHSLGGALATVAGADLRGNGYDIDVFSYGAPRVGNRAFAEFLTVQTGGTLYRITHTNDIVPRLPPREFGYSHSSPEYYIKSGTLVPVTRNDIVKIEGIDATGGNNQPNIPDIPAHLWYFGLIGTC

SEQ ID NO: 11048 - protein, 268 aa, Thermomyces lanuginosus
EVSQDLFNQFNLFAQYSAAAYCGKNNDAPAGTNITCTGNACPEVEKADATFLYSFEDSGVGDVTGFLALDNTNKLIVLSFRGSRSIENWIGNLNFDLKEINDICSGCRGHDGFTSSWRSVADTLRQKVEDAVREHPDYRVVFTGHSLGGALATVAGADLRGNGYDIDVFSYGAPRVGNRAFAEFLTVQTGGTLYRITHTNDIVPRLPPREFGYSHSSPEYWIQSGTLVPVTRNDIVKIEGIDATGGNNQPNIPDIPAHLWYFGLIGTC

SEQ ID NO: 11049 - protein, 268 aa, Thermomyces lanuginosus
EVSQDLFNQFNLFAQYSAAAYCGKNNDAPAGTNITCTGNACPEVEKADATFLYSFEDSGVGDVTGFLALDNTNKLIVLSFRGSRSIENWIGNLNFDLKHINDICSGCRGHDGFTSSWRSVADTLRQKVEDAVREHPDYRVVFTGHSLGGALATVAGADLRGNGYDIDVFSYGAPRVGNRAFAEFLTVQTGGTLYRITHTNDIVPRLPPREFGYSHSSPEYWIKSGTLVPVTRNDIVKIEGIDATGGNNKPNIPDIPAHLWYFGLIGTC

SEQ ID NO: 11050 - protein, 268 aa, Thermomyces lanuginosus
EVSQDLFNQFNLFAQYSAAAYCGKNNDAPAGTNITCTGNACPEVEKADATFLYSFEDSGVGDVTGFLALDNTNKNIVLSFRGSRSIENWIGNLNFDLKEINDICSGCRGHDGFTSSWRSVADTLRQKVEDAVREHPDYRVVFTGHSLGGALATVAGADLRGNGYDIDVFSYGAPRVGNRAFAEFLTVQTGGTLYRITHTNDIVPRLPPREFGYSHSSPEYWIKSGTLVPVTRNDIVKIEGIDATGGNNQPNIPDIPAHLWYFGLIGTC

SEQ ID NO: 11051 - protein, 268 aa, Thermomyces lanuginosus
EVSQDLFNQFNLFAQYSAAAYCGKNNDAPAGTNITCTGNACPEVEKADATFLYSFEDSGVGDVTGFLALDNTNKLIVLSFRGSRSIENWIGNLNFDLKEINDICSGCRGHDGFTSSWRSVADTLRQKVEDAVREHDDYRVVFTGHSLGGALATVAGADLRGNGYDIDVFSYGAPRVGNRAFAEFLTVQTGGTLYRITHTNDIVPRLPPREFGYSHSSPEYWIKSGTLVPVTRNDIVKIEGIDATGGNNQPNIPDIPAHLWYFGLIGTC

SEQ ID NO: 11052 - protein, 268 aa, Thermomyces lanuginosus
EVSQDLFNQFNLFAQYSAAAYCGKNNDAPAGTNITCTGNACPEVEKADATFLYSFEDSGVGDVTGRLALDNTNKLIVLSFRGSRSIENWIGNLNFDLKEINDICSGCRGHDGFTSSWRSVADTLRQKVEDAVREHPDYRVVFTGHSLGGALATVAGADLRGNGYDIDVFSYGAPRVGNRAFAEFLTVQTGGTLYRITHTNDIVPRLPPREFGYSHSSPEYWIKSGTLVPVTRNDIVKIEGIDATGGNNQPNIPDIPAHLWYFGLIGTC

SEQ ID NO: 11053 - protein, 268 aa, Thermomyces lanuginosus
EVSQDLFNQFNLFAQYSAAAYCGKNNDAPAGTNITCTGNACPEVEKADATFLYSFEDSGVGDVTGFLALDNTNKLIVLSFRGSRSIENWIGNLNFDLKEINDICSGCRGHDGFTSSWRSVADTLRQKVEDAVREHPDYRFVFTGHSLGGALATVAGADLRGNGYDIDVFSYGAPRVGNRAFAEFLTVQTGGTLYRITHTNDIVPRLPPREFGYSHSSPEYWIKSGTLVPVTRNDIVKIEGIDATGGNNQPNIPDIPAHLWYFGLIGTC

SEQ ID NO: 11054 - protein, 268 aa, Thermomyces lanuginosus
EVSQDLFNQFNLFAQYSAAAYCGKNNDAPAGTNITCTGNACPEVEKADATYLYSFEDSGVGDVTGFLALDNTNKLIVLSFRGSRSIENWIGNLNFDLKEINDICSGCRGHDGFTSSWRSVADTLRQKVEDAVREHPDYRVVFTGHSLGGALATVAGADLRGNGYDIDVFSYGAPRVGNRAFAEFLTVQTGGTLYRITHTNDIVPRLPPREFGYSHSSPEYWIKSGTLVPVTRNDIVKIEGIDATGGNNQPNIPDIPAHLWYFGLIGTC

SEQ ID NO: 11055 - protein, 268 aa, Thermomyces lanuginosus
EVSQDLFNQFNWFAQYSAAAYCGKNNDAPAGTNITCTGNACPEVEKADATFLYSFEDSGVGDVTGFLALDNTNKLIVLSFRGSRSIENWIGNLNFDLKEINDICSGCRGHDGFTSSWRSVADTLRQKVEDAVREHPDYRVVFTGHSLGGALATVAGADLRGNGYDIDVFSYGAPRVGNRAFAEFLTVQTGGTLYRITHTNDIVPRLPPREFGYSHSSPEYWIKSGTLVPVTRNDIVKIEGIDATGGNNQPNIPDIPAHLWYFGLIGTC

SEQ ID NO: 11056 - protein, 268 aa, Thermomyces lanuginosus
EVSQDLFNQFNLFAQYSAAAYCGKNNDAPAGTNITCTGNACPEVEKADATFLYSFEDSGVGDVTGFLALDNTNKLIVLSFRGSRSIENWIGNLNFDLKEINDICSGCRGHDGFTSSWRSVADTLRQKVEAAVREHPDYRVVFTGHSLGGALATVAGADLRGNGYDIDVFSYGAPRVGNRAFAEFLTVQTGGTLYRITHTNDIVPRLPPREFGYSHSSPEYWIKSGTLVPVTRNDIVKIEGIDATGGNNQPNIPDIPAHLWYFGLIGTC

SEQ ID NO: 11057 - protein, 268 aa, Thermomyces lanuginosus
EVSQDLFNQFNLFAQYSAAAYCGKNNDAPAGTNITCTGNACPEVEKADATFLYSFEDSGVGDVTGFLALDNTNKLIILSFRGSRSIENWIGNLNFDLKEINDICSGCRGHDGFTSSWRSVADTLRQKVEDAVREHPDYRVVFTGHSLGGALATVAGADLRGNGYDIDVFSYGAPRVGNRAFAEFLTVQTGGTLYRITHTNDIVPRLPPREFGYSHSSPEYWIKSGTLVPVTRNDIVKIEGIDATGGNNQPNIPDIPAHLWYFGLIGTC

SEQ ID NO: 11058 - protein, 268 aa, Thermomyces lanuginosus
EVSQDLFNQFNLFAQYSAAAYCGKNNDAPAGTNITCTGNACPEVEKADATFLYSFEDSGVGDVTGFLALDNTNKLIVLSFRGSRSIENWIGNLNFDLKEINDICSGCRGHDGFTSSWRSVADTLRQKCEDAVREHPDYRVVFTGHSLGGALATVAGADLRGNGYDIDVFSYGAPRVGNRAFAEFLTVQTGGTLYRITHTNDIVPRLPPREFGYSHSSPEYWIKSGTLVPVTRNDIVKIEGIDATGGNNQPNIPDIPAHLWYFGLIGTC

SEQ ID NO: 11059 - protein, 268 aa, Thermomyces lanuginosus
EVSQDLFNQFNLFAQYSAAAYCGKNNDAPAGTNITCTGNACPEVEKADATFLYSFEDSGVGDVTGFLALDNTNKLIVLSFRGSRSIENWIGNLNFDLKEINDICSGCRGHDGFTSSWRSVADTLRQKVEDAVREHPDYRVVFTGHSLGGALATVAGADLRGNGYDIDVFSYGAPRVGNRAFAEFLTVQTGGTLYRITHTNDIVPRLPPREFGYSHSSPEYWIKSGTLVPVTRNDIVKIEGIDATGGNNQPSIPDIPAHLWYFGLIGTC

SEQ ID NO: 11060 - protein, 268 aa, Thermomyces lanuginosus
EVSQDLFNQFNLFAQYSAAAYCGKNNDAPAGTNITCTGNACPEVEKADATFLYSFEDSGVGDVTGFLALDNTNKLIVLSFRGSRSIENWIGNLNFDLKEINDICSGCRGHDGFTSSWRSVADTLRQKVEDAVREHPDYRVVFTGHSLGGALATVAGADLRGNGYDIDVFSYGAPRVGNRAFAEFLTVQTGGTLYRITHTNDIVPRLPPTEFGYSHSSPEYWIKSGTLVPVTRNDIVKIEGIDATGGNNQPNIPDIPAHLWYFGLIGTC

SEQ ID NO: 11061 - protein, 268 aa, Thermomyces lanuginosus
EVSQDLFNQFNLFAQYSAAAYCGKNNDAPAGTNITCTGNACPEVEKADATFLYSFEDSGVGDVTGFLALDNTNKLIVLSFRGSRSIENWIGNLNFDLKRINDICSGCRGHDGFTSSWRSVADTLRQKVEDAVREHPDYRVVFTGHSLGGALATVAGADLRGNGYDIDVFSYGAPRVGNRAFAEFLTVQTGGTLYRITHTNDIVPRLPPREFGYSHSSPEYWIKSGTLVPVTRNDIVKIEGIDATGGNNKPNIPDIPAHLWYFGLIGTC

SEQ ID NO: 11062 - protein, 268 aa, Thermomyces lanuginosus
EVSQDLFNQFNLFAQYSAAAYCGKNNDAPAGTNITCTGNACPEVEKADATNLYSFEDSGVGDVTGFLALDNTNKLIVLSFRGSRSIENWIGNLNFDLKEINDICSGCRGHDGFTSSWRSVADTLRQKVEDAVREHPDYRVVFTGHSLGGALATVAGADLRGNGYDIDVFSYGAPRVGNRAFAEFLTVQTGGTLYRITHTNDIVPRLPPREFGYSHSSPEYWIKSGTLVPVTRNDIVKIEGIDATGGNNQPNIPDIPAHLWYFGLIGTC

SEQ ID NO: 11063 - protein, 268 aa, Thermomyces lanuginosus
EVSQDLFNQFNLFAQYSAAAYCGKNNDAPAGTNITCTGNACPEVEKADATFLYSFEDSGVGDVTGFLALDNTNKLIVLSFRGSRSIENWIGNLNFDLKEINDICSGCRGHDGFTSSWRSVADTLRQKVEDAVREHPDYRVVFTGHSLGGALATVAGADLRGNGYDIDVFSYGAPRVGNRAFAEFLTVQTGGTLYRITHTNDIVPRLPPREFGYSHQSPEYWIKSGTLVPVTRNDIVKIEGIDATGGNNQPNIPDIPAHLWYFGLIGTC

SEQ ID NO: 11064 - protein, 268 aa, Thermomyces lanuginosus
EVSQDLFNQFNLFAQYSAAAYCGKNNDAPAGTNITCTGNACPEVEKADATFLYSFEDSGVGDVTGFLALDNTNKLIVLSFRGSRSIENWIGNLNFDLKEINDICSGCRGHDGFTSSWRSVADTLRQKVEDAVREHPDYRVVFTGHSLGGALATVAGADLRGSGYDIDVFSYGAPRVGNRAFAEFLTVQTGGTLYRITHTNDIVPRLPPREFGYSHSSPEYWIKSGTLVPVTRNDIVKIEGIDATGGNNQPNIPDIPAHLWYFGLIGTC

SEQ ID NO: 11065 - protein, 268 aa, Thermomyces lanuginosus
EVSQDLFNQFNLFAQYSAAAYCGKNNDAPAGTNITCTGNACPEVEKADATFLYSFEDSGVGDVTGFLALDNTGKLIVLSFRGSRSIENWIGNLNFDLKEINDICSGCRGHDGFTSSWRSVADTLRQKVEDAVREHPDYRVVFTGHSLGGALATVAGADLRGNGYDIDVFSYGAPRVGNRAFAEFLTVQTGGTLYRITHTNDIVPRLPPREFGYSHSSPEYWIKSGTLVPVTRNDIVKIEGIDATGGNNQPNIPDIPAHLWYFGLIGTC

SEQ ID NO: 11066 - protein, 268 aa, Thermomyces lanuginosus
EVSQDLFNQFNLFAQYSAAAYCGKNNDAPAGTNITCTGNACPEVEKADATFLYSFEDSGVGDVTGFLALDNTNKLIVLSFRGSRSIENWIGNLNFDLKEINDICSGCRGHDGFTSSWRSVADLLRQKVEDAVREHPDYRVVFTGHSLGGALATVAGADLRGNGYDIDVFSYGAPRVGNRAFAEFLTVQTGGTLYRITHTNDIVPRLPPREFGYSHSSPEYWIKSGTLVPVTRNDIVKIEGIDATGGNNQPNIPDIPAHLWYFGLIGTC

SEQ ID NO: 11067 - protein, 268 aa, Thermomyces lanuginosus
EVSQDLFNQFNLFAQYSAAAYCGKSNDAPAGTNITCTGNACPEVEKADATFLYSFEDSGVGDVTGFLALDNTNKLIVLSFRGSRSIENWIGNLNFDLKEINDICSGCRGHDGFTSSWRSVADTLRQKVEDAVREHPDYRVVFTGHSLGGALATVAGADLRGNGYDIDVFSYGAPRVGNRAFAEFLTVQTGGTLYRITHTNDIVPRLPPREFGYSHSSPEYWIKSGTLVPVTRNDIVKIEGIDATGGNNQPNIPDIPAHLWYFGLIGTC

SEQ ID NO: 11068 - protein, 268 aa, Thermomyces lanuginosus
EVSQDLFNQFNLFAQYSAAAYCGKNNDAPAGTNITCTGNACPEVEKADATFLYSFEDSGVGDVTGFLALDNTNKLIVLSFRGSRSIENWIGNLNFDLKEINDICSGCRGHDGFTSSWRSVADTLRQKVEDAVREHPDYRVVFTGHSLGGAIATVAGADLRGNGYDIDVFSYGAPRVGNRAFAEFLTVQTGGTLYRITHTNDIVPRLPPREFGYSHSSPEYWIKSGTLVPVTRNDIVKIEGIDATGGNNQPNIPDIPAHLWYFGLIGTC

SEQ ID NO: 11069 - protein, 268 aa, Thermomyces lanuginosus
EVSQDLFNQFNLFAQYSAAAYCGTNNDAPAGTNITCTGNACPEVEKADATFLYSFEDSGVGDVTGFLALDNTNKLIVLSFRGSRSIENWIGNLNFDLKEINDICSGCRGHDGFTSSWRSVADTLRQKVEDAVREHPDYRVVFTGHSLGGALATVAGADLRGNGYDIDVFSYGAPRVGNRAFAEFLTVQTGGTLYRITHTNDIVPRLPPREFGYSHSSPEYWIKSGTLVPVTRNDIVKIEGIDATGGNNQPNIPDIPAHLWYFGLIGTC

SEQ ID NO: 11070 - protein, 268 aa, Thermomyces lanuginosus
EVSQDLFNQFNLFAQYSAAAYCGKNNDAPAGTNITCTGNACPEVEKADATFLYSFEDSGVGDVTGFLALDSTNKLIVLSFRGSRSIENWIGNLNFDLKEINDICSGCRGHDGFTSSWRSVADTLRQKVEDAVREHPDYRVVFTGHSLGGALATVAGADLRGNGYDIDVFSYGAPRVGNRAFAEFLTVQTGGTLYRITHTNDIVPRLPPREFGYSHSSPEYWIKSGTLVPVTRNDIVKIEGIDATGGNNQPNIPDIPAHLWYFGLIGTC

SEQ ID NO: 11071 - protein, 268 aa, Thermomyces lanuginosus
EVSQDLFNQFNLFAQYSAAAYCGKNNDAPAGTNITCTGNACPEVEKADATFLYSFEDSGVGDVTGFLALDNTNKLIVLSFRGSRSIENWIGNLNFDLKEINDICSGCRGHDGFTSSWRSVADTLRQKVEAAVREHPDYRVVFTGHSLGGALATVAGADLRGNGYDIDVFSYGAPRVGNRAFAEFLTVQTGGTLYRITHTNDIVPRLPPREFGYSHSSPEYWIKSGTLVPVTRNDIVKIEGIDATGGNNQPNIPDIPAHLWYFGRIGTC

SEQ ID NO: 11072 - protein, 268 aa, Thermomyces lanuginosus
EVSQDKFNQFNLFAQYSAAAYCGKNNDAPAGTNITCTGNACPEVEKADATFLYSFEDSGVGDVTGFLALDNTNKLIVLSFRGSRSIENWIGNLNFDLKEINDICSGCRGHDGFTSSWRSVADTLRQKVEDAVREHPDYRVVFTGHSLGGALATVAGADLRGNGYDIDVFSYGAPRVGNRAFAEFLTVQTGGTLYRITHTNDIVPRLPPREFGYSHSSPEYWIKSGTLVPVTRNDIVKIEGIDATGGNNQPNIPDIPAHLWYFGLIGTC

SEQ ID NO: 11073 - protein, 268 aa, Thermomyces lanuginosus
EVHQDLFNQFNLFAQYSAAAYCGKNNDAPAGTNITCTGNACPEVEKADATFLYSFEDSGVGDVTGFLALDNTNKLIVLSFRGSRSIENWIGNLNFDLKEINDICSGCRGHDGFTSSWRSVADTLRQKVEDAVREHPDYRVVFTGHSLGGALATVAGADLRGNGYDIDVFSYGAPRVGNRAFAEFLTVQTGGTLYRITHTNDIVPRLPPREFGYSHSSPEYWIKSGTLVPVTRNDIVKIEGIDATGGNNQPNIPDIPAHLWYFGLIGTC

SEQ ID NO: 11074 - protein, 268 aa, Thermomyces lanuginosus
EVSQDLFNQFNLFAQYSAAAYCGKNNDAPAGTNITCTGNACPEVEKADATFLYSFEDSGVGDVTGFLALDNTNKLIVLSFRGSRSIENWIGNLNFDLKEINDICSGCRGHDGFTSSWRSVADTLRQKVEDAVREHPDYRVVFTGHSLGGALATVSGADLRGNGYDIDVFSYGAPRVGNRAFAEFLTVQTGGTLYRITHTNDIVPRLPPREFGYSHSSPEYWIKSGTLVPVTRNDIVKIEGIDATGGNNQPNIPDIPAHLWYFGLIGTC

SEQ ID NO: 11075 - protein, 268 aa, Thermomyces lanuginosus
EVSQDLFNQFNLFAQYSAAAYCGKNNDAPAGTNITCTGNACPEVEKADATFLYSFEDSGVGDVTGFLALDNTNKLIVLSFRGSRSIENWIGNLNFDLKEINDICSGCRGHAGFTSSWRSVADTLRQKVEDAVREHPDYRVVFTGHSLGGALATVAGADLRGNGYDIDVFSYGAPRVGNRAFAEFLTVQTGGTLYRITHTNDIVPRLPPREFGYSHSSPEYWIKSGTLVPVTRNDIVKIEGIDATGGNNQPNIPDIPAHLWYFGLIGTC

SEQ ID NO: 11076 - protein, 268 aa, Thermomyces lanuginosus
EVSQDLFNQFNLFAQYSAAAYCGKNNDAPAGTNITCTGNACPEVEKADATFLYSFEDSGVGDVTGFLALDNTNKLIVLSFRGSLSIENWIGNLNFDLKEINDICSGCRGHDGFTSSWRSVADTLRQKVEDAVREHPDYRVVFTGHSLGGALATVAGADLRGNGYDIDVFSYGAPRVGNRAFAEFLTVQTGGTLYRITHTNDIVPRLPPREFGYSHSSPEYWIKSGTLVPVTRNDIVKIEGIDATGGNNQPNIPDIPAHLWYFGLIGTC

SEQ ID NO: 11077 - protein, 268 aa, Thermomyces lanuginosus
EVSQDLFNQFNLFAQYSAAAYCGKNNDAPAGTNITCTGNACPEVEKADATFLYSFEDSGVGDVTGFLALDNTNKLIVLSFRGSRSIENWIGNLNFDLKEINDICSGCRGHDGFTSSWRSNADTLRQKVEDAVREHPDYRVVFTGHSLGGALATVAGADLRGNGYDIDVFSYGAPRVGNRAFAEFLTVQTGGTLYRITHTNDIVPRLPPREFGYSHSSPEYWIKSGTLVPVTRNDIVKIEGIDATGGNNQPNIPDIPAHLWYFGLIGTC

SEQ ID NO: 11078 - protein, 268 aa, Thermomyces lanuginosus
EVSQDLFNQFNLFAQYSAAAYCGKNNDAPAGTNITCTGNACPEVEKADATFLYSFEDSGVGDVIGFLALDNTNKLIVLSFRGSRSIENWIGNLNFDLKEINDICSGCRGHDGFTSSWRSVADTLRQKVEDAVREHPDYRVVFTGHSLGGALATVAGADLRGNGYDIDVFSYGAPRVGNRAFAEFLTVQTGGTLYRITHTNDIVPRLPPREFGYSHSSPEYWIKSGTLVPVTRNDIVKIEGIDATGGNNQPNIPDIPAHLWYFGLIGTC

SEQ ID NO: 11079 - protein, 268 aa, Thermomyces lanuginosus
EVSQDLFNQFNLFAQYSAAAYCGKNNDAPAGTNITCTGNACPEVEKADATFLYSFEDSGVGDVTGFLALDNTNKIIVLSFRGSRSIENWIGNLNFDLKEINDICSGCRGHDGFTSSWRSVADTLRQKVEDAVREHPDYRVVFTGHSLGGALATVAGADLRGNGYDIDVFSYGAPRVGNRAFAEFLTVQTGGTLYRITHTNDIVPRLPPREFGYSHSSPEYWIKSGTLVPVTRNDIVKIEGIDATGGNNQPNIPDIPAHLWYFGLIGTC

SEQ ID NO: 11080 - protein, 268 aa, Thermomyces lanuginosus
EVSQDLFNQFNLFAQYSAAAYCGKNNDAPAGTNITCTGNACPEVEKADKTFLYSFEDSGVGDVTGFLALDNTNKLIVLSFRGSRSIENWIGNLNFDLKEINDICSGCRGHDGFTSSWRSVADTLRQKVEDAVREHPDYRVVFTGHSLGGALATVAGADLRGNGYDIDVFSYGAPRVGNRAFAEFLTVQTGGTLYRITHTNDIVPRLPPREFGYSHSSPEYWIKSGTLVPVTRNDIVKIEGIDATGGNNQPNIPDIPAHLWYFGLIGTC

SEQ ID NO: 11081 - protein, 268 aa, Thermomyces lanuginosus
EVSQDLFNQFNLFAQYSAAAYCGKNNDAPAGTNITCTGNACPEVEKADATFLYSFEDSGVGDVTGFLALDNTNKLIVLSFRGSRSIENWIGNLNFDLKEINDICSGCRGHDGFTSSWRSVADTLRQKVEDAVREHPTYRVVFTGHSLGGALATVAGADLRGNGYDIDVFSYGAPRVGNRAFAEFLTVQTGGTLYRITHTNDIVPRLPPREFGYSHSSPEYWIKSGTLVPVTRNDIVKIEGIDATGGNNQPNIPDIPAHLWYFGLIGTC

SEQ ID NO: 11082 - protein, 268 aa, Thermomyces lanuginosus
EVSQDLFNQFNLFAQYSAAAYCGKNNDAPAGTNITCTGNACPEVEKADATFLYSFEDSGVGDVTGFLALDNTNKLIVLSFRGSRSIENWIGNLNFDLKEINDICSGCRGHDGFTSSWRSVADQLRQKVEDAVREHPDYRVVFTGHSLGGALATVAGADLRGNGYDIDVFSYGAPRVGNRAFAEFLTVQTGGTLYRITHTNDIVPRLPPREFGYSHSSPEYWIKSGTLVPVTRNDIVKIEGIDATGGNNQPNIPDIPAHLWYFGLIGTC

SEQ ID NO: 11083 - protein, 268 aa, Thermomyces lanuginosus
EVSQDLFNQFNLFAQYSAAAYCGKNNDAPAGTNITCTGNACPEVEKADATFLYSFEDSGVGDVTGFLALDNTNKLIVLSFRGSRSIENWIGNLNFDLKEINDICSGCRGHDGFTSSWRSVADTLRQKVEDAVREHPDYRVVFTGHSLGGALATVAGADLRGNLYDIDVFSYGAPRVGNRAFAEFLTVQTGGTLYRITHTNDIVPRLPPREFGYSHSSPEYWIKSGTLVPVTRNDIVKIEGIDATGGNNQPNIPDIPAHLWYFGLIGTC

SEQ ID NO: 11084 - protein, 268 aa, Thermomyces lanuginosus
EVSQDLFNQFNLFAQYSAAAYCGKNNDAPAGTNITCTGNACPEVEKADATFLYSFEDSGVGDVTGFLALDNTNKLIVLSFRGSRSIENWIGNLNFDLKEINDICSGCRGHDGFTSSWRSVADTLRQKVEDAVREHPDYRVVFTGHSLGGALATVAGADMRGNGYDIDVFSYGAPRVGNRAFAEFLTVQTGGTLYRITHTNDIVPRLPPREFGYSHSSPEYWIKSGTLVPVTRNDIVKIEGIDATGGNNQPNIPDIPAHLWYFGLIGTC

SEQ ID NO: 11085 - protein, 268 aa, Thermomyces lanuginosus
EVSQDLFNQFNLFASYSAAAYCGKNNDAPAGTNITCTGNACPEVEKADATFLYSFEDSGVGDVTGFLALDNTNKLIVLSFRGSRSIENWIGNLNFDLKEINDICSGCRGHDGFTSSWRSVADTLRQKVEDAVREHPDYRVVFTGHSLGGALATVAGADLRGNGYDIDVFSYGAPRVGNRAFAEFLTVQTGGTLYRITHTNDIVPRLPPREFGYSHSSPEYWIKSGTLVPVTRNDIVKIEGIDATGGNNQPNIPDIPAHLWYFGLIGTC

SEQ ID NO: 11086 - protein, 268 aa, Thermomyces lanuginosus
EVSQDLFNQFNLFAQYSAAAYCGKNNDAPAGTNITCTGNACPEVEKADATFLYSFEDSGVGDVTGFLALDNTNKLIVLSFRGSRSIENWIGNLNFDLKEINDICSGCRGHDGFTSSWRSVADTLRQKVEDHVREHPDYRVVFTGHSLGGALATVAGADLRGNGYDIDVFSYGAPRVGNRAFAEFLTVQTGGTLYRITHTNDIVPRLPPREFGYSHSSPEYWIKSGTLVPVTRNDIVKIEGIDATGGNNQPNIPDIPAHLWYFGLIGTC

SEQ ID NO: 11087 - protein, 268 aa, Thermomyces lanuginosus
EVSQDLFNQFNLFAQYSAAAYCGKNNDAPAGTNITCTGNACPEVEKADATFLYSFEDSGVGDVTGFLALDNTNKLIVLSFRGSRSIENWIGNLNFDLKEINDICSGCRGHDGFTSSWRSVADTLRQKVEDAVREHPDYRVVFTGHSLGGALATVAGADLRGNGYDIDVFSYGAPRVGNRAFAEFLTVQEGGTLYRITHTNDIVPRLPPREFGYSHSSPEYWIKSGTLVPVTRNDIVKIEGIDATGGNNQPNIPDIPAHLWYFGLIGTC

SEQ ID NO: 11088 - protein, 268 aa, Thermomyces lanuginosus
EVSQDLFNQFNLFAQYSAAAYCGKNNDAPAGTNITCTGNACPEVEKADATFLYSFEDSGVGDVTGFLALDNTNKLIVLSFRGSRSIENWIGNLNFDLKEINDICSGCRGHDGFTSSWRSVADTLRQKVEDAVREHPDYRVVFTGHSLGGALATVAGADLRGNGYDIDVFSYGAPRVGNRAFAEFLTVQTGGTLYRITHTNDIVPRLPPREFGYSHSSPEYWIKSGTLVKVTRNDIVKIEGIDATGGNNQPNIPDIPAHLWYFGLIGTC

SEQ ID NO: 11089 - protein, 268 aa, Thermomyces lanuginosus
EVSQDLFNQFNLFAQYSAAAYCWKNNDAPAGTNITCTGNACPEVEKADATFLYSFEDSGVGDVTGFLALDNTNKLIVLSFRGSRSIENWIGNLNFDLKEINDICSGCRGHDGFTSSWRSVADTLRQKVEDAVREHPDYRVVFTGHSLGGALATVAGADLRGNGYDIDVFSYGAPRVGNRAFAEFLTVQTGGTLYRITHTNDIVPRLPPREFGYSHSSPEYWIKSGTLVPVTRNDIVKIEGIDATGGNNQPNIPDIPAHLWYFGLIGTC

SEQ ID NO: 11090 - protein, 268 aa, Thermomyces lanuginosus
EVSQDLFNQFNLFAQYSAAAYCGKNNDAPAGTNITCTGNACPEVEKADATFLYSFEDSGVGDVTGFLALDNTNKLIVLSFRGSRSIENWIGNLNFDLKEINDICSGCRGHDGFTSSWRSVADTLRQKVEDAVREHPDYRVVFTGHSLGGALATVAGADLRGNGYDIDVFSYGAPRVGNRAFAQFLTVQTGGTLYRITHTNDIVPRLPPREFGYSHSSPEYWIKSGTLVPVTRNDIVKIEGIDATGGNNQPNIPDIPAHLWYFGLIGTC

SEQ ID NO: 11091 - protein, 268 aa, Thermomyces lanuginosus
EVSQDLFNQFNLFAQYSAAAYCGKNNDAPAGTNITCTGNACPEVEKADATFLYSFEDSGVGDVTGFLALDNTNKLIVLSFRGSRSIENWIGNLNFDLKEINDICSGCRGHDGFTSSWRSVADTLRQKVEDAVREHPDYRVVFTGHSLGGALATVAGADLRGNGDDIDVFSYGAPRVGNRAFAEFLTVQTGGTLYRITHTNDIVPRLPPREFGYSHSSPEYWIKSGTLVPVTRNDIVKIEGIDATGGNNQPNIPDIPAHLWYFGLIGTC

SEQ ID NO: 11092 - protein, 268 aa, Thermomyces lanuginosus
EVSQDLFNQFNLFAQYSAAAYCGKNNDAPAGTNITCTGNACPEVEKADATFLYSFEDSGVGDVTGFLALDNTNKLIVLSFRGSRSIENWIGNLNFDLKEINDICSGCRGHDGFTSSWRSVADTLRQKVEDAVREHPDYRVVFTGHSLGGALATVAGADLRGNGYDIDVFSYGAPRVGNRAFAEFLTVQTGGTLYRITHTSDIVPRLPPREFGYSHSSPEYWIKSGTLVPVTRNDIVKIEGIDATGGNNQPNIPDIPAHLWYFGLIGTC

SEQ ID NO: 11093 - protein, 268 aa, Thermomyces lanuginosus
EVSQDLFNQFYLFAQYSAAAYCGKNNDAPAGTNITCTGNACPEVEKADATFLYSFEDSGVGDVTGFLALDNTNKLIVLSFRGSRSIENWIGNLNFDLKEINDICSGCRGHDGFTSSWRSVADTLRQKVEDAVREHPDYRVVFTGHSLGGALATVAGADLRGNGYDIDVFSYGAPRVGNRAFAEFLTVQTGGTLYRITHTNDIVPRLPPREFGYSHSSPEYWIKSGTLVPVTRNDIVKIEGIDATGGNNQPNIPDIPAHLWYFGLIGTC

SEQ ID NO: 11094 - protein, 268 aa, Thermomyces lanuginosus
EVSQDLFNQFNLFAQYSAAAYCGKNNDAPAGTNITCTGNACPEVEKADATFLYSFEDSGVGDVTGFLALDNTNKLIVLSFRGSRSIENWIGNLNFDLKEINDICSGCRGHQGFTSSWRSVADTLRQKVEDAVREHPDYRVVFTGHSLGGALATVAGADLRGNGYDIDVFSYGAPRVGNRAFAEFLTVQTGGTLYRITHTNDIVPRLPPREFGYSHSSPEYWIKSGTLVPVTRNDIVKIEGIDATGGNNQPNIPDIPAHLWYFGLIGTC

SEQ ID NO: 11095 - protein, 268 aa, Thermomyces lanuginosus
EVSQDLFNQFNLFAQYSATAYCGKNNDAPAGTNITCTGNACPEVEKADATFLYSFEDSGVGDVTGFLALDNTNKLIVLSFRGSRSIENWIGNLNFDLKEINDICSGCRGHDGFTSSWRSVADTLRQKVEDAVREHPDYRVVFTGHSLGGALATVAGADLRGNGYDIDVFSYGAPRVGNRAFAEFLTVQTGGTLYRITHTNDIVPRLPPREFGYSHSSPEYWIKSGTLVPVTRNDIVKIEGIDATGGNNQPNIPDIPAHLWYFGLIGTC

SEQ ID NO: 11096 - protein, 268 aa, Thermomyces lanuginosus
EVSQDLFNQFNLFAQYSAAAYCGKNNDAPAGTNITCTGNACPEVEKADATFLYSFEDSGVGDVTGFLALDNTNKLIVLSFRGSRSIENWIGNLNFDLKEINDICSGCRGHDGFTSSWRSVADTLRQKVEDAVREHPDYRVVFTGHSLGGALATVAGAELRGNGYDIDVFSYGAPRVGNRAFAEFLTVQTGGTLYRITHTNDIVPRLPPREFGYSHSSPEYWIKSGTLVPVTRNDIVKIEGIDATGGNNQPNIPDIPAHLWYFGLIGTC

SEQ ID NO: 11097 - protein, 268 aa, Thermomyces lanuginosus
EVSQDLFNQFNLFAQYSAAAYCGKHNDAPAGTNITCTGNACPEVEKADATFLYSFEDSGVGDVTGFLALDNTNKLIVLSFRGSRSIENWIGNLNFDLKEINDICSGCRGHDGFTSSWRSVADTLRQKVEDAVREHPDYRVVFTGHSLGGALATVAGADLRGNGYDIDVFSYGAPRVGNRAFAEFLTVQTGGTLYRITHTNDIVPRLPPREFGYSHSSPEYWIKSGTLVPVTRNDIVKIEGIDATGGNNQPNIPDIPAHLWYFGLIGTC

SEQ ID NO: 11098 - protein, 268 aa, Thermomyces lanuginosus
EVSQDLFNQFNLFAQYSAAAYCGKNQDAPAGTNITCTGNACPEVEKADATFLYSFEDSGVGDVTGFLALDNTNKLIVLSFRGSRSIENWIGNLNFDLKEINDICSGCRGHDGFTSSWRSVADTLRQKVEDAVREHPDYRVVFTGHSLGGALATVAGADLRGNGYDIDVFSYGAPRVGNRAFAEFLTVQTGGTLYRITHTNDIVPRLPPREFGYSHSSPEYWIKSGTLVPVTRNDIVKIEGIDATGGNNQPNIPDIPAHLWYFGLIGTC

SEQ ID NO: 11099 - protein, 268 aa, Thermomyces lanuginosus
EVSQDLFNQFNLFAQYSAAAYCGKNNDAPAGTNITCTGNACPEVEKADATFLYSFEDSGVGDVEGFLALDNTNKLIVLSFRGSRSIENWIGNLNFDLKEINDICSGCRGHDGFTSSWRSVADTLRQKVEDAVREHPDYRVVFTGHSLGGALATVAGADLRGNGYDIDVFSYGAPRVGNRAFAEFLTVQTGGTLYRITHTNDIVPRLPPREFGYSHSSPEYWIKSGTLVPVTRNDIVKIEGIDATGGNNQPNIPDIPAHLWYFGLIGTC

SEQ ID NO: 11100 - protein, 268 aa, Thermomyces lanuginosus
EVSQDLFNQFNLFAQYSAAAYCGKNNDAPAGTNITCTGNACPEVEKADATFLYSFEDSGVGDVTGFLALDNTNKLIVLSFRGSRSIENWIGNLNFDLKEINDICSGCRGHDGFTSSWRSVADTLRQKVEDAVREHPDYRVVFTGHSLGGALATVAGADLRGNGYDIDVFSYGAPRVGNRAFAEFLTVQTGGTLYRITHTNDIVPRLPPREFGYSHSSPEYWIKSGTLVPWTRNDIVKIEGIDATGGNNQPNIPDIPAHLWYFGLIGTC

SEQ ID NO: 11101 - protein, 268 aa, Thermomyces lanuginosus
EVSQDLFNQFNLFAQYSAAAYCGKNNDAPAGTNITCTGNACPEVEKTDATFLYSFEDSGVGDVTGFLALDNTNKLIVLSFRGSRSIENWIGNLNFDLKEINDICSGCRGHDGFTSSWRSVADTLRQKVEDAVREHPDYRVVFTGHSLGGALATVAGADLRGNGYDIDVFSYGAPRVGNRAFAEFLTVQTGGTLYRITHTNDIVPRLPPREFGYSHSSPEYWIKSGTLVPVTRNDIVKIEGIDATGGNNQPNIPDIPAHLWYFGLIGTC

SEQ ID NO: 11102 - protein, 268 aa, Thermomyces lanuginosus
EVSQDLFNQFNLFAQYSAAAYCGKNNDAPAGTNITCTGNACPEVEKADATFLYSFEDSGVGDVTGFLALDNTNKLIVLSFRGSRSIENWIGNLNFDLEEINDICSGCRGHDGFTSSWRSVADTLRQKVEDAVREHPDYRVVFTGHSLGGALATVAGADLRGNGYDIDVFSYGAPRVGNRAFAEFLTVQTGGTLYRITHTNDIVPRLPPREFGYSHSSPEYWIKSGTLVPVTRNDIVKIEGIDATGGNNQPNIPDIPAHLWYFGLIGTC

SEQ ID NO: 11103 - protein, 268 aa, Thermomyces lanuginosus
EVSQDLFNQFNLFAQYSAAAYCGKNNDAPAGTNITCTGNACPEVEKADATFLYSFEDSGVGDVTGFLALDNTNKLIVLSFRGSRSIENWIGNLNFDLKEINDICSGCRGHDGFTSSWRSVADTLRQKVEDAVREHPDYRVVFTGHSLGGALATVAGADLRGNGYDIDVFSYGAPRVGNRAFAEFLTVQTGGTLYRITHTNDIVPRLPPREFGYSHSSPEYWIKRGTLVPVTRNDIVKIEGIDATGGNNQPNIPDIPAHLWYFGLIGTC

SEQ ID NO: 11104 - protein, 268 aa, Thermomyces lanuginosus
EVSQDLFNQFNLFAQYSAATYCGKNNDAPAGTNITCTGNACPEVEKADATFLYSFEDSGVGDVTGFLALDNTNKLIVLSFRGSRSIENWIGNLNFDLKEINDICSGCRGHDGFTSSWRSVADTLRQKVEDAVREHPDYRVVFTGHSLGGALATVAGADLRGNGYDIDVFSYGAPRVGNRAFAEFLTVQTGGTLYRITHTNDIVPRLPPREFGYSHSSPEYWIKSGTLVPVTRNDIVKIEGIDATGGNNQPNIPDIPAHLWYFGLIGTC

SEQ ID NO: 11105 - protein, 268 aa, Thermomyces lanuginosus
EVSQDLFNQFNLFAQYSAAAYCGKNNDAPAGTNITCTGNACPEVEKADATFLYSFEDSGVGDVTGFLALDNTNKLIVLSFRGSRSIENWIGNLNFDLKEINDICSGCRGHDGFTSSWRSVADTLRQKVEDAVREHPDYRVVFTGHSLGGALATVAGADLRGNGYDIDVFSYGAPRVGNRAFAEFLTVQTGGTLYRITHTNDIVPRLPPREFGYSHSSPEYWIKSGTLVPVTRDDIVKIEGIDATGGNNQPNIPDIPAHLWYFGLIGTC

SEQ ID NO: 11106 - protein, 268 aa, Thermomyces lanuginosus
EVSQDLFNQFNLFAQYSAAAYCGKNNDAPAGTNITCTGNACPEVEKADATFLYSFEDSGVGDVTGFLALDNTNKLIVLSFRGSRSIENWIGNLNFDLKEINDICSGCRGHDGFTSSWRSVADTLRQKVEDAVREHPDYRVVFTGHSLGGALATVAGADLRGNGYDIDVFSYGAPRVGNRAFAEFLTVQTGGTLYRITHTNDIVPRLPPREFQYSHSSPEYWIKSGTLVPVTRNDIVKIEGIDATGGNNQPNIPDIPAHLWYFGLIGTC

SEQ ID NO: 11107 - protein, 268 aa, Thermomyces lanuginosus
EVSQDLFNQFNLFAQYSAAAYCGKNNDAPAGTNITCTGNACPEVEKADATFLYSFEDSGVGDVTGFLALDNTNKLIVLSFRGSRSIENWIGNLNFDLKEINDICSGCRGHDGFTSSWRSVADTLRQKVEDAVREHPDYRVVFTGHSLGGALATVAGADLRGNAYDIDVFSYGAPRVGNRAFAEFLTVQTGGTLYRITHTNDIVPRLPPREFGYSHSSPEYWIKSGTLVPVTRNDIVKIEGIDATGGNNQPNIPDIPAHLWYFGLIGTC

SEQ ID NO: 11108 - protein, 268 aa, Thermomyces lanuginosus
EVSQDLFNQFNLFAQYSAAAYCGKNNDAPAGTNITCTGNACPEVEKADATFLYSFEDSGVGDVTGFLALDNTNKLIVLSFRGSRSIENWIGNLNFDLKEINDICSGCRGHDGFTSSWRSVADTLRQKVEDAVREHPDYRVVFTGHSLGGALATMAGADLRGNGYDIDVFSYGAPRVGNRAFAEFLTVQTGGTLYRITHTNDIVPRLPPREFGYSHSSPEYWIKSGTLVPVTRNDIVKIEGIDATGGNNQPNIPDIPAHLWYFGLIGTC

SEQ ID NO: 11109 - protein, 268 aa, Thermomyces lanuginosus
EVSQDLFNQFNLFAQYSAAAYCGDNNDAPAGTNITCTGNACPEVEKADATFLYSFEDSGVGDVTGFLALDNTNKLIVLSFRGSRSIENWIGNLNFDLKEINDICSGCRGHDGFTSSWRSVADTLRQKVEDAVREHPDYRVVFTGHSLGGALATVAGADLRGNGYDIDVFSYGAPRVGNRAFAEFLTVQTGGTLYRITHTNDIVPRLPPREFGYSHSSPEYWIKSGTLVPVTRNDIVKIEGIDATGGNNQPNIPDIPAHLWYFGLIGTC

SEQ ID NO: 11110 - protein, 268 aa, Thermomyces lanuginosus
EVSQDLFNQFNLFAQYSAAAYCGKNNDAPAGTNITCTGNACPEVEKADATFLYSFEDSGVGDVTGFLALDNTNKLIVLSFRGSRSIENWIGNLNFDLKEINDICSGCRGHDGFTSSWRSVADTLRQKVEDAVREHPDYRVVFTGHSLGGALATVAGADLRGNGYDIDVFSYGAPRVGNRAFAEFLTVQTGGTLYRITHTNDIVPRLPPREFGYSHSSPEYWIKSGTLVPVTRNDIVKIEGIDATGGNNQPNIPNIPAHLWYFGLIGTC

SEQ ID NO: 11111 - protein, 268 aa, Thermomyces lanuginosus
EVSQDLFNQFNLFAQYSAAAYCGKNNDAPAGTNITCTGNACPEVEKADATFLYSFKDSGVGDVTGFLALDNTNKLIVLSFRGSRSIENWIGNLNFDLKEINDICSGCRGHDGFTSSWRSVADTLRQKVEDAVREHPDYRVVFTGHSLGGALATVAGADLRGNGYDIDVFSYGAPRVGNRAFAEFLTVQTGGTLYRITHTNDIVPRLPPREFGYSHSSPEYWIKSGTLVPVTRNDIVKIEGIDATGGNNQPNIPDIPAHLWYFGLIGTC

SEQ ID NO: 11112 - protein, 268 aa, Thermomyces lanuginosus
EVSQDLFNQFNLFAQYSAAAYCGKNNDAPAGTNITCTGNACPEVEKADATFLYSFEDSGVGDVTGFLALDNTNKLIVLSFRGSRSIENWIGNLNFDLKEINDICSGCRGHDGFTSSWRSVADTLRQKVEDAVREHPDYRVVFTGHSLGGALATVAGADLRGNGYDIDVFSYGAPRVGNEAFAEFLTVQTGGTLYRITHTNDIVPRLPPREFGYSHSSPEYWIKSGTLVPVTRNDIVKIEGIDATGGNNQPNIPDIPAHLWYFGLIGTC

SEQ ID NO: 11113 - protein, 268 aa, Thermomyces lanuginosus
EVSQDLFNQFNLFAQYSAAAYCGKNNDACAGTNITCTGNACPEVEKADATFLYSFEDSGVGDVTGFLALDNTNKLIVLSFRGSRSIENWIGNLNFDLKEINDICSGCRGHDGFTSSWRSVADTLRQKVEDAVREHPDYRVVFTGHSLGGALATVAGADLRGNGYDIDVFSYGAPRVGNRAFAEFLTVQTGGTLYRITHTNDIVPRLPPREFGYSHSSPEYWIKSGTLVPVTRNDIVKIEGIDATGGNNQPNIPDIPAHLWYFGLIGTC

SEQ ID NO: 11114 - protein, 268 aa, Thermomyces lanuginosus
EVSQDLFNQFNLFAQYSAAAYCGKNNDAPAGTNITCTGNACPEVEKADATFLYSFEDSGVGDVTGFLALDNTNKLIVLSFRGSRSIENWIGNLNFDLKEINDICSGCRGHDGFTSSWRSVADTLRQKVEDAVREHPDYRVVFTGHSLGGALATVAGADLRGNGYDIDVFSYGAPRNGNRAFAEFLTVQTGGTLYRITHTNDIVPRLPPREFGYSHSSPEYWIKSGTLVPVTRNDIVKIEGIDATGGNNQPNIPDIPAHLWYFGLIGTC

SEQ ID NO: 11115 - protein, 268 aa, Thermomyces lanuginosus
EVSQDLFNQFNLFAQYSAAAYCGKNNVAPAGTNITCTGNACPEVEKADATFLYSFEDSGVGDVTGFLALDNTNKLIVLSFRGSRSIENWIGNLNFDLKEINDICSGCRGHDGFTSSWRSVADTLRQKVEDAVREHPDYRVVFTGHSLGGALATVAGADLRGNGYDIDVFSYGAPRVGNRAFAEFLTVQTGGTLYRITHTNDIVPRLPPREFGYSHSSPEYWIKSGTLVPVTRNDIVKIEGIDATGGNNQPNIPDIPAHLWYFGLIGTC

SEQ ID NO: 11116 - protein, 268 aa, Thermomyces lanuginosus
EVSQDLFNQFNLFAQYSAAAYCGKNNDAPWGTNITCTGNACPEVEKADATFLYSFEDSGVGDVTGFLALDNTNKLIVLSFRGSRSIENWIGNLNFDLKEINDICSGCRGHDGFTSSWRSVADTLRQKVEDAVREHPDYRVVFTGHSLGGALATVAGADLRGNGYDIDVFSYGAPRVGNRAFAEFLTVQTGGTLYRITHTNDIVPRLPPREFGYSHSSPEYWIKSGTLVPVTRNDIVKIEGIDATGGNNQPNIPDIPAHLWYFGLIGTC

SEQ ID NO: 11117 - protein, 268 aa, Thermomyces lanuginosus
EVSQDLFNQFNLFAQYSAAAYCGKNNDAPAGTNITCTGNACPEVEKADATFLYSFEDSGVGDVTGFLALDNTNKLIVLSFRGSRSIENWIGNLNFDLKEINDICSGCRGHDGFTSSWRSVADTLRQKVEDAVREHPDYRVVFTGHSLGGALATVAGADLRGEGYDIDVFSYGAPRVGNRAFAEFLTVQTGGTLYRITHTNDIVPRLPPREFGYSHSSPEYWIKSGTLVPVTRNDIVKIEGIDATGGNNQPNIPDIPAHLWYFGLIGTC

SEQ ID NO: 11118 - protein, 268 aa, Thermomyces lanuginosus
EVSQDLFNQFNLFAQYSAAAYCGHNNDAPAGTNITCTGNACPEVEKADATFLYSFEDSGVGDVTGFLALDNTNKLIVLSFRGSRSIENWIGNLNFDLKEINDICSGCRGHDGFTSSWRSVADTLRQKVEDAVREHPDYRVVFTGHSLGGALATVAGADLRGNGYDIDVFSYGAPRVGNRAFAEFLTVQTGGTLYRITHTNDIVPRLPPREFGYSHSSPEYWIKSGTLVPVTRNDIVKIEGIDATGGNNQPNIPDIPAHLWYFGLIGTC

SEQ ID NO: 11119 - protein, 268 aa, Thermomyces lanuginosus
EVSQDLFNQFNLFAQYSAAAYCGKNNDAPAGTNITCTGNACPEVEKADATFLYSFEDSGVGDVTGFLALDNTNKLIVLSFRGSRSIENWIGNLNFDLKEINDICSGCRGHDGFTSSWRSVADTLRQKVEDAVREHPDYRVVFTGHSLGGALATVAGADLRGNGYDIDVFSYGAPRVGNRAFAEFLTVQTGGTLYRITHTNDIVPRLPPREFGYSHGSPEYWIKSGTLVPVTRNDIVKIEGIDATGGNNQPNIPDIPAHLWYFGLIGTC

SEQ ID NO: 11120 - protein, 268 aa, Thermomyces lanuginosus
EVSQDLFNQFNLFAQYSAAAYCGKNNDAPAGTNITCTGNACPEVEKADATFLYSFEDSGVGDVTGFLALDNTNKLIVLSFRGSRSIENWIGNLNFDLKEINDICSGCRGHDGFTSSWRSVADTLRQKVEDAVREHPDYRVVFTGHSLGGALATVAGADLRGNGYDIDVFSYGAPRVGNRAFAEFLTVQTGGTLYRITHTNDIVPRLPPREFGYSHSSPEYWIKSGTLVPVTRNDIVKIEGIDATGGNNQPNIPDIPAHLHYFGLIGTC

SEQ ID NO: 11121 - protein, 268 aa, Thermomyces lanuginosus
EVSQDLFNQFNLFAQYSAAAYCGKNNDAPAGTNITCTGNACPEVEKADATFVYSFEDSGVGDVTGFLALDNTNKLIVLSFRGSRSIENWIGNLNFDLKEINDICSGCRGHDGFTSSWRSVADTLRQKVEDAVREHPDYRVVFTGHSLGGALATVAGADLRGNGYDIDVFSYGAPRVGNRAFAEFLTVQTGGTLYRITHTNDIVPRLPPREFGYSHSSPEYWIKSGTLVPVTRNDIVKIEGIDATGGNNQPNIPDIPAHLWYFGLIGTC

SEQ ID NO: 11122 - protein, 268 aa, Thermomyces lanuginosus
EVSQDLFNQFNLFAQYSAAAYCGKNNDAPAGTNITCTGNACPEVEKADATFLYSFEDSGVGDVTGFLALDNTNKLIVLSFRGSRSIENWIGNLDFDLKEINDICSGCRGHDGFTSSWRSVADTLRQKVEDAVREHPDYRVVFTGHSLGGALATVAGADLRGNGYDIDVFSYGAPRVGNRAFAEFLTVQTGGTLYRITHTNDIVPRLPPREFGYSHSSPEYWIKSGTLVPVTRNDIVKIEGIDATGGNNQPNIPDIPAHLWYFGLIGTC

SEQ ID NO: 11123 - protein, 268 aa, Thermomyces lanuginosus
EVSQDLFNQFNLFAQYSAAAYCGKNNDAPAGTNITCTGNACPEVEKADATFLYSFEDMGVGDVTGFLALDNTNKLIVLSFRGSRSIENWIGNLNFDLKEINDICSGCRGHDGFTSSWRSVADTLRQKVEDAVREHPDYRVVFTGHSLGGALATVAGADLRGNGYDIDVFSYGAPRVGNRAFAEFLTVQTGGTLYRITHTNDIVPRLPPREFGYSHSSPEYWIKSGTLVPVTRNDIVKIEGIDATGGNNQPNIPDIPAHLWYFGLIGTC

SEQ ID NO: 11124 - protein, 268 aa, Thermomyces lanuginosus
EVSQDLFNQFNLFAQYSAAAYCGKNNDAPAGTNITCTGNACPEVEKALATFLYSFEDSGVGDVTGFLALDNTNKLIVLSFRGSRSIENWIGNLNFDLKEINDICSGCRGHDGFTSSWRSVADTLRQKVEDAVREHPDYRVVFTGHSLGGALATVAGADLRGNGYDIDVFSYGAPRVGNRAFAEFLTVQTGGTLYRITHTNDIVPRLPPREFGYSHSSPEYWIKSGTLVPVTRNDIVKIEGIDATGGNNQPNIPDIPAHLWYFGLIGTC

SEQ ID NO: 11125 - protein, 268 aa, Thermomyces lanuginosus
EVSQDLFTQFNLFAQYSAAAYCGKNNDAPAGTNITCTGNACPEVEKADATFLYSFEDSGVGDVTGFLALDNTNKLIVLSFRGSRSIENWIGNLNFDLKEINDICSGCRGHDGFTSSWRSVADTLRQKVEDAVREHPDYRVVFTGHSLGGALATVAGADLRGNGYDIDVFSYGAPRVGNRAFAEFLTVQTGGTLYRITHTNDIVPRLPPREFGYSHSSPEYWIKSGTLVPVTRNDIVKIEGIDATGGNNQPNIPDIPAHLWYFGLIGTC

SEQ ID NO: 11126 - protein, 268 aa, Thermomyces lanuginosus
EVSQDLFNQFNLFAQYSAAAYCGKNNDAPAGTNITCTGNACPEVEKADATFLYSFEDSGVGDVTGFLALDNTNKLIVLSFRGSRSIENWIGNLNFDLKEINDICSGCRGHDGFTSSWRSVADTLRQKVEDAVREHPDYRVVFTGHSLGGALATVAGADLRGNGYDIDVFSYGAPRVGNRTFAEFLTVQTGGTLYRITHTNDIVPRLPPREFGYSHSSPEYWIKSGTLVPVTRNDIVKIEGIDATGGNNQPNIPDIPAHLWYFGLIGTC

SEQ ID NO: 11127 - protein, 268 aa, Thermomyces lanuginosus
EVSQDLFEQFNLFAQYSAAAYCGKNNDAPAGTNITCTGNACPEVEKADATFLYSFEDSGVGDVTGFLALDNTNKLIVLSFRGSRSIENWIGNLNFDLKEINDICSGCRGHDGFTSSWRSVADTLRQKVEDAVREHPDYRVVFTGHSLGGALATVAGADLRGNGYDIDVFSYGAPRVGNRAFAEFLTVQTGGTLYRITHTNDIVPRLPPREFGYSHSSPEYWIKSGTLVPVTRNDIVKIEGIDATGGNNQPNIPDIPAHLWYFGLIGTC

SEQ ID NO: 11128 - protein, 268 aa, Thermomyces lanuginosus
EVSQDLFNQFNLFAQYSAAAYCGKNNDAPAGTNITCTGNACPEVEKADATFLYSFEDSGVGDVTGFLALDNTNKLIVLSFRGSRSIENWIGNLNFDLKEINDICSGCRGHDGFTSSWRSVADTLRQKVEDAVREHPDYRVVFTGHSLGGALATVAGADLRGQGYDIDVFSYGAPRVGNRAFAEFLTVQTGGTLYRITHTNDIVPRLPPREFGYSHSSPEYWIKSGTLVPVTRNDIVKIEGIDATGGNNQPNIPDIPAHLWYFGLIGTC

SEQ ID NO: 11129 - protein, 268 aa, Thermomyces lanuginosus
EVSQDLFNQFNLFAQYSAAAYCGKNNDAPAGTNITCTGNACPEVEKADATFLYSFEDSGVGDVTGFLALDNTNKLIVLSFRGSRSIENWIGNLNFDLKEINDICSGCRGHDGFTSSWRSVADTLRQKVEDAVREHPDYRVVFTGHSLGGALATVAGADLRGNGYDIDVFSYGAPRVGNRAFAEFLTVQTGGTLYRITHTNDIVPRLPPREFGYSHSSPEYWIKSGTLVPVTRNDIVKIEGIDATGGNNQPNIXDIPAHLWYFGLIGTC

SEQ ID NO: 11130 - protein, 268 aa, Thermomyces lanuginosus
EVSQDLFNQFNLFAQYSAAAYCGWNNDAPAGTNITCTGNACPEVEKADATFLYSFEDSGVGDVTGFLALDNTNKLIVLSFRGSRSIENWIGNLNFDLKEINDICSGCRGHDGFTSSWRSVADTLRQKVEDAVREHPDYRVVFTGHSLGGALATVAGADLRGNGYDIDVFSYGAPRVGNRAFAEFLTVQTGGTLYRITHTNDIVPRLPPREFGYSHSSPEYWIKSGTLVPVTRNDIVKIEGIDATGGNNQPNIPDIPAHLWYFGLIGTC

SEQ ID NO: 11131 - protein, 268 aa, Thermomyces lanuginosus
EVSQDLFNQFNLFAQYSAAAYCGKNMDAPAGTNITCTGNACPEVEKADATFLYSFEDSGVGDVTGFLALDNTNKLIVLSFRGSRSIENWIGNLNFDLKEINDICSGCRGHDGFTSSWRSVADTLRQKVEDAVREHPDYRVVFTGHSLGGALATVAGADLRGNGYDIDVFSYGAPRVGNRAFAEFLTVQTGGTLYRITHTNDIVPRLPPREFGYSHSSPEYWIKSGTLVPVTRNDIVKIEGIDATGGNNQPNIPDIPAHLWYFGLIGTC

SEQ ID NO: 11132 - protein, 268 aa, Thermomyces lanuginosus
EVSQDLFNQFNLFAQYSAAAYCGKNNDAPAGTNITCTGNACPEVEKADATFLYSFEDSGVGDVTGFLALDNTNKLIVLSFRGSRSIENWIGNLNFDLKEINDICSGCRGHDGFTSSWRSVADTLRQKVEDAVREHPQYRVVFTGHSLGGALATVAGADLRGNGYDIDVFSYGAPRVGNRAFAEFLTVQTGGTLYRITHTNDIVPRLPPREFGYSHSSPEYWIKSGTLVPVTRNDIVKIEGIDATGGNNQPNIPDIPAHLWYFGLIGTC

SEQ ID NO: 11133 - protein, 268 aa, Thermomyces lanuginosus
EVSQDLFNQFNLFAQYSAAAYCGKNNDAPAGTNITCTGNACPEVEKADATFLYSFEDSGVGDVTGFLALDNTNSLIVLSFRGSRSIENWIGNLNFDLKEINDICSGCRGHDGFTSSWRSVADTLRQKVEDAVREHPDYRVVFTGHSLGGALATVAGADLRGNGYDIDVFSYGAPRVGNRAFAEFLTVQTGGTLYRITHTNDIVPRLPPREFGYSHSSPEYWIKSGTLVPVTRNDIVKIEGIDATGGNNQPNIPDIPAHLWYFGLIGTC

SEQ ID NO: 11134 - protein, 268 aa, Thermomyces lanuginosus
EVSQDLFNQFNLFAQYSAAAYCGKNNDAPAGTNITCTGNACPEVEKADATFLYSFEDSGVGDVTGFLALDNTNKLIVLSFRGSRSIENWIGNLNFDLKEINDICSGCRGHDGFFSSWRSVADTLRQKVEDAVREHPDYRVVFTGHSLGGALATVAGADLRGNGYDIDVFSYGAPRVGNRAFAEFLTVQTGGTLYRITHTNDIVPRLPPREFGYSHSSPEYWIKSGTLVPVTRNDIVKIEGIDATGGNNQPNIPDIPAHLWYFGLIGTC

SEQ ID NO: 11135 - protein, 268 aa, Thermomyces lanuginosus
EVSQDLFNQFNLFAQYSAAAYCGKNNDAPAGTNITCTGNACPEVEKADATFLYSFEDSGVGDVTGFLALDNTNKLIVLSFRGSRSIENWIGNLNFDLKEINDICSGCRGHDGFTSSWRSVADTLRQKVEDAVREHPDYRVVFTGHSLGGALATVAGADLRGNGYDIDVFSYGAPRVGNRAFAEFLTVQTGGTLYRITHTNDIVPRLPPREFGYSHSSPEYWIKSGTLVPVTRNDIVKIEGIDATGGNNQPYIPDIPAHLWYFGLIGTC

SEQ ID NO: 11136 - protein, 268 aa, Thermomyces lanuginosus
EVSQDLFNQFNLFAQYSAAAYCGKNNDAPAGTNITCTGNACPEVEKADATFLYSFEDSGVGDVTGFLALDNTNKLIVLSFRGSRSIENWIGNLNFDLKEINDICSGCRGHDGFTSSWRSVADTLRQKVEDAVREHPDYRVVFTGHSLGGALATVAGADLRGNGYDIDVFSYGAPRVGNRAFAEFLTVQTGGTLYRITHTNDIVPRLPPREFGYSHSSPEYWIKSGTLVPVTRNDIVKIEGIDATGGNNQPNIPPIPAHLWYFGLIGTC

SEQ ID NO: 11137 - protein, 268 aa, Thermomyces lanuginosus
EVSQDLFNQFNLFAQYSAAAYCGKNNDAPAGTNITCTGNACPEVEKADATFLYSFEDSGVGDVTGFLALDNTNKLIVLSFRGSRSIENWIGNLNFDLKEINDICSGCRGHDGFTSSWRSVADTLRQKVEDNVREHPDYRVVFTGHSLGGALATVAGADLRGNGYDIDVFSYGAPRVGNRAFAEFLTVQTGGTLYRITHTNDIVPRLPPREFGYSHSSPEYWIKSGTLVPVTRNDIVKIEGIDATGGNNQPNIPDIPAHLWYFGLIGTC

SEQ ID NO: 11138 - protein, 268 aa, Thermomyces lanuginosus
EVSQDLFNQFNLFAQYSAAAYCGKNNDAPNGTNITCTGNACPEVEKADATFLYSFEDSGVGDVTGFLALDNTNKLIVLSFRGSRSIENWIGNLNFDLKEINDICSGCRGHDGFTSSWRSVADTLRQKVEDAVREHPDYRVVFTGHSLGGALATVAGADLRGNGYDIDVFSYGAPRVGNRAFAEFLTVQTGGTLYRITHTNDIVPRLPPREFGYSHSSPEYWIKSGTLVPVTRNDIVKIEGIDATGGNNQPNIPDIPAHLWYFGLIGTC

SEQ ID NO: 11139 - protein, 268 aa, Thermomyces lanuginosus
EVSQDLFNQFNLFAQYSAAAYCGKNNDAPAGTNITCTGNACPEVEKADATFLYSFEDSGVGDVTGFLALDNTNKLIVLSFRGSRSIENWIGNLNFDIKEINDICSGCRGHDGFTSSWRSVADTLRQKVEDAVREHPDYRVVFTGHSLGGALATVAGADLRGNGYDIDVFSYGAPRVGNRAFAEFLTVQTGGTLYRITHTNDIVPRLPPREFGYSHSSPEYWIKSGTLVPVTRNDIVKIEGIDATGGNNQPNIPDIPAHLWYFGLIGTC

SEQ ID NO: 11140 - protein, 268 aa, Thermomyces lanuginosus
EVSQDLFNQFNLFAQYSAAAYCGKNNDAPAGTNITCTGNACPEVEKADATFLYSFEDSGVGDVTGFLALDNTNKLIVLSFRGSRSIENWIGNLNFDLKEINDICSGCRGHDGFTSSWRSVADTLRQKVEDAVREHPDYRVVFTGHSLGGALATVAGADLRGNGYDIDVFSYGAPRVGNRAFAEFLTVQTGGTLYRITHTNDIVPRLPPREFGYDHSSPEYWIKSGTLVPVTRNDIVKIEGIDATGGNNQPNIPDIPAHLWYFGLIGTC

SEQ ID NO: 11141 - protein, 268 aa, Thermomyces lanuginosus
EVSQDLFNQFNLFAQYSAAAYCGKNNDAPAGTNITCTGNACPEVEKADATFLYSFEDSGVGDVTGFLALDNTNKLIVLSFRGSRSIENWIGNLNFDLKEINDICFGCRGHDGFTSSWRSVADTLRQKVEDAVREHPDYRVVFTGHSLGGALATVAGADLRGNGYDIDVFSYGAPRVGNRAFAEFLTVQTGGTLYRITHTNDIVPRLPPREFGYSHSSPEYWIKSGTLVPVTRNDIVKIEGIDATGGNNQPNIPDIPAHLWYFGLIGTC

SEQ ID NO: 11142 - protein, 268 aa, Thermomyces lanuginosus
EVSQDLFNQFNLFAQYSAAAYCGKNNDAPAGTNITCTGNACPEVEKADATELYSFEDSGVGDVTGFLALDNTNKLIVLSFRGSRSIENWIGNLNFDLKEINDICSGCRGHDGFTSSWRSVADTLRQKVEDAVREHPDYRVVFTGHSLGGALATVAGADLRGNGYDIDVFSYGAPRVGNRAFAEFLTVQTGGTLYRITHTNDIVPRLPPREFGYSHSSPEYWIKSGTLVPVTRNDIVKIEGIDATGGNNQPNIPDIPAHLWYFGLIGTC

SEQ ID NO: 11143 - protein, 268 aa, Thermomyces lanuginosus
EVSQDLFNQFNLFAQYSAAAYCGKNNDAPAGTNITCTGNACPEVEKADATFLYSFEDSGVGDVTGFLALDNTNKLIVLSFRGSRSIENWIGNRNFDLKEINDICSGCRGHDGFTSSWRSVADTLRQKVEDAVREHPDYRVVFTGHSLGGALATVAGADLRGNGYDIDVFSYGAPRVGNRAFAEFLTVQTGGTLYRITHTNDIVPRLPPREFGYSHSSPEYWIKSGTLVPVTRNDIVKIEGIDATGGNNQPNIPDIPAHLWYFGLIGTC

SEQ ID NO: 11144 - protein, 268 aa, Thermomyces lanuginosus
EVSQDLFNQFNLFAQYSAAAYCGKNNDAPAGTNITCTGNACPEVEKADATFLYSFEDSGVGDVTGFLALDNTNKLIVLSFRGSRSIENWIGNLNFDLKEINDICSGCRGHDGFTSSWRSVADTLRQKVEDAVREHPDYRVVFTGHSLGGALATVAGADLRGNGYDIDVFSYGAPRVGNRAFAEFLTVQTGGTLYRITHTNDIVPRLPPREFGYSHSSPEYFIKSGTLVPVTRNDIVKIEGIDATGGNNQPNIPDIPAHLWYFGLIGTC

SEQ ID NO: 11145 - protein, 268 aa, Thermomyces lanuginosus
EVSQDLFNQFNLFAQYSAAAYCGKNNDAPAGTNITCTGNACPEVEKADATFLYSFEDSGVGDVTGFLALDNTNKLIVLSFRGSRSIENWIGNLNFDLKEINDICSGCRGHDGFTSSWRSVADTLRQKVEDAVREHPFYRVVFTGHSLGGALATVAGADLRGNGYDIDVFSYGAPRVGNRAFAEFLTVQTGGTLYRITHTNDIVPRLPPREFGYSHSSPEYWIKSGTLVPVTRNDIVKIEGIDATGGNNQPNIPDIPAHLWYFGLIGTC

SEQ ID NO: 11146 - protein, 268 aa, Thermomyces lanuginosus
EVSQDLFNQFNLFAQYSAAAYCGKNNDAPAGTNITCTGIACPEVEKADATFLYSFEDSGVGDVTGFLALDNTNKLIVLSFRGSRSIENWIGNLNFDLKEINDICSGCRGHDGFTSSWRSVADTLRQKVEDAVREHPDYRVVFTGHSLGGALATVAGADLRGNGYDIDVFSYGAPRVGNRAFAEFLTVQTGGTLYRITHTNDIVPRLPPREFGYSHSSPEYWIKSGTLVPVTRNDIVKIEGIDATGGNNQPNIPDIPAHLWYFGLIGTC

SEQ ID NO: 11147 - protein, 268 aa, Thermomyces lanuginosus
EVSQDLFNQFNLFAQYSAAAYCGKNNDAPAGTNITCTGNACPEVEKADATFLYSFEDSGVGDVTGFLALDNTNKLIVLSFRGSRSIENWIGNLNFDLKEINDICSGCRGHDGFTSSWRSVADTLRIKVEDAVREHPDYRVVFTGHSLGGALATVAGADLRGNGYDIDVFSYGAPRVGNRAFAEFLTVQTGGTLYRITHTNDIVPRLPPREFGYSHSSPEYWIKSGTLVPVTRNDIVKIEGIDATGGNNQPNIPDIPAHLWYFGLIGTC

SEQ ID NO: 11148 - protein, 268 aa, Thermomyces lanuginosus
EVSQDLFNQFNLFAQYSAAAYCGKNNDAPAGTNITCTGNACPEVEKADATFLYSFEDSGVGDVTGFLALDNTNKLIVLSFRGSRSIENWIGNLNFDLKEINDICSGCRGHDGFTSSWRSVADTLRQKVEDAVREHPDYRVVFTGHSLGGALATVAGADLRGNGYDIDVFSYGAPRVGNRAFAEFLTVQTGGTLYRITHTNDIVPRLPPREFGYSHSSPEYWIKSGTLVPVTRNDIVKIEGIDATGGNNQPNIPAIPAHLWYFGLIGTC

SEQ ID NO: 11149 - protein, 268 aa, Thermomyces lanuginosus
EVSQDLFNQFNLFAQYSAAAYCGKNNDAPAGTNITCTGNACPEVEKADATFLYSFEDSGVGDVTGFLALDNTNKLIVLSFRGSRSIENWIGNLNFDLKEINDICSGCRGHDGFTSSWRSVADTLRQKVEDAVREHPVYRVVFTGHSLGGALATVAGADLRGNGYDIDVFSYGAPRVGNRAFAEFLTVQTGGTLYRITHTNDIVPRLPPREFGYSHSSPEYWIKSGTLVPVTRNDIVKIEGIDATGGNNQPNIPDIPAHLWYFGLIGTC

SEQ ID NO: 11150 - protein, 268 aa, Thermomyces lanuginosus
EVSQDLFNQFNLFAQYSAAAYCGKNNDAPAGTNITCTGNACPEVEKADATFLYSFEDSGVGDVTGFLALDNTNKLIVLSFRGSRSIPNWIGNLNFDLKEINDICSGCRGHDGFTSSWRSVADTLRQKVEDAVREHPDYRVVFTGHSLGGALATVAGADLRGNGYDIDVFSYGAPRVGNRAFAEFLTVQTGGTLYRITHTNDIVPRLPPREFGYSHSSPEYWIKSGTLVPVTRNDIVKIEGIDATGGNNQPNIPDIPAHLWYFGLIGTC

SEQ ID NO: 11151 - protein, 268 aa, Thermomyces lanuginosus
EVSQDLFNQFNLFAQYSAAAYCGKNNDAPAGTNITCTGNACPEVEKADATFLYSFEDSGVGDVTGFLALDNTNKLIVLSFRGSRSIENWIGNLNFDLKEINDICSGCRGHDGFTSSWRSVADTLRQKVEDAVREHPDYRVVFTGHSLGGALATVAGADLRGNGYDIDVFSYGAPRVGNRAFAEFLTVQTGGTLYRITHTNDIVPRLPPREFGYSHSSPEYWIKSGTLVPVTRNDIVKIEGIDATGGNNQPNTPDIPAHLWYFGLIGTC

SEQ ID NO: 11152 - protein, 268 aa, Thermomyces lanuginosus
EVSQDLFNQFNLFAQYSAAAYCGKNNDAPAGTNITCTGNACPEVEKADATFLYSFEDSGVGDVTGFLALDNTNKLIVLSFRGSRSIENWIGNLNFDLKEINDICSGCRGHDGFTSSWRSVQDTLRQKVEDAVREHPDYRVVFTGHSLGGALATVAGADLRGNGYDIDVFSYGAPRVGNRAFAEFLTVQTGGTLYRITHTNDIVPRLPPREFGYSHSSPEYWIKSGTLVPVTRNDIVKIEGIDATGGNNQPNIPDIPAHLWYFGLIGTC

SEQ ID NO: 11153 - protein, 268 aa, Thermomyces lanuginosus
EVSQDLFNQFNLFAQYSAAAYCGKNNDAPAGTNITCTGNACPEVEKADATFLYSFEDSGVGDVTGFLALDNTNKLIVLSFRGSRSIENWIGNLNFDLKEINDICSGCRGHDGFTSSWRSVADTLRQKVEDAVREHPDYRVVFTGHSLGGALATVAGADLRGNGYDIDVFSYGAPRVGNRAFAEFLTVQTGGTLYRITHTNDIVPRLPPREFGYSHSSPEYWIKSGTLVPVTRNDIVKIEGIDATGGNNQPNLPDIPAHLWYFGLIGTC

SEQ ID NO: 11154 - protein, 268 aa, Thermomyces lanuginosus
EVSQDLYNQFNLFAQYSAAAYCGKNNDAPAGTNITCTGNACPEVEKADATFLYSFEDSGVGDVTGFLALDNTNKLIVLSFRGSRSIENWIGNLNFDLKEINDICSGCRGHDGFTSSWRSVADTLRQKVEDAVREHPDYRVVFTGHSLGGALATVAGADLRGNGYDIDVFSYGAPRVGNRAFAEFLTVQTGGTLYRITHTNDIVPRLPPREFGYSHSSPEYWIKSGTLVPVTRNDIVKIEGIDATGGNNQPNIPDIPAHLWYFGLIGTC

SEQ ID NO: 11155 - protein, 268 aa, Thermomyces lanuginosus
EVSQDLFNQFNLFAQYSAAAYCGKNNDAPAGTNITCTGNACPEVEKADATFLYSFEDSGVGDVTGFLALDNTNKLIVLSFRGSRSIENWIGNLNFDLKEINDICSGCRGHDGFTSSWRSVADTLRQKVEDAVREHPDYRVVFTGHSLGGALATVAGADLRGNGYDIDVFSYGAPRVGNRAFAEFLTVQTGGTLYRITHTNDIVPRLPPREFGYSHSSPEYWIKSGTCVPVTRNDIVKIEGIDATGGNNQPNIPDIPAHLWYFGLIGTC

SEQ ID NO: 11156 - protein, 268 aa, Thermomyces lanuginosus
EVSQDLFNQFNLFAQYSAAAYCGKNNDAPAGTNITCTGNACPEVEKADATFLYSFEDSGVGDVTGFLALDNTNKLITLSFRGSRSIENWIGNLNFDLKEINDICSGCRGHDGFTSSWRSVADTLRQKVEDAVREHPDYRVVFTGHSLGGALATVAGADLRGNGYDIDVFSYGAPRVGNRAFAEFLTVQTGGTLYRITHTNDIVPRLPPREFGYSHSSPEYWIKSGTLVPVTRNDIVKIEGIDATGGNNQPNIPDIPAHLWYFGLIGTC

SEQ ID NO: 11157 - protein, 268 aa, Thermomyces lanuginosus
EVSQDLFNQFHLFAQYSAAAYCGKNNDAPAGTNITCTGNACPEVEKADATFLYSFEDSGVGDVTGFLALDNTNKLIVLSFRGSRSIENWIGNLNFDLKEINDICSGCRGHDGFTSSWRSVADTLRQKVEDAVREHPDYRVVFTGHSLGGALATVAGADLRGNGYDIDVFSYGAPRVGNRAFAEFLTVQTGGTLYRITHTNDIVPRLPPREFGYSHSSPEYWIKSGTLVPVTRNDIVKIEGIDATGGNNQPNIPDIPAHLWYFGLIGTC

SEQ ID NO: 11158 - protein, 268 aa, Thermomyces lanuginosus
EVSQDLFNQFNLFAQYSAAAYCGKNNDAPAGTNITCTGNACPEVEKADATFLYSFEDSGVGDVTGFLALDNTNKLIVLSFRGSRSIENWIGNLMFDLKEINDICSGCRGHDGFTSSWRSVADTLRQKVEDAVREHPDYRVVFTGHSLGGALATVAGADLRGNGYDIDVFSYGAPRVGNRAFAEFLTVQTGGTLYRITHTNDIVPRLPPREFGYSHSSPEYWIKSGTLVPVTRNDIVKIEGIDATGGNNQPNIPDIPAHLWYFGLIGTC

SEQ ID NO: 11159 - protein, 268 aa, Thermomyces lanuginosus
EVSQDLFNQFNLFAQYSAAAYCGKNNDAPAGTNITCTGNACPEVEKADATFLYSFEDSGVGDVTGFLALDNTNKLIVLSFRGSRSIENWIGNLSFDLKEINDICSGCRGHDGFTSSWRSVADTLRQKVEDAVREHPDYRVVFTGHSLGGALATVAGADLRGNGYDIDVFSYGAPRVGNRAFAEFLTVQTGGTLYRITHTNDIVPRLPPREFGYSHSSPEYWIKSGTLVPVTRNDIVKIEGIDATGGNNQPNIPDIPAHLWYFGLIGTC

SEQ ID NO: 11160 - protein, 268 aa, Thermomyces lanuginosus
EVSQDLFNQFNLFAQYSAAAYCGKNNDAPAQTNITCTGNACPEVEKADATFLYSFEDSGVGDVTGFLALDNTNKLIVLSFRGSRSIENWIGNLNFDLKEINDICSGCRGHDGFTSSWRSVADTLRQKVEDAVREHPDYRVVFTGHSLGGALATVAGADLRGNGYDIDVFSYGAPRVGNRAFAEFLTVQTGGTLYRITHTNDIVPRLPPREFGYSHSSPEYWIKSGTLVPVTRNDIVKIEGIDATGGNNQPNIPDIPAHLWYFGLIGTC

SEQ ID NO: 11161 - protein, 268 aa, Thermomyces lanuginosus
EVSQDLFNQFNLFAQYSAAAYCGKNNDAPAGTNITCTGNACPEVEKADATFLYSFEDSGVGDVTGFLALDNTNKLIVLSFRGSRSIENWIGNLNFDLKEINDICSGCRGHDGFTSSWRSVADTLRQKVEDAVREHPDYRVVFTGHSLGGALATVAGADLRGNGYDIDVFSYGAPRVGNRAFAEFLTVQTGGTLYRITHGNDIVPRLPPREFGYSHSSPEYWIKSGTLVPVTRNDIVKIEGIDATGGNNQPNIPDIPAHLWYFGLIGTC

SEQ ID NO: 11162 - protein, 268 aa, Thermomyces lanuginosus
EVSQDLFNQFNLFAQYSAAAYCGKNNDAPAGTNITCTGNACPETEKADATFLYSFEDSGVGDVTGFLALDNTNKLIVLSFRGSRSIENWIGNLNFDLKEINDICSGCRGHDGFTSSWRSVADTLRQKVEDAVREHPDYRVVFTGHSLGGALATVAGADLRGNGYDIDVFSYGAPRVGNRAFAEFLTVQTGGTLYRITHTNDIVPRLPPREFGYSHSSPEYWIKSGTLVPVTRNDIVKIEGIDATGGNNQPNIPDIPAHLWYFGLIGTC

SEQ ID NO: 11163 - protein, 268 aa, Thermomyces lanuginosus
EVSQDLFNQFNLFAQYSAAAYCGKNNDAPAGTNITCTGNACPEVEKADATFLYSFEDSGVGDVTGFLALDNTNKLIVLSFRGSRSIENWIGNLNFDLKEINDICSGCRGHDGFTSSWRSVADTLRQKVEDAVREHPDYRVVFTGHSLGGALATVAGADLRGNGYDIDVFSYGAPRVGNRAFAEFLTVQTGGTLYRITHTNDIVPRLPPREFGYSHSSPEYWIKSGTLVPVTRNRIVKIEGIDATGGNNQPNIPDIPAHLWYFGLIGTC

SEQ ID NO: 11164 - protein, 268 aa, Thermomyces lanuginosus
EVSQDLFNQFNLFAQYSAAAYCGKNNDAPAGTNITCTGNACPEVEKADATFLYSFEDSGVGDVTGFLALDNTNKLIVLSFRGSRSIENWIGNLNFDLKEINDICSGCRGHDGFTSSWRSVADTLRQKVEDAVREHPDYRVVFTGHSLGGALATVAGADLRGNGYDIDVFSYGAPRVGNRAFAEFLTVQTGGTLYRITHTNDIVPRLPPREFGYSHSSPEYWIKSGTLVPVTRQDIVKIEGIDATGGNNQPNIPDIPAHLWYFGLIGTC

SEQ ID NO: 11165 - protein, 268 aa, Thermomyces lanuginosus
EVSQDLFNQFNLFAQYSAAAYCGKNNDAPAGTNITCTGNACPEVEKADATFLYSFEDSGVGDVTGFLALDNTNKLIVLSFRGSRSIENWIGNLNFDLKEINDICSGCRGHDGFTSSWRSVADTLRQKVEDAVREHPDYRVVFTGHSLGGALATVAGADLRGNGYDIDVFSYGAPRVGNRAFAEFLTVQTGGTLYRITHTNDIVPRLPPRXFGYSHSSPEYWIKSGTLVPVTRNDIVKIEGIDATGGNNQPNIPDIPAHLWYFGLIGTC

SEQ ID NO: 11166 - protein, 268 aa, Thermomyces lanuginosus
EVSQDLFNQFNLFAQYSAAAYCGKNNDAPAGTNITCTGNACPEVEMADATFLYSFEDSGVGDVTGFLALDNTNKLIVLSFRGSRSIENWIGNLNFDLKEINDICSGCRGHDGFTSSWRSVADTLRQKVEDAVREHPDYRVVFTGHSLGGALATVAGADLRGNGYDIDVFSYGAPRVGNRAFAEFLTVQTGGTLYRITHTNDIVPRLPPREFGYSHSSPEYWIKSGTLVPVTRNDIVKIEGIDATGGNNQPNIPDIPAHLWYFGLIGTC

SEQ ID NO: 11167 - protein, 268 aa, Thermomyces lanuginosus
EVSQDLFNQFNLFAQWSAAAYCGKNNDAPAGTNITCTGNACPEVEKADATFLYSFEDSGVGDVTGFLALDNTNKLIVLSFRGSRSIENWIGNLNFDLKEINDICSGCRGHDGFTSSWRSVADTLRQKVEDAVREHPDYRVVFTGHSLGGALATVAGADLRGNGYDIDVFSYGAPRVGNRAFAEFLTVQTGGTLYRITHTNDIVPRLPPREFGYSHSSPEYWIKSGTLVPVTRNDIVKIEGIDATGGNNQPNIPDIPAHLWYFGLIGTC

SEQ ID NO: 11168 - protein, 268 aa, Thermomyces lanuginosus
EVSQDLFNQFNLQAQYSAAAYCGKNNDAPAGTNITCTGNACPEVEKADATFLYSFEDSGVGDVTGFLALDNTNKLIVLSFRGSRSIENWIGNLNFDLKEINDICSGCRGHDGFTSSWRSVADTLRQKVEDAVREHPDYRVVFTGHSLGGALATVAGADLRGNGYDIDVFSYGAPRVGNRAFAEFLTVQTGGTLYRITHTNDIVPRLPPREFGYSHSSPEYWIKSGTLVPVTRNDIVKIEGIDATGGNNQPNIPDIPAHLWYFGLIGTC

SEQ ID NO: 11169 - protein, 268 aa, Thermomyces lanuginosus
EVGQDLFNQFNLFAQYSAAAYCGKNNDAPAGTNITCTGNACPEVEKADATFLYSFEDSGVGDVTGFLALDNTNKLIVLSFRGSRSIENWIGNLNFDLKEINDICSGCRGHDGFTSSWRSVADTLRQKVEDAVREHPDYRVVFTGHSLGGALATVAGADLRGNGYDIDVFSYGAPRVGNRAFAEFLTVQTGGTLYRITHTNDIVPRLPPREFGYSHSSPEYWIKSGTLVPVTRNDIVKIEGIDATGGNNQPNIPDIPAHLWYFGLIGTC

SEQ ID NO: 11170 - protein, 268 aa, Thermomyces lanuginosus
EVSQDLFNQFNLFAQYSAAAYCGKNNDAPAGTNITCTGNACPEVEKADATFLYSFEDSGVGDVTGFLALDNTNKLIVLSFRGSRSIENWIGNLNFDLKEINDICSGCRGHDGFTSSWRSVADTLRQKVEDAVREHPNYRVVFTGHSLGGALATVAGADLRGNGYDIDVFSYGAPRVGNRAFAEFLTVQTGGTLYRITHTNDIVPRLPPREFGYSHSSPEYWIKSGTLVPVTRNDIVKIEGIDATGGNNQPNIPDIPAHLWYFGLIGTC

SEQ ID NO: 11171 - protein, 268 aa, Thermomyces lanuginosus
EVSQDLFNQFNLFAQYSAAAYCGKNNDAPAGTNITCTGNACPEVEKADATFLYSFEDSGVGDQTGFLALDNTNKLIVLSFRGSRSIENWIGNLNFDLKEINDICSGCRGHDGFTSSWRSVADTLRQKVEDAVREHPDYRVVFTGHSLGGALATVAGADLRGNGYDIDVFSYGAPRVGNRAFAEFLTVQTGGTLYRITHTNDIVPRLPPREFGYSHSSPEYWIKSGTLVPVTRNDIVKIEGIDATGGNNQPNIPDIPAHLWYFGLIGTC

SEQ ID NO: 11172 - protein, 268 aa, Thermomyces lanuginosus
EVSQDLFNQFNLFAQYSAAAYCGKNWDAPAGTNITCTGNACPEVEKADATFLYSFEDSGVGDVTGFLALDNTNKLIVLSFRGSRSIENWIGNLNFDLKEINDICSGCRGHDGFTSSWRSVADTLRQKVEDAVREHPDYRVVFTGHSLGGALATVAGADLRGNGYDIDVFSYGAPRVGNRAFAEFLTVQTGGTLYRITHTNDIVPRLPPREFGYSHSSPEYWIKSGTLVPVTRNDIVKIEGIDATGGNNQPNIPDIPAHLWYFGLIGTC

SEQ ID NO: 11173 - protein, 268 aa, Thermomyces lanuginosus
EVSQDLFNQFNLFAQYSAAAYCGKNNDAPAGTNITCTGNACPEVEKADATFLYSFEDSGVGDVTGFLALDNTNKLIVLSFRGSRSIENWIGNLNFDLKEINDICSGCRGHDGFTSSWRSVADTLRQKVEDAVREHPDYRVVFTGHSLGGAWATVAGADLRGNGYDIDVFSYGAPRVGNRAFAEFLTVQTGGTLYRITHTNDIVPRLPPREFGYSHSSPEYWIKSGTLVPVTRNDIVKIEGIDATGGNNQPNIPDIPAHLWYFGLIGTC

SEQ ID NO: 11174 - protein, 268 aa, Thermomyces lanuginosus
EVSQDLFNQFNLFAQYSAAAYCGKNNEAPAGTNITCTGNACPEVEKADATFLYSFEDSGVGDVTGFLALDNTNKLIVLSFRGSRSIENWIGNLNFDLKEINDICSGCRGHDGFTSSWRSVADTLRQKVEDAVREHPDYRVVFTGHSLGGALATVAGADLRGNGYDIDVFSYGAPRVGNRAFAEFLTVQTGGTLYRITHTNDIVPRLPPREFGYSHSSPEYWIKSGTLVPVTRNDIVKIEGIDATGGNNQPNIPDIPAHLWYFGLIGTC

SEQ ID NO: 11175 - protein, 268 aa, Thermomyces lanuginosus
EVSQDLFNQFNLFAQYSAAAYCGKNNDAPAGTNITCTGNACPEVEKADATFLYSFEDSGVGDVTGFLALDNHNKLIVLSFRGSRSIENWIGNLNFDLKEINDICSGCRGHDGFTSSWRSVADTLRQKVEDAVREHPDYRVVFTGHSLGGALATVAGADLRGNGYDIDVFSYGAPRVGNRAFAEFLTVQTGGTLYRITHTNDIVPRLPPREFGYSHSSPEYWIKSGTLVPVTRNDIVKIEGIDATGGNNQPNIPDIPAHLWYFGLIGTC

SEQ ID NO: 11176 - protein, 268 aa, Thermomyces lanuginosus
EVSQDLFNQFNLFAQYSAAAYCGKNNDAPAGTNITCTGNACPEVEKADATFLYSFEDSGVGDVTGFLALDNTNKLIVLSFRGSRSIENWIGNLNFDLKEINDICSGCRGHDGFTSSWRSVADTLRQKVEDAVREHPDYRVVFTGHSLGGALATVAGADLRGNGYDIDVFSYGAPRVGNRAFAEFLTVQVGGTLYRITHTNDIVPRLPPREFGYSHSSPEYWIKSGTLVPVTRNDIVKIEGIDATGGNNQPNIPDIPAHLWYFGLIGTC

SEQ ID NO: 11177 - protein, 268 aa, Thermomyces lanuginosus
EVSQDLFNQFNLFAQYSAAAYCGKNNDAPAGTNITCTGNACPEVEKADATFLYSFEDSGVGDVTGFLALDNKNKLIVLSFRGSRSIENWIGNLNFDLKEINDICSGCRGHDGFTSSWRSVADTLRQKVEDAVREHPDYRVVFTGHSLGGALATVAGADLRGNGYDIDVFSYGAPRVGNRAFAEFLTVQTGGTLYRITHTNDIVPRLPPREFGYSHSSPEYWIKSGTLVPVTRNDIVKIEGIDATGGNNQPNIPDIPAHLWYFGLIGTC

SEQ ID NO: 11178 - protein, 268 aa, Thermomyces lanuginosus
EVSQDLFNQFNLFAQYSAAAYCGKNNDAPAGTNITCTGNACPEVEKADATFLYSFEDSGVGDVTGFLALDNTNKLIVLSFRGSRSIENWIGNLNFDLKEINDICEGCRGHDGFTSSWRSVADTLRQKVEDAVREHPDYRVVFTGHSLGGALATVAGADLRGNGYDIDVFSYGAPRVGNRAFAEFLTVQTGGTLYRITHTNDIVPRLPPREFGYSHSSPEYWIKSGTLVPVTRNDIVKIEGIDATGGNNQPNIPDIPAHLWYFGLIGTC

SEQ ID NO: 11179 - protein, 268 aa, Thermomyces lanuginosus
EVSQDLFNQFNLFAQYSAAAYCGKNNDAPAGTNITCTVNACPEVEKADATFLYSFEDSGVGDVTGFLALDNTNKLIVLSFRGSRSIENWIGNLNFDLKEINDICSGCRGHDGFTSSWRSVADTLRQKVEDAVREHPDYRVVFTGHSLGGALATVAGADLRGNGYDIDVFSYGAPRVGNRAFAEFLTVQTGGTLYRITHTNDIVPRLPPREFGYSHSSPEYWIKSGTLVPVTRNDIVKIEGIDATGGNNQPNIPDIPAHLWYFGLIGTC

SEQ ID NO: 11180 - protein, 268 aa, Thermomyces lanuginosus
EVSQDLFNQFNLFAQYSAAAYCGKNNDAPAGTNITCTGNACPEVEKADATFLYSFEDSGVGDVTGFLALDNTNKLIVLSFRGSRSIENWIGNLNFDLKRIRDICSGCRGHDGFTSSWRSVADTLRQKVEDAVREHPDYRVVFTGHSLGGALATVAGADLRGNGYDIDVFSYGAPRVGNRAFAEFLTVQTGGTLYRITHTNDIVPRLPPREFGYSHSSPEYWIKSGTLVPVTRNDIVKIEGIDATGGNNQPNIPDIPAHLWYFGLIGTC

SEQ ID NO: 11181 - protein, 268 aa, Thermomyces lanuginosus
EVSQDLFNQFNLFAQYSAAAYCGKNNDAPAGTNITCTGNACPEVEKADATFLYSFEDSGVGDVTGFLALDNTNKLIVLSFRGSRSIENWIGNLNFDLKEINDICSGCRGHDGFTSSWRSVADTLRQKVEDAVREHPDYRVVFTGHSLGGALATVAGADLRGNGYDIDVFSYGAPRVGNRAFAEFLTVQTGGTLYRITHTNDIVPRLPPREFGYSHSSPEYWIKSGTLVPVTRNDIVKIEGIDATGGNNQPNGPDIPAHLWYFGLIGTC

SEQ ID NO: 11182 - protein, 268 aa, Thermomyces lanuginosus
EVSQDLFNQFNLFAQYSAAAYCGKNNDAPAGTNITCTGNWCPEVEKADATFLYSFEDSGVGDVTGFLALDNTNKLIVLSFRGSRSIENWIGNLNFDLKEINDICSGCRGHDGFTSSWRSVADTLRQKVEDAVREHPDYRVVFTGHSLGGALATVAGADLRGNGYDIDVFSYGAPRVGNRAFAEFLTVQTGGTLYRITHTNDIVPRLPPREFGYSHSSPEYWIKSGTLVPVTRNDIVKIEGIDATGGNNQPNIPDIPAHLWYFGLIGTC

SEQ ID NO: 11183 - protein, 268 aa, Thermomyces lanuginosus
EVSQDLFNQFNLFAQYSAAAYCGKNNDAPAGTNITCTGNACPEVEKADATFLYSFEDSGVGDVTGFLALDNTNKLIVLSFRGSRSIENWIGNLNFDLKEINDICSGCRGHDGFTSSWRSVADTLRQKVEDAVREHPDYRVVFTGHSLGGALATVAGADLRGNGYDWDVFSYGAPRVGNRAFAEFLTVQTGGTLYRITHTNDIVPRLPPREFGYSHSSPEYWIKSGTLVPVTRNDIVKIEGIDATGGNNQPNIPDIPAHLWYFGLIGTC

SEQ ID NO: 11184 - protein, 268 aa, Thermomyces lanuginosus
EVSQDLFNQFNLFAQYSAAAYCGKNNDAPAGTNITCTGNACPEVEKADATFLYSFEDSGVGDVTGFLALDNTNKLIVLSFRGSRSIENWIGNLNFDLKEINDICSGCRGHDGFTSSWRSVADTLRQKVEDAVREHPDYRVVFTGHSLGGALATVAGADLRGNGYDIDVFSYGAPRVGNRAFAEFLTVQTGGTLYRITHTNDIVPRLPPREFGYSHSSPEYWIKSGTLVPVTRNDIVKIEGIDATGGNNQDNIPDIPAHLWYFGLIGTC

SEQ ID NO: 11185 - protein, 268 aa, Thermomyces lanuginosus
EVSQDLFNQFNLFAQYSAAAYCGKNNDAPAGTNITCTGNACPEVEKADATFLYSFEDSGVGDVTGFLALDNTNKLIVLSFRGSRSIENWIGNLNFDLKEINDICSGCRGHDGFTSSWRSVADTLRQKVEDAVREHPDYRVVFTGHSLGGALATVAGADLRGNGYDIDVFSYGAPRVGNRAFAEFLTVQTGGTLYRITHTNDIVPRLPPREFGYSHSSPEYWIKSGTLVPVTRNDIVKIEGIDAMGGNNQPNIPDIPAHLWYFGLIGTC

SEQ ID NO: 11186 - protein, 268 aa, Thermomyces lanuginosus
EVSQDLFNQFNLFAQYSAAAYCGKNNDAPAGTNITCTGNACPEVEKADATFLYSFEDSGVGDVTGFLALDNTNKLIVLSFRGSRSIENWIGNLNFDLKEINDICSGCRGHDGFTSSWRSSADTLRQKVEDAVREHPDYRVVFTGHSLGGALATVAGADLRGNGYDIDVFSYGAPRVGNRAFAEFLTVQTGGTLYRITHTNDIVPRLPPREFGYSHSSPEYWIKSGTLVPVTRNDIVKIEGIDATGGNNQPNIPDIPAHLWYFGLIGTC

SEQ ID NO: 11187 - protein, 268 aa, Thermomyces lanuginosus
EVSQDLFNQFNLFAQYSAAAYCGKNNDAPAGTNITCTGNACPEVEKADATFLYSFEDSGVGDVTGFLALDNTNKLIVLSFRGSRSIENWIGNLNFDLKEINDICSGCRGHDGFTSSWRSVADTLRQKVEDAVREHPDYRVVFTGHSLGGALATVAGADLRGNGYDIDVFSYGAPRVGNRAFAEFLTVQTGGTLYRITHTNDIVPRLPPREFGYSHSSPEYWIKSCTLVPVTRNDIVKIEGIDATGGNNQPNIPDIPAHLWYFGLIGTC

SEQ ID NO: 11188 - protein, 268 aa, Thermomyces lanuginosus
EVSQDLFNQFNLFAQYSAAAYCGKNNDAPAGTNITCTGNACPEVEKADATFLYSFEDSGVGDVTGFLALDNTNKLIVLSFRGSRSIENWIGNLNFDLKEINDICSGCRGHDGFTSSWRSVADTLRQKVEDAVREHPDYRVVFTGHSLGGALATVAGADLRGNGYDIDVFSYGAPRVGNRAFAEFLTVQTGGTLYRITGTNDIVPRLPPREFGYSHSSPEYWIKSGTLVPVTRNDIVKIEGIDATGGNNQPNIPDIPAHLWYFGLIGTC

SEQ ID NO: 11189 - protein, 268 aa, Thermomyces lanuginosus
EVSQDLFNQFNLFAQYSAAAYCGKNNDAPAGTNITCTGNACPEVEGADATFLYSFEDSGVGDVTGFLALDNTNKLIVLSFRGSRSIENWIGNLNFDLKEINDICSGCRGHDGFTSSWRSVADTLRQKVEDAVREHPDYRVVFTGHSLGGALATVAGADLRGNGYDIDVFSYGAPRVGNRAFAEFLTVQTGGTLYRITHTNDIVPRLPPREFGYSHSSPEYWIKSGTLVPVTRNDIVKIEGIDATGGNNQPNIPDIPAHLWYFGLIGTC

SEQ ID NO: 11190 - protein, 268 aa, Thermomyces lanuginosus
EVSQDLFNQFNLFAQYSAAAYCGKNNDAPAGTNITCTGNACPEVEKADATFLYSFEDSGVGDVTGFLALDNTNKLIVLSFRGSRSIENWIGNLNFDLKEINDICSGCRGHDGFTSSWRSVADTLRQKVEDAVREHPDYRVVFTGHSLGGALATVAGADLRGNGYDIDVFSYGAPRVGNRAFAEFLTVQTGGTLYRITHTNDIVPRLPPREFGYSHSSPEYWIKSGTLVPVTRNDIVKIEGIDATGGNNQPNFPDIPAHLWYFGLIGTC

SEQ ID NO: 11191 - protein, 268 aa, Thermomyces lanuginosus
EVSQDLFNQFNLFAQYSAAAYCGKNNDAPAGTNITCDGNACPEVEKADATFLYSFEDSGVGDVTGFLALDNTNKLIVLSFRGSRSIENWIGNLNFDLKEINDICSGCRGHDGFTSSWRSVADTLRQKVEDAVREHPDYRVVFTGHSLGGALATVAGADLRGNGYDIDVFSYGAPRVGNRAFAEFLTVQTGGTLYRITHTNDIVPRLPPREFGYSHSSPEYWIKSGTLVPVTRNDIVKIEGIDATGGNNQPNIPDIPAHLWYFGLIGTC

SEQ ID NO: 11192 - protein, 268 aa, Thermomyces lanuginosus
EVSQDLFNQFNLFAQYSAAAYCGKNNDAPAGTNITCTGNACPEVEKADLTFLYSFEDSGVGDVTGFLALDNTNKLIVLSFRGSRSIENWIGNLNFDLKEINDICSGCRGHDGFTSSWRSVADTLRQKVEDAVREHPDYRVVFTGHSLGGALATVAGADLRGNGYDIDVFSYGAPRVGNRAFAEFLTVQTGGTLYRITHTNDIVPRLPPREFGYSHSSPEYWIKSGTLVPVTRNDIVKIEGIDATGGNNQPNIPDIPAHLWYFGLIGTC

SEQ ID NO: 11193 - protein, 268 aa, Thermomyces lanuginosus
EVSQDLFNQFNLFAQYSAAAYCGKNNDAPAGTNITCTGNACPEVEKADATFLYSFEDSGYGDVTGFLALDNTNKLIVLSFRGSRSIENWIGNLNFDLKEINDICSGCRGHDGFTSSWRSVADTLRQKVEDAVREHPDYRVVFTGHSLGGALATVAGADLRGNGYDIDVFSYGAPRVGNRAFAEFLTVQTGGTLYRITHTNDIVPRLPPREFGYSHSSPEYWIKSGTLVPVTRNDIVKIEGIDATGGNNQPNIPDIPAHLWYFGLIGTC

SEQ ID NO: 11194 - protein, 268 aa, Thermomyces lanuginosus
EVSQDLFNQFNLFAQYSAAAYCGKNNDAPAGTNITCTGNACPEVEKADATFLYSFEDSGVGDVTGFLALDNTNKLIVLSFRGSRSIENWIGNLNFDLKEINDICSGCRGHDGFTSSWRSVADTLRQKVEDAVREHPDYRVVFTGHSLGGALATVAGADLRGNGYDIDVFSYGAPRVGNRAFAEFLTVQMGGTLYRITHTNDIVPRLPPREFGYSHSSPEYWIKSGTLVPVTRNDIVKIEGIDATGGNNQPNIPDIPAHLWYFGLIGTC

SEQ ID NO: 11195 - protein, 268 aa, Thermomyces lanuginosus
EVSQDLFNQFNLFAQYSAAAYCHKNNDAPAGTNITCTGNACPEVEKADATFLYSFEDSGVGDVTGFLALDNTNKLIVLSFRGSRSIENWIGNLNFDLKEINDICSGCRGHDGFTSSWRSVADTLRQKVEDAVREHPDYRVVFTGHSLGGALATVAGADLRGNGYDIDVFSYGAPRVGNRAFAEFLTVQTGGTLYRITHTNDIVPRLPPREFGYSHSSPEYWIKSGTLVPVTRNDIVKIEGIDATGGNNQPNIPDIPAHLWYFGLIGTC

SEQ ID NO: 11196 - protein, 268 aa, Thermomyces lanuginosus
EVSQDLFNQFNLFAQYSAAAYCGKNNDAPAGTNITCTGNACPEVEKADATFLYSFEDSGVGDVTGFLALDNTNKLIVLSFRGSRSIENWIGNLNFDLKEINDICSGCRGHDGFTSSWRSVADTLRQKVEDAVREHPDYRVVFNGHSLGGALATVAGADLRGNGYDIDVFSYGAPRVGNRAFAEFLTVQTGGTLYRITHTNDIVPRLPPREFGYSHSSPEYWIKSGTLVPVTRNDIVKIEGIDATGGNNQPNIPDIPAHLWYFGLIGTC

SEQ ID NO: 11197 - protein, 268 aa, Thermomyces lanuginosus
EVSQDLFNQFNLFAQYSAAAYCGKNNDAPAMTNITCTGNACPEVEKADATFLYSFEDSGVGDVTGFLALDNTNKLIVLSFRGSRSIENWIGNLNFDLKEINDICSGCRGHDGFTSSWRSVADTLRQKVEDAVREHPDYRVVFTGHSLGGALATVAGADLRGNGYDIDVFSYGAPRVGNRAFAEFLTVQTGGTLYRITHTNDIVPRLPPREFGYSHSSPEYWIKSGTLVPVTRNDIVKIEGIDATGGNNQPNIPDIPAHLWYFGLIGTC

SEQ ID NO: 11198 - protein, 268 aa, Thermomyces lanuginosus
EVSKDLFNQFNLFAQYSAAAYCGKNNDAPAGTNITCTGNACPEVEKADATFLYSFEDSGVGDVTGFLALDNTNKLIVLSFRGSRSIENWIGNLNFDLKEINDICSGCRGHDGFTSSWRSVADTLRQKVEDAVREHPDYRVVFTGHSLGGALATVAGADLRGNGYDIDVFSYGAPRVGNRAFAEFLTVQTGGTLYRITHTNDIVPRLPPREFGYSHSSPEYWIKSGTLVPVTRNDIVKIEGIDATGGNNQPNIPDIPAHLWYFGLIGTC

SEQ ID NO: 11199 - protein, 268 aa, Thermomyces lanuginosus
EVSQDLFNQFNLFAQYSAAAYCGKNNDAPAGTNITCTGNACPEVEKADATFLYSFEDSGVGDVTGFLALDNTNKLIVLSFRGSRSIENWIGNLNFDLKEINDICSGCRGHDGFTSSWRSVADKLRQKVEDAVREHPDYRVVFTGHSLGGALATVAGADLRGNGYDIDVFSYGAPRVGNRAFAEFLTVQTGGTLYRITHTNDIVPRLPPREFGYSHSSPEYWIKSGTLVPVTRNDIVKIEGIDATGGNNQPNIPDIPAHLWYFGLIGTC

SEQ ID NO: 11200 - protein, 268 aa, Thermomyces lanuginosus
EVSQDLFNWFNLFAQYSAAAYCGKNNDAPAGTNITCTGNACPEVEKADATFLYSFEDSGVGDVTGFLALDNTNKLIVLSFRGSRSIENWIGNLNFDLKEINDICSGCRGHDGFTSSWRSVADTLRQKVEDAVREHPDYRVVFTGHSLGGALATVAGADLRGNGYDIDVFSYGAPRVGNRAFAEFLTVQTGGTLYRITHTNDIVPRLPPREFGYSHSSPEYWIKSGTLVPVTRNDIVKIEGIDATGGNNQPNIPDIPAHLWYFGLIGTC

SEQ ID NO: 11201 - protein, 268 aa, Thermomyces lanuginosus
EVSQDLFNQFNLFAQYSAAAYCGKNNDAPAGTNITCTGNACPEVEKADATFLYSFEDSGVGDVTGFLALDNTNKLIVLSFRGSRSIENWIGNLNFDLKEINDICSGCRGHDGFTSSWRSVADTLRQKVEDAVREHPDYRVVFTGHSLGGALATVAGADLRGNPYDIDVFSYGAPRVGNRAFAEFLTVQTGGTLYRITHTNDIVPRLPPREFGYSHSSPEYWIKSGTLVPVTRNDIVKIEGIDATGGNNQPNIPDIPAHLWYFGLIGTC

SEQ ID NO: 11202 - protein, 268 aa, Thermomyces lanuginosus
EVSQDLFNQFNLFAQYSAAAYCMKNNDAPAGTNITCTGNACPEVEKADATFLYSFEDSGVGDVTGFLALDNTNKLIVLSFRGSRSIENWIGNLNFDLKEINDICSGCRGHDGFTSSWRSVADTLRQKVEDAVREHPDYRVVFTGHSLGGALATVAGADLRGNGYDIDVFSYGAPRVGNRAFAEFLTVQTGGTLYRITHTNDIVPRLPPREFGYSHSSPEYWIKSGTLVPVTRNDIVKIEGIDATGGNNQPNIPDIPAHLWYFGLIGTC

SEQ ID NO: 11203 - protein, 268 aa, Thermomyces lanuginosus
EVSQDLFNQFNLFAQYSAAAYCGKNNDAPAGTNITCTGNACPEVEKADATFLYRFEDSGVGDVTGFLALDNTNKLIVLSFRGSRSIENWIGNLNFDLKEINDICSGCRGHDGFTSSWRSVADTLRQKVEDAVREHPDYRVVFTGHSLGGALATVAGADLRGNGYDIDVFSYGAPRVGNRAFAEFLTVQTGGTLYRITHTNDIVPRLPPREFGYSHSSPEYWIKSGTLVPVTRNDIVKIEGIDATGGNNQPNIPDIPAHLWYFGLIGTC

SEQ ID NO: 11204 - protein, 268 aa, Thermomyces lanuginosus
EVSQDLFNQFNLFAQYSAAAYCGKNNDAPAGTNITCTGNACPEVEKADATFLYSFEDSGVGDVTGFLALDNTSKLIVLSFRGSRSIENWIGNLNFDLKEINDICSGCRGHDGFTSSWRSVADTLRQKVEDAVREHPDYRVVFTGHSLGGALATVAGADLRGNGYDIDVFSYGAPRVGNRAFAEFLTVQTGGTLYRITHTNDIVPRLPPREFGYSHSSPEYWIKSGTLVPVTRNDIVKIEGIDATGGNNQPNIPDIPAHLWYFGLIGTC

SEQ ID NO: 11205 - protein, 268 aa, Thermomyces lanuginosus
EVAQDLFNQFNLFAQYSAAAYCGKNNDAPAGTNITCTGNACPEVEKADATFLYSFEDSGVGDVTGFLALDNTNKLIVLSFRGSRSIENWIGNLNFDLKEINDICSGCRGHDGFTSSWRSVADTLRQKVEDAVREHPDYRVVFTGHSLGGALATVAGADLRGNGYDIDVFSYGAPRVGNRAFAEFLTVQTGGTLYRITHTNDIVPRLPPREFGYSHSSPEYWIKSGTLVPVTRNDIVKIEGIDATGGNNQPNIPDIPAHLWYFGLIGTC

SEQ ID NO: 11206 - protein, 268 aa, Thermomyces lanuginosus
EVSQDLFNQFNLFAQYSAAAYCGKNNDEPAGTNITCTGNACPEVEKADATFLYSFEDSGVGDVTGFLALDNTNKLIVLSFRGSRSIENWIGNLNFDLKEINDICSGCRGHDGFTSSWRSVADTLRQKVEDAVREHPDYRVVFTGHSLGGALATVAGADLRGNGYDIDVFSYGAPRVGNRAFAEFLTVQTGGTLYRITHTNDIVPRLPPREFGYSHSSPEYWIKSGTLVPVTRNDIVKIEGIDATGGNNQPNIPDIPAHLWYFGLIGTC

SEQ ID NO: 11207 - protein, 268 aa, Thermomyces lanuginosus
EVSQDLFNQFNLFAQYSAAAYCGKNNDAPAGTRITCTGNACPEVEKADATFLYSFEDSGVGDVTGFLALDNTNKLIVLSFRGSRSIENWIGNLNFDLKEINDICSGCRGHDGFTSSWRSVADTLRQKVEDAVREHPDYRVVFTGHSLGGALATVAGADLRGNGYDIDVFSYGAPRVGNRAFAEFLTVQTGGTLYRITHTNDIVPRLPPREFGYSHSSPEYWIKSGTLVPVTRNDIVKIEGIDATGGNNQPNIPDIPAHLWYFGLIGTC

SEQ ID NO: 11208 - protein, 268 aa, Thermomyces lanuginosus
EVSQDLFNQFNLFAQYSAAAYCGKNNDAPAGTNITCTGNACPEVEKADATFLYSFEDSGVGDVTGFLANDNTNKLIVLSFRGSRSIENWIGNLNFDLKEINDICSGCRGHDGFTSSWRSVADTLRQKVEDAVREHPDYRVVFTGHSLGGALATVAGADLRGNGYDIDVFSYGAPRVGNRAFAEFLTVQTGGTLYRITHTNDIVPRLPPREFGYSHSSPEYWIKSGTLVPVTRNDIVKIEGIDATGGNNQPNIPDIPAHLWYFGLIGTC

SEQ ID NO: 11209 - protein, 268 aa, Thermomyces lanuginosus
EVSQDLFNQFNLFAQYSAAAYCGKNNDAPAGTNITCTGNACPEVEKADATFLYSFEDGGVGDVTGFLALDNTNKLIVLSFRGSRSIENWIGNLNFDLKEINDICSGCRGHDGFTSSWRSVADTLRQKVEDAVREHPDYRVVFTGHSLGGALATVAGADLRGNGYDIDVFSYGAPRVGNRAFAEFLTVQTGGTLYRITHTNDIVPRLPPREFGYSHSSPEYWIKSGTLVPVTRNDIVKIEGIDATGGNNQPNIPDIPAHLWYFGLIGTC

SEQ ID NO: 11210 - protein, 268 aa, Thermomyces lanuginosus
EVSQDLFNQFNLFAQYSAAAYCGKNNDAPAGTNITCTGNACPEVEKADATFLYSFEDSGVGDVTGFLALDNTNKLIVLSFRGSRSIENWIGNLNFDLKEINDICSGCRGHDGFTSSWRSVADTLRQKVEDAVREHPDYRVVFTGHSLGGALATVAGADLRGNGYDIDVFSYGAPRVGNRAFAEFLTVQNGGTLYRITHTNDIVPRLPPREFGYSHSSPEYWIKSGTLVPVTRNDIVKIEGIDATGGNNQPNIPDIPAHLWYFGLIGTC

SEQ ID NO: 11211 - protein, 268 aa, Thermomyces lanuginosus
EVSQDLFNQFNLFAQYSAAAYCGKNNDAPAGTNITCTGNACPEVEKADATFLYSFEDSGVGDVTGFLAADNTNKLIVLSFRGSRSIENWIGNLNFDLKEINDICSGCRGHDGFTSSWRSVADTLRQKVEDAVREHPDYRVVFTGHSLGGALATVAGADLRGNGYDIDVFSYGAPRVGNRAFAEFLTVQTGGTLYRITHTNDIVPRLPPREFGYSHSSPEYWIKSGTLVPVTRNDIVKIEGIDATGGNNQPNIPDIPAHLWYFGLIGTC

SEQ ID NO: 11212 - protein, 268 aa, Thermomyces lanuginosus
EVSQDLFNQFNLFAQYSAAAYCGKNNDAPAGTNITCTGNACPEVEKADATFLYSFEDSGVGDVTGFLALDNTNKLIVLSFRGSRSIENWIGNLNFDLKEINDICSGCRGHDGFTSSWRSVADTLRQKVEDAVREHPDYRVVFTGHSLGGALATVAWADLRGNGYDIDVFSYGAPRVGNRAFAEFLTVQTGGTLYRITHTNDIVPRLPPREFGYSHSSPEYWIKSGTLVPVTRNDIVKIEGIDATGGNNQPNIPDIPAHLWYFGLIGTC

SEQ ID NO: 11213 - protein, 268 aa, Thermomyces lanuginosus
EVSQDLFNQFNLFAQYSAAAYCGKNNDAPAGTNITCTGNACPEVEKADATFLYSFEDSGVGDVTGFLALDNTNKLIVLSFRGSRSIENWIGNLNFDLKEINDICSGCRGHDGFTSSWRSVADTLRQKVEDWVREHPDYRVVFTGHSLGGALATVAGADLRGNGYDIDVFSYGAPRVGNRAFAEFLTVQTGGTLYRITHTNDIVPRLPPREFGYSHSSPEYWIKSGTLVPVTRNDIVKIEGIDATGGNNQPNIPDIPAHLWYFGLIGTC

SEQ ID NO: 11214 - protein, 268 aa, Thermomyces lanuginosus
EVSQDLFNQFNLFAQYSAAAYCGKNNDAPAGTNITCTGNACPEVEKADATFLYSFEDSGVGDVTGFLALDNTNKLIVLSFRGSRSIENWIGNLNFDLKEINDICSGCRGHDGFTSSWRSVADTLRQKVEDAVREHPDYRMVFTGHSLGGALATVAGADLRGNGYDIDVFSYGAPRVGNRAFAEFLTVQTGGTLYRITHTNDIVPRLPPREFGYSHSSPEYWIKSGTLVPVTRNDIVKIEGIDATGGNNQPNIPDIPAHLWYFGLIGTC

SEQ ID NO: 11215 - protein, 268 aa, Thermomyces lanuginosus
EVSQDLFNQFNLFAQYSAAAYCGKNNDAPAGTNITCTGNACPEVEKADATFLYSFEDSGVGDVTGFLALDNTNKLIVLSFRGSRSIENWIGNLNFDLKEINDICSGCRGHDGFTSSWRSVADTLRQKVEDAVREHPDYRTVFTGHSLGGALATVAGADLRGNGYDIDVFSYGAPRVGNRAFAEFLTVQTGGTLYRITHTNDIVPRLPPREFGYSHSSPEYWIKSGTLVPVTRNDIVKIEGIDATGGNNQPNIPDIPAHLWYFGLIGTC

SEQ ID NO: 11216 - protein, 268 aa, Thermomyces lanuginosus
EVSQDLFNQFNLFAQYSAAAYCGKNNDAPAGTNITCTGNACPEVEKADATFLYSFEDSGVGDVTGFLALDNTNKLIVLSFRGSRSIENWIGNLNFDLKEINDICSGCRGHDGFTSSWRSVADTLRQKVEDAVREHPDYRVVFTGHSLGGALATVAGADLRGNGYDIDVFSYGAPRVGNRAFAEFLTVQTGGTLYRITHTNDIVPRXPPREFGYSHSSPEYWIKSGTLVPVTRNDIVKIEGIDATGGNNQPNIPDIPAHLWYFGLIGTC

SEQ ID NO: 11217 - protein, 268 aa, Thermomyces lanuginosus
EVSQDLFNQFNLFAQYSAAAYCGKNNDAPAGTNITCTGNACPEVEKADATFLYSFEDSGVGDVTGFLALDNTNKLIVLSFRGSRSIENWIGNLNFDLKEINDICSGCRGHDGFTSSWRSVADILRQKVEDAVREHPDYRVVFTGHSLGGALATVAGADLRGNGYDIDVFSYGAPRVGNRAFAEFLTVQTGGTLYRITHTNDIVPRLPPREFGYSHSSPEYWIKSGTLVPVTRNDIVKIEGIDATGGNNQPNIPDIPAHLWYFGLIGTC

SEQ ID NO: 11218 - protein, 268 aa, Thermomyces lanuginosus
EVSQDLFNQFNLFAQYSAAAYCGKNNDAGAGTNITCTGNACPEVEKADATFLYSFEDSGVGDVTGFLALDNTNKLIVLSFRGSRSIENWIGNLNFDLKEINDICSGCRGHDGFTSSWRSVADTLRQKVEDAVREHPDYRVVFTGHSLGGALATVAGADLRGNGYDIDVFSYGAPRVGNRAFAEFLTVQTGGTLYRITHTNDIVPRLPPREFGYSHSSPEYWIKSGTLVPVTRNDIVKIEGIDATGGNNQPNIPDIPAHLWYFGLIGTC

SEQ ID NO: 11219 - protein, 268 aa, Thermomyces lanuginosus
EVSQDLFNQFNLFAQYSAAAYCGKNNDAPAGTNITCTGNACPEVEKADATFLYSFEDSGVGDVTGFLALDNYNKLIVLSFRGSRSIENWIGNLNFDLKEINDICSGCRGHDGFTSSWRSVADTLRQKVEDAVREHPDYRVVFTGHSLGGALATVAGADLRGNGYDIDVFSYGAPRVGNRAFAEFLTVQTGGTLYRITHTNDIVPRLPPREFGYSHSSPEYWIKSGTLVPVTRNDIVKIEGIDATGGNNQPNIPDIPAHLWYFGLIGTC

SEQ ID NO: 11220 - protein, 268 aa, Thermomyces lanuginosus
EVSQDLFNQFNLFAQYSAAAYCGKNNDAPAGTNITCTGNACPEVEKADATFLYSFEDSGVGDVTGFLALDETNKLIVLSFRGSRSIENWIGNLNFDLKEINDICSGCRGHDGFTSSWRSVADTLRQKVEDAVREHPDYRVVFTGHSLGGALATVAGADLRGNGYDIDVFSYGAPRVGNRAFAEFLTVQTGGTLYRITHTNDIVPRLPPREFGYSHSSPEYWIKSGTLVPVTRNDIVKIEGIDATGGNNQPNIPDIPAHLWYFGLIGTC

SEQ ID NO: 11221 - protein, 268 aa, Thermomyces lanuginosus
EVSQDLFNQFNLFAQYSAAAYCGKNNDAPAGTNITCTGNACPEVEKADATFLYSFEDSGVGDVTGFLALDNTNKLIVLSFRGSRSIENWIGNLNFDLKEINDICSGCRGHDGFTSSWRSVADTLRQKVEDAVREHPDYRVVFTGHSLGGALATVAGADLRGNGYDIDVFSYGAPRVGNRAFAEFLTVQTGGTLYRITHTNDIVPRLPPREFGYSHSSPEYWIKSGTLVPVTRNDIVKIEGIDATGGNNQPTIPDIPAHLWYFGLIGTC

SEQ ID NO: 11222 - protein, 268 aa, Thermomyces lanuginosus
EVSQDLFNQFNLFAQYSAAAYCGKNNDAPAGTNITCTGNACPEVEKADATFLYSFEDSGVGDVTGFLALDNTNKLIVLSFRGSRSIENWIGNLNFDDKEINDICSGCRGHDGFTSSWRSVADTLRQKVEDAVREHPDYRVVFTGHSLGGALATVAGADLRGNGYDIDVFSYGAPRVGNRAFAEFLTVQTGGTLYRITHTNDIVPRLPPREFGYSHSSPEYWIKSGTLVPVTRNDIVKIEGIDATGGNNQPNIPDIPAHLWYFGLIGTC

SEQ ID NO: 11223 - protein, 268 aa, Thermomyces lanuginosus
EVSQDLFNQFNLFAQYSAAAYCGKNNDAPAGTNITCTGNACPMVEKADATFLYSFEDSGVGDVTGFLALDNTNKLIVLSFRGSRSIENWIGNLNFDLKEINDICSGCRGHDGFTSSWRSVADTLRQKVEDAVREHPDYRVVFTGHSLGGALATVAGADLRGNGYDIDVFSYGAPRVGNRAFAEFLTVQTGGTLYRITHTNDIVPRLPPREFGYSHSSPEYWIKSGTLVPVTRNDIVKIEGIDATGGNNQPNIPDIPAHLWYFGLIGTC

SEQ ID NO: 11224 - protein, 268 aa, Thermomyces lanuginosus
EVSQDLFNQFNLFAQYSAAAYCGKNNDAPAGTNITCTGNACPEVEFADATFLYSFEDSGVGDVTGFLALDNTNKLIVLSFRGSRSIENWIGNLNFDLKEINDICSGCRGHDGFTSSWRSVADTLRQKVEDAVREHPDYRVVFTGHSLGGALATVAGADLRGNGYDIDVFSYGAPRVGNRAFAEFLTVQTGGTLYRITHTNDIVPRLPPREFGYSHSSPEYWIKSGTLVPVTRNDIVKIEGIDATGGNNQPNIPDIPAHLWYFGLIGTC

SEQ ID NO: 11225 - protein, 268 aa, Thermomyces lanuginosus
EVSQDLFNQFNLFAQYSAAAYCGKNNDAPAGTNITCTGNACPEVEKADATFLYSFEDSGVGDVTGFLALDNTNKLIVLSFRGSRSIENWIGNLNFDLKEINDICSGCRGHEGFTSSWRSVADTLRQKVEDAVREHPDYRVVFTGHSLGGALATVAGADLRGNGYDIDVFSYGAPRVGNRAFAEFLTVQTGGTLYRITHTNDIVPRLPPREFGYSHSSPEYWIKSGTLVPVTRNDIVKIEGIDATGGNNQPNIPDIPAHLWYFGLIGTC

SEQ ID NO: 11226 - protein, 268 aa, Thermomyces lanuginosus
EVSQDLFNQFNLFAQYSAAAYCGKNNDAPAGTNITCTGNACPEVEKADATFLYSFEDSGGGDVTGFLALDNTNKLIVLSFRGSRSIENWIGNLNFDLKEINDICSGCRGHDGFTSSWRSVADTLRQKVEDAVREHPDYRVVFTGHSLGGALATVAGADLRGNGYDIDVFSYGAPRVGNRAFAEFLTVQTGGTLYRITHTNDIVPRLPPREFGYSHSSPEYWIKSGTLVPVTRNDIVKIEGIDATGGNNQPNIPDIPAHLWYFGLIGTC

SEQ ID NO: 11227 - protein, 268 aa, Thermomyces lanuginosus
EVSQDLFNQFNLFAQYSAAAYCGKNNDAPAGTNITCTGNACPEVEKADATFLYSFEDSGVGDVTGFLALDNTNKLIVLSFRGSRSIENWIGNLNFDLKEINDICSGCRGHDGFTSSWRSVADTLRQKVEDAVREHPDYRVVFTGHSLGGALATVAGADLRGNGYDIDVFSYGAPRVGNRAFAEFLTVQTGGTLYRITHTNDIVPRLPPREFGYSHSSPEYWIKSGTLVPVTRNDIVKIEGIDATGGNNQPNIPDIPAHLWYKGLIGTC

SEQ ID NO: 11228 - protein, 268 aa, Thermomyces lanuginosus
EVSQDLFNQFNLFAQYSAAAYCGKNNDAPAGTNITCTGNACPEVEKADATFGYSFEDSGVGDVTGFLALDNTNKLIVLSFRGSRSIENWIGNLNFDLKEINDICSGCRGHDGFTSSWRSVADTLRQKVEDAVREHPDYRVVFTGHSLGGALATVAGADLRGNGYDIDVFSYGAPRVGNRAFAEFLTVQTGGTLYRITHTNDIVPRLPPREFGYSHSSPEYWIKSGTLVPVTRNDIVKIEGIDATGGNNQPNIPDIPAHLWYFGLIGTC

SEQ ID NO: 11229 - protein, 268 aa, Thermomyces lanuginosus
EVSQDLFNQFNLFAQYSAAAYCGKNNDAPAGTNITCTGNACPEVEKADATFLYSFEDSGVGDVGGFLALDNTNKLIVLSFRGSRSIENWIGNLNFDLKEINDICSGCRGHDGFTSSWRSVADTLRQKVEDAVREHPDYRVVFTGHSLGGALATVAGADLRGNGYDIDVFSYGAPRVGNRAFAEFLTVQTGGTLYRITHTNDIVPRLPPREFGYSHSSPEYWIKSGTLVPVTRNDIVKIEGIDATGGNNQPNIPDIPAHLWYFGLIGTC

SEQ ID NO: 11230 - protein, 268 aa, Thermomyces lanuginosus
EVSQDLFNQFNLFAQYSAAAYCGKNNDAPAGTNITCTGNACPEVEKADATFLYSFEDSGVGDVTGFLALDNTNKLIVLSFRGSRSIENWIGNLNFDLKEINDICSGCRGHDGFTSSWRSVADTLRQKVEDAVREHPDYRVVFTGHSLGGALATVAGADLRGNGSDIDVFSYGAPRVGNRAFAEFLTVQTGGTLYRITHTNDIVPRLPPREFGYSHSSPEYWIKSGTLVPVTRNDIVKIEGIDATGGNNQPNIPDIPAHLWYFGLIGTC

SEQ ID NO: 11231 - protein, 268 aa, Thermomyces lanuginosus
EVSQDLFNQFNLFAQYSAAAYCGKNNDAPAGTNITCTGNACPEVEKADATFLYSFEDSGVGDVTGFLALDNTNKLIVLSFRGSRSIENWIGNLNFDLKEINDICPGCRGHDGFTSSWRSVADTLRQKVEDAVREHPDYRVVFTGHSLGGALATVAGADLRGNGYDIDVFSYGAPRVGNRAFAEFLTVQTGGTLYRITHTNDIVPRLPPREFGYSHSSPEYWIKSGTLVPVTRNDIVKIEGIDATGGNNQPNIPDIPAHLWYFGLIGTC

SEQ ID NO: 11232 - protein, 268 aa, Thermomyces lanuginosus
EVSQDLFNQFNLFAQYSAAAYCGKNNDAPAGTNITCTGNACPEVEKADATFLYSFEDSGVGDVTGFLALDNTNKLIVLSFRGSRSIENWIGNLNFDLKEINDICSGCRGHDGFTSSWRSVADTLRQKVEDAVREHPDYRVVFTGHSLGGALATVAGADLRGNGYDIDVFSYGAPRVGNRAFAEFLTVQTGGTLYRITHTNDIVPRLPPREFGYSHSSPEYWIKSGTLVPVTRNDIVKIEGIDATGGNNQPNRPDIPAHLWYFGLIGTC

SEQ ID NO: 11233 - protein, 268 aa, Thermomyces lanuginosus
EVSQDLFNQFNVFAQYSAAAYCGKNNDAPAGTNITCTGNACPEVEKADATFLYSFEDSGVGDVTGFLALDNTNKLIVLSFRGSRSIENWIGNLNFDLKEINDICSGCRGHDGFTSSWRSVADTLRQKVEDAVREHPDYRVVFTGHSLGGALATVAGADLRGNGYDIDVFSYGAPRVGNRAFAEFLTVQTGGTLYRITHTNDIVPRLPPREFGYSHSSPEYWIKSGTLVPVTRNDIVKIEGIDATGGNNQPNIPDIPAHLWYFGLIGTC

SEQ ID NO: 11234 - protein, 268 aa, Thermomyces lanuginosus
EVSQDLFNQFNLFAQYSAAAYCGKNNDHPAGTNITCTGNACPEVEKADATFLYSFEDSGVGDVTGFLALDNTNKLIVLSFRGSRSIENWIGNLNFDLKEINDICSGCRGHDGFTSSWRSVADTLRQKVEDAVREHPDYRVVFTGHSLGGALATVAGADLRGNGYDIDVFSYGAPRVGNRAFAEFLTVQTGGTLYRITHTNDIVPRLPPREFGYSHSSPEYWIKSGTLVPVTRNDIVKIEGIDATGGNNQPNIPDIPAHLWYFGLIGTC

SEQ ID NO: 11235 - protein, 268 aa, Thermomyces lanuginosus
EVSQDLFNQFNLFAQYSAAAYCKKNNDAPAGTNITCTGNACPEVEKADATFLYSFEDSGVGDVTGFLALDNTNKLIVLSFRGSRSIENWIGNLNFDLKEINDICSGCRGHDGFTSSWRSVADTLRQKVEDAVREHPDYRVVFTGHSLGGALATVAGADLRGNGYDIDVFSYGAPRVGNRAFAEFLTVQTGGTLYRITHTNDIVPRLPPREFGYSHSSPEYWIKSGTLVPVTRNDIVKIEGIDATGGNNQPNIPDIPAHLWYFGRIGTC

SEQ ID NO: 11236 - protein, 268 aa, Thermomyces lanuginosus
EVSQDLFNQFNLFAQYSAAAYCGKNNDAPAGTNITCTGNACPEVEKADATFLYSFEDSGVGDVTGFLALDNTNKLIVLSFRGSRSIENWIGNLNFDLKEINDICSGCRGHDGFTSSWRSVADTLRQKVEDAVREHPDYRVVFTGHSLGGALATVAGADLRGNGYDIDVFSYGAPRVGNRAFAEFLTVQTGGTLYRITHTNDIVPRLPPREFGYSHSSPEYWIKSGTLVPVTRNDIVKIEGIDATGGNNQPNNPDIPAHLWYFGLIGTC

SEQ ID NO: 11237 - protein, 268 aa, Thermomyces lanuginosus
EVSQDLFNQFNLFAQYSAAAYCGKNNDAPAGTNITCTGNACPEVEKADATFLYSFEDSGVADVTGFLALDNTNKLIVLSFRGSRSIENWIGNLNFDLKEINDICSGCRGHDGFTSSWRSVADTLRQKVEDAVREHPDYRVVFTGHSLGGALATVAGADLRGNGYDIDVFSYGAPRVGNRAFAEFLTVQTGGTLYRITHTNDIVPRLPPREFGYSHSSPEYWIKSGTLVPVTRNDIVKIEGIDATGGNNQPNIPDIPAHLWYFGLIGTC

SEQ ID NO: 11238 - protein, 268 aa, Thermomyces lanuginosus
EVSQDLFNQFNLFAQYSAAAYCGKNNDAPAGTNITCWGNACPEVEKADATFLYSFEDSGVGDVTGFLALDNTNKLIVLSFRGSRSIENWIGNLNFDLKEINDICSGCRGHDGFTSSWRSVADTLRQKVEDAVREHPDYRVVFTGHSLGGALATVAGADLRGNGYDIDVFSYGAPRVGNRAFAEFLTVQTGGTLYRITHTNDIVPRLPPREFGYSHSSPEYWIKSGTLVPVTRNDIVKIEGIDATGGNNQPNIPDIPAHLWYFGLIGTC

SEQ ID NO: 11239 - protein, 268 aa, Thermomyces lanuginosus
QVSQDLFNQFNLFAQYSAAAYCGKNNDAPAGTNITCTGNACPEVEKADATFLYSFEDSGVGDVTGFLALDNTNKLIVLSFRGSRSIENWIGNLNFDLKEINDICSGCRGHDGFTSSWRSVADTLRQKVEDAVREHPDYRVVFTGHSLGGALATVAGADLRGNGYDIDVFSYGAPRVGNRAFAEFLTVQTGGTLYRITHTNDIVPRLPPREFGYSHSSPEYWIKSGTLVPVTRNDIVKIEGIDATGGNNQPNIPDIPAHLWYFGLIGTC

SEQ ID NO: 11240 - protein, 268 aa, Thermomyces lanuginosus
EVSQDLFNQFNLNAQYSAAAYCGKNNDAPAGTNITCTGNACPEVEKADATFLYSFEDSGVGDVTGFLALDNTNKLIVLSFRGSRSIENWIGNLNFDLKEINDICSGCRGHDGFTSSWRSVADTLRQKVEDAVREHPDYRVVFTGHSLGGALATVAGADLRGNGYDIDVFSYGAPRVGNRAFAEFLTVQTGGTLYRITHTNDIVPRLPPREFGYSHSSPEYWIKSGTLVPVTRNDIVKIEGIDATGGNNQPNIPDIPAHLWYFGLIGTC

SEQ ID NO: 11241 - protein, 268 aa, Thermomyces lanuginosus
EVSQDLFNQFNLFAQYSAAAYCGKNNDAPAGTNITCTGNACPEVEKADATFLYSFEDSGVGDVTGFLALDNTNKLIVLSFRGSRSIENWIGNLNFDLKEINDICSGCRGHDGFTSSWRSVADTLRQKVEDAVREHPDYRVVFTGHSLGGALATVAGADLRGNGYDIDVFSYGAPRVGNRAFAEFLTVQTGGTLYRITHNNDIVPRLPPREFGYSHSSPEYWIKSGTLVPVTRNDIVKIEGIDATGGNNQPNIPDIPAHLWYFGLIGTC

SEQ ID NO: 11242 - protein, 268 aa, Thermomyces lanuginosus
EVSQDLFNQFNLFAQYSAAAYCGKNNDAPAGTNITCTGNACPEVEKADATFLYSFEDSGVGDVTGFLALDNTNKLIVLSFRGSRSIENWIGNLNFDLKEINDICSGCRGHDGFTSSWRSVADTLRQKVEDAVREHPDYRVVFTGHSLGGALATVAGADLRGNGYDIDVFSYGAPRVGNRAFAEFLTVQTGGTLYRITHTNDIVPRLPPREFGYSHSSPEYWIKSGTLVPVTRNDIVKIEGIDATGGNNQPNIPDIPAHRWYFGLIGTC

SEQ ID NO: 11243 - protein, 268 aa, Thermomyces lanuginosus
EVSQDLFNQFNLFAQYSAAAYCGKNNDAPAGTNITCTGNACPEVEKADATFLYSFEDSGVGDVTGFLALDNTNKLIVLSFRGSRSIENWIGNLNFDLKEINDICSGCRGHDGFTSSWRSVADTLRQKVEDTVREHPDYRVVFTGHSLGGALATVAGADLRGNGYDIDVFSYGAPRVGNRAFAEFLTVQTGGTLYRITHTNDIVPRLPPREFGYSHSSPEYWIKSGTLVPVTRNDIVKIEGIDATGGNNQPNIPDIPAHLWYFGLIGTC

SEQ ID NO: 11244 - protein, 268 aa, Thermomyces lanuginosus
EVSQDLFNQFNLFAQYSAAAYCGKNNDAPAGTNITCTKNACPEVEKADATFLYSFEDSGVGDVTGFLALDNTNKLIVLSFRGSRSIENWIGNLNFDLKEINDICSGCRGHDGFTSSWRSVADTLRQKVEDAVREHPDYRVVFTGHSLGGALATVAGADLRGNGYDIDVFSYGAPRVGNRAFAEFLTVQTGGTLYRITHTNDIVPRLPPREFGYSHSSPEYWIKSGTLVPVTRNDIVKIEGIDATGGNNQPNIPDIPAHLWYFGLIGTC

SEQ ID NO: 11245 - protein, 268 aa, Thermomyces lanuginosus
EVSQDLFNQFNLFAQYSAAAYCGKNNDAPAGTNITCTGNACPEVEKADATFLYSFEDSGVGDVTGFLALDYTNKLIVLSFRGSRSIENWIGNLNFDLKEINDICSGCRGHDGFTSSWRSVADTLRQKVEDAVREHPDYRVVFTGHSLGGALATVAGADLRGNGYDIDVFSYGAPRVGNRAFAEFLTVQTGGTLYRITHTNDIVPRLPPREFGYSHSSPEYWIKSGTLVPVTRNDIVKIEGIDATGGNNQPNIPDIPAHLWYFGLIGTC

SEQ ID NO: 11246 - protein, 268 aa, Thermomyces lanuginosus
EVSQDEFNQFNLFAQYSAAAYCGKNNDAPAGTNITCTGNACPEVEKADATFLYSFEDSGVGDVTGFLALDNTNKLIVLSFRGSRSIENWIGNLNFDLKEINDICSGCRGHDGFTSSWRSVADTLRQKVEDAVREHPDYRVVFTGHSLGGALATVAGADLRGNGYDIDVFSYGAPRVGNRAFAEFLTVQTGGTLYRITHTNDIVPRLPPREFGYSHSSPEYWIKSGTLVPVTRNDIVKIEGIDATGGNNQPNIPDIPAHLWYFGLIGTC

SEQ ID NO: 11247 - protein, 268 aa, Thermomyces lanuginosus
EVSQDLFNQFNLFAQYSAAAYCGKNNDAPAGTNITCTGNACPEVEKADATFLYSFEDSGVGDVTGFLALDNTNKLIVLSFRGSRSQENWIGNLNFDLKEINDICSGCRGHDGFTSSWRSVADTLRQKVEDAVREHPDYRVVFTGHSLGGALATVAGADLRGNGYDIDVFSYGAPRVGNRAFAEFLTVQTGGTLYRITHTNDIVPRLPPREFGYSHSSPEYWIKSGTLVPVTRNDIVKIEGIDATGGNNQPNIPDIPAHLWYFGLIGTC

SEQ ID NO: 11248 - protein, 268 aa, Thermomyces lanuginosus
EVSQDLFNQFNLFAQYSAAAYCGKNNDAPAGTNITCTGNACPEVEKADATFLYSFEDSGVGDVTGFLALDNDNKLIVLSFRGSRSIENWIGNLNFDLKEINDICSGCRGHDGFTSSWRSVADTLRQKVEDAVREHPDYRVVFTGHSLGGALATVAGADLRGNGYDIDVFSYGAPRVGNRAFAEFLTVQTGGTLYRITHTNDIVPRLPPREFGYSHSSPEYWIKSGTLVPVTRNDIVKIEGIDATGGNNQPNIPDIPAHLWYFGLIGTC

SEQ ID NO: 11249 - protein, 268 aa, Thermomyces lanuginosus
EVSQDLFNQFNLFAQYSAAAYCGKNNDAPAGTNITCTGNACPEVEKADATFLYSFEDSGVGDVTGFLALDNTNKLIVLSFRGSRSIENWIGNKNFDLKEINDICSGCRGHDGFTSSWRSVADTLRQKVEDAVREHPDYRVVFTGHSLGGALATVAGADLRGNGYDIDVFSYGAPRVGNRAFAEFLTVQTGGTLYRITHTNDIVPRLPPREFGYSHSSPEYWIKSGTLVPVTRNDIVKIEGIDATGGNNQPNIPDIPAHLWYFGLIGTC

SEQ ID NO: 11250 - protein, 268 aa, Thermomyces lanuginosus
EVSQDLFNAFNLFAQYSAAAYCGKNNDAPAGTNITCTGNACPEVEKADATFLYSFEDSGVGDVTGFLALDNTNKLIVLSFRGSRSIENWIGNLNFDLKEINDICSGCRGHDGFTSSWRSVADTLRQKVEDAVREHPDYRVVFTGHSLGGALATVAGADLRGNGYDIDVFSYGAPRVGNRAFAEFLTVQTGGTLYRITHTNDIVPRLPPREFGYSHSSPEYWIKSGTLVPVTRNDIVKIEGIDATGGNNQPNIPDIPAHLWYFGLIGTC

SEQ ID NO: 11251 - protein, 268 aa, Thermomyces lanuginosus
EVSQDLFNQFNLFAQYSAAAYCGKNNDAPAGTNITCTGNACPEVEKADATFLYSFEDSGVGDVTGFLALDNTNKLIVLSFRGSRSIENWIGNLNFDLKEINDICSGCRGHDGFTSSWRSVADTLRQKVEDAVREHPDYRVVFTGHSLGGALATVAGADLRGNGYDIDVFSYGAPRVGNIAFAEFLTVQTGGTLYRITHTNDIVPRLPPREFGYSHSSPEYWIKSGTLVPVTRNDIVKIEGIDATGGNNQPNIPDIPAHLWYFGLIGTC

SEQ ID NO: 11252 - protein, 268 aa, Thermomyces lanuginosus
EVSQDLFNQFNLFAQYSAAAYCGKNNDAPAGTNITCTGNACPEVEKADATFLYSFEDSGVGDVTGFLALDNTNKLIVLSFRGSRSIENWIGNLNFDLKEINDICSGCRGHDGFTSSWRSVADTLRQKVEDAVREHPDYRVVFTGHSLGGALATVAGADLRGNGYDIDVFSYGAPRVGNRAFAEFLTVQTGGTLYRITHTNDIVPRLPPREFGYSHSSPEYWIKSGTLVPVTRNDIVLIEGIDATGGNNQPNIPDIPAHLWYFGLIGTC

SEQ ID NO: 11253 - protein, 268 aa, Thermomyces lanuginosus
EVSQDLFNQFNLFAQYSAAAYCGKNNDAPAGTNITCTGNACPEVEKADATFLYSFEDSGVGDVTGFLALDNTNKLIALSFRGSRSIENWIGNLNFDLKEINDICSGCRGHDGFTSSWRSVADTLRQKVEDAVREHPDYRVVFTGHSLGGALATVAGADLRGNGYDIDVFSYGAPRVGNRAFAEFLTVQTGGTLYRITHTNDIVPRLPPREFGYSHSSPEYWIKSGTLVPVTRNDIVKIEGIDATGGNNQPNIPDIPAHLWYFGLIGTC

SEQ ID NO: 11254 - protein, 268 aa, Thermomyces lanuginosus
EVSQDLFNQFNLFAQYSAAAYCGKNNDAPAGTNITCTGNACPEVEKADATFLYSFEDSGVGDVTGFLALDNTNKLIVLSFRGSRSIENWIGNLNFDLKEINDICSGCRGHDGFTSSWRSVADTLRQKVEDAVREHPDYRVVFTGHSLGGALATVAGADLRGNGYDIDVFSYGAPRVGNRDFAEFLTVQTGGTLYRITHTNDIVPRLPPREFGYSHSSPEYWIKSGTLVPVTRNDIVKIEGIDATGGNNQPNIPDIPAHLWYFGLIGTC

SEQ ID NO: 11255 - protein, 268 aa, Thermomyces lanuginosus
EVSQDLFNQFNLFAQYSAAAYCGKNNDAPAGTNITCTGNACPEVEKADATFLLSFEDSGVGDVTGFLALDNTNKLIVLSFRGSRSIENWIGNLNFDLKEINDICSGCRGHDGFTSSWRSVADTLRQKVEDAVREHPDYRVVFTGHSLGGALATVAGADLRGNGYDIDVFSYGAPRVGNRAFAEFLTVQTGGTLYRITHTNDIVPRLPPREFGYSHSSPEYWIKSGTLVPVTRNDIVKIEGIDATGGNNQPNIPDIPAHLWYFGLIGTC

SEQ ID NO: 11256 - protein, 268 aa, Thermomyces lanuginosus
EVSQDLFNQFNLFAQYSAAAYCGKNNDAPAGTNITCTGNACPEVEKADATFLYSFEDSGVGDVTGFLALDNTNKLIVLSFRGSRSIENWIGNLNFDLKEINDICSGCRGHDGFTSSWRSVADTLRQKVEDAVREHPDYRVVFTGHSLGGALATVAGADLRGNGYDIDVFSYGAPRVGNRQFAEFLTVQTGGTLYRITHTNDIVPRLPPREFGYSHSSPEYWIKSGTLVPVTRNDIVKIEGIDATGGNNQPNIPDIPAHLWYFGLIGTC

SEQ ID NO: 11257 - protein, 268 aa, Thermomyces lanuginosus
EVSQDLFNQFNLFAQYSAAAYCGKNNDAPAGTNITCTGNACPEVEKADATFLYSFEDSGVGDVTGFLALDNTNKLIVLSFRGSRSIENWIGNLNFDLKEINDICSGCRGHDGFTSSWRSVADTLRQKVEDAVREHPDYRIVFTGHSLGGALATVAGADLRGNGYDIDVFSYGAPRVGNRAFAEFLTVQTGGTLYRITHTNDIVPRLPPREFGYSHSSPEYWIKSGTLVPVTRNDIVKIEGIDATGGNNQPNIPDIPAHLWYFGLIGTC

SEQ ID NO: 11258 - protein, 268 aa, Thermomyces lanuginosus
EVSQDLFNQFNLFAQYSAAAYCGKNNDAPAGTNITCTGNACPEVEKADATFLYSFEDSGVGDVTGFLALDNTNKLIVLSFRGSRSIENWIGNLNFDLKEINDICSGCRGHDGFTSSWRSVADNLRQKVEDAVREHPDYRVVFTGHSLGGALATVAGADLRGNGYDIDVFSYGAPRVGNRAFAEFLTVQTGGTLYRITHTNDIVPRLPPREFGYSHSSPEYWIKSGTLVPVTRNDIVKIEGIDATGGNNQPNIPDIPAHLWYFGLIGTC

SEQ ID NO: 11259 - protein, 268 aa, Thermomyces lanuginosus
EVSQDLFNQFNLFAQYSAAAYCGKNNDAPAGTNITCTGNACPEVEKADATFLYSFEDSGVGDVTGFLALDNTNKLIVLSFRGSRSIENWIGNLNFDLKEINDICSGCRGHLGFTSSWRSVADTLRQKVEDAVREHPDYRVVFTGHSLGGALATVAGADLRGNGYDIDVFSYGAPRVGNRAFAEFLTVQTGGTLYRITHTNDIVPRLPPREFGYSHSSPEYWIKSGTLVPVTRNDIVKIEGIDATGGNNQPNIPDIPAHLWYFGLIGTC

SEQ ID NO: 11260 - protein, 268 aa, Thermomyces lanuginosus
EVSQDLFNQFNLFAQYSAAAYCGKNNDAPAGTNITCTGNACPEVEKADATFLYSFEDSGVGDVTGFLALDNTNKLIVLSFRGSRSIENWIGNLNFDLQEINDICSGCRGHDGFTSSWRSVADTLRQKVEDAVREHPDYRVVFTGHSLGGALATVAGADLRGNGYDIDVFSYGAPRVGNRAFAEFLTVQTGGTLYRITHTNDIVPRLPPREFGYSHSSPEYWIKSGTLVPVTRNDIVKIEGIDATGGNNQPNIPDIPAHLWYFGLIGTC

SEQ ID NO: 11261 - protein, 268 aa, Thermomyces lanuginosus
EVSQDLFNQFNLFAQYSAAAYCGKNNDAPAGTNITCTGNACPEVEKADATFLYSFEDSGVGDVTGFLALDNTNKLIVLSFRGSRSIENWIGNLNFDLKEINDICSGCRGHDGFTSSWRSVADTLRQKVEDAVREHPDYRVVFTGHSLGGALATVAGADLRGNGYDIDVFSYGAPRVGNRAFAEFLTVQTGGTLYRITHTNDIVPRLPPREFGYSHSSPEYWIKSGTLVPVTRNDIVKIEGIDATGGNNQPNSPDIPAHLWYFGLIGTC

SEQ ID NO: 11262 - protein, 268 aa, Thermomyces lanuginosus
EVSQDLFNQFNLFAQYSAAAYCGKNNDAPDGTNITCTGNACPEVEKADATFLYSFEDSGVGDVTGFLALDNTNKLIVLSFRGSRSIENWIGNLNFDLKEINDICSGCRGHDGFTSSWRSVADTLRQKVEDAVREHPDYRVVFTGHSLGGALATVAGADLRGNGYDIDVFSYGAPRVGNRAFAEFLTVQTGGTLYRITHTNDIVPRLPPREFGYSHSSPEYWIKSGTLVPVTRNDIVKIEGIDATGGNNQPNIPDIPAHLWYFGLIGTC

SEQ ID NO: 11263 - protein, 268 aa, Thermomyces lanuginosus
EVSQDLFNQFNLFAQYSAAAYCGKNNDAPAGTNITCTGNACPEVEKADATFLYSFEDSGVGDVTGFLALDNTNKLIVLSFRGSRSIENWIGNLNFDLKEICDICSGCRGHDGFTSSWRSVADTLRQKVEDAVREHPDYRVVFTGHSLGGALATVAGADLRGNGYDIDVFSYGAPRVGNRAFAEFLTVQTGGTLYRITHTNDIVPRLPPREFGYSHSSPEYWIKSGTLVPVTRNDIVKIEGIDATGGNNQPNIPDIPAHLWYFGLIGTC

SEQ ID NO: 11264 - protein, 268 aa, Thermomyces lanuginosus
EVSQDLFNQFNLFAQYSAAAYCGKNNDAPAGTNITCTINACPEVEKADATFLYSFEDSGVGDVTGFLALDNTNKLIVLSFRGSRSIENWIGNLNFDLKEINDICSGCRGHDGFTSSWRSVADTLRQKVEDAVREHPDYRVVFTGHSLGGALATVAGADLRGNGYDIDVFSYGAPRVGNRAFAEFLTVQTGGTLYRITHTNDIVPRLPPREFGYSHSSPEYWIKSGTLVPVTRNDIVKIEGIDATGGNNQPNIPDIPAHLWYFGLIGTC

SEQ ID NO: 11265 - protein, 268 aa, Thermomyces lanuginosus
EVSQDLFNQFNLFAQYSAAAYCGKNNDAPAGTNITCTGNACPEVEKADATILYSFEDSGVGDVTGFLALDNTNKLIVLSFRGSRSIENWIGNLNFDLKEINDICSGCRGHDGFTSSWRSVADTLRQKVEDAVREHPDYRVVFTGHSLGGALATVAGADLRGNGYDIDVFSYGAPRVGNRAFAEFLTVQTGGTLYRITHTNDIVPRLPPREFGYSHSSPEYWIKSGTLVPVTRNDIVKIEGIDATGGNNQPNIPDIPAHLWYFGLIGTC

SEQ ID NO: 11266 - protein, 268 aa, Thermomyces lanuginosus
EVSQDLFNQFNLFAQYSAAAYCGKNNDAPAGTNITCTGNACPEVEKADATFLYSFEDSGVGDVTGFLALDNTNKLIVLSFRGSRSIENWIGNLNFDLKEINDICSGCRGHDGFTSSWRSVADTLRQKVEDAVREHPDYRVVFTGHSLGGALATVAGADLRGNGYDIDVFSYGAPRVGNRAFAEFLTVQTGGTLYRITHTNDIVPRLPPREFGYSHSSPEYWIASGTLVPVTRNDIVKIEGIDATGGNNQPNIPDIPAHLWYFGLIGTC

SEQ ID NO: 11267 - protein, 268 aa, Thermomyces lanuginosus
EVSQDLFNQFNLFAQYSAAAYCGKNNDAPAGTNITCTGNACPEVEKADATFLYSFEDSGVGDVTGFLALDNTNKLIVLSFRGSRSIENWIGNLNFDLKEINDICSGCRGHDGFTSSWRSVADTLRQKVEDAVREHPDYRVVFTGHSLGGALATVAGADLRGNGYDIDVFSYGAPRVGNKAFAEFLTVQTGGTLYRITHTNDIVPRLPPREFGYSHSSPEYWIKSGTLVPVTRNDIVKIEGIDATGGNNQPNIPDIPAHLWYFGLIGTC

SEQ ID NO: 11268 - protein, 268 aa, Thermomyces lanuginosus
EVSQDLFNQFNLFAQYSAAAYCGKNNDAPAGTNITCTGNACPEVEKADATFLYSFEDSGVGDVTGFLALDNTNKLIVLSFRGSRSIENWIGNLNFDLKEINDICSGCRGHDGFTSSWRSVADTLRQKVEDAVREHPDYRVVFTGHSLGGALATVAGADLRGNGYDIDVFSYGAPRVGNRAFAEFLTVQTGGTLYRITHTNDIVPRLPPREFGYSHSSPEYWIKSGTLVPVTRNDIVKIEGIDASGGNNQPNIPDIPAHLWYFGLIGTC

SEQ ID NO: 11269 - protein, 268 aa, Thermomyces lanuginosus
EVSQDLFNQFNLFAQYSAAAYCGKNNDAPAGTNITCTGNACPEVEKADATFLYSFEDSGVGDVTGFLALDNTNKLIVLSFRGSRSIENWIGNLNFDLKEINDICSGCRGHDGFTSSWRSVADTLRQKVEDAVREHPDYRVVFTGHSLGGALATVAGADLRGNGYDIDVFSYGAPRVGNRAFAEFLTVQTGGTLYRITHTNDIVPRLPPREFGYSHSSPEYWIKSGTLVPVTRNDIVEIEGIDATGGNNQPNIPDIPAHLWYFGLIGTC

SEQ ID NO: 11270 - protein, 268 aa, Thermomyces lanuginosus
EVSQDLFNQFNLFAQYSAAAYCGKNNDAPAGTNITCTGNACPEVEKADATFLYSFEDSGVGDVTGFLALDNTNKLIVLSFRGSRSIENWIGNLNFGLKEINDICSGCRGHDGFTSSWRSVADTLRQKVEDAVREHPDYRVVFTGHSLGGALATVAGADLRGNGYDIDVFSYGAPRVGNRAFAEFLTVQTGGTLYRITHTNDIVPRLPPREFGYSHSSPEYWIKSRTLVPVTRNDIVKIEGIDATGGNNQPNIPDIPAHLWYFGLIGTC

SEQ ID NO: 11271 - protein, 268 aa, Thermomyces lanuginosus
EVSQDIFNQFNLFAQYSAAAYCGKNNDAPAGTNITCTGNACPEVEKADATFLYSFEDSGVGDVTGFLALDNTNKLIVLSFRGSRSIENWIGNLNFDLKEINDICSGCRGHDGFTSSWRSVADTLRQKVEDAVREHPDYRVVFTGHSLGGALATVAGADLRGNGYDIDVFSYGAPRVGNRAFAEFLTVQTGGTLYRITHTNDIVPRLPPREFGYSHSSPEYWIKSGTLVPVTRNDIVKIEGIDATGGNNQPNIPDIPAHLWYFGLIGTC

SEQ ID NO: 11272 - protein, 268 aa, Thermomyces lanuginosus
EVSQDLFNQFNLFAQYSAAAYCGKNNDAPAGRNITCTGNACPEVEKADATFLYSFEDSGVGDVTGFLALDNTNKLIVLSFRGSRSIENWIGNLNFDLKEINDICSGCRGHDGFTSSWRSVADTLRQKVEDAVREHPDYRVVFTGHSLGGALATVAGADLRGNGYDIDVFSYGAPRVGNRAFAEFLTVQTGGTLYRITHTNDIVPRLPPREFGYSHSSPEYWIKSGTLVPVTRNDIVKIEGIDATGGNNQPNIPDIPAHLWYFGLIGTC

SEQ ID NO: 11273 - protein, 268 aa, Thermomyces lanuginosus
EVSQDLFNQFNLFAQYSAAAYCGKNNDAPAGTNITCTGNACPEVEKADATFLYSFEDSGVGDVCGFLALDNTNKLIVLSFRGSRSIENWIGNLNFDLKEINDICSGCRGHDGFTSSWRSVADTLRQKVEDAVREHPDYRVVFTGHSLGGALATVAGADLRGNGYDIDVFSYGAPRVGNRAFAEFLTVQTGGTLYRITHTNDIVPRLPPREFGYSHSSPEYWIKSGTLVPVTRNDIVKIEGIDATGGNNQPNIPDIPAHLWYFGLIGTC

SEQ ID NO: 11274 - protein, 268 aa, Thermomyces lanuginosus
EVSQDLFNQFNLFAQYSAAAYCGKNNDAPAGTNITCTGNACPEVEKADATFLYSFEDSGVGDVTGFLALDNTNKLIVLSFRGSRSIENWIGNLNFDLKEINDICSGCRGHDGFTGSWRSVADTLRQKVEDAVREHPDYRVVFTGHSLGGALATVAGADLRGNGYDIDVFSYGAPRVGNRAFAEFLTVQTGGTLYRITHTNDIVPRLPPREFGYSHSSPEYWIKSGTLVPVTRNDIVKIEGIDATGGNNQPNIPDIPAHLWYFGLIGTC

SEQ ID NO: 11275 - protein, 268 aa, Thermomyces lanuginosus
EVSQDLFNQFNLFAQYSAAAYCGKNNDAPAGTNITCTGNACPEVEKADATFLYSFEDSGVGDVTGFLALDNTNKLIVLSFRGSRSIENWITNLNFDLKEINDICSRCRGHDGFTSSWRSVADTLRQKVEDAVREHPDYRVVFTGHSLGGALATVAGADLRGNGYDIDVFSYGAPRVGNRAFAEFLTVQTGGTLYRITHTNDIVPRLPPREFGYSHSSPEYWIKSGTLVPVTRNDIVKIEGIDATGGNNQPNIPDIPAHLWYFGLIGTC

SEQ ID NO: 11276 - protein, 268 aa, Thermomyces lanuginosus
EVSQDLFNQFNLFAQYSAAAYCGKNNDAPAGTNITCTGNACPEVEKADATFLYSFEDSGVGDVTGFIALDNTNKLIVLSFRGSRSIENWIGNLNFDLKEINDICSGCRGHDGFTSSWRSVADTLRQKVEDAVREHPDYRVVFTGHSLGGALATVAGADLRGNGYDIDVFSYGAPRVGNRAFAEFLTVQTGGTLYRITHTNDIVPRLPPREFGYSHSSPEYWIKSGTLVPVTRNDIVKIEGIDATGGNNQPNIPDIPAHLWYFGLIGTC

SEQ ID NO: 11277 - protein, 268 aa, Thermomyces lanuginosus
EVSQDLFNQFNLFAQYSAAAYCGKNNDAPAGTNITCTGNACPEVEKADATFLYSFEDSGVGDVTGFLALDNTNKLIVLSFRGSRSIENWIGNLNFDLKEINDICSGCRGHDGFTSSWRSVADTLRQKVEHAVREHPDYRVVFTGHSLGGALATVAGADLRGNGYDIDVFSYGAPRVGNRAFAEFLTVQTGGTLYRITHTNDIVPRLPPREFGYSHSSPEYWIKSGTLVPVTRNDIVKIEGIDATGGNNQPNIPDIPAHLWYFGLIGTC

SEQ ID NO: 11278 - protein, 268 aa, Thermomyces lanuginosus
EVSQDLFNQFNLFAQYSAAAYCGKNNDAPAGTNITCTGNACPEVEKWDATFLYSFEDSGVGDVTGFLALDNTNKLIVLSFRGSRSIENWIGNLNFDLKEINDICSGCRGHDGFTSSWRSVADTLRQKVEDAVREHPDYRVVFTGHSLGGALATVAGADLRGNGYDIDVFSYGAPRVGNRAFAEFLTVQTGGTLYRITHTNDIVPRLPPREFGYSHSSPEYWIKSGTLVPVTRNDIVKIEGIDATGGNNQPNIPDIPAHLWYFGLIGTC

SEQ ID NO: 11279 - protein, 268 aa, Thermomyces lanuginosus
EVSQDLFNQFNLFAQYSAAAYCGKNNDAPAGTNITCTGNACPEVEKADATFLYSFEDSGVGDVTGFLALDNTNKLINLSFRGSRSIENWIGNLNFDLKEINDICSGCRGHDGFTSSWRSVADTLRQKVEDAVREHPDYRVVFTGHSLGGALATVAGADLRGNGYDIDVFSYGAPRVGNRAFAEFLTVQTGGTLYRITHTNDIVPRLPPREFGYSHSSPEYWIKSGTLVPVTRNDIVKIEGIDATGGNNQPNIPDIPAHLWYFGLIGTC

SEQ ID NO: 11280 - protein, 268 aa, Thermomyces lanuginosus
EVSQDLFNQFNLFAQYSAAAYCGKNNDAPAGTNITCTGNACPEVEKADATFLYSFEDSGVGDVTGFLALDNTNKLIVLSFRGSRSIENWIGNDNFDLKEINDICSGCRGHDGFTSSWRSVADTLRQKVEDAVREHPDYRVVFTGHSLGGALATVAGADLRGNGYDIDVFSYGAPRVGNRAFAEFLTVQTGGTLYRITHTNDIVPRLPPREFGYSHSSPEYWIKSGTLVPVTRNDIVKIEGIDATGGNNQPNIPDIPAHLWYFGLIGTC

SEQ ID NO: 11281 - protein, 268 aa, Thermomyces lanuginosus
EVSQDLFNQFNLFAQYSAAAYCGKNNDAPAGANITCTGNACPEVEKADATFLYSFEDSGVGDVTGFLALDNTNKLIVLSFRGSRSIENWIGNLNFDLKEINDICSGCRGHDGFTSSWRSVADTLRQKVEDAVREHPDYRVVFTGHSLGGALATVAGADLRGNGYDIDVFSYGAPRVGNRAFAEFLTVQTGGTLYRITHTNDIVPRLPPREFGYSHSSPEYWIKSGTLVPVTRNDIVKIEGIDATGGNNQPNIPDIPAHLWYFGLIGTC

SEQ ID NO: 11282 - protein, 268 aa, Thermomyces lanuginosus
EVSQDLFNQFNLFAQYSAAAYCGKNNDAPAGTNITCTGNACPEVEKADATFLYSFEDSGVGDVTGFLALDNTNKLIVLSFRGSHSIENWIGNLNFDLKEINDICSGCRGHDGFTSSWRSVADTLRQKVEDAVREHPDYRVVFTGHSLGGALATVAGADLRGNGYDIDVFSYGAPRVGNRAFAEFLTVQTGGTLYRITHTNDIVPRLPPREFGYSHSSPEYWIKSGTLVPVTRNDIVKIEGIDATGGNNQPNIPDIPAHLWYFGLIGTC

SEQ ID NO: 11283 - protein, 268 aa, Thermomyces lanuginosus
EVSQDLFNQFNLFAQYSAAAYCGKNNDAPAGTNITCTGNACPEVEKADATFLYSFEDSGVGDVTGFLAGDNTNKLIVLSFRGSRSIENWIGNLNFDLKEINDICSGCRGHDGFTSSWRSVADTLRQKVEDAVREHPDYRVVFTGHSLGGALATVAGADLRGNGYDIDVFSYGAPRVGNRAFAEFLTVQTGGTLYRITHTNDIVPRLPPREFGYSHSSPEYWIKSGTLVPVTRNDIVKIEGIDATGGNNQPNIPDIPAHLWYFGLIGTC

SEQ ID NO: 11284 - protein, 268 aa, Thermomyces lanuginosus
EVSQDLFNQFNLFAQYSAAAYCGKNNDAPAGTNITCTGNACPEVEKADATFLYSFEDSGVGDVTGFLALDNTNKLIVLSFRGSRSIENWIGNLNFDLKEINDICSGCRGHDGFTSSWRSVADTLRQKVEDAVREHPDYRVVFTGHSLGGALATVAGADLRGNGVDIDVFSYGAPRVGNRAFAEFLTVQTGGTLYRITHTNDIVPRLPPREFGYSHSSPEYWIKSGTLVPVTRNDIVKIEGIDATGGNNQPNIPDIPAHLWYFGLIGTC

SEQ ID NO: 11285 - protein, 268 aa, Thermomyces lanuginosus
EVSQDLFNQFNLFAQYSAAAYCGKNNDAPAGTNITCTGNACPEVEKADATFLYSFEDSGVGDVTGFLALDNTNKLIVLSFRGSRSIENWIGNLNFDLKEINDICSGCRGHDGFTSSWRSVAFTLRQKVEDAVREHPDYRVVFTGHSLGGALATVAGADLRGNGYDIDVFSYGAPRVGNRAFAEFLTVQTGGTLYRITHTNDIVPRLPPREFGYSHSSPEYWIKSGTLVPVTRNDIVKIEGIDATGGNNQPNIPDIPAHLWYFGLIGTC

SEQ ID NO: 11286 - protein, 268 aa, Thermomyces lanuginosus
EVSQDLFNQFNLFAQYSAAAYCGKNNDAPAGTNITCTGNACPEVEKADATFLYSFEDSGVGDVTGFLALDNTNKLIVLSFRGSRSIENWIGNLNFDLKEINDICSGCRGHDGFTSSWRSVADTLRQKVEDAVREHPDYRVVFTGHSLGGALATVAGADLRGNGYDIDVFSYGAPRVGNRAFAEFLTVQTGGTLYRITHTNDIVPRLPPREFGYSHNSPEYWIKSGTLVPVTRNDIVKIEGIDATGGNNQPNIPDIPAHLWYFGLIGTC

SEQ ID NO: 11287 - protein, 268 aa, Thermomyces lanuginosus
EVSQDLFNQFNLFAQYSAAAYCGKNNDAPAGTDITCTGNACPEVEKADATFLYSFEDSGVGDVTGFLALDNTNKLIVLSFRGSRSIENWIGNLNFDLKEINDICSGCRGHDGFTSSWRSVADTLRQKVEDAVREHPDYRVVFTGHSLGGALATVAGADLRGNGYDIDVFSYGAPRVGNRAFAEFLTVQTGGTLYRITHTNDIVPRLPPREFGYSHSSPEYWIKSGTLVPVTRNDIVKIEGIDATGGNNQPNIPDIPAHLWYFGLIGTC

SEQ ID NO: 11288 - protein, 268 aa, Thermomyces lanuginosus
EVSQDLFNQFNLFAQYSAAAYCGKNNDAPAGTNITCTGNACPEVEKADATFLYSFEDSGVGDVTGFLALDNTNKLIVLSFRGSRSIENWIGNLNFDLKEINDICSGCRGHDGFTSSWRSVADTLRQKVEDIVREHPDYRVVFTGHSLGGALATVAGADLRGNGYDIDVFSYGAPRVGNRAFAEFLTVQTGGTLYRITHTNDIVPRLPPREFGYSHSSPEYWIKSGTLVPVTRNDIVKIEGIDATGGNNQPNIPDIPAHLWYFGLIGTC

SEQ ID NO: 11289 - protein, 268 aa, Thermomyces lanuginosus
EVSQDLFNQFNLFAQYSAAAYCGKNNDAPAGTNITCTGNACPEVEKADATFLYSFEDSGVGDVRGFLALDNTNKLIVLSFRGSRSIENWIGNLNFDLKEINDICSGCRGHDGFTSSWRSVADTLRQKVEDAVREHPDYRVVFTGHSLGGALATVAGADLRGNGYDIDVFSYGAPRVGNRAFAEFLTVQTGGTLYRITHTNDIVPRLPPREFGYSHSSPEYWIKSGTLVPVTRNDIVKIEGIDATGGNNQPNIPDIPAHLWYFGLIGTC

SEQ ID NO: 11290 - protein, 268 aa, Thermomyces lanuginosus
EVSQDLFNQFNLFAQYSAAAYCGKNNDAPAGTNITCTGNACPEVEKADATFLYSFEDSGVGDVTGFLALDNTNKLIVLSFRGSRSIENWIGNLNFDLKEINDICSGCRGHDGFTSSWRSVADTLRQEVEDAVREHPDYRVVFTGHSLGGALATVAGADLRGNGYDIDVFSYGAPRVGNRAFAEFLTVQTGGTLYRITHTNDIVPRLPPREFGYSHSSPEYWIKSGTLVPVTRNDIVKIEGIDATGGNNQPNIPDIPAHLWYFGLIGTC

SEQ ID NO: 11291 - protein, 268 aa, Thermomyces lanuginosus
EVSQDLFNQFNLFAQYSAAAYCGKNNDAPAGTNITCTGNACPEVEKADATFRYSFEDSGVGDVTGFLALDNTNKLIVLSFRGSRSIENWIGNLNFDLKEINDICSGCRGHDGFTSSWRSVADTLRQKVEDAVREHPDYRVVFTGHSLGGALATVAGADLRGNGYDIDVFSYGAPRVGNRAFAEFLTVQTGGTLYRITHTNDIVPRLPPREFGYSHSSPEYWIKSGTLVPVTRNDIVKIEGIDATGGNNQPNIPDIPAHLWYFGLIGTC

SEQ ID NO: 11292 - protein, 268 aa, Thermomyces lanuginosus
EVSQDLFNQFNLFAQYSAAAYCGKNNDAPAGTNITCTGNACPEVEKADATFLYSFEDSGVGDVTGFLALDNTNKLIVLSFRGSRSIENWIGNLNFDLKEINDICSGCRGHDGFTSSWRSVADTLRQKVEGAVREHPDYRVVFTGHSLGGALATVAGADLRGNGYDIDVFSYGAPRVGNRAFAEFLTVQTGGTLYRITHTNDIVPRLPPREFGYSHSSPEYWIKSGTLVPVTRNDIVKIEGIDATGGNNQPNIPDIPAHLWYFGLIGTC

SEQ ID NO: 11293 - protein, 268 aa, Thermomyces lanuginosus
EVSQDLFAQFNLFAQYSAAAYCGKNNDAPAGTNITCTGNACPEVEKADATFLYSFEDSGVGDVTGFLALDNTNKLIVLSFRGSRSIENWIGNLNFDLKEINDICSGCRGHDGFTSSWRSVADTLRQKVEDAVREHPDYRVVFTGHSLGGALATVAGADLRGNGYDIDVFSYGAPRVGNRAFAEFLTVQTGGTLYRITHTNDIVPRLPPREFGYSHSSPEYWIKSGTLVPVTRNDIVKIEGIDATGGNNQPNIPDIPAHLWYFGLIGTC

SEQ ID NO: 11294 - protein, 268 aa, Thermomyces lanuginosus
EVSQDLFNQFNLFAQYSAAAYCGKNNDAPAGTNITCTGNACPEVEKADATFLYSFEDSGVGDKTGFLALDNTNKLIVLSFRGSRSIENWIGNLNFDLKEINDICSGCRGHDGFTSSWRSVADTLRQKVEDAVREHPDYRVVFTGHSLGGALATVAGADLRGNGYDIDVFSYGAPRVGNRAFAEFLTVQTGGTLYRITHTNDIVPRLPPREFGYSHSSPEYWIKSGTLVPVTRNDIVKIEGIDATGGNNQPNIPDIPAHLWYFGLIGTC

SEQ ID NO: 11295 - protein, 268 aa, Thermomyces lanuginosus
EVSQDLFNQFNLFAQYSAAAYCGKNNDAPAGTNITCTGNACPEVEKADATFLYSFEDSGVGDVTGFLALDNTNKLIVLSFRGSRSIENWIGNLNFDLKEINDICSGCRGHDGFTSSWRSVADTLRQKVEDAVREHPDYRVVFTGHSLGGALATVAGADLRGNGYDIDVFSYGAPRVGNRAFAEFLTVQTGGTLYRITHTNDIVPRLPNREFGYSHSSPEYWIKSGTLVPVTRNDIVKIEGIDATGGNNQPNIPDIPAHLWYFGLIGTC

SEQ ID NO: 11296 - protein, 268 aa, Thermomyces lanuginosus
EVSQDLFNQFNLFAQYSAAAYCGKNNDAPAGTNITCTGNACPEVEKADATFLYSFEDSGVGDVTGFLALDNTNKLIVLSFRGSRSIENWIGNLNFDLKEINDICSGCRGHWGFTSSWRSVADTLRQKVEDAVREHPDYRVVFTGHSLGGALATVAGADLRGNGYDIDVFSYGAPRVGNRAFAEFLTVQTGGTLYRITHTNDIVPRLPPREFGYSHSSPEYWIKSGTLVPVTRNDIVKIEGIDATGGNNQPNIPDIPAHLWYFGLIGTC

SEQ ID NO: 11297 - protein, 268 aa, Thermomyces lanuginosus
EVSQDLFNQFNLFAQYSAAAYCGKNNDAPAGTNITCTGNACPEVEKADATFLYSFEDSGVGDVTGFLALDNTNKLIVLSFRGSRSIENWIGNLNFDLKEINDICSGCRGHDGFTSSWRSVADTLRQKVEYAVREHPDYRVVFTGHSLGGALATVAGADLRGNGYDIDVFSYGAPRVGNRAFAEFLTVQTGGTLYRITHTNDIVPRLPPREFGYSHSSPEYWIKSGTLVPVTRNDIVKIEGIDATGGNNQPNIPDIPAHLWYFGLIGTC

SEQ ID NO: 11298 - protein, 268 aa, Thermomyces lanuginosus
EVSQDLFNQFNLFAQYSAAAYCGKNNDAPAGTNITCTGNACPEVEKADATFLYSFEDSGVGDVTGFLALDNTNKLIVLSFRGSRSIENWIGNLNFDLKEINDICSGCRGHDGFTSSWRSVADTLRQKVEDAVREHPDYRVVFTGHSLGGALATVAGADLRGNGYDIDVFSYGAPRVGNRAFAEFLTVQTGGTLYRITHTNDIVPRLPPREFGYSHSSPEYWIKSGTLVPVTRNDIVKIEGIDAFGGNNQPNIPDIPAHLWYFGLIGTC

SEQ ID NO: 11299 - protein, 268 aa, Thermomyces lanuginosus
EVSMDLFNQFNLFAQYSAAAYCGKNNDAPAGTNITCTGNACPEVEKADATFLYSFEDSGVGDVTGFLALDNTNKLIVLSFRGSRSIENWIGNLNFDLKEINDICSGCRGHDGFTSSWRSVADTLRQKVEDAVREHPDYRVVFTGHSLGGALATVAGADLRGNGYDIDVFSYGAPRVGNRAFAEFLTVQTGGTLYRITHTNDIVPRLPPREFGYSHSSPEYWIKSGTLVPVTRNDIVKIEGIDATGGNNQPNIPDIPAHLWYFGLIGTC

SEQ ID NO: 11300 - protein, 268 aa, Thermomyces lanuginosus
EVSQDLFNQFNLFAQYSAAAYCGKNNDAPAGTNITCTGNACPEVEKADATFLYSFEDSGVGDVTGFLALDNTNKLIVLSFRGSRSIENWIGNLNFDMKEINDICSGCRGHDGFTSSWRSVADTLRQKVEDAVREHPDYRVVFTGHSLGGALATVAGADLRGNGYDIDVFSYGAPRVGNRAFAEFLTVQTGGTLYRITHTNDIVPRLPPREFGYSHSSPEYWIKSGTLVPVTRNDIVKIEGIDATGGNNQPNIPDIPAHLWYFGLIGTC

SEQ ID NO: 11301 - protein, 268 aa, Thermomyces lanuginosus
EVSQDLFNQFNLFAQYSAAAYCGKNNDAQAGTNITCTGNACPEVEKADATFLYSFEDSGVGDVTGFLALDNTNKLIVLSFRGSRSIENWIGNLNFDLKEINDICSGCRGHDGFTSSWRSVADTLRQKVEDAVREHPDYRVVFTGHSLGGALATVAGADLRGNGYDIDVFSYGAPRVGNRAFAEFLTVQTGGTLYRITHTNDIVPRLPPREFGYSHSSPEYWIKSGTLVPVTRNDIVKIEGIDATGGNNQPNIPDIPAHLWYFGLIGTC

SEQ ID NO: 11302 - protein, 268 aa, Thermomyces lanuginosus
EVSQDLFNQFNLFAQYSAAAYCGKNNDAPAGTNITCTWNACPEVEKADATFLYSFEDSGVGDVTGFLALDNTNKLIVLSFRGSRSIENWIGNLNFDLKEINDICSGCRGHDGFTSSWRSVADTLRQKVEDAVREHPDYRVVFTGHSLGGALATVAGADLRGNGYDIDVFSYGAPRVGNRAFAEFLTVQTGGTLYRITHTNDIVPRLPPREFGYSHSSPEYWIKSGTLVPVTRNDIVKIEGIDATGGNNQPNIPDIPAHLWYFGLIGTC

SEQ ID NO: 11303 - protein, 268 aa, Thermomyces lanuginosus
EVSQDLFNQFNLFAQYSAAAYCGKNNDAPAGTNITCTGNACPEVEKADATFLYSFEDSGVGDVTGFLALDNTNKLIVLSFRGSRSIENWIGNLNFDLKEINDICSGCRGHDGFTSSWRSVADTLRQKVEDAVREHPDYRVVFTGHSLGGALATVAGADLRGNGYDIDVFSYGAPRVGNRAFAEFLTVQTGGTLYRITHTNDIVPRLPPREFGYSHSSPEYWIKSGTLVPVTRNDIVKIEGIDAQGGNNQPNIPDIPAHLWYFGLIGTC

SEQ ID NO: 11304 - protein, 268 aa, Thermomyces lanuginosus
EVDQDLFNQFNLFAQYSAAAYCGKNNDAPAGTNITCTGNACPEVEKADATFLYSFEDSGVGDVTGFLALDNTNKLIVLSFRGSRSIENWIGNLNFDLKEINDICSGCRGHDGFTSSWRSVADTLRQKVEDAVREHPDYRVVFTGHSLGGALATVAGADLRGNGYDIDVFSYGAPRVGNRAFAEFLTVQTGGTLYRITHTNDIVPRLPPREFGYSHSSPEYWIKSGTLVPVTRNDIVKIEGIDATGGNNQPNIPDIPAHLWYFGLIGTC

SEQ ID NO: 11305 - protein, 268 aa, Thermomyces lanuginosus
EVSQDLFNQFNLFAQYSAAAYCGLNNDAPAGTNITCTGNACPEVEKADATFLYSFEDSGVGDVTGFLALDNTNKLIVLSFRGSRSIENWIGNLNFDLKEINDICSGCRGHDGFTSSWRSVADTLRQKVEDAVREHPDYRVVFTGHSLGGALATVAGADLRGNGYDIDVFSYGAPRVGNRAFAEFLTVQTGGTLYRITHTNDIVPRLPPREFGYSHSSPEYWIKSGTLVPVTRNDIVKIEGIDATGGNNQPNIPDIPAHLWYFGLIGTC

SEQ ID NO: 11306 - protein, 268 aa, Thermomyces lanuginosus
EVSQDLFNQFNLFAQYSAAAYCGKNNDAPAGTNITCTGNSCPEVEKADATFLYSFEDSGVGDVTGFLALDNTNKLIVLSFRGSRSIENWIGNLNFDLKEINDICSGCRGHDGFTSSWRSVADTLRQKVEDAVREHPDYRVVFTGHSLGGALATVAGADLRGNGYDIDVFSYGAPRVGNRAFAEFLTVQTGGTLYRITHTNDIVPRLPPREFGYSHSSPEYWIKSGTLVPVTRNDIVKIEGIDATGGNNQPNIPDIPAHLWYFGLIGTC

SEQ ID NO: 11307 - protein, 268 aa, Thermomyces lanuginosus
EVSQDLFNQFNLFAQYSAAAYCGKNNDAPAGTNITCTGNACPEVEKADATFLYSFEDSGVGDVTGFLALDNTNKLIVLSFRGSRSIENWIGNLKFDLKEINDICSGCRGHDGFTSSWRSVADTLRQKVEDAVREHPDYRVVFTGHSLGGALATVAGADLRGNGYDIDVFSYGAPRVGNRAFAEFLTVQTGGTLYRITHTNDIVPRLPPREFGYSHSSPEYWIKSGTLVPVTRNDIVKIEGIDATGGNNQPNIPDIPAHLWYFGLIGTC

SEQ ID NO: 11308 - protein, 268 aa, Thermomyces lanuginosus
EVSQDLFNQFNLFAQYSAAAYCGKNNDAPAGTNITCTGNACPEVEKADATFLYSFEDSGVGDVTGFLALDNTNKLIVLSFRGSRSIENWIGNLNFDLKEINDICSGCRGHDGFTSSWRSVADTLRQKVEDAVREHPDYRVVFTGHSLGGALATVAGADLRGNGYDIDVFSYGAPRVGNRAFAEFLTVQTGGTLYRITHTNDIVPRLPPREFGYSHSSPEYWILSGTLVPVTRNDIVKIEGIDATGGNNQPNIPDIPAHLWYFGLIGTC

SEQ ID NO: 11309 - protein, 268 aa, Thermomyces lanuginosus
EVSQDLFNQFNLFAQYSAAAYCGKNNDAPAGTNITCTGNACPEVEKADATFLYSFEDSGVGDVTGFLALDNTNKLIVLSFRGSRSIENWIGNLNFDLKEINDICSGCRGHDGFTSSWRSVADTLRQKVEDAVREHPDYRVVHTGHSLGGALATVAGADLRGNGYDIDVFSYGAPRVGNRAFAEFLTVQTGGTLYRITHTNDIVPRLPPREFGYSHSSPEYWIKSGTLVPVTRNDIVKIEGIDATGGNNQPNIPDIPAHLWYFGLIGTC

SEQ ID NO: 11310 - protein, 268 aa, Thermomyces lanuginosus
EVSQDLFNQFNLFAQYSAAAYCGKNNDAPAGTNITCTGNACPEVEKADATFLYSFEDSGVGDVTGFLALDNTNKLIVLSFRGSRSIENWIGNLNFDLKEINDICSGCRGHDGFTSSWRSVADTLRQKVEDAVREHPEYRVVFTGHSLGGALATVAGADLRGNGYDIDVFSYGAPRVGNRAFAEFLTVQTGGTLYRITHTNDIVPRLPPREFGYSHSSPEYWIKSGTLVPVTRNDIVKIEGIDATGGNNQPNIPDIPAHLWYFGLIGTC

SEQ ID NO: 11311 - protein, 268 aa, Thermomyces lanuginosus
EVSQDLFNQFNLFAQYSAAAYCGKNNDAPAGMNITCTGNACPEVEKADATFLYSFEDSGVGDVTGFLALDNTNKLIVLSFRGSRSIENWIGNLNFDLKEINDICSGCRGHDGFTSSWRSVADTLRQKVEDAVREHPDYRVVFTGHSLGGALATVAGADLRGNGYDIDVFSYGAPRVGNRAFAEFLTVQTGGTLYRITHTNDIVPRLPPREFGYSHSSPEYWIKSGTLVPVTRNDIVKIEGIDATGGNNQPNIPDIPAHLWYFGLIGTC

SEQ ID NO: 11312 - protein, 268 aa, Thermomyces lanuginosus
EVSQDLFNQFNLFAQYSAAAYCGKNNDAPAGTNITCTGNACPEVEKADATFLYSFEDSGVGDVTGFLALDNTNKLIVLSFRGSRSIENWIGNLNFDLKEINDICSGCRGHDGFTSSWRSVADTLRQKVEDAVREHPDYRVVFTGHSLGGALATVAGADLRGNGYDIDVFSYGAPRVGNRAFAEFLTVQTGGTLYRITHTNDIVPRLPPREFGYSHSSPEYWIKSGTLVPVTRNDIVKIEGIDATGGNNQPNIPDIPAHLPYFGLIGTC

SEQ ID NO: 11313 - protein, 268 aa, Thermomyces lanuginosus
EVSQDLFNQFNLFAQYSAAAYCGKNNDAPAETNITCTGNACPEVEKADATFLYSFEDSGVGDVTGFLALDNTNKLIVLSFRGSRSIENWIGNLNFDLKEINDICSGCRGHDGFTSSWRSVADTLRQKVEDAVREHPDYRVVFTGHSLGGALATVAGADLRGNGYDIDVFSYGAPRVGNRAFAEFLTVQTGGTLYRITHTNDIVPRLPPREFGYSHSSPEYWIKSGTLVPVTRNDIVKIEGIDATGGNNQPNIPDIPAHLWYFGLIGTC

SEQ ID NO: 11314 - protein, 268 aa, Thermomyces lanuginosus
EVSQDLFNQFNLFAQYSAAAYCGKNNDAPAGTNITCTGNACPEVEKADATFLYSFEDSGVGDVTGFLALDHTNKLIVLSFRGSRSIENWIGNLNFDLKEINDICSGCRGHDGFTSSWRSVADTLRQKVEDAVREHPDYRVVFTGHSLGGALATVAGADLRGNGYDIDVFSYGAPRVGNRAFAEFLTVQTGGTLYRITHTNDIVPRLPPREFGYSHSSPEYWIKSGTLVPVTRNDIVKIEGIDATGGNNQPNIPDIPAHLWYFGLIGTC

SEQ ID NO: 11315 - protein, 268 aa, Thermomyces lanuginosus
EVSQDLFNQFNLFAQYSAAAYCGKNNDAPAGTNITCTGNACPEVEKADATFLYSFEDSGVGDVTGFLALDNTNKLIVLSFRGSRSIENWIGNLNFDLKEINDICSGCRGHDGFTISWRSVADTLRQKVEDAVREHPDYRVVFTGHSLGGALATVAGADLRGNGYDIDVFSYGAPRVGNRAFAEFLTVQTGGTLYRITHTNDIVPRLPPREFGYSHSSPEYWIKSGTLVPVTRNDIVKIEGIDATGGNNQPNIPDIPAHLWYFGLIGTC

SEQ ID NO: 11316 - protein, 268 aa, Thermomyces lanuginosus
EVSQDLFNQFNLFAQYSAAAYCGKNNDAPAGTNITCTGNACPEVEKADATFLYSFEDSGVGDVTGFLALDNTNKLIVLSFRGSRSIENWIGNLPFDLKEINDICSGCRGHDGFTSSWRSVADTLRQKVEDAVREHPDYRVVFTGHSLGGALATVAGADLRGNGYDIDVFSYGAPRVGNRAFAEFLTVQTGGTLYRITHTNDIVPRLPPREFGYSHSSPEYWIKSGTLVPVTRNDIVKIEGIDATGGNNQPNIPDIPAHLWYFGLIGTC

SEQ ID NO: 11317 - protein, 268 aa, Thermomyces lanuginosus
EVSQDLFNQFNLFAQYSAAAYCGFNNDAPAGTNITCTGNACPEVEKADATFLYSFEDSGVGDVTGFLALDNTNKLIVLSFRGSRSIENWIGNLNFDLKEINDICSGCRGHDGFTSSWRSVADTLRQKVEDAVREHPDYRVVFTGHSLGGALATVAGADLRGNGYDIDVFSYGAPRVGNRAFAEFLTVQTGGTLYRITHTNDIVPRLPPREFGYSHSSPEYWIKSGTLVPVTRNDIVKIEGIDATGGNNQPNIPDIPAHLWYFGLIGTC

SEQ ID NO: 11318 - protein, 268 aa, Thermomyces lanuginosus
EVSQDLFNQFNLFAQYSAAAYCGKNNDAPAGTNITCTGNACPEVEKADATFLYSFEDSGVGDVTGGLALDNTNKLIVLSFRGSRSIENWIGNLNFDLKEINDICSGCRGHDGFTSSWRSVADTLRQKVEDAVREHPDYRVVFTGHSLGGALATVAGADLRGNGYDIDVFSYGAPRVGNRAFAEFLTVQTGGTLYRITHTNDIVPRLPPREFGYSHSSPEYWIKSGTLVPVTRNDIVKIEGIDATGGNNQPNIPDIPAHLWYFGLIGTC

SEQ ID NO: 11319 - protein, 268 aa, Thermomyces lanuginosus
EVSQDLFNQFNLFAQYSAAAYCGKTNDAPAGTNITCTGNACPEVEKADATFLYSFEDSGVGDVTGFLALDNTNKLIVLSFRGSRSIENWIGNLNFDLKEINDICSGCRGHDGFTSSWRSVADTLRQKVEDAVREHPDYRVVFTGHSLGGALATVAGADLRGNGYDIDVFSYGAPRVGNRAFAEFLTVQTGGTLYRITHTNDIVPRLPPREFGYSHSSPEYWIKSGTLVPVTRNDIVKIEGIDATGGNNQPNIPDIPAHLWYFGLIGTC

SEQ ID NO: 11320 - protein, 268 aa, Thermomyces lanuginosus
EVSQDLFNQFNLFAQYSAAAYCGKNNDAPAPTNITCTGNACPEVEKADATFLYSFEDSGVGDVTGFLALDNTNKLIVLSFRGSRSIENWIGNLNFDLKEINDICSGCRGHDGFTSSWRSVADTLRQKVEDAVREHPDYRVVFTGHSLGGALATVAGADLRGNGYDIDVFSYGAPRVGNRAFAEFLTVQTGGTLYRITHTNDIVPRLPPREFGYSHSSPEYWIKSGTLVPVTRNDIVKIEGIDATGGNNQPNIPDIPAHLWYFGLIGTC

SEQ ID NO: 11321 - protein, 268 aa, Thermomyces lanuginosus
EVSQDLFNQFNLFAQYSAAAYCGKNNDAPAGTNITCTGNACPEVEKADATFLYSFEDSGVGDVTGFLALDNTNKLIVLSFRGSRSIENWIGNLNFDLKEINDICSGCRGHDGFTSSWRSVADTLRQFVEDAVREHPDYRVVFTGHSLGGALATVAGADLRGNGYDIDVFSYGAPRVGNRAFAEFLTVQTGGTLYRITHTNDIVPRLPPREFGYSHSSPEYWIKSGTLVPVTRNDIVKIEGIDATGGNNQPNIPDIPAHLWYFGLIGTC

SEQ ID NO: 11322 - protein, 268 aa, Thermomyces lanuginosus
EVSQDLFNQFNLFAQYSAAAYCGKNNDAPAGTNITCTGNACPEVEKADATFLYSFEDSGVGDVTGFLALDNTNKLIVLSFRGSRSIENWIGNLNFDLKEINDICSGCRGHDGFTSSWRSVADTLRQKVEDAVREHPDYRVVFTGHSLGGALATVAGADLRGNGYDIDVFSYGAPRVGNRAFAEFLTVQTGGTLYRITHTNDIVPRLPPREFGYSHSSPEYWIKSGTLVPVTRNDIVKIEGIDATGGNNQPNIPDITAHLWYFGLIGTC

SEQ ID NO: 11323 - protein, 268 aa, Thermomyces lanuginosus
EVSQDLFNQFNLFAQYSAAAYCGKNNDAPAGTNITCTGNACPEVEKADATFLYSFEDSGVGDVTGFLALDNTNKLIVLSFRGSRSIENWIGNLNFDLKEINDICSGCRGHDGFTSSWRSVADTLRQKVEDAWREHPDYRVVFTGHSLGGALATVAGADLRGNGYDIDVFSYGAPRVGNRAFAEFLTVQTGGTLYRITHTNDIVPRLPPREFGYSHSSPEYWIKSGTLVPVTRNDIVKIEGIDATGGNNQPNIPDIPAHLWYFGLIGTC

SEQ ID NO: 11324 - protein, 268 aa, Thermomyces lanuginosus
EVSQDLFNQFNLFAQYSAAAYCGKNNDAPLGTNITCTGNACPEVEKADATFLYSFEDSGVGDVTGFLALDNTNKLIVLSFRGSRSIENWIGNLNFDLKEINDICSGCRGHDGFTSSWRSVADTLRQKVEDAVREHPDYRVVFTGHSLGGALATVAGADLRGNGYDIDVFSYGAPRVGNRAFAEFLTVQTGGTLYRITHTNDIVPRLPPREFGYSHSSPEYWIKSGTLVPVTRNDIVKIEGIDATGGNNQPNIPDIPAHLWYFGLIGTC

SEQ ID NO: 11325 - protein, 268 aa, Thermomyces lanuginosus
EVSQDLFNQFNLFAQYSAAAYCGENNDAPAGTNITCTGNACPEVEKADATFLYSFEDSGVGDVTGFLALDNTNKLIVLSFRGSRSIENWIGNLNFDLKEINDICSGCRGHDGFTSSWRSVADTLRQKVEDAVREHPDYRVVFTGHSLGGALATVAGADLRGNGYDIDVFSYGAPRVGNRAFAEFLTVQTGGTLYRITHTNDIVPRLPPREFGYSHSSPEYWIKSGTLVPVTRNDIVKIEGIDATGGNNQPNIPDIPAHLWYFGLIGTC

SEQ ID NO: 11326 - protein, 268 aa, Thermomyces lanuginosus
EVSQDLFNQFNLFAQYSAAAYCGKNNDAPAGTNITCTGNACPEVEKADATFLYSFEDSGVGDVTGFLALDNTNKLIVLSFRGSRSIENWIGNLNFDLKEINDICSGCMGHDGFTSSWRSVADTLRQKVEDAVREHPDYRVVFTGHSLGGALATVAGADLRGNGYDIDVFSYGAPRVGNRAFAEFLTVQTGGTLYRITHTNDIVPRLPPREFGYSHSSPEYWIKSGTLVPVTRNDIVKIEGIDATGGNNQPNIPDIPAHLWYFGLIGTC

SEQ ID NO: 11327 - protein, 268 aa, Thermomyces lanuginosus
EVSQDLFNQFNLHAQYSAAAYCGKNNDAPAGTNITCTGNACPEVEKADATFLYSFEDSGVGDVTGFLALDNTNKLIVLSFRGSRSIENWIGNLNFDLKEINDICSGCRGHDGFTSSWRSVADTLRQKVEDAVREHPDYRVVFTGHSLGGALATVAGADLRGNGYDIDVFSYGAPRVGNRAFAEFLTVQTGGTLYRITHTNDIVPRLPPREFGYSHSSPEYWIKSGTLVPVTRNDIVKIEGIDATGGNNQPNIPDIPAHLWYFGLIGTC

SEQ ID NO: 11328 - protein, 268 aa, Thermomyces lanuginosus
EVSQDLFNQFNLFAQYSAASYCGKNNDAPAGTNITCTGNACPEVEKADATFLYSFEDSGVGDVTGFLALDNTNKLIVLSFRGSRSIENWIGNLNFDLKEINDICSGCRGHDGFTSSWRSVADTLRQKVEDAVREHPDYRVVFTGHSLGGALATVAGADLRGNGYDIDVFSYGAPRVGNRAFAEFLTVQTGGTLYRITHTNDIVPRLPPREFGYSHSSPEYWIKSGTLVPVTRNDIVKIEGIDATGGNNQPNIPDIPAHLWYFGLIGTC

SEQ ID NO: 11329 - protein, 268 aa, Thermomyces lanuginosus
EVSQDLFIQFNLFAQYSAAAYCGKNNDAPAGTNITCTGNACPEVEKADATFLYSFEDSGVGDVTGFLALDNTNKLIVLSFRGSRSIENWIGNLNFDLKEINDICSGCRGHDGFTSSWRSVADTLRQKVEDAVREHPDYRVVFTGHSLGGALATVAGADLRGNGYDIDVFSYGAPRVGNRAFAEFLTVQTGGTLYRITHTNDIVPRLPPREFGYSHSSPEYWIKSGTLVPVTRNDIVKIEGIDATGGNNQPNIPDIPAHLWYFGLIGTC

SEQ ID NO: 11330 - protein, 268 aa, Thermomyces lanuginosus
EVSQDLFNQFNLFAQYSAAAYCGKNNDAPAGTNITCTGNACPEVEKADATFLYSFEDSGVGDVTGFLALDNTNKLIVLSFRGSRSIENWIGNLNFDLKEINDICSGCRGHDGFTSSWRSVADTLRQKVEDAVREHPDYRVVFTGHSLGGALATVAGADLRGNGYDIDVFSYGAPRVGNRAFAEFLTVQTGGTLYRITHTNDIVPRLPPREFGYSHSSPEYWIKSGTLVPVTRNDIVKIEGIDATGGNNQPNIFDIPAHLWYFGLIGTC

SEQ ID NO: 11331 - protein, 268 aa, Thermomyces lanuginosus
EVSQDLFNQFNLFAQYSAAAYCRKNNDAPAGTNITCTGNACPEVEKADATFLYSFEDSGVGDVTGFLALDNTNKLIVLSFRGSRSIENWIGNLNFDLKEINDICSGCRGHDGFTSSWRSVADTLRQKVEDAVREHPDYRVVFTGHSLGGALATVAGADLRGNGYDIDVFSYGAPRVGNRAFAEFLTVQTGGTLYRITHTNDIVPRLPPREFGYSHSSPEYWIKSGTLVPVTRNDIVKIEGIDATGGNNQPNIPDIPAHLWYFGLIGTC

SEQ ID NO: 11332 - protein, 268 aa, Thermomyces lanuginosus
EVSQDLFNQFNLFAQYSAAAYCGKNNDAPAGINITCTGNACPEVEKADATFLYSFEDSGVGDVTGFLALDNTNKLIVLSFRGSRSIENWIGNLNFDLKEINDICSGCRGHDGFTSSWRSVADTLRQKVEDAVREHPDYRVVFTGHSLGGALATVAGADLRGNGYDIDVFSYGAPRVGNRAFAEFLTVQTGGTLYRITHTNDIVPRLPPREFGYSHSSPEYWIKSGTLVPVTRNDIVKIEGIDATGGNNQPNIPDIPAHLWYFGLIGTC

SEQ ID NO: 11333 - protein, 268 aa, Thermomyces lanuginosus
EVSQDLFNQFNLFAQYSAAAYCGKNNDAPAGTNITCTGNACPEVEKADATFLYSFTDSGVGDVTGFLALDNTNKLIVLSFRGSRSIENWIGNLNFDLKEINDICSGCRGHDGFTSSWRSVADTLRQKVEDAVREHPDYRVVFTGHSLGGALATVAGADLRGNGYDIDVFSYGAPRVGNRAFAEFLTVQTGGTLYRITHTNDIVPRLPPREFGYSHSSPEYWIKSGTLVPVTRNDIVKIEGIDATGGNNQPNIPDIPAHLWYFGLIGTC

SEQ ID NO: 11334 - protein, 268 aa, Thermomyces lanuginosus
EVSQDLFNQFNLFAQYSAAAYCGKNNDAPAGTNITCTGNACPEVEKADATFLYSFEDSGVGDVTGFLALDNTNKLIVLSFRGSRSIENWIGNLGFDLKEINDICSGCRGHDGFTSSWRSVADTLRQKVEDAVREHPDYRVVFTGHSLGGALATVAGADLRGNGYDIDVFSYGAPRVGNRAFAEFLTVQTGGTLYRITHTNDIVPRLPPREFGYSHSSPEYWIKSGTLVPVTRNDIVKIEGIDATGGNNQPNIPDIPAHLWYFGLIGTC

SEQ ID NO: 11335 - protein, 268 aa, Thermomyces lanuginosus
EVSQLLFNQFNLFAQYSAAAYCGKNNDAPAGTNITCTGNACPEVEKADATFLYSFEDSGVGDVTGFLALDNTNKLIVLSFRGSRSIENWIGNLNFDLKEINDICSGCRGHDGFTSSWRSVADTLRQKVEDAVREHPDYRVVFTGHSLGGALATVAGADLRGNGYDIDVFSYGAPRVGNRAFAEFLTVQTGGTLYRITHTNDIVPRLPPREFGYSHSSPEYWIKSGTLVPVTRNDIVKIEGIDATGGNNQPNIPDIPAHLWYFGLIGTC

SEQ ID NO: 11336 - protein, 268 aa, Thermomyces lanuginosus
EVSQDLFNQFNLFAQYSAAAYCGKNNDAPAGTNITCTGNACWEVEKADATFLYSFEDSGVGDVTGFLALDNTNKLIVLSFRGSRSIENWIGNLNFDLKEINDICSGCRGHDGFTSSWRSVADTLRQKVEDAVREHPDYRVVFTGHSLGGALATVAGADLRGNGYDIDVFSYGAPRVGNRAFAEFLTVQTGGTLYRITHTNDIVPRLPPREFGYSHSSPEYWIKSGTLVPVTRNDIVKIEGIDATGGNNQPNIPDIPAHLWYFGLIGTC

SEQ ID NO: 11337 - protein, 268 aa, Thermomyces lanuginosus
EVSQDLFNQFNLFAQYSAAAYCGKNNDAPAGTNITCTGNACPEVEKADATFLYSFEDSGVGDVTGFLALDNTNKLIVLSFRGSRSIENWIGNLNFDLKEINDICSGCRGHDGFTSSWRSVADTLRQKVEDAVREHPDYRVVFTGHSLGGAMATVAGADLRGNGYDIDVFSYGAPRVGNRAFAEFLTVQTGGTLYRITHTNDIVPRLPPREFGYSHSSPEYWIKSGTLVPVTRNDIVKIEGIDATGGNNQPNIPDIPAHLWYFGLIGTC

SEQ ID NO: 11338 - protein, 268 aa, Thermomyces lanuginosus
EVSQDLFNQFNLFAQYSAAAYCGKNNDAPAGTNITCTGNACPEVEKADATFLYSFEDSGVRDVTGFLALDNTNKLIVLSFRGSRSIENWIGNLNFDLKEINDICSGCRGHDGFTSSWRSVADTLRQKVEDAVREHPDYRVVFTGHSLGGALATVAGADLRGNGYDIDVFSYGAPRVGNRAFAEFLTVQTGGTLYRITHTNDIVPRLPPREFGYSHSSPEYWIKSGTLVPVTRNDIVKIEGIDATGGNNQPNIPDIPAHLWYFGLIGTC

SEQ ID NO: 11339 - protein, 268 aa, Thermomyces lanuginosus
EVSQDLFNQFNLFAQYSAAAYCGKNNDAPAGTNITCTGNACPEVEKADATFLYSFEDSGVGDVTGFLALDNTNKLIVLSFRGSRSIENWIGNLNFDLKEINDICSGCRGHDGFTSSWRSVADTLRQKVEDAVREHPDYRVVFTGHSLGGALATVAGADLRGNGYDIDVFSYGAPRVGNRAFAEFLTVQRGGTLYRITHTNDIVPRLPPREFGYSHSSPEYWIKSGTLVPVTRNDIVKIEGIDATGGNNQPNIPDIPAHLWYFGLIGTC

SEQ ID NO: 11340 - protein, 268 aa, Thermomyces lanuginosus
EVSQDLFNQFNLFAQYSAAAYCGKNNDAPAGTNITCTGNACPEVEKADATFLYSFEDSGVGDVTGFLALDNTNKLIVLSFRGSRSIENWIGNLNFDLKEINDICSGCRGHDGFTSSWRSVADTLRQKVEDAHREHPDYRVVFTGHSLGGALATVAGADLRGNGYDIDVFSYGAPRVGNRAFAEFLTVQTGGTLYRITHTNDIVPRLPPREFGYSHSSPEYWIKSGTLVPVTRNDIVKIEGIDATGGNNQPNIPDIPAHLWYFGLIGTC

SEQ ID NO: 11341 - protein, 268 aa, Thermomyces lanuginosus
EVSQDLFNQFNLFAQYSAAAYCPKNNDAPAGTNITCTGNACPEVEKADATFLYSFEDSGVGDVTGFLALDNTNKLIVLSFRGSRSIENWIGNLNFDLKEINDICSGCRGHDGFTSSWRSVADTLRQKVEDAVREHPDYRVVFTGHSLGGALATVAGADLRGNGYDIDVFSYGAPRVGNRAFAEFLTVQTGGTLYRITHTNDIVPRLPPREFGYSHSSPEYWIKSGTLVPVTRNDIVKIEGIDATGGNNQPNIPDIPAHLWYFGLIGTC

SEQ ID NO: 11342 - protein, 268 aa, Thermomyces lanuginosus
EVSQDLFNQFNLFAQYSAAAYCGKNNDAPAGTNITCTGNACPEVEKADATFLYSFEDSGVGDVTGFLALDNTNKLIVLSFRGSRSIENWIGNLNFDLKEINDICSGCRGHDGFTSSWRSVADTLRQKVEDAVREFPDYRVVFTGHSLGGALATVAGADLRGNGYDIDVFSYGAPRVGNRAFAEFLTVQTGGTLYRITHTNDIVPRLPPREFGYSHSSPEYWIKSGTLVPVTRNDIVKIEGIDATGGNNQPNIPDIPAHLWYFGLIGTC

SEQ ID NO: 11343 - protein, 268 aa, Thermomyces lanuginosus
EVSQDLFNQFNLFAQYSAAAYCGKNNDAPAGTNITCTGNACPEVEKADATFLYSFEDSGVGDVTGFLALDNTNKLIVLSFRGSRSIENWIGNLNFDLKEINDICSGCRGHDGFTSSWRSVADTLRQKVEDAVREHPDYRVVFTGHSLGGALATVAGADLRGNGYDIDVFSYGAPRVGNRAFAEFLTVQTGGTLYRITHTNDIVPRLPPREFGYSHSSPEYWIKSGTLVPVTRNDIVTIEGIDATGGNNQPNIPDIPAHLWYFGLIGTC

SEQ ID NO: 11344 - protein, 268 aa, Thermomyces lanuginosus
EVSQDLFNQFNLFAQYSQAAYCGKNNDAPAGTNITCTGNACPEVEKADATFLYSFEDSGVGDVTGFLALDNTNKLIVLSFRGSRSIENWIGNLNFDLKEINDICSGCRGHDGFTSSWRSVADTLRQKVEDAVREHPDYRVVFTGHSLGGALATVAGADLRGNGYDIDVFSYGAPRVGNRAFAEFLTVQTGGTLYRITHTNDIVPRLPPREFGYSHSSPEYWIKSGTLVPVTRNDIVKIEGIDATGGNNQPNIPDIPAHLWYFGLIGTC

SEQ ID NO: 11345 - protein, 268 aa, Thermomyces lanuginosus
EVSQDLFNQFNLFAQYSAAAYCGKNNDAPAGTNITCTGNACPEVEKADATFLYSFEDSGVGDVTGFLATDNTNKLIVLSFRGSRSIENWIGNLNFDLKEINDICSGCRGHDGFTSSWRSVADTLRQKVEDAVREHPDYRVVFTGHSLGGALATVAGADLRGNGYDIDVFSYGAPRVGNRAFAEFLTVQTGGTLYRITHTNDIVPRLPPREFGYSHSSPEYWIKSGTLVPVTRNDIVKIEGIDATGGNNQPNIPDIPAHLWYFGLIGTC

SEQ ID NO: 11346 - protein, 268 aa, Thermomyces lanuginosus
EVSQDLFNQFNLFAQYSAAAYCGKNNDAPAGTNITCTGNACPEVEKADATFLYSFEDSGVGDVTGFLALDNTNKLIVLSFRGSRSIENWIGNLNFDLKEINDICSGCRGHDGFTSSWRSVADTLRQKVEDAVREHPDYRVVFTGHSLGGALATVAGADLRGFGYDIDVFSYGAPRVGNRAFAEFLTVQTGGTLYRITHTNDIVPRLPPREFGYSHSSPEYWIKSGTLVPVTRNDIVKIEGIDATGGNNQPNIPDIPAHLWYFGLIGTC

SEQ ID NO: 11347 - protein, 268 aa, Thermomyces lanuginosus
EVSQDLFNQFNLFAQYSAAAYCGKNNDAPAGTNITCTGNACPEVEKADATFLYSFEDSGVGDVTGFLALDNTNKLIVLSFRGSRSIENWIGNLNFDLKEINDICSGCRGHDGFTSSWRSVADTLRQKVEDAVREHPDYRVVFTGHSLGGALATVAGADLRGNGYDIDVFSYGAPRVGNRAFAEFLTVQTGGTLYRITHTNDIVPRLPPREFGYSHSSPEYWIKSGTLAPVTRNDIVKIEGIDATGGNNQPNIPDIPAHLWYFGLIGTC

SEQ ID NO: 11348 - protein, 268 aa, Thermomyces lanuginosus
EVSQDLFNQFNLFAQYSAAAYCGKNNDAPAGTNITCTGNACPEVEKADATFLYSFEDSGVGDVTGFLALDNTNKLIVLSFRGSRSIENWIGNLNFDLKEINDICRGCRGHDGFTSSWRSVADTLRQKVEDAVREHPDYRVVFTGHSLGGALATVAGADLRGNGYDIDVFSYGAPRVGNRAFAEFLTVQTGGTLYRITHTNDIVPRLPPREFGYSHSSPEYWIKSGTLVPVTRNDIVKIEGIDATGGNNQPNIPDIPAHLWYFGLIGTC

SEQ ID NO: 11349 - protein, 268 aa, Thermomyces lanuginosus
EVSQDLFNQFNLFAQYSAAAYCGKNNDAPAGTNITCTGNACPEVEKADATFLYSFEDSGVGDVTGFLAKDNTNKLIVLSFRGSRSIENWIGNLNFDLKEINDICSGCRGHDGFTSSWRSVADTLRQKVEDAVREHPDYRVVFTGHSLGGALATVAGADLRGNGYDIDVFSYGAPRVGNRAFAEFLTVQTGGTLYRITHTNDIVPRLPPREFGYSHSSPEYWIKSGTLVPVTRNDIVKIEGIDATGGNNQPNIPDIPAHLWYFGLIGTC

SEQ ID NO: 11350 - protein, 268 aa, Thermomyces lanuginosus
EVSQDLFNQFNLFAQYSAAAYCGKNNDAPAGTNITCTGNACPEVEKADATFLYSFEDSGVGDVTGFLALDNTNKLIVLSFRGSRSIENWIGNLNFDLKEINDICSGCRGHDGFTSSWRSVADTLRQKVEVAVREHPDYRVVFTGHSLGGALATVAGADLRGNGYDIDVFSYGAPRVGNRAFAEFLTVQTGGTLYRITHTNDIVPRLPPREFGYSHSSPEYWIKSGTLVPVTRNDIVKIEGIDATGGNNQPNIPDIPAHLWYFGLIGTC

SEQ ID NO: 11351 - protein, 268 aa, Thermomyces lanuginosus
EVSQDLFNQFNLFAQYSAAAYCGKNNDAPAGTNITCTGNACPEVEKADATFLYSFEDSGVGDVTGFLALDNLNKLIVLSFRGSRSIENWIGNLNFDLKEINDICSGCRGHDGFTSSWRSVADTLRQKVEDAVREHPDYRVVFTGHSLGGALATVAGADLRGNGYDIDVFSYGAPRVGNRAFAEFLTVQTGGTLYRITHTNDIVPRLPPREFGYSHSSPEYWIKSGTLVPVTRNDIVKIEGIDATGGNNQPNIPDIPAHLWYFGLIGTC

SEQ ID NO: 11352 - protein, 268 aa, Thermomyces lanuginosus
EVSQDLFNQFNLFAQYSAAAYCGKNSDAPAGTNITCTGNACPEVEKADATFLYSFEDSGVGDVTGFLALDNTNKLIVLSFRGSRSIENWIGNLNFDLKEINDICSGCRGHDGFTSSWRSVADTLRQKVEDAVREHPDYRVVFTGHSLGGALATVAGADLRGNGYDIDVFSYGAPRVGNRAFAEFLTVQTGGTLYRITHTNDIVPRLPPREFGYSHSSPEYWIKSGTLVPVTRNDIVKIEGIDATGGNNQPNIPDIPAHLWYFGLIGTC

SEQ ID NO: 11353 - protein, 268 aa, Thermomyces lanuginosus
EVSQDLFNQFNLFAQYSAAAYCGKNNDAPAGTNITCTGNACPEVEKADATFLYSFEDSGVGDVTGFLALDNTNKLIVLSFRGSRSIENWIGNLNFDLKEINDICSGCRGHDGFTSSWRSVADTLRQKVEDAVREHPDYRLVFTGHSLGGALATVAGADLRGNGYDIDVFSYGAPRVGNRAFAEFLTVQTGGTLYRITHTNDIVPRLPPREFGYSHSSPEYWIKSGTLVPVTRNDIVKIEGIDATGGNNQPNIPDIPAHLWYFGLIGTC

SEQ ID NO: 11354 - protein, 268 aa, Thermomyces lanuginosus
EVSQDTFNQFNLFAQYSAAAYCGKNNDAPAGTNITCTGNACPEVEKADATFLYSFEDSGVGDVTGFLALDNTNKLIVLSFRGSRSIENWIGNLNFDLKEINDICSGCRGHDGFTSSWRSVADTLRQKVEDAVREHPDYRVVFTGHSLGGALATVAGADLRGNGYDIDVFSYGAPRVGNRAFAEFLTVQTGGTLYRITHTNDIVPRLPPREFGYSHSSPEYWIKSGTLVPVTRNDIVKIEGIDATGGNNQPNIPDIPAHLWYFGLIGTC

SEQ ID NO: 11355 - protein, 268 aa, Thermomyces lanuginosus
EVSQDLFNQFNLFAQYSAAAYCGKNNDAPAGTNITCTGNACPEVEKADATFLYSFEDSGVGDVTGFLALDNTNKLIVLSFRGSRSIENWIGNLNFDLKEINDICSGCRGHDGFTSSWRSVADTLYQKVEDAVREHPDYRVVFTGHSLGGALATVAGADLRGNGYDIDVFSYGAPRVGNRAFAEFLTVQTGGTLYRITHTNDIVPRLPPREFGYSHSSPEYWIKSGTLVPVTRNDIVKIEGIDATGGNNQPNIPDIPAHLWYFGLIGTC

SEQ ID NO: 11356 - protein, 268 aa, Thermomyces lanuginosus
EVSQDLFNQFNLFAQYSAAAYCGKNNDAPAGTNITCTGNACPEVEKADATFLYSFEDSGVGDVTGQLALDNTNKLIVLSFRGSRSIENWIGNLNFDLKEINDICSGCRGHDGFTSSWRSVADTLRQKVEDAVREHPDYRVVFTGHSLGGALATVAGADLRGNGYDIDVFSYGAPRVGNRAFAEFLTVQTGGTLYRITHTNDIVPRLPPREFGYSHSSPEYWIKSGTLVPVTRNDIVKIEGIDATGGNNQPNIPDIPAHLWYFGLIGTC

SEQ ID NO: 11357 - protein, 268 aa, Thermomyces lanuginosus
EVSQDLFNQFNLFAQYSAAAYCGKNNDAPAGTNITCTGNACPEVEKMDATFLYSFEDSGVGDVTGFLALDNTNKLIVLSFRGSRSIENWIGNLNFDLKEINDICSGCRGHDGFTSSWRSVADTLRQKVEDAVREHPDYRVVFTGHSLGGALATVAGADLRGNGYDIDVFSYGAPRVGNRAFAEFLTVQTGGTLYRITHTNDIVPRLPPREFGYSHSSPEYWIKSGTLVPVTRNDIVKIEGIDATGGNNQPNIPDIPAHLWYFGLIGTC

SEQ ID NO: 11358 - protein, 268 aa, Thermomyces lanuginosus
EVSQDLFNQFNLFAQYSAAAYCGKNNDAPAGTNITCTGNACPEVEKADATFLYSFEDSGVGDVTGFLALDNTNKLIVLSFRGSRSIENWIGNLNFDLKEINDICSGCRGHDGFTSSWRSVADTLRQKVEDAVVEHPDYRVVFTGHSLGGALATVAGADLRGNGYDIDVFSYGAPRVGNRAFAEFLTVQTGGTLYRITHTNDIVPRLPPREFGYSHSSPEYWIKSGTLVPVTRNDIVKIEGIDATGGNNQPNIPDIPAHLWYFGLIGTC

SEQ ID NO: 11359 - protein, 268 aa, Thermomyces lanuginosus
EVSQDLFNQFNLFAQYSAAAYCGKNNDAPAGTNITCTGNACPEVEKADATFLYSFEDSGVGDVTGFLALDNTNKLIVLSFRGSRSIENWIGNLNFDLKEINDICSGCRGHDGFTSSWRSVADTLRQKVEDAVREHPDYRVVFTGHSLGGALATVAGADLRGNGYDIDVFSYGAPRVGNRAFAEFLTVQTGGTLYRITHTNDIVPRLPPREFGYSHSSPEYWIKSGTLVPVTRNDIVKIEGIDATGGNDQPNIPDIPAHLWYFGLIGTC

SEQ ID NO: 11360 - protein, 268 aa, Thermomyces lanuginosus
EVSQDLFNQFNLFAQYSAAAYCGKNNDAPAGTNITCTGNACPEVEKADATFLYSFEDSGVGDVTGFLALDNTNKLIVLSFRGSRSIENWIGNLNFDLKEINDICSGCRGHDGFTSSWRSVADTLRQKVEDAVREHPDYRVVFGGHSLGGALATVAGADLRGNGYDIDVFSYGAPRVGNRAFAEFLTVQTGGTLYRITHTNDIVPRLPPREFGYSHSSPEYWIKSGTLVPVTRNDIVKIEGIDATGGNNQPNIPDIPAHLWYFGLIGTC

SEQ ID NO: 11361 - protein, 268 aa, Thermomyces lanuginosus
EVSQDLFNQFNLFAQYSAAAYCGKNNDAPAGTNITCTGNACPEVEKADATFLYSFEDSGVGDVTGFLALDNTNKLIVLSFRGSRSIDNWIGNLNFDLKEINDICSGCRGHDGFTSSWRSVADTLRQKVEDAVREHPDYRVVFTGHSLGGALATVAGADLRGNGYDIDVFSYGAPRVGNRAFAEFLTVQTGGTLYRITHTNDIVPRLPPREFGYSHSSPEYWIKSGTLVPVTRNDIVKIEGIDATGGNNQPNIPDIPAHLWYFGLIGTC

SEQ ID NO: 11362 - protein, 268 aa, Thermomyces lanuginosus
EVSQDLFNQFNLFAQYSAAAYCGKNNDAPAGTNITCTGNACPEVEKADATFLYSFEDSGVGDVTGFLALDNTNKLIVLSFRGSRSIENWIGNLNFDLKEINDICSGCRGHDGFTSSWRSVADTLRQKVEDARREHPDYRVVFTGHSLGGALATVAGADLRGNGYDIDVFSYGAPRVGNRAFAEFLTVQTGGTLYRITHTNDIVPRLPPREFGYSHSSPEYWIKSGTLVPVTRNDIVKIEGIDATGGNNQPNIPDIPAHLWYFGLIGTC

SEQ ID NO: 11363 - protein, 268 aa, Thermomyces lanuginosus
EVSQDLFNQFNLFAQYSAAAYCGKANDAPAGTNITCTGNACPEVEKADATFLYSFEDSGVGDVTGFLALDNTNKLIVLSFRGSRSIENWIGNLNFDLKEINDICSGCRGHDGFTSSWRSVADTLRQKVEDAVREHPDYRVVFTGHSLGGALATVAGADLRGNGYDIDVFSYGAPRVGNRAFAEFLTVQTGGTLYRITHTNDIVPRLPPREFGYSHSSPEYWIKSGTLVPVTRNDIVKIEGIDATGGNNQPNIPDIPAHLWYFGLIGTC

SEQ ID NO: 11364 - protein, 268 aa, Thermomyces lanuginosus
EVSQDLFNQFNLFAQYSAAAYCGKNNDAYAGTNITCTGNACPEVEKADATFLYSFEDSGVGDVTGFLALDNTNKLIVLSFRGSRSIENWIGNLNFDLKEINDICSGCRGHDGFTSSWRSVADTLRQKVEDAVREHPDYRVVFTGHSLGGALATVAGADLRGNGYDIDVFSYGAPRVGNRAFAEFLTVQTGGTLYRITHTNDIVPRLPPREFGYSHSSPEYWIKSGTLVPVTRNDIVKIEGIDATGGNNQPNIPDIPAHLWYFGLIGTC

SEQ ID NO: 11365 - protein, 268 aa, Thermomyces lanuginosus
EVSQDLFNQFNLFAQYSAAAYCGKNNDAPAGTNITCTGNACPEVEKADATFLYSFEDSGVGDVTGFLALDNTNKLIVLSFRGSRSIENWIGNLNFDLKEINDICSGCRGHDGFTSSWRSVADTLRQKVEDAVREHPGYRVVFTGHSLGGALATVAGADLRGNGYDIDVFSYGAPRVGNRAFAEFLTVQTGGTLYRITHTNDIVPRLPPREFGYSHSSPEYWIKSGTLVPVTRNDIVKIEGIDATGGNNQPNIPDIPAHLWYFGLIGTC

SEQ ID NO: 11366 - protein, 268 aa, Thermomyces lanuginosus
EVSQDLFNQFNLFAQYSAAAYCGKNNDAPAGTNITCTGNACPEVEKADATFLYSFEDSGVGDVTGFLALDNTNKLIVLSFRGSRSIENWIGNLNFDLKEINDICSGCRGHDGFTSSWRSVADTLRQKVEDAVREHPDYLVVFTGHSLGGALATVAGADLRGNGYDIDVFSYGAPRVGNRAFAEFLTVQTGGTLYRITHTNDIVPRLPPREFGYSHSSPEYWIKSGTLVPVTRNDIVKIEGIDATGGNNQPNIPDIPAHLWYFGLIGTC

SEQ ID NO: 11367 - protein, 268 aa, Thermomyces lanuginosus
EVSQDLFNQFNLFAQYSAAAYCGKNNDAPAGTNITCTGNACPEVEKADATFLYSFEDSGVGDVTGFLALDNTNKLIVLSFRGSRSIENWIGNLNFDLKEINDICSGCRGHDGFTSSWRSVADTLRQKVEDAVREHPHYRVVFTGHSLGGALATVAGADLRGNGYDIDVFSYGAPRVGNRAFAEFLTVQTGGTLYRITHTNDIVPRLPPREFGYSHSSPEYWIKSGTLVPVTRNDIVKIEGIDATGGNNQPNIPDIPAHLWYFGLIGTC

SEQ ID NO: 11368 - protein, 268 aa, Thermomyces lanuginosus
EVSQDLFNQFNLFAQYSAAAYCGKNNDAPAGTNITCTGNACPEVEKADATFLYGFEDSGVGDVTGFLALDNTNKLIVLSFRGSRSIENWIGNLNFDLKEINDICSGCRGHDGFTSSWRSVADTLRQKVEDAVREHPDYRVVFTGHSLGGALATVAGADLRGNGYDIDVFSYGAPRVGNRAFAEFLTVQTGGTLYRITHTNDIVPRLPPREFGYSHSSPEYWIKSGTLVPVTRNDIVKIEGIDATGGNNQPNIPDIPAHLWYFGLIGTC

SEQ ID NO: 11369 - protein, 268 aa, Thermomyces lanuginosus
EVSQDLFNQFNLFAQYSAAAYCGRNNDAPAGTNITCTGNACPEVEKADATFLYSFEDSGVGDVTGFLALDNTNKLIVLSFRGSRSIENWIGNLNFDLKEINDICSGCRGHDGFTSSWRSVADTLRQKVEDAVREHPDYRVVFTGHSLGGALATVAGADLRGNGYDIDVFSYGAPRVGNRAFAEFLTVQTGGTLYRITHTNDIVPRLPPREFGYSHSSPEYWIKSGTLVPVTRNDIVKIEGIDATGGNNQPNIPDIPAHLWYFGLIGTC

SEQ ID NO: 11370 - protein, 268 aa, Thermomyces lanuginosus
EVSQDLFNQFNLFAQYSAAAYCGKNNDAPAGTNITCTGNACPEVEKADATFLYSFEDSGVGDVTGFLALDNTNKLIVLSFRGSRSIENWIGNLNFDLKEINDICSGCRGHDGFTSSWRSVADTLRQKVEDAVREHPDYRVVFTGHSLGGALATVAGADLRGNGYDIDVFSYGAPRVGNRAFAEFLTVQTGGTLYRITHVNDIVPRLPPREFGYSHSSPEYWIKSGTLVPVTRNDIVKIEGIDATGGNNQPNIPDIPAHLWYFGLIGTC

SEQ ID NO: 11371 - protein, 268 aa, Thermomyces lanuginosus
EVSQDLFNQFNLFAQYSAAAYCGKNNDAPAGTNITCTGNACPEVEKADATFLYSFEDSGVGDVTGFLALDNTNKLIVLSFRGSRSIENWIGNLNFDTKEINDICSGCRGHDGFTSSWRSVADTLRQKVEDAVREHPDYRVVFTGHSLGGALATVAGADLRGNGYDIDVFSYGAPRVGNRAFAEFLTVQTGGTLYRITHTNDIVPRLPPREFGYSHSSPEYWIKSGTLVPVTRNDIVKIEGIDATGGNNQPNIPDIPAHLWYFGLIGTC

SEQ ID NO: 11372 - protein, 268 aa, Thermomyces lanuginosus
EVSQDLFNQFNLFAQYSAAAYCGKNNDAPAGTNITCTGNACPEVEKADATFLYSFEDSGVGDVTGFLALDNVNKLIVLSFRGSRSIENWIGNLNFDLKEINDICSGCRGHDGFTSSWRSVADTLRQKVEDAVREHPDYRVVFTGHSLGGALATVAGADLRGNGYDIDVFSYGAPRVGNRAFAEFLTVQTGGTLYRITHTNDIVPRLPPREFGYSHSSPEYWIKSGTLVPVTRNDIVKIEGIDATGGNNQPNIPDIPAHLWYFGLIGTC

SEQ ID NO: 11373 - protein, 268 aa, Thermomyces lanuginosus
EVSQDLFNQFNLFAQYSAAAYCGKNNDAPAGTNITCTGNACPEVEKADATFLYSFEDSGVGDVTGFLALDNTNKLIVLSFRGSRSIENWIGNLNFDLKEINDICSGCRGHDGFTSSWRSVADTLIQKVEDAVREHPDYRVVFTGHSLGGALATVAGADLRGNGYDIDVFSYGAPRVGNRAFAEFLTVQTGGTLYRITHTNDIVPRLPPREFGYSHSSPEYWIKSGTLVPVTRNDIVKIEGIDATGGNNQPNIPDIPAHLWYFGLIGTC

SEQ ID NO: 11374 - protein, 268 aa, Thermomyces lanuginosus
EVSQDLFNQFNLFAQYSAAAYCGKNNDAPAGTNITCTGNACPEVEKADATFLYSFEDSGVGDVTGFLALDNTNKLIVLSFRGSRSIENWIGNLNFDLKEINDICSGCRGHDGFTSSWRSVADTLRQKVEDAVREHPDYRVVFTGHSLGGALATVAGADLRGNGYDIDVFSYGAPRVGNRAFAEFLTVFTGGTLYRITHTNDIVPRLPPREFGYSHSSPEYWIKSGTLVPVTRNDIVKIEGIDATGGNNQPNIPDIPAHLWYFGLIGTC

SEQ ID NO: 11375 - protein, 268 aa, Thermomyces lanuginosus
EVSQDLFNQFNLFAQYSAAAYCGKNNDAPAGTNITCTGNACPEVEKADATFLYSFEDSGVGDVTGFLALDNTNKLIVLSFRGSRSIENWIGNLNFDLKEINDICSGCRGHDGFTSSWRSVADTLRQKVEDAVREHPDYRVVFTGHSLGGALATVAGADLRGPGYDIDVFSYGAPRVGNRAFAEFLTVQTGGTLYRITHTNDIVPRLPPREFGYSHSSPEYWIKSGTLVPVTRNDIVKIEGIDATGGNNQPNIPDIPAHLWYFGLIGTC

SEQ ID NO: 11376 - protein, 268 aa, Thermomyces lanuginosus
EVSQDLFNQFNLFAQYSAAAYCGKNNDAPAGTNITCTGNACPEVEKADATFLYSFEDSGVGDVTGFLALDNTNKLIVLSFRGSRSIENWIGNLNFDLKEINDICSGCRGHDGFTSSWRSVADTLRQKVEDAVREHPDYRVVFTGHSLGGALATVAGADLRGNGYDIDVFSYGAPRVGNRAFAEFLTVQTGFTLYRITHTNDIVPRLPPREFGYSHSSPEYWIKSGTLVPVTRNDIVKIEGIDATGGNNQPNIPDIPAHLWYFGLIGTC

SEQ ID NO: 11377 - protein, 268 aa, Thermomyces lanuginosus
EVSQDLMNQFNLFAQYSAAAYCGKNNDAPAGTNITCTGNACPEVEKADATFLYSFEDSGVGDVTGFLALDNTNKLIVLSFRGSRSIENWIGNLNFDLKEINDICSGCRGHDGFTSSWRSVADTLRQKVEDAVREHPDYRVVFTGHSLGGALATVAGADLRGNGYDIDVFSYGAPRVGNRAFAEFLTVQTGGTLYRITHTNDIVPRLPPREFGYSHSSPEYWIKSGTLVPVTRNDIVKIEGIDATGGNNQPNIPDIPAHLWYFGLIGTC

SEQ ID NO: 11378 - protein, 268 aa, Thermomyces lanuginosus
EVSQDLFNQFNLFAQYSAAAYCGKNNDAPAGTNITCTGNACPEVEKADATFLYSFEDSGVGDVTGFLALDNTNKLIVLSFRGSRSIENWIGNLNFDLKEINDICSGCQGHDGFTSSWRSVADTLRQKVEDAVREHPDYRVVFTGHSLGGALATVAGADLRGNGYDIDVFSYGAPRVGNRAFAEFLTVQTGGTLYRITHTNDIVPRLPPREFGYSHSSPEYWIKSGTLVPVTRNDIVKIEGIDATGGNNQPNIPDIPAHLWYFGLIGTC

SEQ ID NO: 11379 - protein, 268 aa, Thermomyces lanuginosus
EVSQTLFNQFNLFAQYSAAAYCGKNNDAPAGTNITCTGNACPEVEKADATFLYSFEDSGVGDVTGFLALDNTNKLIVLSFRGSRSIENWIGNLNFDLKEINDICSGCRGHDGFTSSWRSVADTLRQKVEDAVREHPDYRVVFTGHSLGGALATVAGADLRGNGYDIDVFSYGAPRVGNRAFAEFLTVQTGGTLYRITHTNDIVPRLPPREFGYSHSSPEYWIKSGTLVPVTRNDIVKIEGIDATGGNNQPNIPDIPAHLWYFGLIGTC

SEQ ID NO: 11380 - protein, 268 aa, Thermomyces lanuginosus
EVSQDLFNQFNLFAQYSAAAYCGKNNDAPAGTNITCTGNACPEVEKADATFLYSFEDSGVGDVTGFLAHDNTNKLIVLSFRGSRSIENWIGNLNFDLKEINDICSGCRGHDGFTSSWRSVADTLRQKVEDAVREHPDYRVVFTGHSLGGALATVAGADLRGNGYDIDVFSYGAPRVGNRAFAEFLTVQTGGTLYRITHTNDIVPRLPPREFGYSHSSPEYWIKSGTLVPVTRNDIVKIEGIDATGGNNQPNIPDIPAHLWYFGLIGTC

SEQ ID NO: 11381 - protein, 268 aa, Thermomyces lanuginosus
EVSQDLFNQFNLFAQYSAAAYCGKNNDAPAGTNITCTGNACPEVEKADATFLYSFEDSGVGDVTGFLALDNTNKLIVLSFRGSRSIENWIGNLNFDLKEINDICSGCRGHDGFTSSWRSVADTLRQKVEDAVREHPDYRVVFTGHSLGGALATVAMADLRGNGYDIDVFSYGAPRVGNRAFAEFLTVQTGGTLYRITHTNDIVPRLPPREFGYSHSSPEYWIKSGTLVPVTRNDIVKIEGIDATGGNNQPNIPDIPAHLWYFGLIGTC

SEQ ID NO: 11382 - protein, 268 aa, Thermomyces lanuginosus
EVSQDLFNQFNLFAQYSAAAYCGKNNDAPAGTNITCTGNACPEVEKADATFLGSFEDSGVGDVTGFLALDNTNKLIVLSFRGSRSIENWIGNLNFDLKEINDICSGCRGHDGFTSSWRSVADTLRQKVEDAVREHPDYRVVFTGHSLGGALATVAGADLRGNGYDIDVFSYGAPRVGNRAFAEFLTVQTGGTLYRITHTNDIVPRLPPREFGYSHSSPEYWIKSGTLVPVTRNDIVKIEGIDATGGNNQPNIPDIPAHLWYFGLIGTC

SEQ ID NO: 11383 - protein, 268 aa, Thermomyces lanuginosus
EVSQDLFNQFNLFAQYSAAAYCGKNNDAPAGTNITCTGNACPEVEKADATFLYSFEDSGVGDVTGFLALDNTNKLIVLSFRGSRSIENWIGNLNFDLKEINDICSGCRGHDGFTSSWRSVADTLRQKVEDAVREHPDYRVVFTGHSLGGALATVAGADLRGNGYDIDVFSYGAPRVGNRAFAEFLTVQTGGTLYRITHTNDIVPRLPPREFGYSHSSPEYWIKSGTLVPVTRNDIVKIEGIDATGGNNTPNIPDIPAHLWYFGLIGTC

SEQ ID NO: 11384 - protein, 268 aa, Thermomyces lanuginosus
EVSQDLFNQFNLFAQYSAAAYCGKNNDAPAGTNITCCGNACPEVEKADATFLYSFEDSGVGDVTGFLALDNTNKLIVLSFRGSRSIENWIGNLNFDLKEINDICSGCRGHDGFTSSWRSVADTLRQKVEDAVREHPDYRVVFTGHSLGGALATVAGADLRGNGYDIDVFSYGAPRVGNRAFAEFLTVQTGGTLYRITHTNDIVPRLPPREFGYSHSSPEYWIKSGTLVPVTRNDIVKIEGIDATGGNNQPNIPDIPAHLWYFGLIGTC

SEQ ID NO: 11385 - protein, 268 aa, Thermomyces lanuginosus
EVSQDLFNQFNLFAQYSAAAYCQKNNDAPAGTNITCTGNACPEVEKADATFLYSFEDSGVGDVTGFLALDNTNKLIVLSFRGSRSIENWIGNLNFDLKEINDICSGCRGHDGFTSSWRSVADTLRQKVEDAVREHPDYRVVFTGHSLGGALATVAGADLRGNGYDIDVFSYGAPRVGNRAFAEFLTVQTGGTLYRITHTNDIVPRLPPREFGYSHSSPEYWIKSGTLVPVTRNDIVKIEGIDATGGNNQPNIPDIPAHLWYFGLIGTC

SEQ ID NO: 11386 - protein, 268 aa, Thermomyces lanuginosus
EVSQDLFNQFNLFAQYSAAAYCGKNNDAPAGTNITCTGNACPEVEKADATFLYSFEDSGVGDVTGFLALDNTNKLIVLSFRGSRSIENWIGNLNFDLKEINDICSGCRGHDGFTSSWRSVADTLRQKVEDAVREHPDYRVVFTGHSLGGALATVAGADLRGNGYDIDVFGYGAPRVGNRAFAEFLTVQTGGTLYRITHTNDIVPRLPPREFGYSHSSPEYWIKSGTLVPVTRNDIVKIEGIDATGGNNQPNIPDIPAHLWYFGLIGTC

SEQ ID NO: 11387 - protein, 268 aa, Thermomyces lanuginosus
EVSQDMFNQFNLFAQYSAAAYCGKNNDAPAGTNITCTGNACPEVEKADATFLYSFEDSGVGDVTGFLALDNTNKLIVLSFRGSRSIENWIGNLNFDLKEINDICSGCRGHDGFTSSWRSVADTLRQKVEDAVREHPDYRVVFTGHSLGGALATVAGADLRGNGYDIDVFSYGAPRVGNRAFAEFLTVQTGGTLYRITHTNDIVPRLPPREFGYSHSSPEYWIKSGTLVPVTRNDIVKIEGIDATGGNNQPNIPDIPAHLWYFGLIGTC

SEQ ID NO: 11388 - protein, 268 aa, Thermomyces lanuginosus
EVSQDLFNQFNLFAQYSAAAYCGKNNDAPAGTNITCTGNACPEVEKADATFLYSFEDSGVGDVTGFLALDNTNKLIVLSFRGSRSIENWIGNLNFDLKEINDICSGCRGHAGFTSSWRSVADTLRQKVEDAVREHPDYRVVFTGHSLGGALATVAGADLRGNGYDIDVFSYGAPRVGNRAFAEFLTVQTGGTLYRITHTNDIVPRLPPREFGYSHSSPEYWIKSGTLVPVTRNDIVKIEGIDATGGNNQPNIPDIPAHLWYFGRIGTC

SEQ ID NO: 11389 - protein, 268 aa, Thermomyces lanuginosus
EVSQDLFNQFNLFAQYSAAAYCGKNNDAPAGTNITCTGNACPEVEKADATFLYSFEDSGVGDVTGFLYLDNTNKLIVLSFRGSRSIENWIGNLNFDLKEINDICSGCRGHDGFTSSWRSVADTLRQKVEDAVREHPDYRVVFTGHSLGGALATVAGADLRGNGYDIDVFSYGAPRVGNRAFAEFLTVQTGGTLYRITHTNDIVPRLPPREFGYSHSSPEYWIKSGTLVPVTRNDIVKIEGIDATGGNNQPNIPDIPAHLWYFGLIGTC

SEQ ID NO: 11390 - protein, 268 aa, Thermomyces lanuginosus
EVSQDLFNQFNLFAQYSAAAYCGKNNDAPAGTNITCTGNACPEVEKADATFLYSFEDSGVGDVTGFLALDNTNKLIVLSFRGSRSIENWIGNLNFDLKEINDICSGCRGHDGFTSSWRSVADTLRQKVEDAVREHPDYRVVFTGHSLGGALATVAGADLRGNGYDIDVFSYGAPRVGNRAFAEFLTVQTGGTLYRITHTNDIVPRLPPREFGYSHSSPEYWIKSGTLVPVTRNDIVKIEGIDATGGNNQPNIPDFPAHLWYFGLIGTC

SEQ ID NO: 11391 - protein, 268 aa, Thermomyces lanuginosus
EVSSDLFNQFNLFAQYSAAAYCGKNNDAPAGTNITCTGNACPEVEKADATFLYSFEDSGVGDVTGFLALDNTNKLIVLSFRGSRSIENWIGNLNFDLKEINDICSGCRGHDGFTSSWRSVADTLRQKVEDAVREHPDYRVVFTGHSLGGALATVAGADLRGNGYDIDVFSYGAPRVGNRAFAEFLTVQTGGTLYRITHTNDIVPRLPPREFGYSHSSPEYWIKSGTLVPVTRNDIVKIEGIDATGGNNQPNIPDIPAHLWYFGLIGTC

SEQ ID NO: 11392 - protein, 268 aa, Thermomyces lanuginosus
EVSQDLFNQFNLFAQYSAAAYCGKNNDAPAGTNITCTGNACPEVEKADATFLWSFEDSGVGDVTGFLALDNTNKLIVLSFRGSRSIENWIGNLNFDLKEINDICSGCRGHDGFTSSWRSVADTLRQKVEDAVREHPDYRVVFTGHSLGGALATVAGADLRGNGYDIDVFSYGAPRVGNRAFAEFLTVQTGGTLYRITHTNDIVPRLPPREFGYSHSSPEYWIKSGTLVPVTRNDIVKIEGIDATGGNNQPNIPDIPAHLWYFGLIGTC

SEQ ID NO: 11393 - protein, 268 aa, Thermomyces lanuginosus
EVSQDLFNQFNLFAQYSAAAYCGKNNDAPAGTNITCTGNACPEVEKADATFLYSFEDSGVGDVTGFLALDNTNKLIVLSFRGSRSIENWIGNLNFDLKEINDICSGCRGHDGFMSSWRSVADTLRQKVEDAVREHPDYRVVFTGHSLGGALATVAGADLRGNGYDIDVFSYGAPRVGNRAFAEFLTVQTGGTLYRITHTNDIVPRLPPREFGYSHSSPEYWIKSGTLVPVTRNDIVKIEGIDATGGNNQPNIPDIPAHLWYFGLIGTC

SEQ ID NO: 11394 - protein, 268 aa, Thermomyces lanuginosus
EVSQDLFNQFNLFAQYSAAAYCGKNNDAPAGTNITCTGNACPEVEKADATFLYSFEDSGVGDVTGFLALDNTNKLIVLSFRGSRSIENWIGNLNFDLKEINDICSGCRGHDGFTSSWRSVADTLRQKVEDAVREHPDYRVVFTGHSLGGALATVAGADLRGNGYDIDVFSYGAPRVGNRAFAEFLTVQTGGTLYRVTHTNDIVPRLPPREFGYSHSSPEYWIKSGTLVPVTRNDIVKIEGIDATGGNNQPNIPDIPAHLWYFGLIGTC

SEQ ID NO: 11395 - protein, 268 aa, Thermomyces lanuginosus
EVSQDLFNQFNLFAQYSAAAYCGKNNDAPAGTNITCTGNACVEVEKADATFLYSFEDSGVGDVTGFLALDNTNKLIVLSFRGSRSIENWIGNLNFDLKEINDICSGCRGHDGFTSSWRSVADTLRQKVEDAVREHPDYRVVFTGHSLGGALATVAGADLRGNGYDIDVFSYGAPRVGNRAFAEFLTVQTGGTLYRITHTNDIVPRLPPREFGYSHSSPEYWIKSGTLVPVTRNDIVKIEGIDATGGNNQPNIPDIPAHLWYFGLIGTC

SEQ ID NO: 11396 - protein, 268 aa, Thermomyces lanuginosus
EVSQDLFNQFNLFAQYSAAAYCGKNNDAPAGTNITCTGNACPEVEKADATFLYSFEDSGVGDVTGFLALDNTNKLIVLSFRGSRSIENWYGNLNFDLKEINDICSGCRGHDGFTSSWRSVADTLRQKVEDAVREHPDYRVVFTGHSLGGALATVAGADLRGNGYDIDVFSYGAPRVGNRAFAEFLTVQTGGTLYRITHTNDIVPRLPPREFGYSHSSPEYWIKSGTLVPVTRNDIVKIEGIDATGGNNQPNIPDIPAHLWYFGLIGTC

SEQ ID NO: 11397 - protein, 268 aa, Thermomyces lanuginosus
EVSQDLFNQFNLFAQYSAAAYCGKNNDAPAGTNITCTGNACPEVEKADATFLYSFEDSGVGDVTGFLALDNTNKLIVLSFRGSRSIENWIGNLNFDLKEINDICSGCRGHDGFTSSWRSVADTLRQKVEDAVREHPDYRVVFTGHSLGGALATVAGADLRGNGYDIDVFSYGAPRVGNRAFAEFLTVQTGGNLYRITHTNDIVPRLPPREFGYSHSSPEYWIKSGTLVPVTRNDIVKIEGIDATGGNNQPNIPDIPAHLWYFGLIGTC

SEQ ID NO: 11398 - protein, 268 aa, Thermomyces lanuginosus
EVSQDLFNQFNLFAQYSAAAYCGKNNDAPAGTNITCTGNACPEVEKADATFLYSFEDSGVGDVTGFLALDNTNKLIVLSFRGSRSIENWIGNLNFDLKEINDICSGCRGHDGFTSSWRSVADTLRQGVEDAVREHPDYRVVFTGHSLGGALATVAGADLRGNGYDIDVFSYGAPRVGNRAFAEFLTVQTGGTLYRITHTNDIVPRLPPREFGYSHSSPEYWIKSGTLVPVTRNDIVKIEGIDATGGNNQPNIPDIPAHLWYFGLIGTC

SEQ ID NO: 11399 - protein, 268 aa, Thermomyces lanuginosus
EVSQDLFNQFNLFAQYSAAAYCGKNNDAPAGTNITCTGNACPEVEKADATFLYSFEDSGVGDVTGFLALDNTNKLIVLSFRGSRSIENWIGNLNFDLKEINDICSGCRGNDGFTSSWRSVADTLRQKVEDAVREHPDYRVVFTGHSLGGALATVAGADLRGNGYDIDVFSYGAPRVGNRAFAEFLTVQTGGTLYRITHTNDIVPRLPPREFGYSHSSPEYWIKSGTLVPVTRNDIVKIEGIDATGGNNQPNIPDIPAHLWYFGLIGTC

SEQ ID NO: 11400 - protein, 268 aa, Thermomyces lanuginosus
EVSQDLFNQFNLFAQYSAAAYCGKNNDAPAGTNITCTGNACPEVEKADATFLYSFEDSGVGDVTGFLALDNTNKLIVLSFRGSRSIENWIGNLNFDLKEINDICSGCRGHDGFTSSWRSVADTLRQKVEDAVREHPDYRVVFTGHSLGGALATVAGADLRGNGYDIDVFSYGAPRVGNRAFAEFLTVQTGGTLYRITHTPDIVPRLPPREFGYSHSSPEYWIKSGTLVPVTRNDIVKIEGIDATGGNNQPNIPDIPAHLWYFGLIGTC

SEQ ID NO: 11401 - protein, 268 aa, Thermomyces lanuginosus
EVSQDLFNQFNLFAQYSAAAYCGKNNDAPAGTNITCTGNACPEVEKADATFLYSFEDSGVGDVTGFLALDNTNKDIVLSFRGSRSIENWIGNLNFDLKEINDICSGCRGHDGFTSSWRSVADTLRQKVEDAVREHPDYRVVFTGHSLGGALATVAGADLRGNGYDIDVFSYGAPRVGNRAFAEFLTVQTGGTLYRITHTNDIVPRLPPREFGYSHSSPEYWIKSGTLVPVTRNDIVKIEGIDATGGNNQPNIPDIPAHLWYFGLIGTC

SEQ ID NO: 11402 - protein, 268 aa, Thermomyces lanuginosus
EVSQDLFNQFNLFAQYSAAAYCGKNNDAPAGTNITCTGNACPEVEKADATFLYSFEDSGVGDVTGFLALDNTNKLIVLSFRGSRSIENWIGNLNFDLKEINDICSGCRGHDGFTSSWRSVADTLRQKVEDAVREHPDYRVVFTGHSLGGALATVAGADLRGNGYDIDVFSYGAPRVGNRAFAEFLTVQTGGTLYRITHTNDIVPRLPPREFGYSHSSPEYWIKSETLVPVTRNDIVKIEGIDATGGNNQPNIPDIPAHLWYFGLIGTC

SEQ ID NO: 11403 - protein, 268 aa, Thermomyces lanuginosus
EVSQDLFNQFNLFAQYSAAAYCGKNNDAPAGTNITCTGNACPEVEKADATFLYSFEDSGVGDVTGFLALDNTNKLIVLSFRGSRSIENWIGNLNFDLKEINDICSGCRGHDGFTSSWRSYADTLRQKVEDAVREHPDYRVVFTGHSLGGALATVAGADLRGNGYDIDVFSYGAPRVGNRAFAEFLTVQTGGTLYRITHTNDIVPRLPPREFGYSHSSPEYWIKSGTLVPVTRNDIVKIEGIDATGGNNQPNIPDIPAHLWYFGLIGTC

SEQ ID NO: 11404 - protein, 268 aa, Thermomyces lanuginosus
EVSQDLFNQFNLFAQYSAAAYCGKNNDAPAGTNITCTGNACPEVEKADATFLYSFEDSGVGDVTGFLALDNTNKLIVLSFRGSRSIENWIGNLNFDLKEINDICSGCRGHDGFTSSWRSVADTLRQKVEDAVREHPDYRVVFTGHSLGGALATVAGADLRGNGYDIDVFSYGAPRVGNRAFAEFLTVQTGGTLYRITHTNDIVPRLPPREFGYSHSSPEYWIKSGTLVPVTRNDIVKIEGIDATGGNNQPNCPDIPAHLWYFGLIGTC

SEQ ID NO: 11405 - protein, 268 aa, Thermomyces lanuginosus
EVSQDLFNQFNLFAQYSAAAYCGKNNDAPAGTNITCTGNACPEVEKADATFLYSFEDSGVGDVTGFLALDNTNKLIVLSFRGSRSIENWIGNLNFDLKEIEDICSGCRGHDGFTSSWRSVADTLRQKVEDAVREHPDYRVVFTGHSLGGALATVAGADLRGNGYDIDVFSYGAPRVGNRAFAEFLTVQTGGTLYRITHTNDIVPRLPPREFGYSHSSPEYWIKSGTLVPVTRNDIVKIEGIDATGGNNQPNIPDIPAHLWYFGLIGTC

SEQ ID NO: 11406 - protein, 268 aa, Thermomyces lanuginosus
EVSQDLFNQFNLFAQYSAAAYCGKNNDAPAGTNITCTGNACPEVEKADATFLYSFEDSGVGDVTGFLALDNTNKLIVLSFRGSRSIENWIGNLNFDLKEINDICSGCRGHDGFTSSWRSVADTLRQTVEDAVREHPDYRVVFTGHSLGGALATVAGADLRGNGYDIDVFSYGAPRVGNRAFAEFLTVQTGGTLYRITHTNDIVPRLPPREFGYSHSSPEYWIKSGTLVPVTRNDIVKIEGIDATGGNNQPNIPDIPAHLWYFGLIGTC

SEQ ID NO: 11407 - protein, 268 aa, Thermomyces lanuginosus
EVSQDLFNQFNLFAQYSAAAYCGKNNDAPAGTNITCTGNACPEVEKADATFLYSFEDSGVGDVTGFLALDNTNKLIVLSFRGSRSIENWIGNLNFDLKEINDICSGCRGHDGFTSSWRSVADTLRQKVEDAVREHPDYRVVFTGHSLGGALATVAGADLRGNGYDIDVFSYGAPRVGNRAFAYFLTVQTGGTLYRITHTNDIVPRLPPREFGYSHSSPEYWIKSGTLVPVTRNDIVKIEGIDATGGNNQPNIPDIPAHLWYFGLIGTC

SEQ ID NO: 11408 - protein, 268 aa, Thermomyces lanuginosus
EVSQDLFNQFNLFAQYSAAAYCGKNNDAPAGTNITCTGNACPEVEKADATFLYSFEDSGVGDVTGFLALDNTNKLIVLSFRGSRSLENWIGNLNFDLKEINDICSGCRGHDGFTSSWRSVADTLRQKVEDAVREHPDYRVVFTGHSLGGALATVAGADLRGNGYDIDVFSYGAPRVGNRAFAEFLTVQTGGTLYRITHTNDIVPRLPPREFGYSHSSPEYWIKSGTLVPVTRNDIVKIEGIDATGGNNQPNIPDIPAHLWYFGLIGTC

SEQ ID NO: 11409 - protein, 268 aa, Thermomyces lanuginosus
EVSQDLFNQFNLFAQYSAAAYCGKNNDAPAGTNITCTGNACPEVEKADATFLYSFEDSGVGDVTGFLALDNTNKLIVLSFRGSRSIENWIGNLNFDLKEINDICSGCRGHDGFTSSWRSVADTLRQKVEDAVREHPDYRVVFTGHSLGGALATVAGADLRGNGYDIDVFSYGAPRVGNRAFAEFLTNQTGGTLYRITHTNDIVPRLPPREFGYSHSSPEYWIKSGTLVPVTRNDIVKIEGIDATGGNNQPNIPDIPAHLWYFGLIGTC

SEQ ID NO: 11410 - protein, 268 aa, Thermomyces lanuginosus
EVSQDLFNQFNLFAQYSAAAYCGKNNDAPAGTNITCTGNACPEVEKADATFLYSFEDSGVGDVTGFLALDNTNKLIVLSFRGSRSIENWIGALNFDLKEINDICSGCRGHDGFTSSWRSVADTLRQKVEDAVREHPDYRVVFTGHSLGGALATVAGADLRGNGYDIDVFSYGAPRVGNRAFAEFLTVQTGGTLYRITHTNDIVPRLPPREFGYSHSSPEYWIKSGTLVPVTRNDIVKIEGIDATGGNNQPNIPDIPAHLWYFGLIGTC

SEQ ID NO: 11411 - protein, 268 aa, Thermomyces lanuginosus
EVSQDLFMQFNLFAQYSAAAYCGKNNDAPAGTNITCTGNACPEVEKADATFLYSFEDSGVGDVTGFLALDNTNKLIVLSFRGSRSIENWIGNLNFDLKEINDICSGCRGHDGFTSSWRSVADTLRQKVEDAVREHPDYRVVFTGHSLGGALATVAGADLRGNGYDIDVFSYGAPRVGNRAFAEFLTVQTGGTLYRITHTNDIVPRLPPREFGYSHSSPEYWIKSGTLVPVTRNDIVKIEGIDATGGNNQPNIPDIPAHLWYFGLIGTC

SEQ ID NO: 11412 - protein, 268 aa, Thermomyces lanuginosus
EVSQDLFNQFNLFAQYSAAAYCGKNNDAPAGTNITCTGNACPEVEKADATFLYSFEDSGVGDVTGFLALDNTNKLILLSFRGSRSIENWIGNLNFDLKEINDICSGCRGHDGFTSSWRSVADTLRQKVEDAVREHPDYRVVFTGHSLGGALATVAGADLRGNGYDIDVFSYGAPRVGNRAFAEFLTVQTGGTLYRITHTNDIVPRLPPREFGYSHSSPEYWIKSGTLVPVTRNDIVKIEGIDATGGNNQPNIPDIPAHLWYFGLIGTC

SEQ ID NO: 11413 - protein, 268 aa, Thermomyces lanuginosus
EVSQDLFNQFNLFAQYSAAAYCGKCNDAPAGTNITCTGNACPEVEKADATFLYSFEDSGVGDVTGFLALDNTNKLIVLSFRGSRSIENWIGNLNFDLKEINDICSGCRGHDGFTSSWRSVADTLRQKVEDAVREHPDYRVVFTGHSLGGALATVAGADLRGNGYDIDVFSYGAPRVGNRAFAEFLTVQTGGTLYRITHTNDIVPRLPPREFGYSHSSPEYWIKSGTLVPVTRNDIVKIEGIDATGGNNQPNIPDIPAHLWYFGLIGTC

SEQ ID NO: 11414 - protein, 268 aa, Thermomyces lanuginosus
EVSQDLFNQFNLFAQYSAAAYCGKNNDAPAGTIITCTGNACPEVEKADATFLYSFEDSGVGDVTGFLALDNTNKLIVLSFRGSRSIENWIGNLNFDLKEINDICSGCRGHDGFTSSWRSVADTLRQKVEDAVREHPDYRVVFTGHSLGGALATVAGADLRGNGYDIDVFSYGAPRVGNRAFAEFLTVQTGGTLYRITHTNDIVPRLPPREFGYSHSSPEYWIKSGTLVPVTRNDIVKIEGIDATGGNNQPNIPDIPAHLWYFGLIGTC

SEQ ID NO: 11415 - protein, 268 aa, Thermomyces lanuginosus
EVSQDLFNQFNLFAQYSAAAYCGKNNDAPAGTNITCTGNACPEVEKADATFLYSFEDSGVGDVTGFLALDNTNKLIVLSFRGSXSIENWIGNLNFDLKEINDICSGCRGHDGFTSSWRSVADTLRQKVEDAVREHPDYRVVFTGHSLGGALATVAGADLRGNGYDIDVFSYGAPRVGNRAFAEFLTVQTGGTLYRITHTNDIVPRLPPREFGYSHSSPEYWIKSGTLVPVTRNDIVKIEGIDATGGNNQPNIPDIPAHLWYFGLIGTC

SEQ ID NO: 11416 - protein, 268 aa, Thermomyces lanuginosus
EVSQDLFNQFNLFAQYSAAAYCGKNNDAPAGTNITCTGNACPEVEKADATFLYSFEDSGVGDVTGFLALDNTNHLIVLSFRGSRSIENWIGNLNFDLKEINDICSGCRGHDGFTSSWRSVADTLRQKVEDAVREHPDYRVVFTGHSLGGALATVAGADLRGNGYDIDVFSYGAPRVGNRAFAEFLTVQTGGTLYRITHTNDIVPRLPPREFGYSHSSPEYWIKSGTLVPVTRNDIVKIEGIDATGGNNQPNIPDIPAHLWYFGLIGTC

SEQ ID NO: 11417 - protein, 268 aa, Thermomyces lanuginosus
EVSQDLFNQFNLFAQYSAAAYCGKNNDAPAGTNITCTGNACPEVEKADATFLYSFEDSGVGDVTGFLALDNTNKLIVLSFRGSRSIANWIGNLNFDLKEINDICSGCRGHDGFTSSWRSVADTLRQKVEDAVREHPDYRVVFTGHSLGGALATVAGADLRGNGYDIDVFSYGAPRVGNRAFAEFLTVQTGGTLYRITHTNDIVPRLPPREFGYSHSSPEYWIKSGTLVPVTRNDIVKIEGIDATGGNNQPNIPDIPAHLWYFGLIGTC

SEQ ID NO: 11418 - protein, 268 aa, Thermomyces lanuginosus
EVSQDLFNQFNLFAQYSAAAYCGKINDAPAGTNITCTGNACPEVEKADATFLYSFEDSGVGDVTGFLALDNTNKLIVLSFRGSRSIENWIGNLNFDLKEINDICSGCRGHDGFTSSWRSVADTLRQKVEDAVREHPDYRVVFTGHSLGGALATVAGADLRGNGYDIDVFSYGAPRVGNRAFAEFLTVQTGGTLYRITHTNDIVPRLPPREFGYSHSSPEYWIKSGTLVPVTRNDIVKIEGIDATGGNNQPNIPDIPAHLWYFGLIGTC

SEQ ID NO: 11419 - protein, 268 aa, Thermomyces lanuginosus
EVSQDLFNQFNLFAQYSAAAYCGKNNDAPAGTNITCTGNACPEVEKADATRLYSFEDSGVGDVTGFLALDNTNKLIVLSFRGSRSIENWIGNLNFDLKEINDICSGCRGHDGFTSSWRSVADTLRQKVEDAVREHPDYRVVFTGHSLGGALATVAGADLRGNGYDIDVFSYGAPRVGNRAFAEFLTVQTGGTLYRITHTNDIVPRLPPREFGYSHSSPEYWIKSGTLVPVTRNDIVKIEGIDATGGNNQPNIPDIPAHLWYFGLIGTC

SEQ ID NO: 11420 - protein, 268 aa, Thermomyces lanuginosus
EVSQDLFNQFNLFAQYSAAAYCGKNNDAPAGTNITCTGNACPEVEKADATFMYSFEDSGVGDVTGFLALDNTNKLIVLSFRGSRSIENWIGNLNFDLKEINDICSGCRGHDGFTSSWRSVADTLRQKVEDAVREHPDYRVVFTGHSLGGALATVAGADLRGNGYDIDVFSYGAPRVGNRAFAEFLTVQTGGTLYRITHTNDIVPRLPPREFGYSHSSPEYWIKSGTLVPVTRNDIVKIEGIDATGGNNQPNIPDIPAHLWYFGLIGTC

SEQ ID NO: 11421 - protein, 268 aa, Thermomyces lanuginosus
EVSQDLFNQFNLFAQYSAAAYCGKNNDAPAGTNITCTGNACPEVEKADATFLYSFEDSGVGDVTGFLALDNTNKLIVLSFRGSRSIENWIGNLNFDLKEINDICSGCRGHDGFTSSWRSVADTLRQKVEDAVREHPDYRVVFTGHSLGGALATVAGADLRGNGYDIDVFSYGAPRVGNRAFAEFLTVQGGGTLYRITHTNDIVPRLPPREFGYSHSSPEYWIKSGTLVPVTRNDIVKIEGIDATGGNNQPNIPDIPAHLWYFGLIGTC

SEQ ID NO: 11422 - protein, 268 aa, Thermomyces lanuginosus
EVSQDLFNQFNLFAQYSAAAYCGKNNDAPAGTNITCTGNACPEVEKADATFLYSFEDSGVGDVTGFLALDNTNKLIVLSFRGSRSIENWIGNLNFDLKEINDICSGCRGHDGFTSSWRSVADTLRQKVEDAVREHPDYRVVFTGHSLGGALATVAGADLRGNRYDIDVFSYGAPRVGNRAFAEFLTVQTGGTLYRITHTNDIVPRLPPREFGYSHSSPEYWIKSGTLVPVTRNDIVKIEGIDATGGNNQPNIPDIPAHLWYFGLIGTC

SEQ ID NO: 11423 - protein, 268 aa, Thermomyces lanuginosus
EVSQDLFNQFNLFAQYSAAAYCGKNNDAPAGTNITCTGNACPEVEKADATFLYSFEDSGVGDVTGFLALDNTNKVIVLSFRGSRSIENWIGNLNFDLKEINDICSGCRGHDGFTSSWRSVADTLRQKVEDAVREHPDYRVVFTGHSLGGALATVAGADLRGNGYDIDVFSYGAPRVGNRAFAEFLTVQTGGTLYRITHTNDIVPRLPPREFGYSHSSPEYWIKSGTLVPVTRNDIVKIEGIDATGGNNQPNIPDIPAHLWYFGLIGTC

SEQ ID NO: 11424 - protein, 268 aa, Thermomyces lanuginosus
EVSQDLFNQFNLFAQYSAAAYCGKNNDAPAGTNITCTGNACPEVEKADATFLYSFEDSGVGDVTGFLALDNTNKLIVLSFRGSRSIENWIGNLNFDLKEINDICSGCRGHDGFTSSWRSVADTLRQKVEDAVREHPDYRVVFTGHSLGGALATVAGADLRGNGYDIDVFSYGAPRVGNRAFAEFLTVQTGGTLYRITHTNDIVPRLPPREFGYSHSSPEYWIKSGTLVPVTRNDIVKIEGIDATGGNNEPNIPDIPAHLWYFGLIGTC

SEQ ID NO: 11425 - protein, 268 aa, Thermomyces lanuginosus
EVSQDLFNQFNLFAQYSAAAYCGKNNDAPAGTNITCTGNACPEVEKADATFLYYFEDSGVGDVTGFLALDNTNKLIVLSFRGSRSIENWIGNLNFDLKEINDICSGCRGHDGFTSSWRSVADTLRQKVEDAVREHPDYRVVFTGHSLGGALATVAGADLRGNGYDIDVFSYGAPRVGNRAFAEFLTVQTGGTLYRITHTNDIVPRLPPREFGYSHSSPEYWIKSGTLVPVTRNDIVKIEGIDATGGNNQPNIPDIPAHLWYFGLIGTC

SEQ ID NO: 11426 - protein, 268 aa, Thermomyces lanuginosus
EVSQDLFNQFNLFAQYSAAAYCGKNNDAPAGTNITCTGNACPEVEKADATFLYSFEDSGVGDVTGFLALDNPNKLIVLSFRGSRSIENWIGNLNFDLKEINDICSGCRGHDGFTSSWRSVADTLRQKVEDAVREHPDYRVVFTGHSLGGALATVAGADLRGNGYDIDVFSYGAPRVGNRAFAEFLTVQTGGTLYRITHTNDIVPRLPPREFGYSHSSPEYWIKSGTLVPVTRNDIVKIEGIDATGGNNQPNIPDIPAHLWYFGLIGTC

SEQ ID NO: 11427 - protein, 268 aa, Thermomyces lanuginosus
EVSQDLFNQFNLFAQYSAAAYCGKNNDAPAGTNITCTGNACPEVEKADATFLYSFEDSGVGDVTGFLALDNTNKLIVLSFRGSRSIENWIGNLNFDLKEINDICSGCRGHDGFTSSWRSVADTLRQKVEDAVREHPDYRVVFTGHSLGGALATVAGADLRGNGYDIDVFSYGAPRVGNRALAEFLTVQTGGTLYRITHTNDIVPRLPPREFGYSHSSPEYWIKSGTLVPVTRNDIVKIEGIDATGGNNQPNIPDIPAHLWYFGLIGTC

SEQ ID NO: 11428 - protein, 268 aa, Thermomyces lanuginosus
EVSQDLFNQFNLFAQYSAAAYCGKNNDAPADTNITCTGNACPEVEKADATFLYSFEDSGVGDVTGFLALDNTNKLIVLSFRGSRSIENWIGNLNFDLKEINDICSGCRGHDGFTSSWRSVADTLRQKVEDAVREHPDYRVVFTGHSLGGALATVAGADLRGNGYDIDVFSYGAPRVGNRAFAEFLTVQTGGTLYRITHTNDIVPRLPPREFGYSHSSPEYWIKSGTLVPVTRNDIVKIEGIDATGGNNQPNIPDIPAHLWYFGLIGTC

SEQ ID NO: 11429 - protein, 268 aa, Thermomyces lanuginosus
EVSQDLFNQFNLFAQYSAAAYCGKNNDAPAGTNITCTGNACPEVEKADATFEYSFEDSGVGDVTGFLALDNTNKLIVLSFRGSRSIENWIGNLNFDLKEINDICSGCRGHDGFTSSWRSVADTLRQKVEDAVREHPDYRVVFTGHSLGGALATVAGADLRGNGYDIDVFSYGAPRVGNRAFAEFLTVQTGGTLYRITHTNDIVPRLPPREFGYSHSSPEYWIKSGTLVPVTRNDIVKIEGIDATGGNNQPNIPDIPAHLWYFGLIGTC

SEQ ID NO: 11430 - protein, 268 aa, Thermomyces lanuginosus
EVSQDLFNQFNLFAQYSAAAYCGKNNDAPAGTNITCTGNACPEVEKADATFLYSFEDSGVGDVTGFLALDNTNKLIVLSFRGSRSIENWIGNLNFDLKEINDICSGCRGHDGFTSSWRSVADTLRQKVEDAVREHPSYRVVFTGHSLGGALATVAGADLRGNGYDIDVFSYGAPRVGNRAFAEFLTVQTGGTLYRITHTNDIVPRLPPREFGYSHSSPEYWIKSGTLVPVTRNDIVKIEGIDATGGNNQPNIPDIPAHLWYFGLIGTC

SEQ ID NO: 11431 - protein, 268 aa, Thermomyces lanuginosus
EVSQDLFNQFNLFAQYSAAAYCGKNNDAPAGTNITCTGNACPEVEKADATFLYSFEDSGVGDVTGFLALDNTNKLIVLSFRGSRSIENWIGNLNFDLKEINDICSGCRGHDGFTSSWRSVADTLRQKVEDAVREHPDYRVVFTGHSLGGALATVAGADLRGNGYDIDVFSYGAPRVGNRAFAEFLTVQTGGTLYRITHTNDIVPRLPPREFGYSHSSPEYWIKSGTLVPVMRNDIVKIEGIDATGGNNQPNIPDIPAHLWYFGLIGTC

SEQ ID NO: 11432 - protein, 268 aa, Thermomyces lanuginosus
EVSQDLFNQFNLFAQYSAAAYCGKNNDAPAGTNITCTGNACPEVEKADATFLYSFEDSGVGDVTGFLALDNTNKLIVLSFRGSRSIENWIGNLNFDLKEINHICSGCRGHDGFTSSWRSVADTLRQKVEDAVREHPDYRVVFTGHSLGGALATVAGADLRGNGYDIDVFSYGAPRVGNRAFAEFLTVQTGGTLYRITHTNDIVPRLPPREFGYSHSSPEYWIKSGTLVPVTRNDIVKIEGIDATGGNNQPNIPDIPAHLWYFGLIGTC

SEQ ID NO: 11433 - protein, 268 aa, Thermomyces lanuginosus
EVSQDLFNQFNLFAQYSAAAYCGKNNDAPAGTNITCTGNACPEVEKADATFLYSFEDSGVGDVTGFLALDNTNKGIVLSFRGSRSIENWIANLNFDLKEINDICSGCRGHDGFTSSWRSVADTLRQKVEDAVREHPDYRVVFTGHSLGGALATVAGADLRGNGYDIDVFSYGAPRVGNRAFAEFLTNQTGGTLYRITHTNDIVPRLPPREFGYSHSSPEYWIKSGTLVPVTRNDIVKIEGIDATGGNNQPNIPDIPAHLWYFGRIGTC

SEQ ID NO: 11434 - protein, 268 aa, Thermomyces lanuginosus
EVSQDLFNQFNLFAQYSAAAYCGKNNDAPAGTNITCTGNACPEVEKADATFLYSFEDSGVGDVTGFLALDNTNKLIVLSFRGSRSIENWIGNLNTDLKEINDICSGCRGHDGFTSSWRSVADTLRQKVEDAVREHPDYRVVFTGHSLGGALATVAGADLRGNGYDIDVFSYGAPRVGNRAFAEFLTVQTGGTLYRITHTNDIVPRLPPREFGYSHSSPEYWIKSGTLVPVTRNDIVKIEGIDATGGNNQPNIPDIPAHLWYFGLIGTC

SEQ ID NO: 11435 - protein, 268 aa, Thermomyces lanuginosus
EVSQDLFNQFNLFAQYSAAAYCGKNNDAPAGTNITCTGNACPEVEKADATFLYSFEDSGVGDVTGFLALDNTNKLIVLSFRGSRSIENWIGNLNFDLKEINDICSGCRGHDGFTSSWRSVADTLRQKVEDAVREHPDYRVVFTGHSLGGALATVAGADLRGNGYIIDVFSYGAPRVGNRAFAEFLTVQTGGTLYRITHTNDIVPRLPPREFGYSHSSPEYWIKSGTLVPVTRNDIVKIEGIDATGGNNQPNIPDIPAHLWYFGLIGTC

SEQ ID NO: 11436 - protein, 268 aa, Thermomyces lanuginosus
EVSQDLFNQFNLFAQYSAAAYCGKKNDAPAGTNITCTGNACPEVEKADATFLYSFEDSGVGDVTGFLALDNTNKLIVLSFRGSRSIENWIGNLNFDLKEINDICSGCRGHDGFTSSWRSVADTLRQKVEDAVREHPDYRVVFTGHSLGGALATVAGADLRGNGYDIDVFSYGAPRVGNRAFAEFLTVQTGGTLYRITHTNDIVPRLPPREFGYSHSSPEYWIKSGTLVPVTRNDIVKIEGIDATGGNNQPNIPDIPAHLWYFGLIGTC

SEQ ID NO: 11437 - protein, 268 aa, Thermomyces lanuginosus
EVSQDLFNQFNLFAQYSAAAYCGKNNDAPAGSNITCTGNACPEVEKADATFLYSFEDSGVGDVTGFLALDNTNKLIVLSFRGSRSIENWIGNLNFDLKEINDICSGCRGHDGFTSSWRSVADTLRQKVEDAVREHPDYRVVFTGHSLGGALATVAGADLRGNGYDIDVFSYGAPRVGNRAFAEFLTVQTGGTLYRITHTNDIVPRLPPREFGYSHSSPEYWIKSGTLVPVTRNDIVKIEGIDATGGNNQPNIPDIPAHLWYFGLIGTC

SEQ ID NO: 11438 - protein, 268 aa, Thermomyces lanuginosus
EVSQDLFNQFNLFAQYSAAAYCGKNNDAPAGTNITCTGNACPEVEKADATFLYSFESSGVGDVTGFLALDNTNKLIVLSFRGSRSIENWIGNLNFDLKEINDICSGCRGHDGFTSSWRSVADTLRQKVEDAVREHPDYRVVFTGHSLGGALATVAGADLRGNGYDIDVFSYGAPRVGNRAFAEFLTVQTGGTLYRITHTNDIVPRLPPREFGYSHSSPEYWIKSGTLVPVTRNDIVKIEGIDATGGNNQPNIPDIPAHLWYFGLIGTC

SEQ ID NO: 11439 - protein, 268 aa, Thermomyces lanuginosus
EVSQDLFNQFNLFAQYSAAAYCGKNNDAPAGTNITCTGNACPEVEKADATFLYSFEDSGVGDVTGFLALDNTNKLIVLSFRGSRSIENWIGNLNFDLKEINDICSGCRGHDGFTSSWRSVADTLRQKVEDAVREHPDYRVVFTGHSLGGALATVAGADLRGNGYDIDVFSYGAPRVGNRAFAEFLTVQTGGTLYRITHTNDIVPRLPPREFGYSHSSPEYWIKSGTLVPVTRNDIVKIEGIDATGGNNQPNWPDIPAHLWYFGLIGTC

SEQ ID NO: 11440 - protein, 268 aa, Thermomyces lanuginosus
EVSQDLFNQFNLFAQYSAAAYCGKNNDASAGTNITCTGNACPEVEKADATFLYSFEDSGVGDVTGFLALDNTNKLIVLSFRGSRSIENWIGNLNFDLKEINDICSGCRGHDGFTSSWRSVADTLRQKVEDAVREHPDYRVVFTGHSLGGALATVAGADLRGNGYDIDVFSYGAPRVGNRAFAEFLTVQTGGTLYRITHTNDIVPRLPPREFGYSHSSPEYWIKSGTLVPVTRNDIVKIEGIDATGGNNQPNIPDIPAHLWYFGLIGTC

SEQ ID NO: 11441 - protein, 268 aa, Thermomyces lanuginosus
EVSQDLFNHFNLFAQYSAAAYCGKNNDAPAGTNITCTGNACPEVEKADATFLYSFEDSGVGDVTGFLALDNTNKLIVLSFRGSRSIENWIGNLNFDLKEINDICSGCRGHDGFTSSWRSVADTLRQKVEDAVREHPDYRVVFTGHSLGGALATVAGADLRGNGYDIDVFSYGAPRVGNRAFAEFLTVQTGGTLYRITHTNDIVPRLPPREFGYSHSSPEYWIKSGTLVPVTRNDIVKIEGIDATGGNNQPNIPDIPAHLWYFGLIGTC

SEQ ID NO: 11442 - protein, 268 aa, Thermomyces lanuginosus
EVSQDLFNQFNLFAQYSAAAYCGKNNDAPAGTNITCTGNACPEVEKADATFLYSFEDSGVGDVTGFLALDNTNKAIVLSFRGSRSIENWIGNLNFDLKEINDICSGCRGHDGFTSSWRSVADTLRQKVEDAVREHPDYRVVFTGHSLGGALATVAGADLRGNGYDIDVFSYGAPRVGNRAFAEFLTVQTGGTLYRITHTNDIVPRLPPREFGYSHSSPEYWIKSGTLVPVTRNDIVKIEGIDATGGNNQPNIPDIPAHLWYFGLIGTC

SEQ ID NO: 11443 - protein, 268 aa, Thermomyces lanuginosus
EVSQDLFNQFNLFAQYSAAAYCGKNNDAPAGTNITCTGNACPEVEKADATFLYSFEDSGVGDVTGFLALDNTNKLIVLSFRGSRSIENWIGNLNFDLKEINDICSGCRGHDGFTSSWRSVADTLRQKVEDAVREHPDYRVVFTGHSLGGALATVAGADLRGNGYDIDQFSYGAPRVGNRAFAEFLTVQTGGTLYRITHTNDIVPRLPPREFGYSHSSPEYWIKSGTLVPVTRNDIVKIEGIDATGGNNQPNIPDIPAHLWYFGLIGTC

SEQ ID NO: 11444 - protein, 268 aa, Thermomyces lanuginosus
EVSQDLFNQFNLFAQYSAAAYCGKNNDGPAGTNITCTGNACPEVEKADATFLYSFEDSGVGDVTGFLALDNTNKLIVLSFRGSRSIENWIGNLNFDLKEINDICSGCRGHDGFTSSWRSVADTLRQKVEDAVREHPDYRVVFTGHSLGGALATVAGADLRGNGYDIDVFSYGAPRVGNRAFAEFLTVQTGGTLYRITHTNDIVPRLPPREFGYSHSSPEYWIKSGTLVPVTRNDIVKIEGIDATGGNNQPNIPDIPAHLWYFGLIGTC

SEQ ID NO: 11445 - protein, 268 aa, Thermomyces lanuginosus
EVSQDLFNQFNLFAQYSAAAYCGKNNDAPAGTNITCTGNACPEVEWADATFLYSFEDSGVGDVTGFLALDNTNKLIVLSFRGSRSIENWIGNLNFDLKEINDICSGCRGHDGFTSSWRSVADTLRQKVEDAVREHPDYRVVFTGHSLGGALATVAGADLRGNGYDIDVFSYGAPRVGNRAFAEFLTVQTGGTLYRITHTNDIVPRLPPREFGYSHSSPEYWIKSGTLVPVTRNDIVKIEGIDATGGNNQPNIPDIPAHLWYFGLIGTC

SEQ ID NO: 11446 - protein, 268 aa, Thermomyces lanuginosus
EVSQDLFNQFNLFAQYSAAAYCVKNNDAPAGTNITCTGNACPEVEKADATFLYSFEDSGVGDVTGFLALDNTNKLIVLSFRGSRSIENWIGNLNFDLKEINDICSGCRGHDGFTSSWRSVADTLRQKVEDAVREHPDYRVVFTGHSLGGALATVAGADLRGNGYDIDVFSYGAPRVGNRAFAEFLTVQTGGTLYRITHTNDIVPRLPPREFGYSHSSPEYWIKSGTLVPVTRNDIVKIEGIDATGGNNQPNIPDIPAHLWYFGLIGTC

SEQ ID NO: 11447 - protein, 268 aa, Thermomyces lanuginosus
EVSQDLFNQFNLFAQYSAAAYCGKNNFAPAGTNITCTGNACPEVEKADATFLYSFEDSGVGDVTGFLALDNTNKLIVLSFRGSRSIENWIGNLNFDLKEINDICSGCRGHDGFTSSWRSVADTLRQKVEDAVREHPDYRVVFTGHSLGGALATVAGADLRGNGYDIDVFSYGAPRVGNRAFAEFLTVQTGGTLYRITHTNDIVPRLPPREFGYSHSSPEYWIKSGTLVPVTRNDIVKIEGIDATGGNNQPNIPDIPAHLWYFGLIGTC

SEQ ID NO: 11448 - protein, 268 aa, Thermomyces lanuginosus
EVSQDLFNQFNLFAQYSAAAYCGKNNDAPAGTNITCTGNACPEVEKADATFLYSFEDSGVGDVTGFLALDNTNKLIVLSFRGSRSIENWIGNLNFDLKEINDICSGCRGHDGFTSSWRSVADTLRQKVEDAVREHPDYRVVFTGHSLGGALATVAGADLRGNGYDIDVFSYGAPRVGNRAFAEFLTVQTGGTLYRITHTNDIVPRLPPREFGYSHSSPEYWIKSGTLVPVTPNDIVKIEGIDATGGNNQPNIPDIPAHLWYFGLIGTC

SEQ ID NO: 11449 - protein, 268 aa, Thermomyces lanuginosus
EVSQDLFNQFNLFAQYSAAAYCGKNNDAPAGTNITCTGNACPEVEKADATFLYSFEDSGVGDVTGFLALDNTNKLIVLSFRGSRSIENWIGNLNFDLKEINDICSGCRGHDGFTSSWRSVADTLRQKVEDAVREHPDYRVVFTGHSLGGALATVAGADLRGNGYDIDVFSYGAPRVGNRAFAEFLTVQTGGTLYRITHTNDIVPRLPPREFGYSHSSPEYWIKSGTLVPVTRNDIVKIEGIDATGGNNQPNQPDIPAHLWYFGLIGTC

SEQ ID NO: 11450 - protein, 268 aa, Thermomyces lanuginosus
EVSQDLFNQFNLFAQYSAAAYCGKNNDAPAGTNITCTLNACPEVEKADATFLYSFEDSGVGDVTGFLALDNTNKLIVLSFRGSRSIENWIGNLNFDLKEINDICSGCRGHDGFTSSWRSVADTLRQKVEDAVREHPDYRVVFTGHSLGGALATVAGADLRGNGYDIDVFSYGAPRVGNRAFAEFLTVQTGGTLYRITHTNDIVPRLPPREFGYSHSSPEYWIKSGTLVPVTRNDIVKIEGIDATGGNNQPNIPDIPAHLWYFGLIGTC

SEQ ID NO: 11451 - protein, 268 aa, Thermomyces lanuginosus
EVSQDLFNQFNLFAQYSAAAYCGKNNDAPAGTNITCTGNACPEVEKADATFLYSFEDSGVGDVTGFLALDNTNKLIVLSFRGSRSIENWIGNLNFDLKEINDICSGCRGHDGFTSSWRSVADTLRQKVEDAVREHPDYRVVFTGHSLGGALATVAGADLRGNGYDIDVFSYGAPRVGNRAFATFLTVQTGGTLYRITHTNDIVPRLPPREFGYSHSSPEYWIKSGTLVPVTRNDIVKIEGIDATGGNNQPNIPDIPAHLWYFGLIGTC

SEQ ID NO: 11452 - protein, 268 aa, Thermomyces lanuginosus
EVSQDLFNQFNLFAQYSAAAYCGKNNDAPAGTNITCTGNACPEVEKADATFLYSFEDSGVGDVTGFLALDNTNKLIVLSFRGSRSIENWIGNLNFDLKEINDICSGCRGHDGFTSSWRSVADTLRQKVEDAVREHPDYRVVYTGHSLGGALATVAGADLRGNGYDIDVFSYGAPRVGNRAFAEFLTVQTGGTLYRITHTNDIVPRLPPREFGYSHSSPEYWIKSGTLVPVTRNDIVKIEGIDATGGNNQPNIPDIPAHLWYFGLIGTC

SEQ ID NO: 11453 - protein, 268 aa, Thermomyces lanuginosus
EVSQDLFNQFNLFAQYSAAAYCGKNNDAPAGTNITCTGNACPEVEKADATFLYSFEDSGVGDVTGFLALDNTNKLIVLSFRGSRSIENWIGNLNFDLKEINDICSGCRGHDGFTSSWRSVADTLRQKVEDSVREHPDYRVVFTGHSLGGALATVAGADLRGNGYDIDVFSYGAPRVGNRAFAEFLTVQTGGTLYRITHTNDIVPRLPPREFGYSHSSPEYWIKSGTLVPVTRNDIVKIEGIDATGGNNQPNIPDIPAHLWYFGLIGTC

SEQ ID NO: 11454 - protein, 268 aa, Thermomyces lanuginosus
EVSQDLFNQFNLFAQYSAAAYCEKNNDAPAGTNITCTGNACPEVEKADATFLYSFEDSGVGDVTGFLALDNTNKLIVLSFRGSRSIENWIGNLNFDLKEINDICSGCRGHDGFTSSWRSVADTLRQKVEDAVREHPDYRVVFTGHSLGGALATVAGADLRGNGYDIDVFSYGAPRVGNRAFAEFLTVQTGGTLYRITHTNDIVPRLPPREFGYSHSSPEYWIKSGTLVPVTRNDIVKIEGIDATGGNNQPNIPDIPAHLWYFGLIGTC

SEQ ID NO: 11455 - protein, 268 aa, Thermomyces lanuginosus
EVSQDLFNQFNLFAQYSAAAYCCKNNDAPAGTNITCTGNACPEVEKADATFLYSFEDSGVGDVTGFLALDNTNKLIVLSFRGSRSIENWIGNLNFDLKEINDICSGCRGHDGFTSSWRSVADTLRQKVEDAVREHPDYRVVFTGHSLGGALATVAGADLRGNGYDIDVFSYGAPRVGNRAFAEFLTVQTGGTLYRITHTNDIVPRLPPREFGYSHSSPEYWIKSGTLVPVTRNDIVKIEGIDATGGNNQPNIPDIPAHLWYFGLIGTC

SEQ ID NO: 11456 - protein, 268 aa, Thermomyces lanuginosus
EVSQDLFNQFNLFAQYSCAAYCGKNNDAPAGTNITCTGNACPEVEKADATFLYSFEDSGVGDVTGFLALDNTNKLIVLSFRGSRSIENWIGNLNFDLKEINDICSGCRGHDGFTSSWRSVADTLRQKVEDAVREHPDYRVVFTGHSLGGALATVAGADLRGNGYDIDVFSYGAPRVGNRAFAEFLTVQTGGTLYRITHTNDIVPRLPPREFGYSHSSPEYWIKSGTLVPVTRNDIVKIEGIDATGGNNQPNIPDIPAHLWYFGLIGTC

SEQ ID NO: 11457 - protein, 268 aa, Thermomyces lanuginosus
EVSQDLFNQFNLFAQYSAAAYCGKNNDAPAGTNITCTGNACPEVEKADATFLYSFEDSGVGDVTGFLALDNTNKLIVLSFRGSRSIENWIGNLNFDLKEINDICSGCRGHDGFTSSWRSVADTLRQKVEEAVREHPDYRVVFTGHSLGGALATVAGADLRGNGYDIDVFSYGAPRVGNRAFAEFLTVQTGGTLYRITHTNDIVPRLPPREFGYSHSSPEYWIKSGTLVPVTRNDIVKIEGIDATGGNNQPNIPDIPAHLWYFGLIGTC

SEQ ID NO: 11458 - protein, 268 aa, Thermomyces lanuginosus
EVSQDLFNQFNLFAQYSAAAYCGKNNDAPAGTNITCTGNACPEVEKADATFLYSFEDSGVGDVTGFLALDNTNKLIVLSFRGSRSIENWIGNLNFDLKEINDICSGCRGHDGFTSSWRSVADTLRQKVEDAVREHPPYRVVFTGHSLGGALATVAGADLRGNGYDIDVFSYGAPRVGNRAFAEFLTVQTGGTLYRITHTNDIVPRLPPREFGYSHSSPEYWIKSGTLVPVTRNDIVKIEGIDATGGNNQPNIPDIPAHLWYFGLIGTC

SEQ ID NO: 11459 - protein, 268 aa, Thermomyces lanuginosus
EVSQDLFNQFNLFAQYSAAAYCGKNNDAPAGTNITCTGNACPEVEKADATDLYSFEDSGVGDVTGFLALDNTNKLIVLSFRGSRSIENWIGNLNFDLKEINDICSGCRGHDGFTSSWRSVADTLRQKVEDAVREHPDYRVVFTGHSLGGALATVAGADLRGNGYDIDVFSYGAPRVGNRAFAEFLTVQTGGTLYRITHTNDIVPRLPPREFGYSHSSPEYWIKSGTLVPVTRNDIVKIEGIDATGGNNQPNIPDIPAHLWYFGLIGTC

SEQ ID NO: 11460 - protein, 268 aa, Thermomyces lanuginosus
EVSQDLFNQFNLFAQYSAAAYCGKNNDAPAGTNITCTGNACPEVEKADATFLYSFEDSGVGDVTGFLALDNTNKLIVLSFRGSRSIENWIGNLNFDLKEINDICSGCRGHDGFTSSWRSVADTLRQKVEQAVREHPDYRVVFTGHSLGGALATVAGADLRGNGYDIDVFSYGAPRVGNRAFAEFLTVQTGGTLYRITHTNDIVPRLPPREFGYSHSSPEYWIKSGTLVPVTRNDIVKIEGIDATGGNNQPNIPDIPAHLWYFGLIGTC

SEQ ID NO: 11461 - protein, 268 aa, Thermomyces lanuginosus
EVSQDLFNQFNLFAQYSAAAYCGKNNDAPAGTNITCTGNACPEVEKADATFLYSFEDSGVGDVTGFLALDNTNKLIVLSFRGSRSIENWIGNLNFDLKEINDICSGCRGHDGFTSSWRSVADTLRQKVEDAVREHPDYRVVFTGHSLGGALATVAGADLRGNGYDIDVFSYGAPRVGNRAFAEFLTSQTGGTLYRITHTNDIVPRLPPREFGYSHSSPEYWIKSGTLVPVTRNDIVKIEGIDATGGNNQPNIPDIPAHLWYFGLIGTC

SEQ ID NO: 11462 - protein, 268 aa, Thermomyces lanuginosus
EVSQDLFNQFNLFAQYSAAAYCGKNNDAPAGTNITCTGNACPEVEKADATFLYSFEDSGVGDVTGFLALDNTNKLIVLSFRGSRSIENWIGNLNFDLKEINDYCSGCRGHDGFTSSWRSVADTLRQKVEDAVREHPDYRVVFTGHSLGGALATVAGADLRGNGYDIDVFSYGAPRVGNRAFAEFLTVQTGGTLYRITHTNDIVPRLPPREFGYSHSSPEYWIKSGTLVPVTRNDIVKIEGIDATGGNNQPNIPDIPAHLWYFGLIGTC

SEQ ID NO: 11463 - protein, 268 aa, Thermomyces lanuginosus
EVSQDLFNQFVLFAQYSAAAYCGKNNDAPAGTNITCTGNACPEVEKADATFLYSFEDSGVGDVTGFLALDNTNKLIVLSFRGSRSIENWIGNLNFDLKEINDICSGCRGHDGFTSSWRSVADTLRQKVEDAVREHPDYRVVFTGHSLGGALATVAGADLRGNGYDIDVFSYGAPRVGNRAFAEFLTVQTGGTLYRITHTNDIVPRLPPREFGYSHSSPEYWIKSGTLVPVTRNDIVKIEGIDATGGNNQPNIPDIPAHLWYFGLIGTC

SEQ ID NO: 11464 - protein, 268 aa, Thermomyces lanuginosus
EVSQDLFNQFNLFAQYSAAAYCGKNNDAPAGTNITCTGNACPEVEKADATFLYSFEDSGVGDVTGFLALDNTNKLIVLSFRGSRSIENWIGNLNFDLKEINDICSGCRGHDGFTSSWRSVADTLRQKVEDAVREHPDYRVVFTGHSLGGALITVAGADLRGNGYDIDVFSYGAPRVGNRAFAEFLTVQTGGTLYRITHTNDIVPRLPPREFGYSHSSPEYWIKSGTLVPVTRNDIVKIEGIDATGGNNQPNIPDIPAHLWYFGLIGTC

SEQ ID NO: 11465 - protein, 268 aa, Thermomyces lanuginosus
EVSQDLFNQFNLFAQYSAAAYCGKNNDAPAGTNITCTGSACPEVEKADATFLYSFEDSGVGDVTGFLALDNTNKLIVLSFRGSRSIENWIGNLNFDLKEINDICSGCRGHDGFTSSWRSVADTLRQKVEDAVREHPDYRVVFTGHSLGGALATVAGADLRGNGYDIDVFSYGAPRVGNRAFAEFLTVQTGGTLYRITHTNDIVPRLPPREFGYSHSSPEYWIKSGTLVPVTRNDIVKIEGIDATGGNNQPNIPDIPAHLWYFGLIGTC

SEQ ID NO: 11466 - protein, 268 aa, Thermomyces lanuginosus
EVSQDLFNQFNLFAQYSAAAYCGKNNDAPAGTNITCTGNACPEVEKADATFLYSFEDSGVDDVTGFLALDNTNKLIVLSFRGSRSIENWIGNLNFDLKEINDICSGCRGHDGFTSSWRSVADTLRQKVEDAVREHPDYRVVFTGHSLGGALATVAGADLRGNGYDIDVFSYGAPRVGNRAFAEFLTVQTGGTLYRITHTNDIVPRLPPREFGYSHSSPEYWIKSGTLVPVTRNDIVKIEGIDATGGNNQPNIPDIPAHLWYFGLIGTC

SEQ ID NO: 11467 - protein, 268 aa, Thermomyces lanuginosus
EVSQDLFNQFNLFAQYSAAAYCGKNNDAPAGTNITCTGNACPEVEKADATFLYSFEDSGVGDVTGFLALDNTNKLIVLSFRGSRSIENWIGNLNFDLKEINDICSGCRGHDGFTSSWRSVADTLRQKVEDAVREHPDYRVVFTGHSLGGALATVAGADLRGNGYDIDVFSYGAPRVGNRAFAEFLTVQTGGTLYRITHTNDIVPRLPPREFGYSHDSPEYWIKSGTLVPVTRNDIVKIEGIDATGGNNQPNIPDIPAHLWYFGLIGTC

SEQ ID NO: 11468 - protein, 268 aa, Thermomyces lanuginosus
EVSQDLFNQFNLFAQYSAAAYCGKNNDAPAGTNITCTGNACPEVEKADATFLYSFEDSGVGDVTGFLALDNTNKLIVLSFRGSRSIENWIGNLNFDLKEINDICSGCRGHDGFTSSWRSVADTLRQKVEDAVREHPDYRVVFTGHSLGGALATVAGADLRGNGYDIDVFSYGAPRVGNRAFAEFLTVQTGGTLYRITHTNDIVPRLPPREFGYSHSSPEYWIKSGTMVPVTRNDIVKIEGIDATGGNNQPNIPDIPAHLWYFGRIGTC

SEQ ID NO: 11469 - protein, 268 aa, Thermomyces lanuginosus
EVSQDLFNQFNLFAQYSAAAYCGKNNDAPAGTNITCTGNACPEVEKADATFLYSFEDSGVGDVTGFLALDNTNKLIVLSFRGSRSIENWIGNLNFDLKEINDICSGCRGHDGFTSSWRSVADTLRQKVEDAVREHPDYRVVFTGHSLGGALATVAGADLRGNGYDIDVFSYGAPRVGNRAFAEFLTVQTSGTLYRITHTNDIVPRLPPREFGYSHSSPEYWIKSGTLVPVTRNDIVKIEGIDATGGNNQPNIPDIPAHLWYFGLIGTC

SEQ ID NO: 11470 - protein, 268 aa, Thermomyces lanuginosus
EVSQDLFNQFNLFAQYSAAAYCGKNNDAPAGTNITCTGNACPEVEKADATFLYSFEDSGVGDVTGFLALDNTNKLIVLSFRGSRSIENWIGNLNFDLKEINDICSGCRGHDGFTSSWRSVADTLRQKVEDAVREHPDYRVVFTGHSLGGALATVAGADLRGNGYDIDVFSYGAPRVGNRAFAEFLTVQTGGTLYRITHTNDIVPRLPPREFGYSHSSPEYWIKSGTLVPVTRNDIVKIEGIDATGGNNQPNIPTIPAHLWYFGLIGTC

SEQ ID NO: 11471 - protein, 268 aa, Thermomyces lanuginosus
EVSQDLFNQFNLFAQYSAAAYCGKNNDAPAGTNITCTGNACPEVEKADATFLYSFEDSGVGDVTGFLALDNTNKLIVLSFRGSRSIENWIGNLNFDLKEINDICSGCRGHDGFTSSWRSVADTLRQKVEDAVREHPRYRVVFTGHSLGGALATVAGADLRGNGYDIDVFSYGAPRVGNRAFAEFLTVQTGGTLYRITHTNDIVPRLPPREFGYSHSSPEYWIKSGTLVPVTRNDIVKIEGIDATGGNNQPNIPDIPAHLWYFGLIGTC

SEQ ID NO: 11472 - protein, 268 aa, Thermomyces lanuginosus
EVSQDLFNQFNLFAQYSAAAYCGKNNDAPAGTNITCTGNACPEVEKADATFLYSFEDSGVGDVTGFLALDNTNKLIVLSFRGSRSIENWIGNLNFDLKEINDICSGCRGHDGFTSSWRSVADTLRQKVEDAVREHQDYRVVFTGHSLGGALATVAGADLRGNGYDIDVFSYGAPRVGNRAFAEFLTVQTGGTLYRITHTNDIVPRLPPREFGYSHSSPEYWIKSGTLVPVTRNDIVKIEGIDATGGNNQPNIPDIPAHLWYFGLIGTC

SEQ ID NO: 11473 - protein, 268 aa, Thermomyces lanuginosus
EVSQHLFNQFNLFAQYSAAAYCGKNNDAPAGTNITCTGNACPEVEKADATFLYSFEDSGVGDVTGFLALDNTNKLIVLSFRGSRSIENWIGNLNFDLKEINDICSGCRGHDGFTSSWRSVADTLRQKVEDAVREHPDYRVVFTGHSLGGALATVAGADLRGNGYDIDVFSYGAPRVGNRAFAEFLTVQTGGTLYRITHTNDIVPRLPPREFGYSHSSPEYWIKSGTLVPVTRNDIVKIEGIDATGGNNQPNIPDIPAHLWYFGLIGTC

SEQ ID NO: 11474 - protein, 268 aa, Thermomyces lanuginosus
EVSQDLFNQFNLFAQYSAAAYCGKNNDAPAGTNITCTGNACPEVEKADGTFLYSFEDSGVGDVTGFLALDNTNKLIVLSFRGSRSIENWIGNLNFDLKEINDICSGCRGHDGFTSSWRSVADTLRQKVEDAVREHPDYRVVFTGHSLGGALATVAGADLRGNGYDIDVFSYGAPRVGNRAFAEFLTVQTGGTLYRITHTNDIVPRLPPREFGYSHSSPEYWIKSGTLVPVTRNDIVKIEGIDATGGNNQPNIPDIPAHLWYFGLIGTC

SEQ ID NO: 11475 - protein, 268 aa, Thermomyces lanuginosus
EVSQDLFNQFNLFAQYSAAAYCGKNNDAPAGTNITCTGNACPEVEKADATFLYSFEDSGVGDVTGFLALDNTNKLIVLSFRGSRSIENWIGNLNFDLKEINDICSGCRGHDGFTSSWRSVADTLRQKVEDAVREHPDYRVVFTGHSLGGATATVAGADLRGNGYDIDVFSYGAPRVGNRAFAEFLTVQTGGTLYRITHTNDIVPRLPPREFGYSHSSPEYWIKSGTLVPVTRNDIVKIEGIDATGGNNQPNIPDIPAHLWYFGLIGTC

SEQ ID NO: 11476 - protein, 268 aa, Thermomyces lanuginosus
EVSYDLFNQFNLFAQYSAAAYCGKNNDAPAGTNITCTGNACPEVEKADATFLYSFEDSGVGDVTGFLALDNTNKLIVLSFRGSRSIENWIGNLNFDLKEINDICSGCRGHDGFTSSWRSVADTLRQKVEDAVREHPDYRVVFTGHSLGGALATVAGADLRGNGYDIDVFSYGAPRVGNRAFAEFLTVQTGGTLYRITHTNDIVPRLPPREFGYSHSSPEYWIKSGTLVPVTRNDIVKIEGIDATGGNNQPNIPDIPAHLWYFGLIGTC

SEQ ID NO: 11477 - protein, 268 aa, Thermomyces lanuginosus
EVSQDLFNQFNLFAQYSAAAYCGKNNDAPAGTNITCTGNACPEVEKADATFLYSFEDSGVLDVTGFLALDNTNKLIVLSFRGSRSIENWIGNLNFDLKEINDICSGCRGHDGFTSSWRSVADTLRQKVEDAVREHPDYRVVFTGHSLGGALATVAGADLRGNGYDIDVFSYGAPRVGNRAFAEFLTVQTGGTLYRITHTNDIVPRLPPREFGYSHSSPEYWIKSGTLVPVTRNDIVKIEGIDATGGNNQPNIPDIPAHLWYFGLIGTC

SEQ ID NO: 11478 - protein, 268 aa, Thermomyces lanuginosus
EVSQDLFNQFNLFAQYSAAAYCGKNNDAPAGTNITCTGNACPEVEKADATFLYSFEDSGVGDVTGFLALDNTNKLIVLSFRGSRSIENWIGNHNFDLKEINDICSGCRGHDGFTSSWRSVADTLRQKVEDAVREHPDYRVVFTGHSLGGALATVAGADLRGNGYDIDVFSYGAPRVGNRAFAEFLTVQTGGTLYRITHTNDIVPRLPPREFGYSHSSPEYWIKSGTLVPVTRNDIVKIEGIDATGGNNQPNIPDIPAHLWYFGLIGTC

SEQ ID NO: 11479 - protein, 268 aa, Thermomyces lanuginosus
EVSQDLFNQFNLFAQYSAAAYCGKNNDAPAGTNITCTGNACPEVEKADATFLYSFEDSGVGDVTGFLALDNTNKLIVLSFRGSRSIENWIGNLNFDLKEINDICSGCRGHDGFTSSWRSVADTLRQKVEDAVREHPDYRVVFTGHSLGGALATVAGADLRGNGYDIDVFSYGAPRVGNRAFAEFLTVQTGGTLYRITHTNDIVPRLPPREFGYSHSSPEYWIKSGTLVPVTRNDIVKIEGIDATGGNNQTNIPDIPAHLWYFGLIGTC

SEQ ID NO: 11480 - protein, 268 aa, Thermomyces lanuginosus
EVSQDLFNQFNLFAQYSAAAYCGKNNDAPAGTNITCTGNACPEVEKADATFLYSFEDSGVGDVNGFLALDNTNKLIVLSFRGSRSIENWIGNLNFDLKEINDICSGCRGHDGFTSSWRSVADTLRQKVEDAVREHPDYRVVFTGHSLGGALATVAGADLRGNGYDIDVFSYGAPRVGNRAFAEFLTVQTGGTLYRITHTNDIVPRLPPREFGYSHSSPEYWIKSGTLVPVTRNDIVKIEGIDATGGNNQPNIPDIPAHLWYFGLIGTC

SEQ ID NO: 11481 - protein, 268 aa, Thermomyces lanuginosus
EVEQDLFNQFNLFAQYSAAAYCGKNNDAPAGTNITCTGNACPEVEKADATFLYSFEDSGVGDVTGFLALDNTNKLIVLSFRGSRSIENWIGNLNFDLKEINDICSGCRGHDGFTSSWRSVADTLRQKVEDAVREHPDYRVVFTGHSLGGALATVAGADLRGNGYDIDVFSYGAPRVGNRAFAEFLTVQTGGTLYRITHTNDIVPRLPPREFGYSHSSPEYWIKSGTLVPVTRNDIVKIEGIDATGGNNQPNIPDIPAHLWYFGLIGTC

SEQ ID NO: 11482 - protein, 268 aa, Thermomyces lanuginosus
EVSQDLVNQFNLFAQYSAAAYCGKNNDAPAGTNITCTGNACPEVEKADATFLYSFEDSGVGDVTGFLALDNTNKLIVLSFRGSRSIENWIGNLNFDLKEINDICSGCRGHDGFTSSWRSVADTLRQKVEDAVREHPDYRVVFTGHSLGGALATVAGADLRGNGYDIDVFSYGAPRVGNRAFAEFLTVQTGGTLYRITHTNDIVPRLPPREFGYSHSSPEYWIKSGTLVPVTRNDIVKIEGIDATGGNNQPNIPDIPAHLWYFGLIGTC

SEQ ID NO: 11483 - protein, 268 aa, Thermomyces lanuginosus
EVSQDLFNQFNLFAQYSAAAYCGKNNDAPAGTNITCTGNACPEVEKADATFLYSFEDSGVGDVTGFLALDNTNKLIVLSFRGSRSIENWIGNLNVDLKEINDICSGCRGHDGFTSSWRSVADTLRQKVEDAVREHPDYRVVFTGHSLGGALATVAGADLRGNGYDIDVFSYGAPRVGNRAFAEFLTVQTGGTLYRITHTNDIVPRLPPREFGYSHSSPEYWIKSGTLVPVTRNDIVKIEGIDATGGNNQPNIPDIPAHLWYFGLIGTC

SEQ ID NO: 11484 - protein, 268 aa, Thermomyces lanuginosus
EVSQDLFNQFNLFAQYSAAAYCGKNNDAPAGTNITCTGNACPEVEKADATFLYSFEDSGVGDVTGFLALDNTNKLIVLSFRGSRSIENWIGNPNFDLKEINDICSGCRGHDGFTSSWRSVADTLRQKVEDAVREHPDYRVVFTGHSLGGALATVAGADLRGNGYDIDVFSYGAPRVGNRAFAEFLTVQTGGTLYRITHTNDIVPRLPPREFGYSHSSPEYWIKSGTLVPVTRNDIVKIEGIDATGGNNQPNIPDIPAHLWYFGLIGTC

SEQ ID NO: 11485 - protein, 268 aa, Thermomyces lanuginosus
EVSQDLFNQFNLFAQYSAAAYCGKNNDAPAGTNITCTGNACPEVEKADATFLYSFEDSGVGDVTGFLALDNTNKLIVLSFRGSRSIENWIGNLNFDLKEINDICSGCRGHDGFTSSWRSVADTLRQKVEDAVREHPDYRVVFTGHSLGGALATVAGADLRGNGYDIDVFSYGAPRVGNRAFAEFLTVQTGGTLYRITHTNDIVPRLPPREFGYSHSSPEYWIKSGTLVPVKRNDIVKIEGIDATGGNNQPNIPDIPAHLWYFGLIGTC

SEQ ID NO: 11486 - protein, 268 aa, Thermomyces lanuginosus
EVSQDLFNQFNLFAQYSAAAYCGKNNIAPAGTNITCTGNACPEVEKADATFLYSFEDSGVGDVTGFLALDNTNKLIVLSFRGSRSIENWIGNLNFDLKEINDICSGCRGHDGFTSSWRSVADTLRQKVEDAVREHPDYRVVFTGHSLGGALATVAGADLRGNGYDIDVFSYGAPRVGNRAFAEFLTVQTGGTLYRITHTNDIVPRLPPREFGYSHSSPEYWIKSGTLVPVTRNDIVKIEGIDATGGNNQPNIPDIPAHLWYFGLIGTC

SEQ ID NO: 11487 - protein, 268 aa, Thermomyces lanuginosus
EVSQDLFNQFNLFAQYSAAAYCGKNNDAPAGTNITCTGNACPEVEKADATFLYSFEDIGVGDVTGFLALDNTNKLIVLSFRGSRSIENWIGNLNFDLKEINDICSGCRGHDGFTSSWRSVADTLRQKVEDAVREHPDYRVVFTGHSLGGALATVAGADLRGNGYDIDVFSYGAPRVGNRAFAEFLTVQTGGTLYRITHTNDIVPRLPPREFGYSHSSPEYWIKSGTLVPVTRNDIVKIEGIDATGGNNQPNIPDIPAHLWYFGLIGTC

SEQ ID NO: 11488 - protein, 268 aa, Thermomyces lanuginosus
EVSQDLFNQFNLFAQYSAAAYCGKNNDAPAGTNITCTGNACPEVEKADATFLYSFEDSGVGDVTGFLCLDNTNKLIVLSFRGSRSIENWIGNLNFDLKEINDICSGCRGHDGFTSSWRSVADTLRQKVEDAVREHPDYRVVFTGHSLGGALATVAGADLRGNGYDIDVFSYGAPRVGNRAFAEFLTVQTGGTLYRITHTNDIVPRLPPREFGYSHSSPEYWIKSGTLVPVTRNDIVKIEGIDATGGNNQPNIPDIPAHLWYFGLIGTC

SEQ ID NO: 11489 - protein, 268 aa, Synthetic construct
EVSQDLFNQFNLFAQYSAAAYCGKNNDAPAGTNITCTGNACPEVEKADATFLYSFEDSGVGDVTGFLALDNTNKLIVLSFRGSRSIENWIGNLKFLLKKINDICSGCRGHDGFTSSWRSVADTLRQKVEDAVREHPDYRVVFTGHSLGGALATVAGADLRGNGYDIDVFSYGAPRVGNRAFAEFLTVQTGGTLYRITHTNDIVPRLPPREFGYSHSSPEYWIRSGTLVPVTRNDIVKIEGIDATGGNNQPNIPDIPAHLWYFGLIGTC

SEQ ID NO: 11490 - protein, 268 aa, Thermomyces lanuginosus
EVSQDLFNQFNLFAQYSAAAYCGKNNDAPAGTNITCTGNACPEVEKADATFLYSFEDSGVGDVTGFLALDNSNKLIVLSFRGSRSIENWIGNLNFDLKEINDICSGCRGHDGFTSSWRSVADTLRQKVEDAVREHPDYRVVFTGHSLGGALATVAGADLRGNGYDIDVFSYGAPRVGNRAFAEFLTVQTGGTLYRITHTNDIVPRLPPREFGYSHSSPEYWIKSGTLVPVTRNDIVKIEGIDATGGNNQPNIPDIPAHLWYFGLIGTC

SEQ ID NO: 11491 - protein, 268 aa, Thermomyces lanuginosus
EVSQDLFNQFNLFAQYSAAAYCGKNNDAPAGTNITCTGNACPEVEKADATFLYSFEDSGVGDVTGFLALDNTNKLIVLSFRGSRSIENWIGNLNFDLKEINDICSGCRGHDGFTSSWRSVADTLRQKVEDAVREHPDYRVVFTGHSLGGALATVAGADLRGNGYDIDVFSYGAPRVGNRAFAEFLTVETGGTLYRITHTNDIVPRLPPREFGYSHSSPEYWIKSGTLVPVTRNDIVKIEGIDATGGNNQPNIPDIPAHLWYFGLIGTC

SEQ ID NO: 11492 - protein, 268 aa, Thermomyces lanuginosus
EVSQDLFNQFNLFAMYSAAAYCGKNNDAPAGTNITCTGNACPEVEKADATFLYSFEDSGVGDVTGFLALDNTNKLIVLSFRGSRSIENWIGNLNFDLKEINDICSGCRGHDGFTSSWRSVADTLRQKVEDAVREHPDYRVVFTGHSLGGALATVAGADLRGNGYDIDVFSYGAPRVGNRAFAEFLTVQTGGTLYRITHTNDIVPRLPPREFGYSHSSPEYWIKSGTLVPVTRNDIVKIEGIDATGGNNQPNIPDIPAHLWYFGLIGTC

SEQ ID NO: 11493 - protein, 268 aa, Thermomyces lanuginosus
EVSQDLFNQFNLFAQYSAAAYCGKNNDAPAGTNITCTGNACPEVEKADATFLYSFEDSGVGDVTGFLALDNTNKLIVLSFRGSRSIENWIGNXNFDLKEINDICSGCRGHDGFTSSWRSVADTLRQKVEDAVREHPDYRVVFTGHSLGGALATVAGADLRGNGYDIDVFSYGAPRVGNRAFAEFLTVQTGGTLYRITHTNDIVPRLPPREFGYSHSSPEYWIKSGTLVPVTRNDIVKIEGIDATGGNNQPNIPDIPAHLWYFGLIGTC

SEQ ID NO: 11494 - protein, 268 aa, Thermomyces lanuginosus
EVSQDLFNQFNLFAQYSAAAYCGKNNDAPAGTNITCTGNACPEVEKADATFLYSFEDSGVGDVTGFLALDNTNKLIVLSFRGSRSIENWIGNLNFDLKEINDICSGCRGHDGFTSSWRSVADTLRQKVEDAVREHPDYRVVFTGHSLGGALATVAGADLRGNGYDIDLFSYGAPRVGNRAFAEFLTVQTGGTLYRITHTNDIVPRLPPREFGYSHSSPEYWIKSGTLVPVTRNDIVKIEGIDATGGNNQPNIPDIPAHLWYFGLIGTC

SEQ ID NO: 11495 - protein, 268 aa, Thermomyces lanuginosus
EVSQDLFNQFNLFAQYSAAAYCGKNNDAPAGTNITCTGNACPEVEKADATFLYSFEDSGVGDVTGLLALDNTNKLIVLSFRGSRSIENWIGNLNFDLKEINDICSGCRGHDGFTSSWRSVADTLRQKVEDAVREHPDYRVVFTGHSLGGALATVAGADLRGNGYDIDVFSYGAPRVGNRAFAEFLTVQTGGTLYRITHTNDIVPRLPPREFGYSHSSPEYWIKSGTLVPVTRNDIVKIEGIDATGGNNQPNIPDIPAHLWYFGLIGTC

SEQ ID NO: 11496 - protein, 268 aa, Thermomyces lanuginosus
EVSQDLFNQFNLFAQYSAAAYCGKNNDAPAGTNITCTGNACPEVEKADATFLYSFEDSGVGDVTGFLILDNTNKLIVLSFRGSRSIENWIGNLNFDLKEINDICSGCRGHDGFTSSWRSVADTLRQKVEDAVREHPDYRVVFTGHSLGGALATVAGADLRGNGYDIDVFSYGAPRVGNRAFAEFLTVQTGGTLYRITHTNDIVPRLPPREFGYSHSSPEYWIKSGTLVPVTRNDIVKIEGIDATGGNNQPNIPDIPAHLWYFGLIGTC

SEQ ID NO: 11497 - protein, 268 aa, Thermomyces lanuginosus
EVSQDLFNQFNLFAQYSAAAYCGKNNDAPAGTNITCTGNACPEVEKADATFLYSFEDSGVGDVTGFLALDNTNKLIVLSFRGSRSIENWIGNLNFDLKEINDICSGCRGHDGFTSSWRSVADTLRQKVEDAVREHPDYRVVFTGHSLGGALATVAGADLRGNGYDIDVFSYGAPRVGNRAFAEFLTQQTGGTLYRITHTNDIVPRLPPREFGYSHSSPEYWIKSGTLVPVTRNDIVKIEGIDATGGNNQPNIPDIPAHLWYFGLIGTC

SEQ ID NO: 11498 - protein, 268 aa, Thermomyces lanuginosus
EVSQDLFNQFNLFAQYSAAAYCGKNNDAPAGTNITCTGNACPEVEKADATFLYSFEDSGVGDVLGFLALDNTNKLIVLSFRGSRSIENWIGNLNFDLKEINDICSGCRGHDGFTSSWRSVADTLRQKVEDAVREHPDYRVVFTGHSLGGALATVAGADLRGNGYDIDVFSYGAPRVGNRAFAEFLTVQTGGTLYRITHTNDIVPRLPPREFGYSHSSPEYWIKSGTLVPVTRNDIVKIEGIDATGGNNQPNIPDIPAHLWYFGLIGTC

SEQ ID NO: 11499 - protein, 268 aa, Thermomyces lanuginosus
EVSQDLFNQFNLFAQYSAAAYCGKNNDAPAGTNITCTGNACPEVEKADATFLYSFEDSGVGDVTGFLALDNFNKLIVLSFRGSRSIENWIGNLNFDLKEINDICSGCRGHDGFTSSWRSVADTLRQKVEDAVREHPDYRVVFTGHSLGGALATVAGADLRGNGYDIDVFSYGAPRVGNRAFAEFLTVQTGGTLYRITHTNDIVPRLPPREFGYSHSSPEYWIKSGTLVPVTRNDIVKIEGIDATGGNNQPNIPDIPAHLWYFGLIGTC

SEQ ID NO: 11500 - protein, 268 aa, Thermomyces lanuginosus
EVSQDLFNQFNLFAQYSAAAYCGKNNDAPAGTNITCTGNACPEVEKADATFLYSFEDSGVGDVTGFLALDNTNKLIVLSFRGSRSIENWIGNLNFDLKEINDICSGCRGHDGFTSSWRSVADTLRQKVEDAVREHPDYRVVFTGHSLGGALATVAGADLRGNGYDIDVFSYGAPRVGNRAFAEFLTVQTGGTLYRITHTNDIVPRLPPREFGYSHSSPEYWIKSGTLVPVTRNDIVKIEGIDATGGNNQPAIPDIPAHLWYFGLIGTC

SEQ ID NO: 11501 - protein, 268 aa, Thermomyces lanuginosus
EVSQDLFNQFNLFAQYSAAAYCGKNNDAPAGTNITCTGNACPEVEKADATFLYSFEDSGVGDVTGFLALDNTNKLIVLSFRGSRSIENWIGNLNFDLKEINDICSGCRGHDGFTSSWRSVADTLRQKVEDAVREHPDYRVVFTGHSLGGALATVAFADLRGNGYDIDVFSYGAPRVGNRAFAEFLTVQTGGTLYRITHTNDIVPRLPPREFGYSHSSPEYWIKSGTLVPVTRNDIVKIEGIDATGGNNQPNIPDIPAHLWYFGLIGTC

SEQ ID NO: 11502 - protein, 268 aa, Thermomyces lanuginosus
EVSQDLFNQFNLFAQYSAAAYCGKNNDAPAGTNITCTGNACPEVEKADATFLYSFEDSGVGDVTGFLALDNTNKLIVLSFRGSRSIENWIGNLNFDLKEINDICSGCRGHDGFTSSWRSVADTLRQKVEDAVREHPDYRVVFTGHSLGGALATVAGADLRGNGYDIDVFSYGAPRVGNRAFAEFLTVQTGGTLYRITHTNDIVPRLPPREFGYAHSSPEYWIKSGTLVPVTRNDIVKIEGIDATGGNNQPNIPDIPAHLWYFGLIGTC

SEQ ID NO: 11503 - protein, 268 aa, Thermomyces lanuginosus
EVSQDLFNQFNLFAQYSAAAYCGKNNDAPAGTNITCTGNACPEVEKADATFLYSFEDSGVGDVTGFLALDNTNKLIVLSFRGSRSIENWIGNLNFDLKEINDICSGCRGHDGFTSSWRSVADTLRQKVEDAVREHPDYRVVFTGHSLGGALATVAGADLRGNGYDIDVFSYGAPRLGNRAFAEFLTVQTGGTLYRITHTNDIVPRLPPREFGYSHSSPEYWIKSGTLVPVTRNDIVKIEGIDATGGNNQPNIPDIPAHLWYFGLIGTC

SEQ ID NO: 11504 - protein, 268 aa, Thermomyces lanuginosus
EVSQDLFNQFNLFAQYSAAAYCGKNNDAPAGTNITCTGNACPEVEKADATFLYSFEDSGVGDVTGFLALDNTNKLIVLSFRGSRSIENWIGNLNFDLKEINDICSGCRGHDGFTSSWRSVADTLRQKVEDAVREHPDYRVVFTGHSLGGALATVAGADLRGNGYDIDVFSYGAPRVGNRAFAEYLTVQTGGTLYRITHTNDIVPRLPPREFGYSHSSPEYWIKSGTLVPVTRNDIVKIEGIDATGGNNQPNIPDIPAHLWYFGLIGTC

SEQ ID NO: 11505 - protein, 268 aa, Thermomyces lanuginosus
EVSQDLFNQFNLFAQYSAAAYCGKNNDAPAGTNITCTGNACPEVEKADATFLYSFEDSGVGDVTGFLALDNTNKLIVLSFRGSRSIENWIGNLNFDLKEINDICSGCRGHDGFTSSWRSVADTLRQKVEDAVREHPDYRQVFTGHSLGGALATVAGADLRGNGYDIDVFSYGAPRVGNRAFAEFLTVQTGGTLYRITHTNDIVPRLPPREFGYSHSSPEYWIKSGTLVPVTRNDIVKIEGIDATGGNNQPNIPDIPAHLWYFGLIGTC

SEQ ID NO: 11506 - protein, 268 aa, Thermomyces lanuginosus
EVSQKLFNQFNLFAQYSAAAYCGKNNDAPAGTNITCTGNACPEVEKADATFLYSFEDSGVGDVTGFLALDNTNKLIVLSFRGSRSIENWIGNLNFDLKEINDICSGCRGHDGFTSSWRSVADTLRQKVEDAVREHPDYRVVFTGHSLGGALATVAGADLRGNGYDIDVFSYGAPRVGNRAFAEFLTVQTGGTLYRITHTNDIVPRLPPREFGYSHSSPEYWIKSGTLVPVTRNDIVKIEGIDATGGNNQPNIPDIPAHLWYFGLIGTC

SEQ ID NO: 11507 - protein, 268 aa, Synthetic construct
EVSQDLFNQFNLFAQYSAAAYCGKNNDAPAGTNITCTGNACPEVEKADATFLYSFEDSGVGDVTGFLALDNTNKLIVLSFRGSRSIENWIGNLNFDLKEINDICSGCRGHDGFTSSWRSVADTLRQKVEDAVREHPDYRVVFTGHSLGGALATVAGADLRGNGYDIDVFSYGAPRVGNRAFAEFLTVQTGGTLYRITHTNDIVPRLPPRVFGYSHSSPEYWIKSGTLVPVTRNDIVKIEGIDATGGNNQPNIPDIPAHLWYFGLIGTC

SEQ ID NO: 11508 - protein, 268 aa, Thermomyces lanuginosus
EVSQDLFNQFNLFAQYSAAAYCGKNNDAPAGTNITCTGNACPEVEKADATFLYSFEDSGVGNVTGFLALDNTNKLIVLSFRGSRSIENWIGNLNFDLKEINDICSGCRGHDGFTSSWRSVADTLRQKVEDAVREHPDYRVVFTGHSLGGALATVAGADLRGNGYDIDVFSYGAPRVGNRAFAEFLTVQTGGTLYRITHTNDIVPRLPPREFGYSHSSPEYWIKSGTLVPVTRNDIVKIEGIDATGGNNQPNIPDIPAHLWYFGLIGTC

SEQ ID NO: 11509 - protein, 268 aa, Thermomyces lanuginosus
EVSQDLFNQFNLFAQYSAAAYCGKNNDAPAGTNITCTGNMCPEVEKADATFLYSFEDSGVGDVTGFLALDNTNKLIVLSFRGSRSIENWIGNLNFDLKEINDICSGCRGHDGFTSSWRSVADTLRQKVEDAVREHPDYRVVFTGHSLGGALATVAGADLRGNGYDIDVFSYGAPRVGNRAFAEFLTVQTGGTLYRITHTNDIVPRLPPREFGYSHSSPEYWIKSGTLVPVTRNDIVKIEGIDATGGNNQPNIPDIPAHLWYFGLIGTC

SEQ ID NO: 11510 - protein, 268 aa, Thermomyces lanuginosus
EVSQDLFNQFNLFAQYSAAAYCGKNNDAPAGTNITCTGNACPEVEKADATFLYSFEDSGVGDVTGFLALDNTNKLIVLSFRGSRSIENWIGNLNFDLKEINDICSGCRGHDGFTSSWRSVADTLRQKVEDAVREHPDYRVVFTGHSLGGALATVAGADLRGNGYDIDVFSYGAPRVGNRAFAEFLTVQTGGTLYRITHTNDIVPRLPPRSFGYSHSSPEYWIKSGTLVPVTRNDIVKIEGIDATGGNNQPNIPDIPAHLWYFGLIGTC

SEQ ID NO: 11511 - protein, 268 aa, Thermomyces lanuginosus
EVSQDLFNQFNLFAQYSAAAYCGKNNDAPAGTNITCTGNACPEVEKADATFLYSFEDSGVGDVTGFLALDNTNKLIVLSFRGSRSIENWIGNLNFDLKEINDICSGCRGHDGFTSSWRSVADTLRQKVEDAVREHPDYRVVFTGHSLGGALATVAGADLRGNGYDIDVFSYGAPRVGNQAFAEFLTVQTGGTLYRITHTNDIVPRLPPREFGYSHSSPEYWIKSGTLVPVTRNDIVKIEGIDATGGNNQPNIPDIPAHLWYFGLIGTC

SEQ ID NO: 11512 - protein, 268 aa, Thermomyces lanuginosus
EVSQDLFNQFNLFAQYSAAAYCGKNNDAPAGTNITCTGNACPEVEKADATFLYSFEDSGVGDVTGFLALDNTNKLIVLSFRGSRSIENWIGNLNFDLKEINDICSGCRGHDGFTSSWRSVADTLRQKVEDAVREHPDYRVVFTGHSLGGALATVAGADLRGNGYDIDVFSYGAPRVGNRAFAEFLTVQTGGTLYRITHTNDIVPRLPPREFGYSHSSPEYWIKSGTLVPVTDNDIVKIEGIDATGGNNQPNIPDIPAHLWYFGLIGTC

SEQ ID NO: 11513 - protein, 268 aa, Thermomyces lanuginosus
EVSQDLFNQFNLFAQYSAAAYCGKNNDAPAGTNITCTGNACPEVEKADATFLYSFEDSGVGDVTGFLALDNTNKLIVLSFRGSRSIENWIGNLNFDLKEINDICSGCRGHDGFTNSWRSVADTLRQKVEDAVREHPDYRVVFTGHSLGGALATVAGADLRGNGYDIDVFSYGAPRVGNRAFAEFLTVQTGGTLYRITHTNDIVPRLPPREFGYSHSSPEYWIKSGTLVPVTRNDIVKIEGIDATGGNNQPNIPDIPAHLWYFGLIGTC

SEQ ID NO: 11514 - protein, 268 aa, Thermomyces lanuginosus
EVSQDLFNQFNLFAQYSAAAYCGKNNDAPAGTNITCTGNACPEVEKEDATFLYSFEDSGVGDVTGFLALDNTNKLIVLSFRGSRSIENWIGNLNFDLKEINDICSGCRGHDGFTSSWRSVADTLRQKVEDAVREHPDYRVVFTGHSLGGALATVAGADLRGNGYDIDVFSYGAPRVGNRAFAEFLTVQTGGTLYRITHTNDIVPRLPPREFGYSHSSPEYWIKSGTLVPVTRNDIVKIEGIDATGGNNQPNIPDIPAHLWYFGLIGTC

SEQ ID NO: 11515 - protein, 268 aa, Thermomyces lanuginosus
EVSQDLFNQFNLFAQYSAAAYCGKNNDAPAGTNITCTGNACPEVEKADATFLYSFEDSGVGDVTGFLALDNTNKLIVLSFRGSRSIENWIGNLNFDLKEINDICSGCRGHDGFTSSWRSVADTLRQKVEDAVREHPKYRVVFTGHSLGGALATVAGADLRGNGYDIDVFSYGAPRVGNRAFAEFLTVQTGGTLYRITHTNDIVPRLPPREFGYSHSSPEYWIKSGTLVPVTRNDIVKIEGIDATGGNNQPNIPDIPAHLWYFGLIGTC

SEQ ID NO: 11516 - protein, 268 aa, Thermomyces lanuginosus
EVSQDLFNQFNLFAQYSAAIYCGKNNDAPAGTNITCTGNACPEVEKADATFLYSFEDSGVGDVTGFLALDNTNKLIVLSFRGSRSIENWIGNLNFDLKEINDICSGCRGHDGFTSSWRSVADTLRQKVEDAVREHPDYRVVFTGHSLGGALATVAGADLRGNGYDIDVFSYGAPRVGNRAFAEFLTVQTGGTLYRITHTNDIVPRLPPREFGYSHSSPEYWIKSGTLVPVTRNDIVKIEGIDATGGNNQPNIPDIPAHLWYFGLIGTC

SEQ ID NO: 11517 - protein, 268 aa, Thermomyces lanuginosus
EVSQDLFNQFNLFAQYSAAAYCGKNNDAPAGTNITCTGNACPEVEKADATFLYSFEDSGVGDVTGFLALDNTNKLIVLSFRGSRSIENWIGNLNFDLKEINDICSGCRGHDGFTSSWRSVAETLRQKVEDAVREHPDYRVVFTGHSLGGALATVAGADLRGNGYDIDVFSYGAPRVGNRAFAEFLTVQTGGTLYRITHTNDIVPRLPPREFGYSHSSPEYWIKSGTLVPVTRNDIVKIEGIDATGGNNQPNIPDIPAHLWYFGLIGTC

SEQ ID NO: 11518 - protein, 268 aa, Thermomyces lanuginosus
EVSQDLFNQFNLFAHYSAAAYCGKNNDAPAGTNITCTGNACPEVEKADATFLYSFEDSGVGDVTGFLALDNTNKLIVLSFRGSRSIENWIGNLNFDLKEINDICSGCRGHDGFTSSWRSVADTLRQKVEDAVREHPDYRVVFTGHSLGGALATVAGADLRGNGYDIDVFSYGAPRVGNRAFAEFLTVQTGGTLYRITHTNDIVPRLPPREFGYSHSSPEYWIKSGTLVPVTRNDIVKIEGIDATGGNNQPNIPDIPAHLWYFGLIGTC

SEQ ID NO: 11519 - protein, 268 aa, Thermomyces lanuginosus
EVSQDLFNQFNLFAQYSAAAYCGKWNDAPAGTNITCTGNACPEVEKADATFLYSFEDSGVGDVTGFLALDNTNKLIVLSFRGSRSIENWIGNLNFDLKEINDICSGCRGHDGFTSSWRSVADTLRQKVEDAVREHPDYRVVFTGHSLGGALATVAGADLRGNGYDIDVFSYGAPRVGNRAFAEFLTVQTGGTLYRITHTNDIVPRLPPREFGYSHSSPEYWIKSGTLVPVTRNDIVKIEGIDATGGNNQPNIPDIPAHLWYFGLIGTC

SEQ ID NO: 11520 - protein, 268 aa, Thermomyces lanuginosus
EVSQDLFNQFNLFAQYSAAAYCGKNNDAPAGTNITCTGNACPEVEKADATFLYSFEDSGVGDVTGFLALDNTNKLIVLSFRGSRSIENWIGNLNFDLKEINDICSGCRGHDGFTSSWRSVADTLRQKVEDAVREHPDYRVVFTGHSLGGALATVAGADLRGNGYDIDVFSYGAPRVGNRAFAEFLTVQTGGTLYRITHTNDIVPRLPPREFGYSHSSPEYWIKSGTLVPVTCNDIVKIEGIDATGGNNQPNIPDIPAHLWYFGLIGTC

SEQ ID NO: 11521 - protein, 268 aa, Thermomyces lanuginosus
EVSQDLFNQFNLFAQYSAAAYCGKNNDAPAGTNITCTGNACPEVEKADATFLYSFEDSGVGDVTGFLALDNTNKLIVLSFRGSRSIENWIGNLNFDLKEINDICSGCRGHDGFTSSWRSVADTLRQKVEDAKREHPDYRVVFTGHSLGGALATVAGADLRGNGYDIDVFSYGAPRVGNRAFAEFLTVQTGGTLYRITHTNDIVPRLPPREFGYSHSSPEYWIKSGTLVPVTRNDIVKIEGIDATGGNNQPNIPDIPAHLWYFGLIGTC

SEQ ID NO: 11522 - protein, 268 aa, Thermomyces lanuginosus
EVSQDLFNQFNLFAQYSAAAYCGKNNDAPAGTNITCTGNACPEVEKADATFLYSFEDSGVGDVTGFLALDNTNKLIVLSFRGSRSIENWIGNLNFDLKEINDICSGCRGHDGFTSSWRSVADTLRQKVEDAVREHPDYRVVFTGHSLGGALATVAGADLRGNGYDIDVFSYGAPRVGNRAFAEFLTVQTGGTLYRITHTNDIVPRLPPREFGYSHSSPEYWIKSGTLVPVTRNDIVKIEGIDATGGNNQPNIPHIPAHLWYFGLIGTC

SEQ ID NO: 11523 - protein, 268 aa, Thermomyces lanuginosus
EVSQDLFNQFNLFAQYSAAAYCGKNNDAPAGTNITCTGNACPEVEKADATFLYSFEDSGVGDVTGFLALDNTNKLIVLSFRGSRSIENWIGNLNFDLKEINDICSGCRGHDGFTSSWRSVADTLRQKVEDAVREHPDYRVVFTGHSLGGALATVAGADLRGNGYDIDVFSYGAPRVGNRAFAEFLTVQTGGTLYRITHTNDIVPRLPPREFGYSHSSPEYWIKSGTLVPVTRNDIVKIEGIDATGGNNQPNIPDWPAHLWYFGLIGTC

SEQ ID NO: 11524 - protein, 268 aa, Thermomyces lanuginosus
EVSQDLFNQFNLFAQYSAAAYCTKNNDAPAGTNITCTGNACPEVEKADATFLYSFEDSGVGDVTGFLALDNTNKLIVLSFRGSRSIENWIGNLNFDLKEINDICSGCRGHDGFTSSWRSVADTLRQKVEDAVREHPDYRVVFTGHSLGGALATVAGADLRGNGYDIDVFSYGAPRVGNRAFAEFLTVQTGGTLYRITHTNDIVPRLPPREFGYSHSSPEYWIKSGTLVPVTRNDIVKIEGIDATGGNNQPNIPDIPAHLWYFGLIGTC

SEQ ID NO: 11525 - protein, 268 aa, Thermomyces lanuginosus
EVSQDLFNQFNLFAQYSAAAYCGKNNDAPAGTNITCTGNACPEVEKADATFLYSFEDSGVGDVTGFLALDNTNKLIVLSFRGSRSIENWIGNLNFDLKEINDICSGCRGHDGFTSSWRSVADTLRQRVEDAVREHPDYRVVFTGHSLGGALATVAGADLRGNGYDIDVFSYGAPRVGNRAFAEFLTVQTGGTLYRITHTNDIVPRLPPREFGYSHSSPEYWIKSGTLVPVTRNDIVKIEGIDATGGNNQPNIPDIPAHLWYFGLIGTC

SEQ ID NO: 11526 - protein, 268 aa, Thermomyces lanuginosus
EVSQDLFNQFNLFAQYSAAAYCGKNNDAPAGTNITCTGNACPEVEKADATFLYSFEDSGVGDVTGFLALDNTNKLIVLSFRGSRSIENWIGNLNFDLKEINDICSGCRGHDGFTSSWRSVADTLRQKVEDAVREHPDYRVVFTGHSLGGALATVAGADLRGNGYDIDVFSYGAPRVGNRAFAEFLTVQTGGTLYRITHTNDIVPRLPPREFGYSHSSPEYWIKSGTLVPVTRNDIVKIEGIDATGGNNQPNIPDIPAHQWYFGLIGTC

SEQ ID NO: 11527 - protein, 268 aa, Thermomyces lanuginosus
EVSQDLFNQFNLFAQYSAAAYCGKNNDAPASTNITCTGNACPEVEKADATFLYSFEDSGVGDVTGFLALDNTNKLIVLSFRGSRSIENWIGNLNFDLKEINDICSGCRGHDGFTSSWRSVADTLRQKVEDAVREHPDYRVVFTGHSLGGALATVAGADLRGNGYDIDVFSYGAPRVGNRAFAEFLTVQTGGTLYRITHTNDIVPRLPPREFGYSHSSPEYWIKSGTLVPVTRNDIVKIEGIDATGGNNQPNIPDIPAHLWYFGLIGTC

SEQ ID NO: 11528 - protein, 268 aa, Thermomyces lanuginosus
EVSQDLFNQFNLFAQYSAAAYCGKNNDAPAGTNITCTGNACPEVEKADATFLYSFEDSGVGDVTGFLALDNTNKLIVLSFRGSRSIENWQGNLNFDLKEINDICSGCRGHDGFTSSWRSVADTLRQKVEDAVREHPDYRVVFTGHSLGGALATVAGADLRGNGYDIDVFSYGAPRVGNRAFAEFLTVQTGGTLYRITHTNDIVPRLPPREFGYSHSSPEYWIKSGTLVPVTRNDIVKIEGIDATGGNNQPNIPDIPAHLWYFGLIGTC

SEQ ID NO: 11529 - protein, 268 aa, Thermomyces lanuginosus
EVSQDLFNQFNLFAQYSAAAYCGKNNDAPAGTNITCTGNACPEVEKADATPLYSFEDSGVGDVTGFLALDNTNKLIVLSFRGSRSIENWIGNLNFDLKEINDICSGCRGHDGFTSSWRSVADTLRQKVEDAVREHPDYRVVFTGHSLGGALATVAGADLRGNGYDIDVFSYGAPRVGNRAFAEFLTVQTGGTLYRITHTNDIVPRLPPREFGYSHSSPEYWIKSGTLVPVTRNDIVKIEGIDATGGNNQPNIPDIPAHLWYFGLIGTC

SEQ ID NO: 11530 - protein, 268 aa, Thermomyces lanuginosus
EVSQDLFNQFNLFAQYSAAAYCGKNVDAPAGTNITCTGNACPEVEKADATFLYSFEDSGVGDVTGFLALDNTNKLIVLSFRGSRSIENWIGNLNFDLKEINDICSGCRGHDGFTSSWRSVADTLRQKVEDAVREHPDYRVVFTGHSLGGALATVAGADLRGNGYDIDVFSYGAPRVGNRAFAEFLTVQTGGTLYRITHTNDIVPRLPPREFGYSHSSPEYWIKSGTLVPVTRNDIVKIEGIDATGGNNQPNIPDIPAHLWYFGLIGTC

SEQ ID NO: 11531 - protein, 268 aa, Thermomyces lanuginosus
EVSQDLFNQFNLFAQYSAAAYCGKNNDAPAGTNITCTGNACPEVEKADATFLYSFEDSGVGDVTGFLALDNTNKLIVLSFRGSRSIENWIGNLNFDLKEINDICSGCRGHDFFTSSWRSVADTLRQKVEDAVREHPDYRVVFTGHSLGGALATVAGADLRGNGYDIDVFSYGAPRVGNRAFAEFLTVQTGGTLYRITHTNDIVPRLPPREFGYSHSSPEYWIKSGTLVPVTRNDIVKIEGIDATGGNNQPNIPDIPAHLWYFGLIGTC

SEQ ID NO: 11532 - protein, 268 aa, Thermomyces lanuginosus
EVSQDLFNQFNLFAQYSAAAYCGKNNDAPAGTNITCTGNACPEIEKADATFLYSFEDSGVGDVTGFLALDNTNKLIVLSFRGSRSIENWIGNLNFDLKEINDICSGCRGHDGFTSSWRSVADTLRQKVEDAVREHPDYRVVFTGHSLGGALATVAGADLRGNGYDIDVFSYGAPRVGNRAFAEFLTVQTGGTLYRITHTNDIVPRLPPREFGYSHSSPEYWIKSGTLVPVTRNDIVKIEGIDATGGNNQPNIPDIPAHLWYFGLIGTC

SEQ ID NO: 11533 - protein, 268 aa, Thermomyces lanuginosus
EVSQDLFNQFNLFAQYSAAAYCGKNNDAPAGTNITCTGNACPEVEKADATFLYSFEDSGVGDVTGFLALDNTNKLIVLSFRGSRSIENWIGNLNFDLKEINDICSGCRGHDGFTSSWRSVADTLRQKVEDAVREHPDYRVVFTGHSLGGALATVAGADLRGNGYDIDVFSYGAPRVGNRAFAEFLTVQTGGTLYRITHTNDIVPRLPPREFGYSHSSPEYWISSGTLVPVTRNDIVKIEGIDATGGNNQPNIPDIPAHLWYFGLIGTC

SEQ ID NO: 11534 - protein, 268 aa, Thermomyces lanuginosus
EVSQDLFNQFNLFAQYSAAAYCGKNNDAPAGTNITCTGNACPEVEKADATFLYSFEDSGVGDVTGFLALDNTNKLIVLSFRGSRSIENWIGNLNFDLKEINDICSGCRGHDGFTSSWRSVADTLRQKVEDAVREHPDYRVVFTGHSLGGALATVAGADLRGNGYDIDVFSYGAPRVGNRAFAEFLTVQTGGTLYRITHTNDIVPRLPPREFGYSHSHPEYWIKSGTLVPVTRNDIVKIEGIDATGGNNQPNIPDIPAHLWYFGLIGTC

SEQ ID NO: 11535 - protein, 268 aa, Thermomyces lanuginosus
EVSQDLFNQFNLFAQYSAAAYCGKNNDAPAGTNITCTGNACPEVEKAPATFLYSFEDSGVGDVTGFLALDNTNKLIVLSFRGSRSIENWIGNLNFDLKEINDICSGCRGHDGFTSSWRSVADTLRQKVEDAVREHPDYRVVFTGHSLGGALATVAGADLRGNGYDIDVFSYGAPRVGNRAFAEFLTVQTGGTLYRITHTNDIVPRLPPREFGYSHSSPEYWIKSGTLVPVTRNDIVKIEGIDATGGNNQPNIPDIPAHLWYFGLIGTC

SEQ ID NO: 11536 - protein, 268 aa, Thermomyces lanuginosus
EVSQDLFNQFNLFAQYSAAAYCGKNNDAPAGTNITCTGNACPEVEKADATFLYSFEDSGVGDVTGFLALDNTNKLIVLSFRGSRSIENWIGNLNFDLKEINDICSGCRGHDGFTSSWRSVADTLRQKVEDAVREHPDYRVVFTGHSLGGALATVAGADLRGNGYDIDVFSYGAPRVGNRAFAEFLTVQTGGTLYRITHTNDIVPRLPPREFGYSHSSPEYWIKSGTLVPVTRNDIVKIEGITATGGNNQPNIPDIPAHLWYFGLIGTC

SEQ ID NO: 11537 - protein, 268 aa, Thermomyces lanuginosus
DVSQDLFNQFNLFAQYSAAAYCGKNNDAPAGTNITCTGNACPEVEKADATFLYSFEDSGVGDVTGFLALDNTNKLIVLSFRGSRSIENWIGNLNFDLKEINDICSGCRGHDGFTSSWRSVADTLRQKVEDAVREHPDYRVVFTGHSLGGALATVAGADLRGNGYDIDVFSYGAPRVGNRAFAEFLTVQTGGTLYRITHTNDIVPRLPPREFGYSHSSPEYWIKSGTLVPVTRNDIVKIEGIDATGGNNQPNIPDIPAHLWYFGLIGTC

SEQ ID NO: 11538 - protein, 268 aa, Thermomyces lanuginosus
EVSQDLFNQFNLFAQYSAAAYCGKNNDAPAGTNITCTGNACPEVEKADATFLYSFEDSGVGDVTGFLALDNTNKTIVLSFRGSRSIENWIGNLNFDLKEINDICSGCRGHDGFTSSWRSVADTLRQKVEDAVREHPDYRVVFTGHSLGGALATVAGADLRGNGYDIDVFSYGAPRVGNRAFAEFLTVQTGGTLYRITHTNDIVPRLPPREFGYSHSSPEYWIKSGTLVPVTRNDIVKIEGIDATGGNNQPNIPDIPAHLWYFGLIGTC

SEQ ID NO: 11539 - protein, 268 aa, Thermomyces lanuginosus
EVSQDLFNQFNLFAQYSAAAYCGKNNDAPAGTNITCTGNACPEVEKADATFLYSFEDSDVGDVTGFLALDNTNKLIVLSFRGSRSIENWIGNLNFDLKEINDICSGCRGHDGFTSSWRSVADTLRQKVEDAVREHPDYRVVFTGHSLGGALATVAGADLRGNGYDIDVFSYGAPRVGNRAFAEFLTVQTGGTLYRITHTNDIVPRLPPREFGYSHSSPEYWIKSGTLVPVTRNDIVKIEGIDATGGNNQPNIPDIPAHLWYFGLIGTC

SEQ ID NO: 11540 - protein, 268 aa, Thermomyces lanuginosus
EVSQDLFNQFNLFAQYSAAAYCGKNNDAPAGTNITCTGNACPEVEKADATFLYSFEDSGVGDVTGYLALDNTNKLIVLSFRGSRSIENWIGNLNFDLKEINDICSGCRGHDGFTSSWRSVADTLRQKVEDAVREHPDYRVVFTGHSLGGALATVAGADLRGNGYDIDVFSYGAPRVGNRAFAEFLTVQTGGTLYRITHTNDIVPRLPPREFGYSHSSPEYWIKSGTLVPVTRNDIVKIEGIDATGGNNQPNIPDIPAHLWYFGLIGTC

SEQ ID NO: 11541 - protein, 268 aa, Thermomyces lanuginosus
EVSQDLFNQFNLFAQYSAAAYCGKNNDAPAGTNITCTGNACPEVEKADATFLYSFEDSGVGDVTGFLALDNTNKLIVLSFRGSRSIENWIGNLNFDLKEINDICSGCRGHDGFTSSWRSVADTLRQKVEDAVREHPDYRVVFTGHSLGGALATVAGADLRGNGYDIDVFSYGAPRVGNRAFAEFLTVQTGGTLYRITHTNDIVPRLPPRKFGYSHSSPEYWIKSGTLVPVTRNDIVKIEGIDATGGNNQPNIPDIPAHLWYFGLIGTC

SEQ ID NO: 11542 - protein, 268 aa, Thermomyces lanuginosus
EVSQDYFNQFNLFAQYSAAAYCGKNNDAPAGTNITCTGNACPEVEKADATFLYSFEDSGVGDVTGFLALDNTNKLIVLSFRGSRSIENWIGNLNFDLKEINDICSGCRGHDGFTSSWRSVADTLRQKVEDAVREHPDYRVVFTGHSLGGALATVAGADLRGNGYDIDVFSYGAPRVGNRAFAEFLTVQTGGTLYRITHTNDIVPRLPPREFGYSHSSPEYWIKSGTLVPVTRNDIVKIEGIDATGGNNQPNIPDIPAHLWYFGLIGTC

SEQ ID NO: 11543 - protein, 268 aa, Thermomyces lanuginosus
EVSQDLFNQFNLFAQYSAAAYCGKNNDLPAGTNITCTGNACPEVEKADATFLYSFEDSGVGDVTGFLALDNTNKLIVLSFRGSRSIENWIGNLNFDLKEINDICSGCRGHDGFTSSWRSVADTLRQKVEDAVREHPDYRVVFTGHSLGGALATVAGADLRGNGYDIDVFSYGAPRVGNRAFAEFLTVQTGGTLYRITHTNDIVPRLPPREFGYSHSSPEYWIKSGTLVPVTRNDIVKIEGIDATGGNNQPNIPDIPAHLWYFGLIGTC

SEQ ID NO: 11544 - protein, 268 aa, Thermomyces lanuginosus
EVSQDLFNQFNLFAQYSAAAYCGKNNDAPAGTNITCTGNACPEVEKADATFLYSFEDSGVGDVTYFLALDNTNKLIVLSFRGSRSIENWIGNLNFDLKEINDICSGCRGHDGFTSSWRSVADTLRQKVEDAVREHPDYRVVFTGHSLGGALATVAGADLRGNGYDIDVFSYGAPRVGNRAFAEFLTVQTGGTLYRITHTNDIVPRLPPREFGYSHSSPEYWIKSGTLVPVTRNDIVKIEGIDATGGNNQPNIPDIPAHLWYFGLIGTC

SEQ ID NO: 11545 - protein, 268 aa, Thermomyces lanuginosus
EVSQDLFNQFNLFAQYSAAAYCLKNNDAPAGTNITCTGNACPEVEKADATFLYSFEDSGVGDVTGFLALDNTNKLIVLSFRGSRSIENWIGNLNFDLKEINDICSGCRGHDGFTSSWRSVADTLRQKVEDAVREHPDYRVVFTGHSLGGALATVAGADLRGNGYDIDVFSYGAPRVGNRAFAEFLTVQTGGTLYRITHTNDIVPRLPPREFGYSHSSPEYWIKSGTLVPVTRNDIVKIEGIDATGGNNQPNIPDIPAHLWYFGLIGTC

SEQ ID NO: 11546 - protein, 268 aa, Thermomyces lanuginosus
EVSQDLFNQFNLFAQYSAAAYCGKNNDAPAGTNITCTGNACPEVEKADATFLYSFEDSGVGDVTGFLWLDNTNKLIVLSFRGSRSIENWIGNLNFDLKEINDICSGCRGHDGFTSSWRSVADTLRQKVEDAVREHPDYRVVFTGHSLGGALATVAGADLRGNGYDIDVFSYGAPRVGNRAFAEFLTVQTGGTLYRITHTNDIVPRLPPREFGYSHSSPEYWIKSGTLVPVTRNDIVKIEGIDATGGNNQPNIPDIPAHLWYFGLIGTC

SEQ ID NO: 11547 - protein, 268 aa, Thermomyces lanuginosus
EVSQDLFNQFNLFAQYSAAAYCGKNNDAPAGTNITCTGNACPEVEKADATFLYSFEDSGVGDVTGFLALDNTNKLIVLSFRGSRSIENWNGNLNFDLKEINDICSGCRGHDGFTSSWRSVADTLRQKVEDAVREHPDYRVVFTGHSLGGALATVAGADLRGNGYDIDVFSYGAPRVGNRAFAEFLTVQTGGTLYRITHTNDIVPRLPPREFGYSHSSPEYWIKSGTLVPVTRNDIVKIEGIDATGGNNQPNIPDIPAHLWYFGLIGTC

SEQ ID NO: 11548 - protein, 268 aa, Thermomyces lanuginosus
EVSQDLFNQFNLFAQYSAAAYCGKNNDAPAGTNITCTGNACPEVEKADATLLYSFEDSGVGDVTGFLALDNTNKLIVLSFRGSRSIENWIGNLNFELKEINDICSGCRGHDGFTSSWRSVADTLRQKVEDAVREHPDYRVVFTGHSLGGALATVAGADLRGNGYDIDVFSYGAPRVGNRAFAEFLTVQTGGTLYRITHTNDIVPRLPPREFGYSHSSPEYWIKSGTLVPVTRNDIVKIEGIDATGGNNQPNIPDIPAHLWYFGLIGTC

SEQ ID NO: 11549 - protein, 268 aa, Thermomyces lanuginosus
EVSQDLFNQFNLFAQYSAAAYCGKNNDAPAGTNITCTGNACPEVEKADATFLYSFEDSGVGDVTGFLALDNTNKLIVLSFRGSRSIENWIGNLNFDLKEINDICSGCRGHDGFTSSWRSVADTLRQKVEDAVREHPDYRVVFTGHSLGGALATVGGADLRGNGYDIDVFSYGAPRVGNRAFAEFLTVQTGGTLYRITHTNDIVPRLPPREFGYSHSSPEYWIKSGTLVPVTRNDIVKIEGIDATGGNNQPNIPDIPAHLWYFGLIGTC

SEQ ID NO: 11550 - protein, 268 aa, Thermomyces lanuginosus
EVSQDLFNQFNLFAQYSAAAYCGKNNDAPAGQNITCTGNACPEVEKADATFLYSFEDSGVGDVTGFLALDNTNKLIVLSFRGSRSIENWIGNLNFDLKEINDICSGCRGHDGFTSSWRSVADTLRQKVEDAVREHPDYRVVFTGHSLGGALATVAGADLRGNGYDIDVFSYGAPRVGNRAFAEFLTVQTGGTLYRITHTNDIVPRLPPREFGYSHSSPEYWIKSGTLVPVTRNDIVKIEGIDATGGNNQPNIPDIPAHLWYFGLIGTC

SEQ ID NO: 11551 - protein, 268 aa, Thermomyces lanuginosus
EVSQDLFNQFNLFAQYSAAAYCGKNNDAPAGTNITCTGNACPEVEKADATFLYSFEDSGVGDVTGFLALDNTNKLIVLSFRGSRSIENWIGNLNFDQKEINDICSGCRGHDGFTSSWRSVADTLRQKVEDAVREHPDYRVVFTGHSLGGALATVAGADLRGNGYDIDVFSYGAPRVGNRAFAEFLTVQTGGTLYRITHTNDIVPRLPPREFGYSHSSPEYWIKSGTLVPVTRNDIVKIEGIDATGGNNQPNIPDIPAHLWYFGLIGTC

SEQ ID NO: 11552 - protein, 268 aa, Thermomyces lanuginosus
EVSQDLFNQFNLFAQYSAAAYCGKNNDAPHGTNITCTGNACPEVEKADATFLYSFEDSGVGDVTGFLALDNTNKLIVLSFRGSRSIENWIGNLNFDLKEINDICSGCRGHDGFTSSWRSVADTLRQKVEDAVREHPDYRVVFTGHSLGGALATVAGADLRGNGYDIDVFSYGAPRVGNRAFAEFLTVQTGGTLYRITHTNDIVPRLPPREFGYSHSSPEYWIKSGTLVPVTRNDIVKIEGIDATGGNNQPNIPDIPAHLWYFGLIGTC

SEQ ID NO: 11553 - protein, 268 aa, Thermomyces lanuginosus
EVSQDLFNQFNLFAQYSAAAYCGKNNDAPAGTNITCTGNACPEVEKADATFLYSFEDSGVGDVTGFLALDNRNKLIVLSFRGSRSIENWIGNLNFDLKEINDICSGCRGHDGFTSSWRSVADTLRQKVEDAVREHPDYRVVFTGHSLGGALATVAGADLRGNGYDIDVFSYGAPRVGNRAFAEFLTVQTGGTLYRITHTNDIVPRLPPREFGYSHSSPEYWIKSGTLVPVTRNDIVKIEGIDATGGNNQPNIPDIPAHLWYFGLIGTC

SEQ ID NO: 11554 - protein, 268 aa, Thermomyces lanuginosus
EVSQDLFNQFNLFAQYSAAAYCGKNNDAPAGTNITCTGNACPEVEKADATFLYSFEDSGVGDVTGFLALDNTNKLIVLSFRGSRSIENWIGNLNFDLKEINDICSGCRGHDGFTSSWRSVADTLRQKVEDAVREHPDYRVVFTGHSLGGALATVAGADLRGNGYDIDVFSYGAPRVGNRAFAEFLTTQTGGTLYRITHTNDIVPRLPPREFGYSHSSPEYWIKSGTLVPVTRNDIVKIEGIDATGGNNQPNIPDIPAHLWYFGRIGTC

SEQ ID NO: 11555 - protein, 268 aa, Thermomyces lanuginosus
EVSQDLFNQFNLFAQYSAAAYCGKNNDAPAGTNITCTGNACPEVEKADATFLYSFEDSGVGDVTGFLALDNTNKLIVLSFRGSRSIENWIGNLNFDLKEINDICSGCRGHDGFTSSWRSVADTLRQKVEDAVREHPDYRVVFTGHSLGGALATVAGADLRGNGYDIDVFSYGAPRVGNRAFAEFLTVQTGGTLYRITHTNDIVPRLPPREFGYSHSSPEYWIKSGTLVPVTRGDIVKIEGIDATGGNNQPNIPDIPAHLWYFGLIGTC

SEQ ID NO: 11556 - protein, 268 aa, Thermomyces lanuginosus
EVSQDLFNQFNLFAQYSAAAYCGKNNDAPAGTNITCTGNACPEVEKADATFLYSFEDSGVGDVTGFLALDNTNKLIVLSFRGSRSIENWIGNLNFDLKEINDICSGCRGHTGFTSSWRSVADTLRQKVEDAVREHPDYRVVFTGHSLGGALATVAGADLRGNGYDIDVFSYGAPRVGNRAFAEFLTVQTGGTLYRITHTNDIVPRLPPREFGYSHSSPEYWIKSGTLVPVTRNDIVKIEGIDATGGNNQPNIPDIPAHLWYFGLIGTC

SEQ ID NO: 11557 - protein, 268 aa, Thermomyces lanuginosus
EVSQDLFNQFNLFAQYSAAAYCGKNNDAPAGTNITCTGNACPEVEKADATFLYSFEDSGVGDVTGFLALDNTNKLIVLSFRGSRSIENWIGNLNGDLKEINDICSGCRGHDGFTSSWRSVADTLRQKVEDAVREHPDYRVVFTGHSLGGALATVAGADLRGNGYDIDVFSYGAPRVGNRAFAEFLTVQTGGTLYRITHTNDIVPRLPPREFGYSHSSPEYWIKSGTLVPVTRNDIVKIEGIDATGGNNQPNIPDIPAHLWYFGLIGTC

SEQ ID NO: 11558 - protein, 268 aa, Thermomyces lanuginosus
EPSQDLFNQFNLFAQYSAAAYCGKNNDAPAGTNITCTGNACPEVEKADATFLYSFEDSGVGDVTGFLALDNTNKLIVLSFRGSRSIENWIGNLNFDLKEINDICSGCRGHDGFTSSWRSVADTLRQKVEDAVREHPDYRVVFTGHSLGGALATVAGADLRGNGYDIDVFSYGAPRVGNRAFAEFLTVQTGGTLYRITHTNDIVPRLPPREFGYSHSSPEYWIKSGTLVPVTRNDIVKIEGIDATGGNNQPNIPDIPAHLWYFGLIGTC

SEQ ID NO: 11559 - protein, 268 aa, Thermomyces lanuginosus
EVSQDLFNQFNLFAQYSAAAYCGKNNDAPAGTNITCTGNACPEVEKADATFLYSFEDSGVGDVTGFLALDNTNKLIVLSFRGSRSIENWIGNLNFDLKEINDICSGCRGHDGFTSSWRSVADTLRQKVEDAVREHPDYRVVFTGHSLGGALATVAGADLRGNGYDIDVFSYGAPRVGNRAFAEFLTVQTGGTLYRITHTNDIVPRLPPREFGYSHSSPEYWIKSGTLVSVTRNDIVKIEGIDATGGNNQPNIPDIPAHLWYFGLIGTC

SEQ ID NO: 11560 - protein, 268 aa, Thermomyces lanuginosus
EVSQDLFNQFNLFAQYSAAAYCGKNNDAPAGTNITCTGNACPEVEKADATFLYSFEDSGVGDVTGILALDNTNKLIVLSFRGSRSIENWIGNLNFDLKEINDICSGCRGHDGFTSSWRSVADTLRQKVEDAVREHPDYRVVFTGHSLGGALATVAGADLRGNGYDIDVFSYGAPRVGNRAFAEFLTVQTGGTLYRITHTNDIVPRLPPREFGYSHSSPEYWIKSGTLVPVTRNDIVKIEGIDATGGNNQPNIPDIPAHLWYFGLIGTC

SEQ ID NO: 11561 - protein, 268 aa, Thermomyces lanuginosus
EVSQDLFNQFNLFAQYSAAAYCGKNNDAPAGTNITCTGNACPEVEKADATFLYSFEDSGVGDVTGFLALDNTNKLIVLSFRGSRSIENWIGNLNFDLKKINDICSGCRGHDGFTSSWRSVADTLRQKVEDAVREHPDYRVVFTGHSLGGALATVAGADLRGNGYDIDVFSYGAPRVGNRAFAEFLTVQTGGTLYRITHTNDIVPRLPPXEFGYSHSSPEYWIKSGTLVPVTRNDIVKIEGIDATGGNNRPNIPDIPAHLWYFGLIGTC

SEQ ID NO: 11562 - protein, 268 aa, Thermomyces lanuginosus
EVSQDLFNQFNLFAQYSAAAYCGKNNDAPAGTNITCTGNACPEVEKADATFLYSFEDSGVGDVTGFLALDNTNKLIVLSFRGSRSIENWIGNLNFDLKEINDICSGCRGHDGFTSSWRSVADTLRQKVEDAVREHPDYRVVFTGHSLGGALATVAGADLRGNGYDIDVFSYGAPRVGNRAFAEFLTVQTGGTLYRITHTNDIVPRLPPREFGYSHSSPEYWIKSGTLVPVTRNDIVKVEGIDATGGNNQPNIPDIPAHLWYFGLIGTC

SEQ ID NO: 11563 - protein, 268 aa, Synthetic construct
EVSQDLFNQFNLFAQYSAAAYCGKNNDAPAGTNITCTGNACPEVEKADATFLYSFRDSGVGDVTGFLALDNTNKLIVLSFRGSRSIENWFGNLNFLLKKINDICSGCRGHDGFTSSWRSVADTLRQKVEDAVREHPDYRVVFTGHSLGGALATVAGADLRGNGYDIDVFSYGAPRVGNRAFAEFLTVQTGGTLYRITHTNDIVPRLPPREFGYSHSSPEYWIKSGTLVPVTRNDIVKIEGIDATGGNNQPNIPDIPAHLWYFGLIGTC

SEQ ID NO: 11564 - protein, 268 aa, Thermomyces lanuginosus
EVSQDLFNQFNLFAQYSAAAYCGKNNDAPAGTNITCTGNACPEVEKADATFLYSFEDSGVGDVTGFLALDNTNKLIVLSFRGSRSIENWIGNLNFDLKEINDICSGCRGHDGFTSSWRSVAHTLRQKVEDAVREHPDYRVVFTGHSLGGALATVAGADLRGNGYDIDVFSYGAPRVGNRAFAEFLTVQTGGTLYRITHTNDIVPRLPPREFGYSHSSPEYWIKSGTLVPVTRNDIVKIEGIDATGGNNQPNIPDIPAHLWYFGLIGTC

SEQ ID NO: 11565 - protein, 268 aa, Thermomyces lanuginosus
EVSPDLFNQFNLFAQYSAAAYCGKNNDAPAGTNITCTGNACPEVEKADATFLYSFEDSGVGDVTGFLALDNTNKLIVLSFRGSRSIENWIGNLNFDLKEINDICSGCRGHDGFTSSWRSVADTLRQKVEDAVREHPDYRVVFTGHSLGGALATVAGADLRGNGYDIDVFSYGAPRVGNRAFAEFLTVQTGGTLYRITHTNDIVPRLPPREFGYSHSSPEYWIKSGTLVPVTRNDIVKIEGIDATGGNNQPNIPDIPAHLWYFGLIGTC

SEQ ID NO: 11566 - protein, 268 aa, Thermomyces lanuginosus
EVSQDLFNQFNLFAQYSAAAYCGKNNDAPAGTNITCTGNACPEVEKADATFLYSFEDSGVGDVTGFLALDNTNKLIVLSFRGSRSIENWIGNLNFDLKEINDICSGCRGHDGFTSSWRSVADTLRQKVEDAVREHPDYRVVFTGHSLGGALATVAGADLRGNGYDIDVFSYGAPRVGNRAFAVFLTVQTGGTLYRITHTNDIVPRLPPREFGYSHSSPEYWIKSGTLVPVTRNDIVKIEGIDATGGNNQPNIPDIPAHLWYFGLIGTC

SEQ ID NO: 11567 - protein, 268 aa, Thermomyces lanuginosus
EVSQDLFNQFNLFAQYSAAAYCGKNNDAPAGTNITCTGNACPEVEKADATFLYSFEDSGVGDVTGFLALDNTNKLIVLSFRGSRSIENWIGNLNFDLKEINDICSGCKGHDGFTSSWRSVADTLRQKVEDAVREHPDYRVVFTGHSLGGALATVAGADLRGNGYDIDVFSYGAPRVGNRAFAEFLTVQTGGTLYRITHTNDIVPRLPPREFGYSHSSPEYWIKSGTLVPVTRNDIVKIEGIDATGGNNQPNIPDIPAHLWYFGLIGTC

SEQ ID NO: 11568 - protein, 268 aa, Thermomyces lanuginosus
EVSQDLFNQFNLFAQYSALAYCGKNNDAPAGTNITCTGNACPEVEKADATFLYSFEDSGVGDVTGFLALDNTNKLIVLSFRGSRSIENWIGNLNFDLKEINDICSGCRGHDGFTSSWRSVADTLRQKVEDAVREHPDYRVVFTGHSLGGALATVAGADLRGNGYDIDVFSYGAPRVGNRAFAEFLTVQTGGTLYRITHTNDIVPRLPPREFGYSHSSPEYWIKSGTLVPVTRNDIVKIEGIDATGGNNQPNIPDIPAHLWYFGLIGTC

SEQ ID NO: 11569 - protein, 268 aa, Thermomyces lanuginosus
EVSQDLFNQFNLFAQYSAAAYCGKNNDAPAGTNITCTGNACPEVEKADATFLYSFEDSGVGDVTGFLALDNTNKLIVLSFRGSRSIENWIGNLNFDLKEINDICSGCRGHDGFTSSWRSVADTLRQKVEDAVREHPDYRVVFTGHSLGGALATVAGADLRGNGYDIDVFSYGAPRVGNRAFAEFLTVQTGLTLYRITHTNDIVPRLPPREFGYSHSSPEYWIKSGTLVPVTRNDIVKIEGIDATGGNNQPNIPDIPAHLWYFGLIGTC

SEQ ID NO: 11570 - protein, 268 aa, Thermomyces lanuginosus
EVSQDLFNQFNLFAQYSAAAYCGKNNDAPAGTNITCTGNACPEVEKADATFLYSFEDSGVGDVTGFLALDNTNKLIVLSFRGSRSIENWIGNLNFDLKEINDICSGCRGHDQFTSSWRSVADTLRQKVEDAVREHPDYRVVFTGHSLGGALATVAGADLRGNGYDIDVFSYGAPRVGNRAFAEFLTVQTGGTLYRITHTNDIVPRLPPREFGYSHSSPEYWIKSGTLVPVTRNDIVKIEGIDATGGNNQPNIPDIPAHLWYFGLIGTC

SEQ ID NO: 11571 - protein, 268 aa, Thermomyces lanuginosus
EVSQDLFNQFNLFAQYSAAAYCGKNNDAPAGTNITCTGNACPEVEKADATFLYSFEDSGVGDVTGFLALDNTNKLIVLSFRGSRSIENWIGNLNFDLKEINDICSGCRGHDGFTSSWRSVADTLRQKVEDAVREHPDYRVVFTGHSLGGALATVAGADLRGNGYDIDVFSYGAPRVGNRAFAEFLTVQTGGTTYRITHTNDIVPRLPPREFGYSHSSPEYWIKSGTLVPVTRNDIVKIEGIDATGGNNQPNIPDIPAHLWYFGLIGTC

SEQ ID NO: 11572 - protein, 268 aa, Thermomyces lanuginosus
EVSQDLFNQFNLFAQYSAAAYCGKNNDAPAGTNITCTGNACPEVEKADATFLYSFEDSGVGDVTGFLALDNTNKLIVLSFRGSRSIENWIGNLNFDLKEINDICSGCRGHDGFTSSWRSVADTLRQKVEDAVREHPDYRVVFTGHSLGGALATVAGADLRGNGYDIDGFSYGAPRVGNRAFAEFLTVQTGGTLYRITHTNDIVPRLPPREFGYSHSSPEYWIKSGTLVPVTRNDIVKIEGIDATGGNNQPNIPDIPAHLWYFGLIGTC

SEQ ID NO: 11573 - protein, 268 aa, Thermomyces lanuginosus
EVSQDLFNQFNLFAQYSAAAYCGKNNQAPAGTNITCTGNACPEVEKADATFLYSFEDSGVGDVTGFLALDNTNKLIVLSFRGSRSIENWIGNLNFDLKEINDICSGCRGHDGFTSSWRSVADTLRQKVEDAVREHPDYRVVFTGHSLGGALATVAGADLRGNGYDIDVFSYGAPRVGNRAFAEFLTVQTGGTLYRITHTNDIVPRLPPREFGYSHSSPEYWIKSGTLVPVTRNDIVKIEGIDATGGNNQPNIPDIPAHLWYFGLIGTC

SEQ ID NO: 11574 - protein, 268 aa, Thermomyces lanuginosus
EVSQDLFNQFNLFAQYSAAAYCGKNNDAPAGTNITCTGNACPEVEKADATFLYSFEDSGLGDVTGFLALDNTNKLIVLSFRGSRSIENWIGNLNFDLKEINDICSGCRGHDGFTSSWRSVADTLRQKVEDAVREHPDYRVVFTGHSLGGALATVAGADLRGNGYDIDVFSYGAPRVGNRAFAEFLTVQTGGTLYRITHTNDIVPRLPPREFGYSHSSPEYWIKSGTLVPVTRNDIVKIEGIDATGGNNQPNIPDIPAHLWYFGLIGTC

SEQ ID NO: 11575 - protein, 268 aa, Thermomyces lanuginosus
EVSQDLFNQFNLFAQYSAAAYCGKNNDAPAGTNITCTGNACPEVEKADATFLYSFEDSGVGDVTGFLALDNTNKLIVLSFRGSRSIENWIGNLNFDLKEINDICSGCRGHDGFTSSWRSVADTLRQKVEDAVREHPDYRVVFTGHSLGGALATVAGADLRGNGYDIDVFSYGAPRVGNRAFAEFLTVQTGGTLYRITHTNDIVPRLPPREFGYSHSSPEYWIKSGTLVPVTRNDIVKIEGIDATGGNNQPNIPDIPAHLWWFGLIXTC

SEQ ID NO: 11576 - protein, 268 aa, Thermomyces lanuginosus
EVSQDLFNQFNLFAQYSAAAYCGKNNDAPAGTNITCTGNACPEVEKADATFLYSFEDSGVGDVTGFLALDNTNKLIVLSFRGSRSIENWIGNLNFDLKEINDICSGCRGHDGFTSSWRSVADTLRQKVEDAVREHPDYRVVFTGHSLGGALATVAGADLRGNGYDIDVFSYGAPRVGNRAFAEFLTVQTGGTLYRITHTNDIVPRLPPREFGYSHSSPEYWIKSGTLVPVTRNDIVKIEGIDATGGNNQPNIPDIAAHLWYFGLIGTC

SEQ ID NO: 11577 - protein, 268 aa, Thermomyces lanuginosus
EVSQDLFNQFNLFAQYSAAAYCGKNNDAPAGTNITCTGNACPEVEKADATFLYSFEDSGVGDVTGFLALDNTNKLIVLSFRGSRSIENWIGNLNFDLKEINDICSGCRGHDGFTSSWRSVADTLRQKVEDAVRVHPDYRVVFTGHSLGGALATVAGADLRGNGYDIDVFSYGAPRVGNRAFAEFLTVQTGGTLYRITHTNDIVPRLPPREFGYSHSSPEYWIKSGTLVPVTRNDIVKIEGIDATGGNNQPNIPDIPAHLWYFGLIGTC

SEQ ID NO: 11578 - protein, 268 aa, Thermomyces lanuginosus
EVSQDLFNQFNLFAQYSAAPYCGKNNDAPAGTNITCTGNACPEVEKADATFLYSFEDSGVGDVTGFLALDNTNKLIVLSFRGSRSIENWIGNLNFDLKEINDICSGCRGHDGFTSSWRSVADTLRQKVEDAVREHPDYRVVFTGHSLGGALATVAGADLRGNGYDIDVFSYGAPRVGNRAFAEFLTVQTGGTLYRITHTNDIVPRLPPREFGYSHSSPEYWIKSGTLVPVTRNDIVKIEGIDATGGNNQPNIPDIPAHLWYFGLIGTC

SEQ ID NO: 11579 - protein, 268 aa, Thermomyces lanuginosus
EVSQDLFNQFNLFAQYSAAAYCFKNNDAPAGTNITCTGNACPEVEKADATFLYSFEDSGVGDVTGFLALDNTNKLIVLSFRGSRSIENWIGNLNFDLKEINDICSGCRGHDGFTSSWRSVADTLRQKVEDAVREHPDYRVVFTGHSLGGALATVAGADLRGNGYDIDVFSYGAPRVGNRAFAEFLTVQTGGTLYRITHTNDIVPRLPPREFGYSHSSPEYWIKSGTLVPVTRNDIVKIEGIDATGGNNQPNIPDIPAHLWYFGLIGTC

SEQ ID NO: 11580 - protein, 268 aa, Thermomyces lanuginosus
EVSQDLFNGFNLFAQYSAAAYCGKNNDAPAGTNITCTGNACPEVEKADATFLYSFEDSGVGDVTGFLALDNTNKLIVLSFRGSRSIENWIGNLNFDLKEINDICSGCRGHDGFTSSWRSVADTLRQKVEDAVREHPDYRVVFTGHSLGGALATVAGADLRGNGYDIDVFSYGAPRVGNRAFAEFLTVQTGGTLYRITHTNDIVPRLPPREFGYSHSSPEYWIKSGTLVPVTRNDIVKIEGIDATGGNNQPNIPDIPAHLWYFGLIGTC

SEQ ID NO: 11581 - protein, 268 aa, Thermomyces lanuginosus
EVSFDLFNQFNLFAQYSAAAYCGKNNDAPAGTNITCTGNACPEVEKADATFLYSFEDSGVGDVTGFLALDNTNKLIVLSFRGSRSIENWIGNLNFDLKEINDICSGCRGHDGFTSSWRSVADTLRQKVEDAVREHPDYRVVFTGHSLGGALATVAGADLRGNGYDIDVFSYGAPRVGNRAFAEFLTVQTGGTLYRITHTNDIVPRLPPREFGYSHSSPEYWIKSGTLVPVTRNDIVKIEGIDATGGNNQPNIPDIPAHLWYFGLIGTC

SEQ ID NO: 11582 - protein, 268 aa, Thermomyces lanuginosus
EVSQDLFNQFNLFAQYSAAAYCGKNNDAPAGTNITCTGNACPEVEKADATFLYSFEDSGVGDVTGFLALDNTNKLIVLSFRGSRSIENWIGNLNFDLKEIYDICSGCRGHDGFTSSWRSVADTLRQKVEDAVREHPDYRVVFTGHSLGGALATVAGADLRGNGYDIDVFSYGAPRVGNRAFAEFLTVQTGGTLYRITHTNDIVPRLPPREFGYSHSSPEYWIKSGTLVPVTRNDIVKIEGIDATGGNNQPNIPDIPAHLWYFGLIGTC

SEQ ID NO: 11583 - protein, 268 aa, Thermomyces lanuginosus
EVSQDLFNQFNLFAQYSAAAYCGKNNDAPAGTNITCTGNACPEVEKADATFLYSFEDSGVGDVTGFLALDNTNKLIVLSFRGSRTIENWIGNLNFDLKEINDICSGCRGHDGFTSSWRSVADTLRQKVEDAVREHPDYRVVFTGHSLGGALATVAGADLRGNGYDIDVFSYGAPRVGNRAFAEFLTVQTGGTLYRITHTNDIVPRLPPREFGYSHSSPEYWIKSGTLVPVTRNDIVKIEGIDATGGNNQPNIPDIPAHLWYFGLIGTC

SEQ ID NO: 11584 - protein, 268 aa, Thermomyces lanuginosus
EVSQDLFNQFNLFAQYSAAAYCGYNNDAPAGTNITCTGNACPEVEKADATFLYSFEDSGVGDVTGFLALDNTNKLIVLSFRGSRSIENWIGNLNFDLKEINDICSGCRGHDGFTSSWRSVADTLRQKVEDAVREHPDYRVVFTGHSLGGALATVAGADLRGNGYDIDVFSYGAPRVGNRAFAEFLTVQTGGTLYRITHTNDIVPRLPPREFGYSHSSPEYWIKSGTLVPVTRNDIVKIEGIDATGGNNQPNIPDIPAHLWYFGLIGTC

SEQ ID NO: 11585 - protein, 268 aa, Thermomyces lanuginosus
EVSQDLFNQFNLFAQYSAAAYCGKNNDAPAGTNITCTGNACPEVEKADATFLYSFEDSGVGDVTGFLALDNTNKLIVLSFRGSRSIENWIGNLNFDLKEINDICSGCRGHDGFTLSWRSVADTLRQKVEDAVREHPDYRVVFTGHSLGGALATVAGADLRGNGYDIDVFSYGAPRVGNRAFAEFLTVQTGGTLYRITHTNDIVPRLPPREFGYSHSSPEYWIKSGTLVPVTRNDIVKIEGIDATGGNNQPNIPDIPAHLWYFGLIGTC

SEQ ID NO: 11586 - protein, 268 aa, Thermomyces lanuginosus
EVSQDLFNQFNLFAQYSAAAYCGKNNDNPAGTNITCTGNACPEVEKADATFLYSFEDSGVGDVTGFLALDNTNKLIVLSFRGSRSIENWIGNLNFDLKEINDICSGCRGHDGFTSSWRSVADTLRQKVEDAVREHPDYRVVFTGHSLGGALATVAGADLRGNGYDIDVFSYGAPRVGNRAFAEFLTVQTGGTLYRITHTNDIVPRLPPREFGYSHSSPEYWIKSGTLVPVTRNDIVKIEGIDATGGNNQPNIPDIPAHLWYFGLIGTC

SEQ ID NO: 11587 - protein, 268 aa, Thermomyces lanuginosus
EVSQDLFNQFNLFAQYSAAAYCGKNNDAPAGTNITCTGNACPEVEKADATFLYSFEDSGVGDVTGFLALDNTNKLIVLSFRGSRSIENWIGNLNFDLKEINDICSGCRGHDGFTSSWRSVADTLRQKVEDAVREHPDYRVVFTGHSLGGALATVAGADLRGNFYDIDVFSYGAPRVGNRAFAEFLTVQTGGTLYRITHTNDIVPRLPPREFGYSHSSPEYWIKSGTLVPVTRNDIVKIEGIDATGGNNQPNIPDIPAHLWYFGLIGTC

SEQ ID NO: 11588 - protein, 268 aa, Thermomyces lanuginosus
EVSQDLFWQFNLFAQYSAAAYCGKNNDAPAGTNITCTGNACPEVEKADATFLYSFEDSGVGDVTGFLALDNTNKLIVLSFRGSRSIENWIGNLNFDLKEINDICSGCRGHDGFTSSWRSVADTLRQKVEDAVREHPDYRVVFTGHSLGGALATVAGADLRGNGYDIDVFSYGAPRVGNRAFAEFLTVQTGGTLYRITHTNDIVPRLPPREFGYSHSSPEYWIKSGTLVPVTRNDIVKIEGIDATGGNNQPNIPDIPAHLWYFGLIGTC

SEQ ID NO: 11589 - protein, 268 aa, Thermomyces lanuginosus
EVSQDLFNQFNLFAQYSAAAYCGKNNDAPAGTNITCTGNACPEVEKADATFLYSFEDSGVGDVTGFLGLDNTNKLIVLSFRGSRSIENWIGNLNFDLKEINDICSGCRGHDGFTSSWRSVADTLRQKVEDAVREHPDYRVVFTGHSLGGALATVAGADLRGNGYDIDVFSYGAPRVGNRAFAEFLTVQTGGTLYRITHTNDIVPRLPPREFGYSHSSPEYWIKSGTLVPVTRNDIVKIEGIDATGGNNQPNIPDIPAHLWYFGLIGTC

SEQ ID NO: 11590 - protein, 268 aa, Thermomyces lanuginosus
EVSQDLFNQFNLFAQYSAAAYCGKNNDAPAGTNITCTGNACPEVEKADATFLYSFEDSGVGDVTGFLALDNTNKLIVLSFRGSRSIENWIGNLNFDLKEINDICSGCRGHDGFTSSWRSVADTLRQKVEDAVREHPDYRVVFTGHSLGGALATVAGADLRGNGYDIDVFSYGAPRVGNRAFAEFLTVQTGGTLYRITHTNDIVPRLPPREFGYSHSSPEYWIKSGTLVMVTRNDIVKIEGIDATGGNNQPNIPDIPAHLWYFGLIGTC

SEQ ID NO: 11591 - protein, 268 aa, Thermomyces lanuginosus
EVSQDLFNQFNLFAQYSAAAYCGKNNDAPAGTNITCTGNACPEVEKADATFLYSFEDSGVGDVTGFLALDNTNKLIVLSFRGSRSIENWIGNLNFDLKEINDICDGCRGHDGFTSSWRSVADTLRQKVEDAVREHPDYRVVFTGHSLGGALATVAGADLRGNGYDIDVFSYGAPRVGNRAFAEFLTVQTGGTLYRITHTNDIVPRLPPREFGYSHSSPEYWIKSGTLVPVTRNDIVKIEGIDATGGNNQPNIPDIPAHLWYFGLIGTC

SEQ ID NO: 11592 - protein, 268 aa, Thermomyces lanuginosus
EVSQDLFNDFNLFAQYSAAAYCGKNNDAPAGTNITCTGNACPEVEKADATFLYSFEDSGVGDVTGFLALDNTNKLIVLSFRGSRSIENWIGNLNFDLKEINDICSGCRGHDGFTSSWRSVADTLRQKVEDAVREHPDYRVVFTGHSLGGALATVAGADLRGNGYDIDVFSYGAPRVGNRAFAEFLTVQTGGTLYRITHTNDIVPRLPPREFGYSHSSPEYWIKSGTLVPVTRNDIVKIEGIDATGGNNQPNIPDIPAHLWYFGLIGTC

SEQ ID NO: 11593 - protein, 268 aa, Thermomyces lanuginosus
EVSQDLFNQFNLFAQHSAAAYCGKNNDAPAGTNITCTGNACPEVEKADATFLYSFEDSGVGDVTGFLALDNTNKLIVLSFRGSRSIENWIGNLNFDLKEINDICSGCRGHDGFTSSWRSVADTLRQKVEDAVREHPDYRVVFTGHSLGGALATVAGADLRGNGYDIDVFSYGAPRVGNRAFAEFLTVQTGGTLYRITHTNDIVPRLPPREFGYSHSSPEYWIKSGTLVPVTRNDIVKIEGIDATGGNNQPNIPDIPAHLWYFGLIGTC

SEQ ID NO: 11594 - protein, 268 aa, Thermomyces lanuginosus
EVSQDLFNQFNLFAQYSAAAYCGKNNDAPAGTNITCTGNACPEVEKADATFLYSFEDSGVGDVTGFLALDNTNKLIVLSFRGSRSIENWIGNLNFDLKEINDICSGCRGHDGFTSSWRSVADTLRMKVEDAVREHPDYRVVFTGHSLGGALATVAGADLRGNGYDIDVFSYGAPRVGNRAFAEFLTVQTGGTLYRITHTNDIVPRLPPREFGYSHSSPEYWIKSGTLVPVTRNDIVKIEGIDATGGNNQPNIPDIPAHLWYFGLIGTC

SEQ ID NO: 11595 - protein, 268 aa, Thermomyces lanuginosus
EVSQDLFNQFNLFAQYSAAAYCGKNNDAPAGTNITCTGNACPEVEKADATFLYSFEDSGVGDVTGFLALDNTNKLIVLSFRGSRSIENWIGNLNFDLKEIMDICSGCRGHDGFTSSWRSVADTLRQKVEDAVREHPDYRVVFTGHSLGGALATVAGADLRGNGYDIDVFSYGAPRVGNRAFAEFLTVQTGGTLYRITHTNDIVPRLPPREFGYSHSSPEYWIKSGTLVPVTRNDIVKIEGIDATGGNNQPNIPDIPAHLWYFGLIGTC

SEQ ID NO: 11596 - protein, 268 aa, Thermomyces lanuginosus
EVSQDLFNQFNLFAQYSAAAYCGKNNDAPAGTNIRCTGNACPEVEKADATFLYSFEDSGVGDVTGFLALDNTNKLIVLSFRGSRSIENWIGNLNFDLKEINDICSGCRGHDGFTSSWRSVADTLRQKVEDAVREHPDYRVVFTGHSLGGALATVAGADLRGNGYDIDVFSYGAPRVGNRAFAEFLTVQTGGTLYRITHTNDIVPRLPPREFGYSHSSPEYWIKSGTLVPVTRNDIVKIEGIDATGGNNQPNIPDIPAHLWYFGLIGTC

SEQ ID NO: 11597 - protein, 268 aa, Thermomyces lanuginosus
EVSQDLFNQFNLFAQYSAAAYCGKNNDAPAGTNITCTGNACPEVEKADATFLYSFEDSGVGDVTGFLALDNTNKLIVLSFRGSRSIENWIGNLNFDLKEINDICSGCRGHDGFTSSWRSVADTLRQKVEDAVREHPDYRVVFTGHSLGGALATVAGADLRGNGYDIDVFSYGAPRVGNRAFAEFLTVQTGGTLYRITHTNDIVPRLPPREFGYSHSSPEYWIKSGTLVPVTRNDIVKIEGIDAIGGNNQPNIPDIPAHLWYFGLIGTC

SEQ ID NO: 11598 - protein, 268 aa, Thermomyces lanuginosus
EVSQDHFNQFNLFAQYSAAAYCGKNNDAPAGTNITCTGNACPEVEKADATFLYSFEDSGVGDVTGFLALDNTNKLIVLSFRGSRSIENWIGNLNFDLKEINDICSGCRGHDGFTSSWRSVADTLRQKVEDAVREHPDYRVVFTGHSLGGALATVAGADLRGNGYDIDVFSYGAPRVGNRAFAEFLTVQTGGTLYRITHTNDIVPRLPPREFGYSHSSPEYWIKSGTLVPVTRNDIVKIEGIDATGGNNQPNIPDIPAHLWYFGLIGTC

SEQ ID NO: 11599 - protein, 268 aa, Thermomyces lanuginosus
EVSQDLFNQFNLFAQYSAAAYCGKNNDQPAGTNITCTGNACPEVEKADATFLYSFEDSGVGDVTGFLALDNTNKLIVLSFRGSRSIENWIGNLNFDLKEINDICSGCRGHDGFTSSWRSVADTLRQKVEDAVREHPDYRVVFTGHSLGGALATVAGADLRGNGYDIDVFSYGAPRVGNRAFAEFLTVQTGGTLYRITHTNDIVPRLPPREFGYSHSSPEYWIKSGTLVPVTRNDIVKIEGIDATGGNNQPNIPDIPAHLWYFGLIGTC

SEQ ID NO: 11600 - protein, 268 aa, Thermomyces lanuginosus
EVSQDLFNQFNLFAQYSAAAYCGKNNDAPAGTNITCTGNACPEVEKADATFLYSFEDSGVGDVTGFLALDDTNKLIVLSFRGSRSIENWIGNLNFDLKEINDICSGCRGHDGFTSSWRSVADTLRQKVEDAVREHPDYRVVFTGHSLGGALATVAGADLRGNGYDIDVFSYGAPRVGNRAFAEFLTVQTGGTLYRITHTNDIVPRLPPREFGYSHSSPEYWIKSGTLVPVTRNDIVKIEGIDATGGNNQPNIPDIPAHLWYFGLIGTC

SEQ ID NO: 11601 - protein, 268 aa, Thermomyces lanuginosus
EVSQDLFNQFNLFAQYSAAAYCGKNNDAPAGTNITCTGNACPEVEKADATFLYSFEDSGVGDVTGFLALDNTNKLIVLSFRGSRSIENWIGNLNFDLKEINDICSGCRGHDGFTSSWRSVADTLRQKVEDAVNEHPDYRVVFTGHSLGGALATVAGADLRGNGYDIDVFSYGAPRVGNRAFAEFLTVQTGGTLYRITHTNDIVPRLPPREFGYSHSSPEYWIKSGTLVPVTRNDIVKIEGIDATGGNNQPNIPDIPAHLWYFGLIGTC

SEQ ID NO: 11602 - protein, 268 aa, Thermomyces lanuginosus
EVSQDLFNQFNLFAQYSAAAYCGKNNDAPAGTNITCTGNACPEVEKADATFLYSFEDSGVGDVTGFLALDNTNKLIVLSFRGSRSIENWIGNLNFDLKEINDICSGCRGHDGFTSSWRSVADTLRQKVEDAVREHPDYRVVFTGHSLGGALATVAGADLRGNGYDIDVFSYGAPRVGNRAFAEFLTVQTGGTLYRITHTNDIVPRLPPREFGYSHSSPEYWIKSGTLVPVTRNDIVKIEGIDATGGNNQPNIPDIXAHLWYFGLIGTC

SEQ ID NO: 11603 - protein, 268 aa, Thermomyces lanuginosus
EVSQDLFNQFNLFAQYSAAAYCGKNNDAPAGTNITCTGNACPEVEKADATFLYSFEDSGVGDVTGFLALDNTNELIVLSFRGSRSIENWIGNLNFDLKEINDICSGCRGHDGFTSSWRSVADTLRQKVEDAVREHPDYRVVFTGHSLGGALATVAGADLRGNGYDIDVFSYGAPRVGNRAFAEFLTVQTGGTLYRITHTNDIVPRLPPREFGYSHSSPEYWIKSGTLVPVTRNDIVKIEGIDATGGNNQPNIPDIPAHLWYFGLIGTC

SEQ ID NO: 11604 - protein, 268 aa, Thermomyces lanuginosus
EVSQDLFNQFNLFAQYSAAAYCGKNNDAPAGTNITCTGNACPEVEKADATFLYSFEDSGVGDVTGWLALDNTNKLIVLSFRGSRSIENWIGNLNFDLKEINDICSGCRGHDGFTSSWRSVADTLRQKVEDAVREHPDYRVVFTGHSLGGALATVAGADLRGNGYDIDVFSYGAPRVGNRAFAEFLTVQTGGTLYRITHTNDIVPRLPPREFGYSHSSPEYWIKSGTLVPVTRNDIVKIEGIDATGGNNQPNIPDIPAHLWYFGLIGTC

SEQ ID NO: 11605 - protein, 268 aa, Thermomyces lanuginosus
EVSQDLFNQFNLFAQYSAAAYCGKNNDAPAGTNITCTGNACPEVEKADATFLYSFEDSGVGDVTGFLALDNTNKLIVLSFRGSRSIENWIGNLNFDLKEINDICSGCRGHDGFTSSWRSVADTLRQKVEDAVREHPDYRVVFTGHSLGGALATVAGADLRGNGYDIDVFSYGAPRVGNRAFAEFLTVQTGGTLYRITHTNDIVPRLPPREFGYSHSSPEYWIKSGTLVPVTRNDIVKIEGIDATGGNNQPNIPDIPAHLWKFGLIGTC

SEQ ID NO: 11606 - protein, 268 aa, Thermomyces lanuginosus
EVSQDLFNQFNLFAQYSAAAYCGKNNDAPAGTNITCTGNACPEVEKADATFLYSFEDSGVGDVTGFLALDNTNKLIVLSFRGSRSIENWIGNLNFDLKEINDICSGCRGHDGFTSSWRSVADTLRQKVEDAVIEHPDYRVVFTGHSLGGALATVAGADLRGNGYDIDVFSYGAPRVGNRAFAEFLTVQTGGTLYRITHTNDIVPRLPPREFGYSHSSPEYWIKSGTLVPVTRNDIVKIEGIDATGGNNQPNIPDIPAHLWYFGLIGTC

SEQ ID NO: 11607 - protein, 268 aa, Thermomyces lanuginosus
EVSQDLFNQFNLFAQYSAAAYCGKNNDAPAGTNITCTGNACPEVEKADATFLYSFEDSGVGDVTGFLALDNTNKLIVLSFRGSRSIENWIGNLNFDLKEINDICSGCRGHDGFTSSWRSVADTLRQKVEDAVREHPDYRVVFTGHSLGGALATVAGADLRGNGYDIDVFSYGAPRVGNRAFAEFLTVQTGGTLYRITHTNDIVPRLPPREFGYSHSSPEYWIKSGTHVPVTRNDIVKIEGIDATGGNNQPNIPDIPAHLWYFGLIGTC

SEQ ID NO: 11608 - protein, 268 aa, Thermomyces lanuginosus
EVSQDLFNQFNHFAQYSAAAYCGKNNDAPAGTNITCTGNACPEVEKADATFLYSFEDSGVGDVTGFLALDNTNKLIVLSFRGSRSIENWIGNLNFDLKEINDICSGCRGHDGFTSSWRSVADTLRQKVEDAVREHPDYRVVFTGHSLGGALATVAGADLRGNGYDIDVFSYGAPRVGNRAFAEFLTVQTGGTLYRITHTNDIVPRLPPREFGYSHSSPEYWIKSGTLVPVTRNDIVKIEGIDATGGNNQPNIPDIPAHLWYFGLIGTC

SEQ ID NO: 11609 - protein, 268 aa, Thermomyces lanuginosus
EVSQDLFNQFNLFAQYSAAAYCGKNNDAPAGTNITCTGNACPEVEKADATFLYSFEDSGVGDVTGFLALDNTNKLIVLSFRGSRSIENWIGNLNFDLKHINDICSGCRGHDGFTSSWRSVADTLRQKVEDAVREHPDYRVVFTGHSLGGALATVAGADLRGNGYDIDVFSYGAPRVGNRAFAEFLTVQTGGTLYRITHTNDIVPRLPPREFGYSHSSPEYWIKSGTLVPVTRNDIVKIEGIDATGGNNHPNIPDIPAHLWYFGLIGTC

SEQ ID NO: 11610 - protein, 268 aa, Thermomyces lanuginosus
EVSQDLFNQFNLFAQYSAAAYCGKNNDAPAGTNITCTGNACPEVEKADASFLYSFEDSGVGDVTGFLALDNTNKLIVLSFRGSRSIENWIGNLNFDLKEINDICSGCRGHDGFTSSWRSVADTLRQKVEDAVREHPDYRVVFTGHSLGGALATVAGADLRGNGYDIDVFSYGAPRVGNRAFAEFLTVQTGGTLYRITHTNDIVPRLPPREFGYSHSSPEYWIKSGTLVPVTRNDIVKIEGIDATGGNNQPNIPDIPAHLWYFGLIGTC

SEQ ID NO: 11611 - protein, 268 aa, Thermomyces lanuginosus
EVSQDLFNQFNLFAQYSAAAYCGKNNDAPAGTNITCTGNACPEVEKADATFLYSFEDSGVGDVTGFLALDNTNKLIVLSFRGSRSIENWIGNLNFDLKEINDICSGCRGHDGFTSSWRSVADTLRQKVEDAVREHPDYRVVFTGHSLGGALATVAGADLRGNGYDIDVFSYGAPRVGRRAFAEFLTVQTGGTLYRITHTNDIVPRLPPREFGYSHSSPEYWIKSGTLVPVTRNDIVKIEGIDATGGNNQPNIPDIPAHLWYFGLIGTC

SEQ ID NO: 11612 - protein, 268 aa, Thermomyces lanuginosus
EVSQDLFNQFNLFAQYSAAAYCGKNNDAPAGTNITCTGNACPEVEKAHATFLYSFEDSGVGDVTGFLALDNTNKLIVLSFRGSRSIENWIGNLNFDLKEINDICSGCRGHDGFTSSWRSVADTLRQKVEDAVREHPDYRVVFTGHSLGGALATVAGADLRGNGYDIDVFSYGAPRVGNRAFAEFLTVQTGGTLYRITHTNDIVPRLPPREFGYSHSSPEYWIKSGTLVPVTRNDIVKIEGIDATGGNNQPNIPDIPAHLWYFGLIGTC

SEQ ID NO: 11613 - protein, 268 aa, Thermomyces lanuginosus
EVSQDLFNQFNLFAQYSAAAYCGKNNDAPAGTNITCTGNACPEVEKADATFLYSFEDSGVGDVTGFLALDNTNKLIVLSFRGSRSIENWIGNLNFDLKEINDICSGCRGHDGFTSSWRSVADTLRQKVEDAVREHPDYRVVFTGHSLGGALATVAGADRRGNGYDIDVFSYGAPRVGNRAFAEFLTVQTGGTLYRITHTNDIVPRLPPREFGYSHSSPEYWIKSGTLVPVTRNDIVKIEGIDATGGNNQPNIPDIPAHLWYFGLIGTC

SEQ ID NO: 11614 - protein, 268 aa, Thermomyces lanuginosus
EVSQDLFNQFNLFAQYSAAAYCGPNNDAPAGTNITCTGNACPEVEKADATFLYSFEDSGVGDVTGFLALDNTNKLIVLSFRGSRSIENWIGNLNFDLKEINDICSGCRGHDGFTSSWRSVADTLRQKVEDAVREHPDYRVVFTGHSLGGALATVAGADLRGNGYDIDVFSYGAPRVGNRAFAEFLTVQTGGTLYRITHTNDIVPRLPPREFGYSHSSPEYWIKSGTLVPVTRNDIVKIEGIDATGGNNQPNIPDIPAHLWYFGLIGTC

SEQ ID NO: 11615 - protein, 268 aa, Thermomyces lanuginosus
EVSQDLFNQFNLFAQYSAAAYCGKNNDAPAGTNITCTGNACPEVEKADATMLYSFEDSGVGDVTGFLALDNTNKLIVLSFRGSRSIENWIGNLNFDLKEINDICSGCRGHDGFTSSWRSVADTLRQKVEDAVREHPDYRVVFTGHSLGGALATVAGADLRGNGYDIDVFSYGAPRVGNRAFAEFLTVQTGGTLYRITHTNDIVPRLPPREFGYSHSSPEYWIKSGTLVPVTRNDIVKIEGIDATGGNNQPNIPDIPAHLWYFGLIGTC

SEQ ID NO: 11616 - protein, 268 aa, Thermomyces lanuginosus
EVSQDLFNQFNLFAQYSAAAYCGKNNDAPAGTNITCTGNACPEVEKADATFLYSFEDSGVGDVTGFLALDNTNKLIVLSFRGSRSIENWIGNLNFDLKEINDICSGCRGHDGFTSSWRSVADTLRQKVEDAVREHPDYRVVFTGHSLGGALATVAGADLRGNGYDIDVFSYGAPRVGNRAFAEFLTVRTGGTLYRITHTNDIVPRLPPREFGYSHSSPEYWIKSGTLVPVTRNDIVKIEGIDATGGNNQPNIPDIPAHLWYFGLIGTC

SEQ ID NO: 11617 - protein, 268 aa, Thermomyces lanuginosus
EVSQDLFNQFNLFAQYSAAAYCGKNNDAPAGTNITCTGNACPEVEKADATFLYSFEDSGVGDVTGFLALDNTNKLIVLSFRGSRSIENWIGNLNFDLKEINDICSGCRGHDGFTSSWRSVADTLRQKVEDAVEEHPDYRVVFTGHSLGGALATVAGADLRGNGYDIDVFSYGAPRVGNRAFAEFLTVQTGGTLYRITHTNDIVPRLPPREFGYSHSSPEYWIKSGTLVPVTRNDIVKIEGIDATGGNNQPNIPDIPAHLWYFGLIGTC

SEQ ID NO: 11618 - protein, 268 aa, Thermomyces lanuginosus
EVSQDLFNQFNLFAQYSAAAYCGKNNDAPAGTNITCTGNACPEVEKADATFLYSFEDSGVGDVTGFLALDNTNKLIVLSFRGSRSIENWIGNLNFDLKEINDICSGCRGHDGFTSSWRSVADTLRQKVEDAVREHPDYRVVFTGHSLGGALATVAGADLRGNGYDIDVFSYGAPRVGNRAFAEFLTVQTGGTLYRITHTNDIVPRLPPREFGYSHSSPEYWIKSGTLVPVTRNDIVKIEGIDATGGNNQPNIRDIPAHLWYFGLIGTC

SEQ ID NO: 11619 - protein, 268 aa, Thermomyces lanuginosus
EVSQDLFNQFNLFAQYSAAAYCGKNNDAPAGTNITCTGNACPEVEKADATFLYSFEDSGVGDVTGFLALDNTNKLIVLSFRGSRSIENWIGNLNFDLKEINDICSGCRGHDGFTSSWRSVADTLRQKVEDAVRPHPDYRVVFTGHSLGGALATVAGADLRGNGYDIDVFSYGAPRVGNRAFAEFLTVQTGGTLYRITHTNDIVPRLPPREFGYSHSSPEYWIKSGTLVPVTRNDIVKIEGIDATGGNNQPNIPDIPAHLWYFGLIGTC

SEQ ID NO: 11620 - protein, 268 aa, Thermomyces lanuginosus
EVSQDLFNQFNLFAQYSAAAYCGKNNDAPAGTNITCTGNACPEVEKADATFLYSFEDSGVGDVTGFLALDNTNKLIVLSFRGSRSIENWIGNLNFDLKEINDICSGCRGHDGFTSSWRSVADTLRQKVEDAVREHPDYRVVFTGHSLGGALATVAGADLRGNGYDIDVFSYGAPRVGNRAFAEFLTVQTGGTLYRITHTNDIVPRLPPREFGYSHSSPEYWIKSGTLVPVTRNDIVKIEGIDATGGNNQPDIPDIPAHLWYFGLIGTC

SEQ ID NO: 11621 - protein, 268 aa, Thermomyces lanuginosus
EVSQDLFNQFNLFAQYSAAAYCGKNNDAPAGTNITCTGNACPEVEKADATFLYSFEDSGVGDVTGFLALDNTNKLIVLSFRGSRSIENWIGNLNFDLKEINDICSGCRGHDGFTSSWRSVKDTLRQKVEDAVREHPDYRVVFTGHSLGGALATVAGADLRGNGYDIDVFSYGAPRVGNRAFAEFLTVQTGGTLYRITHTNDIVPRLPPREFGYSHSSPEYWIKSGTLVPVTRNDIVKIEGIDATGGNNQPNIPDIPAHLWYFGLIGTC

SEQ ID NO: 11622 - protein, 268 aa, Thermomyces lanuginosus
EVSQDLFNQFNLFAQYSAAAYCGANNDAPAGTNITCTGNACPEVEKADATFLYSFEDSGVGDVTGFLALDNTNKLIVLSFRGSRSIENWIGNLNFDLKEINDICSGCRGHDGFTSSWRSVADTLRQKVEDAVREHPDYRVVFTGHSLGGALATVAGADLRGNGYDIDVFSYGAPRVGNRAFAEFLTVQTGGTLYRITHTNDIVPRLPPREFGYSHSSPEYWIKSGTLVPVTRNDIVKIEGIDATGGNNQPNIPDIPAHLWYFGLIGTC

SEQ ID NO: 11623 - protein, 268 aa, Thermomyces lanuginosus
EVSQDLFNQFNLFAQYSAAAYCGKNNDAPAGTNITCTGNACPEVEKADATFLYVFEDSGVGDVTGFLALDNTNKLIVLSFRGSRSIENWIGNLNFDLKEINDICSGCRGHDGFTSSWRSVADTLRQKVEDAVREHPDYRVVFTGHSLGGALATVAGADLRGNGYDIDVFSYGAPRVGNRAFAEFLTVQTGGTLYRITHTNDIVPRLPPREFGYSHSSPEYWIKSGTLVPVTRNDIVKIEGIDATGGNNQPNIPDIPAHLWYFGLIGTC

SEQ ID NO: 11624 - protein, 268 aa, Thermomyces lanuginosus
EVSQDLFNQFNLFAQYSAAAYCGKNNDAPAGTNITCTGNACPEVEKADATFLYSFEDSGVGDVKGFLALDNTNKLIVLSFRGSRSIENWIGNLNFDLKEINDICSGCRGHDGFTSSWRSVADTLRQKVEDAVREHPDYRVVFTGHSLGGALATVAGADLRGNGYDIDVFSYGAPRVGNRAFAEFLTVQTGGTLYRITHTNDIVPRLPPREFGYSHSSPEYWIKSGTLVPVTRNDIVKIEGIDATGGNNQPNIPDIPAHLWYFGLIGTC

SEQ ID NO: 11625 - protein, 268 aa, Thermomyces lanuginosus
EVSQDLFNQFNLFAQYSAAAYCGKNNDAPAVTNITCTGNACPEVEKADATFLYSFEDSGVGDVTGFLALDNTNKLIVLSFRGSRSIENWIGNLNFDLKEINDICSGCRGHDGFTSSWRSVADTLRQKVEDAVREHPDYRVVFTGHSLGGALATVAGADLRGNGYDIDVFSYGAPRVGNRAFAEFLTVQTGGTLYRITHTNDIVPRLPPREFGYSHSSPEYWIKSGTLVPVTRNDIVKIEGIDATGGNNQPNIPDIPAHLWYFGLIGTC

SEQ ID NO: 11626 - protein, 268 aa, Thermomyces lanuginosus
EVSQDLFNKFNLFAQYSAAAYCGKNNDAPAGTNITCTGNACPEVEKADATFLYSFEDSGVGDVTGFLALDNTNKLIVLSFRGSRSIENWIGNLNFDLKEINDICSGCRGHDGFTSSWRSVADTLRQKVEDAVREHPDYRVVFTGHSLGGALATVAGADLRGNGYDIDVFSYGAPRVGNRAFAEFLTVQTGGTLYRITHTNDIVPRLPPREFGYSHSSPEYWIKSGTLVPVTRNDIVKIEGIDATGGNNQPNIPDIPAHLWYFGLIGTC

SEQ ID NO: 11627 - protein, 268 aa, Thermomyces lanuginosus
EVSQDLFNQFNLFAQYSAAAYCGKNNDAPAGTNITCTGNACPEVEKADATFLYSFEDSGVGDVTGFLALDNTNKLIVLSFRGSRSIENWIGNLNFDLKEINDICSGCRGHDGFTMSWRSVADTLRQKVEDAVREHPDYRVVFTGHSLGGALATVAGADLRGNGYDIDVFSYGAPRVGNRAFAEFLTVQTGGTLYRITHTNDIVPRLPPREFGYSHSSPEYWIKSGTLVPVTRNDIVKIEGIDATGGNNQPNIPDIPAHLWYFGLIGTC

SEQ ID NO: 11628 - protein, 268 aa, Thermomyces lanuginosus
EVSQYLFNQFNLFAQYSAAAYCGKNNDAPAGTNITCTGNACPEVEKADATFLYSFEDSGVGDVTGFLALDNTNKLIVLSFRGSRSIENWIGNLNFDLKEINDICSGCRGHDGFTSSWRSVADTLRQKVEDAVREHPDYRVVFTGHSLGGALATVAGADLRGNGYDIDVFSYGAPRVGNRAFAEFLTVQTGGTLYRITHTNDIVPRLPPREFGYSHSSPEYWIKSGTLVPVTRNDIVKIEGIDATGGNNQPNIPDIPAHLWYFGLIGTC

SEQ ID NO: 11629 - protein, 268 aa, Thermomyces lanuginosus
EVSQDLFNQFNLFAQYSAAAYCGKNNDAPAGTNITCTGNACPEVEKADATFLYSFEDSGVGDVTGFLALDNTNKLIVLSFRGSRSIENWIGNLVFDLKEINDICSGCRGHDGFTSSWRSVADTLRQKVEDAVREHPDYRVVFTGHSLGGALATVAGADLRGNGYDIDVFSYGAPRVGNRAFAEFLTVQTGGTLYRITHTNDIVPRLPPREFGYSHSSPEYWIKSGTLVPVTRNDIVKIEGIDATGGNNQPNIPDIPAHLWYFGLIGTC

SEQ ID NO: 11630 - protein, 268 aa, Thermomyces lanuginosus
EVSQDLFNQFNLFAQYSAAAYCGKNNDAPAGTNITCTGNACPEVEKADATFLYSFEDSGVGDVTGFLALDNTNKLIVLSFRGSRSIENWIGNLNFDLKEINDICSGCRGHDGFTSSWRSVADTLRQKVEDAVREHPIYRVVFTGHSLGGALATVAGADLRGNGYDIDVFSYGAPRVGNRAFAEFLTVQTGGTLYRITHTNDIVPRLPPREFGYSHSSPEYWIKSGTLVPVTRNDIVKIEGIDATGGNNQPNIPDIPAHLWYFGLIGTC

SEQ ID NO: 11631 - protein, 268 aa, Thermomyces lanuginosus
EVSQDLFNQFNLFAQYSAAAYCGKNNDAPAGTNITCTGNACPEVEKADAAFLYSFEDSGVGDVTGFLALDNTNKLIVLSFRGSRSIENWIGNLNFDLKEINDICSGCRGHDGFTSSWRSVADTLRQKVEDAVREHPDYRVVFTGHSLGGALATVAGADLRGNGYDIDVFSYGAPRVGNRAFAEFLTVQTGGTLYRITHTNDIVPRLPPREFGYSHSSPEYWIKSGTLVPVTRNDIVKIEGIDATGGNNQPNIPDIPAHLWYFGLIGTC

SEQ ID NO: 11632 - protein, 268 aa, Thermomyces lanuginosus
EVSQDLFNQFNLFAQYSAAAYCGKNNDAPAGTNITCTGNACPEVEKADATFLYSFEDSGVGDVTGFLALDNTNKLIVLSFRGSRSIENWIGNLNFDLKEINDICSGCRGHDGFTSSWRSVADTLRQKVEDAVREHPDYRVVFTGHSLGGALATVAGADLRGNGYDIDVFSYGAPRVGNRKFAEFLTVQTGGTLYRITHTNDIVPRLPPREFGYSHSSPEYWIKSGTLVPVTRNDIVKIEGIDATGGNNQPNIPDIPAHLWYFGLIGTC

SEQ ID NO: 11633 - protein, 268 aa, Thermomyces lanuginosus
EVSQDLFNQFNLFAQYSAAAYCGKNNDAPAGTNITCTGNACPEHEKADATFLYSFEDSGVGDVTGFLALDNTNKLIVLSFRGSRSIENWIGNLNFDLKEINDICSGCRGHDGFTSSWRSVADTLRQKVEDAVREHPDYRVVFTGHSLGGALATVAGADLRGNGYDIDVFSYGAPRVGNRAFAEFLTVQTGGTLYRITHTNDIVPRLPPREFGYSHSSPEYWIKSGTLVPVTRNDIVKIEGIDATGGNNQPNIPDIPAHLWYFGLIGTC

SEQ ID NO: 11634 - protein, 268 aa, Thermomyces lanuginosus
EVSQDLFNQFNLFAQYSAAAYCGKNNDAPAGTNITCTGNACPEVEKADATFLYSFEDSGVGDVTGFLALDNTNKEIVLSFRGSRSIENWIGNLNFDLKEINDICSGCRGHDGFTSSWRSVADTLRQKVEDAVREHPDYRVVFTGHSLGGALATVAGADLRGNGYDIDVFSYGAPRVGNRAFAEFLTVQTGGTLYRITHTNDIVPRLPPREFGYSHSSPEYWIKSGTLVPVTRNDIVKIEGIDATGGNNQPNIPDIPAHLWYFGLIGTC

SEQ ID NO: 11635 - protein, 268 aa, Thermomyces lanuginosus
EVSQDLFNQFNLFAQYSAAAYCNKNNDAPAGTNITCTGNACPEVEKADATFLYSFEDSGVGDVTGFLALDNTNKLIVLSFRGSRSIENWIGNLNFDLKEINDICSGCRGHDGFTSSWRSVADTLRQKVEDAVREHPDYRVVFTGHSLGGALATVAGADLRGNGYDIDVFSYGAPRVGNRAFAEFLTVQTGGTLYRITHTNDIVPRLPPREFGYSHSSPEYWIKSGTLVPVTRNDIVKIEGIDATGGNNQPNIPDIPAHLWYFGLIGTC

SEQ ID NO: 11636 - protein, 268 aa, Thermomyces lanuginosus
EVSQDLFNQFNLFAQYSAAAYCGKNNDAPAGTNITCTGNACPEVEKADATFLYSFEDSGVGDVTGFLALDNTNKLIVLSFRGSRSIENWIGNLNFDLKEINDICSGCRGHDGFTSSWRSVADTLRQKVEDAVFEHPDYRVVFTGHSLGGALATVAGADLRGNGYDIDVFSYGAPRVGNRAFAEFLTVQTGGTLYRITHTNDIVPRLPPREFGYSHSSPEYWIKSGTLVPVTRNDIVKIEGIDATGGNNQPNIPDIPAHLWYFGLIGTC

SEQ ID NO: 11637 - protein, 268 aa, Thermomyces lanuginosus
EVSQDLFNQFNLFAQYSAAAYCGKNNDAPAGTNITCTGNACPEVEKADATFLYSFEDSGVGDVTGFLALDNTNKLIVLSFRGSRSIENWIGNLNFDLKEINDICSGCRGHDGFTVSWRSVADTLRQKVEDAVREHPDYRVVFTGHSLGGALATVAGADLRGNGYDIDVFSYGAPRVGNRAFAEFLTVQTGGTLYRITHTNDIVPRLPPREFGYSHSSPEYWIKSGTLVPVTRNDIVKIEGIDATGGNNQPNIPDIPAHLWYFGLIGTC

SEQ ID NO: 11638 - protein, 268 aa, Thermomyces lanuginosus
EVSQDLFNQFNLFAQYSAAAYCGKNNDAPAGTNITCTGNACPEVEKADATFLYSFEDSGVGDVTGFLALDNTNKLIVLSFRGSRSIENWIGNLNFDLKEINDICSGCRGHDGFTSSWRSVADTLRQKVEDAVREHPDYRVVFTGHSLGGALATVAGADLRGNGYDIDVFSYGAPRVGNRAFAEFLTVQTGGTLYRITHTNDIVPRLPPREFGYSHSSPEYWIKSGTLVPVTTNDIVKIEGIDATGGNNQPNIPDIPAHLWYFGLIGTC

SEQ ID NO: 11639 - protein, 268 aa, Thermomyces lanuginosus
EVSQDLFNQFNLFAQYSAAAYCGKNNDAPAGTNITCTGNACPEVEKADATFLYSFEDSGVGDVTGFLALDNTNKLIVLSFRGSRSIENWIGNLNFDLKEINDICSGCRGHDGFTSSWRSVADTLRQKVEDAVREHPDYRVVFTGHSLGGALATVAGADLRGMGYDIDVFSYGAPRVGNRAFAEFLTVQTGGTLYRITHTNDIVPRLPPREFGYSHSSPEYWIKSGTLVPVTRNDIVKIEGIDATGGNNQPNIPDIPAHLWYFGLIGTC

SEQ ID NO: 11640 - protein, 268 aa, Thermomyces lanuginosus
EVSQDLFNQFNLFAQYSAAAYCGKNNDAPAGTNITCTGNACPEVEKADATFLYSFEDSGVGDVTGTLALDNTNKLIVLSFRGSRSIENWIGNLNFDLKEINDICSGCRGHDGFTSSWRSVADTLRQKVEDAVREHPDYRVVFTGHSLGGALATVAGADLRGNGYDIDVFSYGAPRVGNRAFAEFLTVQTGGTLYRITHTNDIVPRLPPREFGYSHSSPEYWIKSGTLVPVTRNDIVKIEGIDATGGNNQPNIPDIPAHLWYFGLIGTC

SEQ ID NO: 11641 - protein, 268 aa, Thermomyces lanuginosus
EVSQDLFNQFNLFAQYSAAAYCGKNNDDPAGTNITCTGNACPEVEKADATFLYSFEDSGVGDVTGFLALDNTNKLIVLSFRGSRSIENWIGNLNFDLKEINDICSGCRGHDGFTSSWRSVADTLRQKVEDAVREHPDYRVVFTGHSLGGALATVAGADLRGNGYDIDVFSYGAPRVGNRAFAEFLTVQTGGTLYRITHTNDIVPRLPPREFGYSHSSPEYWIKSGTLVPVTRNDIVKIEGIDATGGNNQPNIPDIPAHLWYFGLIGTC

SEQ ID NO: 11642 - protein, 268 aa, Thermomyces lanuginosus
EVSQDLFNQFNLFAQYSAAAYCGKNNDAPAGTNITCTGNACPEVEKADATFLYSFEDSGVGDVTGFLALDNTNKLIVLSFRGSRSIENWIGNLNFDLKEINDICSGCRGHDGFTSSWRSVADTLRQKVEDAVREHPDYRVVFTGHSLGGALATFAGADLRGNGYDIDVFSYGAPRVGNRAFAEFLTVQTGGTLYRITHTNDIVPRLPPREFGYSHSSPEYWIKSGTLVPVTRNDIVKIEGIDATGGNNQPNIPDIPAHLWYFGLIGTC

SEQ ID NO: 11643 - protein, 268 aa, Thermomyces lanuginosus
EVSQDLFNQFNLFAQYSAAAYCGKNNDAPAGTNITCTGNACPEVEKADATFLYSFEDSGVGDVTGFLALDNTNKLIVLSFRGSRSIENWIGNLNFDLKEINDICSGCRGHDGFTSSWRSVADTLRQKVEDAVREHPDYRVVFTGHSLGGALATVAGADLRGNGYDIDVFSYGAPRVGNRAFAEFLTVQTGGTLYRITHTNDIVPRLPPREFGYSHSSPEYWIKSGTLVPVTRNDIVKIEGIDATGGNNQPNIPDLPAHLWYFGLIGTC

SEQ ID NO: 11644 - protein, 268 aa, Thermomyces lanuginosus
EVSQDLFNQFNLFAQYSAAAYCGKNNDAPAGTNITCTGNACPEVEKADATFLYSFEDSGVGDVTGFLALDNTNKLIVLSFRGSRSIENWIGNLNFDLKEINDICSGCRGHDGFTSSWRSVADTLRQKVEDAVREHPDYRVVFTGHSLGGALATVAGADLRGGGYDIDVFSYGAPRVGNRAFAEFLTVQTGGTLYRITHTNDIVPRLPPREFGYSHSSPEYWIKSGTLVPVTRNDIVKIEGIDATGGNNQPNIPDIPAHLWYFGLIGTC

SEQ ID NO: 11645 - protein, 268 aa, Thermomyces lanuginosus
EVSQDLFNQFNLFAQYSAAAYCGKNNDAPAGTNITCTGNACPEVEKADATFLYSFEDSGVGDVTGFLALDNTNKLIVLSFRGSRSIENWIGNLNFDLKEINDICSGCRGHDGFTSSWRSVADTLRQKVEDAVREHPDYRVVFTGHSLGGALATVAGADLRGNGYDIDVFSYGAPRVGNRAFAEFLTVQTGGTLYRITHTNDIVPRLPPREIGYSHSSPEYWIKSGTLVPVTRNDIVKIEGIDATGGNNQPNIPDIPAHLWYFGLIGTC

SEQ ID NO: 11646 - protein, 268 aa, Thermomyces lanuginosus
EVSQDLFNQFNLFAQYSAAAYCGKNNDAPAGTNITCTDNACPEVEKADATFLYSFEDSGVGDVTGFLALDNTNKLIVLSFRGSRSIENWIGNLNFDLKEINDICSGCRGHDGFTSSWRSVADTLRQKVEDAVREHPDYRVVFTGHSLGGALATVAGADLRGNGYDIDVFSYGAPRVGNRAFAEFLTVQTGGTLYRITHTNDIVPRLPPREFGYSHSSPEYWIKSGTLVPVTRNDIVKIEGIDATGGNNQPNIPDIPAHLWYFGLIGTC

SEQ ID NO: 11647 - protein, 268 aa, Thermomyces lanuginosus
EVSQDLFNQFNLFAQYSAAAYCGKENDAPAGTNITCTGNACPEVEKADATFLYSFEDSGVGDVTGFLALDNTNKLIVLSFRGSRSIENWIGNLNFDLKEINDICSGCRGHDGFTSSWRSVADTLRQKVEDAVREHPDYRVVFTGHSLGGALATVAGADLRGNGYDIDVFSYGAPRVGNRAFAEFLTVQTGGTLYRITHTNDIVPRLPPREFGYSHSSPEYWIKSGTLVPVTRNDIVKIEGIDATGGNNQPNIPDIPAHLWYFGLIGTC

SEQ ID NO: 11648 - protein, 268 aa, Thermomyces lanuginosus
EVSQDLFNQFNLFAQYSAAAYCGKNNDAPAGTNITCTGNACPEVEKADATFLYSFEDSGVGDVTGMLALDNTNKLIVLSFRGSRSIENWIGNLNFDLKEINDICSGCRGHDGFTSSWRSVADTLRQKVEDAVREHPDYRVVFTGHSLGGALATVAGADLRGNGYDIDVFSYGAPRVGNRAFAEFLTVQTGGTLYRITHTNDIVPRLPPREFGYSHSSPEYWIKSGTLVPVTRNDIVKIEGIDATGGNNQPNIPDIPAHLWYFGLIGTC

SEQ ID NO: 11649 - protein, 268 aa, Thermomyces lanuginosus
EVSQDLFNQFNLFAQYSAAAYCGKNNDAPAGTNITCTGNACPEVEKADATFLYSFEDSGVGDVTGFLALDNTNKLIVLSFRGSRSIENWIGNLNFDLKEINDICSGCRGHDGFTSSWRSVADTLRQKVEDAVREHPDYRVVFTGHSLGGALATVAGADLRGNGYDIDVFSYGAPRVGNRAFAEFLTVQTGGTLYRITHTNDIVPRLPPREFGYSHVSPEYWIKSGTLVPVTRNDIVKIEGIDATGGNNQPNIPDIPAHLWYFGLIGTC

SEQ ID NO: 11650 - protein, 268 aa, Thermomyces lanuginosus
EVSQDLFNQFNLFAQYSAAAYCGKNNTAPAGTNITCTGNACPEVEKADATFLYSFEDSGVGDVTGFLALDNTNKLIVLSFRGSRSIENWIGNLNFDLKEINDICSGCRGHDGFTSSWRSVADTLRQKVEDAVREHPDYRVVFTGHSLGGALATVAGADLRGNGYDIDVFSYGAPRVGNRAFAEFLTVQTGGTLYRITHTNDIVPRLPPREFGYSHSSPEYWIKSGTLVPVTRNDIVKIEGIDATGGNNQPNIPDIPAHLWYFGLIGTC

SEQ ID NO: 11651 - protein, 268 aa, Thermomyces lanuginosus
EVSQDLFNQFNLFAQYSAAAYCGKNNDAPAGTNITCTGNACPEVEKADATFLYSFEDRGVGDVTGFLALDNTNKLIVLSFRGSRSIENWIGNLNFDLKEINDICSGCRGHDGFTSSWRSVADTLRQKVEDAVREHPDYRVVFTGHSLGGALATVAGADLRGNGYDIDVFSYGAPRVGNRAFAEFLTVQTGGTLYRITHTNDIVPRLPPREFGYSHSSPEYWIKSGTLVPVTRNDIVKIEGIDATGGNNQPNIPDIPAHLWYFGLIGTC

SEQ ID NO: 11652 - protein, 268 aa, Thermomyces lanuginosus
EVSQDLFNQFNLFAQYSAAAYCGKNNDAPAGTNITCTGNACPEVEKADATFLYSFEDSGVGDVTGFLALDNTNKLIVLSFRGSRSIENWIGNLNFDLKEINDICSGCRGHDGFTSSWRSVADTLRQKVEDAVREHPDYRVVFTGHSLGGALATVAGADLRGNGYDIDVFSYGAPRVGNRAFAEFLTVQTGGTLYRITHTNDIVPRLPPREFGYSHSSPEYWIKSGTLVPVHRNDIVKIEGIDATGGNNQPNIPDIPAHLWYFGLIGTC

SEQ ID NO: 11653 - protein, 268 aa, Thermomyces lanuginosus
EVSQDLFNQFNLFAQYSAAAYCGKNLDAPAGTNITCTGNACPEVEKADATFLYSFEDSGVGDVTGFLALDNTNKLIVLSFRGSRSIENWIGNLNFDLKEINDICSGCRGHDGFTSSWRSVADTLRQKVEDAVREHPDYRVVFTGHSLGGALATVAGADLRGNGYDIDVFSYGAPRVGNRAFAEFLTVQTGGTLYRITHTNDIVPRLPPREFGYSHSSPEYWIKSGTLVPVTRNDIVKIEGIDATGGNNQPNIPDIPAHLWYFGLIGTC

SEQ ID NO: 11654 - protein, 268 aa, Thermomyces lanuginosus
EVSQDLFNQFNLFAQYSAAAYCGKNNDAPAGTNITCTGNACPEVEKADATFLYSFEDSGVGDVTGFLALDTTNKLIVLSFRGSRSIENWIGNLNFDLKEINDICSGCRGHDGFTSSWRSVADTLRQKVEDAVREHPDYRVVFTGHSLGGALATVAGADLRGNGYDIDVFSYGAPRVGNRAFAEFLTVQTGGTLYRITHTNDIVPRLPPREFGYSHSSPEYWIKSGTLVPVTRNDIVKIEGIDATGGNNQPNIPDIPAHLWYFGLIGTC

SEQ ID NO: 11655 - protein, 268 aa, Thermomyces lanuginosus
EVSQDLFNQFNLFAQYSAAAYCGKNNDAPAGTNITCTGNACPEVEKADATFLYSFEDSGVGDVTGFLALDNTNKLIVLSFRGSRSIENWIGNLNFDLKEINDICSGCRGHDGFTSSWRSVADTLRQKVEDAVREHPDYRVVFTGHSLGGALATVAGADLRGNGYDIDVFSYGAPRVGNRAFAEFLTVQTGGPLYRITHTNDIVPRLPPREFGYSHSSPEYWIKSGTLVPVTRNDIVKIEGIDATGGNNQPNIPDIPAHLWYFGLIGTC

SEQ ID NO: 11656 - protein, 268 aa, Thermomyces lanuginosus
EVSQDLFNQFNLFAQYSAAAYCGKNNDAPAGTNITCTGNACPEVEKADATFLYSFEDSGVGDVTGFLALDNTNKLIVLSFRGSRSIENWIANLNFDLKKINDICSGCRGHDGFTSSWRSVADTLRQKVEDAVREHPDYRVVFTGHSLGGALATVAGADLRGNGYDIDVFSYGAPRVGNRAFAEFLTVQTGGTLYRITHTNDIVPRLPPREFGYSHSSPEYWIKSGTLVPVRRRDIVKIEGIDATGGNNRPNIPDIPAHLWYFGLIGTC

SEQ ID NO: 11657 - protein, 268 aa, Thermomyces lanuginosus
EVSQDLFNQFNLFAQYSAAAYCGKNNDAPAGTNITCTGNACPEVEKADATFLYSFEDSGVGDVTGFLALDNTNKLIVLSFRGSRSIENWIGNLNFDLKEINDICSGCRGHDGFTSSWRSVADTLRQKVEDAVREHPDYRVVFTGHALGGALATVAGADLRGNGYDIDVFSYGAPRVGNRAFAEFLTVQTGGTLYRITHTNDIVPRLPPREFGYSHSSPEYWIKSGTLVPVTRNDIVKIEGIDATGGNNQPNIPDIPAHLWYFGLIGTC

SEQ ID NO: 11658 - protein, 269 aa, Thermomyces lanuginosus
EVSQDLFNQFNLFAQYSAAAYCGKNNDAPAGTNITCTGNACPEVEKADATFLYSFEDSGVGDVTGFLALDNTNKLIVLSFRGSRSIENWIGNLNFDLKEINDICSGCRGHDGFTSSWRSVADTLRQKVEDAVREHPDYRVVFTGHSLGGALATVAGADLRGNGYDIDVFSYGAPRVGNRAFAEFLTVQTGGTLYRITHTNDIVPRLPPREFGYSHSSPEYWIKSGTLVPVTRRDIVKIEGIDARTGGNNQPNIPDIPAHLWYFGLIGTC

SEQ ID NO: 11659 - protein, 269 aa, Thermomyces lanuginosus
EVSQDLFNQFNLFAQYSAAAYCGKNNDAPAGTNITCTGNACPEVEKADATFLYSFEDSGVGDVTGFLALDNTNKLIVLSFRGSRSIENWIGNLNFDLKEINDICSGCRGHDGFTSSWRSVADTLRQKVEDAVREHPDYRVVFTGHSLGGALATVAGADLRGNGYDIDVFSYGAPRVGNRAFAEFLTVQTGGTLYRITHTNDIVPRLPPREFGYSHSSPEYWIKSGTLVPVTRNDIVKIEGIDATGGNNQPNIPIIPAHLWYFDLNEGSC

SEQ ID NO: 11660 - protein, 269 aa, Thermomyces lanuginosus
EVSQDLFNQFNLFAQYSAAAYCGKNNDAPAGTNITCTGNACPEVEKADATFLYSFEDSGVGDVTGFLALDNTNKLIVLSFRGSRSIENWIGNLNFDLKEINDICSGCRGHDGFTSSWRSVADTLRQKVEDAVREHPDYRVVFTGHSLGGALATVAGADLRGNGYDIDVFSYGAPRVGNRAFAEFLTVQTGGTLYRITHTNDIVPRLPPREFGYSHSSPEYWIKSGTLVRVTRRNDIVKIEGIDATGGNNQPNIPDIPAHLWYFGLIGTC

SEQ ID NO: 11661 - protein, 269 aa, Thermomyces lanuginosus
EVSQDLFNQFNLFAQYSAAAYCGKNNDAPAGTNITCTGNACPEVEKADATFLYSFEDSGVGDVTGFLALDNTNKLIVLSFRGSRSIENWIGNLNFDLKEINDICRRGCRGHDGFTSSWRSVADTLRQKVEDAVREHPDYRVVFTGHSLGGALATVAGADLRGNGYDIDVFSYGAPRVGNRAFAEFLTVQTGGTLYRITHTNDIVPRLPPREFGYSHSSPEYWIKSGTLVPVTRNDIVKIEGIDATGGNNQPNIPDIPAHLWYFGLIGTC

SEQ ID NO: 11662 - protein, 269 aa, Thermomyces lanuginosus
EVSQDLFNQFNLFAQYSAAAYCGKNNDAPAGTNITCTGNACPEVEKADATFLYSFEDSGVGDVTGFLALDNTNKLIVLSFRGSRSIENWIGNLNFDLKEINDICSGCRGHDGFTSSWRSVADTLRQKVEDAVREHPDYRVVFTGHSLGGALATVAGADLRGNGYDIDVFSYGAPRVGNRAFAEFLTVQTGGTLYRITHTNDIVPRLPPREFGYSHSSPEYWIKRGTLVRPVTRNDIVKIEGIDATGGNNQPNIPDIPAHLWYFGLIGTC

SEQ ID NO: 11663 - protein, 270 aa, Thermomyces lanuginosus
EVSQDLFNQFNLFAQYSAAAYCGKNNDAPAGTNITCTGNACPEVEKADATFLYSFEDSGVGDVTGFLALDNTNKLIVLSFRGSRSIENWIGNLNFDLKEINDICSGCRGHDGFTSSWRSVADTLRQKVEDAVREHPDYRVVFTGHSLGGALATVAGADLRGNGYDIDVFSYGAPRVGNRAFAEFLTVQTGGTLYRITHTNDIVPRLPPREFGYSHSSPEYWIKSGTLVPRVRTRNDIVKIEGIDATGGNNQPNIPDIPAHLWYFGLIGTC

SEQ ID NO: 11664 - protein, 268 aa, Thermomyces lanuginosus; identical to SEQ ID NO: 7501

SEQ ID NO: 11665 - protein, 268 aa, Thermomyces lanuginosus; identical to SEQ ID NO: 7502

SEQ ID NO: 11666 - protein, 268 aa, Thermomyces lanuginosus
EVSQDLFNQFNLFAQYSAAAYCGKNNDAPAGTNITCTGNACPEVEKADATFLYSFEDSGVGDVTGFLALDNTNKLIVLSFRGSRSIENWIGNLNFDLKEINDICSGCRGHDGFTSSWRSVADTLRQKVEDAVREHPDYRVVFTGHSLGGALATVAGADLRGNGYDIDVFSYGAPRVGNRAFAEFLTVQTGGTLYRITHTNDIVPRLPPREFGYSHSSPEYWIKSGTLVPVTRNDIVKIEGIDATGGNNQRNIPDIPAHLWYFGLIGTC

SEQ ID NO: 11667 - protein, 268 aa, Thermomyces lanuginosus
EVSQDLFNQFNLFAQYSAAAYCGKNNDAPAGTNITCTGFACPEVEKADATFLYSFEDSGVGDVTGFLALDNTNKLIVLSFRGSRSIENWIGNLNFDLKEINDICSGCRGHDGFTSSWRSVADTLRQKVEDAVREHPDYRVVFTGHSLGGALATVAGADLRGNGYDIDVFSYGAPRVGNRAFAEFLTVQTGGTLYRITHTNDIVPRLPPREFGYSHSSPEYWIKSGTLVPVTRNDIVKIEGIDATGGNNQPNIPDIPAHLWYFGLIGTC

SEQ ID NO: 11668 - protein, 268 aa, Thermomyces lanuginosus
EVSQDLFNQFNLFAQYSAAAYCGKNNDAPAGTNITCGGNACPEVEKADATFLYSFEDSGVGDVTGFLALDNTNKLIVLSFRGSRSIENWIGNLNFDLKEINDICSGCRGHDGFTSSWRSVADTLRQKVEDAVREHPDYRVVFTGHSLGGALATVAGADLRGNGYDIDVFSYGAPRVGNRAFAEFLTVQTGGTLYRITHTNDIVPRLPPREFGYSHSSPEYWIKSGTLVPVTRNDIVKIEGIDATGGNNQPNIPDIPAHLWYFGLIGTC

SEQ ID NO: 11669 - protein, 268 aa, Synthetic construct
EVSQDLFNQFNLFAQYSAAAYCGKNNDAPAGTNITCTGNACPEVEKADATFLYSFEDSGVGDVTGFLALDNTNKLIVLSFRGSRSIENWIGNLNFDLKEINDICSGCRGHDGFTSSWRSVADTLRQKVEDAVREHPDYRVVFTGHSLGGALATVAGADLRGNGYDIDVFSYGAPRVGNRAFAEFLTVQTGGTLYRITHTNDIVPRMPPREFGYSHSSPEYWIKSGTLVPVTRNDIVKIEGIDATGGNNQPNIPDIPAHLWYFGLIGTC

SEQ ID NO: 11670 - protein, 268 aa, Thermomyces lanuginosus
EVSQDLFNQFNLFAQYSAAAYCGKNNDAPAGTNITCTGNACPEVEKADATFLYSFEDSGVGDVTGFLALDNTNKLIVLSFRGSRSIENWTGNLNFDLKEINDICSGCRGHDGFTSSWRSVADTLRQKVEDAVREHPDYRVVFTGHSLGGALATVAGADLRGNGYDIDVFSYGAPRVGNRAFAEFLTVQTGGTLYRITHTNDIVPRLPPREFGYSHSSPEYWIKSGTLVPVTRNDIVKIEGIDATGGNNQPNIPDIPAHLWYFGLIGTC

SEQ ID NO: 11671 - protein, 268 aa, Thermomyces lanuginosus
EVSQDLFNQFNLFAQYSAAAYCGKNNDAPAGTNITCTGYACPEVEKADATFLYSFEDSGVGDVTGFLALDNTNKLIVLSFRGSRSIENWIGNLNFDLKEINDICSGCRGHDGFTSSWRSVADTLRQKVEDAVREHPDYRVVFTGHSLGGALATVAGADLRGNGYDIDVFSYGAPRVGNRAFAEFLTVQTGGTLYRITHTNDIVPRLPPREFGYSHSSPEYWIKSGTLVPVTRNDIVKIEGIDATGGNNQPNIPDIPAHLWYFGLIGTC

SEQ ID NO: 11672 - protein, 268 aa, Thermomyces lanuginosus
EVSQDLFNQFNLFAQYSAAAYCGKNNDAPAGTNITCTGNACPEVEKADATFLYSFEDSGVGDVTGFLALDNTNKLIVLSFRGSRSIENWIGNLNFDLKEINDICSGCRGHDGFTSSWRSVADTLRQKVEDAVREHPDYRVVFSGHSLGGALATVAGADLRGNGYDIDVFSYGAPRVGNRAFAEFLTVQTGGTLYRITHTNDIVPRLPPREFGYSHSSPEYWIKSGTLVPVTRNDIVKIEGIDATGGNNQPNIPDIPAHLWYFGLIGTC

SEQ ID NO: 11673 - protein, 268 aa, Thermomyces lanuginosus
EVSQDLFNQFNLFAQYSAAAYCGKNNDAPAGTNITCTGNACPEVEKADATFLYSFEDSGVGDVTGFLALDNTNKLIVLSFRGSRSIENWIGNLNFDLKEINDICSGCRGHDGFTSSWRSVADTLRQKVEDAVREHPDYRVVFTGHSLGGALATVAGADLRGNGYDIDVFSYGAPRVGNRAFAEFLTVQTGGTLYRITHTNDIVPRTPPREFGYSHSSPEYWIKSGTLVPVTRNDIVKIEGIDATGGNNQPNIPDIPAHLWYFGLIGTC

SEQ ID NO: 11674 - protein, 268 aa, Thermomyces lanuginosus
EVSQDLFNQFNLFAQYSAAAYCGKNNDAPAGTNITCTGNACPEVEKADATFLYSFEDSGVGDVTGFLALDNTNKLIVLSFRGSRSIENWIGNLNFDLKEINAICSGCRGHDGFTSSWRSVADTLRQKVEDAVREHPDYRVVFTGHSLGGALATVAGADLRGNGYDIDVFSYGAPRVGNRAFAEFLTVQTGGTLYRITHTNDIVPRLPPREFGYSHSSPEYWIKSGTLVPVTRNDIVKIEGIDATGGNNQPNIPDIPAHLWYFGLIGTC

SEQ ID NO: 11675 - protein, 268 aa, Thermomyces lanuginosus
EVSQDLFNQFNLFAQYSAAAYCGKNNDAPAGTNITCRGNACPEVEKADATFLYSFEDSGVGDVTGFLALDNTNKLIVLSFRGSRSIENWIGNLNFDLKEINDICSGCRGHDGFTSSWRSVADTLRQKVEDAVREHPDYRVVFTGHSLGGALATVAGADLRGNGYDIDVFSYGAPRVGNRAFAEFLTVQTGGTLYRITHTNDIVPRLPPREFGYSHSSPEYWIKSGTLVPVTRNDIVKIEGIDATGGNNQPNIPDIPAHLWYFGLIGTC

SEQ ID NO: 11676 - protein, 268 aa, Thermomyces lanuginosus
EVSQDLFNQFNLFAQYSAAAYCGKNNDAPAGTNITCTGNACPEVEKADATFLYSFEDSGVGDVTGFLALDNTNKLIVLSFRGSRSIENWIGNLNFDLIEINDICSGCRGHDGFTSSWRSVADTLRQKVEDAVREHPDYRVVFTGHSLGGALATVAGADLRGNGYDIDVFSYGAPRVGNRAFAEFLTVQTGGTLYRITHTNDIVPRLPPREFGYSHSSPEYWIKSGTLVPVTRNDIVKIEGIDATGGNNQPNIPDIPAHLWYFGLIGTC

SEQ ID NO: 11677 - protein, 268 aa, Synthetic construct
EVSQDLFNQFNLFAQYSAAAYCGKNNDAPAGTNITCTGNACPEVEKADATFLYSFEDSGVGDVTGFLALDNTNKLIVLSFRGSRSIENWIGNLNFDLKEINDICSGCRGHDGFTSSWRSVADTLRQKVEDAVREHPDYRVVFTGHSLGGALATVAGADLRGNGYDIDVFSYGAPRVGNRAFAEFLTVQTGGTLYRITHTNDIVPRLPPREFGYSHSSPEYWIKSGTLVPVTRNDIVKIEGIDATGGNNQPNIPDIPAHIWYFGLIGTC

SEQ ID NO: 11678 - protein, 268 aa, Thermomyces lanuginosus
EVSQDLFNQFNLFAQYSAAAYCGKNNDAPAGTNITCTGVACPEVEKADATFLYSFEDSGVGDVTGFLALDNTNKLIVLSFRGSRSIENWIGNLNFDLKEINDICSGCRGHDGFTSSWRSVADTLRQKVEDAVREHPDYRVVFTGHSLGGALATVAGADLRGNGYDIDVFSYGAPRVGNRAFAEFLTVQTGGTLYRITHTNDIVPRLPPREFGYSHSSPEYWIKSGTLVPVTRNDIVKIEGIDATGGNNQPNIPDIPAHLWYFGLIGTC

SEQ ID NO: 11679 - protein, 268 aa, Synthetic construct
EVSQDLFNQFNLFAQYSAAAYCGKNNDAPAGTNITCTGNACPEVEKADATFLYSFEDSGVGDVTGFLALDNTNKLIVLSFRGSRSIENWIGNLNFDLKEINDICSGCRGHDGFTSSWRSVADTLRQKVEDAVREHPDYRVVFTGHSLGGALATVAGADLRGNGYDIDVFSYGAPRVGNRAFAEFLTVQTGGTLYRITHTNDIVPREPPREFGYSHSSPEYWIKSGTLVPVTRNDIVKIEGIDATGGNNQPNIPDIPAHLWYFGLIGTC

SEQ ID NO: 11680 - protein, 268 aa, Synthetic construct
EVSQDLFNQFNLFAQYSAAAYCGKNNDAPAGTNITCTGNACPEVEKADATFLYSFEDSGVGDVTGFLALDNTNKLIVLSFRGSRSIENWIGNLNFDLKEINDICSGCRGHDGFTSSWRSVADTLRQKVEDAVREHPDYRVVFTGHSLGGALATVAGADLRGNGYDIDVFSYGAPRVGNRAFAEFLTVQTGGTLYRITHTNDIVPRYPPREFGYSHSSPEYWIKSGTLVPVTRNDIVKIEGIDATGGNNQPNIPDIPAHLWYFGLIGTC

SEQ ID NO: 11681 - protein, 268 aa, Thermomyces lanuginosus
EVSQDLFNQFNLFAQYSAAAYCGKNNDAPAGTNITCTGMACPEVEKADATFLYSFEDSGVGDVTGFLALDNTNKLIVLSFRGSRSIENWIGNLNFDLKEINDICSGCRGHDGFTSSWRSVADTLRQKVEDAVREHPDYRVVFTGHSLGGALATVAGADLRGNGYDIDVFSYGAPRVGNRAFAEFLTVQTGGTLYRITHTNDIVPRLPPREFGYSHSSPEYWIKSGTLVPVTRNDIVKIEGIDATGGNNQPNIPDIPAHLWYFGLIGTC

SEQ ID NO: 11682 - protein, 268 aa, Thermomyces lanuginosus
EVSQDLFNQFNLFAQYSAAAYCGKNNDAPAGTNITCTGNACPEVEKADATFLYSFEDSGVGDVTGFLALDNTNKLIVLSFRGSRSIENWIGNLNFDLKEINDICSGCRGHDGFTSSWRSVADTLRQKVEDAVREHPDYRVVFTGHSLGGALATVAGADLRGNGYAIDVFSYGAPRVGNRAFAEFLTVQTGGTLYRITHTNDIVPRLPPREFGYSHSSPEYWIKSGTLVPVTRNDIVKIEGIDATGGNNQPNIPDIPAHLWYFGLIGTC

SEQ ID NO: 11683 - protein, 268 aa, Thermomyces lanuginosus
EVSQDLFNQFNLFAQYSAAAYCGKNNDAPAGTNITCTGPACPEVEKADATFLYSFEDSGVGDVTGFLALDNTNKLIVLSFRGSRSIENWIGNLNFDLKEINDICSGCRGHDGFTSSWRSVADTLRQKVEDAVREHPDYRVVFTGHSLGGALATVAGADLRGNGYDIDVFSYGAPRVGNRAFAEFLTVQTGGTLYRITHTNDIVPRLPPREFGYSHSSPEYWIKSGTLVPVTRNDIVKIEGIDATGGNNQPNIPDIPAHLWYFGLIGTC

SEQ ID NO: 11684 - protein, 268 aa, Synthetic construct
EVSQDLFNQFNLFAQYSAAAYCGKNNDAPAGTNITCTGNACPEVEKADATFLYSFWDSGVGDVTGFLALDNTNKLIVLSFRGSRSIENWIGNLNFDLKEINDICSGCRGHDGFTSSWRSVADTLRQKVEDAVREHPDYRVVFTGHSLGGALATVAGADLRGNGYDIDVFSYGAPRVGNRAFAEFLTVQTGGTLYRITHTNDIVPRLPPREFGYSHSSPEYWIKSGTLVPVTRNDIVKIEGIDATGGNNQPNIPDIPAHLWYFGLIGTC

SEQ ID NO: 11685 - protein, 268 aa, Synthetic construct
EVSQDLFNQFNLFAQYSAAAYCGKNNDAPAGTNITCTGNACPEVEKADATFLYSFEDSGVGDVTGFLALDNTNKLIVLSFRGSRSIENWIGNLNFDLKEINDICSGCRGHDGFTSSWRSVADTLRQKVEDAVREHPDYRVVFTGHSLGGALATVAGADLRGNGYDIDVFSYGAPRVGNRAFAEFLTVQTGGTLYRITHTNDIVPRLPPREFGYSHSSPEYWIKSGTLVPVTRNDIVKIEGIDATGGNNQPNIPDIPAHHWYFGLIGTC

SEQ ID NO: 11686 - protein, 268 aa, Thermomyces lanuginosus
EVSQDLFNQFNLFAQYSAAAYCGKNNDAPAGTNITCTGQACPEVEKADATFLYSFEDSGVGDVTGFLALDNTNKLIVLSFRGSRSIENWIGNLNFDLKEINDICSGCRGHDGFTSSWRSVADTLRQKVEDAVREHPDYRVVFTGHSLGGALATVAGADLRGNGYDIDVFSYGAPRVGNRAFAEFLTVQTGGTLYRITHTNDIVPRLPPREFGYSHSSPEYWIKSGTLVPVTRNDIVKIEGIDATGGNNQPNIPDIPAHLWYFGLIGTC

SEQ ID NO: 11687 - protein, 268 aa, Thermomyces lanuginosus
EVSQDLFNQFNLFAQYSAAAYCGKNNDAPAGTNITCTGNACPEVEKADATFLYSFEDSGVGDVTGFLALDNTNKLIVLSFRGSRSIENWIGNLNFDLKEINDICSGCRGHDGFTSSWRSVADTLRQKVEDAVREHPDYRVVFTGHSLGGALATVAGADLRGNGYDIDVFSYGAPRVGNRAFAEFLTVQTGGTLYRITHTNDIVPRLPPREFGYSHSSPEYWIKSGTLVPVTRNDIVKIEGIDATGGNNQPNIPYIPAHLWYFGLIGTC

SEQ ID NO: 11688 - protein, 268 aa, Thermomyces lanuginosus
EVSQDLFNQFNLFAQYSAAAYCGKNNDAPAGTNITCTGNACPEVEKADATFLYSFEDAGVGDVTGFLALDNTNKLIVLSFRGSRSIENWIGNLNFDLKEINDICSGCRGHDGFTSSWRSVADTLRQKVEDAVREHPDYRVVFTGHSLGGALATVAGADLRGNGYDIDVFSYGAPRVGNRAFAEFLTVQTGGTLYRITHTNDIVPRLPPREFGYSHSSPEYWIKSGTLVPVTRNDIVKIEGIDATGGNNQPNIPDIPAHLWYFGLIGTC

SEQ ID NO: 11689 - protein, 268 aa, Synthetic construct
EVSQDLFNQFNLFAQYSAAAYCGKNNDAPAGTNITCTGNACPEVEKADATFLYSFEDSGVGDVTGFLALDNTNKLIVLSFRGSRSIENWIGNLNFDLKEINDICSGCRGHDGFTSSWRSVADTLRQKVEDAVREHPDYRVVFTGHSLGGALATVAGADLRGNGYDIDVFSYGAPRVGNRAFAEFLTVQTGGTLYRITHTNDIVPRLPPREFGYSHSSPEYWIKSGTLVPVTRNDIVKIEGIDATGGNNQPNIPDIPAHFWYFGLIGTC

SEQ ID NO: 11690 - protein, 268 aa, Thermomyces lanuginosus
EVSQDLFNQFNLFAQYSAAAYCGKNNDAPAGTNITCTGNACPEVEKADATFLYSFEDSGVGDVTGFLALDNTNKLIVLSFRGSRSIENWIGNLNFDLKEINDICSGCRGHDGFTSSWRSVADTLRQKVEDAVREHPDYRVVFTGHSLGGALATVAGADLRGNGYDIDVFSYGAPRVGNRAFAEFLTVQTGGTLYRITHTNDIVPRLPPREFGYSHSSPEYWIKSGTLVPVTRNDIVKIEGIDATGGNNQPNIPDIPAHTWYFGLIGTC

SEQ ID NO: 11691 - protein, 268 aa, Synthetic construct
EVSQDLFNQFNLFAQYSAAAYCGKNNDAPAGTNITCTGNACPEVEKADATFLYSFEDSGVGDVTGFLALDNTNKLIVLSFRGSRSIENWIGNLNFDLKEINDICSGCRGHDGFTSSWRSVADTLRQKVEDAVREHPDYRVVFTGHSLGGALATVAGADLRGNGYDIDVFSYGAPRVGNRAFAEFLTVQTGGTLYRITHTNDIVPRKPPREFGYSHSSPEYWIKSGTLVPVTRNDIVKIEGIDATGGNNQPNIPDIPAHLWYFGLIGTC

SEQ ID NO: 11692 - protein, 268 aa, Thermomyces lanuginosus
EVSQDLFNQFNLFAQYSAAAYCGKNNDAPAGTNITCTGNACPEVEKADATFLYSFEDSGVGDVTGFLALDNTNKLIVLSFRGSRSIENWIGNLNFDLKEINDICSGCRGHDGFTSSWRSVADTLRQKVEDAVREHPDYRVVFTGHSLGGALATVAGADLRGNGYDIDVFSYGAPRVGNRAFAEFLTVQTGGTLYRITHTNDIVPRLPPREFGYSHSSPEYWIKSGTLVPVTRNDIVKIEGIDATGGNNQPNIPDIKAHLWYFGLIGTC

SEQ ID NO: 11693 - protein, 268 aa, Thermomyces lanuginosus
EVSQDLFNQFNLFAQYSAAAYCGKNNDAPAGTNITCTGGACPEVEKADATFLYSFEDSGVGDVTGFLALDNTNKLIVLSFRGSRSIENWIGNLNFDLKEINDICSGCRGHDGFTSSWRSVADTLRQKVEDAVREHPDYRVVFTGHSLGGALATVAGADLRGNGYDIDVFSYGAPRVGNRAFAEFLTVQTGGTLYRITHTNDIVPRLPPREFGYSHSSPEYWIKSGTLVPVTRNDIVKIEGIDATGGNNQPNIPDIPAHLWYFGLIGTC

SEQ ID NO: 11694 - protein, 268 aa, Synthetic construct
EVSQDLFNQFNLFAQYSAAAYCGKNNDAPAGTNITCTGNACPEVEKADATFLYSFEDSGVGDVTGFLALDNTNKLIVLSFRGSRSIENWIGNLNFDLKEINDICSGCRGHDGFTSSWRSVADTLRQKVEDAVREHPDYRVVFTGHSLGGALATVAGADLRGNGYDIDVFSYGAPRVGNRAFAEFLTVQTGGTLYRITHTNDIVPRFPPREFGYSHSSPEYWIKSGTLVPVTRNDIVKIEGIDATGGNNQPNIPDIPAHLWYFGLIGTC

SEQ ID NO: 11695 - protein, 268 aa, Thermomyces lanuginosus
EVSQDLFNQFNLFAQYSAAAYCGKNNDAPAGTNITCTGNACPEVEKADATFLYSFEDSGVGDVTGFLALDNTNKLIVLSFRGSRSIENWIGNLNFDLKEINDICSGCRGHDGFTSSWRSVADTLRQKVEDAVREHPDYRVVFTGHSLGGALATVAGADLRGNKYDIDVFSYGAPRVGNRAFAEFLTVQTGGTLYRITHTNDIVPRLPPREFGYSHSSPEYWIKSGTLVPVTRNDIVKIEGIDATGGNNQPNIPDIPAHLWYFGLIGTC

SEQ ID NO: 11696 - protein, 268 aa, Thermomyces lanuginosus
EVSQDLFNQFNLFAQYSAAAYCGKNNDAPAGTNITCAGNACPEVEKADATFLYSFEDSGVGDVTGFLALDNTNKLIVLSFRGSRSIENWIGNLNFDLKEINDICSGCRGHDGFTSSWRSVADTLRQKVEDAVREHPDYRVVFTGHSLGGALATVAGADLRGNGYDIDVFSYGAPRVGNRAFAEFLTVQTGGTLYRITHTNDIVPRLPPREFGYSHSSPEYWIKSGTLVPVTRNDIVKIEGIDATGGNNQPNIPDIPAHLWYFGLIGTC

SEQ ID NO: 11697 - protein, 268 aa, Thermomyces lanuginosus
EVSQDLFNQFNLFAQYSAAAYCGKNNDAPAGTNITCVGNACPEVEKADATFLYSFEDSGVGDVTGFLALDNTNKLIVLSFRGSRSIENWIGNLNFDLKEINDICSGCRGHDGFTSSWRSVADTLRQKVEDAVREHPDYRVVFTGHSLGGALATVAGADLRGNGYDIDVFSYGAPRVGNRAFAEFLTVQTGGTLYRITHTNDIVPRLPPREFGYSHSSPEYWIKSGTLVPVTRNDIVKIEGIDATGGNNQPNIPDIPAHLWYFGLIGTC

SEQ ID NO: 11698 - protein, 268 aa, Synthetic construct
EVSQDLFNQFNLFAQYSAAAYCGKNNDAPAGTNITCTGNACPEVEKADATFLYSFEDSGVGDVTGFLALDNTNKLIVLSFRGSRSIENWIGNLNFDLKEINDICSGCRGHDGFTSSWRSVADTLRQKVEDAVREHPDYRVVFTGHSLGGALATVAGADLRGNGYDIDVFSYGAPRVGNRAFAEFLTVQTGGTLYRITHTNDIVPRHPPREFGYSHSSPEYWIKSGTLVPVTRNDIVKIEGIDATGGNNQPNIPDIPAHLWYFGLIGTC

SEQ ID NO: 11699 - protein, 268 aa, Synthetic construct
EVSQDLFNQFNLFAQYSAAAYCGKNNDAPAGTNITCTGNACPEVEKADATFLYSFEDSGVGDVTGFLALDNTNKLIVLSFRGSRSIENWIGNLNFDLKEINDICSGCRGHDGFTSSWRSVADTLRQKVEDAVREHPDYRVVFTGHSLGGALATVAGADLRGNGYDIDVFSYGAPRVGNRAFAEFLTVQTGGTLYRITHTNDIVPRLPPREFGYSHSSPEYWIKSGTLVPVTRNDIVKIEGIDATGGNNQPNIPDIPAHMWYFGLIGTC

SEQ ID NO: 11700 - protein, 268 aa, Thermomyces lanuginosus
EVSQDLFNQFNLFAQYSAAAYCGKNNDAPAGTNITCTGDACPEVEKADATFLYSFEDSGVGDVTGFLALDNTNKLIVLSFRGSRSIENWIGNLNFDLKEINDICSGCRGHDGFTSSWRSVADTLRQKVEDAVREHPDYRVVFTGHSLGGALATVAGADLRGNGYDIDVFSYGAPRVGNRAFAEFLTVQTGGTLYRITHTNDIVPRLPPREFGYSHSSPEYWIKSGTLVPVTRNDIVKIEGIDATGGNNQPNIPDIPAHLWYFGLIGTC

SEQ ID NO: 11701 - protein, 268 aa, Thermomyces lanuginosus
EVSQDLFNQFNLFAQYSAAAYCGKNNDAPAGTNITCTGNACPEVEKADATFLYSFEDSGVGDVTGFLALDNTNKLIVLSFRGSRSIENWIGNLNFDLKEINDICSGCRGHDGFTSSWRSVADTLRQKVEDAVREHPDYRVVFTGHSLGGALATVAGADLRGNGYDIDVFSYGAPRVGNRAFAEFLTVQTGGTLYRITHTNDIVPRLPPREFGYSHSSPEYWIKSGTLVPVTRNDIVKIEGIDATGGNNQPNIPDTPAHLWYFGLIGTC

SEQ ID NO: 11702 - protein, 268 aa, Thermomyces lanuginosus
EVSQDLFNQFNLFAQYSAAAYCGKNNDAPAGTNITCTGEACPEVEKADATFLYSFEDSGVGDVTGFLALDNTNKLIVLSFRGSRSIENWIGNLNFDLKEINDICSGCRGHDGFTSSWRSVADTLRQKVEDAVREHPDYRVVFTGHSLGGALATVAGADLRGNGYDIDVFSYGAPRVGNRAFAEFLTVQTGGTLYRITHTNDIVPRLPPREFGYSHSSPEYWIKSGTLVPVTRNDIVKIEGIDATGGNNQPNIPDIPAHLWYFGLIGTC

SEQ ID NO: 11703 - protein, 268 aa, Thermomyces lanuginosus
EVSQDLFNQFNLFAQYSAAAYCGKNNDAPAGTNITCTGNACPEVEKADATFLYSFEDSGVGDVTGFLALDNTNKLIVLSFRGSRSIENWISNLNFVLKEINDICSGCRGHDGFTSSWRSVADTLRQKVEDAVREHPDYRVVFTGHSLGGALATVAGADLRGNGYDIDVFSYGAPRVGNRAFAEFLTVQTGGTLYRITHTNDIVPRLPPREFGYSHSSPEYWIKSGTLVPVTRNDIVKIEGIDATGGNNQPNIPRIPAHLWYFGLIGTC

SEQ ID NO: 11704 - protein, 268 aa, Thermomyces lanuginosus
EVSQDLFNQFNLFAQYSAAAYCGKNNDAPAGTNITCTGNACPEVEKADATFLYSFEDSGVGDVTGFLALDNTNKLIVLSFRGSRSIENWIGNLNFDLKEINDICSGCRGHDGFTSSWRSVADTLRQKVEDAVREHPDYRVVFTGHSLGGALATVAGAFLRGNGYDIDVFSYGAPRVGNRAFAEFLTVQTGGTLYRITHTNDIVPRLPPREFGYSHSSPEYWIKSGTLVPVTRNDIVKIEGIDATGGNNQPNIPDIPAHLWYFGLIGTC

SEQ ID NO: 11705 - protein, 268 aa, Thermomyces lanuginosus
EVSQDLFNQFNLFAQYSAAAYCGKNNDAPAGTNITCSGNACPEVEKADATFLYSFEDSGVGDVTGFLALDNTNKLIVLSFRGSRSIENWIGNLNFDLKEINDICSGCRGHDGFTSSWRSVADTLRQKVEDAVREHPDYRVVFTGHSLGGALATVAGADLRGNGYDIDVFSYGAPRVGNRAFAEFLTVQTGGTLYRITHTNDIVPRLPPREFGYSHSSPEYWIKSGTLVPVTRNDIVKIEGIDATGGNNQPNIPDIPAHLWYFGLIGTC

SEQ ID NO: 11706 - protein, 268 aa, Synthetic construct
EVSQDLFNQFNLFAQYSAAAYCGKNNDAPAGTNITCTGNACPEVEKADATFLYSFGDSGVGDVTGFLALDNTNKLIVLSFRGSRSIENWIGNLNFDLKEINDICSGCRGHDGFTSSWRSVADTLRQKVEDAVREHPDYRVVFTGHSLGGALATVAGADLRGNGYDIDVFSYGAPRVGNRAFAEFLTVQTGGTLYRITHTNDIVPRLPPREFGYSHSSPEYWIKSGTLVPVTRNDIVKIEGIDATGGNNQPNIPDIPAHLWYFGLIGTC

SEQ ID NO: 11707 - protein, 268 aa, Thermomyces lanuginosus
EVSQDLFNQFNLFAQYSAAAYCGKNNDAPAGTNITCTGNACPEVEKADATFLYSFEDSGVGDVTGFLALDNTNKLIVLSFRGSRSIENWIGNLNFKLKEINDICSGCRGHDGFTSSWRSVADTLRQKVEDAVREHPDYRVVFTGHSLGGALATVAGADLRGNGYDIDVFSYGAPRVGNRAFAEFLTVQTGGTLYRITHTNDIVPRLPPREFGYRHSSPEYWIKSGTLVPVTRNDIVKIEGIDATGGNNQPNIPDIPAHLWYFGLIGTC

SEQ ID NO: 11708 - protein, 268 aa, Synthetic construct
EVSQDLFNQFNLFAQYSAAAYCGKNNDAPAGTNITCTGNACPEVEKADATFLYSFCDSGVGDVTGFLALDNTNKLIVLSFRGSRSIENWIGNLNFDLKEINDICSGCRGHDGFTSSWRSVADTLRQKVEDAVREHPDYRVVFTGHSLGGALATVAGADLRGNGYDIDVFSYGAPRVGNRAFAEFLTVQTGGTLYRITHTNDIVPRLPPREFGYSHSSPEYWIKSGTLVPVTRNDIVKIEGIDATGGNNQPNIPDIPAHLWYFGLIGTC

SEQ ID NO: 11709 - protein, 268 aa, Synthetic construct
EVSQDLFNQFNLFAQYSAAAYCGKNNDAPAGTNITCTGNACPEVEKADATFLYSFEDSGVGDVTGFLALDNTNKLIVLSFRGSRSIENWIGNLNFLLKEINDICSGCRGHDGFTSSWRSVADTLRQKVEDAVREHPDYRVVFTGHSLGGALATVAGADLRGNGYDIDVFSYGAPRVGNRAFAEFLTVQTGGTLYRITHTNDIVPRVPPREFGYSHSSPEYWIKSGTLVPVTRNDIVKIEGIDATGGNNQPNIPDIPAHLWYFGLIGTC

SEQ ID NO: 11710 - protein, 268 aa, Synthetic construct
EVSQDLFNQFNLFAQYSAAAYCGKNNDAPAGTNITCTGNACPEVEKADATFLYSFEDSGVGDVTGFLALDNTNKLIVLSFRGSRSIENWIGNLNFDLKEINDICSGCRGHDGFTSSWRSVADTLRQKVEDAVREHPDYRVVFTGHSLGGALATVAGADLRGNGYDIDVFSYGAPRVGNRAFAEFLTVQTGGTLYRITHTNDIVPRRPPREFGYSHSSPEYWIKSGTLVPVTRNDIVKIEGIDATGGNNQPNIPDIPAHLWYFGLIGTC

SEQ ID NO: 11711 - protein, 268 aa, Synthetic construct
EVSQDLFNQFNLFAQYSAAAYCGKNNDAPAGTNITCTGNACPEVEKADATFLYSFEDSGVGDVTGFLALDNTNKLIVLSFRGSRSIENWIGNLNFDLKEINDICSGCRGHDGFTSSWRSVADTLRQKVEDAVREHPDYRVVFTGHSLGGALATVAGADLRGNGYDIDVFSYGAPRVGNRAFAEFLTVQTGGTLYRITHTNDIVPRWPPREFGYSHSSPEYWIKSGTLVPVTRNDIVKIEGIDATGGNNQPNIPDIPAHLWYFGLIGTC

SEQ ID NO: 11712 - protein, 268 aa, Synthetic construct
EVSQDLFNQFNLFAQYSAAAYCGKNNDAPAGTNITCTGNACPEVEKADATFLYSFEDSGVGDVTGFLALDNTNKLIVLSFRGSRSIENWIGNLNFDLKEINDICSGCRGHDGFTSSWRSVADTLRQKVEDAVREHPDYRVVFTGHSLGGALATVAGADLRGNGYDIDVFSYGAPRVGNRAFAEFLTVQTGGTLYRITHTNDIVPRLPPREFGYSHSSPEYWIKSGTLVPVTRNDIVKIEGIDATGGNNQPNIPDIPAHWWYFGLIGTC

SEQ ID NO: 11713 - protein, 268 aa, Synthetic construct
EVSQDLFNQFNLFAQYSAAAYCGKNNDAPAGTNITCTGNACPEVEKADATFLYSFEDSGVGDVTGFLALDNTNKLIVLSFRGSRSIENWIGNLNFDLKEINDICSGCRGHDGFTSSWRSVADTLRQKVEDAVREHPDYRVVFTGHSLGGALATVAGADLRGNGYDIDVFSYGAPRVGNRAFAEFLTVQTGGTLYRITHTNDIVPRNPPREFGYSHSSPEYWIKSGTLVPVTRNDIVKIEGIDATGGNNQPNIPDIPAHLWYFGLIGTC

SEQ ID NO: 11714 - protein, 268 aa, Thermomyces lanuginosus
EVSQDLFNQFNLFAQYSAAAYCGKNNDAPAGTAITCTGNACPEVEKADATFLYSFEDSGVGDVTGFLALDNTNKLIVLSFRGSRSIENWIGNLNFDLKEINDICSGCRGHDGFTSSWRSVADTLRQKVEDAVREHPDYRVVFTGHSLGGALATVAGADLRGNGYDIDVFSYGAPRVGNRAFAEFLTVQTGGTLYRITHTNDIVPRLPPREFGYSHSSPEYWIKSGTLVPVTRNDIVKIEGIDATGGNNQPNIPDIPAHLWYFGLIGTC

SEQ ID NO: 11715 - protein, 268 aa, Thermomyces lanuginosus
EVSQDLFNQFNLFAQYSAAAYCGKNNDAPAGTNITCTGAACPEVEKADATFLYSFEDSGVGDVTGFLALDNTNKLIVLSFRGSRSIENWIGNLNFDLKEINDICSGCRGHDGFTSSWRSVADTLRQKVEDAVREHPDYRVVFTGHSLGGALATVAGADLRGNGYDIDVFSYGAPRVGNRAFAEFLTVQTGGTLYRITHTNDIVPRLPPREFGYSHSSPEYWIKSGTLVPVTRNDIVKIEGIDATGGNNQPNIPDIPAHLWYFGLIGTC

SEQ ID NO: 11716 - protein, 268 aa, Synthetic construct
EVSQDLFNQFNLFAQYSAAAYCGKNNDAPAGTNITCTGNACPEVEKADATFLYSFIDSGVGDVTGFLALDNTNKLIVLSFRGSRSIENWIGNLNFDLKEINDICSGCRGHDGFTSSWRSVADTLRQKVEDAVREHPDYRVVFTGHSLGGALATVAGADLRGNGYDIDVFSYGAPRVGNRAFAEFLTVQTGGTLYRITHTNDIVPRLPPREFGYSHSSPEYWIKSGTLVPVTRNDIVKIEGIDATGGNNQPNIPDIPAHLWYFGLIGTC

SEQ ID NO: 11717 - protein, 268 aa, Thermomyces lanuginosus
EVSQDLFNQFNLFAQYSAAAYCGKNNDAPAGTNITCTGNACPEVEKADATFLYSFEDSGVGDVTGFLALDNTNKLIVLSFRGSRSIENWIANLNFGLKEINDICSGCRGHDGFTSSWRSVADTLRQKVEDAVREHPDYRVVFTGHSLGGALATVAGADLRGNGYDIDVFSYGAPRVGNRAFAEFLTVQTGGTLYRITHTNDIVPRLPPREFGYSHSSPEYWIKSGTLVPVRRRDIVKIEGIDATGGNNQPNIPDIPAHLWYFGLIGTC

SEQ ID NO: 11718 - protein, 268 aa, Thermomyces lanuginosus
EVSQDLFNQFNLFAQYSAAAYCGKNNDAPAGTNITCTGNACPEVEKADATFLYSFEDSGVGDVTGFLALDNTNKLIVLSFRGSRSIENWIGNLNFDLKEINDICSGCRGHDGFTSSWRSVADTLRQKVEDAVREHPDYRVVFTGHSLGGALATVAGADLRGNGYDIDVFSYGAPRVGNRAFAEFLTVQTGGTLYRITHTNDIVPRLPPRAFGYSHSSPEYWIKSGTLVPVTRNDIVKIEGIDATGGNNQPNIPDIPAHLWYFGLIGTC

SEQ ID NO: 11719 - protein, 268 aa, Thermomyces lanuginosus
EVSQDLFNQFNLFAQYSAAAYCGKNNDAPAGTNITCTGNACPEVEKADATFLYSFEDSGVGDVTGFLALDNTNKLIVLSFRGSRSIENWIGNLNFDLKEINDICSGCRGHKGFTSSWRSVADTLRQKVEDAVREHPDYRVVFTGHSLGGALATVAGADLRGNGYDIDVFSYGAPRVGNRAFAEFLTVQTGGTLYRITHTNDIVPRLPPREFGYSHSSPEYWIKSGTLVPVTRNDIVKIEGIDATGGNNQPNIPDIPAHLWYFGLIGTC

SEQ ID NO: 11720 - protein, 268 aa, Thermomyces lanuginosus
EVSQDLFNQFNLFAQYSAAAYCGKNNDAPAGTNITCNGNACPEVEKADATFLYSFEDSGVGDVTGFLALDNTNKLIVLSFRGSRSIENWIGNLNFDLKEINDICSGCRGHDGFTSSWRSVADTLRQKVEDAVREHPDYRVVFTGHSLGGALATVAGADLRGNGYDIDVFSYGAPRVGNRAFAEFLTVQTGGTLYRITHTNDIVPRLPPREFGYSHSSPEYWIKSGTLVPVTRNDIVKIEGIDATGGNNQPNIPDIPAHLWYFGLIGTC

SEQ ID NO: 11721 - protein, 268 aa, Synthetic construct
EVSQDLFNQFNLFAQYSAAAYCGKNNDAPAGTNITCTGNACPEVEKADATFLYSFEDSGVGDVTGFLALDNTNKLIVLSFRGSRSIENWIGNLNFDLKEINDICSGCRGHDGFTSSWRSVADTLRQKVEDAVREHPDYRVVFTGHSLGGALATVAGADLRGNGYDIDVFSYGAPRVGNRAFAEFLTVQTGGTLYRITHTNDIVPRLPPREFGYSHSSPEYWIKSGTLVPVTRNDIVKIEGIDATGGNNQPNIPDIPAHPWYFGLIGTC

SEQ ID NO: 11722 - protein, 268 aa, Synthetic construct
EVSQDLFNQFNLFAQYSAAAYCGKNNDAPAGTNITCTGNACPEVEKADATFLYSFYDSGVGDVTGFLALDNTNKLIVLSFRGSRSIENWIGNLNFDLKEINDICSGCRGHDGFTSSWRSVADTLRQKVEDAVREHPDYRVVFTGHSLGGALATVAGADLRGNGYDIDVFSYGAPRVGNRAFAEFLTVQTGGTLYRITHTNDIVPRLPPREFGYSHSSPEYWIKSGTLVPVTRNDIVKIEGIDATGGNNQPNIPDIPAHLWYFGLIGTC

SEQ ID NO: 11723 - protein, 268 aa, Synthetic construct
EVSQDLFNQFNLFAQYSAAAYCGKNNDAPAGTNITCTGNACPEVEKADATFLYSFEDSGVGDVTGFLALDNTNKLIVLSFRGSRSIENWIGNLNFDLKEINDICSGCRGHDGFTSSWRSVADTLRQKVEDAVREHPDYRVVFTGHSLGGALATVAGADLRGNGYDIDVFSYGAPRVGNRAFAEFLTVQTGGTLYRITHTNDIVPRLPPREFGYSHSSPEYWIKSGTLVPVTRNDIVKIEGIDATGGNNQPNIPDIPAHYWYFGLIGTC

SEQ ID NO: 11724 - protein, 268 aa, Synthetic construct
EVSQDLFNQFNLFAQYSAAAYCGKNNDAPAGTNITCTGNACPEVEKADATFLYSFPDSGVGDVTGFLALDNTNKLIVLSFRGSRSIENWIGNLNFDLKEINDICSGCRGHDGFTSSWRSVADTLRQKVEDAVREHPDYRVVFTGHSLGGALATVAGADLRGNGYDIDVFSYGAPRVGNRAFAEFLTVQTGGTLYRITHTNDIVPRLPPREFGYSHSSPEYWIKSGTLVPVTRNDIVKIEGIDATGGNNQPNIPDIPAHLWYFGLIGTC

SEQ ID NO: 11725 - protein, 268 aa, Thermomyces lanuginosus
EVSQDLFNQFNLFAQYSAAAYCGKNNDAPAGTNITCTGNACPEVEKADATFLYSFEDSGVGDVTGFLALDNTNKLIVLSFRGSRSIENWIGNLNFDLKEINDICSGCRGHDGFTSSWRSVADTLRQKVEDAVREHPDYRVVFTGHSLGGGLATVAGADLRGNGYDIDVFSYGAPRVGNRAFAEFLTVQTGGTLYRITHTNDIVPRLPPREFGYSHSSPEYWIKSGTLVPVTRNDIVKIEGIDATGGNNQPNIPDIPAHLWYFGLIGTC

SEQ ID NO: 11726 - protein, 268 aa, Synthetic construct
EVSQDLFNQFNLFAQYSAAAYCGKNNDAPAGTNITCTGNACPEVEKADATFLYSFEDSGVGDVTGFLALDNTNKLIVLSFRGSRSIENWIGNLNFLLKEINDICSGCRGHDGFTSSWRSVADTLRQKVEDAVREHPDYRVVFTGHSLGGALATVAGADLRGNGYDIDVFSYGAPRVGNRAFAEFLTVQTGGTLYRITHTNDIVPRSPPREFGYSHSSPEYWIKSGTLVPVTRNDIVKIEGIDATGGNNQPNIPDIPAHLWYFGLIGTC

SEQ ID NO: 11727 - protein, 268 aa, Synthetic construct
EVSQDLFNQFNLFAQYSAAAYCGKNNDAPAGTNITCTGNACPEVEKADATFLYSFEDSGVGDVTGFLALDNTNKLIVLSFRGSRSIENWIGNLNFDLKEINDICSGCRGHDGFTSSWRSVADTLRQKVEDAVREHPDYRVVFTGHSLGGALATVAGADLRGNGYDIDVFSYGAPRVGNRAFAEFLTVQTGGTLYRITHTNDIVPRIPPREFGYSHSSPEYWIKSGTLVPVTRNDIVKIEGIDATGGNNQPNIPDIPAHLWYFGLIGTC

SEQ ID NO: 11728 - protein, 268 aa, Thermomyces lanuginosus
EVSQDLFNQFNLFAQYSAAAYCGKNNDAPAGTNITCTGLACPEVEKADATFLYSFEDSGVGDVTGFLALDNTNKLIVLSFRGSRSIENWIGNLNFDLKEINDICSGCRGHDGFTSSWRSVADTLRQKVEDAVREHPDYRVVFTGHSLGGALATVAGADLRGNGYDIDVFSYGAPRVGNRAFAEFLTVQTGGTLYRITHTNDIVPRLPPREFGYSHSSPEYWIKSGTLVPVTRNDIVKIEGIDATGGNNQPNIPDIPAHLWYFGLIGTC

SEQ ID NO: 11729 - protein, 268 aa, Thermomyces lanuginosus
EVSQDLFNQFNLFAQYSAAAYCGKNNDAPAGTNITCFGNACPEVEKADATFLYSFEDSGVGDVTGFLALDNTNKLIVLSFRGSRSIENWIGNLNFDLKEINDICSGCRGHDGFTSSWRSVADTLRQKVEDAVREHPDYRVVFTGHSLGGALATVAGADLRGNGYDIDVFSYGAPRVGNRAFAEFLTVQTGGTLYRITHTNDIVPRLPPREFGYSHSSPEYWIKSGTLVPVTRNDIVKIEGIDATGGNNQPNIPDIPAHLWYFGLIGTC

SEQ ID NO: 11730 - protein, 268 aa, Synthetic construct
EVSQDLFNQFNLFAQYSAAAYCGKNNDAPAGTNITCTGNACPEVEKADATFLYSFFDSGVGDVTGFLALDNTNKLIVLSFRGSRSIENWIGNLNFDLKEINDICSGCRGHDGFTSSWRSVADTLRQKVEDAVREHPDYRVVFTGHSLGGALATVAGADLRGNGYDIDVFSYGAPRVGNRAFAEFLTVQTGGTLYRITHTNDIVPRLPPREFGYSHSSPEYWIKSGTLVPVTRNDIVKIEGIDATGGNNQPNIPDIPAHLWYFGLIGTC

SEQ ID NO: 11731 - protein, 268 aa, Synthetic construct
EVSQDLFNQFNLFAQYSAAAYCGKNNDAPAGTNITCTGNACPEVEKADATFLYSFEDSGVGDVTGFLALDNTNKLIVLSFRGSRSIENWIGNLNFDLKEINDICSGCRGHDGFWSSWRSVADTLRQKVEDAVREHPDYRVVFTGHSLGGALATVAGADLRGNGYDIDVFSYGAPRVGNRAFAEFLTVQTGGTLYRITHTNDIVPRLPPREFGYSHSSPEYWIKSGTLVPVTRNDIVKIEGIDATGGNNQPNIPDIPAHLWYFGLIGTC

SEQ ID NO: 11732 - protein, 268 aa, Synthetic construct
EVSQDLFNQFNLFAQYSAAAYCGKNNDAPAGTNITCTGNACPEVEKADATFLYSFEDSGVGDVTGFLALDNTNKLIVLSFRGSRSIENWIGNLNFDLKEINDICSGCRGHDGFTSSWRSVADTLRQKVEDAVREHPDYRVVFTGHSLGGALATVAGADLRGNGYDIDVFSYGAPRVGNRAFAEFLTVQTGGTLYRITHTNDIVPRLPPREFGYSHSSPEYWIKSGTLVPVTRNDIVKIEGIDATGGNNQPNIPDIPAHDWYFGLIGTC

SEQ ID NO: 11733 - protein, 268 aa, Thermomyces lanuginosus
EVSQDLFNQFNLFAQYSAAAYCGKNNDAPAGTNITCTGRACPEVEKADATFLYSFEDSGVGDVTGFLALDNTNKLIVLSFRGSRSIENWIGNLNFDLKEINDICSGCRGHDGFTSSWRSVADTLRQKVEDAVREHPDYRVVFTGHSLGGALATVAGADLRGNGYDIDVFSYGAPRVGNRAFAEFLTVQTGGTLYRITHTNDIVPRLPPREFGYSHSSPEYWIKSGTLVPVTRNDIVKIEGIDATGGNNQPNIPDIPAHLWYFGLIGTC

SEQ ID NO: 11734 - protein, 268 aa, Synthetic construct
EVSQDLFNQFNLFAQYSAAAYCGKNNDAPAGTNITCTGNACPEVEKADATFLYSFMDSGVGDVTGFLALDNTNKLIVLSFRGSRSIENWIGNLNFDLKEINDICSGCRGHDGFTSSWRSVADTLRQKVEDAVREHPDYRVVFTGHSLGGALATVAGADLRGNGYDIDVFSYGAPRVGNRAFAEFLTVQTGGTLYRITHTNDIVPRLPPREFGYSHSSPEYWIKSGTLVPVTRNDIVKIEGIDATGGNNQPNIPDIPAHLWYFGLIGTC

SEQ ID NO: 11735 - protein, 268 aa, Synthetic construct
EVSQDLFNQFNLFAQYSAAAYCGKNNDAPAGTNITCTGNACPEVEKADATFLYSFEDSGVGDVTGFLALDNTNKLIVLSFRGSRSIENWIGNLNFDLKEINDICSGCRGHDGFTSSWRSVADTLRQKVEDAVREHPDYRVVFTGHSLGGALATVAGADLRGNGYDIDVFSYGAPRVGNRAFAEFLTVQTGGTLYRITHTNDIVPRDPPREFGYSHSSPEYWIKSGTLVPVTRNDIVKIEGIDATGGNNQPNIPDIPAHLWYFGLIGTC

SEQ ID NO: 11736 - protein, 268 aa, Synthetic construct
EVSQDLFNQFNLFAQYSAAAYCGKNNDAPAGTNITCTGNACPEVEKADATFLYSFEDSGVGDVTGFLALDNTNKLIVLSFRGSRSIENWIGNLNFDLKEINDICSGCRGHDGFTSSWRSVADTLRQKVEDAVREHPDYRVVFTGHSLGGALATVAGADLRGNGYDIDVFSYGAPRVGNRAFAEFLTVQTGGTLYRITHTNDIVPRQPPREFGYSHSSPEYWIKSGTLVPVTRNDIVKIEGIDATGGNNQPNIPDIPAHLWYFGLIGTC

SEQ ID NO: 11737 - protein, 268 aa, Synthetic construct
EVSQDLFNQFNLFAQYSAAAYCGKNNDAPAGTNITCTGNACPEVEKADATFLYSFEDSGVGDVTGFLALDNTNKLIVLSFRGSRSIENWIGNLNFDLKEINDICSGCRGHDGFTSSWRSVADTLRQKVEDAVREHPDYRVVFTGHSLGGALATVAGADLRGNGYDIDVFSYGAPRVGNRAFAEFLTVQTGGTLYRITHTNDIVPRLPPREFGYSHSSPEYWIKSGTLVPVTRNDIVKIEGIDATGGNNQPNIPDIPAHEWYFGLIGTC

SEQ ID NO: 11738 - protein, 268 aa, Thermomyces lanuginosus
EVSQDLFNQFNLFAQYSAAAYCGKNNDAPAGTNITCTGNACPEVEKADATFLYSFEDSGVGDVTGFLALDNTNKLIVLSFRGSRSIENWIGNLNFDLKEINDICSGCRGHNGFTSSWRSVADTLRQKVEDAVREHPDYRVVFTGHSLGGALATVAGADLRGNGYDIDVFSYGAPRVGNRAFAEFLTVQTGGTLYRITHTNDIVPRLPPREFGYSHSSPEYWIKSGTLVPVTRNDIVKIEGIDATGGNNQPNIPDIPAHLWYFGLIGTC

SEQ ID NO: 11739 - protein, 268 aa, Thermomyces lanuginosus
EVSQDLFNQFNLFAQYSAAAYCGKNNDAPAGTNITCTGNACPEVEKADATFLYSFEDSGVGDVTGFLALDNTNKLIVLSFRGSRSIENWIGNLNFDLKEINDICSGCRGHDGFTSSWRSVADTLRQKVEDAVREHPDYRVVFTGHSLGGALATVAGADLRGNGYDIDVFSYGAPRVGNRAFAEFLTVQTGGTLYRITHTNDIVPRLPPRQFGYSHSSPEYWIKSGTLVPVTRNDIVKIEGIDATGGNNQPNIPDIPAHLWYFGLIGTC

SEQ ID NO: 11740 - protein, 268 aa, Synthetic construct
EVSQDLFNQFNLFAQYSAAAYCGKNNDAPAGTNITCTGNACPEVEKADATFLYSFEDSGVGDVTGFLALDNTNKLIVLSFRGSRSIENWIGNLNFDLKEINDICSGCRGHDGFTSSWRSVADTLRQKVEDAVREHPDYRVVFTGHSLGGALATVAGADLRGNGYDIDVFSYGAPRVGNRAFAEFLTVQTGGTLYRITHTNDIVPRCPPREFGYSHSSPEYWIKSGTLVPVTRNDIVKIEGIDATGGNNQPNIPDIPAHLWYFGLIGTC

SEQ ID NO: 11741 - protein, 268 aa, Synthetic construct
EVSQDLFNQFNLFAQYSAAAYCGKNNDAPAGTNITCTGNACPEVEKADATFLYSFEDSGVGDVTGFLALDNTNKLIVLSFRGSRSIENWIVNLNFDLKEINDICSGCRGHDGFWSSWRSVADTLRQKVEDAVREHPDYRVVFTGHSLGGALATVAGADLRGNGYDIDVFSYGAPRVGNRAFAEFLTVQTGGTLYRITHTNDIVPRLPPREFGYSHSSPEYWIKSGTLVPVTRNDIVKIEGIDATGGNNQPNIPDIPAHLWYFGLIGTC

SEQ ID NO: 11742 - protein, 268 aa, Synthetic construct
EVSQDLFNQFNLFAQYSAAAYCGKNNDAPAGTNITCTGNACPEVEKADATFLYSFEDSGVGDVTGFLALDNTNKLIVLSFRGSRSIENWIGNLNFDLKEINDICSGCRGHDGFTSSWRSVADTLRQKVEDAVREHPDYRVVFTGHSLGGALATVAGADLRGNGYDIDVFSYGAPRVGNRAFAEFLTVQTGGTLYRITHTNDIVPRLPPREFGYSHSSPEYWIKSGTLVPVTRNDIVKIEGIDATGGNNQPNIPDIPAHCWYFGLIGTC

SEQ ID NO: 11743 - protein, 268 aa, Thermomyces lanuginosus
EVSQDLFNQFNLFAQYSAAAYCGKNNDAPAGTNITCLGNACPEVEKADATFLYSFEDSGVGDVTGFLALDNTNKLIVLSFRGSRSIENWIGNLNFDLKEINDICSGCRGHDGFTSSWRSVADTLRQKVEDAVREHPDYRVVFTGHSLGGALATVAGADLRGNGYDIDVFSYGAPRVGNRAFAEFLTVQTGGTLYRITHTNDIVPRLPPREFGYSHSSPEYWIKSGTLVPVTRNDIVKIEGIDATGGNNQPNIPDIPAHLWYFGLIGTC

SEQ ID NO: 11744 - protein, 268 aa, Synthetic construct
EVSQDLFNQFNLFAQYSAAAYCGKNNDAPAGTNITCTGNACPEVEKADATFLYSFEDSGVGDVTGFLALDNTNKLIVLSFRGSRSIENWIGNLNFDLKEINDICSGCRGHDGFTSSWRSVADTLRQKVEDAVREHPDYRVVFTGHSLGGALATVAGADLRGNGYDIDVFSYGAPRVGNRAFAEFLTVQTGGTLYRITHTNDIVPRPPPREFGYSHSSPEYWIKSGTLVPVTRNDIVKIEGIDATGGNNQPNIPDIPAHLWYFGLIGTC

SEQ ID NO: 11745 - protein, 267 aa, Thermomyces lanuginosus
VSQDLFNQFNLFAQYSAAAYCGKNNDAPAGTNITCTGNACPEVEKADATFLYSFEDSGVGDVTGFLALDNTNKLIVLSFRGSRSIENWIGNLNFELKEINDICSGCRGHDGFTSSWRSVADTLRQKVEDAVREHPDYRVVFTGHSLGGALATVAGADLRGNGYDIDVFSYGAPRVGNRAFAEFLTVQTGGTLYRITHTNDIVPRLPPREFGYSHSSPEYWIKSGTLVPVTRCDIVKIEGIDATGGNNQPNIPDIPAHLWYFGLIGTC

SEQ ID NO: 11746 - protein, 267 aa, Thermomyces lanuginosus
VSQDLFNQFNLFAQYSAAAYCGKNNDAPAGTNITCTGNACPEVEKADATFLYSFEDSGVGDVTGFLALDNTNKLIVLSFRGSRSIENWIGNLNFCLKEINDICSGCRGHDGFTSSWRSVADTLRQKVEDAVREHPDYRVVFTGHSLGGALATVAGADLRGNGYDIDVFSYGAPRVGNRAFAEFLTVQTGGTLYRITHTNDIVPRLPPREFGYSHSSPEYWIKSRTLVPVTRNDIVKIEGIDATGGNNQPNIPDIPAHLWYFGLITTC

SEQ ID NO: 11747 - protein, 267 aa, Thermomyces lanuginosus
VSQDLFNQFNLFAQYSAAAYCGKNNDAPAGTNITCTGNACPEVEKADATFLYSFEDSGVGDVTGFLALDNTNKLIVLSFRGSRSIENWIGNLNFDLKEINDICSGCRGHDGFTSSWRSVADTLRQKVEDAVREHPDYRVVFTGHSLGGALATVAGADLRGNGYDIDVFSYGAPRVGNRAFAEFLTVQTGGTLYRITHTNDIVPRLPPREFGYSHSSPEYWIKSRTLVPVTRNDIVKIEGIDATGGNNQPNIPDIPAHLWYFALVSTC

SEQ ID NO: 11748 - protein, 267 aa, Thermomyces lanuginosus
VSQDLFNQFNLFAQYSAAAYCGKNNDAPAGTNITCTGNACPEVEKADATFLYSFEDSGVGDVTGFLALDNTNKLIVLSFRGSRSIENWIGNLNFFLKEINDICSGCRGHDGFTSSWRSVADTLRQKVEDAVREHPDYRVVFTGHSLGGALATVAGADLRGNGYDIDVFSYGAPRVGNRAFAEFLTVQTGGTLYRITHTNDIVPRLPPREFGYSHSSPEYWIKSRTLVPVTRNDIVKIEGIDATGGNNQPNIPDIPAHLWYFGLISTC

SEQ ID NO: 11749 - protein, 267 aa, Thermomyces lanuginosus
VSQDLFNQFNLFAQYSAAAYCGKNNDAPAGTNITCTGNACPEVEKADATFLYSFEDSGVGDVTGFLALDNTNKLIVLSFRGSRSIENWIGNLNFLLKEINDICSGCRGHDGFTSSWRSVADTLRQKVEDAVREHPDYRVVFTGHSLGGALATVAGADLRGNGYDIDVFSYGAPRVGNRAFAEFLTVQTGGTLYRITHTNDIVPRLPPREFGYSHSSPEYWIKSGTLVPVTRCDIVKIEGIDATGGNNQPNIPDIPAHLWYFGLIGTC

SEQ ID NO: 11750 - protein, 267 aa, Thermomyces lanuginosus
VSQDLFNQFNLFAQYSAAAYCGKNNDAPAGTNITCTGNACPEVEKADATFLYSFEDSGVGDVTGFLALDNTNKLIVLSFRGSRSIENWIGNLNFMLKEINDICSSCRGHDGFTSSWRSVADTLRQKVEDAVREHPDYRVVFTGHSLGGALATVAGADLRGNGYDIDVFSYGAPRVGNRAFAEFLTVQTGGTLYRITHTNDIVPRLPPREFGYSHSSPEYWIKSRTLVPVTRNDIVKIEGIDATGGNNQPNIPDIPAHLWYFGLIDTC

SEQ ID NO: 11751 - protein, 267 aa, Thermomyces lanuginosus
VSQDLFNQFNLFAQYSAAAYCGKNNDAPAGTNITCTGNACPEVEKADATFLYSFEDSGVGDVTGFLALDNTNKLIVLSFRGSRSIENWIGNLNFDLKEINDICSGCRGHDGFTSSWRSVADTLRQKVEDAVREHPDYRVVFTGHSLGGALATVAGADLRGNGYDIDVFSYGAPRVGNRAFAEFLTVQTGGTLYRITHTNDIVPRLPPREFGYSHSSPEYWIKSGTLVPVTRCDIVKIEGIDATGGNNQPNIPDIPAHLWYFGLIGTC

SEQ ID NO: 11752 - protein, 267 aa, Thermomyces lanuginosus
VSQDLFNQFNLFAQYSAAAYCGKNNDAPAGTNITCTGNACPEVEKADATFLYSFEDSGVGDVTGFLALDNTNKLIVLSFRGSRSIENWIGNLNFDLKEINDICSGCRGHDGFTSSWRSVADTLRQKVEDAVREHPDYRVVFTGHSLGGALATVAGADLRGNGYDIDVFSYGAPRVGNRAFAEFLTVQTGGTLYRITHTNDIVPRLPPREFGYSHSSPEYWIKSGTLVPVTRNDIVCIEGIDATGGNNQPNIPDIPAHLWYFGLIGTC

SEQ ID NO: 11753 - protein, 267 aa, Thermomyces lanuginosus
VSQDLFNQFNLFAQYSAAAYCGKNNDAPAGTNITCTGNACPEVEKADATFLYSFEDSGVGDVTGFLALDNTNKLIVLSFRGSRSIENWIGNLNFDLKKINDICSGCRGHDGFTSSWRSVADTLRQKVEDAVREHPDYRVVFTGHSLGGALATVAGADLRGNGYDIDVFSYGAPRVGNRAFAEFLTVQTGGTLYRITHTNDIVPRLPPREFGYSHSSPEYWIKSGTLVPVTRNDIVKICGIDATGGNNRPNIPDIPAHLWYFGLIGTC

SEQ ID NO: 11754 - protein, 267 aa, Thermomyces lanuginosus
VSQDLFNQFNLFAQYSAAAYCGKNNDAPAGTNITCTGNACPEVEKADATFLYSFEDSGVGDVTGFLALDNTNKLIVLSFRGSRSIENWIGNLNFDLDKINDICSGCRGHDGFTSSWRSVADTLRQKVEDAVREHPDYRVVFTGHSLGGALATVAGADLRGNGYDIDVFSYGAPRVGNRAFAEFLTVQTGGTLYRITHTNDIVPRLPPREFGYSHSSPEYWIKSGTLVPVTRNDIVKIEGIDATGGNNRPNIPDIPAHLWYFGLIGTC

SEQ ID NO: 11755 - protein, 267 aa, Thermomyces lanuginosus
VSQDLFNQFNLFAQYSAAAYCGKNNDAPAGTNITCTGNACPEVEKADATFLYSFEDSGVGVVTGFLALDNTNKLIVLSFRGSRSIENWIGNLNFDLKKINDICSGCRGHDGFTSSWRSVADTLRQKVEDAVREHPDYRVVFTGHSLGGALATVAGADLRGNGYDIDVFSYGAPRVGNRAFAEFLTVQTGGTLYRITHTNDIVPRLPPREFGYSHSSPEYWIKSGTLVPVTRNDIVKIEGIDATGGNNRPNIPDIPAHLWYFGLIGTC

SEQ ID NO: 11756 - protein, 267 aa, Thermomyces lanuginosus
VSQDLFNQFNLFAQYSAAAYCGKNNDAPAGTNITCTGNACPEVEKADATFLYSFEDSGVGAVTGFLALDNTNKLIVLSFRGSRSIENWIGNLNFDLKKINDICSGCRGHDGFTSSWRSVADTLRQKVEDAVREHPDYRVVFTGHSLGGALATVAGADLRGNGYDIDVFSYGAPRVGNRAFAEFLTVQTGGTLYRITHTNDIVPRLPPREFGYSHSSPEYWIKSGTLVPVTRNDIVKIEGIDATGGNNRPNIPDIPAHLWYFGLIGTC

SEQ ID NO: 11757 - protein, 267 aa, Thermomyces lanuginosus
VSQDLFNQFNLFAQYSAAAYCGKNNDAPAGTNITCTGNACPEVEKADATFLYSFEDSGVGDVTGFLALDNTNKLIVLSFRGSRSIENWIGNLNFSLKEINDICSGCRGHDGFTSSWRSVADTLRQKVEDAVREHPDYRVVFTGHSLGGALATVAGADLRGNGYDIDVFSYGAPRVGNRAFAEFLTVQTGGTLYRITHTNDIVPRLPPREFGYSHSSPEYWIKSGTLVPVTRNDIVKICGIDATGGNNRPNIPDIPAHLWYFFAISEC

SEQ ID NO: 11758 - protein, 267 aa, Thermomyces lanuginosus
VSQDLFNQFNLFAQYSAAAYCGKNNDAPAGTNITCTGNACPEVEKADATFLYSFEDSGVGGVTGFLALDNTNKLIVLSFRGSRSIENWIGNLNFDLKKINDICSGCRGHDGFTSSWRSVADTLRQKVEDAVREHPDYRVVFTGHSLGGALATVAGADLRGNGYDIDVFSYGAPRVGNRAFAEFLTVQTGGTLYRITHTNDIVPRLPPREFGYSHSSPEYWIKSGTLVPVTRNDIVKIEGIDATGGNNRPNIPDIPAHLWYFGLIGTC

SEQ ID NO: 11759 - protein, 267 aa, Thermomyces lanuginosus
VSQDLFNQFNLFAQYSAAAYCGKNNDAPAGTNITCTGNACPEVEKADATFLYSFEDSGVGDVTGFLALDNTNKLIVLSFRGSRSIENWIGNLNFSLKEINDICSGCRGHDGFTSSWRSVADTLRQKVEDAVREHPDYRVVFTGHSLGGALATVAGADLRGNGYDIDVFSYGAPRVGNRAFAEFLTVQTGGTLYRITHTNDIVPRLPPREFGYSHSSPEYWIKSGTLVPVTRNDIVKICGIDATGGNNRPNIPDIPAHLWYFGLIDTC

SEQ ID NO: 11760 - protein, 267 aa, Thermomyces lanuginosus
VSQDLFNQFNLFAQYSAAAYCGKNNDAPAGTNITCTGNACPEVEKADATFLYSFEDSGVGDVTGFLALDNTNKLIVLSFRGSRSIENWIGNLNFDLKNINDICSGCRGHDGFTSSWRSVADTLRQKVEDAVREHPDYRVVFTGHSLGGALATVAGADLRGNGYDIDVFSYGAPRVGNRAFAEFLTVQTGGTLYRITHTNDIVPRLPPREFGYSHSSPEYWIKSGTLVPVTRNDIVKICGIDATGGNNRPNIPDIPAHLWYFGLIDTC

SEQ ID NO: 11761 - protein, 267 aa, Synthetic construct
VSQDLFNQFNLFAQYSAAAYCGKNNDAPAGTNITCTGNACPEVEKADATFLYSFEDSGVGDVTGFLALDNTNKLIVLSFRGSRSIENWIGNLNFLLKKINDICSGCRGHDGFTSSWRSVADTLRQKVEDAVREHPDYRVVFTGHSLGGALATVAGADLRGNGYDIDVFSYGAPRVGNRAFAEFLTAQTGGTLYRITHTNDIVPRLPPREFGYSHSSPEYWIKSGTLVPVTRNDIVKIEGIDATGGNNRPNIPDIPAHLWYFGLIGTC

SEQ ID NO: 11762 - protein, 267 aa, Synthetic construct
VSQDLFNQFNLFAQYSAAAYCGKNNDAPAGTNITCTGNACPEVEKADATFLYSFEDSGVGDVTGFLALDNTNKLIVLSFRGSRSIENWIGNLKFLLKKINDICSGCRGHDGFTSSWRSVADTLRQKVEDAVREHPDYRVVFTGHSLGGALATVAGADLRGNGYDIDVFSYGAPRVGNRAFAEFLTVQTGGTLYRITHTNDIVPRLPPREFGYSHSSPEYWIKSGTLVPVTRNDIVKIEGIDATGGNNRPNIPDIPAHLWYFGLIGTC

SEQ ID NO: 11763 - protein, 267 aa, Thermomyces lanuginosus
VSQDLFNQFNLFAQYSAAAYCGKNNDAPAGTNITCTGNACPEVEKADATFLYSFEDSGVGDVTGFLALDNTNKLIVLSFRGSRSIENWIGNLNFSLKEINDICSGCRGHDGFTSSWRSVADTLRQKVEDAVREHPDYRVVFTGHSLGGALATVAGADLRGNGYDIDVFSYGAPRVGNRAFAEFLTVQTGGTLYRITHTNDIVPRLPPREFGYSHSSPEYWIKSGTLVPVTRNDIVKICGIDATGGNNRPNIPDIPAHLWYFGLICAC

SEQ ID NO: 11764 - protein, 267 aa, Synthetic construct
VSQDLFNQFNLFAQYSAAAYCGKNNDAPAGTNITCTGNACPEVEKADATFLYSFEDSGVGDVTGFLALDNTNKLIVLSFRGSRSIENWFGNLNFLLKKINDICSGCRGHDGFTSSWRSVADTLRQKVEDAVREHPDYRVVFTGHSLGGALATVAGADLRGNGYDIDVFSYGAPRVGNRAFAEFLTAQTGGTLYRITHTNDIVPRLPPREFGYSHSSPEYWIKSGTLVPVTRNDIVKIEGIDATGGNNQPNIPDIPAHLWYFGLIGTC

SEQ ID NO: 11765 - protein, 267 aa, Thermomyces lanuginosus
VSQDLFNQFNLFAQYSAAAYCGKNNDAPAGTNITCTGNACPEVEKADATFLYSFEDSGVGDVTGFLALDNTNKLIVLSFRGSRSIENWIGNKNFDLKKINDICSGCRGHDGFTSSWRSVADTLRQKVEDAVREHPDYRVVFTGHSLGGALATVAGADLRGNGYDIDVFSYGAPRVGNRAFAEFLTVQTGGTLYRITHTNDIVPRLPPREFGYSHSSPEYWIKSGTLVPVTRNDIVKICGIDATGGNNRPNIPDIPAHLWYFGLIDTC

SEQ ID NO: 11766 - protein, 267 aa, Thermomyces lanuginosus
VSQDLFNQFNLFAQYSAAAYCGKNNDAPAGTNITCTGNACPEVEKADATFLYSFEDSGVGDVTGFLALDNTNKLIVLSFRGSRSIENWIGNLNFDLKEINDICSGCRGHDGFTSSWRSVADTLRQKVEDAVREHPDYRVVFTGHSLGGALATVAGADLRGNGYDIDVFSYGAPRVGNRAFAEFLTVQTGGTLYRITHTNDIVPRLPPREFGYSHSSPEYWIKSGTLVPVTRNDIVKICGIDATGGNNRPNIPDIPAHLWYFGLIDTC

SEQ ID NO: 11767 - protein, 267 aa, Thermomyces lanuginosus
VSQDLFNQFNLFAQYSAAAYCGKNNDAPAGTNITCTGNACPEVEKADATFLYSFEDSGVGDVTGFLALDNTNKLIVLSFRGSRSIENWIGNLNFDLKEINDICSGCRGHDGFTSSWRSVADTLRQKVEDAVREHPDYRVVFTGHSLGGALATVAGADLRGNGYDIDVFSYGAPRVGNRAFAEFLTVQTGGTLYRITHTNDIVPRLPPREFGYSHSSPEYWIKSGTLVPVTRNDIVKICGIDATGGNNRPNIPDIPAHLWYFFAISEC

SEQ ID NO: 11768 - protein, 267 aa, Thermomyces lanuginosus
VSQDLFNQFNLFAQYSAAAYCGKNNDAPAGTNITCTGNACPEVEKADATFLYSFEDSGVGDVTGFLALDNTNKLIVLSFRGSKSIENWIGNLNFDLKKINDICSGCRGHDGFTSSWRSVADTLRQKVEDAVREHPDYRVVFTGHSLGGALATVAGADLRGNGYDIDVFSYGAPRVGNRAFAEFLTVQTGGTLYRITHTNDIVPRLPPREFGYSHSSPEYWIKSGTLVPVTRNDIVKIEGIDATGGNNRPNIPDIPAHLWYFGLIGTC

SEQ ID NO: 11769 - protein, 267 aa, Thermomyces lanuginosus
VSQDLFNQFNLFAQYSAAAYCGKNNDAPAGTNITCTGNACPEVEKADATFLYSFEDSGVGDVTGFLALDNTNKLIVLSFRGSWSIENWIGNLNFDLKKINDICSGCRGHDGFTSSWRSVADTLRQKVEDAVREHPDYRVVFTGHSLGGALATVAGADLRGNGYDIDVFSYGAPRVGNRAFAEFLTVQTGGTLYRITHTNDIVPRLPPREFGYSHSSPEYWIKSGTLVPVTRNDIVKIEGIDATGGNNRPNIPDIPAHLWYFGLIGTC

SEQ ID NO: 11770 - protein, 267 aa, Thermomyces lanuginosus
VSQDLFNQFNLFAQYSAAAYCGKNNDAPAGTNITCTGNACPEVEKADATFLYSFEDSGVGDVTGFLALDNTNKLIVLSFRGSRSIENWIANLNFWLKEINDICSGCRGHDGFTSSWRSVADTLRQKVEDAVREHPDYRVVFTGHSLGGALATVAGADLRGNGYDIDVFSYGAPRVGNRAFAEFLTVQTGGTLYRITHTNDIVPRLPPREFGYSHSSPEYWIKSGTLVPVTRNDIVKICGIDATGGNNRPNIPDITAHLWYFGLISTC

SEQ ID NO: 11771 - protein, 266 aa, Thermomyces lanuginosus
EVSQDLFNQFNLFAQYSAAAYCGKNNDAPAGTNITCTGNACPEVEKADATFLYSFEDSGVGDVTGFLALDNTNKLIVLSFRGSSTIENWIANLNFSLKEINDICSGCRGHDGFTSSWRSVADTLRQKVEDAVREHPDYRVVFTGHSLGGALATVAGADLRGNGYDIDVFSYGAPRVGNRAFAEFLTVQTGGTLYRITHTNDIVPRLPPREFGYSHSSPEYWIKSGTLVPVRRRDIVKIEGIDATGGNNQPNIPDIPAHPWYFQSTE

SEQ ID NO: 11772 - protein, 266 aa, Thermomyces lanuginosus
SQDLFNQFNLFAQYSAAAYCGKNNDAPAGTNITCTGNACPEVEKADATFLYSFEDSGVGDVTGFLALDNTNKLIVLSFRGSRSIENWIGNLNFDLKEINDICSGCRGHDGFTSSWRSVADTLRQKVEDAVREHPDYRVVFTGHSLGGALATVAGADLRGNGYDIDVFSYGAPRVGNRAFAEFLTVQTGGTLYRITHTNDIVPRLPPREFGYSHSSPEYWIKSGTLVPVTRCDIVKIEGIDATGGNNQPNIPDIPAHLWYFGLIGTC

SEQ ID NO: 11773 - protein, 266 aa, Thermomyces lanuginosus
SRDLFNQFNLFAQYSAAAYCGKNNDAPAGTNITCTGNACPEVEKADATFLYSFEDSGVGDVTGFLALDNTNKLIVLSFRGSRSIENWIGNLNFDLKEINDICSGCRGHDGFTSSWRSVADTLRQKVEDAVREHPDYRVVFTGHSLGGALATVAGADLRGNGYDIDVFSYGAPRVGNRAFAEFLTVQTGGTLYRITHTNDIVPRLPPREFGYSHSSPEYWIKSGTLVPVTRNDIVKIEGIDATGGNNQPNIPDIPAHLWYFGLIGTC

SEQ ID NO: 11774 - protein, 270 aa, Thermomyces lanuginosus
VSQDLFNQFNLFAQYSAAAYCGKNNDAPAGTNITCTGNACPEVEKADATFLYSFEDSGVGDVTGFLALDNTNKLIVLSFRGSRSIENWIGNLNFDLKKINDICSGCRGHDGFTSSWRSVADTLRQKVEDAVREHPDYRVVFTGHSLGGALATVAGADLRGNGYDIDVFSYGAPRVGNRAFAEFLTVQTGGTLYRITHTNDIVPRLPPREFGYSHSSPEYWIKSGTLVPVTRNDIVKIEGIDATGGNNRPNIPDIPAHLWYFGLIGTCLPG

SEQ ID NO: 11775 - protein, 268 aa, Synthetic construct; identical to SEQ ID NO: 4429

SEQ ID NO: 11776 - protein, 268 aa, Synthetic construct
EVSQDLFNQFNLFAQYSAAAYCGKNNDAPAGTNITCTGNACPEVEKADATFLYSFTLSGVGDVTGFLALDNTNKLIVLSFRGSRSIENWFGNLNFLLKKINDICSGCRGHDGFTSSWRSVADTLRQKVEDAVREHPDYRVVFTGHSLGGALATVAGADLRGNGYDIDVFSYGAPRVGNRAFAEFLTVQTGGTLYRITHTNDIVPRLPPREFGYSHSSPEYWIKSGTLVPVTRNDIVKIEGIDATGGNNQPNIPDIPAHLWYFGLIGTC

SEQ ID NO: 11777 - protein, 268 aa, Thermomyces lanuginosus
EVSQDLFNQFNLFAQYSAAAYCGKNNDAPAGTNITCTGNACPEVEKADATFLYSFEDSGVGDVTGFLALDNTNKQIVLSFRGSRSIENWIGNLNFDLKEINDICSGCRGHDGFTSSWRSVADTLRQKVEDAVREHPDYRVVFTGHSLGGALATVAGADLRGNGYDIDVFSYGAPRVGNRAFAEFLTNQTGGTLYRITHTNDIVPRLPPREFGYSHSSPEYWIKSGTLVPVTRNDIVKIEGIDATGGNNQPNIPDIPAHLWYFGRIGTC

SEQ ID NO: 11778 - protein, 268 aa, Synthetic construct
EVSQDLFNQFNLFAQYSAAAYCGKNNDAPAGTNITCTGNACPEVEKADATFLYSFEDSGVGDVTGFLALDNTNKLIVLSFRGSRSIKNWIANIKFALKEINDICSGCRGHDGFTSSWRSVADTLRQKVEDAVREHPDYRVVFTGHSLGGALATVAGADLRGNGYDIDVFSYGAPRVGNRAFAEFLTVQTGGTLYRITHTNDIVPRLPPREFGYSHSSPEYWIKSGTLVPVTRNDIVKIEGIDATGGNNQPNIPDIPAHLWYFGLIGTC

SEQ ID NO: 11779 - protein, 268 aa, Thermomyces lanuginosus
EVSQDLFNQFNLFAQYSAAAYCGKNNDAPAGTNITCTGNACPEVEKADATFLYSFEDSGVGDVTGFLALDNTNKLIVLSFRGSRSIENWIGNLNFDLKEINDICSGCRGHDGFTSSWRSVADTLRQKVEDAVREHPDYRVVFTGHSLGGALATVAGADLRGNGYDIDVFSYGAPRVGNRAFAEFLTVQTGGTLYRITHTNDIVPRLPPREFGYSHSSPEYCIKSGTLVPVTRNDIVKIEGIDATGCNNQPNIPDIPAHLWYFGLIGTC

SEQ ID NO: 11780 - protein, 268 aa, Thermomyces lanuginosus
EVSQDLFNQFNLFAQYSAAAYCGKNNDAPAGTNITCTGNACPEVEKADATFLYSFEDMGVGDVTGFLALDNTNKLIVLSFRGSRSIENWIGNLNFDLKEINDICSGCRGHDGFTSSWRSVADTLRQKVEDAVREHPDYRVVFTGHSLGGALATVAGADLRGNGYDIDVFSYGAPRVGNRAFAEFLTVQTGGTLYRITHTNDIVPRLPPREFGYSHSSPEYWIKSGTMVPVTRNDIVKIEGIDATGGNNQPNIPDIPAHLWYFGRIGTC

SEQ ID NO: 11781 - protein, 268 aa, Thermomyces lanuginosus
EVSQDLFNQFNLFAQYSAAAYCKKNNDAPAGTNITCTGNACPEVEKADATFLYSFEDSGVGDVTGFLALDNTNKLIVLSFRGSRSIENWIGNLNFDLKEINDICSGCRGHDGFTSSWRSVADTLRQKVEDAVREHPDYRVVFTGHSLGGALATVAGADLRGNGYDIDVFSYGAPRVGNRAFAEFLTTQTGGTLYRITHTNDIVPRLPPREFGYSHSSPEYWIKSGTLVPVTRNDIVKIEGIDATGGNNQPNIPDIPAHLWYFGRIGTC

SEQ ID NO: 11782 - protein, 268 aa, Thermomyces lanuginosus
EVSQDLFNQFNLFAQYSAAAVCGKNNDAPAGTNITCTGNACPEVEKADATFLYSFEDSGVGDVTGFLALDNTNKLIVLSFRGSRSIENWIGNLNFDLKEINDICSGCRGHDGFTSSWRSVADTLRQKVEDAVREHPDYRVVFTGHSLGGALATVAGADLRGNGYDIDVFSYGAPRVGNRAFAEFLTVQTGGTLYRITHTNDIVPRLPPREFGYSHSSPEYWIKSGTLVPVTRNDIVKIEGIDATGGNNQPNIPDIPAHLWIFGLIGTC

SEQ ID NO: 11783 - protein, 268 aa, Thermomyces lanuginosus
EVSQDLFNQFNLFAQYSAAAYCGKNNDAPAGTNITCTGNACPEVEKADATFLYSFEDSGVGDVTGFLALDNTNKLIVLSFRGSRSIENWIGNLNFLLKEINDICSGCRGHDGFTSSWRSVADTLRQKVEDAVREHPDYRVVFTGHSLGGALATVAGADLRGNGYDIDVFSYGAPRVGNRAFAEFLTVQTGGTLYRITHTNDIVPRLPPREFGYSHSSPEYWIKSGTLVPVRRRDIVKIEGIDATGGNNQPNIPDIPAHLWYFGLIGTC

SEQ ID NO: 11784 - protein, 268 aa, Thermomyces lanuginosus
EVSQDLFNQFNLFAQYSAAAYCGKNNDAPAGTNITCTGNACPEVEKADATFLYSFEDSGVGDVTGFLALDNTNKLIVLSFRGSRSIENWIGNLNFDLKEINDICSGCRGHDGFTSSWRSVADTLRQKVEDAVREHPDYRVVFTGHSLGGALATVAGADLRGNGYDIDVFSYGAPRVGNRAFAEFLTVQTGGTLYRITHTRDIVPRLPPREFGYSHSSPEYWIKSGTRVPVTRNDIVKIEGIDATGGNNQPNIPDIPAHLWYFGLIGTC

SEQ ID NO: 11785 - protein, 268 aa, Thermomyces lanuginosus
EVSQDLFNQFNLFAQYSAAAYCGKNNDAPAGTNITCTGNACPEVEKADATFLYSFEDSGVGDVTGFLALDNTNKLIVLSFRGSRSIENWITNLNFELKEINDICSGCRGHDGFTSSWRSVADTLRQKVEDAVREHPDYRVVFTGHSLGGALATVAGADLRGNGYDIDVFSYGAPRVGNRAFAEFLTVQTGGTLYRITHTNDIVPRLPPREFGYSHSSPEYWIKSGTLVPVRRRDIVKIEGIDATGGNNQPNIPDIPAHLWYFGLIGTC

SEQ ID NO: 11786 - protein, 268 aa, Thermomyces lanuginosus
EVSQDLFNQFNLFAQYSAAAYCGKNNDAPAGTNITCTGNACPEVEKADATFLYSFEDSGVGDVTGFLALDNTNKLIVLSFRGSRSIENWIVNLNFDLKEINDICSGCRGHDGFTSSWRSVADTLRQKVEDAVREHPDYRVVFTGHSLGGALATVAGADLRGNGYDIDVFSYGAPRVGNRAFAEFLTVQTGGTLYRITHTNDIVPRLPPREFGYSHSSPEYWIKSGTLVPVRRRDIVKIEGIDATGGNNQPNIPDIPAHLWYFGLIGTC

SEQ ID NO: 11787 - protein, 268 aa, Thermomyces lanuginosus
EVSQDLFNQFNLFAQYSAAAYCGKNNDAPAGTNITCTRRACPEVEKADATFLYSFEDSGVGDVTGFLALDNTNKLIVLSFRGSRSIENWIGNLNFDLKEINDICSGCRGHDGFTSSWRSVADTLRQKVEDAVREHPDYRVVFTGHSLGGALATVAGADLRGNGYDIDVFSYGAPRVGNRAFAEFLTVQTGGTLYRITHTNDIVPRLPPREFGYSHSSPEYWIKSGTLVPVTRNDIVKIEGIDATGGNNQPNIPDIPAHLWYFGLIGTC

SEQ ID NO: 11788 - protein, 268 aa, Thermomyces lanuginosus
EVSQDLFNQFNLFAQYSAAAYCGKNNDAPAGTNITCTGNACPEVEKADATFLYSFEDSGVGDVTGFLALDNTNKLIVLSFRGSRSIENWIGNLHFDLKEINDICSGCRGHDGFTSSWRSVADTLRQKVEDAVREHPDYRVVFTGHSLGGALATVAGADLRGNGYDIDVFSYGAPRVGNRAFAEFLTVQTGGTLYRITHTNDIVPRLPPREFGYSHSSPEYWIKSGTLVPVTRNDIVKIEGIDATGGNNHPNIPDIPAHLWYFGLIGTC

SEQ ID NO: 11789 - protein, 268 aa, Thermomyces lanuginosus
EVSQDLFNQFNLFAQYSAAAYCGKNNDAPAGTNITCTGNACPEVEKADATFLYSFEDSGVGDVTGFLALDNTNKLIVLSFRGSRSIENWIGNLHFDLKEINDICSGCRGHDGFTSSWRSVADTLRQKVEDAVREHPDYRVVFTGHSLGGALATVAGADLRGNGYDIDVFSYGAPRVGNRAFAEFLTVQTGGTLYRITHTNDIVPRLPPREFGYSHSSPEYWIKSGTLVPVTRNDIVKIEGIDATGGNNRPNIPDIPAHLWYFGLIGTC

SEQ ID NO: 11790 - protein, 268 aa, Thermomyces lanuginosus
EVSQDLFNQFNLFAQYSAAAYCGKNNDAPAGTNITCTGNACPEVEKADATFLYSFEDSGVGDVTGFLALDNTNKLIVLSFRGSRSIENWIGNLNFDLKEINDICSGCRGHDGFTSSWRSVADTLRQKVEDAVREHPDYRVVFTGHSLGGALATVAGADLRGNGYDIDVFSYGAPRVGNRAFAEFLTVQTGGTLYRITHTNDIVPRLPPREFGYSHSSPEYWIKSRRLVPVTRNDIVKIEGIDATGGNNQPNIPDIPAHLWYFGLIGTC

SEQ ID NO: 11791 - protein, 268 aa, Thermomyces lanuginosus
EVSQDLFNQFNLFAQYSAAAYCGKNNSAPAGTNITCTGNACPEVEKADATFLYSFEDSGVGDVTGFLALDNTNKLIVLSFRGSRSIENWIGNLNFDLKEINDICSGCRGHDGFTSSWRSVADTLRQKVEDAVREHPDYRVVFTGHSLGGALATVAGADLRGNGYDIDVFSYGAPRVGNRAFAEFLTVQTGGTLYRITHTNDIVPRLPPREFGYSHSSPEYWIKSGTLVPVTRNDIVKIEGIDATGGNNQPNIPDITAHLWYFGLIGTC

SEQ ID NO: 11792 - protein, 268 aa, Thermomyces lanuginosus
EVSQDLFNQFNLFAQYSAAAYCGKNNDAPAGTNITCTGNACPEVEKADATFLYSFEDSGVGDVTGFLALDNTNKLIVLSFRGSRSIENWITNLNFDLKEINRICRGCRGHDGFTSSWRSVADTLRQKVEDAVREHPDYRVVFTGHSLGGALATVAGADLRGNGYDIDVFSYGAPRVGNRAFAEFLTVQTGGTLYRITHTNDIVPRLPPREFGYSHSSPEYWIKSGTLVPVTRNDIVKIEGIDATGGNNQPNIPDIPAHLWYFGLIGTC

SEQ ID NO: 11793 - protein, 268 aa, Thermomyces lanuginosus
EVSQDLFNQFNLFAQYSAAAYCGKNNDAPAGTNITCTGNACPEVEKADATFLYSFEDSGVGDVTGFLALDNTNKLIVLSFRGSRSIENWITNLNFDLKEIRRICSGCRGHDGFTSSWRSVADTLRQKVEDAVREHPDYRVVFTGHSLGGALATVAGADLRGNGYDIDVFSYGAPRVGNRAFAEFLTVQTGGTLYRITHTNDIVPRLPPREFGYSHSSPEYWIKSGTLVPVTRNDIVKIEGIDATGGNNQPNIPDIPAHLWYFGLIGTC

SEQ ID NO: 11794 - protein, 268 aa, Thermomyces lanuginosus
EVSQDLFNQFNLFAQYSAAAYCGKNNDAPAGTNITCTGNACPEVEKADATFLYSFEDSGVGDVTGFLALDNTNKLIVLSFRGSRSIENWIGNLNFDLKEINDICSGCRGHDGFTSSWRSVADTLRQKVEDAVREHPDYRVVFTGHSLGGALATVAGADLRGNPYDIDVFSYGAPRVGNRAFAEFLTVQTGGTLYRITHTNDIVPRLPPREFGYSHSSPEYWIKSGTMVPVTRNDIVKIEGIDATGGNNQPNIPDIPAHLWYFGRIGTC

SEQ ID NO: 11795 - protein, 268 aa, Thermomyces lanuginosus
EVSQDLFNQFNLFAQYSAAAYCGKNNDAPAGTNITCTGNACPEVEKADATFLYSFEDSGGGAVTGFLALDNTNKLIVLSFRGTRSIENWIGNLNFWLKEINDICSGCRGHDGFTSSWRSVADTLRQKVEDAVREHPDYRVVFTGHSLGGALATVAGADLRGNGYDIDVFSYGAPRVGNRAFAEFLTVQTGGTLYRITHTNDIVPRLPPREFGYSHSSPEYWIKSGTLVPVTRNDIVKIEGIDATGGNNQPNIPDIPAHLWYFGLIWTC

SEQ ID NO: 11796 - protein, 268 aa, Thermomyces lanuginosus
EVSQDLFNQFNLFAQYSAAAYCGKNNDALAGTNITCTGNACPEVEKADATFLYSFEDSGVGDVTGFLALDNTNKLIVLSFRGSRSIENWIGNLNFDLKEINDICSGCRGHDGFTSSWRSVADTLRQKVEDAVREHPDYRVVFTGHSLGGALATVAGADLRGNGYDIDVFSYGAPRVGNRAFAEFLTVQTGGTLYRITHTNDIVPRLPPREFGYSHSSPEYWIKSGTLVLVTRNDIVKIEGIDATGGNNQPNIPDIPAHLWYFGLIGTC

SEQ ID NO: 11797 - protein, 268 aa, Thermomyces lanuginosus
EVSQDLFNQFNLFAQYSAAAYCGKNNDAPAGTNITCTGNACPEVEKADATFLYSFEDSGVGDVTGFLALDNTNKLIVLSFRGSRSIENWITNLNFDLKEINDICSRCRGHDGFTSSWRSVADTLRQKVEDAVREHPDYRVVFTGHSLGGALATVAGADLRGNGYDIDVFSYGAPRVGNRRFAEFLTVQTGGTLYRITHTNDIVPRLPPREFGYSHSSPEYWIKSGTLVPVTRNDIVKIEGIDATGGNNQPNIPDIPAHLWYFGLIGTC

SEQ ID NO: 11798 - protein, 268 aa, Thermomyces lanuginosus
EVSQRLFRQFNLFAQYSAAAYCGKNNDAPAGTNITCTGNACPEVEKADATFLYSFEDSGVGDVTGFLALDNTNKLIVLSFRGSRSIENWIGNLNFDLKEINDICSGCRGHDGFTSSWRSVADTLRQKVEDAVREHPDYRVVFTGHSLGGALATVAGADLRGNGYDIDVFSYGAPRVGNRAFAEFLTVQTGGTLYRITHTNDIVPRLPPREFGYSHSSPEYWIKSGTLVPVTRNDIVKIEGIDATGGNNQPNIPDIPAHLWYFGLIGTC

SEQ ID NO: 11799 - protein, 268 aa, Thermomyces lanuginosus
EVSQDLFNQFNLFAQYSAAAYCGKNNDAPAGTNITCTGKACPEVEKADATFLYSFEDSGVGDVTGFLALDNTNKLIVLSFRGSRSIENWIGNLNFDLKEINDICSGCRGHDGFTSSWRSVADTLRQKVEDAVREHPDYRVVFTGHSLGGALATVAGADLRGNGYDIDVFSYGAPRVGNRAFAEFLTVQTGGTLYRITHTNDIVPRLPPREFGYSHSSPEYWIKSGTLVRVTRNDIVKIEGIDATGGNNQPNIPDIPAHLWYFGLIGTC

SEQ ID NO: 11800 - protein, 268 aa, Thermomyces lanuginosus
EVSQDLFNQFNLFAQYSAAAYCGKNNDAPAGTNITCTGNACPEVEKADATFLYSFEDSGGGAVTGFLALDNTNKLIVLSFRGTKSIENWIGNLNFWLKEINDICSGCRGHDGFTSSWRSVADTLRQKVEDAVREHPDYRVVFTGHSLGGALATVAGADLRGNGYDIDVFSYGAPRVGNRAFAEFLTVQTGGTLYRITHTNDIVPRLPPREFGYSHSSPEYWIKSGTLVPVTRNDIVKIEGIDATGGNNQPNIPDIPAHLWYFGLIDTC

SEQ ID NO: 11801 - protein, 268 aa, Thermomyces lanuginosus
EVSQDLFNQFNLFAQYSAAAYCGKNNDAPAGTNITCTGNACPEVEKADATFLYSFEDSGVGDVTGFLALDNTNKLIVLSFRGSRSIENWIGNLNFDLKEINDICSGCRGHDGFTSSWRSVADTLRQKVEDAVREHPDYRVVFTGHSLGGALATVAGADLRGNGYDIDVFSYGAPRVGNRAFAEFLTVQTGGTLYRITHTNDIVPRLPPREFGYSHSSPEYWIKSGTFIPVTRNDIVKIEGIDATGGNNQPNIPDIPAHLWYFGLIGTC

SEQ ID NO: 11802 - protein, 268 aa, Thermomyces lanuginosus
EVSQDLFNQFNLFAQYSAAAYCGKNNDAPAGTNITCTGNACPEVEKADATFLYSFEDSGVGDVTGFLALDNTNKLIVLSFRGSRSIENWIGNLNFDLKEINDICSGCRGHDGFTSSWRSVADTLRQKVEDAVREHPDYRVVFTGHSLGGALATVAGADLRGNGYDIDVFSYGAPRVGNRAFAEFLTVQTGGTLYRITHTNDIVPRLPPREFGYSHSSPEYWIKSGTLVPVTRRDIRKIEGIDATGGNNQPNIPDIPAHLWYFGLIGTC

SEQ ID NO: 11803 - protein, 268 aa, Thermomyces lanuginosus
EVSQDLFNQFNLFAQYSAAAYCQKNNDAPAGTNITCTGNACPEVEKADATFLYSFEDSGVGDVTGFLALDNTNKQIVLSFRGSRSIENWIGNLNFDLKEINDICSGCRGHDGFTSSWRSVADTLRQKVEDAVREHPDYRVVFTGHSLGGALATVAGADLRGNGYDIDVFSYGAPRVGNRAFAEFLTVQTGGTLYRITHTNDIVPRLPPREFGYSHSSPEYWIKSGTLVPVTRNDIVKIEGIDATGGNNQPNIPDIPAHLWYFGLIGTC

SEQ ID NO: 11804 - protein, 268 aa, Synthetic construct
EVSQDLFNQFNLFAQYSAAAYCGKNNDAPAGTNITCTGNACPEVEKADATFLYSFEDSGVGDVTGFLALDNTNKLIVLSFRGSRSIENWFGNLNFLLKKINDICSGCRGHDGFTSSWRSVADTLRQKVEDAVREHPDYRVVFTGHSLGGALATVAGADLRGNGYDIDVFSYGAPRVGNRAFAEFLTAQTGGTLYRITHTNDIVPRLPPREFGYSHSSPEYWIKSGTLVPVTRNDIVKIEGIDATGGNNQPNIRDIPAHLWYFGLIGTC

SEQ ID NO: 11805 - protein, 268 aa, Synthetic construct
KVSQDLFNQFNLFAQYSAAAYCGKNNDAPAGTNITCTGNACPEVEKADATFLYSFEDSGVGDVTGFLALDNTNKLIVLSFRGSRSIENWIGNLKFLLKKINDICSGCRGHDGFTSSWRSVADTLRQKVEDAVREHPDYRVVFTGHSLGGALATVAGADLRGNGYDIDVFSYGAPRVGNRAFAEFLTVQTGGTLYRITHTNDIVPRLPPREFGYSHSSPEYWIKSGTLVPVTRNDIVKIEGIDATGGNNRPNIPDIPAHLWYFGLIGTC

SEQ ID NO: 11806 - protein, 268 aa, Thermomyces lanuginosus
EVSQDLFNQFNLFAQYSAAAYCGKNNDAPAGTNITCTGNACPEVEKADATFLYSFEDSGVGDVTGFLALDNTNKLIVLSFRGSRSIENWIGNLNFDLKEINDICRRCRGHDGFTSSWRSVADTLRQKVEDAVREHPDYRVVFTGHSLGGALATVAGADLRGNGYDIDVFSYGAPRVGNRAFAEFLTVQTGGTLYRITHTNDIVPRLPPREFGYSHSSPEYWIKSGTLVPVTRNDIVKIEGIDATGGNNQPNIPDIPAHLWYFGLIGTC

SEQ ID NO: 11807 - protein, 268 aa, Thermomyces lanuginosus
EVSQDLFNQFNLFAQYSAAAYCGKNNDAPAGTNITCTGNACPEVEKADATFLYSFEDSGVGDVTGFLALDNTNKLIVLSFRGSRSIENWIGNLKFDLKEINDICSGCRGHDGFTSSWRSVADTLRQKVEDAVREHPDYRVVFTGHSLGGALATVAGADLRGNGYDIDVFSYGAPRVGNRAFAEFLTVQTGGTLYRITHTNDIVPRLPPREFGYSHSSPEYWIKSGTLVPVTRNDIVKIEGIDATGGNNRPNIPDIPAHLWYFGLIGTC

SEQ ID NO: 11808 - protein, 268 aa, Thermomyces lanuginosus
EVSQDLFNQFNLFAQYSAAAYCGKNNDAPAGTNITCTGNACPEVEKADATFLYSFEDSGVGDVTGFLALDNTNKLIVLSFRGSRSIENWIGNLKFDLKEINDICSGCRGHDGFTSSWRSVADTLRQKVEDAVREHPDYRVVFTGHSLGGALATVAGADLRGNGYDIDVFSYGAPRVGNRAFAEFLTVQTGGTLYRITHTNDIVPRLPPREFGYSHSSPEYWIKSGTLVPVTRNDIVKIEGIDATGGNNHPNIPDIPAHLWYFGLIGTC

SEQ ID NO: 11809 - protein, 268 aa, Thermomyces lanuginosus
EVSQDLFNQFNLFAQYSAAAYCGKNNDAPAGTNITCTGNACPEVEKADATFLYSFEDSGVGDVTGFLALDNTNKLIVLSFRGSRSIENWIANLNFGLKEINDICSGCRGHDGFTSSWRSVADTLRQKVEDAVREHPDYRVVFTGHSLGGALATVAGADLRGNGYDIDVFSYGAPRVGNRAFAEFLTVQTGGTLYRITHTNDIVPRLPPREFGYSHSSPEYWIKSRTLVPVRRRDIVKIEGIDATGGNNQPNIPDIPAHLWYFGLIGTC

SEQ ID NO: 11810 - protein, 268 aa, Thermomyces lanuginosus
EVSQDLFNQFNLFAQYSAAAYCGKNNDAPAGTNITCTGNACPEVEKADATFLYSFEDSGVGDVTGFLALDNTNKLIVLSFRGSWSIENWIANLNFDLKKINDICSGCRGHDGFTSSWRSVADTLRQKVEDAVREHPDYRVVFTGHSLGGALATVAGADLRGNGYDIDVFSYGAPRVGNRAFAEFLTVQTGGTLYRITHTNDIVPRLPPREFGYSHSSPEYWIKSGTLVPVRRRDIVKIEGIDATGGNNRPNIPDIPAHLWYFGLIGTC

SEQ ID NO: 11811 - protein, 268 aa, Thermomyces lanuginosus
EVSQDLFNQFNLFAQYSAAAYCGKNNDAPAGTNITCRRNACPEVEKADATFLYSFEDSGVGDVTGFLALDNTNKLIVLSFRGSRSIENWIGNLNFDLKEINDICSGCRGHDGFTSSWRSVADTLRQKVEDAVREHPDYRVVFTGHSLGGALATVAGADLRGNGYDIDVFSYGAPRVGNRAFAEFLTVQTGGTLYRITHTNDIVPRLPPREFGYSHSSPEYWIKSGTLVPVTRNDIVKIEGIDATGGNNQPNIPDIPAHLWYFGLIGTC

SEQ ID NO: 11812 - protein, 268 aa, Thermomyces lanuginosus
EVSQDLFNQFNLFAQYSAAAYCGKNNDAPAGTNITCTGNACPEVEKADATFLYSFEDSGVGDVTGFLALDNTNKLIVLSFRGSRSIENWIGNLNFDLKEINDICSRCRGHDGFTSSWRSVADTLRQKVEDAVREHPDYRVVFTGHSLGGALATVAGADLRGNGYDIDVFSYGAPRVGRRAFAEFLTVQTGGTLYRITHTNDIVPRLPPREFGYSHSSPEYWIKSGTLVPVTRNDIVKIEGIDATGGNNQPNIPDIPAHLWYFGLIGTC

SEQ ID NO: 11813 - protein, 268 aa, Thermomyces lanuginosus
EVSQDLFNQFNLFAQYSAAAYCGKNNDAPAGTNITCTGNACPEVEKADATFLYSFEDSGVGDVTGFLALDNTNKLIVLSFRGSRSIENWIGNLNFDLKEINDICSGCRGHDGFTSSWRSVADTLRQKVEAAVREHPDYRVVFTGHSLGGALATVAGADLRGNGYDIDVFSYGAPRVGNRAFAEFLTTQTGGTLYRITHTNDIVPRLPPREFGYSHSSPEYWIKSGTLVPVTRNDIVKIEGIDATGGNNQPNIPDIPAHLWYFGRIGTC

SEQ ID NO: 11814 - protein, 268 aa, Synthetic construct
EVSQDLFNQFNLFAQYSAAAYCGKNNDAPAGTNITCTGNACPEVEKADATFLYSFEDSGVGDVTGFLALDNTNKLIVLSFRGSRSIENWISNVNCDLKEINDICSGCRGHDGFTSSWRSVADTLRQKVEDAVREHPDYRVVFTGHSLGGALATVAGADLRGNGYDIDVFSYGAPRVGNRAFAEFLTVQTGGTLYRITHTNDIVPRLPPREFGYSHSSPEYWIKSGTLVPVTRNDIVKIEGIDATGGNNQPNIPDIPAHLWYFGLIGTC

SEQ ID NO: 11815 - protein, 268 aa, Synthetic construct
EVSQDLFNQFNLFAQYSAAAYCGKNNDAPAGTNITCTGNACPEVEKADATFLYSFEDSGVGDVTGFLALDNTNKLIVLSFRGSRSIENWFGNLNFLLKKINDICSGCRGHDGFTSSWRSVADTLRQKVEDAVREHPDYRVVFTGHSLGGALATVAGADLRGNGYDIDVFSYGAPRVGNRAFAEFLTAQTGGTLYRITHTNDIVPRLPPREFGYSHSSPEYWIKSGTLVPVTRNDIVKIEGIDATGGNNRPNIPDIPAHLWYFGLIGTC

SEQ ID NO: 11816 - protein, 268 aa, Thermomyces lanuginosus
EVSQDLFNQFNLFAQYSAAAYCGKNNDAPAGTNITCTGNACPEVEKADATFLYSFEDSGVGDVTGFLALDNTNKQIVLSFRGSRSIENWIGNLNFDLKEINDICSGCRGHDGFTSSWRSVADTLRQKVEDAVREHPDYRVVFTGHSLGGALATVAGADLRGNGYDIDVFSYGAPRVGNRAFAEFLTTQTGGTLYRITHTNDIVPRLPPREFGYSHSSPEYWIKSGTLVPVTRNDIVKIEGIDATGGNNQPNIPDIPAHLWYFGRIGTC

SEQ ID NO: 11817 - protein, 268 aa, Thermomyces lanuginosus
EVSQDLFNQFNLFAQYSAAAYCGKNNDAPAGTNITCTGNACPEVEKADATFLYSFEDSGVGDVTGFLALDNTNKRIVLSFRGSRSIENWIGNLNFDLKEINDICSGCRGHDGFTSSWRSVADTLRQKVEAAVREHPDYRVVFTGHSLGGALATVAGADLRGNGYDIDVFSYGAPRVGNRAFAEFLTVQTGGTLYRITHTNDIVPRLPPREFGYSHSSPEYWIKSGTLVPVTRNDIVKIEGIDATGGNNQPNIPDIPAHLWYFGRIGTC

SEQ ID NO: 11818 - protein, 268 aa, Thermomyces lanuginosus
EVSQDLFNQFNLFAQYSAAAYCGKNNDAPAGTNITCTGNACPEVEKADATFLYSFEDSGVGDVTGFLALDNTNKLIVLSFRGSRSIENWIGNLNFDLKEINDICSGCRGHDGFTSSWRSVADTLRQKVEDAVREHPDYRVVFTGHSLGGALATVAGADLRGNGYDIDVFSYGAPRVGNRAFAEFLTVQTGGTLYRITHTNDIVPRLPPREFGYSHSSPEYWIKSRTLVPVTRRDIVKIEGIDATGGNNQPNIPDIPAHLWYFGLIGTC

SEQ ID NO: 11819 - protein, 268 aa, Thermomyces lanuginosus
EVSQDLFNQFNLFAQYSAAAYCGKNNDAPAGTNITCTGNACPEVEKADATFLYSFEDSGVGDVTGFLALDNTNKLIVLSFRGSRSIENWIGNLNFDLKEINDICSGCRGHDGFTSSWRSVADTLRQKVEAAVREHPDYRVVFTGHSLGGALATVAGADLRGNGYDIDVFSYGAPRVGNRAFAEFLTTQTGGTLYRITHTNDIVPRLPPREFGYSHSSPEYWIKSGTLVPVTRNDIVKIEGIDATGGNNQPNIPDIPAHLWYFGLIGTC

SEQ ID NO: 11820 - protein, 268 aa, Thermomyces lanuginosus
EVSQDLFNQFNLFAQYSAAAYCGKNNNAPAGTNITCTGNACPEVEKADATFLYSFEDSGVGDVTGFLALDNTNKLIVLSFRGSRSIENWIGNLNFDLKEINDICSGCRGHAGFTSSWRSVADTLRQKVEDAVREHPDYRVVFTGHSLGGALATVAGADLRGNGYDIDVFSYGAPRVGNRAFAEFLTVQTGGTLYRITHTNDIVPRLPPREFGYSHSSPEYWIKSGTLVPVTRNDIVKIEGIDATGGNNQPNIPDIPAHLWYFGLIGTC

SEQ ID NO: 11821 - protein, 268 aa, Thermomyces lanuginosus
EVSQDLFNQFNLFAQYSAAAYCGKNNDAPAGTNITCTGNACPEVEKADATFLYSFEDSGVGDVTGFLALDNTNKLIVLSFRGSRSIENWIGNLNFDLKEIRRICSGCRGHDGFTSSWRSVADTLRQKVEDAVREHPDYRVVFTGHSLGGALATVAGADLRGNGYDIDVFSYGAPRVGNRAFAEFLTVQTGGTLYRITHTNDIVPRLPPREFGYSHSSPEYWIKSGTLVPVTRNDIVKIEGIDATGGNNQPNIPDIPAHLWYFGLIGTC

SEQ ID NO: 11822 - protein, 268 aa, Thermomyces lanuginosus
EVSQDLFNQFNLFAQYSAAAYCGKNNDAPAGTNITCTGNACPEVEKADATFLYSFEDSGVGDVTGFLALDNTNKLIVLSFRGSRSIENWIGNLNFELKEINDICSGCRGHDGFTSSWRSVADTLRQKVEDAVREHPDYRVVFTGHSLGGALATVAGADLRGNGYDIDVFSYGAPRVGNRAFAEFLTVQTGGTLYRITHTNDIVPRLPPREFGYSHSSPEYWIKSGTLVPVRRRDIVKIEGIDATGGNNQPNIPDIPAHLWYFGLIGTC

SEQ ID NO: 11823 - protein, 268 aa, Thermomyces lanuginosus
EVSXDLFNQFNLFAQYSAAAYCGKNNDAPAGTNITCTGNACPEVEKADATFLYSFEDSGVGDVTGFLALDNTNKLIVLSFRGSRSIENWIGNLNFDLKEINDICSGCRGHDGFTSSWRSVADTLRQKVEDAVREHPDYRVVFTGHSLGGALATVAGADLRGNGYDIDVFSYGAPRVGNRAFAEFLTVQTGGTLYRITHTNDIVPRLPPREFGYSHSSPEYWIKSGTXVPVTRNDIVKIEGIDATGGNNQPNIPDIPAHLWYFGLIGTC

SEQ ID NO: 11824 - protein, 268 aa, Thermomyces lanuginosus
EVSQDLFNQFNLFAQYSAAAYCGKNNDAPAGTNITCTGNACPEVEKADATFLYSFEDSGVGDVTGFLALDNTNKLIVLSFRGSRSIENWIGNLNFDLKEINDICSGCRGHDGFTSSWRSVADTLRQKVEDAVREHPDYRVVFTGHSLGGALATVAGADLRGNGYDIDVFSYGAPRVGNRAFAEFLTVQTGGTLYRITHTNDIVPRLPPREFGYSHSSPEYWIKSGTRVPVTRNDIRKIEGIDATGGNNQPNIPDIPAHLWYFGLIGTC

SEQ ID NO: 11825 - protein, 268 aa, Thermomyces lanuginosus
EVSQDLFNQFNLFAQYSAAAYCKKNNDAPAGTNITCTGNACPEVEKADATFLYSFEDSGVGDVTGFLALDNTNKLIVLSFRGSRSIENWIGNLNFDLKEINDICSGCRGHDGFTSSWRSVADTLRQKVEDAVREHPDYRVVFTGHSLGGALATVAGADLRGNGYDIDVFSYGAPRVGNRAFAEFLTNQTGGTLYRITHTNDIVPRLPPREFGYSHSSPEYWIKSGTLVPVTRNDIVKIEGIDATGGNNQPNIPDIPAHLWYFGRIGTC

SEQ ID NO: 11826 - protein, 268 aa, Thermomyces lanuginosus
EVSQDLFNQFNLFAQYSAAAYCGKNNEAPAGTNITCTGNACPEVEKADATFLYSFEDSGVGDVTGFLALDNTNKLIVLSFRGSRSIENWIGNLNFDLKEINDICSGCRGHDGFTSSWRSVADTLRQKVEDAVREHPDYRVVFTGHSLGGALATVAGADLRGNPYDIDVFSYGAPRVGNRAFAEFLTVQTGGTLYRITHTNDIVPRLPPREFGYSHSSPEYWIKSGTLVPVTRNDIVKIEGIDATGGNNQPNIPDIPAHLWYFGLIGTC

SEQ ID NO: 11827 - protein, 268 aa, Synthetic construct
EVSQDLFNQFNLFAQYSAAAYCGKNNDAPAGTNITCTGNACPEVEKADATFLYSFEDSGVGDVTGFLALDNTNKLIVLSFRGSRSIENWIGNLKLHLKEINDICSGCRGHDGFTSSWRSVADTLRQKVEDAVREHPDYRVVFTGHSLGGALATVAGADLRGNGYDIDVFSYGAPRVGNRAFAEFLTVQTGGTLYRITHTNDIVPRLPPREFGYSHSSPEYWIKSGTLVPVTRNDIVKIEGIDATGGNNQPNIPDIPAHLWYFGLIGTC

SEQ ID NO: 11828 - protein, 268 aa, Thermomyces lanuginosus
EVSQDLFNQFNLFAQYSAAAYCGKNNDAPAGTNITCTGNACPEVFKADATFLYSFEDSGVGDVTGFLALDNTRKLIVLSFRGSRSIENWIGNLNFDLKEINDICSGCRGHDGFTSSWRSVADTLRQKVEDAVREHPDYRVVFTGHSLGGALATVAGADLRGNGYDIDVFSYGAPRVGNRAFAEFLTVQTGGTLYRITHTNDIVPRLPPREFGYSHSSPEYWIKSGTLVPVTRNDIVKIEGIDATGGNNQPNIPDIPAHLWYFGLIGTC

SEQ ID NO: 11829 - protein, 268 aa, Thermomyces lanuginosus
EVSQDLFNQFNLFAQYSAAAYCGKNNDAPAGTNITCTGNACPEVEKADATFLYSFEDSGVGDVTGFLALDNTNKLIVLSFRGSRSIENWIGNLNFDLKEINDICSGCRGHDGFTSSWRSVADTLRQKVEDAVREHPDYRVVFTGHSLGGALATVAGADLRGNGYDIDVFSYGAPRVGNRAFAEFLTVQTGGTLYRITHTNDIVPRLPPREFGYSHSSPEYWIKRGTLVRVTRNDIVKIEGIDATGGNNQPNIPDIPAHLWYFGLIGTC

SEQ ID NO: 11830 - protein, 268 aa, Thermomyces lanuginosus
EVSQDLFNQFKLFAQYSAAAYCGKNNSAPAGTNITCTGNACPEVEKADATFLYSFEDSGVGDVTGFLALDNTNKLIVLSFRGSRSIENWIGNLNFDLKEINDICSGCRGHDGFTSSWRSVADTLRQKVEDAVREHPDYRVVFTGHSLGGALATVAGADLRGNGYDIDVFSYGAPRVGNRAFAEFLTVQTGGTLYRITHTNDIVPRLPPREFGYSHSSPEYWIKSGTLVPVTRNDIVKIEGIDATGGNNQPNIPDIPAHLWYFGLIGTC

SEQ ID NO: 11831 - protein, 268 aa, Thermomyces lanuginosus
EVSQDLFNQFNLFAQYSAAAYCGKNNDAPAGTNITCTGNACPEVEKADATFLYSFEDSGVGDVTGFLALDNTNKLIVLSFRGSRSIENWIGNLNFDLKEINDICSGCRGHDGFTSSWRSVADTLRQKVEDAVREHPDYRVVFTGHSLGGALATVAGADLRGNGYDIDVFSYGAPRVGNRAFAEFLTVQTGGTLYRITHTNDIVPRLPPREFGYSHSSPEYWIKSGRLVPVTRNDIVKIEGIDATGGNNRPNIPDIPAHLWYFGLIGTC

SEQ ID NO: 11832 - protein, 268 aa, Thermomyces lanuginosus
EVSQDLFNQFNLFAQYSKAAYCGKNNSAPAGTNITCTGNACPEVEKADATFLYSFEDSGVGDVTGFLALDNTNKLIVLSFRGSRSIENWIGNLNFDLKEINDICSGCRGHDGFTSSWRSVADTLRQKVEDAVREHPDYRVVFTGHSLGGALATVAGADLRGNGYDIDVFSYGAPRVGNRAFAEFLTVQTGGTLYRITHTNDIVPRLPPREFGYSHSSPEYWIKSGTLVPVTRNDIVKIEGIDATGGNNQPNIPDIPAHLWYFGLIGTC

SEQ ID NO: 11833 - protein, 268 aa, Thermomyces lanuginosus
EVSQDLFNQFNLFAQYSAAAYCGKNNDAPAGTNITCTGNACPEVEKADATFLYSFEDSGVGDVTGFLALDNTNKLIVLSFRGSRSIENWIGNLNFDLKEINDICSGCRGHDGFTSSWRSVADTLRQKVEDAVREHPDYRVVFTGHSLGGALATVAGADLRGNGYDIDVFSYGAPRVGNRAFAEFLTVQTGGTLYRITHTNDIVPRLPPREFGYSHSSPEYWIKSGTLVPVTRNDIVKIEGIDRTRGNNQPNIPDIPAHLWYFGLIGTC

SEQ ID NO: 11834 - protein, 268 aa, Thermomyces lanuginosus
EVSQDLFNQFNLFAQYSAAAYCQKNNDAPAGTNITCTGNACPEVEKADATFLYSFEDSGVGDVTGFLALDNTNKGIVLSFRGSRSIENWIANLNFDLKEINDICSGCRGHDGFTSSWRSVADTLRQKVEDAVREHPDYRVVFTGHSLGGALATVAGADLRGNGYDIDVFSYGAPRVGNRAFAEFLTVQTGGTLYRITHTNDIVPRLPPREFGYSHSSPEYWIKSGTLVPVTRNDIVKIEGIDATGGNNQPNQPDIPAHLWYFGRIGTC

SEQ ID NO: 11835 - protein, 268 aa, Synthetic construct
EVSQDLFNQFNLFAQYSAAAYCGKNNDAPAGTNITCTGNACPEVEKADATFLYSFEDSGVGDVTGFLALDNTNKLIVLSFRGSRSIENWFGNLNFLLKKINDICSGCRGHDGFTSSWRSVADTLRQKVEDAVREHPDYRVVFTGHSLGGALATVAGADLRGNGYDIDVFSYGAPRVGNRAFAEFLTAQTGGTLYRITHTNDIVPRLPPREFGYSHSSPEYWIKSGTLVPVRRNDIVKIEGIDATGGNNQPNIPDIPAHLWYFGLIGTC

SEQ ID NO: 11836 - protein, 268 aa, Thermomyces lanuginosus
EVSQDLFNQFNLFAQYSAAAYCGANNDAPAGTNITCTGNACPEVEKADATFLYSFEDSGVGDVTGFLALDNTNKLIVLSFRGSRSIENWIGNLNFDLKEINDICSGCRGHDGFTSSWRSVADTLRQKVEDAVREHPDYRVVFTGHSLGGALATIAGADLRGNGYDIDVFSYGAPRVGNRAFAEFLTVQTGGTLYRITHTNDIVPRLPPREFGYSHSSPEYWIKSGTLVPVTRNDIVKIEGIDATGGNNQPNIPDIPAHLWYFGLIGTC

SEQ ID NO: 11837 - protein, 268 aa, Thermomyces lanuginosus
EVSQDLFNQFNLFAQYSAAAYCGKNNDAPAGTNITCTGNACPEVEKADATFLYSFEDSGVGDVTGFLALDNTNKRIVLSFRGSRSIENWIGNLNFDLKEINDICSGCRGHDGFTSSWRSVADTLRQKVEDAVREHPDYRVVFTGHSLGGALATVAGADLRGNGYDIDVFSYGAPRVGNRAFAEFLTNQTGGTLYRITHTNDIVPRLPPREFGYSHSSPEYWIKSGTLVPVTRNDIVKIEGIDATGGNNQPNIPDIPAHLWYFGRIGTC

SEQ ID NO: 11838 - protein, 268 aa, Thermomyces lanuginosus
EVSQDLFNQFNLFAQYSAAAYCGKNNDAPAGTNITCTGNACPEVEKADATFLYSFEDSGVGDVTGFLALDNTNKLIVLSFRGSRSIENWIGNLNFDLKEINDICSGCRGHDGFTSSWRSVADTLRQKVEDAVREHPDYRVVFTGHSLGGALATVAGADLRGNGYDIDVFSYGAPRVGNRAFAEFLTTQQGGTLYRITHTNDIVPRLPPREFGYSHSSPEYWIKSGTLVPVTRNDIVKIEGIDATGGNNQPNIPDIPAHLWYFGRIGTC

SEQ ID NO: 11839 - protein, 268 aa, Synthetic construct
EVSQDLFNQFNLFAQYSAAAYCGKNNDAPAGTNITCTGNACPEVEKADATFLYSFEDSGVGDVTGFLALDNTNKLIVLSFRGSRSIENWFGNLNFLLKKINDICSGCRGHDGFTSSWRSVADTLRQKVEDAVREHPDYRVVFTGHSLGGALATVAGADLRGNGYDIDVFSYGAPRVGNRAFAEFLTAQTGGTLYRITHTNDIVPRLPPREFGYSHSSPEYWIKSGTLVPVTRNYIVKIEGIDATGGNNQPNIPDIPAHLWYFGLIGTC

SEQ ID NO: 11840 - protein, 268 aa, Thermomyces lanuginosus
EVSQDLFNQFNLFAQYSAAAYCGKNNDAPAGTNITCTGNACPEVEKADATFLYSFEDSGVGDVTGFLALDNTNKLIVLSFRGSRSIENWIGNLNFDLKEINDICSGCRGHDGFTSSWRSVADTLRQKVEAAVREHPDYRVVFTGHSLGGALATVAGADLRGNGYDIDVFSYGAPRVGNRAFAEFLTNQTGGTLYRITHTNDIVPRLPPREFGYSHSSPEYWIKSGTLVPVTRNDIVKIEGIDATGGNNQPNIPDIPAHLWYFGLIGTC

SEQ ID NO: 11841 - protein, 268 aa, Thermomyces lanuginosus
EVSQDLFNQFNLFAQYSAAAYCGKNNDAPAGTNITCTGNACPEVEKADATFLYSFEDSGVGDVTGFLALDNTNKLIVLSFRGSRSIENWIGNLNFDLKEINDICSGCRGHDGFTSSWRSVADTLRQKVEDAVREHPDYRVVFTGHSLGGALATVAGADLRGNGYDIDVFSYGAPRVGNRAFAEFLTVQTGGTLYRITHTNDIVPRLPPREFGYSHSSPEYWIKSGTLVPVTRRDIVKIEGIDATGGNNRPNIPDIPAHLWYFGLIGTC

SEQ ID NO: 11842 - protein, 268 aa, Thermomyces lanuginosus
EVSQDLFNQFNLFAQYSAAAYCGKNNDAPAGTNITCTGNACPEVEKADATFLYSFEDSGVGDVTGFLALDNTNKLIVLSFRGSRSIENWITNLNFDLKEIRDICSRCRGHDGFTSSWRSVADTLRQKVEDAVREHPDYRVVFTGHSLGGALATVAGADLRGNGYDIDVFSYGAPRVGNRAFAEFLTVQTGGTLYRITHTNDIVPRLPPREFGYSHSSPEYWIKSGTLVPVTRNDIVKIEGIDATGGNNQPNIPDIPAHLWYFGLIGTC

SEQ ID NO: 11843 - protein, 268 aa, Thermomyces lanuginosus
EVSQDLFNQFNLFAQYSAAAYCGKNNDAPAGTNITCTGNACPEVEKADATFLYSFEDSGVGDVTGFLALDNTNKLIVLSFRGSRSIENWIGNLNFDLKEINDICSGCRGHDGFTSSWRSVADTLRQKVEDAVREHPDYRVVFTGHSLGGALATVAGADLRGNGYDIDVFSYGAPRVGNRAFAEFLTVQTGGTLYRITHTNDIVPRLPPREFGYSHSSPEYWIKRGTRVPVTRNDIVKIEGIDATGGNNQPNIPDIPAHLWYFGLIGTC

SEQ ID NO: 11844 - protein, 268 aa, Thermomyces lanuginosus
EVSQDLFNQFNLFAQYSAAAYCQKNNDAPAGTNITCTGNACPEVEKADATFLYSFEDSGVGDVTGFLALDNTNKLIVLSFRGSRSIENWIGNLNFDLKEINDICSGCRGHAGFTSSWRSVADTLRQKVEDAVREHPDYRVVFTGHSLGGALATVAGADLRGNGYDIDVFSYGAPRVGNRAFAEFLTVQTGGTLYRITHTNDIVPRLPPREFGYSHSSPEYWIKSGTLVPVTRNDIVKIEGIDATGGNNQPNIPDIPAHLWYFGRIGTC

SEQ ID NO: 11845 - protein, 268 aa, Thermomyces lanuginosus
EVSQDLFNQFNLFAQYSAAAYCGKNNDAPAGTNITCTGNACPEVEKADATFLYSFEDSGVGDVTGFLALDNTNKRIVLSFRGSRSIENWIGNLNFDLKEINDICSGCRGHDGFTSSWRSVADTLRQKVEDAVREHPDYRVVFTGHSLGGALATVAGADLRGNGYDIDVFSYGAPRVGNRAFAEFLTTQTGGTLYRITHTNDIVPRLPPREFGYSHSSPEYWIKSGTLVPVTRNDIVKIEGIDATGGNNQPNIPDIPAHLWYFGRIGTC

SEQ ID NO: 11846 - protein, 268 aa, Thermomyces lanuginosus
EVSQDLFNQFNLFAQYSAAAYCGKNNDAPAGTNITCTGNACPEVEKADATFLYSFEDSGVGDVTGFLALDNTNKLIVLSFRGSRSIENWIGNLNFDLKEINDICSGCRGHDGFTSSWRSVADTLRQKVEDAVREHPDYRVVFTGHSLGGALATVAGADLRGNGYDIDVFSYGAPRVGNRAFAEFLTVQTGGTLYRITHTRDIVPRLPPREFGYSHSSPEYWIKSGTLVPVRRNDIVKIEGIDATGGNNQPNIPDIPAHLWYFGLIGTC

SEQ ID NO: 11847 - protein, 268 aa, Thermomyces lanuginosus
EVSQDLFNQFNLFAQYSAAAYCGKNNDAPAGTNITCTGNACPEVEKADATFLYSFEDSGVGDVTGFLALDNTNKLIVLSFRGSRSIENWIGNLNFDLKEINDICSGCRGHDGFTSSWRSVADTLRQKVEDAVREHPDYRVVFTGHSLGGALATVAGADLRGNGYDIDVFSYGAPRVGNRAFAEFLTVQTGGTLYRITHTNDIVPRLPPREFGYSHSSPEYWIKSGRLRPVTRNDIVKIEGIDATGGNNQPNIPDIPAHLWYFGLIGTC

SEQ ID NO: 11848 - protein, 268 aa, Synthetic construct
EVSQDLFNQFNLFAQYSAAAYCGKNNDAPAGTNITCTGNACPEVEKADATFLYSFEDSGVGDVTGFLALDNTNKLIVLSFRGSRSIENWFGNLNFLLKKINDICSGCRGHDGFTSSWRSVADTLRQKVEDAVREHPDYRVVFTGHSLGGALATVAGADLRGNGYDIDVFSYGAPRVGNRAFAEFLTAQTGGTLYRITHRNDIVPRLPPREFGYSHSSPEYWIKSGTLVPVTRNDIVKIEGIDATGGNNQPNIPDIPAHLWYFGLIGTC

SEQ ID NO: 11849 - protein, 268 aa, Thermomyces lanuginosus
EVSQDLFNQFNLFAQYSAAAYCGKNNDAPAGTNITCTGNACPEVEKADATFLYSFEDSGVGDVTGFLALDNTNKLIVLSFRGSRSIENWIGNLNFDLKEINDICSGCRGHDGFTSSWRSVADTLRQKVEDAVREHPDYRVVFTGHSLGGALATVAGADLRGNGYDIDVFSYGAPRVGNRAFAEFLTVQTGGTLYRITHTNDIVPRLPPREFGYSHSSPEYWIKKGTLVKVTRNDIVKIEGIDATGGNNQPNIPDIPAHLWYFGLIGTC

SEQ ID NO: 11850 - protein, 268 aa, Thermomyces lanuginosus
EVSQDLFNQFNLFAQYSAAAYCGKNNDAPAGTQITCTGNACPEVEKADATFLYSFEDSGVGDVTGFLALDNTNKLIVLSFRGSRSIENWIGNLNFWLKEINDICSGCRGHDGFTSSWRSVADTLRQKVEDAVREHPDYRVVFTGHSLGGALATVAGADLRGNGYDIDVFSYGAPRVGNRAFAEFLTVQTGGTLYRITHTNDIVPRLPPREFGYSHSSPEYWIKSGTLVPVRRRDIVKIEGIDATGGNNQPNIPDIPAHLWYFGLIGTC

SEQ ID NO: 11851 - protein, 268 aa, Thermomyces lanuginosus
EVSQDLFNQFNLFAQYSAAAYCGKNNDAPAGTNITCTGNACPEVEKADATFLYSFEDSGVGDVTGFLALDNTNKLIVLSFRGSRSIENWIGNLNFDLKHINDICSGCRGHDGFTSSWRSVADTLRQKVEDAVREHPDYRVVFTGHSLGGALATVAGADLRGNGYDIDVFSYGAPRVGNRAFAEFLTVQTGGTLYRITHTNDIVPRLPPXEFGYSHSSPEYWIKSGTLVPVTRNDIVKIEGIDATGGNNHPNIPDIPAHLWYFGLIGTC

SEQ ID NO: 11852 - protein, 268 aa, Thermomyces lanuginosus
EVSQDLFNQFNLFAQYSAAAYCGKNNSAPAGTNITCTGNACPEVEKADATFLYSFEDSGVGDVTGFLALDNTNKQIVLSFRGSRSIENWIQNLNFDLKEINDICSGCRGHDGFTSSWRSVADTLRQKVEDAVREHPDYRVVFTGHSLGGALATVAGADLRGNGYDIDVFSYGAPRVGNRAFAEFLTVQTGGTLYRITHTNDIVPRLPPREFGYSHSSPEYWIKSGTLVPVTRNDIVKIEGIDATGGNNQPNIPDIPAHLWYFGLIGTC

SEQ ID NO: 11853 - protein, 268 aa, Thermomyces lanuginosus
EVSRDLFNQFNLFAQYSAAAYCGKNNDAPAGTNITCTGNACPEVEKADATFLYSFEDSGVGDVTGFLALDNTNKLIVLSFRGSRSIENWIGNLNFDLKEINDICSGCRGHDGFTSSWRSVADTLRQKVEDAVREHPDYRVVFTGHSLGGALATVAGADLRGNGYDIDVFSYGAPRVGNRAFAEFLTVQTGGTLYRITHTNDIVPRLPPREFGYSHSSPEYWIKSGTLVPVRRNDIVKIEGIDATGGNNQPNIPDIPAHLWYFGLIGTC

SEQ ID NO: 11854 - protein, 268 aa, Thermomyces lanuginosus
EVSQRLFNQFRLFAQYSAAAYCGKNNDAPAGTNITCTGNACPEVEKADATFLYSFEDSGVGDVTGFLALDNTNKLIVLSFRGSRSIENWIGNLNFDLKEINDICSGCRGHDGFTSSWRSVADTLRQKVEDAVREHPDYRVVFTGHSLGGALATVAGADLRGNGYDIDVFSYGAPRVGNRAFAEFLTVQTGGTLYRITHTNDIVPRLPPREFGYSHSSPEYWIKSGTLVPVTRNDIVKIEGIDATGGNNQPNIPDIPAHLWYFGLIGTC

SEQ ID NO: 11855 - protein, 268 aa, Synthetic construct
EVSQDLFNQFNLFAQYSAAAYCGKNNDAPAGTNITCTGNACPEVEKADATFLYSFEDSGVGDVTGFLALDNTDKLIVLSFRGSRSIKNWIANLIFGLKEINDICSGCRGHDGFTSSWRSVADTLRQKVEDAVREHPDYRVVFTGHSLGGALATVAGADLRGNGYDIDVFSYGAPRVGNRAFAEFLTVQTGGTLYRITHTNDIVPRLPPREFGYSHSSPEYWIKSGTLVPVTRNDIVKIEGIDATGGNNQPNIPDIPAHLWYFGLIGTC

SEQ ID NO: 11856 - protein, 268 aa, Thermomyces lanuginosus
EVSQDLFNQFNLFAQYSAAAYCGKNNRAPAGTQITCTGNACPEVEKADATFLYSFEDSGVGDVTGFLALDNTNKLIVLSFRGSRSIENWIGNLNFDLKEINDICSGCRGHDGFTSSWRSVADTLRQKVEDAVREHPDYRVVFTGHSLGGALATVAGADLRGNGYDIDVFSYGAPRVGNRAFAEFLTVQTGGTLYRITHTNDIVPRLPPREFGYSHSSPEYWIKSGTLVPVTRNDIVKIEGIDATGGNNQPNIPDIPAHLWYFGLIGTC

SEQ ID NO: 11857 - protein, 268 aa, Thermomyces lanuginosus
EVSQDLFNQFNLFAQYSAAAYCGKNNDAPAGTNITCTGNACPEVEKADATFLYSFEDSGVGDVTGFLALDNTNKLIVLSFRGSRSIENWIANLNFDLKKINDICSGCRGHDGFTSSWRSVADTLRQKVEDAVREHPDYRVVFTGHSLGGALATVAGADLRGNGYDIDVFSYGAPRVGNRAFAEFLTVQGGGTLYRITHTNDIVPRLPPREFGYSHSSPEYWIKSGTLVPVRRRDIVKIEGIDATGGNNRPNIPDIPAHLWYFGLIGTC

SEQ ID NO: 11858 - protein, 268 aa, Thermomyces lanuginosus
EVSQDLFNQFNLFAQYSAAAYCGKNNDAPAGTNITCTGNACPEVEKADATFLYSFEDSGVGDVTGFLALDNTNKLIVLSFRGSRSIENWIGNLNFDLKEINDICSGCRGHDGFTSSWRSVADTLRQKVEDAVREHPDYRVVFTGHSLGGALATVAGADLRGNGYDIDVFSYGAPRVGNRAFAEFLTVQTGGTLYRITHTNDIVPRLPPREFGYSHSSPEYWIKSRTLRPVTRNDIVKIEGIDATGGNNQPNIPDIPAHLWYFGLIGTC

SEQ ID NO: 11859 - protein, 268 aa, Thermomyces lanuginosus
EVSQDLFNQFNLFAQYSAAAYCGKNNDAPAGTNITCTGNACPEVEKADATFLYSFEDSGVGDVTGFLALDNTNKLIVLSFRGSRSIENWIGNLNFDLKEINDICSGCRGHDGFTSSWRSVADTLRQKVEAAVREHPDYRVVFTGHSLGGALATVAGADLRGNGYDIDVFSYGAPRVGNRAFAEFLTVQQGGTLYRITHTNDIVPRLPPREFGYSHSSPEYWIKSGTLVPVTRNDIVKIEGIDATGGNNQPNIPDIPAHLWYFGRIGTC

SEQ ID NO: 11860 - protein, 268 aa, Thermomyces lanuginosus
EVSQDLFNQFNLFAQYSAAAYCGKNNDAPAGTNITCTGNACPEVEKADATFLYSFEDSGVGDVTGFLALDNTNKLIVLSFRGSRSIENWIGNLNFDLKEINDICSGCRGHDGFTSSWRSVADTLRQKVEDAVREHPDYRVVFTGHSLGGALATVAGADLRGNGYDIDVFSYGAPRVGNRAFAEFLTVQTGGTLYRITHTNDIVPRLPPREFGYSHSSPEYWIKSGTLVPVTRNDIVKIEGIDATRGNNRPNIPDIPAHLWYFGLIGTC

SEQ ID NO: 11861 - protein, 268 aa, Thermomyces lanuginosus
EVSQDLFNQFNLFAQYSAAAYCGKNNNAPAGTNITCTGNACPEVEKADATFLYSFEDSGVGDVTGFLALDNTNKLIVLSFRGSRSIENWIGNLNFDLKEINDICSGCRGHDGFTSSWRSVADTLRQKVEDAVREHPDYRVVFTGHSLGGALATVAGADLRGNGYDIDVFSYGAPRVGNRAFAEFLTVQTGGTLYRITHTNDIVPRLPPREFGYSHSSPEYWIKSGTLVPVTRQDIVKIEGIDATGGNNQPNIPDIPAHLWYFGLIGTC

SEQ ID NO: 11862 - protein, 268 aa, Thermomyces lanuginosus
EVSQDLFNQFNLFAQYSAAAYCGKNNDAPAGTNITCTGNACPEVEKADATFLYSFEDSGVGDVTGFLALDNTNKLIVLSFRGSRSIENWIGNLNFDLKEINDICSGCRGHDGFTSSWRSVADTLRQKVEDAVREHPDYRVVFTGHSLGGALATVAGADLRGNGYDIDVFSYGAPRVGNRAFAEFLTVQTGGTLYRITHTNDIVPRLPPREFGYSHSSPEYWIKSGTLVPVRRNDIRKIEGIDATGGNNQPNIPDIPAHLWYFGLIGTC

SEQ ID NO: 11863 - protein, 268 aa, Thermomyces lanuginosus
EVSQDLFNQFNLFAQYSAAAYCGKNNDAPAGTNITCTGNACPEVEKADATFLYSFEDSGVGDVTGFLALDNTNKLIVLSFRGSRSIENWIGNLNFDLKEINDICSGCRGHDGFTSSWRSVADTLRQKVEDAVREHPDYRVVFTGHSLGGALATVAGADLRGNGYDIDVFSYGAPRVGNRAFAEFLTVQTGGTLYRITHTNDIVPRLPPREFGYSHSSPEYWIKSGTLVPVTRNDIVKIEGIDATGGNNRRNIPDIPAHLWYFGLIGTC

SEQ ID NO: 11864 - protein, 268 aa, Thermomyces lanuginosus
EVSQDLFNQFNLFAQYSAAAYCGKNNDAPAGTNITCTGNACPEVEKADATFLYSFEDSGVGDVTGFLALDNTNKLIVLSFRGSRSIENWIGNLNFDLKEINDICSGCRGHDGFTSSWRSVADTLRQKVEDAVREHPDYRVVFTGHSLGGALATVAGADLRGNGYDIDVFSYGAPRVGNRAFAEFLTVQTGGTLYRITHTNDIVPRLPPREFGYSHSSPEYWIKSRTLVPVRRNDIVKIEGIDATGGNNQPNIPDIPAHLWYFGLIGTC

SEQ ID NO: 11865 - protein, 268 aa, Thermomyces lanuginosus
EVSQDLFNQFNLFAQYSAAAYCGKNNDAPAGTNITCTGNACPEVEKADATFLYSFEDSGVGDVTGFLALDNTNKLIVLSFRGSRSIENWIGNLNFDLKEINDICSGCRGHDGFTSSWRSVADTLRQKVEDAVREHPDYRVVFTGHSLGGALATVAGADLRGNGYDIDVFSYGAPRVGNRAFAEFLTVQTGGTLYRITHRRDIVPRLPPREFGYSHSSPEYWIKSGTLVPVTRNDIVKIEGIDATGGNNQPNIPDIPAHLWYFGLIGTC

SEQ ID NO: 11866 - protein, 268 aa, Thermomyces lanuginosus
EVSQDLFNQFNLFAQYSAAAYCGKNNDAPAGTNITCRGRACPEVEKADATFLYSFEDSGVGDVTGFLALDNTNKLIVLSFRGSRSIENWIGNLNFDLKEINDICSGCRGHDGFTSSWRSVADTLRQKVEDAVREHPDYRVVFTGHSLGGALATVAGADLRGNGYDIDVFSYGAPRVGNRAFAEFLTVQTGGTLYRITHTNDIVPRLPPREFGYSHSSPEYWIKSGTLVPVTRNDIVKIEGIDATGGNNQPNIPDIPAHLWYFGLIGTC

SEQ ID NO: 11867 - protein, 268 aa, Thermomyces lanuginosus
EVSQDLFNQFNLFAQYSAAAYCGKNNDAPAGTNITCTGNACPEVEKADATFLYSFEDSGVGDVTGFLALDNTNKLIVLSFRGSRSIENWIGNLRFDLKEINDICSGCRGHDGFTSSWRSVADTLRQKVEDAVREHPDYRVVFTGHSLGGALATVAWADLRGNGYDIDVFSYGAPRVGNRAFAEFLTVQTGGTLYRITHTNDIVPRLPPREFGYSHSSPEYWIKSGTLVPVTRNDIVKIEGIDATGGNNQPNIPDIPAHLWYFGLIGTC

SEQ ID NO: 11868 - protein, 268 aa, Thermomyces lanuginosus
EVSQDLFNQFNLFAQYSAAAYCGKNNDAPAGTNITCTGNACPEVEKADATFLYSFEDSGVGDVTGFLALDNTNKLIVLSFRGSRSIENWIGNLKFDLKEINDICSGCRGHDGFTSSWRSVADTLRQKVEDAVREHPDYRVVFTGHSLGGALATVAGADLRGNGYDIDVFSYGAPRVGNRAFAEFLTVQTGGTLYRITHTNDIVPRLPPREFGYSHSSPEYWIKSGTLVPVTRNDIVKIEGIDATGGNNKPNIPDIPAHLWYFGLIGTC

SEQ ID NO: 11869 - protein, 268 aa, Thermomyces lanuginosus
EVSQDLFNQFNLFAQYSAAAYCGKNNDAPAGTNITCTGNACPEVEKADATFLYSFEDSGVGDVTGFLALDNTNKQIVLSFRGSRSIENWIGNLNFDLKEINDICSGCRGHDGFTSSWRSVADTLRQKVEAAVREHPDYRVVFTGHSLGGALATVAGADLRGNGYDIDVFSYGAPRVGNRAFAEFLTVQTGGTLYRITHTNDIVPRLPPREFGYSHSSPEYWIKSGTLVPVTRNDIVKIEGIDATGGNNQPNIPDIPAHLWYFGLIGTC

SEQ ID NO: 11870 - protein, 268 aa, Thermomyces lanuginosus
EVSQDLFNQFNLFAQYSAAAYCGKNNDAPAGTNITCTGNACPEVEKADATFLYSFKDSGVGDVTGFLALDNTNKLIVLSFRGSRSIENWIGNLNFDLKEINDICSGCRGHDGFTSSWRSVADTLRQKVEAAVREHPDYRVVFTGHSLGGALATVAGADLRGNGYDIDVFSYGAPRVGNRAFAEFLTVQTGGTLYRITHTNDIVPRLPPREFGYSHSSPEYWIKSGTLVPVTRNDIVKIEGIDATGGNNQPNIPDIPAHLWYFGRIGTC

SEQ ID NO: 11871 - protein, 268 aa, Synthetic construct
EVSQDLFNQFNLFAQYSAAAYCGKNNDAPAGTNITCTGNACPEVEKADATFLYSFEDSGVGDVTGFLALDNTNKLIVLSFRGSRSIENWFGNLNFLLKKINDICSGCRGHDGFTSSWRSVADTLRQKVEDAVREHPDYRVVFTGHSLGGALATVAGADLRGNGYDIDVFSYGAPRVGNRAFAEFLTAQTGGTLYRITHTNDIVPRLPPREFGYSHSSPEYWIKSGTLVPVTRRDIVKIEGIDATGGNNQPNIPDIPAHLWYFGLIGTC

SEQ ID NO: 11872 - protein, 268 aa, Synthetic construct
EVSQDLFNQFNLFAQYSAAAYCGKNNDAPAGTNITCTGNACPEVEKADATFLYSFEDSGVGDVTGFLALDNTNKLIVLSFRGTRSIENWIGNLKFNLKEINDICSGCRGHDGFTSSWRSVADTLRQKVEDAVREHPDYRVVFTGHSLGGALATVAGADLRGNGYDIDVFSYGAPRVGNRAFAEFLTVQTGGTLYRITHTNDIVPRLPPREFGYSHSSPEYWIKSGTLVPVTRNDIVKIEGIDATGGNNQPNIPDIPAHLWYFGLIGTC

SEQ ID NO: 11873 - protein, 268 aa, Thermomyces lanuginosus
EVSRDLFNQFRLFAQYSAAAYCGKNNDAPAGTNITCTGNACPEVEKADATFLYSFEDSGVGDVTGFLALDNTNKLIVLSFRGSRSIENWIGNLNFDLKEINDICSGCRGHDGFTSSWRSVADTLRQKVEDAVREHPDYRVVFTGHSLGGALATVAGADLRGNGYDIDVFSYGAPRVGNRAFAEFLTVQTGGTLYRITHTNDIVPRLPPREFGYSHSSPEYWIKSGTLVPVTRNDIVKIEGIDATGGNNQPNIPDIPAHLWYFGLIGTC

SEQ ID NO: 11874 - protein, 268 aa, Thermomyces lanuginosus
EVSQDLFNQFNLFAQYSKAAYCGKNNDAPAGTNITCTGNACPEVFKADATFLYSFEDSGVGDVTGFLALDNTNKLIVLSFRGSRSIENWIGNLNFDLKEINDICSGCRGHDGFTSSWRSVADTLRQKVEDAVREHPDYRVVFTGHSLGGALATVAGADLRGNGYDIDVFSYGAPRVGNRAFAEFLTVQTGGTLYRITHTNDIVPRLPPREFGYSHSSPEYWIKSGTLVPVTRNDIVKIEGIDATGGNNQPNIPDIPAHLWYFGLIGTC

SEQ ID NO: 11875 - protein, 268 aa, Thermomyces lanuginosus
EVSQDLFNQFNLFAQYSAAAYCGKNNDAPAGTNITCTGNACPEVEKADATFLYSFEDSGVGDVTGFLALDNTNKLIVLSFRGSRSIENWIGNLNFDLKHINDICSGCRGHDGFTSSWRSVADTLRQKVEDAVREHPDYRVVFTGHSLGGALATVAGADLRGNGYDIDVFSYGAPRVGNRAFAEFLTVQTGGTLYRITHTNDIVPRLPPXEFGYSHSSPEYWIKSGTLVPVTRNDIVKIEGIDATGGNNRPNIPDIPAHLWYFGLIGTC

SEQ ID NO: 11876 - protein, 268 aa, Thermomyces lanuginosus
EVSQDLFNQFNLFAQYSAAAYCGKNNDAPAGTNITCTGNACPEVEKADATFLYSFEDSGVGDVTGFLALDNTNKLIVLSFRGSRSIENWIGNLNFDLKRINDICSGCRGHDGFTSSWRSVADTLRQKVEDAVREHPDYRVVFTGHSLGGALATVAGADLRGNGYDIDVFSYGAPRVGNRAFAEFLTVQTGGTLYRITHTNDIVPRLPPXEFGYSHSSPEYWIKSGTLVPVTRNDIVKIEGIDATGGNNKPNIPDIPAHLWYFGLIGTC

SEQ ID NO: 11877 - protein, 268 aa, Thermomyces lanuginosus
EVSQDLFNQFNLFAQYSAAAYCGKNNDAPAGTNITCTGNACPEVEKADATTLYSFEDSGVGDVTGFLALDNTNKRIVLSFRGSRSIENWIGNLNFDLKEINDICSGCRGHDGFTSSWRSVADTLRQKVEDAVREHPDYRVVFTGHSLGGALATVAGADLRGNGYDIDVFSYGAPRVGNRAFAEFLTVQTGGTLYRITHTNDIVPRLPPREFGYSHSSPEYWIKSGTLVPVTRNDIVKIEGIDATGGNNQPNIPDIPAHLWYFGLIGTC

SEQ ID NO: 11878 - protein, 268 aa, Thermomyces lanuginosus
EVSQDLFNQFNLFAQYSAAAYCGKNNDAPAGTQITCTGNACPEVEKADATFLYSFEDSGVGDVTGFLALDNTNKLIVLSFRGSRSIENWIANLNFDLKEINDICSGCRGHDGFTSSWRSVADTLRQKVEDAVREHPDYRVVFTGHSLGGALATVAGADLRGNGYDIDVFSYGAPRVGNRAFAEFLTVQTGGTLYRITHTNDIVPRLPPREFGYSHSSPEYWIKSGTLVPVRRRDIVKIEGIDATGGNNQPNIPDIPAHLWYFGLIGTC

SEQ ID NO: 11879 - protein, 268 aa, Thermomyces lanuginosus
EVSQDLFNQFNLFAQYSAAAYCKKNNDAPAGTNITCTGNACPEVEKADATFLYSFEDSGVGDVTGFLALDNTNKRIVLSFRGSRSIENWIGNLNFDLKEINDICSGCRGHDGFTSSWRSVADTLRQKVEDAVREHPDYRVVFTGHSLGGALATVAGADLRGNGYDIDVFSYGAPRVGNRAFAEFLTVQTGGTLYRITHTNDIVPRLPPREFGYSHSSPEYWIKSGTLVPVTRNDIVKIEGIDATGGNNQPNIPDIPAHLWYFGRIGTC

SEQ ID NO: 11880 - protein, 268 aa, Thermomyces lanuginosus
EVSQDLFNQFNLFAQYSAAAYCGKNNNAPAGTNITCTGNACPEVEKADATFLYSFKDSGVGDVTGFLALDNTNKLIVLSFRGSRSIENWIGNLNFDLKEINDICSGCRGHDGFTSSWRSVADTLRQKVEDAVREHPDYRVVFTGHSLGGALATVAGADLRGNGYDIDVFSYGAPRVGNRAFAEFLTVQTGGTLYRITHTNDIVPRLPPREFGYSHSSPEYWIKSGTLVPVTRNDIVKIEGIDATGGNNQPNIPDIPAHLWYFGLIGTC

SEQ ID NO: 11881 - protein, 268 aa, Thermomyces lanuginosus
EVSQDLFNQFNLFAQYSAAAYCGKNNDAPAGTNITCTGNACPEVEKADATFLYSFEDSGVGDVTGFLALDNTNKGIVLSFRGSRSIENWIQNLNFDLKEINDICSGCRGHDGFTSSWRSVADTLRQKVEDAVREHPDYRVVFTGHSLGGALATVAGADLRGNGYDIDVFSYGAPRVGNRAFAEFLTNQTGGTLYRITHTNDIVPRLPPREFGYSHSSPEYWIKSGTLVPVTRNDIVKIEGIDATGGNNQPNIPDIPAHLWYFGRIGTC

SEQ ID NO: 11882 - protein, 268 aa, Thermomyces lanuginosus
EVSQDLFNQFNLFAQYSKAAYCGKNNDAPAGTNITCTGNACPEVEKADATFLYSFEDSGVGDVTGFLALDNTNKDIVLSFRGSRSIENWIGNLNFDLKEINDICSGCRGHDGFTSSWRSVADTLRQKVEDAVREHPDYRVVFTGHSLGGALATVAGADLRGNGYDIDVFSYGAPRVGNRAFAEFLTVQTGGTLYRITHTNDIVPRLPPREFGYSHSSPEYWIKSGTLVPVTRNDIVKIEGIDATGGNNQPNIPDIPAHLWYFGLIGTC

SEQ ID NO: 11883 - protein, 268 aa, Thermomyces lanuginosus
EVSQDLFRQFNLFAQYSAAAYCGKNNDAPAGTNITCTGNACPRVEKADATFLYSFEDSGVGDVTGFLALDNTNKLIVLSFRGSRSIENWIGNLNFDLKEINDICSGCRGHDGFTSSWRSVADTLRQKVEDAVREHPDYRVVFTGHSLGGALATVAGADLRGNGYDIDVFSYGAPRVGNRAFAEFLTVQTGGTLYRITHTNDIVPRLPPREFGYSHSSPEYWIKSGTLVPVTRNDIVKIEGIDATGGNNQPNIPDIPAHLWYFGLIGTC

SEQ ID NO: 11884 - protein, 268 aa, Synthetic construct
EVSQDLFNQFNLFAQYSAAAYCGKNNDAPAGTNITCTGNACPEVEKADATFLYSFEDSGVGDVTGFLALDNTNKLIVLSFRGSRSIENWIGNLKFALKEINDICSGCRGHDGFTSSWRSVADTLRQKVEDAVREHPDYRVVFTGHSLGGALATVAGADLRGNGYDIDVFSYGAPRVGNRAFAEFLTVQTGGTLYRITHTNDIVPRLPPREFGYSHSSPEYWIKSGTLVPVTRNDIVKIEGIDATGGNNRPNIPDIPAHLWYFGLIGTC

SEQ ID NO: 11885 - protein, 268 aa, Thermomyces lanuginosus
EVSQDLFRQFRLFAQYSAAAYCGKNNDAPAGTNITCTGNACPEVEKADATFLYSFEDSGVGDVTGFLALDNTNKLIVLSFRGSRSIENWIGNLNFDLKEINDICSGCRGHDGFTSSWRSVADTLRQKVEDAVREHPDYRVVFTGHSLGGALATVAGADLRGNGYDIDVFSYGAPRVGNRAFAEFLTVQTGGTLYRITHTNDIVPRLPPREFGYSHSSPEYWIKSGTLVPVTRNDIVKIEGIDATGGNNQPNIPDIPAHLWYFGLIGTC

SEQ ID NO: 11886 - protein, 268 aa, Thermomyces lanuginosus
EVSQDLFNQFNLFAQYSAAAYCGKNNDAPRGTRITCTGNACPEVEKADATFLYSFEDSGVGDVTGFLALDNTNKLIVLSFRGSRSIENWIGNLNFDLKEINDICSGCRGHDGFTSSWRSVADTLRQKVEDAVREHPDYRVVFTGHSLGGALATVAGADLRGNGYDIDVFSYGAPRVGNRAFAEFLTVQTGGTLYRITHTNDIVPRLPPREFGYSHSSPEYWIKSGTLVPVTRNDIVKIEGIDATGGNNQPNIPDIPAHLWYFGLIGTC

SEQ ID NO: 11887 - protein, 268 aa, Thermomyces lanuginosus
EVSQDLFNQFNLFAQYSAAAYCGKNNDAPAGTNITCTGNACPEVEKADATFLYSFEDSGVGDVTGFLALDNTNKLIVLSFRGSRSIENWIGNLRFDLKEINDICSGCRGHDGFTSSWRSVADTLRQKVEDAVREHPDYRVVFTGHSLGGALATVAGADLRGNGYDIDVFSYGAPRVGNRAFAEFLTVQTGGTLYRITHTNDIVPRLPPREFGYSHSSPEYWIKSGTLVPVTRNDIVKIEGIDATGGNNKPNIPDIPAHLWYFGLIGTC

SEQ ID NO: 11888 - protein, 268 aa, Thermomyces lanuginosus
EVSQDLFNQFNLFAQYSAAAYCGKNNDAPAGTNITCTGNACPEVEKADATFLYSFEDSGVGDVTGFLALDNTNKLIVLSFRGSRSIENWIGNLNFXLKEINDICSGCRGHDGFTSSWRSVADTLRQKVEDAVREHPDYRVVFTGHSLGGALATVAGADLRGNGYDIDVFSYGAPRVGNRAFAEFLTVQTGGTLYRITHTNDIVPRLPPXEFGYSHSSPEYWIKSGTLVPVTRNDIVKIEGIDATGGNNKPNIPDIPAHLWYFGLIGTC

SEQ ID NO: 11889 - protein, 268 aa, Synthetic construct
EVSQDLFNQFNLFAQYSAAAYCGKNNDAPAGTNITCTGNACPEVEKADATFLYSFEDSGVGDVTGFLALDNTNKLIVLSFRGSRSIENWIGNLKFLLKKINDICSGCRGHDGFTSSWRSVADTLRQKVEDAVREHPDYRVVFTGHSLGGALATVAGADLRGNGYDIDVFSYGAPRVGNRAFAEFLTVQTGGTLYRITHTNDIVPRLPPREFGYSHSSPEYWIKSGTLVPVTRNRIVKIEGIDATGGNNRPNIPDIPAHLWYFGLIGTC

SEQ ID NO: 11890 - protein, 268 aa, Synthetic construct
EVSQDLFNQFNLFAQYSAAAYCGKNNDAPAGTNITCTGNACPEVEKADATFLYSFEDSGVGDVTGFLALDNTNKLIVLSFRGSRSIENWIGNLKFLLKKINDICSGCRGHDGFTSSWRSVADTLRQKVEDAVREHPDYRVVFTGHSLGGALATVAGADLRGNGYDIDVFSYGAPRVGNRAFAEFLTVQTGGTLYRITHTNDIVPRLPPREFGYSHSSPEYWIRSGTLVPVTRNDIVKIEGIDATGGNNRPNIPDIPAHLWYFGLIGTC

SEQ ID NO: 11891 - protein, 268 aa, Thermomyces lanuginosus
EVSQDLFNQFNLFAQYSAAAYCGKNNDAPAGTNITCTGNACPEVEKADATFLYSFEDSGVGDVTGFLALDNTNKLIVLSFRGSRSIENWIGNLNFDLKEINDICSGCRGHDGFTSSWRSVADTLRQKVEDAVREHPDYRVVFTGHSLGGALATVAGADLRGNGYDIDVFSYGAPRVGNRAFAEFLTVQTGGTLYRITHTNDIVPRLPPREFGYSHSSPEYWIKSRTLVRVTRNDIVKIEGIDATGGNNQPNIPDIPAHLWYFGLIGTC

SEQ ID NO: 11892 - protein, 268 aa, Thermomyces lanuginosus
EVSQDLFNQFNLFAQYSAAAYCKKNNDAPAGTNITCTGNACPEVEKADATFLYSFEDSGVGDVTGFLALDNTNKLIVLSFRGSRSIENWIGNLNFDLKEINDICSGCRGHDGFTSSWRSVADTLRQKVEAAVREHPDYRVVFTGHSLGGALATVAGADLRGNGYDIDVFSYGAPRVGNRAFAEFLTVQTGGTLYRITHTNDIVPRLPPREFGYSHSSPEYWIKSGTLVPVTRNDIVKIEGIDATGGNNQPNIPDIPAHLWYFGRIGTC

SEQ ID NO: 11893 - protein, 268 aa, Thermomyces lanuginosus
EVSQDLFNQFNLFAQYSAAAYCGKNNDAPAGTNITCTGNACPEVEKADATFLYSFEDSGVGDVTGFLALDNTNKLIVLSFRGSRSIENWIGNLNFDLKEINDICSGCRGHDGFTSSWRSVADTLRQKVEAAVREHPDYRVVFTGHSLGGALATVAGADLRGNGYDIDVFSYGAPRVGNRAFAEFLTNQTGGTLYRITHTNDIVPRLPPREFGYSHSSPEYWIKSGTLVPVTRNDIVKIEGIDATGGNNQPNIPDIPAHLWYFGRIGTC

SEQ ID NO: 11894 - protein, 268 aa, Thermomyces lanuginosus
EVSQDLFNQFNLFAQYSAAAYCGKNNDAPAGTNITCTGNACPEVEKADATFLYSFEDSGVGDVTGFLALDNTNKLIVLSFRGSRSIENWIGNLNFDLKEINDICSGCRGHDGFTSSWRSVADTLRQKVEDAVREHPDYRVVFTGHSLGGALATVAGADLRGNGYDIDVFSYGAPRVGNRAFAEFLTVQTGGTLYRITHTNDIVPRLPPREFGYSHSSPEYWIKSGTRVRVTRNDIVKIEGIDATGGNNQPNIPDIPAHLWYFGLIGTC

SEQ ID NO: 11895 - protein, 268 aa, Thermomyces lanuginosus
EVSRDLFRQFNLFAQYSAAAYCGKNNDAPAGTNITCTGNACPEVEKADATFLYSFEDSGVGDVTGFLALDNTNKLIVLSFRGSRSIENWIGNLNFDLKEINDICSGCRGHDGFTSSWRSVADTLRQKVEDAVREHPDYRVVFTGHSLGGALATVAGADLRGNGYDIDVFSYGAPRVGNRAFAEFLTVQTGGTLYRITHTNDIVPRLPPREFGYSHSSPEYWIKSGTLVPVTRNDIVKIEGIDATGGNNQPNIPDIPAHLWYFGLIGTC

SEQ ID NO: 11896 - protein, 268 aa, Thermomyces lanuginosus
EVSQDLFNQFNLFAQYSAAAYCGKNNDRRAGTNITCTGNACPEVEKADATFLYSFEDSGVGDVTGFLALDNTNKLIVLSFRGSRSIENWIGNLNFDLKEINDICSGCRGHDGFTSSWRSVADTLRQKVEDAVREHPDYRVVFTGHSLGGALATVAGADLRGNGYDIDVFSYGAPRVGNRAFAEFLTVQTGGTLYRITHTNDIVPRLPPREFGYSHSSPEYWIKSGTLVPVTRNDIVKIEGIDATGGNNQPNIPDIPAHLWYFGLIGTC

SEQ ID NO: 11897 - protein, 268 aa, Synthetic construct
EVSQDLFNQFNLFAQYSAAAYCGKNNDAPAGTNITCTGNACPEVEKADATFLYSFEDSGVGDVTGFLALDNTNKLIVLSFRGSRSIENWIGNLKFLLKEINDICSGCRGHDGFTSSWRSVADTLRQKVEDAVREHPDYRVVFTGHSLGGALATVAGADLRGNGYDIDVFSYGAPRVGNRAFAEFLTVQTGGTLYRITHTNDIVPRLPPREFGYSHSSPEYWIKSGTLVPVTRNDIVKIEGIDATGGNNRPNIPDIPAHLWYFGLIGTC

SEQ ID NO: 11898 - protein, 268 aa, Synthetic construct
EVSQDLFNQFNLFAQYSAAAYCGKNNDAPAGTNITCTGNACPEVEKADATFLYSFEDSGVGRVTGFLALDNTNKLIVLSFRGSRSIENWFGNLNFLLKKINDICSGCRGHDGFTSSWRSVADTLRQKVEDAVREHPDYRVVFTGHSLGGALATVAGADLRGNGYDIDVFSYGAPRVGNRAFAEFLTAQTGGTLYRITHTNDIVPRLPPREFGYSHSSPEYWIKSGTLVPVTRNDIVKIEGIDATGGNNQPNIPDIPAHLWYFGLIGTC

SEQ ID NO: 11899 - protein, 268 aa, Thermomyces lanuginosus
EVSQDLFNQFNLFAQYSAAAYCGKNNDAPAGTNITCTGNACPEVEKADATFLYSFEDSGVGDVTGFLALDNTNKLIVLSFRGSRSIENWIGNLRFDLKEINDICSGCRGHDGFTSSWRSVADTLRQKVEDAVREHPDYRVVFTGHSLGGALATVAGADLRGNGYDIDVFSYGAPRVGNRAFAEFLTVQTGGTLYRITHTNDIVPRLPPREFGYSHSSPEYWIKSGTLVPVTRNDIVKIEGIDATGGNNRPNIPDIPAHLWYFGLIGTC

SEQ ID NO: 11900 - protein, 268 aa, Thermomyces lanuginosus
EVSQDLFNQFNLFAQYSAAAYCGKNNDAPAGTNITCTGNACPEVEKADATFLYSFEDSGVGDVTGFLALDNTNKLIVLSFRGSRSIENWIGNLNFXLKEINDICSGCRGHDGFTSSWRSVADTLRQKVEDAVREHPDYRVVFTGHSLGGALATVAGADLRGNGYDIDVFSYGAPRVGNRAFAEFLTVQTGGTLYRITHTNDIVPRLPPXEFGYSHSSPEYWIKSGTLVPVTRNDIVKIEGIDATGGNNRPNIPDIPAHLWYFGLIGTC

SEQ ID NO: 11901 - protein, 268 aa, Thermomyces lanuginosus
EVSQDLFNQFNLFAQYSAAAYCGKNNDAPAGTNITCTGNACPEVEKADATFLYSFEDSGVGDVTGFLALDNTNKLIVLSFRGSRSIENWIGNLNFDLKEINDICSGCRGHDGFTSSWRSVADTLRQKVEDAVREHPDYRVVFTGHSLGGALATVAGADLRGNGYDIDVFSYGAPRVGNRAFAEFLTVQTGGTLYRITHKKDIVPRLPPREFGYSHSSPEYWIKSGTLVPVTRNDIVKIEGIDATGGNNQPNIPDIPAHLWYFGLIGTC

SEQ ID NO: 11902 - protein, 268 aa, Thermomyces lanuginosus
EVSQDLFNQFNLFAQYSAAAYCGKNNDAPAGTNITCTGNACPEVEKADATFLYSFEDSGVGAVTGFLALDNTNKLIVLSFRGTRSIENWIGNLNFDLKEINDICSGCRGHDGFTSSWRSVADTLRQKVEDAVREHPDYRVVFTGHSLGGALATVAGADLRGNGYDIDVFSYGAPRVGNRAFAEFLTVQTGGTLYRITHTNDIVPRLPPREFGYSHSSPEYWIKSGTLVPVTRNDIVKIEGIDATGGNNQPNIPDIPAHLWYFGLIGTC

SEQ ID NO: 11903 - protein, 268 aa, Thermomyces lanuginosus
EVSQDLFNQFNLFAQYSAAAYCGKNNDAPAGTNITCTGNACPEVEKADATFLYSFEDSGVGDVTGFLALDNTNKLIVLSFRGSRSIENWIGNLRFDLKEINDICSGCRGHDGFTSSWRSVADTLRQKVEDAVREHPDYRVVFTGHSLGGALATVAGADLRGNGYDIDVFSYGAPRVGNRAFAEFLTVQTGGTLYRITHTNDIVPRLPPREFGYSHSSPEYWIKSGTLVPVTRNDIVKIEGIDATGGNNHPNIPDIPAHLWYFGLIGTC

SEQ ID NO: 11904 - protein, 268 aa, Thermomyces lanuginosus
EVSQDLFNQFNLFAQYSAAAYCGKNNDAPAGTNITCTGNACPEVEKADATFLYSFEDSGVGDVTGFLALDNTNKLIVLSFRGSRSIENWIGNLNFDLKEINDICSGCRGHDGFTSSWRSVADTLRQKVEDAVREHPDYRVVFTGHSLGGALATVAGADLRGNGYDIDVFSYGAPRVGNRAFAEFLTVQTGGTLYRITHTNDIVPRLPPREFGYSHSSPEYWIKSGTLVPVTRNRIRKIEGIDATGGNNQPNIPDIPAHLWYFGLIGTC

SEQ ID NO: 11905 - protein, 268 aa, Thermomyces lanuginosus
EVSQDLFNQFNLFAQYSAAAYCGKNNDAPAGTNITCTGNACPEVEKADATFLYSFEDSGVGDVTGFLALDNTNKQIVLSFRGSRSIENWIGNLNFDLKEINDICSGCRGHDGFTSSWRSVADTLRQKVEDAVREHPDYRVVFTGHSLGGALATVAWADLRGNGYDIDVFSYGAPRVGNRAFAEFLTVQTGGTLYRITHTNDIVPRLPPREFGYSHSSPEYWIKSGTLVPVTRNDIVKIEGIDATGGNNQPNIPDIPAHLWYFGLIGTC

SEQ ID NO: 11906 - protein, 268 aa, Thermomyces lanuginosus
EVSQDLFNQFNLFAQYSAAAYCGKNNDAPAGTNITCTGNACPEVEKADATFLYSFEDSGVGDVTGFLALDNTNKLIVLSFRGSRSIENWIGNLNFDLKRINDICSGCRGHDGFTSSWRSVADTLRQKVEDAVREHPDYRVVFTGHSLGGALATVAGADLRGNGYDIDVFSYGAPRVGNRAFAEFLTVQTGGTLYRITHTNDIVPRLPPXEFGYSHSSPEYWIKSGTLVPVTRNDIVKIEGIDATGGNNHPNIPDIPAHLWYFGLIGTC

SEQ ID NO: 11907 - protein, 268 aa, Thermomyces lanuginosus
EVSQDLFNQFNLFAQYSAAAYCGANNDAPAGTNITCTGNACPEVEKADATFLYSFEDSGVGDVTGFLALDNTNKQIVLSFRGSRSIENWIGNLNFDLKEINDICSGCRGHDGFTSSWRSVADTLRQKVEDAVREHPDYRVVFTGHSLGGALATVAGADLRGNGYDIDVFSYGAPRVGNRAFAEFLTVQTGGTLYRITHTNDIVPRLPPREFGYSHSSPEYWIKSGTLVPVTRNDIVKIEGIDATGGNNQPNIPDIPAHLWYFGLIGTC

SEQ ID NO: 11908 - protein, 268 aa, Thermomyces lanuginosus
EVSQDLFNQFNLFAQYSAAAYCGKNNDAPAGTNITCTGNACPEVEKADATFLYSFEDSGVGDVTGFLALDNTNKLIVLSFRGSRSIENWIGNLNFDLKEINDICSGCRGHDGFTSSWRSVADTLRQKVEDAVREHPDYRVVFTGHSLGGALATVAGADLRGNGYDIDVFSYGAPRVGNRAFAEFLTNQQGGTLYRITHTNDIVPRLPPREFGYSHSSPEYWIKSGTLVPVTRNDIVKIEGIDATGGNNQPNIPDIPAHLWYFGRIGTC

SEQ ID NO: 11909 - protein, 268 aa, Thermomyces lanuginosus
EVSQDLFNQFNLFAQYSAAAYCGKNNDAPAGTNITCTGNACPEVEKADATFLYSFEDSGVGDVTGFLALDNTNKLIVLSFRGSRSIENWIGNLNFDLKEINDICSGCRGHAGFTSSWRSVADTLRQKVEAAVREHPDYRVVFTGHSLGGALATVAGADLRGNGYDIDVFSYGAPRVGNRAFAEFLTVQTGGTLYRITHTNDIVPRLPPREFGYSHSSPEYWIKSGTLVPVTRNDIVKIEGIDATGGNNQPNIPDIPAHLWYFGRIGTC

SEQ ID NO: 11910 - protein, 268 aa, Thermomyces lanuginosus
EVSQDLFNQFNLFAQYSAAAYCGKNNDAPAGTNITCTGNACPEVEKADATFLYSFEDSGVGDVTGFLALDNTNKLIVLSFRGSRSIENWIGNLNFDLKEINDICSGCRGHDGFTSSWRSVADTLRQKVEDAVREHPDYRVVFTGHSLGGALATVAGADLRGNGYDIDVFSYGAPRVGNRAFAEFLTVQTGGTLYRITHTRDIVPRLPPREFGYSHSSPEYWIKSRTLVPVTRNDIVKIEGIDATGGNNQPNIPDIPAHLWYFGLIGTC

SEQ ID NO: 11911 - protein, 268 aa, Thermomyces lanuginosus
EVSQDLFNQFNLFAQYSAAAYCGKNNDAPAGTNITCTGNACPEVEKADATFLYSFEDSGVGDVTGFLALDNTNKLIVLSFRGSRSIENWIGNLNFDLKEINDICSGCRGHDGFTSSWRSVADTLRQKVEDAVREHPDYRVVFTGHSLGGALATVAGADLRGNGYDIDVFSYGAPRVGNRAFAEFLTVQTGGTLYRITHTNDIVPRLPPREFGYSHSSPEYWIKSGTLVPVTRNDIKKIKGIDATGGNNQPNIPDIPAHLWYFGLIGTC

SEQ ID NO: 11912 - protein, 268 aa, Thermomyces lanuginosus
EVSQDLFNQFNLFAQYSAAAYCGKNNDAEAGTDITCTGNACPEVEKADATFLYSFEDSGVGDVTGFLALDNTNKLIVLSFRGSRSIENWIGNLNFDLKEINDICSGCRGHDGFTSSWRSVADTLRQKVEDAVREHPDYRVVFTGHSLGGALATVAGADLRGNGYDIDVFSYGAPRVGNRAFAEFLTVQTGGTLYRITHTNDIVPRLPPREFGYSHSSPEYWIKSGTLVPVTRNDIVKIEGIDATGGNNQPNIPDIPAHLWYFGLIGTC

SEQ ID NO: 11913 - protein, 268 aa, Thermomyces lanuginosus
EVSQDLFNQFNLFAQYSAAAYCGKNNDAPAGTNITCTGNACPEVEKADATFLYSFEDSGVGDVTGFLALDNTNKLIVLSFRGSRSIENWIENLNFDLKEINDICSGCRGHDGFTSSWRSVADTLRQKVEDAVREHPDYRVVFTGHSLGGALATVAGADLRGNGYDIDVFSYGAPRVGNRAFAEFLTVQTGGTLYRITHTNDIVPRLPPREFGYSHSSPEYWIKSGTLVPVRRRDIVKIEGIDATGGNNQPNIPDIPAHLWYFGLIGTC

SEQ ID NO: 11914 - protein, 268 aa, Thermomyces lanuginosus
EVSQDLFNQFNLFAQYSAAAYCGKNNDAPAGTNITCTGNACPEVEKADATFLYSFEDSGVGDVTGFLALDNTRKDIVLSFRGSRSIENWIGNLNFDLKEINDICSGCRGHDGFTSSWRSVADTLRQKVEDAVREHPDYRVVFTGHSLGGALATVAGADLRGNGYDIDVFSYGAPRVGNRAFAEFLTVQTGGTLYRITHTNDIVPRLPPREFGYSHSSPEYWIKSGTLVPVTRNDIVKIEGIDATGGNNQPNIPDIPAHLWYFGLIGTC

SEQ ID NO: 11915 - protein, 268 aa, Thermomyces lanuginosus
EVSQDLFNQFNLFAQYSAAAYCGKNNDAPRRTNITCTGNACPEVEKADATFLYSFEDSGVGDVTGFLALDNTNKLIVLSFRGSRSIENWIGNLNFDLKEINDICSGCRGHDGFTSSWRSVADTLRQKVEDAVREHPDYRVVFTGHSLGGALATVAGADLRGNGYDIDVFSYGAPRVGNRAFAEFLTVQTGGTLYRITHTNDIVPRLPPREFGYSHSSPEYWIKSGTLVPVTRNDIVKIEGIDATGGNNQPNIPDIPAHLWYFGLIGTC

SEQ ID NO: 11916 - protein, 268 aa, Synthetic construct
EVSQDLFNQFNLFAQYSAAAYCGKNNDAPAGTNITCTGNACPEVEKADATFLYSFEDSGVGDVTGFLALDNTNKLIVLSFRGSRSIENWIGNLNFDLKEINDICSGCRGHDGFTSSWRSVADTLRQKVEDAVREHPDYRVVFTGHSLGGALATVAGADLRGNGYDIGVFSYGAPRVGNRAFAEFLTVQTGGTLYRITHTNDIVPRLPPRVFGYSHSSPEYWIKSGTLVPVTRNDIVKIEGIDATGGNNQPNIPDIPAHLWYFGLIGTC

SEQ ID NO: 11917 - protein, 268 aa, Thermomyces lanuginosus
EVSQDLFNQFNLFAQYSAAAYCGKNNDAPAGTNITCTGNACPEVEKADATFLYSFEDSGVGDVTGFLALDNTNKLIVLSFRGSRSIENWIGNLNFDLKEINDICSGCRGHDGFTSSWRSVADTLRQKVEDAVREHPDYRVVFTGHSLGGALATVAGADLRGNGYDIDVFSYGAPRVGNRAFAEFLTVQTGGTLYRITHTNDIVPRLPPRQRGYSHSSPEYWIKSGTLVPVTRNDIVKIEGIDATGGNNQPNIPDIPAHLWYFGLIGTC

SEQ ID NO: 11918 - protein, 268 aa, Thermomyces lanuginosus
EVSQDLFNQFNLFAQYSAAAYCGKNNDAPAGTNITCTGNACPEVEKADATFLYSFEDSGVGDVTGFLALDNTNKLIVLSFRGSRSIENWIGNLNFDLKEINDICSGCRGHGGFTSSWRSVADTLRQKVEDAVREHPDYRVVFTGHSLGGALATVAGADLRGNGYDIDVFSYGAPRVGNRAFAEFLTVQTGGTLYRITHTNDIVPRLPPREFGYSHPSPEYWIKSGTLVPVTRNDIVKIEGIDATGGNNQPNIPDIPAHLWYFGLIGTC

SEQ ID NO: 11919 - protein, 268 aa, Thermomyces lanuginosus
EVSQDLFNQFNLFAQYSAAAYCGKNNDAPAGTNITCTGNACPEVEKADATFLYSFEDSGVGDVTGFLALDNTNKLIVLSFRGSRSIENWIQNLNFDLKEINDICSGCRGHDGFTSSWRSVADTLRQKVEDAVREHPDYRVVFTGHSLGGALATVAGADLRGNGYDIDVFSYGAPRVGNRAFAEFLTTQTGGTLYRITHTNDIVPRLPPREFGYSHSSPEYWIKSGTLVPVTRNDIVKIEGIDATGGNNQPNQPDIPAHLWYFGRIGTC

SEQ ID NO: 11920 - protein, 268 aa, Thermomyces lanuginosus
EVSQDLFNQFNLFAQYSAAAYCGKNNDAPAGTNITCTGNACPEVEKADATFLYSFEDSGVGDVTGFLALDNTNKLIVLSFRGSRSIENWIGNLNFDLKEINDICSGCRGHDGFTSSWRSVADTLRQKVEDAVREHPDYRVVFTGHSLGGALATVAGADLRGNGYDIDVFSYGAPRVGNRAFAEFLTVQTGGTLYRITHTNDIVPRLPPREFGYSHSSPEYWIKSGTLRPVRRNDIVKIEGIDATGGNNQPNIPDIPAHLWYFGLIGTC

SEQ ID NO: 11921 - protein, 268 aa, Thermomyces lanuginosus
EVSQDLFNQFNLFAQYSAAAYCGKNNDAPAGTNITCTGNACPEVEKADATFLYSFEDSGVGDVTGFLALDNTNKLIVLSFRGSRSIENWITNLNFDLKEIRDICRGCRGHDGFTSSWRSVADTLRQKVEDAVREHPDYRVVFTGHSLGGALATVAGADLRGNGYDIDVFSYGAPRVGNRAFAEFLTVQTGGTLYRITHTNDIVPRLPPREFGYSHSSPEYWIKSGTLVPVTRNDIVKIEGIDATGGNNQPNIPDIPAHLWYFGLIGTC

SEQ ID NO: 11922 - protein, 268 aa, Thermomyces lanuginosus
EVSQDLFNQFNLFAQYSAAAYCGKNNDAPAGTNITCTGNACPEVEKADATFLYSFEDSGVGDVTGFLALDNTNKLIVLSFRGSRSIENWIGNLNFDLKEINRICRGCRGHDGFTSSWRSVADTLRQKVEDAVREHPDYRVVFTGHSLGGALATVAGADLRGNGYDIDVFSYGAPRVGNRAFAEFLTVQTGGTLYRITHTNDIVPRLPPREFGYSHSSPEYWIKSGTLVPVTRNDIVKIEGIDATGGNNQPNIPDIPAHLWYFGLIGTC

SEQ ID NO: 11923 - protein, 268 aa, Thermomyces lanuginosus
EVSQDLFNQFNLFAQYSAAAYCQKNNDAPAGTNITCTGNACPEVEKADATFLYSFEDSGVGDVTGFLALDNTNKLIVLSFRGSRSIENWIQNLNFDLKEINDICSGCRGHDGFTSSWRSVADTLRQKVEDAVREHPDYRVVFTGHSLGGALATVAGADLRGNGYDIDVFSYGAPRVGNRAFAEFLTVQTGGTLYRITHTNDIVPRLPPREFGYSHSSPEYWIKSGTLVPVTRNDIVKIEGIDATGGNNQPNQPDIPAHLWYFGRIGTC

SEQ ID NO: 11924 - protein, 268 aa, Thermomyces lanuginosus
EVSQDLFNQFNLFAQYSAAAYCGKNNDAPAGTNITCTRNACPEVEKADATFLYSFEDSGVGDVTGFLALDNTNKLIVLSFRGSRSIENWIGNLNFDLKEINDICSGCRGHDGFTSSWRSVADTLRQKVEDAVREHPDYRVVFTGHSLGGALATVAGADLRGNGYDIDVFSYGAPRVGNRAFAEFLTVQTGGTLYRITHTNDIVPRLPPREFGYSHSSPEYWIKSGTLVRVTRNDIVKIEGIDATGGNNQPNIPDIPAHLWYFGLIGTC

SEQ ID NO: 11925 - protein, 268 aa, Thermomyces lanuginosus
EVSQDLFNQFNLFAQYSKAAYCGKNNDAPAGTNITCTGNACPEVEKADATFLYSFEDSGVGDVTGFLALDNTNKQIVLSFRGSRSIENWIGNLNFDLKEINDICSGCRGHDGFTSSWRSVADTLRQKVEDAVREHPDYRVVFTGHSLGGALATVAGADLRGNGYDIDVFSYGAPRVGNRAFAEFLTVQTGGTLYRITHTNDIVPRLPPREFGYSHSSPEYWIKSGTLVPVTRNDIVKIEGIDATGGNNQPNIPDIPAHLWYFGLIGTC

SEQ ID NO: 11926 - protein, 268 aa, Thermomyces lanuginosus
EVSQDLFNQFNLFAQYSAAAYCGKNNDAPAGTNITCTGNACPEVEKADATFLYSFEDSGVGDVTGFLALDNTNKLIVLSFRGSRSIENWIGNLNFDLKEINDICSGCRGHDGFTSSWRSVADTLRQKVEDAVREHPDYRVVFTGHSLGGALATVAGADLRGNGYDIDVFSYGAPRVGNRAFAEFLTVQTGGTLYRITHTNDIVPRLPPREFGYSHSSPEYWIKRRTLVPVTRNDIVKIEGIDATGGNNQPNIPDIPAHLWYFGLIGTC

SEQ ID NO: 11927 - protein, 268 aa, Thermomyces lanuginosus
EVSQDLFNQFNLFAQYSAAAYCGKNNSAPAGTDITCTGNACPEVEKADATFLYSFEDSGVGDVTGFLALDNTNKLIVLSFRGSRSIENWIGNLNFDLKEINDICSGCRGHDGFTSSWRSVADTLRQKVEDAVREHPDYRVVFTGHSLGGALATVAGADLRGNGYDIDVFSYGAPRVGNRAFAEFLTVQTGGTLYRITHTNDIVPRLPPREFGYSHSSPEYWIKSGTLVPVTRNDIVKIEGIDATGGNNQPNIPDIPAHLWYFGLIGTC

SEQ ID NO: 11928 - protein, 268 aa, Thermomyces lanuginosus
EVSQDLFNQFNLFAQYSAAAYCGKNNDAPAGTNITCTGNACPEVEKADATFLYSFEDSGVGDVTGFLALDNTNKLIVLSFRGSRSIENWIGNLNFDLKEIRDICSGCRGHDGFTSSWRSVADTLRQKVEDAVREHPDYRVVFTGHSLGGALATVAGADLRGNGYDIDVFSYGAPRVGNRAFAEFLTVQTGGTLYRITHTNDIVPRLPPREFGYSHSSPEYWIKSGTLVPVTRNDIVKIEGIDATGGNNQPNIPDIPAHSWYFGLIGTC

SEQ ID NO: 11929 - protein, 268 aa, Thermomyces lanuginosus
EVSQDLFNQFNLFAQYSAAAYCGKNNDAPAGTNITCTGNACPEVEKADATFLYSFEDSGVGDVTGFLALDNTNKLIVLSFRGSRSIENWIGNLNFDLKEINDICSGCRGHDGFTSSWRSVADTLRQKVEDAVREHPDYRVVFTGHSLGGALATVAGADLRGNGYDIDVFSYGAPRVGNRAFAEFLTVQTGGTLYRITHTNDIVPRLPPREFGYSHSSPEYWIKSGTLVPVTRNDIRKIRGIDATGGNNQPNIPDIPAHLWYFGLIGTC

SEQ ID NO: 11930 - protein, 268 aa, Synthetic construct
EVSQDLFNQFNLFAQYSAAAYCGKNNDAPAGTNITCTGNACPEVEKADATFLYSFEDSGVGDVTGFLALDNTNKLIVLSFRGSRSIENWIGNLNFDLKEINDICSGCRGHDGFTSSWRSVADTLRQKVEDAVREHPDYRVVFTGHSLGGALATVAGADLRGNGYDIDVFSYGAPRVGNRAFAEFLTVQTGGTLYRITHTNDIVPRLPPREFGYSHSSPEYWIKSGTLVPVTRNDIVKIEGIDATGGNNQPWIPWIPAHLWYFGLIGWC

SEQ ID NO: 11931 - protein, 268 aa, Thermomyces lanuginosus
EVSQDLFNQFNLFAQYSAAAYCGKNNDAPAGTNITCTGNACPEVEKADATFLYSFEDSGVGDVTGFLALDNTNKLIVLSFRGSRSIENWIGNLNFDLKEINDICSGCRGHDGFTSSWRSVADTLRQKVEDAVREHPDYRVVFTGHSLGGALATVAGADLRGNGYDIDVFSYGAPRVGNRAFAEFLTVQTGGTLYRITHTNDIVPRLPPREFGYSHSSPEYWIKKKTLVPVTRNDIVKIEGIDATGGNNQPNIPDIPAHLWYFGLIGTC

SEQ ID NO: 11932 - protein, 268 aa, Thermomyces lanuginosus
EVSQDLFNQFNLFAQYSAAAYCGKNNDAPAGTNITCTGNACPEVEKADATFLYSFEDSGVGDVTGFLALDNTNKLIVLSFRGSRSIENWIGNLNYDLKEINDICSGCRGHDGFTSSWRSVADTLRQKVEDAVREHPDYRVVFTGHSLGGALATVAGADLRGNGYDIDVFSYGAPRVGNRAFAEFLTVQTGGTLYRITHTNDIVPRLPPREEGYSHSSPEYWIKSGTLVPVTRNDIVKIEGIDATGGNNQPNIPDIPAHLWYFGLIGTC

SEQ ID NO: 11933 - protein, 268 aa, Thermomyces lanuginosus
EVSQDLFNQFNLFAQYSAAAYCGKNNDAPAGTNITCTGNACPEVEKADATFLYSFEDSGVGDVTGFLALDNTNKLIVLSFRGSRSIENWIGNLNFDLKEINDICSGCRGHDGFTSSWRSVADTLRQKVEDAVREHPDYRVVFTGHSLGGALATVAGADLRGNGYDIDVFSYGAPRVGNRAFAEFLTVQTGGTLYRITHTNDIVPRLPPREFGYSHSSPEYWIKSGTLVPVTRNDIVKIEGIDATGGNNQPNIPRIRAHLWYFGLIGTC

SEQ ID NO: 11934 - protein, 268 aa, Thermomyces lanuginosus
EVSQDLFNQFNLFAQYSAAAYCGKNNDAPAGTNITCTGNACPEVEKADATFLYSFEDSGVGDVTGFLALDNTNKLIVLSFRGSRSIENWIGNLNFDLKHINDICSGCRGHDGFTSSWRSVADTLRQKVEDAVREHPDYRVVFTGHSLGGALATVAGADLRGNGYDIDVFSYGAPRVGNRAFAEFLTVQTGGTLYRITHTNDIVPRLPPXEFGYSHSSPEYWIKSGTLVPVTRNDIVKIEGIDATGGNNKPNIPDIPAHLWYFGLIGTC

SEQ ID NO: 11935 - protein, 268 aa, Thermomyces lanuginosus
EVSQDLFNQFNLFAQYSAAAYCGKNNDAPAGTNITCTGNACPEVEKADATFLYSFEDSGVGDVTGFLALDNTNKLIVLSFRGSRSIENWIGNLNFDLKEINDICSGCRGHDGFTSSWRSVADTLRQKVEDAVREHPDYRVVFTGHSLGGALATVAGADLRGNGYDIDVFSYGAPRVGNRAFAEFLTVQTGGTLYRITHTNDIVPRLPPREFGYSHSSPEYWIKSRTRVPVTRNDIVKIEGIDATGGNNQPNIPDIPAHLWYFGLIGTC

SEQ ID NO: 11936 - protein, 268 aa, Thermomyces lanuginosus
EVSQDLFNQFNLFAQYSAAAYCGKNNDAPAGTNITCTGNACPEVEKADATFLYSFEDSGVGDVTGFLALDNTNKLIVLSFRGSRSIENWIANLNFGLKEINDICSGCRGHDGFTSSWRSVADTLRQKVEDAVREHPDYRVVFTGHSLGGGLATVAGADLRGNGYDIDVFSYGAPRVGNRAFAEFLTVQTGGTLYRITHTNDIVPRLPPREFGYSHSSPEYWIKSGTLVPVRRRDIVKIEGIDATGGNNQPNIPDIPAHLWYFGLIGTC

SEQ ID NO: 11937 - protein, 268 aa, Thermomyces lanuginosus
EVSQDLFNQFNLFAQYSAAAYCKKNNDAPAGTNITCTGNACPEVEKADATFLYSFEDSGVGDVTGFLALDNTNKLIVLSFRGSRSIENWIGNLNFDLKEINDICSGCRGHDGFTSSWRSVADTLRQKVEAAVREHPDYRVVFTGHSLGGALATVAGADLRGNGYDIDVFSYGAPRVGNRAFAEFLTVQTGGTLYRITHTNDIVPRLPPREFGYSHSSPEYWIKSGTLVPVTRNDIVKIEGIDATGGNNQPNIPDIPAHLWYFGLIGTC

SEQ ID NO: 11938 - protein, 268 aa, Thermomyces lanuginosus
EVSQDLFNQFNLFAQYSAAAYCGKNNDAPAGTNITCTGNACPEVEKADATFLYSFKDSGVGDVTGFLALDNTNKLIVLSFRGSRSIENWIGNLNFDLKEINDICSGCRGHDGFTSSWRSVADTLRQKVEAAVREHPDYRVVFTGHSLGGALATVAGADLRGNGYDIDVFSYGAPRVGNRAFAEFLTVQTGGTLYRITHTNDIVPRLPPREFGYSHSSPEYWIKSGTLVPVTRNDIVKIEGIDATGGNNQPNIPDIPAHLWYFGLIGTC

SEQ ID NO: 11939 - protein, 268 aa, Thermomyces lanuginosus
EVSQDLFNQFNLFAQYSAAAYCGKNNDAPAGTNITCTGNACPEVFKADATFLYSFEDSGVGDVTGFLALDNTNKLIVLSFRGSRSIENWIGNLNFDLKEINDICSGCRGHDGFTSSWRSVADTLRQKVEDAVREHPDYRVVFTGHSLGGALATVAGADLRGNGYDIDVFSYGAPRVGNRAFAEFLTVQDGGTLYRITHTNDIVPRLPPREFGYSHSSPEYWIKSGTLVPVTRNDIVKIEGIDATGGNNQPNIPDIPAHLWYFGLIGTC

SEQ ID NO: 11940 - protein, 268 aa, Thermomyces lanuginosus
EVSQDLFNQFNLFAQYSAAAYCGKNNDAPAGTNITCTGNACPEVEKADATFLYSFEDSGVGDVTGFLALDNTNKLIVLSFRGSRSIENWIGNLNFDLKEINDICSGCRGHDGFTSSWRSVADTLRQKVEDAVREHPDYRVVFTGHSLGGALATVAGADLRGNGYDIDVFSYGAPRVGNRAFAEFLTVQTGGTLYRITHTNDIVPRLPPREFGYSHSSPEYWIKSGTLVPVTRNDIVKIEGIDATGGNNQRNRPDIPAHLWYFGLIGTC

SEQ ID NO: 11941 - protein, 268 aa, Thermomyces lanuginosus
EVSQDLFNQFNLFAQYSAAAYCGKNNDAPAGTNITCTGNACPEVEKADATFLYSFEDSGVGDVTGFLALDNTNKLIVLSFRGSRSIENWIGNLNFDLKEINDICSGCRGHDGFTSSWRSVADTLRQKVEAAVREHPDYRVVFTGHSLGGALATVAGADLRGNGYDIDVFSYGAPRVGNRAFAEFLTVQQGGTLYRITHTNDIVPRLPPREFGYSHSSPEYWIKSGTLVPVTRNDIVKIEGIDATGGNNQPNIPDIPAHLWYFGLIGTC

SEQ ID NO: 11942 - protein, 268 aa, Thermomyces lanuginosus
EVSQDLFNQFNLFAQYSAAAYCGKNNDAPAGTNITCTGNACPEVEKADATFLYSFEDSGVGDVTGFLALDNTNKLIVLSFRGSRSIENWIGNLHFDLKEINDICSGCRGHDGFTSSWRSVADTLRQKVEDAVREHPDYRVVFTGHSLGGALATVAGADLRGNGYDIDVFSYGAPRVGNRAFAEFLTVQTGGTLYRITHTNDIVPRLPPREFGYSHSSPEYWIKSGTLVPVTRNDIVKIEGIDATGGNNKPNIPDIPAHLWYFGLIGTC

SEQ ID NO: 11943 - protein, 268 aa, Thermomyces lanuginosus
EVSQDLFNQFNLFAQYSAAAYCGKNNDAPAGTNITCTGNACPEVEKADATFLYSFEDSGVGDVTGFLALDNTNKLIVLSFRGSRSIENWIGNLNFDLKRINDICSGCRGHDGFTSSWRSVADTLRQKVEDAVREHPDYRVVFTGHSLGGALATVAGADLRGNGYDIDVFSYGAPRVGNRAFAEFLTVQTGGTLYRITHTNDIVPRLPPXEFGYSHSSPEYWIKSGTLVPVTRNDIVKIEGIDATGGNNRPNIPDIPAHLWYFGLIGTC

SEQ ID NO: 11944 - protein, 268 aa, Thermomyces lanuginosus
EVSQDLFNQFNLFAQYSAAAYCGKNNDAPAGTNITCTGNACPEVEKADATFLYSFEDSGVGDVTGFLALDNTNKLIVLSFRGSRSIENWIGNLNFXLKEINDICSGCRGHDGFTSSWRSVADTLRQKVEDAVREHPDYRVVFTGHSLGGALATVAGADLRGNGYDIDVFSYGAPRVGNRAFAEFLTVQTGGTLYRITHTNDIVPRLPPXEFGYSHSSPEYWIKSGTLVPVTRNDIVKIEGIDATGGNNHPNIPDIPAHLWYFGLIGTC

SEQ ID NO: 11945 - protein, 268 aa, Thermomyces lanuginosus
EVSQDLFNQFNLFAQYSAAAYCGKNNDAPAGTNITCTGNACPEVEKADATFLYSFEDSGVGDVTGFLALDNTNKLIVLSFRGSRSIENWIGNLNFDLKEINDICSGCRGHDGFTSSWRSVADTLRQKVEDAVREHPDYRVVFTGHSLGGALATVAGADLRGNGYDIDVFSYGAPRVGRRRFAEFLTVQTGGTLYRITHTNDIVPRLPPREFGYSHSSPEYWIKSGTLVPVTRNDIVKIEGIDATGGNNQPNIPDIPAHLWYFGLIGTC

SEQ ID NO: 11946 - protein, 268 aa, Thermomyces lanuginosus
EVSQDLFNQFNLFAQYSKAAYCGKNNDAPAGTNITCTGNACPEVEKADATFLYSFEDSGVGDVTGFLALDNTNKLIVLSFRGSRSIENWIGNLNFDLKEINDICSGCRGHDGFTSSWRSVADTLRQKVEDAVREHPDYRVVFTGHSLGGALATVAGADLRGNGYDIDVFSYGAPRVGNRAFAEFLTVQDGGTLYRITHTNDIVPRLPPREFGYSHSSPEYWIKSGTLVPVTRNDIVKIEGIDATGGNNQPNIPDIPAHLWYFGLIGTC

SEQ ID NO: 11947 - protein, 268 aa, Thermomyces lanuginosus
EVSQDLFNQFNLFAQYSAAAYCGKNNDAPAGTDITCTGNACPEVFKADATFLYSFEDSGVGDVTGFLALDNTNKLIVLSFRGSRSIENWIGNLNFDLKEINDICSGCRGHDGFTSSWRSVADTLRQKVEDAVREHPDYRVVFTGHSLGGALATVAGADLRGNGYDIDVFSYGAPRVGNRAFAEFLTVQTGGTLYRITHTNDIVPRLPPREFGYSHSSPEYWIKSGTLVPVTRNDIVKIEGIDATGGNNQPNIPDIPAHLWYFGLIGTC

SEQ ID NO: 11948 - protein, 268 aa, Thermomyces lanuginosus
EVSQDLFNQFNLFAQYSAAAYCGKNNDAPAGTNITCTGNACPEVEKADATTLYSFEDSGVGDVTGFLALDNTNKLIVLSFRGSRSIENWIGNLNFDLKEINDICSGCRGHDGFTSSWRSVADTLRQKVEDAVREHPDYRVVFTGHSLGGALATVAGADLRGNGYDIDVFSYGAPRVGNRAFAEFLTVQTGGTLYRITHTNDIVPRLPPREFGYSHSSPEYWIKSGTLVPVTRNDIVKIEGIDATGGNNQPNQPDIPAHLWYFGRIGTC

SEQ ID NO: 11949 - protein, 268 aa, Thermomyces lanuginosus
EVSQDLFNQFNLFAQYSAAAYCGKNNDAPAGTQITCTGNACPEVEKADATFLYSFEDSGVGDVTGFLALDNTNKLIVLSFRGSRSIENWIANLNFDLKKINDICSGCRGHDGFTSSWRSVADTLRQKVEDAVREHPDYRVVFTGHSLGGALATVAGADLRGNGYDIDVFSYGAPRVGNRAFAEFLTVQTGGTLYRITHTNDIVPRLPPREFGYSHSSPEYWIKSGTLVPVRRRDIVKIEGIDATGGNNRPNIPDIPAHLWYFGLIGTC

SEQ ID NO: 11950 - protein, 269 aa, Thermomyces lanuginosus
EVSQDLFNQFNLFAQYSAAAYCGKNNDAPAGTNITCTGNACPEVEKADATFLYSFEDSGVGDVTGFLALDNTNKLIVLSFRGSRSIENWIGNLNFDLKEINDICRRRCRGHDGFTSSWRSVADTLRQKVEDAVREHPDYRVVFTGHSLGGALATVAGADLRGNGYDIDVFSYGAPRVGNRAFAEFLTVQTGGTLYRITHTNDIVPRLPPREFGYSHSSPEYWIKSGTLVPVTRNDIVKIEGIDATGGNNQPNIPDIPAHLWYFGLIGTC

SEQ ID NO: 11951 - protein, 268 aa, Thermomyces lanuginosus; identical to SEQ ID NO: 7764

SEQ ID NO: 11952 - protein, 268 aa, Synthetic construct
EVSQDLFNQFNLFAQYSAAAYCGKNNDAPAGTNITCTGNACPEVEKADATFLYSFEDSGVGDVTGFLALDNTNKLIVLSFRGSRSIENWIGNLNFLLKEINDICSGCRGHDGFTSSWRSVADTLRQKVEDAVREHPDYRVVFTGHSLGGALATVAGADLRGNGYDIDVFSYGAPRVGNRAFAEFLTVQTGGTLYRITHTNDIVPRVPPREFGYSHSSPEYWIKSGTLVPVTRNDIVKIEGIDATGGNNQPNIPDIPAHIWYFGLIGTC

SEQ ID NO: 11953 - protein, 268 aa, Thermomyces lanuginosus
EVSQDLFNQFNLFAQYSAAAYCGKNNDAPAGTNITCTGNACPEVEKADATFLYSFEDSGVGDVTGFLALDNTNKLIVLSFRGSRSIENWIGNLNFDLKEINDICSGCRGHDGFTSSWRSVADTLRQKVEDAVREHPDYRVVFTGHSLGGALATVAGADLRGNGYDIDVFSYGAPRVGNRAFAEFLTVQTGGTLYRITHTNDIVPRLPPREFGYSHPPPEYWIKSGTLVPVTRNDIVKIEGIDATGGNNQPNIPDIPAHLWYFGLIGTC

SEQ ID NO: 11954 - protein, 268 aa, Synthetic construct
KVSQDLFNQFNLFAQYSAAAYCGKNNDAPAGTNITCTGNACPEVEKADATFLYSFEDSGVGDVTGFLALDNTNKLIVLSFRGSRSIENWFGNLNFLLKKINDICSGCRGHDGFTSSWRSVADTLRQKVEDAVREHPDYRVVFTGHSLGGALATVAGADLRGNGYDIDVFSYGAPRVGNRAFAEFLTAQTGGTLYRITHTNDIVPRLPPREFGYSHSSPEYWIKSGTLVPVTRNDIVKIEGIDATGGNNQPNIPDIPAHLWYFGLIGTC

SEQ ID NO: 11955 - protein, 268 aa, Thermomyces lanuginosus
EVSQDLFNQFNLFAQYSAAAYCGKNNDAPAGTNITCTGNACPEVEKADATFLYSFEDSGVGDVTGFLALDNTNKLIVLSFRGSRSIENWIGNLNFDLKEINDICSGCRGHDGFTSSWRSVADTLRQKVEDAVREHPDYRVVFTGHSLGGALATVAGADLRGNGYDIDVFSYGAPRVGNRAFAEFLTVQTGGTLYRITHTNDIVPRLPPREFGYSHSSPEYWIKSGTLVPVRRNDIVKIEGIDATGGNNQPNIPYIPAHLWYFGLIGTC

SEQ ID NO: 11956 - protein, 268 aa, Thermomyces lanuginosus
EVSQDLFNQFNLFAQYSAAAYCGKNNDAPAGTNITCTGNACPEVEKADATFLYSFEDSGVGDVTGFLALDNTNKLIVLSFRGSRSIENWIGNLNFDLKEINDICSGCRGHDGFTSSWRSVADTLRQKVEDAVREHPDYRVVFTGHSLGGALATVAGADLRGNGYDIDVFSYGAPRVGNRAFAEFLTVQTGGTLYRITHTNDIVPRLPPREFGYSHSSPEYWIKSGTLVPVRRNDIVKIEGIDATGGNNQPNIPTIPAHLWYFGLIGTC

SEQ ID NO: 11957 - protein, 268 aa, Thermomyces lanuginosus
EVSQDLFNQFNLFAQYSAAAYCGKNNDAPAGTNITCTGNACPEVEKADATFLYSFEDSGVGDVTGFLALDNTNKLIVLSFRGSRSIENWIGNLNFDLKEINDICSGCRGHDGFTSSWRSVADTLRQKVEDAVREHPDYRVVFTGHSLGGALATVAGADLRGNGYDIDVFSYGAPRVGNRAFAEFLTVQTGGTLYRITHTNDIVPRLPPREFGYSHSSPEYWIKSGTLVPVTRRDIVKIEGIDATGGNNQPNIPNIPAHLWYFGLIGTC

SEQ ID NO: 11958 - protein, 268 aa, Thermomyces lanuginosus
EVSQDLFNQFNLFAQYSAAAYCGKNNDAPAGTNITCTGNACPEVEKADATFLYSFEDSGVGDVTGFLALDNTNKLIVLSFRGSRSIENWIGNLNFNLKEINDICSGCRGHDGFTSSWRSVADTLRQKVEDAVREHPDYRVVFTGHSLGGALATVAGADLRGNGYDIDVFSYGAPRVGNRAFAEFLTVQTGGTLYRITHTNDIVPRLPPREFGYSHSSPEYWIKSGTLVPVRRRDIVKIEGIDATGGNNQPNIPDIPAHLWYFGLIGTC

SEQ ID NO: 11959 - protein, 268 aa, Thermomyces lanuginosus
EVSQDLFNQFNLFAQYSAAAYCGKNNDAPAGTNITCTGNACPEVEKADATFLYSFEDSGVGDVTGFLALDNTNKLIVLSFRGSRSIENWIGNLNFDLKEINDICSGCRGHDGFTSSWRSVADTLRQKVEDAVREHPDYRVVFTGHSLGGALATVAGADLRGNGYDIDVFSYGAPRVGNRAFAEFLTVQTGGTLYRITHTNDIVPRLPPREFGYSHSSPEYWIKSGTLVPVRRNDIVKIEGIDATGGNNQPNIPLIPAHLWYFGLIGTC

SEQ ID NO: 11960 - protein, 268 aa, Thermomyces lanuginosus
EVSQDLFNQFNLFAQYSAAAYCGKNNDAPAGTNITCTGNACPEVEKADATFLYSFEDSGVGDVTGFLALDNTNKLIVLSFRGSRSIENWIGNLNFDLKEINDICSGCRGHDGFTSSWRSVADTLRQKVEDAVREHPDYRVVFTGHSLGGALATVAGADLRGNGYDIDVFSYGAPRVGNRAFAEFLTVQTGGTLYRITHTNDIVPRLPPREFGYSHSSPEYWIKSGTLVPVTRRDIVKIEGIDATGGNNQPNIPHIPAHLWYFGLIGTC

SEQ ID NO: 11961 - protein, 268 aa, Thermomyces lanuginosus
EVSQDLFNQFNLFAQYSAAAYCGKNNDAPAGTNITCTGNACPEVEKADATFLYSFEDSGVGDVTGFLALDNTNKLIVLSFRGSRSIENWIGNLNFDLKEINDICSGCRGHDGFTSSWRSVADTLRQKVEDAVREHPDYRVVFTGHSLGGALATVAGADLRGNGYDIDVFSYGAPRVGNRAFAEFLTVQTGGTLYRITHTNDIVPRLPPREFGYSHSSPEYWIKSGTLVPVRRNDIVKIEGIDATGGNNQPNIPSIPAHLWYFGLIGTC

SEQ ID NO: 11962 - protein, 268 aa, Synthetic construct
EVSQDLFNQFNLFAQYSAAAYCGKNNDAPAGTNITCTGNACPEVEKADATFLYSFEDSGVGDVTGFLALDNTNKLIVLSFRGSRSIENWIVNLNFDLKEINDICSGCRGHDGFWSSWRSVADTLRQKVEDAVREHPDYRVVFTGHSLGGALATVAGADLRGNGYDIDVFSYGAPRVGNRAFAEFLTVQTGGTLYRITHTNDIVPRLPPREFGYSHSSPEYWIKSGTLVPVTRNDIVKIEGIDATGGNNQPNIPDPPAHLWYFGLIGTC

SEQ ID NO: 11963 - protein, 268 aa, Thermomyces lanuginosus
EVSQDLFNQFNLFAQYSAAAYCGKNNDAPAGTQITCTGNACPEVEKADATFLYSFEDSGVGDVTGFLALDNTNKLIVLSFRGSRSIENWIGNLNFDLKEINDICSGCRGHDGFTSSWRSVADTLRQKVEDAVREHPDYRVVFTGHSLGGALATVAGADLRGNGYDIDVFSYGAPRVGNRAFAEFLTVQTGGTLYRITHTNDIVPRLPPREFGYSHSSPEYWIKSGTLVPVTRNDIVKIEGIDATGGNNQPNIPNIPAHLWYFGLIGTC

SEQ ID NO: 11964 - protein, 268 aa, Thermomyces lanuginosus
EVSQDLFNQFNLFAQYSAAAYCGKNNDAPAGTNITCTGNACPEVEKADATFLYSFEDAGVGDVTGFLALDNTNKLIVLSFRGDRSIENWIGNLNFDLKEINDICSGCRGHDGFTSSWRSVADTLRQKVEDAVREHPDYRVVFTGHSLGGALATVAGADLRGNGYDIDVFSYGAPRVGNRAFAEFLTVQTGGTLYRITHTNDIVPRLPPREFGYSHSSPEYWIKSGTLVPVTRNDIVKIEGIDATGGNNQPNIPDIPAHLWYFGLIGTC

SEQ ID NO: 11965 - protein, 268 aa, Thermomyces lanuginosus
EVSQDLFNQFNLFAQYSAAAYCGKNNDAPAGTQITCTGNACPEVEKADATFLYSFEDSGVGDVTGFLALDNTNKLIVLSFRGSRSIENWIGNLNFDLKEINDICSGCRGHDGFTSSWRSVADTLRQKVEDAVREHPDYRVVFTGHSLGGALATVAGADLRGNGYDIDVFSYGAPRVGNRAFAEFLTVQTGGTLYRITHTNDIVPRLPPREFGYSHSSPEYWIKSGTLVPVTRNDIVKIEGIDATGGNNQPNIPLIPAHLWYFGLIGTC

SEQ ID NO: 11966 - protein, 268 aa, Thermomyces lanuginosus
EVSQDLFNQFNLFAQYSAAAYCGKNNDAPAGTNITCTGNACPEVEKADATFLYSFEDSGVGDVTGFLALDNTNKLIVLSFRGSRSIENWIGNLNFDLKEINDICSGCRGHDGFTSSWRSVADTLRQKVEDAVREHPDYRVVFTGHSLGGALATVAGADLRGNGYDIDVFSYGAPRVGNRAFAEFLTVQTGGTLYRITHTNDIVPRLPPREFGYSHSSPEYWIKSGTLVPVTRRDIVKIEGIDATGGNNQPNIPSIPAHLWYFGLIGTC

SEQ ID NO: 11967 - protein, 268 aa, Thermomyces lanuginosus
EVSQDLFNQFNLFAQYSAAAYCGKNNDAPAGTQITCTGNACPEVEKADATFLYSFEDSGVGDVTGFLALDNTNKLIVLSFRGSRSIENWIGNLNFDLKEINDICSGCRGHDGFTSSWRSVADTLRQKVEDAVREHPDYRVVFTGHSLGGALATVAGADLRGNGYDIDVFSYGAPRVGNRAFAEFLTVQTGGTLYRITHTNDIVPRLPPREFGYSHSSPEYWIKSGTLVPVTRNDIVKIEGIDATGGNNQPNIPTIPAHLWYFGLIGTC

SEQ ID NO: 11968 - protein, 268 aa, Thermomyces lanuginosus
EVSQDLFNQFNLFAQYSAAAYCGKNNDAPAGTNITCTGNACPEVEKADATFLYSFEDSGVGDVTGFLALDNTNKLIVLSFRGSRSIENWIGNLNFDLKEINDICSGCRGHDGFTSSWRSVADTLRQKVEDAVREHPDYRVVFTGHSLGGALATVAGADLRGNGYDIDVFSYGAPRVGNRAFAEFLTVQTGGTLYRITHTNDIVPRLPPREFGYSHSSPEYWIKSGTLVPVTRRDIVKIEGIDATGGNNQPNIPQIPAHLWYFGLIGTC

SEQ ID NO: 11969 - protein, 268 aa, Thermomyces lanuginosus
EVSQDLFNQFNLFAQYSAAAYCGKNNDAPAGTNITCTGNACPEVEKADATFLYSFEDSGVGDVTGFLALDNTNKLIVLSFRGSRSIQNWIGNLNFNLKEINDICSGCRGHDGFTSSWRSVADTLRQKVEDAVREHPDYRVVFTGHSLGGALATVAGADLRGNGYDIDVFSYGAPRVGNRAFAEFLTVQTGGTLYRITHTNDIVPRLPPREFGYSHSSPEYWIKSGTLVPVTRNDIVKIEGIDATGGNNQPNIPNIPAHLWYFGLIGTC

SEQ ID NO: 11970 - protein, 268 aa, Thermomyces lanuginosus
EVSQDLFNQFNLFAQYSAAAYCGKNNDAPAGTNITCTGNACPEVEKADATFLYSFEDSGVGDVTGFLALDNTNKLIVLSFRGSRSIENWIGNLNFDLKEINDICSGCRGHDGFTSSWRSVADTLRQKVEDAVREHPDYRVVFTGHSLGGALATVAGADLRGNGYDIDVFSYGAPRVGNRAFAEFLTVQTGGTLYRITHTNDIVPRLPPREFGYSHSSPEYWIKSGTLVPVRRNDIVKIEGIDATGGNNQPNIPNIPAHLWYFGLIGTC

SEQ ID NO: 11971 - protein, 268 aa, Thermomyces lanuginosus
EVSQDLFNQFNLFAQYSAAAYCGKNNDAPAGTNITCTGNACPEVEKADATFLYSFEDSGVGDVTGFLALDNTNKLIVLSFRGSRSIENWIGNLNFDLKEINDICSGCRGHDGFTSSWRSVADTLRQKVEDAVREHPDYRVVFTGHSLGGALATVAGADLRGNGYDIDVFSYGAPRVGNRAFAEFLTVQTGGTLYRITHTNDIVPRLPPREFGYSHSSPEYWIKSGTLVPVTRRDIVKIEGIDATGGNNQPNIPLIPAHLWYFGLIGTC

SEQ ID NO: 11972 - protein, 268 aa, Thermomyces lanuginosus
EVSQDLFNQFNLFAQYSAAAYCGKNNDAPAGTQITCTGNACPEVEKADATFLYSFEDSGVGDVTGFLALDNTNKLIVLSFRGSRSIENWIGNLNFDLKEINDICSGCRGHDGFTSSWRSVADTLRQKVEDAVREHPDYRVVFTGHSLGGALATVAGADLRGNGYDIDVFSYGAPRVGNRAFAEFLTVQTGGTLYRITHTNDIVPRLPPREFGYSHSSPEYWIKSGTLVPVTRNDIVKIEGIDATGGNNQPNIPQIPAHLWYFGLIGTC

SEQ ID NO: 11973 - protein, 268 aa, Thermomyces lanuginosus
EVSQDLFNQFNLFAQYSAAAYCGKNNDAPAGTQITCTGNACPEVEKADATFLYSFEDSGVGDVTGFLALDNTNKLIVLSFRGSRSIENWIGNLNFDLKEINDICSGCRGHDGFTSSWRSVADTLRQKVEDAVREHPDYRVVFTGHSLGGALATVAGADLRGNGYDIDVFSYGAPRVGNRAFAEFLTVQTGGTLYRITHTNDIVPRLPPREFGYSHSSPEYWIKSGTLVPVTRNDIVKIEGIDATGGNNQPNIPYIPAHLWYFGLIGTC

SEQ ID NO: 11974 - protein, 268 aa, Thermomyces lanuginosus
EVSQDLFNQFNLFAQYSAAAYCGKNNDAPAGTNITCTGNACPEVEKADATFLYSFEDSGVGDVTGFLALDNTNKLIVLSFRGSRSIENWIGNLNFDLKEINDICSGCRGHDGFTSSWRSVADTLRQKVEDAVREHPDYRVVFTGHSLGGALATVAGADLRGNGYDIDVFSYGAPRVGNRAFAEFLTVQTGGTLYRITHTNDIVPRLPPAAFGYSHSSPEYWIKSGTLVPVTRNDIVKIEGIDATGGNNQPNIPDIPAHLWYFGLIGTC

SEQ ID NO: 11975 - protein, 268 aa, Thermomyces lanuginosus
EVSQDLFNQFNLFAQYSAAAYCGKNNDAPAGTNITCTGNACPEVEKADATFLYSFEDSGVGDVTGFLALDNTNKLIVLSFRGSRSIENWIGNLNFDLKEINDICSGCRGHDGFTSSWRSVADTLRQKVEDAVREHPDYRVVFTGHSLGGALATVAGADLRGNGYDIDVFSYGAPRVGNRAFAEFLTVQTGGTLYRITHTNDIVPRLPPREFGYSHSSPEYWIKSGTLVPVRRNDIVKIEGIDATGGNNQPNIPQIPAHLWYFGLIGTC

SEQ ID NO: 11976 - protein, 268 aa, Thermomyces lanuginosus
EVSQDLFNQFNLFAQYSAAAYCGKNNDAPAGTNITCTGNACPEVEKADATFLYSFEDSGVGDVTGFLALDNTNKLIVLSFRGSRSIENWIGNLNFDLKEINDICSGCRGHDGFTSSWRSVADTLRQKVEDAVREHPDYRVVFTGHSLGGALATVAGADLRGNGYDIDVFSYGAPRVGNRAFAEFLTVQTGGTLYRITHTNDIVPRLPPREFGYSHSSPEYWIKSGTLVPVRRNDIVKIEGIDATGGNNQPNIPHIPAHLWYFGLIGTC

SEQ ID NO: 11977 - protein, 268 aa, Thermomyces lanuginosus
EVSQDLFNQFNLFAQYSAAAYCGKNNDAPAGTQITCTGNACPEVEKADATFLYSFEDSGVGDVTGFLALDNTNKLIVLSFRGSRSIENWIGNLNFDLKEINDICSGCRGHDGFTSSWRSVADTLRQKVEDAVREHPDYRVVFTGHSLGGALATVAGADLRGNGYDIDVFSYGAPRVGNRAFAEFLTVQTGGTLYRITHTNDIVPRLPPREFGYSHSSPEYWIKSGTLVPVTRNDIVKIEGIDATGGNNQPNIPHIPAHLWYFGLIGTC

SEQ ID NO: 11978 - protein, 268 aa, Synthetic construct
EVSQDLFNQFNLFAQYSAAAYCGKNNDAPAGTNITCTGNACPEVEKADATFLYSFEDSGVGDVTGFLALDNTNKLIVLSFRGSRSIENWFGNLNFLLKKINDICSGCRGHDGFTSSWRSVADTLRQKVEDAVREHPGYRVVFTGHSLGGALATVAGADLRGNGYDIDVFSYGAPRVGNRAFAEFLTAQTGGTLYRITHTNDIVPRLPPREFGYSHSSPEYWIKSGTLVPVTRNDIVKIEGIDATGGNNQPNIPDIPAHLWYFGLIGTC

SEQ ID NO: 11979 - protein, 268 aa, Aspergillus niger
EVSQDLFNQFNLFAQYSAAAYCGKNNDAPAGTNITCTGNACPEVEKADATFLYSFRDSGVGDVTGFLALDNTNKLIVLSFRGSRSIENWIGNLNFDLKEINDICSGCRGHDGFTSSWRSVADTLRQKVEDAVREHPDYRVVFTGHSLGGALATVAGADLRGNGYRIDVFSYGAPRVGNRAFAEFLTVQTGGTLYRITHTNDIVPRLPPREFGYSHSSPEYWIKSGTLVPVTRNDIVKIEGIDATGGNNQPNIPDIPAHLWYFGLIGTC

SEQ ID NO: 11980 - protein, 268 aa, Thermomyces lanuginosus
EVSQDLFNQFNLFAQYSAAAYCGKNNDAPAGTQITCTGNACPEVEKADATFLYSFEDSGVGDVTGFLALDNTNKLIVLSFRGSRSIENWIGNLNFDLKEINDICSGCRGHDGFTSSWRSVADTLRQKVEDAVREHPDYRVVFTGHSLGGALATVAGADLRGNGYDIDVFSYGAPRVGNRAFAEFLTVQTGGTLYRITHTNDIVPRLPPREFGYSHSSPEYWIKSGTLVPVTRNDIVKIEGIDATGGNNQPNIPSIPAHLWYFGLIGTC

SEQ ID NO: 11981 - protein, 268 aa, Thermomyces lanuginosus
EVSQDLFNQFNLFAQYSAAAYCGKNNDAPAGTNITCTGNACPEVEKADATFLYSFEDSGVGDVTGFLALDNTNKLIVLSFRGSRSIENWIGNLNFDLKEINDICSGCRGHDGFTSSWRSVADTLRQKVEDAVREHPDYRVVFTGHSLGGALATVAGADLRGNGYDIDVFSYGAPRVGNRAFAEFLTVQTGGTLYRITHTNDIVPRLPPREFGYSHSSPEYWIKSGTLVPVTRRDIVKIEGIDATGGNNQPNIPYIPAHLWYFGLIGTC

SEQ ID NO: 11982 - protein, 268 aa, Synthetic construct
EVSQDLFNQFNLFAQYSAAAYCGKNNDAPAGTNITCTGNACPEVEKADATFLYSFEDSGVGDVTGFLALDNTNKLIVLSFRGSRSIENWIGNLNFDLKEINDICSGCRGHDGFTSSWRSVADTLRQKVEDAVREHPDYRVVFTGHSLGGALATVAGADLRGNGYDIDVFSYGAPRVGNRAFAEFLTVQTGGTLYRITHTNDIVPRLPPREFGYSHSSPEYWIKSGTLVPVTRNDIVKIEGIDATGGNNQPNIPKIPAHIWYFGLIGTC

SEQ ID NO: 11983 - protein, 268 aa, Thermomyces lanuginosus
EVSQDLFNQFNLFAQYSAAAYCGKNNDAPAGTNITCTGNACPEVEKADATFLYSFEDSGVGDVTGFLALDNTNKLIVLSFRGSRSIENWIGNLNFDLKEINDICSGCRGHDGFTSSWRSVADTLRQKVEDAVREHPDYRVVFTGHSLGGALATVAGADLRGNGYDIDVFSYGAPRVGNRAFAEFLTVQTGGTLYRITHTNDIVPRLPPREFGYSHSSPEYWIKSGTLVPVTRRDIVKIEGIDATGGNNQPNIPTIPAHLWYFGLIGTC

SEQ ID NO: 11984 - protein, 267 aa, Thermomyces lanuginosus
VSQDLFNQFNLFAQYSAAAYCGKNNDAPAGTNITCTGNACPEVEKADATFLYSFEDSGVGDVTGFLALDNTNKLIVLSFRGSRSIENWIGNLNFDLKEINDICSGCRGHDGFTSSWRSVADTLRQKVEDAVREHPDYRVVFTGHSLGGALATVAGADLRGNGYDIDVFSYGAPRVGNRAFAEFLTVQTGGTLYRITHTNDIVPRLPPREFGYSHSSPEYWIKSGTLVPVRRRDIVKIEGIDATGGNNQPNIPDIPAHLWYFGLIGTC

SEQ ID NO: 11985 - protein, 267 aa, Thermomyces lanuginosus
VSQDLFNQFNLFAQYSAAAYCGKNNDAPAGTNITCTGNACPEVEKADATFLYSFEDSGVGDVTGFLALDNTNKLIVLSFRGSRSIENWIGNLNFDLEEINDICSGCRGHDGFTSSWRSVADTLRQKVEDAVREHPDYRVVFTGHSLGGALATVAGADLRGNGYDIDVFSYGAPRVGNRAFAEFLTVQTGGTLYRITHTNDIVPRLPPREFGYSHSSPEYWIKSGTLVPVTRCDIVKIEGIDATGGNNQPNIPDIPAHLWYFGLIGTC

SEQ ID NO: 11986 - protein, 267 aa, Thermomyces lanuginosus
VSQDLFNQFNLFAQYSAAAYCGKNNDAPAGTNITCTGNACPEVEKADATFLYSFEDSGVGDVTGFLALDNTNKLIVLSFRGSRSIENWIGNLNFDLKEINDICSGCRGHDGFTSSWRSVADTLRQKVEDAVREHPDYRVVFTGHSLGGALATVAGADLRGNGYDIDVFSYGAPRVGNRAFAEFLTVQTGGTLYRITTTNDIVPRLPPREFGYSHSSPEYWIKSGTLVPVTRCDIVKIEGIDATGGNNQPNIPDIPAHLWYFGLIGTC

SEQ ID NO: 11987 - protein, 267 aa, Thermomyces lanuginosus
VSQDLFNQFNLFAQYSAAAYCGKNNDAPAGTNITCTGNACPEVEKADATFLYSFEDSGVGDVTGFLALDNTNKLIVLSFRGSRSIENWIGNLNFDLKEINDICSGCRGHDGFTSSWRSVADTLRQKVEDAVREHPDYRVVFTGHSLGGALATVAGADLRGNGYDIDVFSYGAPRVGNRAFAEFLTVQTGGTLYRITHTNDIVPRLPPRTFGYSHSSPEYWIKSGTLVPVTRCDIVKIEGIDATGGNNQPNIPDIPAHLWYFGLIGTC

SEQ ID NO: 11988 - protein, 267 aa, Thermomyces lanuginosus
VSQDLFNQFNLFAQYSAAAYCGKNNDAPAGTNITCTGNACPEVEKADATFLYSFKDSGVGDVTGFLALDNTNKLIVLSFRGSRSIENWIGNLNFDLKEINDICSGCRGHDGFTSSWRSVADTLRQKVEDAVREHPDYRVVFTGHSLGGALATVAGADLRGNGYDIDVFSYGAPRVGNRAFAEFLTVQTGGTLYRITHTNDIVPRLPPREFGYSHSSPEYWIKSGTLVPVTRCDIVKIEGIDATGGNNQPNIPDIPAHLWYFGLIGTC

SEQ ID NO: 11989 - protein, 267 aa, Thermomyces lanuginosus
VSQDLFNQFNLFAQYSAAAYCGKNNDAPAGTNITCTGNACPEVEKADATFLYSFEDSGVGDVTGFLALDNTNKLIVLSFRGSRSIENWIGNLNFDLKEINDICSGCRGHDGFTSSWRSVADTLRQKVEDAVREHPDYRVVFTGHSLGGALATVAGADLRGNGYDIDVFSYGAPRVGNRAFAEFLTVQTGGTLYRITHTNDIVPRLPPREFGYSHSSPEFWIKSGTLVPVTRCDIVKIEGIDATGGNNQPNIPDIPAHLWYFGLIGTC

SEQ ID NO: 11990 - protein, 267 aa, Thermomyces lanuginosus
VSQDLFNQFNLFAQYSAAAYCGKNNDAPAGTNITCTGNACPEVEKADATFLYSFEDSGVGDVTGFLALDNTNKLIVLSFRGSRSIENWIGNLNFDLKEINDICSGCRGHDGFTSSWRSVADTLRQKVEDAVREHPDYRVVFTGHSLGGALATVAGADLRGNGYDIDVFSYGAPRVGNRAFAEFLTVQTGGTLYRITDTNDIVPRLPPREFGYSHSSPEYWIKSGTLVPVTRCDIVKIEGIDATGGNNQPNIPDIPAHLWYFGLIGTC

SEQ ID NO: 11991 - protein, 267 aa, Thermomyces lanuginosus
VSQDLFNQFNLFAQYSAAAYCGKNNDAPAGTNITCTGNACPEVEKADATFLYSFSDSGVGDVTGFLALDNTNKLIVLSFRGSRSIENWIGNLNFDLKEINDICSGCRGHDGFTSSWRSVADTLRQKVEDAVREHPDYRVVFTGHSLGGALATVAGADLRGNGYDIDVFSYGAPRVGNRAFAEFLTVQTGGTLYRITHTNDIVPRLPPREFGYSHSSPEYWIKSGTLVPVTRCDIVKIEGIDATGGNNQPNIPDIPAHLWYFGLIGTC

SEQ ID NO: 11992 - protein, 267 aa, Thermomyces lanuginosus
VSQDLFNQFNLFAQYSAAAYCGKNNDAPAGTNITCTGNACPEVEKADATILYSFEDSGVGDVTGFLALDNTNKLIVLSFRGSRSIENWIGNLNFDLKEINDICSGCRGHDGFTSSWRSVADTLRQKVEDAVREHPDYRVVFTGHSLGGALATVAGADLRGNGYDIDVFSYGAPRVGNRAFAEFLTVQTGGTLYRITHTNDIVPRLPPREFGYSHSSPEYWIKSGTLVPVTRCDIVKIEGIDATGGNNQPNIPDIPAHLWYFGLIGTC

SEQ ID NO: 11993 - protein, 267 aa, Thermomyces lanuginosus
VSQDLFNQFNLFAQYSAAAYCGKNNDAPAGTNITCTGNACPEVEKADATFLYSFEDSGVGDVTGFLALDNTNKLIVLSFRGSRSIENWIGNLNFDLKEINDICSGCRGHDGFTSSWRSVADTLRQKVEDAVREHPDYRVVFTGHSLGGALATVAGADLRGNGYDIDVFSYGAPRMGNRAFAEFLTVQTGGTLYRITHTNDIVPRLPPREFGYSHSSPEYWIKSGTLVPVTRCDIVKIEGIDATGGNNQPNIPDIPAHLWYFGLIGTC

SEQ ID NO: 11994 - protein, 267 aa, Thermomyces lanuginosus
VSQDLFNQFNLFAQYSAAAYCGKNNDAPAGTNITCTGNACPEVEKADATFLYSFEDSGVGDVTGFLALDNTNKLIVLSFRGSRSIENWIGNLNFQLKEINDICSSCRGHDGFTSSWRSVADTLRQKVEDAVREHPDYRVVFTGHSLGGALATVAGADLRGNGYDIDVFSYGAPRVGNRAFAEFLTVQTGGTLYRITHTNDIVPRLPPREFGYSHSSPEYWIKSRTLVPVTRNDIVKIEGIDATGGNNQPNIPDIPAHLWYFGLISTC

SEQ ID NO: 11995 - protein, 267 aa, Thermomyces lanuginosus
VSQDLFNQFNLFAQYSAAAYCGKNNDAPAGTNITCTGNACPEVEKADATFLYSFEDSGVGDVTGFLALDNTNKLIVLSFRGSRSIENWIGNLNFDLIEINDICSGCRGHDGFTSSWRSVADTLRQKVEDAVREHPDYRVVFTGHSLGGALATVAGADLRGNGYDIDVFSYGAPRVGNRAFAEFLTVQTGGTLYRITHTNDIVPRLPPREFGYSHSSPEYWIKSGTLVPVTRCDIVKIEGIDATGGNNQPNIPDIPAHLWYFGLIGTC

SEQ ID NO: 11996 - protein, 267 aa, Thermomyces lanuginosus
VSQDLFNQFNLFAQYSAAAYCGKNNDAPAGTNITCTGNACPEVEKADATFLYSFEDSGVGDVTGFLALDNTNKLIVLSFRGSRSIENWIGNLNFDLKEINDICSGCRGHDGFTSSWRSVADTLRQKVEDAVREHPDYRVVFTGHSLGGALATVAGADLRGNGYDIDVFSYGAPRVGNRAFAEFLTVQTGGTLYRITHTNDIVPRLPPRRFGYSHSSPEYWIKSGTLVPVTRCDIVKIEGIDATGGNNQPNIPDIPAHLWYFGLIGTC

SEQ ID NO: 11997 - protein, 267 aa, Thermomyces lanuginosus
VSQDLFNQFNLFAQYSAAAYCGKNNDAPAGTQITCTGNACPEVEKADATFLYSFEDSGVGDVTGFLALDNTNKLIVLSFRGSRSIENWIGNLNFDLKEINDICSGCRGHDGFTSSWRSVADTLRQKVEDAVREHPDYRVVFTGHSLGGALATVAGADLRGNGYDIDVFSYGAPRVGNRAFAEFLTVQTGGTLYRITHTNDIVPRLPPREFGYSHSSPEYWIKSGTLVPVTRCDIVKIEGIDATGGNNQPNIPDIPAHLWYFGLIGTC

SEQ ID NO: 11998 - protein, 267 aa, Thermomyces lanuginosus
VSQDLFNQFNLFAQYSAAAYCGKNNDAPAGTNITCTANACPEVEKADATFLYSFEDSGVGDVTGFLALDNTNKLIVLSFRGSRSIENWIGNLNFDLKEINDICSGCRGHDGFTSSWRSVADTLRQKVEDAVREHPDYRVVFTGHSLGGALATVAGADLRGNGYDIDVFSYGAPRVGNRAFAEFLTVQTGGTLYRITHTNDIVPRLPPREFGYSHSSPEYWIKSGTLVPVTRCDIVKIEGIDATGGNNQPNIPDIPAHLWYFGLIGTC

SEQ ID NO: 11999 - protein, 267 aa, Thermomyces lanuginosus
VSQDLFNQFNLFAQYSAAAYCGKNNDAPAGTKITCTGNACPEVEKADATFLYSFEDSGVGDVTGFLALDNTNKLIVLSFRGSRSIENWIGNLNFDLKEINDICSGCRGHDGFTSSWRSVADTLRQKVEDAVREHPDYRVVFTGHSLGGALATVAGADLRGNGYDIDVFSYGAPRVGNRAFAEFLTVQTGGTLYRITHTNDIVPRLPPREFGYSHSSPEYWIKSGTLVPVTRCDIVKIEGIDATGGNNQPNIPDIPAHLWYFGLIGTC

SEQ ID NO: 12000 - protein, 267 aa, Thermomyces lanuginosus
VSQDLFNQFNLFAQYSAAAYCGKNNDAPAGTNITCTGNACPEVEKADATFLYSFEDSGVGDVTGFLATDNTNKLIVLSFRGSRSIENWIGNLNFDLKEINDICSGCRGHDGFTSSWRSVADTLRQKVEDAVREHPDYRVVFTGHSLGGALATVAGADLRGNGYDIDVFSYGAPRVGNRAFAEFLTVQTGGTLYRITHTNDIVPRLPPREFGYSHSSPEYWIKSGTLVPVTRCDIVKIEGIDATGGNNQPNIPDIPAHLWYFGLIGTC

SEQ ID NO: 12001 - protein, 267 aa, Thermomyces lanuginosus
VSQDLFNQFNLFAQYSAAAYCGKNNDAPAGTNITCTGNACPEVEKADATFLYSFEDSGVGDVTGFLALDNTNKLIVLSFRGSRSIENWIGNLNFDLKEINDICSGCRGHDGFTSSWRSVADTLRQKVEDAVREHPDYRVVFTGHSLGGALATVAGADLRGNGYDIDVFSYGAPRVGNRAFAEFLTVQTGGTLYRITHTNDIVPRLPPREFGYSHSSPEYWIKSGTRVPVTRCDIVKIEGIDATGGNNQPNIPDIPAHLWYFGLIGTC

SEQ ID NO: 12002 - protein, 267 aa, Thermomyces lanuginosus
VSQDLFNQFNLFAQYSAAAYCGKNNDAPAGTNITCTGNACPEVEKADATFLYSFEDSGVGDVTGFLALDNTNKLIVLSFRGSRSIENWIGNLNFHLKEINDICSSCRGHDGFTSSWRSVADTLRQKVEDAVREHPDYRVVFTGHSLGGALATVAGADLRGNGYDIDVFSYGAPRVGNRAFAEFLTVQTGGTLYRITHTNDIVPRLPPREFGYSHSSPEYWIKSRTLVPVTRNDIVKIEGIDATGGNNQPNIPDIPAHLWYFGLISTC

SEQ ID NO: 12003 - protein, 267 aa, Thermomyces lanuginosus
VSQDLFNQFNLFAQYSAAAYCGKNNDAPAGTNITCTGNACPEVEKADATFLYSFEDSGVGDVTGFLALDNTNKLIVLSFRGSRSIENWIGNLNFDLKEINDICSGCRGHDGFTSSWRSVADTLRQKVEDAVREHPDYRVVFTGHSLGGALATVAGADLRGNGYDIDVFSYGAPRVGNRAFAEFLTVQTGGTLYRITHTNDIVPRLPPRKFGYSHSSPEYWIKSGTLVPVTRCDIVKIEGIDATGGNNQPNIPDIPAHLWYFGLIGTC

SEQ ID NO: 12004 - protein, 267 aa, Thermomyces lanuginosus
VSQRLFRQFNLFAQYSAAAYCGKNNDAPAGTNITCTGNACPEVEKADATFLYSFEDSGVGDVTGFLALDNTNKLIVLSFRGSRSIENWIGNLNFDLKEINDICSGCRGHDGFTSSWRSVADTLRQKVEDAVREHPDYRVVFTGHSLGGALATVAGADLRGNGYDIDVFSYGAPRVGNRAFAEFLTVQTGGTLYRITHTNDIVPRLPPREFGYSHSSPEYWIKSGTLVPVTRNDIVKIEGIDATGGNNQPNIPDIPAHLWYFGLIGTC

SEQ ID NO: 12005 - protein, 267 aa, Thermomyces lanuginosus
VSQDLFNQFNLFAQYSAAAYCGKNNDAPAGTNITCTGNACPEVEKADATFLYSFEDSGVGDVTGFLALDNTNKLIVLSFRGSRSIENWIGNLNFDLKEINDICSGCRGHDGFTSSWRSVADTLRQKVEDAVREHPDYRVVFTGHSLGGALATVAGADLRGNGYDIDVFSYGAPRVGNRAFAEFLTVQTGGTLYRITLTNDIVPRLPPREFGYSHSSPEYWIKSGTLVPVTRCDIVKIEGIDATGGNNQPNIPDIPAHLWYFGLIGTC

SEQ ID NO: 12006 - protein, 267 aa, Thermomyces lanuginosus
VSQDLFNQFNLFAQYSAAAYCGKNNDAPAGTNITCTGNACPEVEKADATFLYSFEDSGVGDVTGFLALDNTNKLIVLSFRGSRSIENWIGNLNFDLKEINDICSGCRGHDGFTSSWRSVADTLRQKVEDAVREHPDYRVVFTGHSLGGALATVAGADLRGNGYDIDVFSYGAPRVGNRAFAEFLTVQTGGTLYRITHTNDIVPRLPPREFGYSHSSPEYWIKSGTGVPVTRCDIVKIEGIDATGGNNQPNIPDIPAHLWYFGLIGTC

SEQ ID NO: 12007 - protein, 267 aa, Thermomyces lanuginosus
VSQDLFNQFNLFAQYSAAAYCGKNNDAPAGTNITCTGNACPEVEKADATFLYSFEDSGVGDVTGFLALDNTNKLIVLSFRGSRSIENWIGNLNFDLQEINDICSGCRGHDGFTSSWRSVADTLRQKVEDAVREHPDYRVVFTGHSLGGALATVAGADLRGNGYDIDVFSYGAPRVGNRAFAEFLTVQTGGTLYRITHTNDIVPRLPPREFGYSHSSPEYWIKSGTLVPVTRCDIVKIEGIDATGGNNQPNIPDIPAHLWYFGLIGTC

SEQ ID NO: 12008 - protein, 267 aa, Thermomyces lanuginosus
VSQDLFNQFNLFAQYSAAAYCGKNNDAPAGTNITCTGNACPEVEKADATFLYSFEDSGVGDVTGFLALDNTNKLIVLSFRGSRSIENWIGNLNFDLKEINDICSGCRGHDGFTSSWRSVADTLRQKVEDAVREHPDYRVVFTGHSLGGALATVAGADLRGNGYDIDVFSYGAPRVGNRAFAEFLTVQTGGTLYRITYTNDIVPRLPPREFGYSHSSPEYWIKSGTLVPVTRCDIVKIEGIDATGGNNQPNIPDIPAHLWYFGLIGTC

SEQ ID NO: 12009 - protein, 267 aa, Thermomyces lanuginosus
VSQDLFNQFNLFAQYSAAAYCGKNNDAPAGTNITCTGNACPEVEKADATFLYSFEDSGVGDVTGFLALDNTNKLIVLSFRGSRSIENWIGNLNFDLKEINDICSGCRGHDGFTSSWRSVADTLRQKVEDAVREHPDYRVVFTGHSLGGALATVAGADLRGNGYDIDVFSYGAPRVGNRAFAEFLTVQTGGTLYRITHTNDIVPRLPPREFGYSHSSPEYWIKSGTLVPVTRCDIVKIEGIDATGGNNQPNIPSIPAHLWYFGLIGTC

SEQ ID NO: 12010 - protein, 267 aa, Thermomyces lanuginosus
VSQDLFNQFNLFAQYSAAAYCGKNNDAPAGTNITCTGNACPEVEKADATFLYSFEDSGVGDVTGFLAHDNTNKLIVLSFRGSRSIENWIGNLNFDLKEINDICSGCRGHDGFTSSWRSVADTLRQKVEDAVREHPDYRVVFTGHSLGGALATVAGADLRGNGYDIDVFSYGAPRVGNRAFAEFLTVQTGGTLYRITHTNDIVPRLPPREFGYSHSSPEYWIKSGTLVPVTRCDIVKIEGIDATGGNNQPNIPDIPAHLWYFGLIGTC

SEQ ID NO: 12011 - protein, 267 aa, Thermomyces lanuginosus
VSQDLFNQFNLFAQYSAAAYCGKNNDAPAGTNITCTGNACPEVEKADATFLYSFRDSGVGDVTGFLALDNTNKLIVLSFRGSRSIENWIGNLNFDLKEINDICSGCRGHDGFTSSWRSVADTLRQKVEDAVREHPDYRVVFTGHSLGGALATVAGADLRGNGYDIDVFSYGAPRVGNRAFAEFLTVQTGGTLYRITHTNDIVPRLPPREFGYSHSSPEYWIKSGTLVPVTRCDIVKIEGIDATGGNNQPNIPDIPAHLWYFGLIGTC

SEQ ID NO: 12012 - protein, 267 aa, Thermomyces lanuginosus
VSQDLFNQFNLFAQYSAAAYCGKNNDAPAGTNITCTGNACPEVEKADATFLYSFEDSGVGDVTGFLALDNTNKLIVLSFRGSRSIENWIGNLNFDLVEINDICSGCRGHDGFTSSWRSVADTLRQKVEDAVREHPDYRVVFTGHSLGGALATVAGADLRGNGYDIDVFSYGAPRVGNRAFAEFLTVQTGGTLYRITHTNDIVPRLPPREFGYSHSSPEYWIKSGTLVPVTRCDIVKIEGIDATGGNNQPNIPDIPAHLWYFGLIGTC

SEQ ID NO: 12013 - protein, 267 aa, Thermomyces lanuginosus
VSQDLFNQFNLFAQYSAAAYCGKNNDAPAGTNITCTGNACPEVEKADATLLYSFEDSGVGDVTGFLALDNTNKLIVLSFRGSRSIENWIGNLNFDLKEINDICSGCRGHDGFTSSWRSVADTLRQKVEDAVREHPDYRVVFTGHSLGGALATVAGADLRGNGYDIDVFSYGAPRVGNRAFAEFLTVQTGGTLYRITHTNDIVPRLPPREFGYSHSSPEYWIKSGTLVPVTRCDIVKIEGIDATGGNNQPNIPDIPAHLWYFGLIGTC

SEQ ID NO: 12014 - protein, 267 aa, Thermomyces lanuginosus
VSQDLFNQFNLFAQYSAAAYCGKNNDAPAGTNITCTGNACPEVEKADATFLYSFEDSGVGDVTGFLALDNTNKLIVLSFRGSRSIENWIGNLNFDLREINDICSGCRGHDGFTSSWRSVADTLRQKVEDAVREHPDYRVVFTGHSLGGALATVAGADLRGNGYDIDVFSYGAPRVGNRAFAEFLTVQTGGTLYRITHTNDIVPRLPPREFGYSHSSPEYWIKSGTLVPVTRCDIVKIEGIDATGGNNQPNIPDIPAHLWYFGLIGTC

SEQ ID NO: 12015 - protein, 267 aa, Thermomyces lanuginosus
ISQDLFNQFNLFAQYSAAAYCGKNNDAPAGTNITCTGNACPEVEKADATFLYSFEDSGVGDVTGFLALDNTNKLIVLSFRGSRSIENWIGNLNFDLKEINDICSGCRGHDGFTSSWRSVADTLRQKVEDAVREHPDYRVVFTGHSLGGALATVAGADLRGNGYDIDVFSYGAPRVGNRAFAEFLTVQTGGTLYRITHTNDIVPRLPPREFGYSHSSPEYWIKSGTLVPVTRCDIVKIEGIDATGGNNQPNIPDIPAHLWYFGLIGTC

SEQ ID NO: 12016 - protein, 267 aa, Thermomyces lanuginosus
VSQDLFNQFNLFAQYSAAAYCGKNNDAPAGTNITCTGNACPEVEKADATFLYSFEDSGVGDVTGFLALDNTNKLIVLSFRGSRSIENWIGNLNFDLTEINDICSGCRGHDGFTSSWRSVADTLRQKVEDAVREHPDYRVVFTGHSLGGALATVAGADLRGNGYDIDVFSYGAPRVGNRAFAEFLTVQTGGTLYRITHTNDIVPRLPPREFGYSHSSPEYWIKSGTLVPVTRCDIVKIEGIDATGGNNQPNIPDIPAHLWYFGLIGTC

SEQ ID NO: 12017 - protein, 267 aa, Thermomyces lanuginosus
VSQDLFNQFNLFAQYSAAAYCGKNNDAPAGTNITCTGNACPEVEKADATFLYSFEDSGVGDVTGFLALDNTNKLIVLSFRGSRSIENWIGNLNFDLKEINDICSGCRGHDGFTSSWRSVADTLRQKVEDAVREHPDYRVVFTGHSLGGALATVAGADLRGNGYDIDVFSYGAPRVGNRAFAEFLTVQTGGTLYRITHTNDIVPRLPPREFGYSHSSPEYWIKSGTFVPVTRCDIVKIEGIDATGGNNQPNIPDIPAHLWYFGLIGTC

SEQ ID NO: 12018 - protein, 267 aa, Thermomyces lanuginosus
VSQDLFNQFNLFAQYSAAAYCGKNNDAPAGTNITCTGNACPEVEKADATFLYSFEDSGVGDVTGFLAFDNTNKLIVLSFRGSRSIENWIGNLNFDLKEINDICSGCRGHDGFTSSWRSVADTLRQKVEDAVREHPDYRVVFTGHSLGGALATVAGADLRGNGYDIDVFSYGAPRVGNRAFAEFLTVQTGGTLYRITHTNDIVPRLPPREFGYSHSSPEYWIKSGTLVPVTRCDIVKIEGIDATGGNNQPNIPDIPAHLWYFGLIGTC

SEQ ID NO: 12019 - protein, 267 aa, Thermomyces lanuginosus
VSQDLFNQFNLFAQYSAAAYCGKNNDAPAGTNITCTGNACPEVEKADATFLYSFEDSGVGDVTGFLALDNTNKLIVLSFRGSRSIENWIGNLNFDLKEINDICSGCRGHDGFTSSWRSVADTLRQKVEDAVREHPDYRVVFTGHSLGGALATVAGADLRGNGYDIDVFSYGAPRVGNRAFAEFLTVQTGGTLYRITGTNDIVPRLPPREFGYSHSSPEYWIKSGTLVPVTRCDIVKIEGIDATGGNNQPNIPDIPAHLWYFGLIGTC

SEQ ID NO: 12020 - protein, 267 aa, Thermomyces lanuginosus
VSQDLFNQFNLFAQYSAAAYCGKNNDAPAGTNITCTGNACPEVEKADATFLYSFEDSGVGDVTGFLALDNTNKLIVLSFRGSRSIENWIGNLNFDLKEINDICSGCRGHDGFTSSWRSVADTLRQKVEDAVREHPDYRVVFTGHSLGGALATVAGADLRGNGYDIDVFSYGAPRLGNRAFAEFLTVQTGGTLYRITHTNDIVPRLPPREFGYSHSSPEYWIKSGTLVPVTRCDIVKIEGIDATGGNNQPNIPDIPAHLWYFGLIGTC

SEQ ID NO: 12021 - protein, 267 aa, Thermomyces lanuginosus
VSQDLFNQFNLFAQYSAAAYCGKNNDAPAGTNITCTGNACPEVEKADATFLYSFEDSGVGDVTGFLALDNTNKLIVLSFRGSRSIENWIGNLNFDLKEINDICSGCRGHAGFTSSWRSVADTLRQKVEDAVREHPDYRVVFTGHSLGGALATVAGADLRGNGYDIDVFSYGAPRVGNRAFAEFLTVQTGGTLYRITHTNDIVPRLPPREFGYSHSSPEYWIKSGTLVPVTRCDIVKIEGIDATGGNNQPNIPDIPAHLWYFGLIGTC

SEQ ID NO: 12022 - protein, 267 aa, Thermomyces lanuginosus
VSQDLFNQFNLFAQYSAAAYCGKNNDAPAGTNITCTGNACPEVEKADATFLYSFEDSGVGDVTGFLALDNTNKLIVLSFRGSRSIENWIGNLNFDLKEINDICSGCRGHDGFTSSWRSVADTLRQKVEDAVREHPDYRVVFTGHSLGGALATVAGADLRGNGYDIDVFSYGAPRVGNRAFAEFLTVQTGGTLYRITSTNDIVPRLPPREFGYSHSSPEYWIKSGTLVPVTRCDIVKIEGIDATGGNNQPNIPDIPAHLWYFGLIGTC

SEQ ID NO: 12023 - protein, 267 aa, Thermomyces lanuginosus
VSQDLFNQFNLFAQYSAAAYCGKNNDAPAGTNITCTGNACPEVEKADATFLYSFEDSGVGDVTGFLASDNTNKLIVLSFRGSRSIENWIGNLNFDLKEINDICSGCRGHDGFTSSWRSVADTLRQKVEDAVREHPDYRVVFTGHSLGGALATVAGADLRGNGYDIDVFSYGAPRVGNRAFAEFLTVQTGGTLYRITHTNDIVPRLPPREFGYSHSSPEYWIKSGTLVPVTRCDIVKIEGIDATGGNNQPNIPDIPAHLWYFGLIGTC

SEQ ID NO: 12024 - protein, 267 aa, Thermomyces lanuginosus
VSQDLFNQFNLFAQYSAAAYCGKNNDAPAGTNITCTGNACPEVEKADATFLYSFEDSGVGDVTGFLARDNTNKLIVLSFRGSRSIENWIGNLNFDLKEINDICSGCRGHDGFTSSWRSVADTLRQKVEDAVREHPDYRVVFTGHSLGGALATVAGADLRGNGYDIDVFSYGAPRVGNRAFAEFLTVQTGGTLYRITHTNDIVPRLPPREFGYSHSSPEYWIKSGTLVPVTRCDIVKIEGIDATGGNNQPNIPDIPAHLWYFGLIGTC

SEQ ID NO: 12025 - protein, 267 aa, Thermomyces lanuginosus
VSQDLFNQFNLFAQYSAAAYCGKNNDAPAGTNITCTGNACPEVEKADATFLYSFQDSGVGDVTGFLALDNTNKLIVLSFRGSRSIENWIGNLNFDLKEINDICSGCRGHDGFTSSWRSVADTLRQKVEDAVREHPDYRVVFTGHSLGGALATVAGADLRGNGYDIDVFSYGAPRVGNRAFAEFLTVQTGGTLYRITHTNDIVPRLPPREFGYSHSSPEYWIKSGTLVPVTRCDIVKIEGIDATGGNNQPNIPDIPAHLWYFGLIGTC

SEQ ID NO: 12026 - protein, 267 aa, Thermomyces lanuginosus
VSQDLFNQFNLFAQYSAAAYCGKNNDAPAGTNITCTGNACPEVEKADATFLYSFEDSGVGDVTGFLALDNTNKLIVLSFRGSRSIENWIGNLNFDLKEINDICSGCRGHDGFTSSWRSVADTLRQKVEDAVREHPDYRVVFTGHSLGGALATVAGADLRGNGYDIDVFSYGAPRVGNRAFAEFLTVQTGGTLYRITHTNDIVPRLPPREFGYSHSSPEYWIKSGTLVPVRRCDIVKIEGIDATGGNNQPNIPDIPAHLWYFGLIGTC

SEQ ID NO: 12027 - protein, 267 aa, Thermomyces lanuginosus
VSQDLFNQFNLFAQYSAAAYCGKNNDAPAGTNITCTGNACPEVEKADATFLYSFEDSGVGDVTGFLACDNTNKLIVLSFRGSRSIENWIGNLNFDLKEINDICSGCRGHDGFTSSWRSVADTLRQKVEDAVREHPDYRVVFTGHSLGGALATVAGADLRGNGYDIDVFSYGAPRVGNRAFAEFLTVQTGGTLYRITHTNDIVPRLPPREFGYSHSSPEYWIKSGTLVPVTRCDIVKIEGIDATGGNNQPNIPDIPAHLWYFGLIGTC

SEQ ID NO: 12028 - protein, 267 aa, Thermomyces lanuginosus
VSQDLFNQFNLFAQYSAAAYCGKNNDAPAGTNITCTGNACPEVEKADATMLYSFEDSGVGDVTGFLALDNTNKLIVLSFRGSRSIENWIGNLNFDLKEINDICSGCRGHDGFTSSWRSVADTLRQKVEDAVREHPDYRVVFTGHSLGGALATVAGADLRGNGYDIDVFSYGAPRVGNRAFAEFLTVQTGGTLYRITHTNDIVPRLPPREFGYSHSSPEYWIKSGTLVPVTRCDIVKIEGIDATGGNNQPNIPDIPAHLWYFGLIGTC

SEQ ID NO: 12029 - protein, 267 aa, Thermomyces lanuginosus
VSQDLFNQFNLFAQYSAAAYCGKNNDAPAGTNITCTGNACPEVEKADATFLYSFEDSGVGDVTGFLALDNTNKLIVLSFRGSRSIENWIGNLNFDLKEINDICSGCRGHDGFTSSWRSVADTLRQKVEDAVREHPDYRVVFTGHSLGGALATVAGADLRGNGYDIDVFSYGAPRVGNRAFAEFLTVQTGGTLYRITHTNDIVPRLPPRAFGYSHSSPEYWIKSGTLVPVTRCDIVKIEGIDATGGNNQPNIPDIPAHLWYFGLIGTC

SEQ ID NO: 12030 - protein, 267 aa, Thermomyces lanuginosus
VSQDLFNQFNLFAQYSAAAYCGKNNDAPAGTNITCTGNACPEVEKADATFLYSFEDSGVGDVTGFLALDNTNKLIVLSFRGSRSIENWIGNLNFDLKEINDICSGCRGHDGFTSSWRSVADTLRQKVEDAVREHPDYRVVFTGHSLGGALATVAGADLRGNGYDIDVFSYGAPRVGNRAFAEFLTVQTGGTLYRITHTNDIVPRLPPREFGYSHSSPEYWIKSGTLVPVTRCDIVKIEGIDATGGNNQPNIPDITAHLWYFGLIGTC

SEQ ID NO: 12031 - protein, 267 aa, Thermomyces lanuginosus
VSQDLFNQFNLFAQYSAAAYCGKNNDAPAGTNITCTGNACPEVEKADATFLYSFEDSGVGDVTGFLAVDNTNKLIVLSFRGSRSIENWIGNLNFDLKEINDICSGCRGHDGFTSSWRSVADTLRQKVEDAVREHPDYRVVFTGHSLGGALATVAGADLRGNGYDIDVFSYGAPRVGNRAFAEFLTVQTGGTLYRITHTNDIVPRLPPREFGYSHSSPEYWIKSGTLVPVTRCDIVKIEGIDATGGNNQPNIPDIPAHLWYFGLIGTC

SEQ ID NO: 12032 - protein, 267 aa, Thermomyces lanuginosus
VSQDLFNQFNLFAQYSAAAYCGKNNDAPAGTNITCTGNACPEVEKADATFLYSFEDSGVGDVTGFLALDNTNKLIVLSFRGSRSIENWIGNLNFDLKEINDICSGCRGHDGFTSSWRSVADTLRQKVEDAVREHPDYRVVFTGHSLGGALATVAGADLRGNGYDIDVFSYGAPRVGNRAFAEFLTVQTGGTLYRITHTNDIVPRLPPRQFGYSHSSPEYWIKSGTLVPVTRCDIVKIEGIDATGGNNQPNIPDIPAHLWYFGLIGTC

SEQ ID NO: 12033 - protein, 267 aa, Thermomyces lanuginosus
VSQDLFNQFNLFAQYSAAAYCGKNNDAPAGTNITCTGNACPEVEKADATFLYSFEDSGVGDVTGFLALDNTNKLIVLSFRGSRSIENWIGNLNFDLKEINDICSGCRGHDGFTSSWRSVADTLRQKVEDAVREHPDYRVVFTGHSLGGALATVAGADLRGNGYDIDVFSYGAPRVGNRAFAEFLTVQTGGTLYRITHTNDIVPRLPPRNFGYSHSSPEYWIKSGTLVPVTRCDIVKIEGIDATGGNNQPNIPDIPAHLWYFGLIGTC

SEQ ID NO: 12034 - protein, 267 aa, Thermomyces lanuginosus
VSQDLFNQFNLFAQYSAAAYCGKNNDAPAGTQITCTGNACPEVEKADATFLYSFEDSGVGDVTGFLALDNTNKLIVLSFRGSRSIENWIANLNFDLKKINDICSGCRGHDGFTSSWRSVADTLRQKVEDAVREHPDYRVVFTGHSLGGALATVAGADLRGNGYDIDVFSYGAPRVGNRAFAEFLTVQTGGTLYRITHTNDIVPRLPPREFGYSHSSPEYWIKSGTLVPVRRRDIVKIEGIDATGGNNRPNIPDIPAHLWYFGLIGTC

SEQ ID NO: 12035 - protein, 267 aa, Thermomyces lanuginosus
VSQDLFNQFNLFAQYSAAAYCGKNNDAPAGTNITCTGNACPEVEKADATFLYSFEDSGVGDVTGFLALDNTNKLIVLSFRGSRSIENWIGNLNFDLKEINDICSGCRGHDGFTSSWRSVADTLRQKVEDAVREHPDYRVVFTGHSLGGALATVAGADLRGNGYDIDVFSYGAPRVGNRAFAEFLTVQTGGTLYRITHTNDIVPRLPPREFGYSHSSPEYWIKSGTLVPVTRNDIVKICGIDATGGNNRPNIPDIPAHLWYFGLISTC

SEQ ID NO: 12036 - protein, 268 aa, Thermomyces lanuginosus
VSQDLFNQFNLFAQYSAAAYCGKNNDAPAGTNITCTGNACPEVEKADATFLYSFEDSGVGDVTGFLALDNTNKLIVLSFRGSRSIENWIGNLNFSLKEINDICSGCRGHDGFTSSWRSVADTLRQKVEDAVREHPDYRVVFTGHSLGGALATVAGADLRGNGYDIDVFSYGAPRVGNRAFAEFLTVQTGGTLYRITHTNDIVPRLPPREFGYSHSSPEYWIKSGTLVPVTRNDIVKICGIDATGGNNRPNIPDIPAHLWYFDINEGSC

SEQ ID NO: 12037 - protein, 267 aa, Synthetic construct
VSQDLFNQFNLFAQYSAAAYCGKNNDAPAGTNITCTGNACPEVEKADATFLYSFEDSGVGDVTGFLALDNTNKLIVLSFRGSRSIENWFGNLNFLLKKINDICSGCRGHDGFTSSWRSVADTLRQKVEDAVREHPDYRVVFTGHSLGGALATVAGADLRGNGYDIDVFSYGAPRVGNRAFAEFLTAQTGGTLYRITHTNDIVPRLPPREFGYSHSSPEYWIKSGTLVPVTRNDIVKIEGIDATGGNNQPNIRDIPAHLWYFGLIGTC

SEQ ID NO: 12038 - protein, 267 aa, Thermomyces lanuginosus
VSQDLFNQFNLFAQYSAAAYCGKNNDAPAGTNITCTGNACPEVEKADATFLYSFEDSGVGDVTGFLALDNTNKLIVLSFRGSRSIENWIGNLNFDLKEINDICSGCRGHDGFTSSWRSVADTLRQKVEDAVREHPDYRVVFTGHSLGGALATVAGADLRGNGYDIDVFSYGAPRVGNRAFAEFLTVQTGGTLYRITHTNDIVPRLPPREFGYSHSSPEYWIKSGTLVPVTRNDIVKICGIDATGGNNRPNIPDIPAHLWYFGLIATC

SEQ ID NO: 12039 - protein, 267 aa, Thermomyces lanuginosus
VSQDLFNQFNLFAQYSAAAYCGKNNDAPAGTNITCTGNACPEVEKADATFLYSFEDSGVGDVTGFLALDNTNKLIVLSFRGSRSIENWIGNLNFSLKEINDICSGCRGHDGFTSSWRSVADTLRQKVEDAVREHPDYRVVFTGHSLGGALATVAGADLRGNGYDIDVFSYGAPRVGNRAFAEFLTVQTGGTLYRITHTNDIVPRLPPREFGYSHSSPEYWIKSGTLVPVTRNDIVKICGIDATGGNNRPNIPDIPAHLWYFGLIATC

SEQ ID NO: 12040 - protein, 267 aa, Thermomyces lanuginosus
VSQDLFNQFNLFAQYSAAAYCGKNNDAPAGTNITCTGNACPEVEKADATFLYSFEDSGVGDVTGFLALDNTNKLIVLSFRGSRSIENWIGNLNFDLKNINDICSGCRGHDGFTSSWRSVADTLRQKVEDAVREHPDYRVVFTGHSLGGALATVAGADLRGNGYDIDVFSYGAPRVGNRAFAEFLTVQTGGTLYRITHTNDIVPRLPPREFGYSHSSPEYWIKSGTLVPVTRNDIVKICGIDATGGNNRPNIPDIPAHLWYFGLIATC

SEQ ID NO: 12041 - protein, 267 aa, Synthetic construct
VSQDLFNQFNLFAQYSAAAYCGKNNDAPAGTNITCTGNACPEVEKADATFLYSFEDSGVGDVTGFLALDNTNKLIVLSFRGSRSIENWIGNLKFLLKEINDICSGCRGHDGFTSSWRSVADTLRQKVEDAVREHPDYRVVFTGHSLGGALATVAGADLRGNGYDIDVFSYGAPRVGNRAFAEFLTVQTGGTLYRITHTNDIVPRLPPREFGYSHSSPEYWIKSGTLVPVTRNDIVKIEGIDATGGNNRPNIPDIPAHLWYFGLIGTC

SEQ ID NO: 12042 - protein, 267 aa, Thermomyces lanuginosus
VSQDLFNQFNLFAQYSAAAYCGKNNDAPAGTNITCTGNACPEVEKADATFLYSFEDSGVGDVTGFLALDNTNKLIVLSFRGSRSIENWIGNLNFSLKEINDICSGCRGHDGFTSSWRSVADTLRQKVEDAVREHPDYRVVFTGHSLGGALATVAGADLRGNGYDIDVFSYGAPRVGNRAFAEFLTVQTGGTLYRITHTNDIVPRLPPREFGYSHSSPEYWIKSGTLVPVTRNDIVKICGIDATGGNNRPNMPDIPAHLWYFGQIDTC

SEQ ID NO: 12043 - protein, 267 aa, Thermomyces lanuginosus
VSQDLFNQFNLFAQYSAAAYCGKNNDAPAGTNITCTGNACPEVEKADATFLYSFEDSGVGDVTGFLALDNTNKLIVLSFRGSRSIENWIGNLNFDLKNINDICSGCRGHDGFTSSWRSVADTLRQKVEDAVREHPDYRVVFTGHSLGGALATVAGADLRGNGYDIDVFSYGAPRVGNRAFAEFLTVQTGGTLYRITHTNDIVPRLPPREFGYSHSSPEYWIKSGTLVPVTRNDIVKICGIDATGGNNRPNIPDIPAHLWYFGLIGTC

SEQ ID NO: 12044 - protein, 267 aa, Thermomyces lanuginosus
VSQDLFNQFNLFAQYSAAAYCGKNNDAPAGTNITCTGNACPEVEKADATFLYSFEDSGVGDVTGFLALDNTNKLIVLSFRGSRSIENWIGNLNFSLKEINDICSGCRGHDGFTSSWRSVADTLRQKVEDAVREHPDYRVVFTGHSLGGALATVAGADLRGNGYDIDVFSYGAPRVGNRAFAEFLTVQTGGTLYRITHTNDIVPRLPPREFGYSHSSPEYWIKSGTLVPVTRNDIVKICGIDATGGNNRPNIPDIPAHLWYFGLISTC

SEQ ID NO: 12045 - protein, 267 aa, Synthetic construct
VSQDLFNQFNLFAQYSAAAYCGKNNDAPAGTNITCTGNACPEVEKADATFLYSFEDSGVGRVTGFLALDNTNKLIVLSFRGSRSIENWFGNLNFLLKKINDICSGCRGHDGFTSSWRSVADTLRQKVEDAVREHPDYRVVFTGHSLGGALATVAGADLRGNGYDIDVFSYGAPRVGNRAFAEFLTAQTGGTLYRITHTNDIVPRLPPREFGYSHSSPEYWIKSGTLVPVTRNDIVKIEGIDATGGNNQPNIPDIPAHLWYFGLIGTC

SEQ ID NO: 12046 - protein, 267 aa, Synthetic construct
VSQDLFNQFNLFAQYSAAAYCGKNNDAPAGTNITCTGNACPEVEKADATFLYSFEDSGVGDVTGFLALDNTNKLIVLSFRGSRSIENWFGNLNFLLKKINDICSGCRGHDGFTSSWRSVADTLRQKVEDAVREHPDYRVVFTGHSLGGALATVAGADLRGNGYDIDVFSYGAPRVGNRAFAEFLTAQTGGTLYRITHTNDIVPRLPPREFGYSHSSPEYWIKSGTLVPVTRNDIVKIEGIDATGGNNRPNIPDIPAHLWYFGLIGTC

SEQ ID NO: 12047 - protein, 267 aa, Thermomyces lanuginosus
VSQDLFNQFNLFAQYSAAAYCGKNNDAPAGTNITCTGNACPEVEKADATFLYSFEDSGVGDVTGFLALDNTNKLIVLSFRGSRSIENWIGNLNFDLKEINDICSGCRGHDGFTSSWRSVADTLRQKVEDAVREHPDYRVVFTGHSLGGALATVAGADLRGNGYDIDVFSYGAPRVGNRAFAEFLTVQTGGTLYRITHTNDIVPRLPPREFGYSHSSPEYWIKSGTLVPVTRNDIVKICGIDATGGNNRPNIPDITAHLWYFGLISAC

SEQ ID NO: 12048 - protein, 267 aa, Synthetic construct
VSQDLFNQFNLFAQYSAAAYCGKNNDAPAGTNITCTGNACPEVEKADATFLYSFEDSGVGDVTGFLALDNTNKLIVLSFRGSRSIENWFGNLNFLLKKINDICSGCRGHDGFTSSWRSVADTLRQKVEDAVREHPDYRVVFTGHSLGGALATVAGADLRGNGYDIDVFSYGAPRVGNRAFAEFLTAQTGGTLYRITHRNDIVPRLPPREFGYSHSSPEYWIKSGTLVPVTRNDIVKIEGIDATGGNNQPNIPDIPAHLWYFGLIGTC

SEQ ID NO: 12049 - protein, 267 aa, Thermomyces lanuginosus
VSQDLFNQFNLFAQYSAAAYCGKNNDAPAGTNITCTGNACPEVEKADATFLYSFEDSGVGDVTGFLALDNTNKLIVLSFRGSRSIENWIGNLNFSLKEINDICSGCRGHDGFTSSWRSVADTLRQKVEDAVREHPDYRVVFTGHSLGGALATVAGADLRGNGYDIDVFSYGAPRVGNRAFAEFLTVQTGGTLYRITHTNDIVPRLPPREFGYSHSSPEYWIKSGTLVPVTRNDIVKICGIDATGGNNRPNIPDIPAHLWYFGLICTC

SEQ ID NO: 12050 - protein, 266 aa, Thermomyces lanuginosus
EVSQDLFNQFNLFAQYSAAAYCGKNNDAPAGTNITCTGNACPEVEKADATFLYSFEDSGVGDVTGFLALDNTNKLIVLSFRGSRSIENWIGNLNFDLKEINDICSGCRGHDGFTSSWRSVADTLRQKVEDAVREHPDYRVVFTGHSLGGALATVAGADLRGNGYDIDVFSYGAPRVGNRAFAEFLTVQTGGTLYRITHTNDIVPRLPPREFGYSHSSPEYWIKSRRPVTRNDIVKIEGIDATGGNNQPNIPDIPAHLWYFGLIGTC

SEQ ID NO: 12051 - protein, 266 aa, Thermomyces lanuginosus
EVSQDLFNQFNLFAQYSAAAYCGKNNDAPAGTNITCTGNACPEVEKADATFLYSFEDSGVGDVTGFLALDNTNKLIVLSFRGSRSIENWIGNLNFDLKEINDICSGCRGHDGFTSSWRSVADTLRQKVEDAVREHPDYRVVFTGHSLGGALATVAGADLRGNGYDIDVFSYGAPRVGNRAFAEFLTVQTGGTLYRITHTNDIVPRLPPREFGYSHSSPEYWIKRRVPVTRNDIVKIEGIDATGGNNQPNIPDIPAHLWYFGLIGTC

SEQ ID NO: 12052 - protein, 266 aa, Thermomyces lanuginosus
SRDLFRQFNLFAQYSAAAYCGKNNDAPAGTNITCTGNACPEVEKADATFLYSFEDSGVGDVTGFLALDNTNKLIVLSFRGSRSIENWIGNLNFDLKEINDICSGCRGHDGFTSSWRSVADTLRQKVEDAVREHPDYRVVFTGHSLGGALATVAGADLRGNGYDIDVFSYGAPRVGNRAFAEFLTVQTGGTLYRITHTNDIVPRLPPREFGYSHSSPEYWIKSGTLVPVTRNDIVKIEGIDATGGNNQPNIPDIPAHLWYFGLIGTC

SEQ ID NO: 12053 - protein, 266 aa, Synthetic construct
SQDLFNQFNLFAQYSAAAYCGKNNDAPAGTNITCTGNACPEVEKADATFLYSFEDSGVGDVTGFLALDNTNKLIVLSFRGSRSIENWIGNLKFLLKEINDICSGCRGHDGFTSSWRSVADTLRQKVEDAVREHPDYRVVFTGHSLGGALATVAGADLRGNGYDIDVFSYGAPRVGNRAFAEFLTVQTGGTLYRITHTNDIVPRLPPREFGYSHSSPEYWIKSGTLVPVTRNDIVKIEGIDATGGNNRPNIPDIPAHLWYFGLIGTC

SEQ ID NO: 12054 - protein, 265 aa, Thermomyces lanuginosus
EVSQDLFNQFNLFAQYSAAAYCGKNNDAPAGTNITCTGNACPEVEKADATFLYSFEDSGVGDVTGFLALDNTNKLIVLSFRGSRSIENWIGNLNFDLKEINDICSGCRGHDGFTSSWRSVADTLRQKVEDAVREHPDYRVVFTGHSLGGALATVAGADLRGNGYDIDVFSYGAPRVGNRAFAEFLTVQTGGTLYRITHTNDIVPRLPPREFGYSHSSPEYWIKRVRVTRNDIVKIEGIDATGGNNQPNIPDIPAHLWYFGLIGTC

SEQ ID NO: 12055 - protein, 265 aa, Synthetic construct
QDLFNQFNLFAQYSAAAYCGKNNDAPAGTNITCTGNACPEVEKADATFLYSFEDSGVGDVTGFLALDNTNKLIVLSFRGSRSIENWIGNLKFLLKEINDICSGCRGHDGFTSSWRSVADTLRQKVEDAVREHPDYRVVFTGHSLGGALATVAGADLRGNGYDIDVFSYGAPRVGNRAFAEFLTVQTGGTLYRITHTNDIVPRLPPREFGYSHSSPEYWIKSGTLVPVTRNDIVKIEGIDATGGNNRPNIPDIPAHLWYFGLIGTC

SEQ ID NO: 12056 - protein, 264 aa, Thermomyces lanuginosus
EVSQDLFNQFNLFAQYSAAAYCGKNNDAPAGTNITCTGNACPEVEKADATFLYSFEDSGVGDVTGFLALDNTNKLIVLSFRGSRSIENWIGNLNFDLKEINDICSGCRGHDGFTSSWRSVADTLRQKVEDAVREHPDYRVVFTGHSLGGALATVAGADLRGNGYDIDVFSYGAPRVGNRAFAEFLTVQTGGTLYRITHTNDIVPRLPPREFGYSHSSPEYWIKRRPTRNDIVKIEGIDATGGNNQPNIPDIPAHLWYFGLIGTC

SEQ ID NO: 12057 - protein, 273 aa, Thermomyces lanuginosus
EVSQDLFNQFNLFAQYSAAAYCGKNNDAPAGTNITCTGNACPEVEKADATFLYSFEDSGVGDVTGFLALDNTNKLIVLSFRGSRSIENWIANLNFDLKKINDICSGCRGHDGFTSSWRSVADTLRQKVEDAVREHPDYRVVFTGHSLGGALATVAGADLRGNGYDIDVFSYGAPRVGNRAFAEFLTVQTGGTLYRITHTNDIVPRLPPREFGYSHSSPEYWIKSGTLVPVRRRDIVKIEGIDATGGNNRPNIPDIPAHLWYFGLIGTCLAGVF

SEQ ID NO: 12058 - protein, 271 aa, Thermomyces lanuginosus
EVSQDLFNQFNLFAQYSAAAYCGKNNDAPAGTNITCTGNACPEVEKADATFLYSFEDSGVGDVTGFLALDNTNKLIVLSFRGSRSIENWIANLNFDLKKINDICSGCRGHDGFTSSWRSVADTLRQKVEDAVREHPDYRVVFTGHSLGGALATVAGADLRGNGYDIDVFSYGAPRVGNRAFAEFLTVQTGGTLYRITHTNDIVPRLPPREFGYSHSSPEYWIKSGTLVPVRRRDIVKIEGIDATGGNNRPNIPDIPAHLWYFGLIGTCLPG

SEQ ID NO: 12059 - protein, 270 aa, Thermomyces lanuginosus
VSQDLFNQFNLFAQYSAAAYCGKNNDAPAGTNITCTGNACPEVEKADATFLYSFEDSGVGDVTGFLALDNTNKLIVLSFRGSRSIENWIANLNFDLKKINDICSGCRGHDGFTSSWRSVADTLRQKVEDAVREHPDYRVVFTGHSLGGALATVAGADLRGNGYDIDVFSYGAPRVGNRAFAEFLTVQTGGTLYRITHTNDIVPRLPPREFGYSHSSPEYWIKSGTLVPVRRRDIVKIEGIDATGGNNRPNIPDIPAHLWYFGLIGTCLPG

SEQ ID NO: 12060 - protein, 268 aa, Thermomyces lanuginosus
EVSQDLFNQFNLFAQYSAAAYCKKNNDAPAGTNITCTGNACPEVEKADATTLYSFEDSGVGDVTGFLALDNTNKLIVLSFRGSRSIENWIGNLNFDLKEINDICSGCRGHDGFTSSWRSVADTLRQKVEDAVREHPDYRVVFTGHSLGGALATVAGADLRGNGYDIDVFSYGAPRVGNRAFAEFLTVQTGGTLYRITHTNDIVPRLPPREFGYSHSSPEYWIKSGTLVPVTRNDIVKIEGIDATGGNNQPNQPDIPAHLWYFGRIGTC

SEQ ID NO: 12061 - protein, 268 aa, Thermomyces lanuginosus
EVSQDLFNQFNLFAQYSAAAYCGKNNDAPAGTNITCTGNACPEVEKADATFLYSFEDSGVGDVTGFLALDNTNKLIVLSFRGSRSIENWIGNLNFDLKEINDICSGCRGHDGFTSSWRSVADTLRQKVEDAVREHPDYRVVFTGHSLGGALATVAGADLRGNGYDIDVFSYGAPRVGNRAFAEFLTVQTGGTLYRITHTNDIVPRLPPREFGYSHSSPEYWIKSGTLVPVRRRDIVKIEGIDATGGNNQPNIPDITAHLWYFGLIGTC

SEQ ID NO: 12062 - protein, 268 aa, Thermomyces lanuginosus
EVSQDLFNQFNLFAQYSAAAYCGKNNDAPAGTQITCTGNACPEVEKADATFLYSFEDSGVGDVTGFLALDNTNKLIVLSFRGSRSIENWIMNLNFDLKEINDICSGCRGHDGFTSSWRSVADTLRQKVEDAVREHPDYRVVFTGHSLGGALATVAGADLRGNGYDIDVFSYGAPRVGNRAFAEFLTVQTGGTLYRITHTNDIVPRLPPREFGYSHSSPEYWIKSGTLVPVRRRDIVKIEGIDATGGNNQPNIPDIPAHLWYFGLIGTC

SEQ ID NO: 12063 - protein, 268 aa, Thermomyces lanuginosus
EVSQDLFNQFNLFAQYSAAAYCGKNNDAPAGTNITCRGRACPEVEKADATFLYSFEDSGVGDVTGFLALDNTNKLIVLSFRGSRSIENWIANLNFGLKEINDICSGCRGHDGFTSSWRSVADTLRQKVEDAVREHPDYRVVFTGHSLGGALATVAGADLRGNGYDIDVFSYGAPRVGNRAFAEFLTVQTGGTLYRITHTNDIVPRLPPREFGYSHSSPEYWIKSGTLVPVRRRDIVKIEGIDATGGNNQPNIPDIPAHLWYFGLIGTC

SEQ ID NO: 12064 - protein, 268 aa, Thermomyces lanuginosus
EVSQDLFNQFNLFAQYSAAAYCGANNDAPAGTNITCTGNACPEVEKADATFLYSFEDSGVGDVTGFLALDNTNKLIVLSFRGSRSIENWIGNLNFDLKEINDICSGCRGHDGFTSSWRSVADTLRQKVEAAVREHPDYRVVFTGHSLGGALATIAGADLRGNGYDIDVFSYGAPRVGNRAFAEFLTVQTGGTLYRITHTNDIVPRLPPREFGYSHSSPEYWIKSGTLVPVTRNDIVKIEGIDATGGNNQPNIPDIPAHLWYFGLIGTC

SEQ ID NO: 12065 - protein, 268 aa, Thermomyces lanuginosus
EVSQDLFNQFNLFAQYSAAAYCGKNNDAPAGTNITCKKKACPEVEKADATFLYSFEDSGVGDVTGFLALDNTNKLIVLSFRGSRSIENWIGNLNFDLKEINDICSGCRGHDGFTSSWRSVADTLRQKVEDAVREHPDYRVVFTGHSLGGALATVAGADLRGNGYDIDVFSYGAPRVGNRAFAEFLTVQTGGTLYRITHTNDIVPRLPPREFGYSHSSPEYWIKSGTLVPVTRNDIVKIEGIDATGGNNQPNIPDIPAHLWYFGLIGTC

SEQ ID NO: 12066 - protein, 268 aa, Thermomyces lanuginosus
EVSQDLFNQFNLFAQYSAAAYCGKNNDAPAGTNITCTGNACPEVEKADATFLYSFEDSGVGDVTGFLALDNTNKQIVLSFRGSRSIENWIGNLNFDLKEINDICSGCRGHDGFTSSWRSVADTLRQKVEDAVREHPDYRVVFTGHSLGGALATVAGADLRGNGYDIDVFSYGAPRVGNRAFAEFLTNQQGGTLYRITHTNDIVPRLPPREFGYSHSSPEYWIKSGTLVPVTRNDIVKIEGIDATGGNNQPNIPDIPAHLWYFGRIGTC

SEQ ID NO: 12067 - protein, 268 aa, Thermomyces lanuginosus
EVSQDLFNQFNLFAQYSAAAYCGKNNDAPAGTNITCTGNACPEVEKADATFLYSFEDSGVGDVTGFLALDNTNKLIVLSFRGSRSIENWIGNLNFDLKEINDICSGCRGHAGFTSSWRSVADTLRQKVEAAVREHPDYRVVFTGHSLGGALATIAGADLRGNGYDIDVFSYGAPRVGNRAFAEFLTVQTGGTLYRITHTNDIVPRLPPREFGYSHSSPEYWIKSGTLVPVTRNDIVKIEGIDATGGNNQPNIPDIPAHLWYFGRIGTC

SEQ ID NO: 12068 - protein, 268 aa, Thermomyces lanuginosus
EVSQDLFNQFNLFAQYSAAAYCGKNNDAPAGTNITCTGNACPEVEKADATFLYSFEDSGVGDVTGFLALDNTNKLIVLSFRGSRSIENWIGNLNFDLKEINDICSGCRGHDGFTSSWRSVADTLRQKVEDAVREHPDYRVVFTGHSLGGALATVAGADLRGNGYDIDVFSYGAPRVGNRAFAEFLTVQTGGTLYRITHTNDIVPRLPPREFGYSHSSPEYWIKSGTLVPVRRRDIVKIEGIDATGGNNQPNIPDYPAHLWYFGLIGTC

SEQ ID NO: 12069 - protein, 268 aa, Thermomyces lanuginosus
EVSQDLFNQFNLFAQYSAAAYCGKNNDAPAGTNITCRRRACPEVEKADATFLYSFEDSGVGDVTGFLALDNTNKLIVLSFRGSRSIENWIGNLNFDLKEINDICSGCRGHDGFTSSWRSVADTLRQKVEDAVREHPDYRVVFTGHSLGGALATVAGADLRGNGYDIDVFSYGAPRVGNRAFAEFLTVQTGGTLYRITHTNDIVPRLPPREFGYSHSSPEYWIKSGTLVPVTRNDIVKIEGIDATGGNNQPNIPDIPAHLWYFGLIGTC

SEQ ID NO: 12070 - protein, 268 aa, Thermomyces lanuginosus
EVSQDLFNQFNLFAQYSAAAYCQANNDAPAGTNITCTGNACPEVEKADATFLYSFEDSGVGDVTGFLALDNTNKLIVLSFRGSRSIENWIGNLNFDLKEINDICSGCRGHDGFTSSWRSVADTLRQKVEDAVREHPDYRVVFTGHSLGGALATVAWADLRGNGYDIDVFSYGAPRVGNRAFAEFLTVQTGGTLYRITHTNDIVPRLPPREFGYSHSSPEYWIKSGTLVPVTRNDIVKIEGIDATGGNNQPNIPDIPAHLWYFGLIGTC

SEQ ID NO: 12071 - protein, 268 aa, Thermomyces lanuginosus
EVSQDLFNQFNLFAQYSAAAYCGKNNDAPAGTNITCTGNACPEVEKADATTLYSFEDSGVGDVTGFLALDNTNKGIVLSFRGSRSIENWIQNLNFDLKEINDICSGCRGHDGFTSSWRSVADTLRQKVEAAVREHPDYRVVFTGHSLGGALATVAGADLRGNGYDIDVFSYGAPRVGNRAFAEFLTVQTGGTLYRITHTNDIVPRLPPREFGYSHSSPEYWIKSGTLVPVTRNDIVKIEGIDATGGNNQPNIPDIPAHLWYFGRIGTC

SEQ ID NO: 12072 - protein, 268 aa, Thermomyces lanuginosus
EVSQDLFNQFNLFAQYSAAAYCGKNNDAPAGTNITCTGNACPEVEKADATFLYSFEDSGVGDVTGFLALDNTNKLIVLSFRGSRSIENWIGNLNFDLKEINDICSGCRGHDGFTSSWRSVADTLRQKVEDAVREHPDYRVVFTGHSLGGALATVAGADLRGNGYDIDVFSYGAPRVGNRAFAEFLTVQTGGTLYRITHTNDIVPRLPPREFGYSHSSPEYWIKSGTLVPVRRRDIVKIEGIDATGGNNQPNIPDIPAHLIYFGLIGTC

SEQ ID NO: 12073 - protein, 268 aa, Thermomyces lanuginosus
EVSQDLFNQFNLFAQYSAAAYCGKNNDAPAGTNITCTGNACPEVEKADATFLYSFEDSGVGDVTGFLALDNTNKLIVLSFRGSRSIENWIGNLNFDLKEINDICSGCRGHDGFTSSWRSVADTLRQKVEDAVREHPDYRVVFTGHSLGGALATVAGADLRGNGYDIDVFSYGAPRVGNRAFAEFLTVQTGGTLYRITHTNDIVPRLPPREFGYSHSSPEYWIKSGTLVPLRRRDIVKIEGIDATGGNNQPNIPDIPAHLWYFGLIGTC

SEQ ID NO: 12074 - protein, 268 aa, Thermomyces lanuginosus
EVSQDLFNQFNLFAQYSAAAYCGKNNDAPAGTNITCTGNACPEVEKADATFLYSFEDSGKGDVTGFLALDNTNKLIVLSFRGSRSIENWIGNLNFDLKEINDICSGCRGHDGFTSSWRSVADTLRQKVEDAVREHPDYRVVFTGHSLGGALATVAGADLRGNGYDIDVFSYGAPRVGNRAFAEFLTVQTGGTLYRITHTNDIVPRLPPREFGYSHSSPEYWIKSGTLVPVRRRDIVKIEGIDATGGNNQPNIPDIPAHLWYFGLIGTC

SEQ ID NO: 12075 - protein, 268 aa, Thermomyces lanuginosus
EVSQDLFNQFNLFAQYSAAAYCGKNNDAPAGTNITCTGNACPEVEKADATFLYSFEDSGVGDVTGFLALDNTNKLIVLSFRGSRSIKNWIGNLNFLLKPINDICSGCRGHDGFTSSWRSVADTLRQKVEDAVREHPDYRVVFTGHSLGGALATVAGADLRGNGYDIDVFSYGAPRVGNRAFAEFLTVQTGGTLYRITHTNDIVPRLPPREFGYSHSSPEYWIKSGTLVPVRRRDIVKIEGIDATGGNNQPNIPDIPAHLWYFGLIGTC

SEQ ID NO: 12076 - protein, 268 aa, Thermomyces lanuginosus
EVSQDLFNQFNLFAQYSAAAYCGKNNNAPAGTNITCTGNACPEVEKADATFLYSFEDSGVGDVTGFLALDNTNKLIVLSFRGSRSIENWIGNLNFGLKEINDICSGCRGHDGFTSSWRSVADTLRQKVEDAVREHPDYRVVFTGHSLGGALATVAGADLRGNGYDIDVFSYGAPRVGNRAFAEFLTVQTGGTLYRITHTNDIVPRLPPREFGYSHSSPEYWIKSGTLVPVRRRDIVKIEGIDATGGNNQPNIPDIPAHLWYFGLIGTC

SEQ ID NO: 12077 - protein, 268 aa, Thermomyces lanuginosus
EVSQDLFNQFNLFAQYSAAAYCGKNNDAPAGTNITCTGNACPEVEKADATFLYSFEDSGVGDVTGFLALDNTNKLIVLSFRGSRSIENWITNLNFELKEINDICSGCRGHAGFTSSWRSVADTLRQKVEDAVREHPDYRVVFTGHSLGGALATVAGADLRGNGYDIDVFSYGAPRVGNRAFAEFLTVQTGGTLYRITHTNDIVPRLPPREFGYSHSSPEYWIKSGTLVPVRRRDIVKIEGIDATGGNNQPNIPDIPAHLWYFGLIGTC

SEQ ID NO: 12078 - protein, 268 aa, Thermomyces lanuginosus
EVSQDLFNQFNLFAQYSAAAYCGKNNRAPAGTNITCTGNACPEVEKADATFLYSFEDXGXGDVTGFLALDNTNKLIVLSFRGSRSIENWIGNLNFDLKEINDICSGCRGHDGFTSSWRSVADTLRQKVEDAVREHPDYRVVFTGHSLGGALATVAGADLRGNGYDIDVFSYGAPRVGNRAFAEFLTVQTGGTLYRITHTNDIVPRLPPREFGYSHSSPEYWIKSGTLVPVTRNDIVKIEGIDATGGNNQPNIPDIPAHLWYFGLIGTC

SEQ ID NO: 12079 - protein, 268 aa, Thermomyces lanuginosus
EVSQDLFNQFNLFAQYSAAAYCGKNNDAPAGTNITCTGNACPEVEKADATFLYSFEDSGVGDVTGFLALDNTNKLIVLSFRGSRSGENWIGNLNFDLKEINDICSGCRGHDGFTSSWRSVADTLRQKVEDAVREHPDYRVVFTGHSLGGALATVAGADLRGNGYDIDVFSYGAPRVGNRAFAEFLTVQTGGTLYRITHTNDIVPRLPPREFGYSHSSPEYWIKSGTLVPVRRRDIVKIEGIDATGGNNQPNIPDIPAHLWYFGLIGTC

SEQ ID NO: 12080 - protein, 268 aa, Thermomyces lanuginosus
EVSQDLFNQFNLFAQYSAAAYCGKNNDAPAGTNITCTGNACPEVEKADATFLYSFEDSGVGDVTGFLALDNTNKLIVLSFRGSRSIENWIGNLNFDLKEINDICSGCRGHDGFTSSWRSVADTLRQKVEDAVREHPDYRVVFTGHSLGGALATVAGADLRGNGYDIDVFSYGAPRVGNRAFAEFLTVQTGGTLYRITHTNDIVPRLPPREFGYSHSSPEYWIKSGTLVPVRRRDIVKIEGIDATGGNNQPNIPDIKAHLWYFGLIGTC

SEQ ID NO: 12081 - protein, 268 aa, Thermomyces lanuginosus
EVSQDLFNQFNLFAQYSAAAYCKKNNDAPAGTNITCTGNACPEVEKADATFLYSFKDSGVGDVTGFLALDNTNKQIVLSFRGSRSIENWIGNLNFDLKEINDICSGCRGHDGFTSSWRSVADTLRQKVEDAVREHPDYRVVFTGHSLGGALATVAGADLRGNGYDIDVFSYGAPRVGNRAFAEFLTVQTGGTLYRITHTNDIVPRLPPREFGYSHSSPEYWIKSGTLVPVTRNDIVKIEGIDATGGNNQPNIPDIPAHLWYFGRIGTC

SEQ ID NO: 12082 - protein, 268 aa, Thermomyces lanuginosus
EVSQDLFNQFNLFAQYSKAAYCGKNNDAPAGTNITCTGNACPEVEKADATFLYSFEDSGVGDVTGFLALDNTNKQIVLSFRGSRSIENWIGNLNFDLKEINDICSGCRGHDGFTSSWRSVADTLRQKVEDAVREHPDYRVVFTGHSLGGALATVAGADLRGNGYDIDVFSYGAPRVGNRAFAEFLTTQTGGTLYRITHTNDIVPRLPPREFGYSHSSPEYWIKSGTLVPVTRNDIVKIEGIDATGGNNQPNIPDIPAHLWYFGLIGTC

SEQ ID NO: 12083 - protein, 268 aa, Thermomyces lanuginosus
EVSQDLFNQFNLFAQYSKAAYCGKNNDAPAGTNITCTGNACPEVFKADATFLYSFEDSGVGDVTGFLALDNTRKLIVLSFRGSRSIENWIGNLNFDLKEINDICSGCRGHDGFTSSWRSVADTLRQKVEDAVREHPDYRVVFTGHSLGGALATVAGADLRGNGYDIDVFSYGAPRVGNRAFAEFLTVQTGGTLYRITHTNDIVPRLPPREFGYSHSSPEYWIKSGTLVPVTRNDIVKIEGIDATGGNNQPNIPDIPAHLWYFGLIGTC

SEQ ID NO: 12084 - protein, 268 aa, Thermomyces lanuginosus
EVSQDLFNQFNLFAQYSAAAYCGKNNRAPAGTNITCTGNACPEVEKADATFLYSFEDSGVGDVTGFLALDNTNKLIVLSFRGSRSIENWIGNLNFDLKEINDICSGCRGHGGFTSSWRSVADTLRQKVEDAVREHPDYRVVFTGHSLGGALATVAGADLRGNGYDIDVFSYGAPRVGNRAFAEFLTVQTGGTLYRITHTNDIVPRLPPREFGYSHPSPEYWIKSGTLVPVTRNDIVKIEGIDATGGNNQPNIPDIPAHLWYFGLIGTC

SEQ ID NO: 12085 - protein, 268 aa, Synthetic construct
EVSQDLFNQFNLFAQYSAAAYCGKNNDAPAGTNITCTGNACPEVEKADATFLYSFEDSGVGDVTGFLALDNTNKLIVLSFRGSRSIENWIGNLNFDLKEINDICSGCRGHDGFTSSWRSVADTLRQKVEDAVREHPDYRVVFTGHSLGGALATVAGADLRGNGYDIGVFSYGAPRVGNRAFAEFLTVQTGGTLYRITHTNDIVPRLPPRVFGYSHSSPEYWIKSGTLVPVTRNDIVKIEGIDATGGNNRPNIPDIPAHLWYFGLIGTC

SEQ ID NO: 12086 - protein, 268 aa, Thermomyces lanuginosus
EVSQDLFNQFNLFAQYSAAAYCGKNNDAPAGTNITCTGNACPEVEKADATFLYSFEDSGVGDVTGFLALDNTNKLIVLSFRGSRSIENWIGNLNFDLKEINDICSGCRGHDGFTSSWRSVADTLRQKVEDAVREHPDYRVVFTGHSLGGALATVAGADLRGNGYDIDVFSYGAPRVGNRAFAEFLTVQTGGTLYRITHTNDMVPRLPPREFGYSHSSPEYWIKSGTLVPVRRRDIVKIEGIDATGGNNQPNIPDIPAHLWYFGLIGTC

SEQ ID NO: 12087 - protein, 268 aa, Thermomyces lanuginosus
EVSQDLFNQFNLFAQYSAAAYCGKNNDAPAGTNITCTGNACPEVEKADATFLYSFEDSGVGDVTGFLALDNTNKLIVLSFRGSRSIENWIGNLNFDLKEIDDICSGCRGHDGFTSSWRSVADTLRQKVEDAVREHPDYRVVFTGHSLGGALATVAGADLRGNGYDIDVFSYGAPRVGNRAFAEFLTVQTGGTLYRITHTNDIVPRLPPREFGYSHSSPEYWIKSGTLVPVRRRDIVKIEGIDATGGNNQPNIPDIPAHLWYFGLIGTC

SEQ ID NO: 12088 - protein, 268 aa, Thermomyces lanuginosus
EVSQDLFNQFNLFAQYSAAAYCGKNNDAPAGTNITCTGNACPEVEKADATFLYSFEDSGVGDVTGFLALDNTNKLIVLSFRGSRSIENWIGNLNFDLKEINDICSGCRGHDGFTSSWRSVADTLRQKVEDAVREHPDYRVVFTGHSLGGALATVAGADLRGNGYDIDVFSYGAPRVGNRAFAEFLTVQTGGTLYRITVTNDIVPRLPPREFGYSHSSPEYWIKSGTLVPVRRRDIVKIEGIDATGGNNQPNIPDIPAHLWYFGLIGTC

SEQ ID NO: 12089 - protein, 268 aa, Thermomyces lanuginosus
EVSQDLFNQFNLFAQYSKAAYCKKNNDAPAGTNITCTGNACPEVEKADATFLYSFEDSGVGDVTGFLALDNTNKLIVLSFRGSRSIENWIGNLNFDLKEINDICSGCRGHDGFTSSWRSVADTLRQKVEDAVREHPDYRVVFTGHSLGGALATVAWADLRGNGYDIDVFSYGAPRVGNRAFAEFLTVQTGGTLYRITHTNDIVPRLPPREFGYSHSSPEYWIKSGTLVPVTRNDIVKIEGIDATGGNNQPNIPDIPAHLWYFGLIGTC

SEQ ID NO: 12090 - protein, 268 aa, Thermomyces lanuginosus
EVSQDLFNQFNLFAQYSAAAYCQKNNDAPAGTNITCTGNACPEVEKADATFLYSFEDSGVGDVTGFLALDNTNKGIVLSFRGSRSIENWIQNLNFDLKEINDICSGCRGHDGFTSSWRSVADTLRQKVEDAVREHPDYRVVFTGHSLGGALATVAGADLRGNGYDIDVFSYGAPRVGNRAFAEFLTVQTGGTLYRITHTNDIVPRLPPREFGYSHSSPEYWIKSGTLVPVTRNDIVKIEGIDATGGNNQPNQPDIPAHLWYFGRIGTC

SEQ ID NO: 12091 - protein, 268 aa, Thermomyces lanuginosus
EVSQDLFNQFNLFAQYSAAAYCGKNNDAPAGTNITCTGNACPEVEKADATFLYSFEDSGVGDVTGFLALDNTNKLIVLSFRGSRSIENWIGNLNFDLKEINDICSGCRGHDGFTSSWRSVADTLRQKVEDAVREHPDYRVVFTGHSLGGALATVAGADLRGNGYDIDVFSYGAPRVGNRAFAEFLTVQTGGTLYRITHTNDIVPRLPPREFGYSHSSPEYWIKSGTLVPVRRRDIVKIEGIDATGGNNQPNIPDIPYHLWYFGLIGTC

SEQ ID NO: 12092 - protein, 268 aa, Thermomyces lanuginosus
EVSQDLFNQFNLFAQYSAAAYCGKNNDAPAGTNITCTGNACPEVEKADATTLYSFEDSGVGDVTGFLALDNTNKQIVLSFRGSRSIENWIQNLNFDLKEINDICSGCRGHDGFTSSWRSVADTLRQKVEAAVREHPDYRVVFTGHSLGGALATVAGADLRGNGYDIDVFSYGAPRVGNRAFAEFLTVQTGGTLYRITHTNDIVPRLPPREFGYSHSSPEYWIKSGTLVPVTRNDIVKIEGIDATGGNNQPNIPDIPAHLWYFGRIGTC

SEQ ID NO: 12093 - protein, 268 aa, Thermomyces lanuginosus
EVSQDLFNQFNLFAQYSAAAYCGKNNDAPAGTNITCTGNACPEVEKADATFLYSFEDSGVGDVTGFLALDNTNKLIVLSFRGSRSIENWIGNLNFELKEINDICSGCRGHDGFTSSWRSVADTLRQKVEDAVREHPDYRVVFTGHSLGGALATVAGADLRGNGYDIDVFSYGAPRVGNRAFAEFLTVQTGGTLYRITHTNDIVPRLPPREFGYSHSSPEYWIKSGTLVPVRRRDIVKIEGIDATGGNNQPNIPDITAHLWYFGLIGTC

SEQ ID NO: 12094 - protein, 268 aa, Thermomyces lanuginosus
EVSQDLFNQFNLFAQYSAAAYCGKNNDAPAGTNITCTGNACPEVEKADATFLYSFEDSGVGDVTGFLALDNTNKLIVLSFRGSRSIENWIGNLNFDLKEINDICSGCRGHEGFTSSWRSVADTLRQKVEDAVREHPDYRVVFTGHSLGGALATVAGADLRGNGYDIDVFSYGAPRVGNRAFAEFLTVQTGGTLYRITHTNDIVPRLPPREFGYSHSSPEYWIKSGTLVPVRRRDIVKIEGIDATGGNNQPNIPDIPAHLWYFGLIGTC

SEQ ID NO: 12095 - protein, 268 aa, Thermomyces lanuginosus
EVSQDLFNQFNLFAQYSAAAYCGKNNEAPAGTNITCTGNACPEVEKADATFLYSFEDSGVGDVTGFLALDNTNKLIVLSFRGSRSIENWIGNLNFDLKEINDICSGCRGHDGFTSSWRSVADTLRQKVEDAVREHPDYRVVFTGHSLGGALATVAGADLRGNGYDIDVFSYGAPRVGNRAFAEFLTVQTGGTLYRITHTNDIVPRLPPREFGYSHSSPEYWIKSGTMVPVTRQDIVKIEGIDATGGNNQPNIPDIPAHLWYFGRIGTC

SEQ ID NO: 12096 - protein, 268 aa, Thermomyces lanuginosus
EVSQDLFNQFNLFAQYSAAAYCGKNNDAPAGTNITCTGNACPEVEKADATFLYSFEDSGVGDVTGFLALDNTNKLIVLSFRGSRSIENWIGNLNFDLKEINDICSGCRGHDGFTSSWRSVADTLRQKVEDAVREHPDYRVVFTGHSLGGALATVAGADLRGNGYDIDVFSYGAPRVGNRAFAEFLTVQTGGTLYRITHTNDIVPRLPPREFGYSHSSPEFWIKSGTLVPVRRRDIVKIEGIDATGGNNQPNIPDIPAHLWYFGLIGTC

SEQ ID NO: 12097 - protein, 268 aa, Thermomyces lanuginosus
EVSQDLFNQFNLFAQYSAAAYCGANNDAPAGTNITCTGNACPEVEKADATFLYSFEDSGVGDVTGFLALDNTNKQIVLSFRGSRSIENWIGNLNFDLKEINDICSGCRGHDGFTSSWRSVADTLRQKVEDAVREHPDYRVVFTGHSLGGALATVAWADLRGNGYDIDVFSYGAPRVGNRAFAEFLTVQTGGTLYRITHTNDIVPRLPPREFGYSHSSPEYWIKSGTLVPVTRNDIVKIEGIDATGGNNQPNIPDIPAHLWYFGLIGTC

SEQ ID NO: 12098 - protein, 268 aa, Thermomyces lanuginosus
EVSQDLFNQFNLFAQYSAAAYCGKNNDAPAGTNITCTGNACPEVEKADATFLYSFEDSGVGDVTGFLALDNTNKLIVLSFRGSRSIENWIGNLNFDLKEINDICSGCRGHDGFTSSWRSVADTLRQKVEDAVREHPDYRVVFTGHSLGGALATVAGADLRGNGYDIDVFSYGAPRVGNRAFAEFLTVQTGGTLYRITHTNDIVPRLPPREFGYSHSSPEYWIKSGTLVPVRRRDIVKIEGIDATGGNNQPNIPDISAHLWYFGLIGTC

SEQ ID NO: 12099 - protein, 268 aa, Thermomyces lanuginosus
EVSQDLFNQFNLFAQYSAAAYCGKNNDAPAGTNITCTGNACPEVEKAQATFLYSFEDSGVGDVTGFLALDNTNKLIVLSFRGSRSIENWIGNLNFDLKEINDICSGCRGHDGFTSSWRSVADTLRQKVEDAVREHPDYRVVFTGHSLGGALATVAGADLRGNPYDIDVFSYGAPRVGNRAFAEFLTVQTGGTLYRITHTNDIVPRLPPREFGYSHSSPEYWIKSGTLVPVTRQDIVKIEGIDATGGNNQPNIPDIPAHLWYFGRIGTC

SEQ ID NO: 12100 - protein, 268 aa, Thermomyces lanuginosus
EVSQDLFNQFNLFAQYSAAAYCKKNNDAPAGTNITCTGNACPEVEKADATFLYSFKDSGVGDVTGFLALDNTNKLIVLSFRGSRSIENWIGNLNFDLKEINDICSGCRGHDGFTSSWRSVADTLRQKVEDAVREHPDYRVVFTGHSLGGALATVAGADLRGNGYDIDVFSYGAPRVGNRAFAEFLTTQTGGTLYRITHTNDIVPRLPPREFGYSHSSPEYWIKSGTLVPVTRNDIVKIEGIDATGGNNQPNIPDIPAHLWYFGLIGTC

SEQ ID NO: 12101 - protein, 268 aa, Thermomyces lanuginosus
EVSQDLFNQFNLFAQYSAAAYCGKNNDAPAGTNITCTGNACPEVEKADATFLYSFEDSGVGDVTGFLALDNTNKLIVLSFRGSRSIENWIGNLNFDLKEINDICSGCRGHDGFTSSWRSVADTLRQKVEDAVREHPDYRVVFTGHSLGGALATVAGADLRGNGYDIDVFSYGAPRVGNRAFAEFLTVQTGGTLYRITHTNDVVPRLPPREFGYSHSSPEYWIKSGTLVPVRRRDIVKIEGIDATGGNNQPNIPDIPAHLWYFGLIGTC

SEQ ID NO: 12102 - protein, 268 aa, Thermomyces lanuginosus
EVSQDLFNQFNLFAQYSAAAYCGKNNDAPAGTNITCTGNACPEVEKADATFLYSFEDSGVGDVTGFLALDNTNKLIVLSFRGSRSIENWIGNLNFDLKEINDICSGCRGHDGFTSSWRSVADTLRQKVEDAVREHPDYRVVFTGHSLGGALATVAGADLRGNGYDIDVFSYGAPRVGNRAFAEFLTVQTGGTLYRITHTNDIVPRLPPREFGYSHSSPEYWIKSGTLVPVRRRDIVKIEGIDATGGNNQPNIPDIPAHLFYFGLIGTC

SEQ ID NO: 12103 - protein, 268 aa, Thermomyces lanuginosus
EVSQDLFNQFNLFAQYSAAAYCGKNNDAPAGTNITCTGNACPEVEKADATFLYSFEDSGVGDVTGFLALDNTNKLIVLSFRGSRSIENWIGNLNFDLKEINDICSGCRGHDGFTSSWRSVADTLRQKVEDAVREHPDYRVVFTGHSLGGALATVAGADLRGNGYDIDVFSYGAPRVGNRAFAEFLTVQTGGTLYRITHTNDIVPRLPPREFGYSHSSPEYWIKFGTLVPVRRRDIVKIEGIDATGGNNQPNIPDIPAHLWYFGLIGTC

SEQ ID NO: 12104 - protein, 268 aa, Thermomyces lanuginosus
EVSQDLFNQFNLFAQYSAAAYCGKNNDAPAGTNITCTGNACPEVEKADVTFLYSFEDSGVGDVTGFLALDNTNKLIVLSFRGSRSIENWIGNLNFDLKEINDICSGCRGHDGFTSSWRSVADTLRQKVEDAVREHPDYRVVFTGHSLGGALATVAGADLRGNGYDIDVFSYGAPRVGNRAFAEFLTTQDGGTLYRITHTNDIVPRLPPREFGYSHSSPEYWIKSGTLVPVTRNDIVKIEGIDATGGNNQPNIPDIPAHLWYFGLIGTC

SEQ ID NO: 12105 - protein, 268 aa, Thermomyces lanuginosus
EVSQDLFNQFNLFAQYSAAAYCGKNNDAPAGTNITCTGNACPEVEKADATFLYSFEDSGVGDVTGFLALDNTNKLIVLSFRGSRSIENWIGNLNFDLKEINDICSGCRGHDGFTSSWRSVADTLRQKVEDAVREHPDYRVVFTGHSLGGALATVAGADLRGNGYDIDVFSYGAPRVGNRAFAEFLTVQTGGTLYRITHTKDIVPRLPPREFGYSHSSPEYWIKSGTLVPVRRRDIVKIEGIDATGGNNQPNIPDIPAHLWYFGLIGTC

SEQ ID NO: 12106 - protein, 268 aa, Thermomyces lanuginosus
EVSQDLFNQFNLFAQYSAAAYCGKNNDAPAGTNITCTGNACPEVEKADATFLYSFEDSGVGDVTGFLALDNTNKLIVLSFRGSRSIENWIGNLRFDLKEINDICSGCRGHDGFTSSWRSVADTLRQKVEDAVREHPDYRVVFTGHSLGGALATVAGADLRGNGYDIDVFSYGAPRVGNRAFAEFLTVQTGGTLYRITHTNDIVPRLPPXEFGYSHSSPEYWIKSGTLVPVTRNDIVKIEGIDATGGNNRPNIPDIPAHLWYFGLIGTC

SEQ ID NO: 12107 - protein, 268 aa, Thermomyces lanuginosus
EVSQDLFNQFNLFAQYSAAAYCGKNNDAPAGTNITCTGNACPEVEKADATFLYSFEDSGVGDVTGFLALDNTNKLIVLSFRGSRSIENWIGNLNFDLKEINDICSGCRGHDGFTSSWRSVADTLRQKVEDAVREHPDYRVVFTGHSLGGALATVAGADLRGNGYDIDVFSYGAPRVGNRAFAEFLTVQTGGTLYRITHTNDIVPRLPPREFGYSHSSPEYWIKSGTLVPVRRRDIVKIEGIDAEGGNNQPNIPDIPAHLWYFGLIGTC

SEQ ID NO: 12108 - protein, 268 aa, Synthetic construct
EVSQDLFNQFNLFAQYSAAAYCGKNNDAPAGTNITCTGNACPEVERADATFLYSFRDSSVGDVTGFLALDNTNKLIVLSFRGSRSIENWIGNLNFDLKEINDICSGCRGHDGFTSSWRSVADTLRQKVEDAVREHPDYRVVFTGHSLGGALATVAGADLRGNGYDIDVFSYGAPRVGNRAFAEFLTVQTGGTLYRITHTNDIVPRLPPREFGYSHSSPEYWIKSGTLVPVTRNDIVKIEGIDATGGNNQPNIPDIPAHLWYFGLIGTC

SEQ ID NO: 12109 - protein, 268 aa, Thermomyces lanuginosus
EVSQDLFNQFNLFAQYSKAAYCGKNNDAPAGTNITCTGNACPEVEKADATFLYSFEDSGVGDVTGFLALDNTNKLIVLSFRGSRSIENWIGNLNFDLKEINDICSGCRGHDGFTSSWRSVADTLRQKVEDAVREHPDYRVVFTGHSLGGALATIAWADLRGNGYDIDVFSYGAPRVGNRAFAEFLTVQTGGTLYRITHTNDIVPRLPPREFGYSHSSPEYWIKSGTLVPVTRNDIVKIEGIDATGGNNQPNIPDIPAHLWYFGLIGTC

SEQ ID NO: 12110 - protein, 268 aa, Thermomyces lanuginosus
EVSQDLFNQFNLFAQYSAAAYCGKNNDAPAGTNITCTGNACPEVEKADATFLYSFEDSGVGDVTGFLALDNTNKQIILSFRGSRSIENWIGNLNFDLKEINDICSGCRGHDGFTSSWRSVADTLRQKVEDAVREHPDYRVVFTGHSLGGALATVAGADLRGNGYDIDVFSYGAPRVGNRAFAEFLTVQDGGTLYRITHTNDIVPRLPPREFGYSHSSPEYWIKSGTLVPVTRNDIVKIEGIDATGGNNQPNIPDIPAHLWYFGLIGTC

SEQ ID NO: 12111 - protein, 268 aa, Thermomyces lanuginosus
EVSQDLFNQFNLFAQYSAAAYCGKNNDAPAGTNITCTGNACPEVEKADATFLYSFEDSGVGDVTGFLALDNTRKDIVLSFRGSRSIENWIGNLNFDLKEINDICSGCRGHDGFTSSWRSVADTLRQKVEDAVREHPDYRVVFTGHSLGGALATVAGADLRGNGYDIDVFSYGAPRVGNRAFAEFLTVQDGGTLYRITHTNDIVPRLPPREFGYSHSSPEYWIKSGTLVPVTRNDIVKIEGIDATGGNNQPNIPDIPAHLWYFGLIGTC

SEQ ID NO: 12112 - protein, 268 aa, Thermomyces lanuginosus
EVSQDLFNQFNLFAQYSAAAYCGKNNDAPAGTNITCTGNACPEVEKADATFLYSFEDSGVGDVTGFLALDNTNKLIVLSFRGSRSIENWIGNLNFDLKEINDICSGCRGHDGFTSSWRSVADTLRQKVEDAVREHPDYRVVFTGHSLGGALATVAGADLRGNGYDIDVFSYGAPRVGNRAFAEFLTVQTGGTLYRITNTNDIVPRLPPREFGYSHSSPEYWIKSGTLVPVRRRDIVKIEGIDATGGNNQPNIPDIPAHLWYFGLIGTC

SEQ ID NO: 12113 - protein, 268 aa, Thermomyces lanuginosus
EVSQDLFNQFNLFAQYSAAAYCGKNNEAPAGTNITCTGNACPEVEKAQATFLYSFEDSGVGDVTGFLALDNTNKLIVLSFRGSRSIENWIGNLNFDLKEINDICSGCRGHDGFTSSWRSVADTLRQKVEDAVREHPDYRVVFTGHSLGGALATVAGADLRGNPYDIDVFSYGAPRVGNRAFAEFLTVQTGGTLYRITHTNDIVPRLPPREFGYSHSSPEYWIKSGTLVPVTRNDIVKIEGIDATGGNNQPNIPDIPAHLWYFGRIGTC

SEQ ID NO: 12114 - protein, 268 aa, Thermomyces lanuginosus
EVSQDLFNQFNLFAQYSAAAYCGKNNDAPAGTNITCTGNACPEVEKADATFLYSFEDMGVGDVTGFLALDNTNKQIVLSFRGSRSIENWIGNLNFDLKEINDICSGCRGHDGFTSSWRSVADTLRQKVEDAVREHPDYRVVFTGHSLGGALATVAGADLRGNGYDIDVFSYGAPRVGNRAFAEFLTVQTGGTLYRITHTNDIVPRLPPREFGYSHSSPEYWIKSGTLVPVTRNDIVKIEGIDATGGNNQPNQPDIPAHLWYFGRIGTC

SEQ ID NO: 12115 - protein, 268 aa, Thermomyces lanuginosus
EVSQDLFNQFNLFAQYSKAAYCGKNNDAPAGTNITCTGNACPEVEKADVTFLYSFEDSGVGDVTGFLALDNTNKLIVLSFRGSRSIENWIGNLNFDLKEINDICSGCRGHDGFTSSWRSVADTLRQKVEDAVREHPDYRVVFTGHSLGGALATVAGADLRGNGYDIDVFSYGAPRVGNRAFAEFLTTQTGGTLYRITHTNDIVPRLPPREFGYSHSSPEYWIKSGTLVPVTRNDIVKIEGIDATGGNNQPNIPDIPAHLWYFGLIGTC

SEQ ID NO: 12116 - protein, 268 aa, Thermomyces lanuginosus
EVSQDLFNQFNLFAQYSAAAYCGKNNDAPAGTNITCTGNACPEVEKADATFLYSFRDSGVGDVTGFLALDNTNKLIVLSFRGSRSIENWIGNLNFDLKEINDICSGCRGHDGFTSSWRSVADTLRQKVEDAVREHPDYRVVFTGHSLGGALATVAGADLRGNGYDIDVFSYGAPRVGNRAFAEFLTVQTGGTLYRITHTNDIVPRLPPREFGYSHSSPEYWIKSGTLVPVRRRDIVKIEGIDATGGNNQPNIPDIPAHLWYFGLIGTC

SEQ ID NO: 12117 - protein, 268 aa, Thermomyces lanuginosus
EVSQDLFNQFNLFAQYSAAAYCGKNNDAPAGTQITCTGNACPEVEKADATFLYSFEDSGVGDVTGFLALDNTNKLIVLSFRGSRSIENWIGNLNFSLKEINDICSGCRGHDGFTSSWRSVADTLRQKVEDAVREHPDYRVVFTGHSLGGALATVAGADLRGNGYDIDVFSYGAPRVGNRAFAEFLTVQTGGTLYRITHTNDIVPRLPPREFGYSHSSPEYWIKSGTLVPVRRRDIVKIEGIDATGGNNQPNIPDIPAHLWYFGLIGTC

SEQ ID NO: 12118 - protein, 268 aa, Thermomyces lanuginosus
EVSQDLFNQFNLFAQYSAAAYCKKNNDAPAGTNITCTGNACPEVEKADATFLYSFEDSGVGDVTGFLALDNTNKLIVLSFRGSRSIENWIGNLNFDLKEINDICSGCRGHDGFTSSWRSVADTLRQKVEAAVREHPDYRVVFTGHSLGGALATVAGADLRGNGYDIDVFSYGAPRVGNRAFAEFLTTQTGGTLYRITHTNDIVPRLPPREFGYSHSSPEYWIKSGTLVPVTRNDIVKIEGIDATGGNNQPNIPDIPAHLWYFGLIGTC

SEQ ID NO: 12119 - protein, 268 aa, Thermomyces lanuginosus
EVSQDLFNQFNLFAQYSAAAYCGKNNDAPAGTNITCTGNACPEVEKADATFLYSFEDSGVGDVTGFLALDNTNKLIVLSFRGXRSXENWXGNLNFDLKEINDICSGCRGHDGFTSSWRSVADTLRQKVEDAVREHPDYRVVFTGHSLGGALATVAGADLRGNGYDIDVFSYGAPRVGNRAFAEFLTVQTGGTLYRITHTNDIVPRLPPREFGYSHSSPEYWIKSGTLVPVTRNDIVKIEGIDATGGNNQPNIPDIPAHLWYFGLIGTC

SEQ ID NO: 12120 - protein, 268 aa, Synthetic construct
EPSQDLFNQFNLFAQYSAAAYCGKNNDAPAGTNITCTGNACPEVEKADATFLYSFEDSGVGDVTGFLALDNTNKLIVLSFRGSRSIENWIGNLKFLLKEINDICSGCRGHDGFTSSWRSVADTLRQKVEDAVREHPDYRVVFTGHSLGGALATVAGADLRGNGYDIDVFSYGAPRVGNRAFAEFLTVQTGGTLYRITHTNDIVPRLPPREFGYSHSSPEYWIKSGTLVPVTRNDIVKIEGIDATGGNNRPNIPDIPAHLWYFGLIGTC

SEQ ID NO: 12121 - protein, 268 aa, Thermomyces lanuginosus
EVSQDLFNQFNLFAQYSAAAYCGKNNDAPAGTNITCTGNACPEVEKADVTFLYSFEDSGVGDVTGFLALDNTNKQIVLSFRGSRSIENWIGNLNFDLKEINDICSGCRGHDGFTSSWRSVADTLRQKVEDAVREHPDYRVVFTGHSLGGALATVAGADLRGNGYDIDVFSYGAPRVGNRAFAEFLTVQDGGTLYRITHTNDIVPRLPPREFGYSHSSPEYWIKSGTLVPVTRNDIVKIEGIDATGGNNQPNIPDIPAHLWYFGLIGTC

SEQ ID NO: 12122 - protein, 268 aa, Thermomyces lanuginosus
EVSQDLFNQFNLFAQYSAAAYCGKNNDAPAGTNITCTGNACPEVEKADATFLYSFEDSGVGDVTGFLALDNTNKLIVLSFRGSRSIENWIGNLNFELKEINDICSGCRGHDGFTSSWRSVADTLRQKVEDAVREHPDYRVVFTGHSLGGALATVAGADLRGNGYDIDVFSYGAPRVGNRAFAEFLTVQTGGTLYRITHTNDIVPRLPPREFGYSHSSPEYWIKSGTLVPVRRRDIVKIEGIDATGGNNQPNIPSIPAHLWYFGLIGTC

SEQ ID NO: 12123 - protein, 268 aa, Thermomyces lanuginosus
EVSDDLFNQFNLFAQYSAAAYCGKNNDAPAGTNITCTGNACPEVEKADATFLYSFEDSGVGDVTGFLALDNTNKLIVLSFRGSRSIENWIGNLNFDLKEINDICSGCRGHDGFTSSWRSVADTLRQKVEDAVREHPDYRVVFTGHSLGGALATVAGADLRGNGYDIDVFSYGAPRVGNRAFAEFLTVQTGGTLYRITHTNDIVPRLPPREFGYSHSSPEYWIKSGTLVPVTRQDIVKIEGIDATGGNNQPNIPDITAHLWYFGLIGTC

SEQ ID NO: 12124 - protein, 268 aa, Thermomyces lanuginosus
EVSQDLFNQFNLFAQYSAAAYCSKNNDAPAGTNITCTGNACPEVEKADATFLYSFEDSGVGDVTGFLALDNTNKLIVLSFRGSRSIENWIGNLNFDLKEINDICSGCRGHDGFTSSWRSVADTLRQKVEDAVREHPDYRVVFTGHSLGGALATVAGADLRGNGYDIDVFSYGAPRVGNRAFAEFLTVQTGGTLYRITHTNDIVPRLPPREFGYSHSSPEYWIKSGTLVPVRRRDIVKIEGIDATGGNNQPNIPDIPAHLWYFGLIGTC

SEQ ID NO: 12125 - protein, 268 aa, Thermomyces lanuginosus
EVSQDLFNQFNLFAQYSAAAYCGKNNEAPAGTNITCTGNACPEVEKADATFLYSFEDMGVGDVTGFLALDNTNKLIVLSFRGSRSIENWIGNLNFDLKEINDICSGCRGHDGFTSSWRSVADTLRQKVEDAVREHPDYRVVFTGHSLGGALATVAGADLRGNPYDIDVFSYGAPRVGNRAFAEFLTVQTGGTLYRITHTNDIVPRLPPREFGYSHSSPEYWIKSGTLVPVTRNDIVKIEGIDATGGNNQPNIPDIPAHLWYFGLIGTC

SEQ ID NO: 12126 - protein, 268 aa, Thermomyces lanuginosus
EVSQDLFNQFNLFAQYSAAAYCGKNNNAPAGTNITCTGNACPEVEKADATFLYSFEDSGVGDVTGFLALDNTNKLIVLSFRGSRSIENWIGNLNFDLKEINDICSGCRGHDGFTSSWRSVADTLRQKVEDAVREHPDYRVVFTGHSLGGALATVAGADLRGNGYDIDVFSYGAPRVGNRAFAEFLTVQTGGTLYRITHTNDIVPRLPPREFGYSHSSPEYWIKSGTLVPVTRQDIVKIEGIDATGGNNQPNIPDITAHLWYFGLIGTC

SEQ ID NO: 12127 - protein, 268 aa, Thermomyces lanuginosus
EVSQDLFNQFNLFAQYSAAAYCGKNNDAPAGTNITCTGNICPEVEKADATFLYSFEDSGVGDVTGFLALDNTNKLIVLSFRGSRSIENWIGNLNFDLKEINDICSGCRGHDGFTSSWRSVADTLRQKVEDAVREHPDYRVVFTGHSLGGALATVAGADLRGNGYDIDVFSYGAPRVGNRAFAEFLTVQTGGTLYRITHTNDIVPRLPPREFGYSHSSPEYWIKSGTLVPVRRRDIVKIEGIDATGGNNQPNIPDIPAHLWYFGLIGTC

SEQ ID NO: 12128 - protein, 268 aa, Thermomyces lanuginosus
EVSQDLFNQFNLFAQYSKAAYCGKNNDAPAGTNITCTGNACPEVFKADATFLYSFEDSGVGDVTGFLALDNTNKLIVLSFRGSRSIENWIGNLNFDLKEINDICSGCRGHDGFTSSWRSVADTLRQKVEDAVREHPDYRVVFTGHSLGGALATVAGADLRGNGYDIDVFSYGAPRVGNRAFAEFLTTQTGGTLYRITHTNDIVPRLPPREFGYSHSSPEYWIKSGTLVPVTRNDIVKIEGIDATGGNNQPNIPDIPAHLWYFGLIGTC

SEQ ID NO: 12129 - protein, 268 aa, Thermomyces lanuginosus
EVSQDLFNQFNLFAQYSAAAYCGKNNDAPAGTNITCTGNACPEVEKADATFLYSFEDSGVGDVTGFLALDNTNKLIVLSFRGSRSIENWIGNLNFDLKEINDICSGCRGHDGFTSSWRSVADTLRQKVEDAVREHPDYRVVFTGHSLGGALATVAGADLRGNGYDIDVFSYGAPRVGNRAFAEFLTVQTGGTLYRITHTNDIVPRLPPPEFGYSHSSPEYWIKSGTLVPVRRRDIVKIEGIDATGGNNQPNIPDIPAHLWYFGLIGTC

SEQ ID NO: 12130 - protein, 268 aa, Thermomyces lanuginosus
EVSQDLFNQFNLFAQYSAAAYCGKNNDAPAGTNITCTGNACPEVEKADATFLYSFEDSGEGDVTGFLALDNTNKLIVLSFRGSRSIENWIGNLNFDLKEINDICSGCRGHDGFTSSWRSVADTLRQKVEDAVREHPDYRVVFTGHSLGGALATVAGADLRGNGYDIDVFSYGAPRVGNRAFAEFLTVQTGGTLYRITHTNDIVPRLPPREFGYSHSSPEYWIKSGTLVPVRRRDIVKIEGIDATGGNNQPNIPDIPAHLWYFGLIGTC

SEQ ID NO: 12131 - protein, 268 aa, Thermomyces lanuginosus
EVSQDLFNQFNLFAQYSAAAYCGKNNSAPAGTNITCTGNACPEVEKADATFLYSFEDSGVGDVTGFLALDNTNKLIVLSFRGSRSIENWIGNLNFDLKEINDICSGCRGHDGFTSSWRSVADTLRQKVEDAVREHPDYRVVFTGHSLGGALATVAGADLRGNGYDIDVFSYGAPRVGNRAFAEFLTVQTGGTLYRITHTNDIVPRLPPREFGYSHSSPEYWIKSGTLVPVTRQDIVKIEGIDATGGNNQPNIPDITAHLWYFGLIGTC

SEQ ID NO: 12132 - protein, 268 aa, Thermomyces lanuginosus
EVSQDLFNQFNLFAQYSAAAYCGKNNDAPAGTNITCTGNACPEVEKADATFLYSFEDSGVGDVTGFLALDNTNKLIVLSFRGSRSIENWIGNLNFDLKEINDICSGCRGHDGFTSSWFSVADTLRQKVEDAVREHPDYRVVFTGHSLGGALATVAGADLRGNGYDIDVFSYGAPRVGNRAFAEFLTVQTGGTLYRITHTNDIVPRLPPREFGYSHSSPEYWIKSGTLVPVRRRDIVKIEGIDATGGNNQPNIPDIPAHLWYFGLIGTC

SEQ ID NO: 12133 - protein, 268 aa, Thermomyces lanuginosus
EVSQDLFNQFNLFAQYSAAAYCGKNNDAPAGTNITCTGNACPEVEKADATFLYSFEDSGVGDVTGFLALDNTNKQIVLSFRGSRSIENWIGNLNFDLKEINDICSGCRGHDGFTSSWRSVADTLRQKVEDAVREHPDYRVVFTGHSLGGALATVAWADLRGNGYDIDVFSYGAPRVGNRAFAEFLTTQTGGTLYRITHTNDIVPRLPPREFGYSHSSPEYWIKSGTLVPVTRNDIVKIEGIDATGGNNQPNIPDIPAHLWYFGLIGTC

SEQ ID NO: 12134 - protein, 268 aa, Thermomyces lanuginosus
EVSQDLFNQFNLFAQYSAAAYCGKNNDAPAGTNITCTGNACPEVEKADATFLYSFEDSGVGDVTGFLALDNTNKLIVLSFRGSRSIENWIGNLNFDLKEINDICSGCRGHAGFTSSWRSVADTLRQKVEDAVREHPDYRVVFTGHSLGGALATVAGADLRGNGYDIDVFSYGAPRVGNRAFAEFLTVQTGGTLYRITHTNDIVPRLPPREFGYSHSSPEYWIKSGTLVPVRRRDIVKIEGIDATGGNNQPNIPDIPAHLWYFGLIGTC

SEQ ID NO: 12135 - protein, 268 aa, Thermomyces lanuginosus
EVSQDLFNQFNLFAQYSAAAYCGKNNDAPAGTNITCTGNACPEVEKADATTLYSFEDSGVGDVTGFLALDNTNKLIVLSFRGSRSIENWIGNLNFDLKEINDICSGCRGHDGFTSSWRSVADTLRQKVEAAVREHPDYRVVFTGHSLGGALATVAGADLRGNGYDIDVFSYGAPRVGNRAFAEFLTVQTGGTLYRITHTNDIVPRLPPREFGYSHSSPEYWIKSGTLVPVTRNDIVKIEGIDATGGNNQPNQPDIPAHLWYFGRIGTC

SEQ ID NO: 12136 - protein, 268 aa, Thermomyces lanuginosus
EVSQDLFNQFNLFAQYSAAAYCGKNNDAPAGTNITCTGNACPEVEKADATFLYSFEDSGVGDVTGFLALDNTNKLIVLSFRGSRSIENWIGNLNFDLKEINDICSGCRGHDGFTSSWRSVADTLRQKVEDAVREHPDYRVVFTGHSLGGALATVAGADLRGNGYDIDVFSYGAPRVGNRAFAEFLTVQTGGTLYRITHTNDIVPRLPPREFGYSHSSPEYWIKSGTLVPVRRRDIVKIEGIDATGGNNQPNIPDIQAHLWYFGLIGTC

SEQ ID NO: 12137 - protein, 268 aa, Thermomyces lanuginosus
EVSQDLFNQFNLFAQYSAAAYCGKNNDAPAGTNITCTGNACPEVEKADATFLYSFEDSGVGDVTGFLALDNTNKLIVLSFRGSRSIENWIGNLNFDLKEINDICSGCRGHDGFTSSWRSVADTLRQKVEDAVREHPDYRVVFTGHSLGGALATVAGADLRGNGYDIDVFSYGAPRVGNRAFAEFLTVQTGGTLYRITHTNDIVPRLPPREFGYSHSSPEYWIKSGTLVPVRRNDIVKIRGIDATGGNNRPNIPDIPAHLWYFGLIGTC

SEQ ID NO: 12138 - protein, 268 aa, Thermomyces lanuginosus
EVSQDLFNQFNLFAQYSAAAYCGKNNDAPAGTNITCTGNACPEVEKADATFLYSFEDSGVGDVTGFLALDNTNKQIVLSFRGSRSIENWIGNLNFDLKEINDICSGCRGHDGFTSSWRSVADTLRQKVEAAVREHPDYRVVFTGHSLGGALATVAGADLRGNGYDIDVFSYGAPRVGNRAFAEFLTTQTGGTLYRITHTNDIVPRLPPREFGYSHSSPEYWIKSGTLVPVTRNDIVKIEGIDATGGNNQPNIPDIPAHLWYFGLIGTC

SEQ ID NO: 12139 - protein, 268 aa, Thermomyces lanuginosus
EVSQDLFNQFNLFAQYSAAAYCGKNNDAPAGTQITCTGNACPEVEKADATFLYSFEDSGVGDVTGFLALDNTNKLIVLSFRGSRSIENWIGNLNFELKEINDICSGCRGHDGFTSSWRSVADTLRQKVEDAVREHPDYRVVFTGHSLGGALATVAGADLRGNGYDIDVFSYGAPRVGNRAFAEFLTVQTGGTLYRITHTNDIVPRLPPREFGYSHSSPEYWIKSGTLVPVRRRDIVKIEGIDATGGNNQPNIPDIPAHLWYFGLIGTC

SEQ ID NO: 12140 - protein, 268 aa, Thermomyces lanuginosus
EVSQDLFNQFNLFAQYSAAAYCGKNNDAPAGTNITCTGNACPEVEKADATFLYSFEDSGVGDVTGFLALDNTNKRIVLSFRGSRSIENWIGNLNFDLKEINDICSGCRGHDGFTSSWRSVADTLRQKVEAAVREHPDYRVVFTGHSLGGALATVAGADLRGNGYDIDVFSYGAPRVGNRAFAEFLTTQTGGTLYRITHTNDIVPRLPPREFGYSHSSPEYWIKSGTLVPVTRNDIVKIEGIDATGGNNQPNIPDIPAHLWYFGRIGTC

SEQ ID NO: 12141 - protein, 268 aa, Thermomyces lanuginosus
EVSQDLFNQFNLFAQYSAAAYCGKNNDAPAGTNITCTGNACPEVEKADATFLYSFEDSGVGDVTGFLALDNTNKLIVLSFRGSRSIENWIGNLNFDLKEINDICSGCRGHDGFTSSWRSVADTLRQKVEDAVREHPDYRVVFTGHSLGGALATVAGADLRGNGYDIDVFSYGAPRVGNRAFAEFLTVQTGGTLYRITHTNDIVPRLPPREFGYSHSSPEYWIKSGTLVPVRRRDIVKIEGIDATGGNNQPNIPDAPAHLWYFGLIGTC

SEQ ID NO: 12142 - protein, 268 aa, Thermomyces lanuginosus
EVSQDLFNQFNLFAQYSAAAYCGKNNDAPAGTNITCTGNACPEVEKADATALYSFEDSGVGDVTGFLALDNTNKLIVLSFRGSRSIENWIGNLNFDLKEINDICSGCRGHDGFTSSWRSVADTLRQKVEDAVREHPDYRVVFTGHSLGGALATVAGADLRGNGYDIDVFSYGAPRVGNRAFAEFLTVQTGGTLYRITHTNDIVPRLPPREFGYSHSSPEYWIKSGTLVPVRRRDIVKIEGIDATGGNNQPNIPDIPAHLWYFGLIGTC

SEQ ID NO: 12143 - protein, 268 aa, Thermomyces lanuginosus
EVSQDLFNQFNLFAQYSAAAYCGKNNDAPAGTNITCTGNACPEVEKADATFLYSFEDSGVGDVTGFLALDNTNKQIVLSFRGSRSIENWIGNLNFDLKEINDICSGCRGHDGFTSSWRSVADTLRQKVEDAVREHPDYRVVFTGHSLGGALATIAGADLRGNGYDIDVFSYGAPRVGNRAFAEFLTTQTGGTLYRITHTNDIVPRLPPREFGYSHSSPEYWIKSGTLVPVTRNDIVKIEGIDATGGNNQPNIPDIPAHLWYFGLIGTC

SEQ ID NO: 12144 - protein, 268 aa, Thermomyces lanuginosus
EVSQDLFNQFNLFAQYSAAAYCGKNNDAPAGTQITCTGNACPEVEKADATFLYSFEDSGVGDVTGFLALDNTNKLIVLSFRGSRSIENWIGNLNFYLKEINDICSGCRGHDGFTSSWRSVADTLRQKVEDAVREHPDYRVVFTGHSLGGALATVAGADLRGNGYDIDVFSYGAPRVGNRAFAEFLTVQTGGTLYRITHTNDIVPRLPPREFGYSHSSPEYWIKSGTLVPVRRRDIVKIEGIDATGGNNQPNIPDIPAHLWYFGLIGTC

SEQ ID NO: 12145 - protein, 268 aa, Thermomyces lanuginosus
EVSQDLFNQFNLFAQYSAAAYCGKNNDAPAGTQITCTGNACPEVEKADATFLYSFEDSGVGDVTGFLALDNTNKLIVLSFRGSRSIENWIVNLNFDLKEINDICSGCRGHDGFTSSWRSVADTLRQKVEDAVREHPDYRVVFTGHSLGGALATVAGADLRGNGYDIDVFSYGAPRVGNRAFAEFLTVQTGGTLYRITHTNDIVPRLPPREFGYSHSSPEYWIKSGTLVPVRRRDIVKIEGIDATGGNNQPNIPDIPAHLWYFGLIGTC

SEQ ID NO: 12146 - protein, 268 aa, Thermomyces lanuginosus
EVSQDLFNQFNLFAQYSAAAYCGKNNDAPAGTNITCTGNACPEVEKADATFLYSFEDSGVGDVTGFLALDNTNKLIVLSFRGSRSIENWIGNLNFDLKEINDICSGCRGHDGFTSSWRSVADTLRQKVEDAVREHPDYRVVFTGHSLGGALATVAGADLRGNGYDIDVFSYGAPRVGNRAFAEFLTVQTGGTLYRITHTNDIVPRLPPREFGYSHSSPEYWIKSGTLVPVRRRDIVKIEGIDATGGNNQPNIPDINAHLWYFGLIGTC

SEQ ID NO: 12147 - protein, 268 aa, Thermomyces lanuginosus
EVSQDLFNQFNLFAQYSAAAYCGKNNRAPAGTNITCTGNACPEVEKADATFLYSFEDSGVGDVTGFLALDNTNKLIVLSFRGSRSIENWIGNLNFDLKEINDICSGCRGHDGFTSSWRSVADTLRQKVEDAVREHPDYRVVFTGHSLGGALATVAGADLRGNGYDIDVFSYGAPRVGNRAFAEFLTVQTGGTLYRITHTNDIVPRLPPREFGYSHSSPEYWIKSGTLVPVRRRDIVKIEGIDATGGNNQPNIPDIPAHLWYFGLIGTC

SEQ ID NO: 12148 - protein, 268 aa, Thermomyces lanuginosus
EVSQDLFNQFNLFAQYSAAAYCGKNNDAPAGTNITCTGNACPEVEKADATFLYSFEDSGVGDVTGFLALDNTNKLIVLSFRGSRSIENWIGNLNFDLKEINDICSGCRGHDGFTSSWRSVADTLRQKVEDAVREHPDYRVVFTGHSLGGALATVAGADLRGNGYDIDVFSYGAPRVGNRAFAEFLTVQTGGTLYRITHTNDIVPRLPPREFGYSHSSPEYWIKSGTLVPVRRRDIVKIEGIDATGGNNQPNIPDSPAHLWYFGLIGTC

SEQ ID NO: 12149 - protein, 268 aa, Thermomyces lanuginosus
EVSQDLKNQFNLFAQYSAAAYCGKNNDAPAGTNITCTGNACPEVEKADATFLYSFEDSGVGDVTGFLALDNTNKLIVLSFRGSRSIENWIGNLNFDLKEINDICSGCRGHDGFTSSWRSVADTLRQKVEDAVREHPDYRVVFTGHSLGGALATVAGADLRGNGYDIDVFSYGAPRVGNRAFAEFLTVQTGGTLYRITHTNDIVPRLPPREFGYSHSSPEYWIKSGTLVPVRRRDIVKIEGIDATGGNNQPNIPDIPAHLWYFGLIGTC

SEQ ID NO: 12150 - protein, 268 aa, Thermomyces lanuginosus
EVSQDLFNQFNLFAQYSAAAYCGKNNDAPAGTNITCTGNACPEVEKADATFLYSFEDMGVGDVTGFLALDNTNKQIVLSFRGSRSIENWIQNLNFDLKEINDICSGCRGHDGFTSSWRSVADTLRQKVEDAVREHPDYRVVFTGHSLGGALATVAGADLRGNGYDIDVFSYGAPRVGNRAFAEFLTVQTGGTLYRITHTNDIVPRLPPREFGYSHSSPEYWIKSGTLVPVTRNDIVKIEGIDATGGNNQPNQPDIPAHLWYFGLIGTC

SEQ ID NO: 12151 - protein, 268 aa, Thermomyces lanuginosus
EVSQDLFNQFNLFAQYSAAAYCGKNNDAPAGTNITCTGNACPEVEKADATILYSFEDSGVGDVTGFLALDNTNKLIVLSFRGSRSIENWIGNLNFDLKEINDICSGCRGHDGFTSSWRSVADTLRQKVEDAVREHPDYRVVFTGHSLGGALATVAGADLRGNGYDIDVFSYGAPRVGNRAFAEFLTVQTGGTLYRITHTNDIVPRLPPREFGYSHSSPEYWIKSGTLVPVRRRDIVKIEGIDATGGNNQPNIPDIPAHLWYFGLIGTC

SEQ ID NO: 12152 - protein, 268 aa, Thermomyces lanuginosus
EVSQDLFNQFNLFAQYSAAAYCGKNNDAPAGTNITCTGNACPEVEKADATFLYSFEDSGVGDVTGFLALDNTNKLIVLSFRGSRSIENWIGNLNFDLIEINDICSGCRGHDGFTSSWRSVADTLRQKVEDAVREHPDYRVVFTGHSLGGALATVAGADLRGNGYDIDVFSYGAPRVGNRAFAEFLTVQTGGTLYRITHTNDIVPRLPPREFGYSHSSPEYWIKSGTLVPVRRRDIVKIEGIDATGGNNQPNIPDIPAHLWYFGLIGTC

SEQ ID NO: 12153 - protein, 268 aa, Thermomyces lanuginosus
EVSQDLFNQFNLFAQYSAAAYCGKNNDAPAGTNITCTGNACPEVEKADATFLYSFEDSGVGDVTGFLALDNTNKLIVLSFRGSRSIENWIGNLNFDLKEINDICSGCRGHDGFTSSWRSVADTLRQKVEDAVREHPDYRVVFTGHSLGGALATVAGADLRGNGYDIDVFSYGAPRVGNRAFAEFLTVQTGGTLYRITHTNDIVPRLPPREFGYSHSSPEYWIKSGTLVPVRRRDIVKIEGIDATGGNNQPNIPSIPAHLWYFGLIGTC

SEQ ID NO: 12154 - protein, 268 aa, Thermomyces lanuginosus
EVSQDLFNQFNLFAQYSKAAYCKKNNDAPAGTNITCTGNACPEVEKADATFLYSFEDSGVGDVTGFLALDNTNKQIVLSFRGSRSIENWIGNLNFDLKEINDICSGCRGHDGFTSSWRSVADTLRQKVEDAVREHPDYRVVFTGHSLGGALATVAGADLRGNGYDIDVFSYGAPRVGNRAFAEFLTVQTGGTLYRITHTNDIVPRLPPREFGYSHSSPEYWIKSGTLVPVTRNDIVKIEGIDATGGNNQPNIPDIPAHLWYFGLIGTC

SEQ ID NO: 12155 - protein, 268 aa, Thermomyces lanuginosus
EVSQDLFNQFNLFAQYSAAAYCGKNNDAPAGTNITCTGNACPEVEKADATFLYSFEDSGVGDVTGFLALDNTNKLIVLSFRGSRSIENWIGNLNFDLKEINDICSGCRGHDGFTSSWRSVADTLRQKVEDAVREHPDYRVVFTGHSLGGALATVAGADLRGNGYDIDVFSYGAPRVGNRAFAEFLTVQTGGTLYRITHTNDIVPRLPPREFGYSHSSPEYWIKSGTLVRVRRRDIVKIEGIDATGGNNQPNIPDIPAHLWYFGLIGTC

SEQ ID NO: 12156 - protein, 268 aa, Thermomyces lanuginosus
EVSQDLFNQFNLFAQYSAAAYCGKNNDAPAGTNITCTGNACPEVEKADATFLYSFEDSGVGDVTGFLALDNTNKLIVLSFRGSRSIENWIGNLNFLLKEINDICSGCRGHDGFTSSWRSVADTLRQKVEDAVREHPDYRVVFTGHSLGGALATVAGADLRGNGYDIDVFSYGAPRVGNRAFAEFLTVQTGGTLYRITHTNDIVPRLPPREFGYSHSSPEYWIKSGTLVPVRRRDIVKIEGIDATGGNNRPNIPDIPAHLWYFGLIGTC

SEQ ID NO: 12157 - protein, 268 aa, Thermomyces lanuginosus
EVSQDLFNQFNLFAQYSKAAYCGKNNDAPAGTNITCTGNACPEVEKADATFLYSFEDSGVGDVTGFLALDNTNKQIVLSFRGSRSIENWIGNLNFDLKEINDICSGCRGHDGFTSSWRSVADTLRQKVEDAVREHPDYRVVFTGHSLGGALATVAWADLRGNGYDIDVFSYGAPRVGNRAFAEFLTVQTGGTLYRITHTNDIVPRLPPREFGYSHSSPEYWIKSGTLVPVTRNDIVKIEGIDATGGNNQPNIPDIPAHLWYFGLIGTC

SEQ ID NO: 12158 - protein, 268 aa, Thermomyces lanuginosus
EVSQDLFNQFNLFAQYSAAAYCGKNNDAPAGTNITCTGNACPEVEKADATFLYSFEDSGVGDVTGFLALDNTNKLIVLSFRGSRSIENWIGNLNFDLKEINDICSGCRGHDGFTSSWRSVADTLRQKVEDAVREHPDYRVVFTGHSLGGALATVAGADLRGNGYDIDVFSYGAPRVGNRAFAEFLTVQTGGTLYRITHTNDIVPRLPPREFGYSHSSPEYWIKSGTLVPVRRRDIVKIEGIDATGGNNQPNIPDIPVHLWYFGLIGTC

SEQ ID NO: 12159 - protein, 268 aa, Thermomyces lanuginosus
EVSQDLFNQFNLFAQYSAAAYCGKNNDAPAGTNITCTGNACPEVEKADATFLYSFEDSGVGDVTGFLALDNTNKQIVLSFRGSRSIENWIGNLNFDLKEINDICSGCRGHDGFTSSWRSVADTLRQKVEDAVREHPDYRVVFTGHSLGGALATVAWADLRGNGYDIDVFSYGAPRVGNRAFAEFLTTQTGGTLYRITHTNDIVPRLPPREFGYSHSSPEYWIKSGTLVPVTRNDIVKIEGIDATGGNNQPNIPDIPAHLWYFGRIGTC

SEQ ID NO: 12160 - protein, 268 aa, Synthetic construct
EVSQDLFNQFNLFAQYSAAAYCGKNNDAPAGTNITCTGNACPEVEKADATFLYSFEGSGVGDVTGFLALDNTNKLIVLSFRGSRSIENWIGNLKFLLKEINDICSGCRGHDGFTSSWRSVADTLRQKVEDAVREHPDYRVVFTGHSLGGALATVAGADLRGNGYDIDVFSYGAPRVGNRAFAEFLTVQTGGTLYRITHTNDIVPRLPPREFGYSHSSPEYWIKSGTLVPVTRNDIVKIEGIDATGGNNRPNIPDIPAHLWYFGLIGTC

SEQ ID NO: 12161 - protein, 268 aa, Thermomyces lanuginosus
EVSQDLHNQFNLFAQYSAAAYCGKNNDAPAGTNITCTGNACPEVEKADATFLYSFEDSGVGDVTGFLALDNTNKLIVLSFRGSRSIENWIGNLNFDLKEINDICSGCRGHDGFTSSWRSVADTLRQKVEDAVREHPDYRVVFTGHSLGGALATVAGADLRGNGYDIDVFSYGAPRVGNRAFAEFLTVQTGGTLYRITHTNDIVPRLPPREFGYSHSSPEYWIKSGTLVPVRRRDIVKIEGIDATGGNNQPNIPDIPAHLWYFGLIGTC

SEQ ID NO: 12162 - protein, 268 aa, Thermomyces lanuginosus
EVSQDLFNQFNLFAQYSAAAYCGKNNDAPAGTNITCTGNACPEVEKADATFLYSFEDSGVGDVTGFLALDNTNKLIILSFRGSRSIENWIGNLNFDLKEINDICSGCRGHDGFTSSWRSVADTLRQKVEAAVREHPDYRVVFTGHSLGGALATIAGADLRGNGYDIDVFSYGAPRVGNRAFAEFLTVQTGGTLYRITHTNDIVPRLPPREFGYSHSSPEYWIKSGTLVPVTRNDIVKIEGIDATGGNNQPNIPDIPAHLWYFGLIGTC

SEQ ID NO: 12163 - protein, 268 aa, Thermomyces lanuginosus
EVSQDLFNQFNLFAQYSAAAYCGKNNDAPAGTNITCTGNACPEVEKADATFLYSFEDSGVGDVTGFLALDNTNKLIVLSFRGSRSIENWIGNLNFDLKEINDICSGCRGHDGFTSSWRSVADTLRQKVEDAVREHPDYRVVFTGHSLGGALATVAGADLRGNGYDIDVFSYGAPRVGNRAFAEFLTVQTGGTLYRITHTNDIVPRLPPREFGYSHSSPEYWIKSGTEVPVRRRDIVKIEGIDATGGNNQPNIPDIPAHLWYFGLIGTC

SEQ ID NO: 12164 - protein, 268 aa, Thermomyces lanuginosus
EVSQDLFNQFNLFAQYSAAAYCGKNNDAEAGTDITCTGNACPEVEKADATFLYSFEDSGVGDVTGFLALDNTNKDIVLSFRGSRSIENWIGNLNFDLKEINDICSGCRGHDGFTSSWRSVADTLRQKVEDAVREHPDYRVVFTGHSLGGALATVAGADLRGNGYDIDVFSYGAPRVGNRAFAEFLTVQTGGTLYRITHTNDIVPRLPPREFGYSHSSPEYWIKSGTLVPVTRNDIVKIEGIDATGGNNQPNIPDIPAHLWYFGLIGTC

SEQ ID NO: 12165 - protein, 268 aa, Thermomyces lanuginosus
EVSQDLFNQFNLFAQYSAAAYCGKNNDAPAGTNITCTGNACPEVEKADATFLYSFEDSGVGDVTGFLALDNTNKLIVLSFRGSRSIENWIGNLNFDLKEINDICSGCRGHDGFTSSWRSVADTLRQKVEDAVREHPDYRVVFTGHSLGGALATVAGADLRGNGYDIDVFSYGAPRVGNRAFAEFLTVQTGGTLYRITHTNDIVPRLPPREFGYSHSSPEYWIKSGTKVPVRRRDIVKIEGIDATGGNNQPNIPDIPAHLWYFGLIGTC

SEQ ID NO: 12166 - protein, 268 aa, Thermomyces lanuginosus
EVSQDLFNQFNLFAQYSAAAYCGKNNDAPAGTNITCTGNACPEVEKADATFLYSFEDSGVGDVTGFLALDNTNKLIVLSFRGSRSIENWIGNLNFDLKEINDICSGCRGHDGFTSSWRSVADTLRQKVEAAVREHPDYRVVFTGHSLGGALATVAGADLRGNPYDIDVFSYGAPRVGNRAFAEFLTVQTGGTLYRITHTNDIVPRLPPREFGYSHSSPEYWIKSGTMVPVTRNDIVKIEGIDATGGNNQPNIPDIPAHLWYFGRIGTC

SEQ ID NO: 12167 - protein, 268 aa, Thermomyces lanuginosus
EVSQDLFNQFNLFAQYSAAAYCGKNNDAPAGTNITCTGNACPEVEKADATLLYSFEDSGVGDVTGFLALDNTNKLIVLSFRGSRSIENWIGNLNFDLKEINDICSGCRGHDGFTSSWRSVADTLRQKVEDAVREHPDYRVVFTGHSLGGALATVAGADLRGNGYDIDVFSYGAPRVGNRAFAEFLTVQTGGTLYRITHTNDIVPRLPPREFGYSHSSPEYWIKSGTLVPVRRRDIVKIEGIDATGGNNQPNIPDIPAHLWYFGLIGTC

SEQ ID NO: 12168 - protein, 268 aa, Thermomyces lanuginosus
EVSQDLFNQFNLFAQYSAAAYCGKNNQAPAGTNITCTGNACPEVEKADATFLYSFEDSGVGDVTGFLALDNTNKLIVLSFRGSRSIENWIGNLNFDLKEINDICSGCRGHDGFTSSWRSVADTLRQKVEDAVREHPDYRVVFTGHSLGGALATVAGADLRGNGYDIDVFSYGAPRVGNRAFAEFLTVQTGGTLYRITHTNDIVPRLPPREFGYSHSSPEYWIKSGTLVPVTRQDIVKIEGIDATGGNNQPNIPDITAHLWYFGLIGTC

SEQ ID NO: 12169 - protein, 268 aa, Thermomyces lanuginosus
EVSQDLFNQFNLFAQYSAAAYCGKNNDAPAGTNITCTGNACPEVEKADATFLYSFEDSGVGDVTGFLALDNTNKLIVLSFRGSRSIENWIGNLNFDLKEINDICSGCRGHDGFTSSWRSVADTLRQKVEDAVREHPDYRVVFTGHSLGGALATVAGADLRGNGYDIDVFSYGAPRVGNRAFAEFLTVQTGGTLYRITHTNDGVPRLPPREFGYSHSSPEYWIKSGTLVPVRRRDIVKIEGIDATGGNNQPNIPDIPAHLWYFGLIGTC

SEQ ID NO: 12170 - protein, 268 aa, Thermomyces lanuginosus
EVSQDLFNQFNLFAQYSAAAYCGKNNDAPAGTNITCTGNACPEVEKADATFLYSFEDSGVGDVTGFLALDNTNKLIVLSFRGSRSIENWFGNLNFDLKEINDICSGCRGHDGFTSSWRSVADTLRQKVEDAVREHPDYRVVFTGHSLGGALATVAGADLRGNGYDIDVFSYGAPRVGNRAFAEFLTVQTGGTLYRITHTNDIVPRLPPREFGYSHSSPEYWIKSGTLVPVTRQDIVKIEGIDATGGNNQPNIPDITAHLWYFGLIGTC

SEQ ID NO: 12171 - protein, 268 aa, Thermomyces lanuginosus
EVSQDLFNQFNLFAQYSAAAYCGKNNDAPAGTNITCTGNACPEVEKADATFLYSFEDSGVGDVTGFLALDNTNKGIVLSFRGSRSIENWIGNLNFDLKEINDICSGCRGHDGFTSSWRSVADTLRQKVEDAVREHPDYRVVFTGHSLGGALATVAGADLRGNGYDIDVFSYGAPRVGNRAFAEFLTHQTGGTLYRITHTNDIVPRLPPREFGYSHSSPEYWIKSGTLVPVTRNDIVKIEGIDATGGNNQPNQPDIPAHLWYFGRIGTC

SEQ ID NO: 12172 - protein, 268 aa, Thermomyces lanuginosus
EVSQDLFNQFNLFAQYSAAAYCQKNNDAPAGTNITCTGNACPEVEKADATFLYSFEDSGVGDVTGFLALDNTNKQIVLSFRGSRSIENWIQNLNFDLKEINDICSGCRGHDGFTSSWRSVADTLRQKVEDAVREHPDYRVVFTGHSLGGALATVAGADLRGNGYDIDVFSYGAPRVGNRAFAEFLTVQTGGTLYRITHTNDIVPRLPPREFGYSHSSPEYWIKSGTLVPVTRNDIVKIEGIDATGGNNQPNQPDIPAHLWYFGRIGTC

SEQ ID NO: 12173 - protein, 268 aa, Thermomyces lanuginosus
EVSQDLFNQFNLFAQYSAAAYCGKNNDAPAGTNITCTGNACPEVEKADATFLYSFEDSGVGDVTGFLALDNTNKLIVLSFRGSRSIENWIGNLNFDLKEINDICSGCRGHDGFTSSWRSVADTLRQKVEDAVREHPDYRVVFTGHSLGGALATVAGADLRGNGYDIDVFSYGAPRVGNRAFAEFLTVQTGGTLYRITHTNDIMPRLPPREFGYSHSSPEYWIKSGTLVPVRRRDIVKIEGIDATGGNNQPNIPDIPAHLWYFGLIGTC

SEQ ID NO: 12174 - protein, 268 aa, Thermomyces lanuginosus
EVSQDLFNQFNLFAQYSAAAYCGKNNDAPAGTNITCTGNACPEVEKADATFLYSFEDSGVGDVTGFLALDNTNKLIVLSFRGSRSIKNWIENLNFDLKEINDICSGCRGHDGFTSSWRSVADTLRQKVEDAVREHPDYRVVFTGHSLGGALATVAGADLRGNGYDIDVFSYGAPRVGNRAFAEFLTVQTGGTLYRITHTNDIVPRLPPREFGYSHSSPEYWIKSGTLVPVRRRDIVKIEGIDATGGNNQPNIPDIPAHLWYFGLIGTC

SEQ ID NO: 12175 - protein, 268 aa, Thermomyces lanuginosus
EVSQDLFNQFNLFAQYSAAAYCGKNNDAPAGTNITCTGNACPEVEKADATFLYSFEDSGVGDVTGFLALDNTNKLIVLSFRGSRSIENWITNLNFDLKEINDICSGCRGHDGFTSSWRSVADTLRQKVEDAVREHPDYRVVFTGHSLGGALATVAGADLRGNGYDIDVFSYGAPRVGNRAFAEFLTVQTGGTLYRITHTNDIVPRLPPREFGYSHSSPEYWIKSGTLVPVRRRDIVKIEGIDATGGNNQPNIPDITAHLWYFGLIGTC

SEQ ID NO: 12176 - protein, 268 aa, Thermomyces lanuginosus
EVSQDLFNQFNLFAQYSAAAYCGKNNDAPAGTNITCTGNACPEVEKAQATFLYSFEDSGVGDVTGFLALDNTNKLIVLSFRGSRSIENWIGNLNFDLKEINDICSGCRGHDGFTSSWRSVADTLRQKVEAAVREHPDYRVVFTGHSLGGALATVAGADLRGNPYDIDVFSYGAPRVGNRAFAEFLTVQTGGTLYRITHTNDIVPRLPPREFGYSHSSPEYWIKSGTLVPVTRNDIVKIEGIDATGGNNQPNIPDIPAHLWYFGRIGTC

SEQ ID NO: 12177 - protein, 268 aa, Thermomyces lanuginosus
EVSQDLFNQFNLFAQYSAAAYCGKNNDAPAGTNITCTGNACPEVEKADATFLYSFEDSGVGDVTGFLALDNTNKQIVLSFRGSRSIENWIGNLNFDLKEINDICSGCRGHDGFTSSWRSVADTLRQKVEDAVREHPDYRVVFTGHSLGGALATVAGADLRGNGYDIDVFSYGAPRVGNRAFAEFLTTQDGGTLYRITHTNDIVPRLPPREFGYSHSSPEYWIKSGTLVPVTRNDIVKIEGIDATGGNNQPNIPDIPAHLWYFGLIGTC

SEQ ID NO: 12178 - protein, 268 aa, Thermomyces lanuginosus
EVSQDLFNQFNLFAQYSAAAYCGKNNDAPAGTNITCTGNACPEVEKADATFLYSFEDSGVGDVTGFLALDNTNKLIVLSFRGSRSIENWIGNLNFDLKEINDICSGCRGHDGFTSSWRSVADTLRQKVEDAVREHPDYRVVFTGHSLGGALATVAGADLRGNGYDIDVFSYGAPRVGNRAFAEFLTVQTGGTLYRITQTNDIVPRLPPREFGYSHSSPEYWIKSGTLVPVRRRDIVKIEGIDATGGNNQPNIPDIPAHLWYFGLIGTC

SEQ ID NO: 12179 - protein, 268 aa, Thermomyces lanuginosus
EVSQDLFNQFNLFAQYSAAAYCGKNNDAPAGTNITCTGNACPEVEKADATFLYSFEDSGVGDVTGFLALDNTNKLIVLSFRGSRSIENWIGNLNFDLKEINDICSGCRGHDGFTSSWRSVADTLRQKVEDAVREHPDYRVVFTGHSLGGALATVAGADLRGNGYDIDVFSYGAPRVGNRAFAEFLTVQTGGTLYRITHTNDIVPRLPPREFGYSHSSPEYWIKSGTLVPVRRRDIVKIEGIDATGGNNQPNIPDIPFHLWYFGLIGTC

SEQ ID NO: 12180 - protein, 268 aa, Thermomyces lanuginosus
EVSQDLFNQFNLFAQYSAAAYCGKNNDAPAGTNITCTGNACPEVEKADATFLYSFEDSGVGDVTGFLALDNTNKLIVLSFRGSRSIENWRGNLNFDLKEINDICSGCRGHDGFTSSWRSVADTLRQKVEDAVREHPDYRVVFTGHSLGGALATVAGADLRGNGYDIDVFSYGAPRVGNRAFAEFLTVQTGGTLYRITHTNDIVPRLPPREFGYSHSSPEYWIKSGTLVPVRRRDIVKIEGIDATGGNNQPNIPDIPAHLWYFGLIGTC

SEQ ID NO: 12181 - protein, 268 aa, Thermomyces lanuginosus
EVSQDLFNQFNLFAQYSAAAYCKKNNDAPAGTNITCTGNACPEVEKADATFLYSFEDSGVGDVTGFLALDNTNKLIVLSFRGSRSIENWIGNLNFDLKEINDICSGCRGHDGFTSSWRSVADTLRQKVEAAVREHPDYRVVFTGHSLGGALATVAGADLRGNGYDIDVFSYGAPRVGNRAFAEFLTNQTGGTLYRITHTNDIVPRLPPREFGYSHSSPEYWIKSGTLVPVTRNDIVKIEGIDATGGNNQPNIPDIPAHLWYFGRIGTC

SEQ ID NO: 12182 - protein, 268 aa, Thermomyces lanuginosus
EVSQDLFNQFNLFAQYSAAAYCGKNNDAPAGTNITCTGNACPEVEKADATFLYSFEDSGVGDVTGFLALDNTNKLIVLSFRGSRSIENWIGNLNFDLKEINDICSGCRGHDGFTSSWRSVADTLRQKVEDAVREHPDYRVVFTGHSLGGALATVAGADLRGNGYDIDVFSYGAPRVGNRAFAEFLTVQTGGTLYRITHTNDIVPRLPPREFGYSHSSPEYWIKSGTLVPVRRRDIVKIEGIDATGGNNQPNIPDIRAHLWYFGLIGTC

SEQ ID NO: 12183 - protein, 268 aa, Thermomyces lanuginosus
EVSQDLFNQFNLFAQYSAAAYCGKNNDAPAGTNITCTGNACPEVEKADATFLYSFEDSGVGDVTGFLALDNTNKLIVLSFRGSRSIENWIGNLNFDLKEINDICSGCRGHDGFTSSWRSVADTLRQKVEDAVREHPDYRVVFTGHSLGGALATVAGADLRGNGYDIDVFSYGAPRVGNRAFAEFLTVQTGGTLYRITHTNDIVPRLPPREFGYSHSSPEYWIKSGTLPPVRRRDIVKIEGIDATGGNNQPNIPDIPAHLWYFGLIGTC

SEQ ID NO: 12184 - protein, 268 aa, Thermomyces lanuginosus
EVSDDLFNQFNLFAQYSAAAYCGKNNSAPAGTNITCTGNACPEVEKADATFLYSFEDSGVGDVTGFLALDNTNKLIVLSFRGSRSIENWIGNLNFDLKEINDICSGCRGHDGFTSSWRSVADTLRQKVEDAVREHPDYRVVFTGHSLGGALATVAGADLRGNGYDIDVFSYGAPRVGNRAFAEFLTVQTGGTLYRITHTNDIVPRLPPREFGYSHSSPEYWIKSGTLVPVTRNDIVKIEGIDATGGNNQPNIPDITAHLWYFGLIGTC

SEQ ID NO: 12185 - protein, 268 aa, Thermomyces lanuginosus
EVSQDLFNQFNLFAQYSAAAYCGKNNNAPAGTNITCTGNACPEVEKADATFLYSFEDSGVGDVTGFLALDNTNKLIVLSFRGSRSIENWIGNLNFDLKEINDICSGCRGHDGFTSSWRSVADTLRQKVEDAVREHPDYRVVFTGHSLGGALATVAGADLRGNGYDIDVFSYGAPRVGNRAFAEFLTVQTGGTLYRITHTNDIVPRLPPREFGYSHSSPEYWIKSGTLVPVRRRDIVKIEGIDATGGNNQPNIPDIPAHLWYFGLIGTC

SEQ ID NO: 12186 - protein, 268 aa, Thermomyces lanuginosus
EVSQDLFNQFNLFAQYSAAAYCGKNNDAPAGTNITCTGNACPEVEKADATFLYSFEDSGVGDVTGFLALDNTNKLIVLSFRGSRSIENWIGNLNFDLKEINDICSGCRGHDGFTSSWRSVADTLRQKVEDAVREHPDYRVVFTGHSLGGGLATVAGADLRGNGYDIDVFSYGAPRVGNRAFAEFLTVQTGGTLYRITHTNDIVPRLPPREFGYSHSSPEYWIKSGTLVPVRRRDIVKIEGIDATGGNNQPNIPDIPAHLWYFGLIGTC

SEQ ID NO: 12187 - protein, 268 aa, Thermomyces lanuginosus
EVSQDLFNQFNLFAQYSAAAYCGKNNDAPAGTNITCTGNACPEVEKADATFLYSFEDSGVGDVTGFLALDNTNKLIVLSFRGSRSIENWIGNLNFELKEINDICSGCRGHAGFTSSWRSVADTLRQKVEDAVREHPDYRVVFTGHSLGGALATVAGADLRGNGYDIDVFSYGAPRVGNRAFAEFLTVQTGGTLYRITHTNDIVPRLPPREFGYSHSSPEYWIKSGTLVPVRRRDIVKIEGIDATGGNNQPNIPDIPAHLWYFGLIGTC

SEQ ID NO: 12188 - protein, 268 aa, Thermomyces lanuginosus
EVSQDLFNQFNLFAQYSAAAYCKKNNDAPAGTNITCTGNACPEVEKADATFLYSFEDSGVGDVTGFLALDNTNKRIVLSFRGSRSIENWIGNLNFDLKEINDICSGCRGHDGFTSSWRSVADTLRQKVEDAVREHPDYRVVFTGHSLGGALATVAGADLRGNGYDIDVFSYGAPRVGNRAFAEFLTTQTGGTLYRITHTNDIVPRLPPREFGYSHSSPEYWIKSGTLVPVTRNDIVKIEGIDATGGNNQPNIPDIPAHLWYFGRIGTC

SEQ ID NO: 12189 - protein, 268 aa, Thermomyces lanuginosus
EVSQDLFNQFNLFAQYSAAAYCGKNNDAPAGTNITCTGNACPEVEKADATFLYSFEDSGVGDVTGFLALDNTNKLIVLSFRGSRSIENWIGNLNFDLKEINDICSGCRGHDGFTSSWRSVADTLRQKVEDAVREHPDYRVVFTGHSLGGALATVAGADLRGNGYDIDVFSYGAPRVGNRAFAEFLTVQTGGTLYRITHTNDIVPRLPPREFGYSHSSPEYWIKSGTLVHVRRRDIVKIEGIDATGGNNQPNIPDIPAHLWYFGLIGTC

SEQ ID NO: 12190 - protein, 268 aa, Thermomyces lanuginosus
EVSQDLFNQFNLFAQYSAAAYCGKNNDAPAGTNITCTGNACPEVEKADATFLYSFEDSGVGDVTGFLALDNTNKLIVLSFRGSRSIENWIGNLNFDLKEINDICSGCRGHDGFTSSWRSVADTLRQKVEDAVREHPDYRVVFTGHSLGGVLATVAGADLRGNGYDIDVFSYGAPRVGNRAFAEFLTVQTGGTLYRITHTNDIVPRLPPREFGYSHSSPEYWIKSGTLVPVRRRDIVKIEGIDATGGNNQPNIPDIPAHLWYFGLIGTC

SEQ ID NO: 12191 - protein, 268 aa, Synthetic construct
EVSQDLFNQFNLFAQYSAAAYCGKNNDAPAGTNITCTGNACPEVEKADATFLYSFEGSGVGDVTGFLALDNTNKLIVLSFRGSRSIENWIGNLKFLLKEINDICSGCRGHDGFTSSWRSVADTLRQKVEDAVREHPDYRVVFTGHSLGGALATVAGADLRGNGYDIDVFSYGAPRVGNRAFAEFLTVQTGGTLYRITHTNDIVPRLPPRKFGYSHSSPEYWIKSGTLVPVTRNDIVKIEGIDATGGNNQPNIPDIPAHLWYFGLIGTC

SEQ ID NO: 12192 - protein, 268 aa, Thermomyces lanuginosus
EVSQDLFNQFNLFAQYSAAAYCKKNNDAPAGTNITCTGNACPEVEKADATFLYSFEDSGVGDVTGFLALDNTNKQIVLSFRGSRSIENWIGNLNFDLKEINDICSGCRGHDGFTSSWRSVADTLRQKVEDAVREHPDYRVVFTGHSLGGALATVAWADLRGNGYDIDVFSYGAPRVGNRAFAEFLTVQTGGTLYRITHTNDIVPRLPPREFGYSHSSPEYWIKSGTLVPVTRNDIVKIEGIDATGGNNQPNIPDIPAHLWYFGRIGTC

SEQ ID NO: 12193 - protein, 268 aa, Thermomyces lanuginosus
EVSQDLFNQFNLFAQYSAAAYCGKNNDAPAGTNITCTGNACPEVEKADATFLYSFEDSGVGDVTGFLALDNTNKLIVLSFRGSRSIENWIGNLNFDLKEINDICSGCRGHDGFTSSWRSVADTLRQKVEDAVREHPDYRVVFTGHSLGGALATVAGADLRGNGYDIDVFSYGAPRVGNRAFAEFLTVQTGGTLYRITHTNDIVPRLPPREFGYSHSSPEYWIKSGTLVPVRRRDIVKIEGIDATGGNNQPNIPDIPAHFWYFGLIGTC

SEQ ID NO: 12194 - protein, 268 aa, Thermomyces lanuginosus
EVSQDLFNQFNLFAQYSAAAYCGKNNDAPAGTNITCTGNACPEVEKADATFLYSFEDSGVGDVTGFLALDNTNKLIVLSFRGSRSIENWIGNLRFDLKEINDICSGCRGHDGFTSSWRSVADTLRQKVEAAVREHPDYRVVFTGHSLGGALATVAGADLRGNGYDIDVFSYGAPRVGNRAFAEFLTTQTGGTLYRITHTNDIVPRLPPREFGYSHSSPEYWIKSGTLVPVTRNDIVKIEGIDATGGNNQPNIPDIPAHLWYFGLIGTC

SEQ ID NO: 12195 - protein, 268 aa, Thermomyces lanuginosus
EVSQDLFNQFNLFAQYSAAAYCGKNNDAPAGTQITCTGNACPEVEKADATFLYSFEDSGVGDVTGFLALDNTNKLIVLSFRGSRSIENWITNLNFDLKEINDICSGCRGHDGFTSSWRSVADTLRQKVEDAVREHPDYRVVFTGHSLGGALATVAGADLRGNGYDIDVFSYGAPRVGNRAFAEFLTVQTGGTLYRITHTNDIVPRLPPREFGYSHSSPEYWIKSGTLVPVRRRDIVKIEGIDATGGNNQPNIPDIPAHLWYFGLIGTC

SEQ ID NO: 12196 - protein, 268 aa, Thermomyces lanuginosus
EVSQDLFNQFNLFAQYSAAAYCGKNNDAPAGTNITCTGNACPEVEKADATFLYSFEDSGVGDVTGFLALDNTNKLIVLSFRGSRSIENWIGNLNFDLKEINDICSGCRGHDGFTSSWRSVADTLRQKVEDAVREHPDYRVVFTGHSLGGALATVAGADLRGNGYDIDVFSYGAPRVGNRAFAEFLTVQTGGTLYRITHTNDIVPRLPPRENGYSHSSPEYWIKSGTLVPVRRRDIVKIEGIDATGGNNQPNIPDIPAHLWYFGLIGTC

SEQ ID NO: 12197 - protein, 268 aa, Thermomyces lanuginosus
EVSQDLFNQFNLFAQYSAAAYCGKNNDAPAGTNITCTGNACPEVEKADATFLYSFEDSGVGDVTGFLALDNTNKLIVLSFRGSRSIENWIGNLNFDLKEINDICSGCRGHDGFTSSWRSVADTLRQKVEAAVREHPDYRVVFTGHSLGGALATVAGADLRGNPYDIDVFSYGAPRVGNRAFAEFLTVQTGGTLYRITHTNDIVPRLPPREFGYSHSSPEYWIKSGTLVPVTRQDIVKIEGIDATGGNNQPNIPDIPAHLWYFGRIGTC

SEQ ID NO: 12198 - protein, 268 aa, Thermomyces lanuginosus
EVSQDLFNQFNLFAQYSAAAYCGKNNQAPAGTNITCTGNACPEVEKADATFLYSFEDMGVGDVTGFLALDNTNKLIVLSFRGSRSIENWIGNLNFDLKEINDICSGCRGHDGFTSSWRSVADTLRQKVEDAVREHPDYRVVFTGHSLGGALATVAGADLRGNGYDIDVFSYGAPRVGNRAFAEFLTVQTGGTLYRITHTNDIVPRLPPREFGYSHSSPEYWIKSGTLVPVTRNDIVKIEGIDATGGNNQPNIPDITAHLWYFGLIGTC

SEQ ID NO: 12199 - protein, 268 aa, Thermomyces lanuginosus
EVSQDLFNQFNLFAQYSAAAYCGKNNSAPAGTNITCTGNACPEVEKADATFLYSFEDMGVGDVTGFLALDNTNKLIVLSFRGSRSIENWIGNLNFDLKEINDICSGCRGHDGFTSSWRSVADTLRQKVEDAVREHPDYRVVFTGHSLGGALATVAGADLRGNGYDIDVFSYGAPRVGNRAFAEFLTVQTGGTLYRITHTNDIVPRLPPREFGYSHSSPEYWIKSGTLVPVTRNDIVKIEGIDATGGNNQPNIPDITAHLWYFGLIGTC

SEQ ID NO: 12200 - protein, 268 aa, Thermomyces lanuginosus
EVSQDLFNQFNLFAQYSAAAYCGKNNDAPAGTNITCTGNACPEVEKADATFLYSFEDSGVGDVTGFLALDNTNKQIVLSFRGSRSIENWIGNLNFDLKEINDICSGCRGHDGFTSSWRSVADTLRQKVEDAVREHPDYRVVFTGHSLGGALATVAWADLRGNGYDIDVFSYGAPRVGNRAFAEFLTNQTGGTLYRITHTNDIVPRLPPREFGYSHSSPEYWIKSGTLVPVTRNDIVKIEGIDATGGNNQPNIPDIPAHLWYFGLIGTC

SEQ ID NO: 12201 - protein, 268 aa, Thermomyces lanuginosus
EVSQDLFNQFNLFAQYSAAAYCQKNNDAPAGTNITCTGNACPEVEKADATFLYSFEDSGVGDVTGFLALDNTNKLIVLSFRGSRSIENWIGNLNFDLKEINDICSGCRGHDGFTSSWRSVADTLRQKVEAAVREHPDYRVVFTGHSLGGALATVAWADLRGNGYDIDVFSYGAPRVGNRAFAEFLTVQTGGTLYRITHTNDIVPRLPPREFGYSHSSPEYWIKSGTLVPVTRNDIVKIEGIDATGGNNQPNIPDIPAHLWYFGLIGTC

SEQ ID NO: 12202 - protein, 268 aa, Thermomyces lanuginosus
EVSQDLFNQFNLFAQYSAAAYCGKNNDAPAGTNITCTGNACPEVEKADATFLYSFEDSGVGDVTGFLALDNTNKQIVLSFRGSRSIENWIGNLNFDLKEINDICSGCRGHDGFTSSWRSVADTLRQKVEDAVREHPDYRVVFTGHSLGGALATVAWADLRGNGYDIDVFSYGAPRVGNRAFAEFLTVQDGGTLYRITHTNDIVPRLPPREFGYSHSSPEYWIKSGTLVPVTRNDIVKIEGIDATGGNNQPNIPDIPAHLWYFGLIGTC

SEQ ID NO: 12203 - protein, 268 aa, Thermomyces lanuginosus
EVSQDLFNQFNLFAQYSAAAYCKKNNSAPAGTNITCTGNACPEVEKADATFLYSFEDSGVGDVTGFLALDNTNKQIVLSFRGSRSIENWIGNLNFDLKEINDICSGCRGHDGFTSSWRSVADTLRQKVEDAVREHPDYRVVFTGHSLGGALATVAGADLRGNGYDIDVFSYGAPRVGNRAFAEFLTVQTGGTLYRITHTNDIVPRLPPREFGYSHSSPEYWIKSGTLVPVTRNDIVKIEGIDATGGNNQPNIPDIPAHLWYFGRIGTC

SEQ ID NO: 12204 - protein, 268 aa, Synthetic construct
EVSQDLFNQFNLFAQYSAAAYCGKNNDAPAGTNITCTGNACPEVEKADATFLYSFEDSGVGDVTGFLALDNTNKLIVLSFRGSRSIENWFGNLNFLLKKINDICSGCRGHDGFTSSWRSVADTLRQKVEDAVREHPGYRVVFTGHSLGGALATVAGADLRGNGYDIDVFSYGAPRVGNRAFAEFLTAQTGGTLYRITHTNDIVPRLPPREFGYSHSSPEYWIKSGTLVPVTRNDIVKIEGIDATGGNNRPNIPDIPAHLWYFGLIGTC

SEQ ID NO: 12205 - protein, 268 aa, Thermomyces lanuginosus
EVSQDLFNQFNLFAQYSKAAYCGKNNDAPAGTDITCTGNACPEVEKADATFLYSFEDSGVGDVTGFLALDNTNKLIVLSFRGSRSIENWIGNLNFDLKEINDICSGCRGHDGFTSSWRSVADTLRQKVEDAVREHPDYRVVFTGHSLGGALATVAGADLRGNGYDIDVFSYGAPRVGNRAFAEFLTVQDGGTLYRITHTNDIVPRLPPREFGYSHSSPEYWIKSGTLVPVTRNDIVKIEGIDATGGNNQPNIPDIPAHLWYFGLIGTC

SEQ ID NO: 12206 - protein, 268 aa, Thermomyces lanuginosus
EVSQDLFNQFNLFAQYSAAAYCGKNNDAPAGTNITCTGNACPEVEKADATFLYSFKDSGVGDVTGFLALDNTNKLIVLSFRGSRSIENWIGNLNFDLKEINDICSGCRGHDGFTSSWRSVADTLRQKVEAAVREHPDYRVVFTGHSLGGALATVAGADLRGNGYDIDVFSYGAPRVGNRAFAEFLTTQTGGTLYRITHTNDIVPRLPPREFGYSHSSPEYWIKSGTLVPVTRNDIVKIEGIDATGGNNQPNIPDIPAHLWYFGRIGTC

SEQ ID NO: 12207 - protein, 268 aa, Thermomyces lanuginosus
EVSQDLFNQFNLFAQYSAAAYCGKNNDAPAGTNITCTGNACPEVEKADATFLYSFEDMGVGDVTGFLALDNTNKLIVLSFRGSRSIENWIGNLNFDLKEINDICSGCRGHDGFTSSWRSVADTLRQKVEDAVREHPDYRVVFTGHSLGGALATVAGADLRGNPYDIDVFSYGAPRVGNRAFAEFLTVQTGGTLYRITHTNDIVPRLPPREFGYSHSSPEYWIKSGTMVPVTRNDIVKIEGIDATGGNNQPNIPDIPAHLWYFGRIGTC

SEQ ID NO: 12208 - protein, 268 aa, Synthetic construct
EVSQDLFNQFNLFAQYSAAAYCGKNNDAPAGTNITCTGNACPEVEKADATFLYSFEDSGVGDVTGFLALDNTNKLIVLSFRGSRSIENWFGNLNFLLKKINDICSGCRGHDGFTSSWRSVADTLRQKVEDAVREHPDYRVVFTGHSLGGALATVAGADLRGNGYDIDVFSYGAPRVGNRAFAEFLTAQTGGTLYRITHTRDIVPRLPPAEFGYSHSSPEYWIKSGTLVPVTRNDIVKIEGIDATGGNNQPNIPDIPAHLWYFGLIGTC

SEQ ID NO: 12209 - protein, 268 aa, Thermomyces lanuginosus
EVSQDLFNQFNLFAQYSAAAYCGKNNDAPAGTNITCTGNACPEVEKADATFLYSFEDSGVGDVTGFLALDNTNKLIILSFRGSRSIENWIGNLNFDLKEINDICSGCRGHDGFTSSWRSVADTLRQKVEDAVREHPDYRVVFTGHSLGGALATVAGADLRGNGYDIDVFSYGAPRVGNRAFAEFLTQQDGGTLYRITHTNDIVPRLPPREFGYSHSSPEYWIKSGTLVPVTRNDIVKIEGIDATGGNNQPNIPDIPAHLWYFGLIGTC

SEQ ID NO: 12210 - protein, 268 aa, Thermomyces lanuginosus
EVSQDLFNQFNLFAQYSAAAYCGKNNDAPAGTNITCTGNACPEVEKADATFLYSFEDSGVGDVTGFLALDNTNKLIVLSFRGSRSIENWIGNLNFDLKEINDICSGCRGHDGFTSSWRSVADTLRQKVEDAVREHPDYRVVFTGHSLGGALATVAGADLRGNGYDIDVFSYGAPRVGNRAFAEFLTVQTGGTLYRITHTNDIVPRLPPREFGYSHSSPEYWIKSGTLVPVRRRDIVKIEGIDATGGNNQPNIPDIPLHLWYFGLIGTC

SEQ ID NO: 12211 - protein, 268 aa, Thermomyces lanuginosus
EVSQDLFNQFNLFAQYSAAAYCGKNNDAPAGTNITCTGNACPEVEKADATFLYSFEDSGVGDVTGFLALDNTNKLIVLSFRGSRSIENWIGNLHFDLKEINDICSGCRGHDGFTSSWRSVADTLRQKVEDAVREHPDYRVVFTGHSLGGALATVAGADLRGNGYDIDVFSYGAPRVGNRAFAEFLTVQTGGTLYRITHTNDIVPRLPPXEFGYSHSSPEYWIKSGTLVPVTRNDIVKIEGIDATGGNNRPNIPDIPAHLWYFGLIGTC

SEQ ID NO: 12212 - protein, 268 aa, Thermomyces lanuginosus
EVSQDLFNQFNLFAQYSAAAYCGKNNDAPAGTNITCTGNACPEVEKADATFLYSFEDSGVGDVTGFLALDNTNKLIVLSFRGSRSIENWITNLNFDLKEINDICSGCRGHDGFTSSWRSVADTLRQKVEDAVREHPDYRVVFTGHSLGGALATVAGADLRGNGYDIDVFSYGAPRVGNRAFAEFLTVQTGGTLYRITHTNDIVPRLPPREFGYSHSSPEYWIKSGTLVPVRRRDIVKIEGIDATGGNNQPNIPSIPAHLWYFGLIGTC

SEQ ID NO: 12213 - protein, 268 aa, Thermomyces lanuginosus
EVSQDLFNQFNLFAQYSKAAYCGKNNSAPAGTNITCTGNACPEVFKADATFLYSFEDSGVGDVTGFLALDNTNKLIVLSFRGSRSIENWIGNLNFDLKEINDICSGCRGHDGFTSSWRSVADTLRQKVEDAVREHPDYRVVFTGHSLGGALATVAGADLRGNGYDIDVFSYGAPRVGNRAFAEFLTVQTGGTLYRITHTNDIVPRLPPREFGYSHSSPEYWIKSGTLVPVTRNDIVKIEGIDATGGNNQPNIPDIPAHLWYFGLIGTC

SEQ ID NO: 12214 - protein, 268 aa, Thermomyces lanuginosus
EVSQDLFNQFNLFAQYSAAAYCGKNNDAPAGTNITCTGNACPEVEKADATFLYSFEDSGVGDVTGFLALDNTNKLIVLSFRGSRSIENWIGNLNFDLKEINDICSGCRGHDGFTSSWRSVADTLRQKVEDAVREHPDYRVVFTGHSLGGALATVAGADLRGNGYDIDVFSYGAPRVGNRAFAEFLTVQTGGTLYRITHTNDIVPRLPPREFGYSHSSPEYWIKSGTLVPVRRRDIVKIEGIDATGGNNQPNINDIPAHLWYFGLIGTC

SEQ ID NO: 12215 - protein, 268 aa, Thermomyces lanuginosus
EVSQDLFNQFNLFAQYSKAAYCGKNNDAPAGTDITCTGNACPEVEKADATFLYSFEDSGVGDVTGFLALDNTNKDIVLSFRGSRSIENWIGNLNFDLKEINDICSGCRGHDGFTSSWRSVADTLRQKVEDAVREHPDYRVVFTGHSLGGALATVAGADLRGNGYDIDVFSYGAPRVGNRAFAEFLTVQTGGTLYRITHTNDIVPRLPPREFGYSHSSPEYWIKSGTLVPVTRNDIVKIEGIDATGGNNQPNIPDIPAHLWYFGLIGTC

SEQ ID NO: 12216 - protein, 268 aa, Thermomyces lanuginosus
EVSQDLFNQFNLFAQYSAAAYCGKNNDAPAGTNITCTGNACPEVEKADATFLYSFEDSGVGDVTGFLALDNTNKLIVLSFRGSRSIENWIGNLKFDLKEINDICSGCRGHDGFTSSWRSVADTLRQKVEDAVREHPDYRVVFTGHSLGGALATVAGADLRGNGYDIDVFSYGAPRVGNRAFAEFLTVQTGGTLYRITHTNDIVPRLPPXEFGYSHSSPEYWIKSGTLVPVTRNDIVKIEGIDATGGNNRPNIPDIPAHLWYFGLIGTC

SEQ ID NO: 12217 - protein, 268 aa, Thermomyces lanuginosus
EVSQDLFNQFNLFAQYSAAAYCGKNNDAPAGTNITCTGNACPEVEKADATFLYSFEDSGVGDVTGFLALDNTNKLIVLSFRGSRSIENWIGNLNFDLKEINDICSGCRGHDGFTSSWRSVADTLRQKVEDAVREHPDYRVVFTGHSLGGALATVAGADLRGNGYDIDVFSYGAPRVGNRAFAEFLTVQTGGTLYRITHTNDIVPRLPPREFGYSHSSPEYWIKSGTLVPKRRRDIVKIEGIDATGGNNQPNIPDIPAHLWYFGLIGTC

SEQ ID NO: 12218 - protein, 268 aa, Thermomyces lanuginosus
EVSQDLFNQFNLFAQYSAAAYCKKNNDAPAGTNITCTGNACPEVEKADATFLYSFEDSGVGDVTGFLALDNTNKLIVLSFRGSRSIENWIGNLNFDLKEINDICSGCRGHDGFTSSWRSVADTLRQKVEAAVREHPDYRVVFTGHSLGGALATVAGADLRGNGYDIDVFSYGAPRVGNRAFAEFLTTQTGGTLYRITHTNDIVPRLPPREFGYSHSSPEYWIKSGTLVPVTRNDIVKIEGIDATGGNNQPNIPDIPAHLWYFGRIGTC

SEQ ID NO: 12219 - protein, 268 aa, Thermomyces lanuginosus
EVSQDLFNQFNLFAQYSKAAYCGANNDAPAGTNITCTGNACPEVEKADATFLYSFEDSGVGDVTGFLALDNTNKLIVLSFRGSRSIENWIGNLNFDLKEINDICSGCRGHDGFTSSWRSVADTLRQKVEDAVREHPDYRVVFTGHSLGGALATIAGADLRGNGYDIDVFSYGAPRVGNRAFAEFLTVQTGGTLYRITHTNDIVPRLPPREFGYSHSSPEYWIKSGTLVPVTRNDIVKIEGIDATGGNNQPNIPDIPAHLWYFGLIGTC

SEQ ID NO: 12220 - protein, 268 aa, Thermomyces lanuginosus
EVSQDLFNQFNLFAQYSAAAYCGKNNDAPAGTNITCTGNACPEVEKADATFLYSFEDSGVGDVTGFLALDNTNKGIVLSFRGSRSIENWIGNLNFDLKEINDICSGCRGHDGFTSSWRSVADTLRQKVEAAVREHPDYRVVFTGHSLGGALATVAGADLRGNGYDIDVFSYGAPRVGNRAFAEFLTHQTGGTLYRITHTNDIVPRLPPREFGYSHSSPEYWIKSGTLVPVTRNDIVKIEGIDATGGNNQPNIPDIPAHLWYFGLIGTC

SEQ ID NO: 12221 - protein, 268 aa, Thermomyces lanuginosus
EVSQDLFNQFNLFAQYSAAAYCGKNNDAPAGTNITCTGNACPEVEKADATFLYSFEDSGVGDVTGFLALDNTNKLIVLSFRGSRSIENWIGNLNFDLKEINDICSGCRGHDGFTSSWRSVADTLRQKVEDAVREHPDYRVVFGGHSLGGALATVAGADLRGNGYDIDVFSYGAPRVGNRAFAEFLTVQTGGTLYRITHTNDIVPRLPPREFGYSHSSPEYWIKSGTLVPVRRRDIVKIEGIDATGGNNQPNIPDIPAHLWYFGLIGTC

SEQ ID NO: 12222 - protein, 268 aa, Thermomyces lanuginosus
EVSQDLFNQFNLFAQYSAAAYCGKNNEAPAGTNITCTGNACPEVEKADATFLYSFEDSGVGDVTGFLALDNTNKLIVLSFRGSRSIENWIGNLNFDLKEINDICSGCRGHDGFTSSWRSVADTLRQKVEAAVREHPDYRVVFTGHSLGGALATVAGADLRGNGYDIDVFSYGAPRVGNRAFAEFLTVQTGGTLYRITHTNDIVPRLPPREFGYSHSSPEYWIKSGTLVPVTRQDIVKIEGIDATGGNNQPNIPDIPAHLWYFGRIGTC

SEQ ID NO: 12223 - protein, 268 aa, Thermomyces lanuginosus
EVSQDLFNQFNLFAQYSAAAYCGKNNDAPAGTNITCTGNACPEVEKADATFLYSFEDSGVGDVTGFLALDNTNKLIVLSFRGSRSIENWIGNLNFDLKEINDICSGCRGHDGFTSSWRSVADTLRQKVEDAVREHPDYRVVFTGHSLGGALATVAGADLRGNGYDIDVFSYGAPRVGNRAFAEFLTVQTGGTLYRITHTNDIVPRLPPREFGYSHSSPEYWIKSGTLVPVRRRDIVKIEGIDATGGNNQPNIPDIPAHLLYFGLIGTC

SEQ ID NO: 12224 - protein, 268 aa, Thermomyces lanuginosus
EVSQDLFNQFNLFAQYSAAAYCQKNNDAPAGTNITCTGNACPEVEKADATFLYSFEDSGVGDVTGFLALDNTNKQIVLSFRGSRSIENWIGNLNFDLKEINDICSGCRGHDGFTSSWRSVADTLRQKVEDAVREHPDYRVVFTGHSLGGALATVAGADLRGNGYDIDVFSYGAPRVGNRAFAEFLTTQTGGTLYRITHTNDIVPRLPPREFGYSHSSPEYWIKSGTLVPVTRNDIVKIEGIDATGGNNQPNIPDIPAHLWYFGLIGTC

SEQ ID NO: 12225 - protein, 268 aa, Synthetic construct
EVRQDLFNQFNLFAQYSAAAYCGKNNDAPAGTNITCTGNACPEVEKADATFLYSFEDSGVGDVTGFLALDNTNKLIVLSFRGSRSIENWFGNLNFLLKKINDICSGCRGHDGFTSSWRSVADTLRQKVEDAVREHPDYRVVFTGHSLGGALATVAGADLRGNGYDIDVFSYGAPRVGNRAFAEFLTAQTGGTLYRITHTNDIVPRLPPREFGYSHSSPEYWIKSGTLVPVTRNDIVKIEGIDATGGNNRPNIPDIPAHLWYFGLIGTC

SEQ ID NO: 12226 - protein, 268 aa, Thermomyces lanuginosus
EVSQDLFNQFNLFAQYSAAAYCGKNNDAPAGTNITCTGNACPEVEKADATFLYSFEDSGVGDVTGFLALDNTNKLIVLSFRGSRSIENWIGNLKFDLKEINDICSGCRGHDGFTSSWRSVADTLRQKVEDAVREHPDYRVVFTGHSLGGALATVAGADLRGNGYDIDVFSYGAPRVGNRAFAEFLTVQTGGTLYRITHTNDIVPRLPPXEFGYSHSSPEYWIKSGTLVPVTRNDIVKIEGIDATGGNNHPNIPDIPAHLWYFGLIGTC

SEQ ID NO: 12227 - protein, 268 aa, Thermomyces lanuginosus
EVSQDLFNQFNLFAQYSAAAYCGKNNDAPAGTNITCTGNACPEVEKADATFLYSFEDSGVGDVTGFLALDNTNKLIVLSFRGSRSIENWIGNLNFDLKEINDICSGCRGHDGFTSSWRSVADTLRQKVEDAVREHPDYRVVFTGHSLGGALATVAGADLRGNGYDIDVFSYGAPRVGNRAFAEFLTVQTGGTLYRITHTNDIVPRLPPREFGYSHSSPEYWIKSGTLVPVRRRDIVKIEGIDATGGNNQPNIPDIPAHLSYFGLIGTC

SEQ ID NO: 12228 - protein, 268 aa, Thermomyces lanuginosus
EVSQDLFNQFNLFAQYSAAAYCGKNNSAPAGTNITCTGNACPEVEKADATFLYSFEDSGVGDVTGFLALDNTNKGIVLSFRGSRSIENWIQNLNFDLKEINDICSGCRGHDGFTSSWRSVADTLRQKVEDAVREHPDYRVVFTGHSLGGALATVAGADLRGNGYDIDVFSYGAPRVGNRAFAEFLTVQTGGTLYRITHTNDIVPRLPPREFGYSHSSPEYWIKSGTLVPVTRNDIVKIEGIDATGGNNQPNQPDIPAHLWYFGRIGTC

SEQ ID NO: 12229 - protein, 268 aa, Thermomyces lanuginosus
EVSQDLFNQFNLFAQYSAAAYCQKNNDAPAGTNITCTGNACPEVEKADVTFLYSFEDSGVGDVTGFLALDNTNKLIVLSFRGSRSIENWIGNLNFDLKEINDICSGCRGHDGFTSSWRSVADTLRQKVEDAVREHPDYRVVFTGHSLGGALATVAGADLRGNGYDIDVFSYGAPRVGNRAFAEFLTVQDGGTLYRITHTNDIVPRLPPREFGYSHSSPEYWIKSGTLVPVTRNDIVKIEGIDATGGNNQPNIPDIPAHLWYFGLIGTC

SEQ ID NO: 12230 - protein, 268 aa, Synthetic construct
EVSQDLFNQFNLFAQYSAAAYCGKNNDAPAGTNITCTGNACPEVEKADATFLYSFEDSGVGDVTGFLALDNTNKLIVLSFRGTRSIKNGIANLKFVLKEINDICSGCRGHDGFTSSWRSVADTLRQKVEDAVREHPDYRVVFTGHSLGGALATVAGADLRGNGYDIDVFSYGAPRVGNRAFAEFLTVQTGGTLYRITHTNDIVPRLPPREFGYSHSSPEYWIKSGTLVPVTRNDIVKIEGIDATGGNNQPNIPDIPAHLWYFGLIGTC

SEQ ID NO: 12231 - protein, 268 aa, Thermomyces lanuginosus
EVSQDLFNQFNLFAQYSAAAYCGKNNDAPAGTQITCTGNACPEVEKADATFLYSFEDSGVGDVTGFLALDNTNKLIVLSFRGSRSIENWIGNLNFGLKEINDICSGCRGHDGFTSSWRSVADTLRQKVEDAVREHPDYRVVFTGHSLGGALATVAGADLRGNGYDIDVFSYGAPRVGNRAFAEFLTVQTGGTLYRITHTNDIVPRLPPREFGYSHSSPEYWIKSGTLVPVRRRDIVKIEGIDATGGNNQPNIPDIPAHLWYFGLIGTC

SEQ ID NO: 12232 - protein, 268 aa, Thermomyces lanuginosus
EVSQDLFNQFNLFAQYSAAAYCGKNNDAPAGTQITCTGNACPEVEKADATFLYSFEDSGVGDVTGFLALDNTNKLIVLSFRGSRSIENWIYNLNFDLKEINDICSGCRGHDGFTSSWRSVADTLRQKVEDAVREHPDYRVVFTGHSLGGALATVAGADLRGNGYDIDVFSYGAPRVGNRAFAEFLTVQTGGTLYRITHTNDIVPRLPPREFGYSHSSPEYWIKSGTLVPVRRRDIVKIEGIDATGGNNQPNIPDIPAHLWYFGLIGTC

SEQ ID NO: 12233 - protein, 268 aa, Thermomyces lanuginosus
EVSQDLFNQFNLFAQYSAAAYCGKNNDAPAGTNITCTGNACPEVEKADATFLYSFEDSGVGDVTGFLALDNTNKRIVLSFRGSRSIENWIGNLNFDLKEINDICSGCRGHDGFTSSWRSVADTLRQKVEAAVREHPDYRVVFTGHSLGGALATVAGADLRGNGYDIDVFSYGAPRVGNRAFAEFLTTQTGGTLYRITHTNDIVPRLPPREFGYSHSSPEYWIKSGTLVPVTRNDIVKIEGIDATGGNNQPNIPDIPAHLWYFGLIGTC

SEQ ID NO: 12234 - protein, 268 aa, Thermomyces lanuginosus
EVSQDLFNQFNLFAQYSKAAYCGKNNDAPAGTNITCTGNACPEVEKADATFLYSFEDSGVGDVTGFLALDNTNKDIVLSFRGSRSIENWIGNLNFDLKEINDICSGCRGHDGFTSSWRSVADTLRQKVEDAVREHPDYRVVFTGHSLGGALATVAGADLRGNGYDIDVFSYGAPRVGNRAFAEFLTVQDGGTLYRITHTNDIVPRLPPREFGYSHSSPEYWIKSGTLVPVTRNDIVKIEGIDATGGNNQPNIPDIPAHLWYFGLIGTC

SEQ ID NO: 12235 - protein, 268 aa, Thermomyces lanuginosus
EVSQDLFNQFNLFAQYSAAAYCGKNNDAPAGTNITCTGNACPEVEKADATFLYSFEDSGVGDVTGFLALDNTNKRIVLSFRGSRSIENWIGNLNFDLKEINDICSGCRGHDGFTSSWRSVADTLRQKVEAAVREHPDYRVVFTGHSLGGALATIAGADLRGNGYDIDVFSYGAPRVGNRAFAEFLTVQTGGTLYRITHTNDIVPRLPPREFGYSHSSPEYWIKSGTLVPVTRNDIVKIEGIDATGGNNQPNIPDIPAHLWYFGRIGTC

SEQ ID NO: 12236 - protein, 268 aa, Thermomyces lanuginosus
EVSQDLFNQFNLFAQYSAAAYCQKNNDAPAGTNITCTGNACPEVFKADATFLYSFEDSGVGDVTGFLALDNTNKLIILSFRGSRSIENWIGNLNFDLKEINDICSGCRGHDGFTSSWRSVADTLRQKVEDAVREHPDYRVVFTGHSLGGALATVAGADLRGNGYDIDVFSYGAPRVGNRAFAEFLTVQTGGTLYRITHTNDIVPRLPPREFGYSHSSPEYWIKSGTLVPVTRNDIVKIEGIDATGGNNQPNIPDIPAHLWYFGLIGTC

SEQ ID NO: 12237 - protein, 268 aa, Synthetic construct
EVSQDLFNQFNLFAQYSAAAYCGKNNDAPAGTNITCTGNACPEVEKADATFLYSFEDSGVGDVTGFLALDNTNKLIVLSFRGTRSIKNWIAHLKFMLKEINDICSGCRGHDGFTSSWRSVADTLRQKVEDAVREHPDYRVVFTGHSLGGALATVAGADLRGNGYDIDVFSYGAPRVGNRAFAEFLTVQTGGTLYRITHTNDIVPRLPPREFGYSHSSPEYWIKSGTLVPVTRNDIVKIEGIDATGGNNQPNIPDIPAHLWYFGLIGTC

SEQ ID NO: 12238 - protein, 268 aa, Thermomyces lanuginosus
EVSQDLFNQFNLFAQYSAAAYCGKNNDAPAGTNITCTGNACPEVEKADATFLYSFEDSGVGDVTGFLALDNTNKLIVLSFRGSRSIENWIGNLNFDLKEINDICSGCRGHDGFTSSWRSVADTLRQKVEDAVREHPDYRVVFTGHSLGGALATVAGADLRGNGYDIDVFSYGAPRVGNRAFAEFLTVQTGGTLYRITHTNDIVPRLPPREFGYSHSSPEYWIKSGTLVPVRRRDIVKIEGIDATGGNNQPNIPDIPHHLWYFGLIGTC

SEQ ID NO: 12239 - protein, 268 aa, Thermomyces lanuginosus
EVSQDLFNQFKLFAQYSAAAYCGKNNDAPAGTNITCTGNACPEVEKADATFLYSFEDSGVGDVTGFLALDNTNKLIVLSFRGSRSIENWIGNLNFDLKEINDICSGCRGHDGFTSSWRSVADTLRQKVEDAVREHPDYRVVFTGHSLGGALATVAGADLRGNGYDIDVFSYGAPRVGNRAFAEFLTVQTGGTLYRITHTNDIVPRLPPREFGYSHSSPEYWIKSGTLVPVTRQDIVKIEGIDATGGNNQPNIPDITAHLWYFGLIGTC

SEQ ID NO: 12240 - protein, 268 aa, Thermomyces lanuginosus
EVSQDLFNQFNLFAQYSAAAYCGKNNDAPAGTNITCTGNACPEVEKADATFLYSFEDSGVGDVTGFLALDNTNKLIVLSFRGSRSIENWIGNLRFDLKEINDICSGCRGHDGFTSSWRSVADTLRQKVEDAVREHPDYRVVFTGHSLGGALATVAGADLRGNGYDIDVFSYGAPRVGNRAFAEFLTVQTGGTLYRITHTNDIVPRLPPXEFGYSHSSPEYWIKSGTLVPVTRNDIVKIEGIDATGGNNHPNIPDIPAHLWYFGLIGTC

SEQ ID NO: 12241 - protein, 268 aa, Thermomyces lanuginosus
EVSQDLFNQFNLFAQYSAAAYCGKNNDAPAGTNITCTGNACPEVEKADATFLYSFEDSGVGDVTGFLALDNTNKLIVLSFRGSRSIENWIGNLNFDLKEINDICSGCRGHDGFTSSWRSVADTLRQKVEDAVREHPDYRVVFTGHSLGGALATVAGADLRGNGYDIDVFSYGAPRVGNRAFAEFLTVQTGGTLYRITHTNDIVPRLPPREFGYSHSSPEYWIKHGTLVPVRRRDIVKIEGIDATGGNNQPNIPDIPAHLWYFGLIGTC

SEQ ID NO: 12242 - protein, 268 aa, Thermomyces lanuginosus
EVSQDLFNQFNLFAQYSAAAYCGKNNDAPAGTNITCTGNACPEVEKADATFLYSFEDSGVGDVTGFLALDNTNKLIVLSFRGSRSIENWIGNLNFDLKEINDICSGCRGHDGFTSSWRSVADTLRQKVEDAVREHPDYRVVFTGHSLGGALATVAGADLRGNGYDIDVFSYGAPRVGNRAFAEFLTVQTGGTLYRITSTNDIVPRLPPREFGYSHSSPEYWIKSGTLVPVRRRDIVKIEGIDATGGNNQPNIPDIPAHLWYFGLIGTC

SEQ ID NO: 12243 - protein, 268 aa, Thermomyces lanuginosus
EVSQDLFNQFNLFAQYSAAAYCGKNNDAPAGTNITCTGNACPEVEKADATFLYSFEDSGVGDVTGFLALDNTNKLIVLSFRGSRSIENWIGNLNFDLKEINDICSGCRGHDGFTSSWRSVADTLRQKVEDAVREHPDYRVVFTGHSLGGALATVAGADLRGNSYDIDVFSYGAPRVGNRAFAEFLTVQTGGTLYRITHTNDIVPRLPPREFGYSHSSPEYWIKSGTLVPVRRRDIVKIEGIDATGGNNQPNIPDIPAHLWYFGLIGTC

SEQ ID NO: 12244 - protein, 268 aa, Thermomyces lanuginosus
EVSQDLFNQFNLFAQYSAAAYCGKNNDAPAGTNITCTGNACPEVEKADATFLYSFEDSGVGDVTGFLALDNTNKLIVLSFRGSRSIENWIGNLNFDLKEINDICSGCRGHDGFTSSWRSVADTLRQKVEDAVREHPDYRVVFTGHSLGGALATVAGADLRGNGYDIDVFSYGAPRVGNRAFAEFLTVQTGGTLYRITATNDIVPRLPPREFGYSHSSPEYWIKSGTLVPVRRRDIVKIEGIDATGGNNQPNIPDIPAHLWYFGLIGTC

SEQ ID NO: 12245 - protein, 268 aa, Thermomyces lanuginosus
EVSQDLFNQFNLFAQYSAAAYCGKNNDAPAGTNITCTGNACPEVEKADATFLYSFEDSGVGAVTGFLALDNTNKLIVLSFRGTRSIENWIANLNFDLKKINDICSGCRGHDGFTSSWRSVADTLRQKVEDAVREHPDYRVVFTGHSLGGALATVAGADLRGNGYDIDVFSYGAPRVGNRAFAEFLTVQTGGTLYRITHTNDIVPRLPPREFGYSHSSPEYWIKSGTLVPVRRRDIVKIEGIDATGGNNRPNIPDIPAHLWYFGLIGTC

SEQ ID NO: 12246 - protein, 268 aa, Thermomyces lanuginosus
EVSQDLFNQFNLFAQYSAAAYCGKNNDAPAGTNITCTGNACPEVEKADATFLYSFEDMGVGDVTGFLALDNTNKLIVLSFRGSRSIENWIGNLNFDLKEINDICSGCRGHDGFTSSWRSVADTLRQKVEDAVREHPDYRVVFTGHSLGGALATVAGADLRGNPYDIDVFSYGAPRVGNRAFAEFLTVQTGGTLYRITHTNDIVPRLPPREFGYSHSSPEYWIKSGTLVPVTRQDIVKIEGIDATGGNNQPNIPDIPAHLWYFGRIGTC

SEQ ID NO: 12247 - protein, 268 aa, Thermomyces lanuginosus
EVSQDLFNQFNLFAQYSAAAYCGKNNDAPAGTNITCTGNACPEVEKADATFLYSFEDSGVGDVTGFLALDNTNKLIVLSFRGSRSIENWIGNLNFDLKEINDICSGCRGHDGFTSSWRSVADTLRQKVEDAVREHPDYRVVFTGHSLGGALATVAGADLRGNGYDIDVFSYGAPRVGNRAFAEFLTVQTGGTLYRITHTNDIVPRLPPREFGYSHSSPEYWIKSGTLVPRRRRDIVKIEGIDATGGNNQPNIPDIPAHLWYFGLIGTC

SEQ ID NO: 12248 - protein, 268 aa, Thermomyces lanuginosus
EVSQDLFNQFNLFAQYSAAAYCGKNNDAPAGTNITCTGNACPEVEKADATFLYSFEDSGVGDVTGFLALDNTNKLIVLSFRGSRSIENWIGNLRFDLKEINDICSGCRGHDGFTSSWRSVADTLRQKVEDAVREHPDYRVVFTGHSLGGALATVAGADLRGNGYDIDVFSYGAPRVGNRAFAEFLTVQTGGTLYRITHTNDIVPRLPPXEFGYSHSSPEYWIKSGTLVPVTRNDIVKIEGIDATGGNNKPNIPDIPAHLWYFGLIGTC

SEQ ID NO: 12249 - protein, 268 aa, Thermomyces lanuginosus
EVSQDLFNQFNLFAQYSAAAYCGKNNDAPAGTNITCTGNACPEVEKADATFLYSFEDSGVGDVTGFLALDNTNKLIVLSFRGSRSIENWIGNLNFDLKEINDICSGCRGHDGFTSSWRSVADTLRQKVEDAVREHPDYRVVFTGHSLGGALATVAGADLRGNGYDIDVFSYGAPRVGNRAFAEFLTVQTGGTLYRITHTNDIVPRLPPREFGYSHSSPEYWIKSGTLVPVRRRDIVKIEGIDATGGNNQPNIPDIAAHLWYFGLIGTC

SEQ ID NO: 12250 - protein, 268 aa, Thermomyces lanuginosus
EVSQDLFNQFNLFAQYSAAAYCGKNNDAPAGTNITCTGNACPEVEKADATFLYSFEDSGVGDVTGFLALDNTNKLIVLSFRGSRSIENWIGNLNFDLKEINDICSGCRGHDGFTSSWRSVADTLRQKVEDAVREHPDYRVVFTGHSLGGALATVAGADLRGNGYDIDVFSYGAPRVGNRAFAEFLTVQTGGTLYRITHTNDIVPRLPPREFGYSHSSPEYWIKSGTLVPVRRRDIVKIEGIDATGGNNQPNIPDIPAHLHYFGLIGTC

SEQ ID NO: 12251 - protein, 268 aa, Thermomyces lanuginosus
EVSQDLFNQFNLFAQYSAAAYCGKNNDAPAGTNITCTGNACPEVEKADATFLYSFEDSGVGDVTGFLALDNTNKLIVLSFRGSRSIENWIGNLNFDLKEINDICSGCRGHDGFTSSWRSVADTLRQKVEDAVREHPDYRVVFTGHSLGGALATVAGADLRGNGYDIDVFSYGAPRVGNRAFAEFLTVQTGGTLYRITITNDIVPRLPPREFGYSHSSPEYWIKSGTLVPVRRRDIVKIEGIDATGGNNQPNIPDIPAHLWYFGLIGTC

SEQ ID NO: 12252 - protein, 268 aa, Thermomyces lanuginosus
EVSQDLFNQFNLFAQYSAAAYCGKNNDAPAGTNITCTGNACPEVEKADATFLYSFEDSGVGDVTGFLALDNTNKLIVLSFRGSRSIENWIGNLNFDLKEINDICSGCRGHDGFTSSWRSVADTLRQKVEDAVREHPDYRVVFTGHSLGGALATVAGADLRGNGYDIDVFSYGAPRVGNRAFAEFLTVQTGGTLYRITHTNDIVPRLPPREFGYSHSSPEYWIKSGTLVPVRRRDIVKIEGIDATGGNNQPNIPDIPAHLQYFGLIGTC

SEQ ID NO: 12253 - protein, 268 aa, Thermomyces lanuginosus
EVSQDLFNQFNLFAQYSAAAYCGKNNDAPAGTNITCTGNACPEVEKADATFLYSFEDSGVGDVTGFLALDNTNKLIVLSFRGSRSIENWIGNLNFDLKEINDICSGCRGHDGFTSSWRSVADTLRQKVEDAVREHPDYRVVFTGHSLGGALATVAGADLRGNGYDIDVFSYGAPRVGNRAFAEFLTVQTGGTLYRITHTNDIVPRLPPREFGYSHSSPEYWIKLGTLVPVRRRDIVKIEGIDATGGNNQPNIPDIPAHLWYFGLIGTC

SEQ ID NO: 12254 - protein, 268 aa, Thermomyces lanuginosus
EVSQDLFNQFNLFAQYSAAAYCGKNNDAPAGTNITCTGNACPEVEKADATFLYSFEDSGVGDVTGFLALDNTNKLIVLSFRGSRSIENWIGNLNFDLKEINDICSGCRGHDGFTSSWRSVADTLRQKVEDAVREHPDYRVVFTGHSLGGALATVAGADLRGNGYDIDVFSYGAPRVGNRAFAEFLTVQTGGTLYRITHTNDIVPRLPPREFGYSHSSPEYWIKSGTLVPVRRRDIVKIEGIDATGGNNQPNIPDIPAHLEYFGLIGTC

SEQ ID NO: 12255 - protein, 268 aa, Thermomyces lanuginosus
EVSQDLFNQFNLFAQYSAAAYCGKNNDAPAGTNITCTGNACPEVEKADATFLYSFENSGVGDVTGFLALDNTNKLIVLSFRGSRSIENWIGNLNFDLKEINDICSGCRGHDGFTSSWRSVADTLRQKVEDAVREHPDYRVVFTGHSLGGALATVAGADLRGNGYDIDVFSYGAPRVGNRAFAEFLTVQTGGTLYRITHTNDIVPRLPPREFGYSHSSPEYWIKSGTLVPVRRRDIVKIEGIDATGGNNQPNIPDIPAHLWYFGLIGTC

SEQ ID NO: 12256 - protein, 268 aa, Thermomyces lanuginosus
EVSQDLFNQFNLFAQYSAAAYCGKNNDAPAGTNITCTGNACPEVEKADATFLYSFEDSGVGDVTGFLALDNTNKLIVLSFRGSRSIENWIGNLNFDLKEINDICSGCRGHDGFTSSWRSVADTLRQKVEDAVREHPDYRVVFTGHSLGGALATVAGADLRGNGYDIDVFSYGAPRVGNRAFAEFLTVQTGGTLYRITHTNDIVPRLPPREFGYSHSSPEYWIKCGTLVPVRRRDIVKIEGIDATGGNNQPNIPDIPAHLWYFGLIGTC

SEQ ID NO: 12257 - protein, 268 aa, Thermomyces lanuginosus
EVSQDLFNQFNLFAQYSAAAYCGKNNDAPAGTNITCTGNACPEVEKADATYLYSFEDSGVGDVTGFLALDNTNKLIVLSFRGSRSIENWIGNLNFDLKEINDICSGCRGHDGFTSSWRSVADTLRQKVEDAVREHPDYRVVFTGHSLGGALATVAGADLRGNGYDIDVFSYGAPRVGNRAFAEFLTVQTGGTLYRITHTNDIVPRLPPREFGYSHSSPEYWIKSGTLVPVRRRDIVKIEGIDATGGNNQPNIPDIPAHLWYFGLIGTC

SEQ ID NO: 12258 - protein, 268 aa, Thermomyces lanuginosus
EVSQDLFNQFNLFAQYSAAAYCGKNNDAPAGTNITCTGNACPEVEKADATFLYSFEDSGVGDVTGFLALDNTNKLIVLSFRGSRSIENWIGNLNFDLKEINDICSGCRGHDGFTSSWRSVADTLRQKVEDAVREHPDYRVVFTGHSLGGALATVAGADLRGNGYDIDVFSYGAPRVGNRAFAEFLTVQTGGTLYRITHTNDIVPRLPPREFGYSHSSPEYWIKSGTLVPVRRGGIVKIEGIDATGGNNQPNIPDIPAHLWYFGLIGTC

SEQ ID NO: 12259 - protein, 268 aa, Thermomyces lanuginosus
EVSQDLFNQFNLFAQYSAAAYCGKNNDAPAGTNITCTGNACPEVEKADATFLYSFEDSGVGDVTGFLALDNTNKLIVLSFRGSRSIENWIGNLNFDLKEINDICSGCRGHDGFTSSWRSVADTLRQKVEDAVREHPDYRVVFTGHSLGGALATVAGADLRGNGYDIDVFSYGAPRVGNRAFAEFLTVQTGGTLYRITHTNDLVPRLPPREFGYSHSSPEYWIKSGTLVPVRRRDIVKIEGIDATGGNNQPNIPDIPAHLWYFGLIGTC

SEQ ID NO: 12260 - protein, 268 aa, Thermomyces lanuginosus
EVSQDLFNQFNLFAQYSAAAYCGKNNDAPAGTNITCTGNACPEVEKADATFLYSFEDSGVGDVTGFLALDNTNKLIVLSFRGSRSIENWIGNLNFDLKEINDICSGCRGHDGFTSSWRSVADTLRQKVEDAVREHPDYRVVFTGHSLGGALATVAGADLRGNGYDIDVFSYGAPRVGNRAFAEFLTVQTGGTLYRITHTNDIVPRLPPREFGYSHSSPEYWIKSGTLVPVRRRDIVKIEGIDATGGNNQPNIPDTPAHLWYFGLIGTC

SEQ ID NO: 12261 - protein, 268 aa, Thermomyces lanuginosus
EVSQDLFNQFNLFAQYSAAAYCGKNNDAPAGTNITCTGNACPEVEKADATFLYSFEDSGVGDVTGFLALDNTNKLIVLSFRGSADIANWIANLNFGLEDINDICSGCRGHDGFTSSWRSVADTLRQKVEDAVREHPDYRVVFTGHSLGGALATVAGADLRGNGYDIDVFSYGAPRVGNRAFAEFLTVQTGGTLYRITHTNDIVPRLPPREFGYSHSSPEYWIKSGTLVPVTRNDIVKIEGIDATGGNNQPNIPDIPAHLWYFGLIGTC

SEQ ID NO: 12262 - protein, 268 aa, Thermomyces lanuginosus
EVSQDLFNQFNLFAQYSAAAYCGKNNSAPAGTNITCTGNACPEVEKADATFLYSFEDSGVGDVTGFLALDNTNKQIVLSFRGSRSIENWIANLNFDLKEINDICSGCRGHDGFTSSWRSVADTLRQKVEDAVREHPDYRVVFTGHSLGGALATVAGADLRGNGYDIDVFSYGAPRVGNRAFAEFLTTQTGGTLYRITHTNDIVPRLPPREFGYSHSSPEYWIKSGTLVPVTRNDIVKIEGIDATGGNNQPNQPDIPAHLWYFGRIGTC

SEQ ID NO: 12263 - protein, 268 aa, Thermomyces lanuginosus
EVSQDLFNQFNLFAQYSKAAYCGKNNDAPAGTNITCTGNACPEVEKADATFLYSFEDSGVGDVTGFLALDNTRKDIVLSFRGSRSIENWIGNLNFDLKEINDICSGCRGHDGFTSSWRSVADTLRQKVEDAVREHPDYRVVFTGHSLGGALATVAGADLRGNGYDIDVFSYGAPRVGNRAFAEFLTVQTGGTLYRITHTNDIVPRLPPREFGYSHSSPEYWIKSGTLVPVTRNDIVKIEGIDATGGNNQPNIPDIPAHLWYFGLIGTC

SEQ ID NO: 12264 - protein, 268 aa, Thermomyces lanuginosus
EVSQDLFNQFNLFAQYSAAAYCGKNNDAPAGTDITCTGNACPEVFKADATFLYSFEDSGVGDVTGFLALDNTRKLIVLSFRGSRSIENWIGNLNFDLKEINDICSGCRGHDGFTSSWRSVADTLRQKVEDAVREHPDYRVVFTGHSLGGALATVAGADLRGNGYDIDVFSYGAPRVGNRAFAEFLTVQTGGTLYRITHTNDIVPRLPPREFGYSHSSPEYWIKSGTLVPVTRNDIVKIEGIDATGGNNQPNIPDIPAHLWYFGLIGTC

SEQ ID NO: 12265 - protein, 268 aa, Thermomyces lanuginosus
EVSQDLFNQFNLFAQYSAAAYCGKNNDAPAGINITCTGNACPEVEKADATFLYSFEDSGVGDVTGFLALDNTNKLIVLSFRGSRSIENWIVNLNFDLKEINDICSGCRGHDGFTSSWRSVADTLRQKVEDAVREHPDYRVVFTGHSLGGALATVAGADLRGNGYDIDVFSYGAPRVGNRAFAEFLTVQTGGTLYRITHTNDIVPRLPPREFGYSHSSPEYWIKSGTLVPVRRRDIVKIEGIDATGGNNQPNIPDIPAHLWYFGLIGTC

SEQ ID NO: 12266 - protein, 268 aa, Thermomyces lanuginosus
EVSQDLFNQFNLFAQYSAAAYCGKNNDAPAGTNITCTGNACPEVEKADATFLYSFEDSGVGDVTGFLALDNTNKLIVLSFRGSRSIENWIQNLNFDLKEINDICSGCRGHDGFTSSWRSVADTLRQKVEAAVREHPDYRVVFTGHSLGGALATVAGADLRGNGYDIDVFSYGAPRVGNRAFAEFLTHQTGGTLYRITHTNDIVPRLPPREFGYSHSSPEYWIKSGTLVPVTRNDIVKIEGIDATGGNNQPNQPDIPAHLWYFGRIGTC

SEQ ID NO: 12267 - protein, 268 aa, Thermomyces lanuginosus
EVSQDLFNQFNLFAQYSAAAYCGKNNEAPAGTNITCTGNACPEVEKADATFLYSFEDMGVGDVTGFLALDNTNKLIVLSFRGSRSIENWIGNLNFDLKEINDICSGCRGHDGFTSSWRSVADTLRQKVEDAVREHPDYRVVFTGHSLGGALATVAGADLRGNPYDIDVFSYGAPRVGNRAFAEFLTVQTGGTLYRITHTNDIVPRLPPREFGYSHSSPEYWIKSGTLVPVTRNDIVKIEGIDATGGNNQPNIPDIPAHLWYFGRIGTC

SEQ ID NO: 12268 - protein, 268 aa, Thermomyces lanuginosus
EVSQDLFNQFNLFAQYSAAAYCQKNNDAPAGTNITCTGNACPEVEKADATFLYSFEDSGVGDVTGFLALDNTNKQIVLSFRGSRSITNWIGNLNFDLKEINDICSGCRGHDGFTSSWRSVADTLRQKVEDAVREHPDYRVVFTGHSLGGALATVAGADLRGNGYDIDVFSYGAPRVGNRAFAEFLTVQTGGTLYRITHTNDIVPRLPPREFGYSHSSPEYWIKSGTLVPVTRNDIVKIEGIDATGGNNQPNIPDIPAHLWYFGRIGTC

SEQ ID NO: 12269 - protein, 268 aa, Thermomyces lanuginosus
EVSQDLFNQFNLFAQYSAAAYCGKNNDAPAGTNITCTGNACPEVEKADATFLYSFEDSGVGDVTGFLALDNTNKLIVLSFRGSRSIENWIGNLNFDLKEINDICSGCRGHDGFTSSWRSVADTLRQKVEDAVREHPDYRVVFTGHSLGGALATVAGADLRGNGYDIDVFSYGAPRVGNRAFAEFLTVQTGGTLYRITHTNDIVPRLPPREFGYSHSSPEYWIKSGTLVPVRRRDIVKIEGIDATGGNNQPNIPDIPAHLDYFGLIGTC

SEQ ID NO: 12270 - protein, 268 aa, Thermomyces lanuginosus
EVSQDLFNQFNLFAQYSAAAYCGKNNDAPAGTNITCTGNACPEVEKADATFLYSFEDSGVGDVTGFLALDNTNKLIVLSFRGSRSIENWIGNLNFDLKEINDICSGCRGHDGFTSSWRSVADTLRQKVEDAVREHPDYRVVFTGHSLGGALATVAGADLRGNGYDIDVFSYGAPRVGNRAFAEFLTVQTGGTLYRITHTNDIVPRLPPREFGYSHSSPEYWIKSGTLVPVRRRDIVKIEGIDATGGNNQPNIPDIPAHLYYFGLIGTC

SEQ ID NO: 12271 - protein, 268 aa, Thermomyces lanuginosus
EVSQDLFNQFNLFAQYSAAAYCGKNNSAPAGTNITCTGNACPEVEKADATFLYSFEDSGVGDVTGFLALDNTRKDIVLSFRGSRSIENWIGNLNFDLKEINDICSGCRGHDGFTSSWRSVADTLRQKVEDAVREHPDYRVVFTGHSLGGALATVAGADLRGNGYDIDVFSYGAPRVGNRAFAEFLTVQTGGTLYRITHTNDIVPRLPPREFGYSHSSPEYWIKSGTLVPVTRNDIVKIEGIDATGGNNQPNIPDIPAHLWYFGLIGTC

SEQ ID NO: 12272 - protein, 268 aa, Thermomyces lanuginosus
EVSQDLFNQFNLFAQYSAAAYCGKNNDAPAGTDITCTGNACPEVEKADATFLYSFEDSGVGDVTGFLALDNTRKLIVLSFRGSRSIENWIGNLNFDLKEINDICSGCRGHDGFTSSWRSVADTLRQKVEDAVREHPDYRVVFTGHSLGGALATVAGADLRGNGYDIDVFSYGAPRVGNRAFAEFLTVQDGGTLYRITHTNDIVPRLPPREFGYSHSSPEYWIKSGTLVPVTRNDIVKIEGIDATGGNNQPNIPDIPAHLWYFGLIGTC

SEQ ID NO: 12273 - protein, 268 aa, Thermomyces lanuginosus
EVSQDLFNQFNLFAQYSKAAYCQKNNDAPAGTNITCTGNACPEVEKADATFLYSFEDSGVGDVTGFLALDNTNKQIVLSFRGSRSIENWIGNLNFDLKEINDICSGCRGHDGFTSSWRSVADTLRQKVEDAVREHPDYRVVFTGHSLGGALATVAGADLRGNGYDIDVFSYGAPRVGNRAFAEFLTVQTGGTLYRITHTNDIVPRLPPREFGYSHSSPEYWIKSGTLVPVTRNDIVKIEGIDATGGNNQPNIPDIPAHLWYFGLIGTC

SEQ ID NO: 12274 - protein, 268 aa, Thermomyces lanuginosus
EVSQDLFNQFNLFAQYSAAAYCGKNNDAPAGTNITCTGNACPEVEKADATFLYSFEDSGVGDVTGFLALDNTNKLIVLSFRGSRSIENWIGNLNFDLKEINDICSGCRGHDGFTSSWRSVADTLRQKVEDAVREHPDYRVVFVGHSLGGALATVAGADLRGNGYDIDVFSYGAPRVGNRAFAEFLTVQTGGTLYRITHTNDIVPRLPPREFGYSHSSPEYWIKSGTLVPVRRRDIVKIEGIDATGGNNQPNIPDIPAHLWYFGLIGTC

SEQ ID NO: 12275 - protein, 268 aa, Synthetic construct
EVSQDLFNQFNLFAQYSAAAYCGKNNDAPAGTNITCTGNACPEVEKADATFLYSFEDSGVGDVTGFLALDNTNKLIVLSFRGTRSIKNWIGNLNFDLKEINDICSGCRGHDGFTSSWRSVADTLRQKVEDAVREHPDYRVVFTGHSLGGALATVAGADLRGNGYDIDVFSYGAPRVGNRAFAEFLTVQTGGTLYRITHTNDIVPRLPPREFGYSHSSPEYWIKSGTLVPVTRNDIVKIEGIDATGGNNRPNIPDIPAHLWYFGLIGTC

SEQ ID NO: 12276 - protein, 268 aa, Thermomyces lanuginosus
EVSDDLFNQFNLFAQYSAAAYCGKNNDAPAGTNITCTGNACPEVEKADATFLYSFEDMGVGDVTGFLALDNTNKLIVLSFRGSRSIENWIGNLNFDLKEINDICSGCRGHDGFTSSWRSVADTLRQKVEDAVREHPDYRVVFTGHSLGGALATVAGADLRGNGYDIDVFSYGAPRVGNRAFAEFLTVQTGGTLYRITHTNDIVPRLPPREFGYSHSSPEYWIKSGTLVPVTRQDIVKIEGIDATGGNNQPNIPDIPAHLWYFGLIGTC

SEQ ID NO: 12277 - protein, 268 aa, Thermomyces lanuginosus
EVSQDLFNQFNLFAQYSAAAYCGKNNDAPAGTNITCTGNACPEVEKADATFLYSFEDSGVGDVTGFLALDNTNKLIVLSFRGSRSIENWIGNLNFDLKEINDICSGCRGHDGFTSSWRSVADTLRQKVEDAVREHPDYRVVFTGHSLGGALATVAGADLRGNGYDIDVFSYGAPRVGNRAFAEFLTVQTGGTLYRITHTNDIVPRLPPREFGYSHSSPEYWIKSGTLVPVRRRDIVKIEGIDATGGNNQPNIPDIPIHLWYFGLIGTC

SEQ ID NO: 12278 - protein, 268 aa, Thermomyces lanuginosus
EVSQDLFNQFNLFAQYSAAAYCKKNNDAPAGTNITCTGNACPEVEKADATFLYSFEDSGVGDVTGFLALDNTNKRIVLSFRGSRSIENWIGNLNFDLKEINDICSGCRGHDGFTSSWRSVADTLRQKVEDAVREHPDYRVVFTGHSLGGALATVAGADLRGNGYDIDVFSYGAPRVGNRAFAEFLTNQTGGTLYRITHTNDIVPRLPPREFGYSHSSPEYWIKSGTLVPVTRNDIVKIEGIDATGGNNQPNIPDIPAHLWYFGRIGTC

SEQ ID NO: 12279 - protein, 268 aa, Thermomyces lanuginosus
EVSQDLFNQFNLFAQYSAAAYCGKNNDAPAGTNITCTGNACPVVEKADATFLYSFEDSGVGDVTGFLALDNTNKLIVLSFRGSRSIENWIRNLNFDLKEINDICSGCRGHDGFTSSWRSVADTLRQKVEDAVREHPDYRVVFTGHSLGGALATVAGADLRGNGYDIDVFSYGAPRVGNRAFAEFLTVQTGGTLYRITHTNDIVPRLPPREFGYSHSSPEYWIKSGTLVPVRRRDIVKIEGIDATGGNNQPNIPDIPAHLWYFGLIGTC

SEQ ID NO: 12280 - protein, 268 aa, Thermomyces lanuginosus
EVSQDLFNQFNLFAQYSAAAYCGKNNDAPAGTNITCTGNACPEVEKADATFLYSFEDSGVGDVTGFLALDNTNKLIVLSFRGSRSIENWIGNLNYDLKEINDICSGCRGHDGFTSSWRSVADTLRQKVEDAVREHPDYRVVFTGHSLGGALATVAGADLRGNGYDIDVFSYGAPRVGNRAFAEFLTVQTGGTLYRITHTNDIVPRLPPREEGYSHSSPEYWIKSGTLVPVTRNDIVKIEGIDATGGNNQPNIPDNPAHLWYFGLIGTC

SEQ ID NO: 12281 - protein, 268 aa, Thermomyces lanuginosus
EVSQDLFNQFNLFAQYSAAAYCGKNNDAPAGTNITCTGNACPEVEKADATFLYSFEDSGVGDVTGFLALDNTNKLIVLSFRGSRSIENWIGNLNFDLKEINDICSGCRGHDGFTSSWRSVADTLRQKVEAAVREHPDYRVVFTGHSLGGALATIAWADLRGNGYDIDVFSYGAPRVGNRAFAEFLTVQTGGTLYRITHTNDIVPRLPPREFGYSHSSPEYWIKSGTLVPVTRNDIVKIEGIDATGGNNQPNIPDIPAHLWYFGLIGTC

SEQ ID NO: 12282 - protein, 268 aa, Thermomyces lanuginosus
EVSQDLFNQFNLFAQYSAAAYCGKNNDAPAGTNITCTGNACPEVEKADATFLYSFEDSGVGDVTGFLALDNTNKLIVLSFRGSRSIENWIGNLNFVLKEINDICSGCRGHAGFTSSWRSVADTLRQKVEDAVREHPDYRVVFTGHSLGGALATVAGADLRGNGYDIDVFSYGAPRVGNRAFAEFLTVQTGGTLYRITHTNDIVPRLPPREFGYSHSSPEYWIKSGTLVPVRRRDIVKIEGIDATGGNNQPNIPDIPAHLWYFGLIGTC

SEQ ID NO: 12283 - protein, 268 aa, Thermomyces lanuginosus
EVSQDLFNQFNLFAQYSAAAYCGKNNDAEAGTNITCTGNACPEVFKADATFLYSFEDSGVGDVTGFLALDNTNKDIVLSFRGSRSIENWIGNLNFDLKEINDICSGCRGHDGFTSSWRSVADTLRQKVEDAVREHPDYRVVFTGHSLGGALATVAGADLRGNGYDIDVFSYGAPRVGNRAFAEFLTVQTGGTLYRITHTNDIVPRLPPREFGYSHSSPEYWIKSGTLVPVTRNDIVKIEGIDATGGNNQPNIPDIPAHLWYFGLIGTC

SEQ ID NO: 12284 - protein, 268 aa, Thermomyces lanuginosus
EVSQDLFNQFNLFAQYSAAAYCGKNNDAPAGTNITCTGNACPEVEKADATFLYSFEDSGVGDVTGFLALDNTNKLIVLSFRGSRSIENWIGNLNFDLKEINDICSGCRGHDGFTSSWRSVADTLRQKVEDAVREHPDYRVVFSGHSLGGALATVAGADLRGNGYDIDVFSYGAPRVGNRAFAEFLTVQTGGTLYRITHTNDIVPRLPPREFGYSHSSPEYWIKSGTLVPVRRRDIVKIEGIDATGGNNQPNIPDIPAHLWYFGLIGTC

SEQ ID NO: 12285 - protein, 268 aa, Thermomyces lanuginosus
EVSQDLFNQFNLFAQYSAAAYCGKNNDAPAGTNITCTGNACPEVEKADATFLYSFEDSGVGDVTGFLALDNTNKLIVLSFRGSRSIENWIGNLNFDLKEINDICSGCRGHDGFTSSWRSVADTLRQKVEDAVREHPDYRVVFTGHSLGGALATVAGADLRGNGYDIDVFSYGAPRVGNRAFAEFLTVQTGGTLYRITHTNDIVPRLPPREFGYSHSSPEYWIKSGTLVPVRRRDIVKIEGIDATGGNNQPNIPDIPAHLNYFGLIGTC

SEQ ID NO: 12286 - protein, 268 aa, Thermomyces lanuginosus
EVSQDLRNQFNLFAQYSAAAYCGKNNDAPAGTNITCTGNACPEVEKADATFLYSFEDSGVGDVTGFLALDNTNKLIVLSFRGSRSIENWIGNLNFDLKEINDICSGCRGHDGFTSSWRSVADTLRQKVEDAVREHPDYRVVFTGHSLGGALATVAGADLRGNGYDIDVFSYGAPRVGNRAFAEFLTVQTGGTLYRITHTNDIVPRLPPREFGYSHSSPEYWIKSGTLVPVRRRDIVKIEGIDATGGNNQPNIPDIPAHLWYFGLIGTC

SEQ ID NO: 12287 - protein, 268 aa, Thermomyces lanuginosus
EVSQDLFNQFNLFAQYSAAAYCGKNNDAPAGTNITCTGNACPEVEKADATFLYSFEDSGVGDVTGFLALDNTNKLIVLSFRGTRSVENWXGNLNFDLKEINDICSGCRGHDGFTSSWRSVADTLRQKVEDAVREHPDYRVVFTGHSLGGALATVAGADLRGNGYDIDVFSYGAPRVGNRAFAEFLTVQTGGTLYRITHTNDIVPRLPPREFGYSHSSPEYWIKSGTLVPVTRNDIVKIEGIDATGGNNQPNIPDIPAHLWYFGLIGTC

SEQ ID NO: 12288 - protein, 268 aa, Thermomyces lanuginosus
EVSQDLFNQFNLFAQYSAAAYCKKNNDAPAGTNITCTGNACPEVEKADATFLYSFEDSGVGDVTGFLALDNTNKRIVLSFRGSRSIENWIGNLNFDLKEINDICSGCRGHDGFTSSWRSVADTLRQKVEAAVREHPDYRVVFTGHSLGGALATVAGADLRGNGYDIDVFSYGAPRVGNRAFAEFLTVQTGGTLYRITHTNDIVPRLPPREFGYSHSSPEYWIKSGTLVPVTRNDIVKIEGIDATGGNNQPNIPDIPAHLWYFGRIGTC

SEQ ID NO: 12289 - protein, 268 aa, Thermomyces lanuginosus
EVSQDLFNQFNLFAQYSAAAYCQKNNDAPAGTNITCTGNACPEVEKADATFLYSFEDSGVGDVTGFLALDNTNKQIILSFRGSRSIENWIGNLNFDLKEINDICSGCRGHDGFTSSWRSVADTLRQKVEDAVREHPDYRVVFTGHSLGGALATVAGADLRGNGYDIDVFSYGAPRVGNRAFAEFLTVQTGGTLYRITHTNDIVPRLPPREFGYSHSSPEYWIKSGTLVPVTRNDIVKIEGIDATGGNNQPNIPDIPAHLWYFGLIGTC

SEQ ID NO: 12290 - protein, 268 aa, Thermomyces lanuginosus
EVSQDLFNQFNLFAQYSAAAYCGKNNDAPAGTNITCTGNACPEVEKADATTLYSFEDSGVGDVTGFLALDNTNKGIVLSFRGSRSIENWIGNLNFDLKEINDICSGCRGHDGFTSSWRSVADTLRQKVEDAVREHPDYRVVFTGHSLGGALATVAGADLRGNGYDIDVFSYGAPRVGNRAFAEFLTVQTGGTLYRITHTNDIVPRLPPREFGYSHSSPEYWIKSGTLVPVTRNDIVKIEGIDATGGNNQPNQPDIPAHLWYFGRIGTC

SEQ ID NO: 12291 - protein, 268 aa, Thermomyces lanuginosus
EVSQDLFNQFNLFAQYSAAAYCGKNNDAPAGTNITCTGNACPEVEKADATFLYSFEDSGGGEVTGFLALDNTNKLIVLSFRGSRSIENWIANLNFDLKKINDICSGCRGHDGFTSSWRSVADTLRQKVEDAVREHPDYRVVFTGHSLGGALATVAGADLRGNGYDIDVFSYGAPRVGNRAFAEFLTVQTGGTLYRITHTNDIVPRLPPREFGYSHSSPEYWIKSGTLVPVRRRDIVKIEGIDATGGNNRPNIPDIPAHLWYFGLIGTC

SEQ ID NO: 12292 - protein, 268 aa, Thermomyces lanuginosus
EVSQDLFNQFNLFAQYSAAAYCGKNNDAPAGTNITCTGNACPEVEKADATFLYSFKDSGVGDVTGFLALDNTNKLIVLSFRGSRSIENWIGNLNFDLKEINDICSGCRGHDGFTSSWRSVADTLRQKVEAAVREHPDYRVVFTGHSLGGALATVAGADLRGNGYDIDVFSYGAPRVGNRAFAEFLTNQTGGTLYRITHTNDIVPRLPPREFGYSHSSPEYWIKSGTLVPVTRNDIVKIEGIDATGGNNQPNIPDIPAHLWYFGRIGTC

SEQ ID NO: 12293 - protein, 268 aa, Thermomyces lanuginosus
EVSQDLFNQFNLFAQYSAAAYCGKNNDAPAGTQITCTGNACPEVEKADATFLYSFEDSGVGDVTGFLALDNTNKLIVLSFRGSRSIENWISNLNFDLKEINDICSGCRGHDGFTSSWRSVADTLRQKVEDAVREHPDYRVVFTGHSLGGALATVAGADLRGNGYDIDVFSYGAPRVGNRAFAEFLTVQTGGTLYRITHTNDIVPRLPPREFGYSHSSPEYWIKSGTLVPVRRRDIVKIEGIDATGGNNQPNIPDIPAHLWYFGLIGTC

SEQ ID NO: 12294 - protein, 268 aa, Thermomyces lanuginosus
EVSQDLFNQFNLFAQYSAAAYCGKNNDAPAGTNITCTGNACPEVEKADATFLYSFEDSGVGDVTGFLALDNTNKLIVLSFRGSRSIENWIGNLNFDLKEINDICSGCRGHDGFTSSWRSVADTLRQKVEDAVREHPDYRVVFTGHSLGGALATVAGADLRGNGYDIDVFSYGAPRVGNRAFAEFLTVQTGGTLYRITHTNDIVPRLPPREFGYSHSSPEYWIKSGTLVPVRRRDIVKIEGIDATGGNNQPNIPDNPAHLWYFGLIGTC

SEQ ID NO: 12295 - protein, 268 aa, Thermomyces lanuginosus
EVSQDLFNQFNLFAQYSAAAYCGKNNNAPAGTNITCTGNACPEVEKADATFLYSFEDMGVGDVTGFLALDNTNKLIVLSFRGSRSIENWIGNLNFDLKEINDICSGCRGHDGFTSSWRSVADTLRQKVEDAVREHPDYRVVFTGHSLGGALATVAGADLRGNGYDIDVFSYGAPRVGNRAFAEFLTVQTGGTLYRITHTNDIVPRLPPREFGYSHSSPEYWIKSGTLVPVTRNDIVKIEGIDATGGNNQPNIPDITAHLWYFGLIGTC

SEQ ID NO: 12296 - protein, 268 aa, Thermomyces lanuginosus
EVSQDLFNQFNLFAQYSAAAYCGKNNDAPAGTNITCTGNACPEVEKADATFLYSFEDSGVGDVTGFLALDNTNKLIVLSFRGSRSIENWIGNLNFDLKEINDICSGCRGHDGFTSSWRSVADTLRQKVEDAVREHPDYRVVFTGHSLGGALATVAGADLRGNGYDIDVFSYGAPRVGNRAFAEFLTVQTGGTLYRITGTNDIVPRLPPREFGYSHSSPEYWIKSGTLVPVRRRDIVKIEGIDATGGNNQPNIPDIPAHLWYFGLIGTC

SEQ ID NO: 12297 - protein, 268 aa, Thermomyces lanuginosus
EVSQDLFNQFNLFAQYSAAAYCGKNNDAPAGTNITCTGNACPEVFKADATFLYSFEDSGVGDVTGFLALDNTRKDIVLSFRGSRSIENWIGNLNFDLKEINDICSGCRGHDGFTSSWRSVADTLRQKVEDAVREHPDYRVVFTGHSLGGALATVAGADLRGNGYDIDVFSYGAPRVGNRAFAEFLTVQTGGTLYRITHTNDIVPRLPPREFGYSHSSPEYWIKSGTLVPVTRNDIVKIEGIDATGGNNQPNIPDIPAHLWYFGLIGTC

SEQ ID NO: 12298 - protein, 268 aa, Thermomyces lanuginosus
EVSQDLFNFFNLFAQYSAAAYCGKNNDAPAGTNITCTGNACPEVEKADATFLYSFEDSGVGDVTGFLALDNTNKLIVLSFRGSRSIENWIGNLNFDLKEINDICSGCRGHDGFTSSWRSVADTLRQKVEDAVREHPDYRVVFTGHSLGGALATVAGADLRGNGYDIDVFSYGAPRVGNRAFAEFLTVQTGGTLYRITHTNDIVPRLPPREFGYSHSSPEYWIKSGTLVPVTRQDIVKIEGIDATGGNNQPNIPDITAHLWYFGLIGTC

SEQ ID NO: 12299 - protein, 268 aa, Thermomyces lanuginosus
EVSQDLFNQFNLFAQYSAAAYCGKNNXAPAGTNITCTGNACPEVEKADATFLYSFEDXGXGDVTGFLALDNTNKLIVLSFRGSRSIENWIGNLNFDLKEINDICSGCRGHDGFTSSWRSVADTLRQKVEDAVREHPDYRVVFTGHSLGGALATVAGADLRGNGYDIDVFSYGAPRVGNRAFAEFLTVQTGGTLYRITHTNDIVPRLPPREFGYSHSSPEYWIKSGTLVPVTRNDIVKIEGIDATGGNNQPNIPDIPAHLWYFGLIGTC

SEQ ID NO: 12300 - protein, 268 aa, Thermomyces lanuginosus
EVSQDLFNQFNLFAQYSAAAYCKKNNDAPAGTNITCTGNACPEVEKADATFLYSFEDSGVGDVTGFLALDNTNKLIVLSFRGSRSIENWIGNLNFDLKEINDICSGCRGHAGFTSSWRSVADTLRQKVEAAVREHPDYRVVFTGHSLGGALATVAGADLRGNGYDIDVFSYGAPRVGNRAFAEFLTVQTGGTLYRITHTNDIVPRLPPREFGYSHSSPEYWIKSGTLVPVTRNDIVKIEGIDATGGNNQPNIPDIPAHLWYFGRIGTC

SEQ ID NO: 12301 - protein, 268 aa, Thermomyces lanuginosus
EVSQDLFNQFNLFAQYSAAAYCGKNNDAPAGTQITCTGNACPEVEKADATFLYSFEDSGVGDVTGFLALDNTNKLIVLSFRGSRSIENWIGNLNFRLKEINDICSGCRGHDGFTSSWRSVADTLRQKVEDAVREHPDYRVVFTGHSLGGALATVAGADLRGNGYDIDVFSYGAPRVGNRAFAEFLTVQTGGTLYRITHTNDIVPRLPPREFGYSHSSPEYWIKSGTLVPVRRRDIVKIEGIDATGGNNQPNIPDIPAHLWYFGLIGTC

SEQ ID NO: 12302 - protein, 268 aa, Thermomyces lanuginosus
EVSQDLFNQFNLFAQYSAAAYCGKNNEAPAGTNITCTGNACPEVEKADATFLYSFEDSGVGDVTGFLALDNTNKLIVLSFRGSRSIENWIGNLNFDLKEINDICSGCRGHDGFTSSWRSVADTLRQKVEDAVREHPQYRVVFTGHSLGGALATVAGADLRGNGYDIDVFSYGAPRVGNRAFAEFLTVQTGGTLYRITHTNDIVPRLPPREFGYSHSSPEYWIKSGTMVPVTRNDIVKIEGIDATGGNNQPNIPDIPAHLWYFGRIGTC

SEQ ID NO: 12303 - protein, 268 aa, Thermomyces lanuginosus
EVSQDLFNQFNLFAQYSAAAYCGKNNDAPAGTQITCTGNACPEVEKADATFLYSFEDSGVGDVTGFLALDNTNKLIVLSFRGSRSIENWIWNLNFDLKEINDICSGCRGHDGFTSSWRSVADTLRQKVEDAVREHPDYRVVFTGHSLGGALATVAGADLRGNGYDIDVFSYGAPRVGNRAFAEFLTVQTGGTLYRITHTNDIVPRLPPREFGYSHSSPEYWIKSGTLVPVRRRDIVKIEGIDATGGNNQPNIPDIPAHLWYFGLIGTC

SEQ ID NO: 12304 - protein, 268 aa, Thermomyces lanuginosus
EVSQDLFNQFNLFAQYSKAAYCGKNNSAPAGTNITCTGNACPEVEKADATFLYSFEDSGVGDVTGFLALDNTNKLIVLSFRGSRSIENWIGNLNFDLKEINDICSGCRGHDGFTSSWRSVADTLRQKVEDAVREHPDYRVVFTGHSLGGALATVAGADLRGNGYDIDVFSYGAPRVGNRAFAEFLTVQDGGTLYRITHTNDIVPRLPPREFGYSHSSPEYWIKSGTLVPVTRNDIVKIEGIDATGGNNQPNIPDIPAHLWYFGLIGTC

SEQ ID NO: 12305 - protein, 268 aa, Thermomyces lanuginosus
EVSQDLFNQFNLFAQYSAAAYCGKNNDAPAGTNITCTGNACPEVEKADATFLYSFEDSGVGDVTGFLALDNTNKLIVLSFRGSRSIENWIGNLNFDLKEINDICSGCRGHDGFTSSWRSVADTLRQKVEDAVREHPDYRVVFTGHSLGGALATVAGADLRGNGYDIDVFSYGAPRVGNRAFAEFLTVQTGGTLYRITHTNDIVPRLPPREFGYSHSSPEYWIKSGTLVPVRRRDIVKIEGIDATGGNNQPNIPDIWAHLWYFGLIGTC

SEQ ID NO: 12306 - protein, 268 aa, Thermomyces lanuginosus
EVSQDLFNQFNLFAQYSAAAYCGKNNDAPAGTNITCTGNACPEVEKADATFLYSFEDSGVGDVTGFLALDNTNKLIVLSFRGSRSIENWIGNLHFDLKEINDICSGCRGHDGFTSSWRSVADTLRQKVEDAVREHPDYRVVFTGHSLGGALATVAGADLRGNGYDIDVFSYGAPRVGNRAFAEFLTVQTGGTLYRITHTNDIVPRLPPXEFGYSHSSPEYWIKSGTLVPVTRNDIVKIEGIDATGGNNKPNIPDIPAHLWYFGLIGTC

SEQ ID NO: 12307 - protein, 268 aa, Thermomyces lanuginosus
EVSQDLFNQFNLFAQYSAAAYCGKNNDAPAGTNITCTGNACPEVEKADATFLYSFEDSGVGDVTGFLALDNTNKLIVLSFRGSRSIENWIGNLKFDLKEINDICSGCRGHDGFTSSWRSVADTLRQKVEDAVREHPDYRVVFTGHSLGGALATVAGADLRGNGYDIDVFSYGAPRVGNRAFAEFLTVQTGGTLYRITHTNDIVPRLPPXEFGYSHSSPEYWIKSGTLVPVTRNDIVKIEGIDATGGNNKPNIPDIPAHLWYFGLIGTC

SEQ ID NO: 12308 - protein, 268 aa, Thermomyces lanuginosus
EVSQDLFNQFNLFAQYSAAAYCGKNNDAPAGTNITCTGNACPEVEKADATFLYSFEDSGVGDVTGFLALDNTNKLIVLSFRGSRSIENWIGNLNFDLKEINDICSGCRGHDGFTSSWRSVADTLRQKVEDAVREHPDYRVVFTGHSLGGALATVAGADLRGNGYDIDVFSYGAPRVGNRAFAEFLTVQTGGTLYRITHTRDIVPRLPPREFGYSHSSPEYWIKSGTLVPVRRRDIVKIEGIDATGGNNQPNIPDIPAHLWYFGLIGTC

SEQ ID NO: 12309 - protein, 268 aa, Thermomyces lanuginosus
EVSQDLFNQFNLFAQYSAAAYCGKNNDAPAGTNITCTGNACPEVEKADATFLYSFEDSGVGDVTGFLALDNTNKLIVLSFRGSRSIENWIGNLNFDLKEINDICSGCRGHDGFTSSWRSVADTLRQKVEDAVREHPDYRVVFTGHSLGGALATVAGADLRGNGYDIDVFSYGAPRVGNRAFAEFLTVQTGGTLYRITETNDIVPRLPPREFGYSHSSPEYWIKSGTLVPVRRRDIVKIEGIDATGGNNQPNIPDIPAHLWYFGLIGTC

SEQ ID NO: 12310 - protein, 268 aa, Thermomyces lanuginosus
EVSQDLFNQFNLFAQYSAAAYCGKNNDAPAGTQITCTGNACPEVEKADATFLYSFEDSGVGDVTGFLALDNTNKLIVLSFRGSRSIENWIENLNFDLKEINDICSGCRGHDGFTSSWRSVADTLRQKVEDAVREHPDYRVVFTGHSLGGALATVAGADLRGNGYDIDVFSYGAPRVGNRAFAEFLTVQTGGTLYRITHTNDIVPRLPPREFGYSHSSPEYWIKSGTLVPVRRRDIVKIEGIDATGGNNQPNIPDIPAHLWYFGLIGTC

SEQ ID NO: 12311 - protein, 268 aa, Thermomyces lanuginosus
EVSQDLFNQFNLFAQYSAAAYCKKNNDAPAGTNITCTGNACPEVEKADATFLYSFKDSGVGDVTGFLALDNTNKRIVLSFRGSRSIENWIGNLNFDLKEINDICSGCRGHDGFTSSWRSVADTLRQKVEDAVREHPDYRVVFTGHSLGGALATVAGADLRGNGYDIDVFSYGAPRVGNRAFAEFLTVQTGGTLYRITHTNDIVPRLPPREFGYSHSSPEYWIKSGTLVPVTRNDIVKIEGIDATGGNNQPNIPDIPAHLWYFGRIGTC

SEQ ID NO: 12312 - protein, 268 aa, Thermomyces lanuginosus
EVSQDLFNQFNLFAQYSAAAYCGKNNDAPAGTNITCTGNACPEVEKADATFLYSFEDSGVGDVTGFLALDNTNKLIVLSFRGSRSIENWIGNLNFDLKEINDICSGCRGHDGFTSSWRSVADTLRQKVEDAVREHPDYRVVFTGHSLGGALATVAGADLRGNGYDIDVFSYGAPRVGNRAFAEFLTVQTGGTLYRITHTNDIVPRLPPREFGYSHSSPEYWIKSGTLVPVRRRDIVKIEGIDATGGNNQPNIPDGPAHLWYFGLIGTC

SEQ ID NO: 12313 - protein, 268 aa, Thermomyces lanuginosus
EVSQDLFNQFNLFAQYSAAAYCGKNNDAPAGTNITCTGNACPEVEKADATFLYSFEDSGVGDVTGFLALDNTNKLIVLSFRGSRSIENWIGNLNFDLKEIRDICSGCRGHDGFTSSWRSVADTLRQKVEDAVREHPDYRVVFTGHSLGGALATVAGADLRGNGYDIDVFSYGAPRVGNRAFAEFLTVQTGGTLYRITHTNDIVPRLPPREFGYSHSSPEYWIKSGTLVPVTRNDIVKIEGIDATGGNNQPNIPDIPAHSWDFGLIGTC

SEQ ID NO: 12314 - protein, 268 aa, Thermomyces lanuginosus
EVSQDLFNQFNLFAQYSKAAYCGKNNSAPAGTNITCTGNACPEVEKADATFLYSFEDSGVGDVTGFLALDNTRKLIVLSFRGSRSIENWIGNLNFDLKEINDICSGCRGHDGFTSSWRSVADTLRQKVEDAVREHPDYRVVFTGHSLGGALATVAGADLRGNGYDIDVFSYGAPRVGNRAFAEFLTVQTGGTLYRITHTNDIVPRLPPREFGYSHSSPEYWIKSGTLVPVTRNDIVKIEGIDATGGNNQPNIPDIPAHLWYFGLIGTC

SEQ ID NO: 12315 - protein, 268 aa, Thermomyces lanuginosus
EVSQDLFNQFNLFAQYSKAAYCGKNNDAPAGTNITCTGNACPEVFKADATFLYSFEDSGVGDVTGFLALDNTNKLIVLSFRGSRSIENWIGNLNFDLKEINDICSGCRGHDGFTSSWRSVADTLRQKVEDAVREHPDYRVVFTGHSLGGALATVAGADLRGNGYDIDVFSYGAPRVGNRAFAEFLTVQDGGTLYRITHTNDIVPRLPPREFGYSHSSPEYWIKSGTLVPVTRNDIVKIEGIDATGGNNQPNIPDIPAHLWYFGLIGTC

SEQ ID NO: 12316 - protein, 268 aa, Thermomyces lanuginosus
EVSQDLFNQFNLFAQYSAAAYCGKNNSAPAGTDITCTGNACPEVEKADATFLYSFEDSGVGDVTGFLALDNTNKLIVLSFRGSRSIENWIGNLNFDLKEINDICSGCRGHDGFTSSWRSVADTLRQKVEDAVREHPDYRVVFTGHSLGGALATVAGADLRGNGYDIDVFSYGAPRVGNRAFAEFLTVQDGGTLYRITHTNDIVPRLPPREFGYSHSSPEYWIKSGTLVPVTRNDIVKIEGIDATGGNNQPNIPDIPAHLWYFGLIGTC

SEQ ID NO: 12317 - protein, 268 aa, Thermomyces lanuginosus
EVSQDLFNQFNLFAQYSAAAYCGKNNDAPAGTNITCTGNACPEVEKADATFLYSFEDSGVGDVTGFLALDNTNKLIVLSFRGSRSIENWILNLNFDLKEINDICSGCRGHDGFTSSWRSVADTLRQKVEDAVREHPDYRVVFTGHSLGGALATVAGADLRGNGYDIDVFSYGAPRVGNRAFAEFLTVQTGGTLYRITHTNDIVPRLPPRQFGYSHSSPEYWIKSGTLVPVRRRDIVKIEGIDATGGNNQPNIPDIPAHLWYFGLIGTC

SEQ ID NO: 12318 - protein, 268 aa, Thermomyces lanuginosus
EVSQDLFNQFNLFAQYSAAAYCGKNNDAPAGTNITCTGNACPEVEKADATFLYSFKDSGVGDVTGFLALDNTNKLIVLSFRGSRSIENWIGNLNFDLKEINDICSGCRGHDGFTSSWRSVADTLRQKVEAAVREHPDYRVVFTGHSLGGALATVAGADLRGNGYDIDVFSYGAPRVGNRAFAEFLTVQQGGTLYRITHTNDIVPRLPPREFGYSHSSPEYWIKSGTLVPVTRNDIVKIEGIDATGGNNQPNIPDIPAHLWYFGLIGTC

SEQ ID NO: 12319 - protein, 268 aa, Thermomyces lanuginosus
EVSQDLFNQFNLFAQYSAAAYCGKNNDAPAGTNITCTGNACPEVEKADATFLYSFEDSGVGDVTGFLALDNTNKLIVLSFRGSRSIENWIGNLNFDLKEINDICSGCRGHDGFTSSWRSVADTLRQKVEDAVREHPDYRVVFTGHSLGGALATVAGADLRGNGYDIDVFSYGAPRVGNRAFAEFLTVQTGGTLYRITHTNDIVPRLPPREFGYSHSSPEYWIKSGTDVPVRRRDIVKIEGIDATGGNNQPNIPDIPAHLWYFGLIGTC

SEQ ID NO: 12320 - protein, 268 aa, Synthetic construct
EVSQDLFNQFNLFAQYSAAAYCGKNNDAPAGTNITCTGNACPEVEKADATFLYSFEDSGVGDVTGFLALDNTNKLIVLSFRGSRSIENWIGNLKFLLKKINDICSGCRGHDGFTSSWRSVADTLRQKVEDAVREHPDYRVVFTGHSLGGALATVAGADLRGNGYDIDVFSYGAPRVGNRAFAEFLTVQTGGTLYRITHTNDIVPRLPPREFGYSHSSPEYWIRSGTLVPVRRNDIVKIEGIDATGGNNRPNIPDIPAHLWYFGLIGTC

SEQ ID NO: 12321 - protein, 268 aa, Thermomyces lanuginosus
EVSQDLFNQFNLFAQYSAAAYCGKNNDAPAGTNITCTGNACPEVEKADATFLYSFEDSGVGDVTGFLALDNTNKLIVLSFRGSRSIENWIGNLNFDLKEINDICSGCRGHDGFTSSWRSVADTLRQKVEDAVREHPDYRVVFAGHSLGGALATVAGADLRGNGYDIDVFSYGAPRVGNRAFAEFLTVQTGGTLYRITHTNDIVPRLPPREFGYSHSSPEYWIKSGTLVPVRRRDIVKIEGIDATGGNNQPNIPDIPAHLWYFGLIGTC

SEQ ID NO: 12322 - protein, 268 aa, Thermomyces lanuginosus
EVSQDLFNQFNLFAQYSAAAYCGKNNDAPAGTNITCTGNACPEVEKADATFLYSFKDSGVGDVTGFLALDNTNKQIVLSFRGSRSIENWIGNLNFDLKEINDICSGCRGHDGFTSSWRSVADTLRQKVEDAVREHPDYRVVFTGHSLGGALATVAGADLRGNGYDIDVFSYGAPRVGNRAFAEFLTNQTGGTLYRITHTNDIVPRLPPREFGYSHSSPEYWIKSGTLVPVTRNDIVKIEGIDATGGNNQPNIPDIPAHLWYFGRIGTC

SEQ ID NO: 12323 - protein, 268 aa, Thermomyces lanuginosus
EVSQDLFNQFNLFAQYSAAAYCGKNNDAEAGTNITCTGNACPEVEKADATFLYSFEDSGVGDVTGFLALDNTRKDIVLSFRGSRSIENWIGNLNFDLKEINDICSGCRGHDGFTSSWRSVADTLRQKVEDAVREHPDYRVVFTGHSLGGALATVAGADLRGNGYDIDVFSYGAPRVGNRAFAEFLTVQTGGTLYRITHTNDIVPRLPPREFGYSHSSPEYWIKSGTLVPVTRNDIVKIEGIDATGGNNQPNIPDIPAHLWYFGLIGTC

SEQ ID NO: 12324 - protein, 268 aa, Thermomyces lanuginosus
EVSRDLFNQFNLFAQYSAAAYCGKNNDAPAGTNITCTGNACPEVEKADATFLYSFEDSGVGDVTGFLALDNTNKLIVLSFRGSRSIENWIGNLNFDLKEINDICSGCRGHDGFTSSWRSVADTLRQKVEDAVREHPDYRVVFTGHSLGGALATVAGADLRGNGYDIDVFSYGAPRVGNRAFAEFLTVQTGGTLYRITHTNDIVPRLPPREFGYSHSSPEYWIKSGTLRPVRRNDIVKIEGIDATGGNNQPNIPDIPAHLWYFGLIGTC

SEQ ID NO: 12325 - protein, 268 aa, Thermomyces lanuginosus
EVSQDLFNQFNLFAQYSAAAYCGKNNDAPAGTNITCTGNACPEVEKADATFLYSFEDSGVGDVTGFLALDNTNKQIVLSFRGSRSIENWIGNLRFDLKEINDICSGCRGHDGFTSSWRSVADTLRQKVEDAVREHPDYRVVFTGHSLGGALATIAGADLRGNGYDIDVFSYGAPRVGNRAFAEFLTVQTGGTLYRITHTNDIVPRLPPREFGYSHSSPEYWIKSGTLVPVTRNDIVKIEGIDATGGNNQPNIPDIPAHLWYFGLIGTC

SEQ ID NO: 12326 - protein, 268 aa, Thermomyces lanuginosus
EVSQDLFNQFNLFAQYSAAAYCGKNNDAPAGTNITCTGNACPEVEKADATFLYSFEDSGVGDVTGFLALDNTNKLIVLSFRGSRSIENWIGNLNFDLKEINDICSGCRGHDGFTSSWRSVADTLRQKVEDAVREHPDYRVVFTGHSLGGALATVAGADLRGNGYDIDVFSYGAPRVGNRAFAEFLTVQTGGTLYRITHTNDIVPRLPPREFGYSHSSPEYWIKKKTKVPVTRNDIVKIEGIDATGGNNQPNIPDIPAHLWYFGLIGTC

SEQ ID NO: 12327 - protein, 268 aa, Thermomyces lanuginosus
EVSQDLFNQFNLFAQYSAAAYCGKNNDAPAGTDITCTGNACPEVFKADATFLYSFEDSGVGDVTGFLALDNTNKDIVLSFRGSRSIENWIGNLNFDLKEINDICSGCRGHDGFTSSWRSVADTLRQKVEDAVREHPDYRVVFTGHSLGGALATVAGADLRGNGYDIDVFSYGAPRVGNRAFAEFLTVQTGGTLYRITHTNDIVPRLPPREFGYSHSSPEYWIKSGTLVPVTRNDIVKIEGIDATGGNNQPNIPDIPAHLWYFGLIGTC

SEQ ID NO: 12328 - protein, 268 aa, Thermomyces lanuginosus
EVSQDLFNQFNLFAQYSAAAYCKKNNDAPAGTNITCTGNACPEVEKADATFLYSFKDSGVGDVTGFLALDNTNKLIVLSFRGSRSIENWIGNLNFDLKEINDICSGCRGHDGFTSSWRSVADTLRQKVEAAVREHPDYRVVFTGHSLGGALATVAGADLRGNGYDIDVFSYGAPRVGNRAFAEFLTVQTGGTLYRITHTNDIVPRLPPREFGYSHSSPEYWIKSGTLVPVTRNDIVKIEGIDATGGNNQPNIPDIPAHLWYFGRIGTC

SEQ ID NO: 12329 - protein, 268 aa, Thermomyces lanuginosus
EVSQDLFNQFNLFAQYSAAAYCGKNNDAPAGTQITCTGNACPEVEKADATFLYSFEDSGVGDVTGFLALDNTNKLIVLSFRGSRSIENWICNLNFDLKEINDICSGCRGHDGFTSSWRSVADTLRQKVEDAVREHPDYRVVFTGHSLGGALATVAGADLRGNGYDIDVFSYGAPRVGNRAFAEFLTVQTGGTLYRITHTNDIVPRLPPREFGYSHSSPEYWIKSGTLVPVRRRDIVKIEGIDATGGNNQPNIPDIPAHLWYFGLIGTC

SEQ ID NO: 12330 - protein, 268 aa, Thermomyces lanuginosus
EVSQDLFNQFNLFAQYSAAAYCGKNNSAPAGTNITCTGNACPEVEKADATFLYSFEDSGVGDVTGFLALDNTNKLIVLSFRGSRSIENWIGNLNFDLKEINDICSGCRGHDGFTSSWRSVADTLRQKVEAAVREHPDYRVVFTGHSLGGALATVAGADLRGNGYDIDVFSYGAPRVGNRAFAEFLTVQTGGTLYRITHTNDIVPRLPPREFGYSHSSPEYWIKSGTLVPVTRNDIVKIEGIDATGGNNQPNQPDIPAHLWYFGRIGTC

SEQ ID NO: 12331 - protein, 268 aa, Thermomyces lanuginosus
EVSQDLFNQFNLFAQYSAAAYCGKNNDAPAGTNITCTGNACPEVEKADATFLYSFEDSGVGDVTGFLALDNTNKLIVLSFRGSRSIENWIGNLNFDLKEINDICSGCRGHAGFTSSWRSVADTLRQKVEAAVREHPDYRVVFTGHSLGGALATVAGADLRGNGYDIDVFSYGAPRVGNRAFAEFLTTQTGGTLYRITHTNDIVPRLPPREFGYSHSSPEYWIKSGTLVPVTRNDIVKIEGIDATGGNNQPNIPDIPAHLWYFGRIGTC

SEQ ID NO: 12332 - protein, 268 aa, Thermomyces lanuginosus
EVSQDLFNQFNLFAQYSAAAYCQKNNDAPAGTNITCTGNACPEVEKADATFLYSFKDSGVGDVTGFLALDNTNKRIVLSFRGSRSIENWIGNLNFDLKEINDICSGCRGHDGFTSSWRSVADTLRQKVEDAVREHPDYRVVFTGHSLGGALATVAGADLRGNGYDIDVFSYGAPRVGNRAFAEFLTVQTGGTLYRITHTNDIVPRLPPREFGYSHSSPEYWIKSGTLVPVTRNDIVKIEGIDATGGNNQPNIPDIPAHLWYFGLIGTC

SEQ ID NO: 12333 - protein, 268 aa, Synthetic construct
EVSQDLFNQFNLFAQYSAAAYCGKNNDAPAGTNITCTGNACPEVEKADATFLYSFEDSGVGDVTGFLALDNTNKLIVLSFRGSRSIENWIGNLNFDLKEINDICSGCRGHDGFTSSWRSVVDTLRQKVEDAVREHPDYRVVFTGHSLGGALATVAGADLRGNGYDIDVFSYGAPRVGNRAFAEFLTVQTGGTLYRITHTNDIVPKLPPRQFGYSHSSPEYWIKSGTLVPVTRNDIVKIEGIDATGGNNQPNIPDIPAHLWYFGLIGTC

SEQ ID NO: 12334 - protein, 268 aa, Thermomyces lanuginosus
EVSQDLFNQFNLFAQYSAAAYCGKNNDAPAGTQITCTGNACPEVEKADATFLYSFEDSGVGDVTGFLALDNTNKLIVLSFRGSRSIENWILNLNFDLKEINDICSGCRGHDGFTSSWRSVADTLRQKVEDAVREHPDYRVVFTGHSLGGALATVAGADLRGNGYDIDVFSYGAPRVGNRAFAEFLTVQTGGTLYRITHTNDIVPRLPPREFGYSHSSPEYWIKSGTLVPVRRRDIVKIEGIDATGGNNQPNIPDIPAHLWYFGLIGTC

SEQ ID NO: 12335 - protein, 268 aa, Thermomyces lanuginosus
EVSQDLFNQFNLFAQYSAAAYCGKNNDAPAGTNITCTGNACPEVEKADATTLYSFEDSGVGDVTGFLALDNTNKQIVLSFRGSRSIENWIGNLNFDLKEINDICSGCRGHDGFTSSWRSVADTLRQKVEDAVREHPDYRVVFTGHSLGGALATVAGADLRGNGYDIDVFSYGAPRVGNRAFAEFLTVQTGGTLYRITHTNDIVPRLPPREFGYSHSSPEYWIKSGTLVPVTRNDIVKIEGIDATGGNNQPNQPDIPAHLWYFGRIGTC

SEQ ID NO: 12336 - protein, 268 aa, Thermomyces lanuginosus
EVSQDLFNQFNLFAQYSAAAYCKKNNDAPAGTNITCTGNACPEVEKADATFLYSFKDSGVGDVTGFLALDNTNKLIVLSFRGSRSIENWIGNLNFDLKEINDICSGCRGHDGFTSSWRSVADTLRQKVEDAVREHPDYRVVFTGHSLGGALATVAGADLRGNGYDIDVFSYGAPRVGNRAFAEFLTTQTGGTLYRITHTNDIVPRLPPREFGYSHSSPEYWIKSGTLVPVTRNDIVKIEGIDATGGNNQPNIPDIPAHLWYFGRIGTC

SEQ ID NO: 12337 - protein, 268 aa, Thermomyces lanuginosus
EVSQDLFNQFNLFAQYSAAAYCGKNNDAPAGTNITCTGNACPEVEKADATFLYSFEDSGVGDVTGFLALDNTNKLIVLSFRGSRSIENWIGNLNFDLKEINDICSGCRGHDGFTSSWRSVADTLRQKVEDAVREHPDYRVVFTGHSLGGALATVAGADLRGNGYDIDVFSYGAPRVGNRAFAEFLTVQTGGTLYRITHTNDIVPRLPPREFGYSHSSPEYWIKSGTLVPHRRRDIVKIEGIDATGGNNQPNIPDIPAHLWYFGLIGTC

SEQ ID NO: 12338 - protein, 268 aa, Thermomyces lanuginosus
EVSQDLFNQFNLFAQYSAAAYCGKNNDAPAGTNITCTGNACPEVFKADATFLYSFEDSGVGDVTGFLALDNTNKDIVLSFRGSRSIENWIGNLNFDLKEINDICSGCRGHDGFTSSWRSVADTLRQKVEDAVREHPDYRVVFTGHSLGGALATVAGADLRGNGYDIDVFSYGAPRVGNRAFAEFLTVQDGGTLYRITHTNDIVPRLPPREFGYSHSSPEYWIKSGTLVPVTRNDIVKIEGIDATGGNNQPNIPDIPAHLWYFGLIGTC

SEQ ID NO: 12339 - protein, 268 aa, Thermomyces lanuginosus
EVSQDLFNQFNLFAQYSAAAYCGKNNDAPAGTNITCTGNACPEVEKADATFLYSFEDSGVGDVTGFLALDNTNKLIVLSFRGSRSIENWIGNLNFDLKEINDICSGCRGHDGFTSSWRSVADTLRQKVEDAVREHPDYRVVFTGHSLGGALATVAGADLRGNGYDIDVFSYGAPRVGNRAFAEFLTVQTGGTLYRITLTNDIVPRLPPREFGYSHSSPEYWIKSGTLVPVRRRDIVKIEGIDATGGNNQPNIPDIPAHLWYFGLIGTC

SEQ ID NO: 12340 - protein, 268 aa, Thermomyces lanuginosus
EVSQDLFNQFNLFAQYSAAAYCGKNNDAPAGTNITCTGNACPEVEKADATVLYSFEDSGVGDVTGFLALDNTNKLIVLSFRGSRSIENWIGNLNFDLKEINDICSGCRGHDGFTSSWRSVADTLRQKVEDAVREHPDYRVVFTGHSLGGALATVAGADLRGNGYDIDVFSYGAPRVGNRAFAEFLTVQTGGTLYRITHTNDIVPRLPPREFGYSHSSPEYWIKSGTLVPVRRRDIVKIEGIDATGGNNQPNIPDIPAHLWYFGLIGTC

SEQ ID NO: 12341 - protein, 268 aa, Thermomyces lanuginosus
EVSQDLFNQFNLFAQYSKAAYCGKNNDAEAGTNITCTGNACPEVEKADATFLYSFEDSGVGDVTGFLALDNTNKLIVLSFRGSRSIENWIGNLNFDLKEINDICSGCRGHDGFTSSWRSVADTLRQKVEDAVREHPDYRVVFTGHSLGGALATVAGADLRGNGYDIDVFSYGAPRVGNRAFAEFLTVQDGGTLYRITHTNDIVPRLPPREFGYSHSSPEYWIKSGTLVPVTRNDIVKIEGIDATGGNNQPNIPDIPAHLWYFGLIGTC

SEQ ID NO: 12342 - protein, 268 aa, Thermomyces lanuginosus
EVSQDLFNQFNLFAQYSAAAYCGKNNSAPAGTNITCTGNACPEVEKADATFLYSFEDSGVGDVTGFLALDNTNKLIVLSFRGSRSIENWIGNLNFDLKEINDICSGCRGHGGFTSSWRSVADTLRQKVEDAVREHPDYRVVFTGHSLGGALATVAGADLRGNGYDIDVFSYGAPRVGNRAFAEFLTVQTGGTLYRITHTNDIVPRLPPREFGYSHPSPEYWIKSGTLVPVTRNDIVKIEGIDATGGNNQPNIPDIPAHLWYFGLIGTC

SEQ ID NO: 12343 - protein, 268 aa, Thermomyces lanuginosus
EVSQDLFNQFNLFAQYSAAAYCGKNNDAPAGTNITCTGNACPEVEKADATFLYSFEDSGVGDVTGFLALDNTNKLIVLSFRGSRSIENWIGNLNFDLKEINDICSGCRGHDGFTSSWRSVADTLRQKVEDAVREHPDYRVVFTGHSLGGALATVAGADLRGNGYDIDVFSYGAPRVGNRAFAEFLTVQTGGTLYRITHTNDIVPRLPNREFGYSHSSPEYWIKSGTLVPVRRRDIVKIEGIDATGGNNQPNIPDIPAHLWYFGLIGTC

SEQ ID NO: 12344 - protein, 268 aa, Thermomyces lanuginosus
EVSQDLFNQFNLFAQYSAAAYCGKNNDAPAGTNITCTGNACPEVEKADATFLYSFEDSGVGDVTGFLALDNTNKLIILSFRGSRSIENWIGNLNFDLKEINDICSGCRGHDGFTSSWRSVADTLRQKVEDAVREHPDYRVVFTGHSLGGALATVAGADLRGNGYDIDVFSYGAPRVGNRAFAEFLTAQDGGTLYRITHTNDIVPRLPPREFGYSHSSPEYWIKSGTLVPVTRNDIVKIEGIDATGGNNQPNIPDIPAHLWYFGLIGTC

SEQ ID NO: 12345 - protein, 268 aa, Thermomyces lanuginosus
EVSQDLFNQFNLFAQYSAAAYCGKNNDAPAGTNITCTGNACPEVEKADATFLYSFEDSGVGDVTGFLALDNTNKLIVLSFRGSRSIKNWIGNLNFDLKPINDICSGCRGHDGFTSSWRSVADTLRQKVEDAVREHPDYRVVFTGHSLGGALATVAGADLRGNGYDIDVFSYGAPRVGNRAFAEFLTVQTGGTLYRITHTNDIVPRLPPREFGYSHSSPEYWIKSGTLVPVRRRDIVKIEGIDATGGNNQPNIPDIPAHLWYFGLIGTC

SEQ ID NO: 12346 - protein, 268 aa, Synthetic construct
EVSQDLFNQFNLFAQYSAAAYCGKNNDAPAGTNITCTGNACPEVEKADPTFLYSFEDSGVGDVTGFLALDNTNKLIVLSFRGSRSIENWIGNLNFDLKEINDICSGCRGHDGFTSSWRSVADTLRQKVEDAVREHPDYRVVFTGHSLGGALATVAGADLRGNGYDIGVFSYGAPRVGNRAFAEFLTVQTGGTLYRITHTNDIVPRLPPRVFGYSHSSPEYWIKSGTLVPVTRNDIVKIEGIDATGGNNQPNIPDIPAHLWYFGLIGTC

SEQ ID NO: 12347 - protein, 268 aa, Thermomyces lanuginosus
EVSQDLFNQFNLFAQYSAAAYCGKNNDAPAGTQITCTGNACPEVEKADATFLYSFEDSGVGDVTGFLALDNTNKLIVLSFRGSRSIENWINNLNFDLKEINDICSGCRGHDGFTSSWRSVADTLRQKVEDAVREHPDYRVVFTGHSLGGALATVAGADLRGNGYDIDVFSYGAPRVGNRAFAEFLTVQTGGTLYRITHTNDIVPRLPPREFGYSHSSPEYWIKSGTLVPVRRRDIVKIEGIDATGGNNQPNIPDIPAHLWYFGLIGTC

SEQ ID NO: 12348 - protein, 268 aa, Thermomyces lanuginosus
EVSQDLFNQFNLFAQYSAAAYCGANNDAPAGTNITCTGNACPEVEKADATFLYSFEDSGVGDVTGFLALDNTNKQIILSFRGSRSIENWIGNLNFDLKEINDICSGCRGHDGFTSSWRSVADTLRQKVEDAVREHPDYRVVFTGHSLGGALATVAGADLRGNGYDIDVFSYGAPRVGNRAFAEFLTVQTGGTLYRITHTNDIVPRLPPREFGYSHSSPEYWIKSGTLVPVTRNDIVKIEGIDATGGNNQPNIPDIPAHLWYFGLIGTC

SEQ ID NO: 12349 - protein, 268 aa, Thermomyces lanuginosus
EVSQDLFNQFNLFAQYSAAAYCKKNNDAPAGTNITCTGNACPEVEKADATFLYSFEDSGVGDVTGFLALDNTNKQIVLSFRGSRSIENWIGNLNFDLKEINDICSGCRGHDGFTSSWRSVADTLRQKVEDAVREHPDYRVVFTGHSLGGALATVAGADLRGNGYDIDVFSYGAPRVGNRAFAEFLTTQTGGTLYRITHTNDIVPRLPPREFGYSHSSPEYWIKSGTLVPVTRNDIVKIEGIDATGGNNQPNIPDIPAHLWYFGLIGTC

SEQ ID NO: 12350 - protein, 268 aa, Thermomyces lanuginosus
EVSQDLFNQFNLFAQYSKAAYCGKNNDAPAGTNITCTGNACPEVEKADVTFLYSFEDSGVGDVTGFLALDNTNKQIVLSFRGSRSIENWIGNLNFDLKEINDICSGCRGHDGFTSSWRSVADTLRQKVEDAVREHPDYRVVFTGHSLGGALATVAGADLRGNGYDIDVFSYGAPRVGNRAFAEFLTVQTGGTLYRITHTNDIVPRLPPREFGYSHSSPEYWIKSGTLVPVTRNDIVKIEGIDATGGNNQPNIPDIPAHLWYFGLIGTC

SEQ ID NO: 12351 - protein, 268 aa, Thermomyces lanuginosus
EVSQDLFNQFNLFAQYSAAAYCGKNNDAPAGTNITCTGNACPEVEKADATFLYSFEDSGVGDVTGFLALDNTNKLIVLSFRGSRSIENWIGNLHFDLKEINDICSGCRGHDGFTSSWRSVADTLRQKVEDAVREHPDYRVVFTGHSLGGALATVAGADLRGNGYDIDVFSYGAPRVGNRAFAEFLTVQTGGTLYRITHTNDIVPRLPPXEFGYSHSSPEYWIKSGTLVPVTRNDIVKIEGIDATGGNNHPNIPDIPAHLWYFGLIGTC

SEQ ID NO: 12352 - protein, 268 aa, Thermomyces lanuginosus
EVSQDLFNQFNLFAQYSAAAYCGKNNDAPAGTQITCTGNACPEVEKADATFLYSFEDSGVGDVTGFLALDNTNKLIVLSFRGSRSIENWIKNLNFDLKEINDICSGCRGHDGFTSSWRSVADTLRQKVEDAVREHPDYRVVFTGHSLGGALATVAGADLRGNGYDIDVFSYGAPRVGNRAFAEFLTVQTGGTLYRITHTNDIVPRLPPREFGYSHSSPEYWIKSGTLVPVRRRDIVKIEGIDATGGNNQPNIPDIPAHLWYFGLIGTC

SEQ ID NO: 12353 - protein, 268 aa, Thermomyces lanuginosus
EVSQDLFNQFNLFAQYSAAAYCGKNNDAPAGTNITCTGNACPEVEKADATFLYSFEDSGVGDVTGFLALDNTNKLIVLSFRGSRSIENWIGNLNFDLKEINDICSGCRGHDGFTSSWRSVADTLRQKVEDAVREHPDYRVVFTGHSLGGALATVAGADLRGNGYDIDVFSYGAPRVGNRAFAEFLTVQTGGTLYRITHTNDIVPRLPPREFGYSHSSPEYWIKSGTLVPVRRRDIVKIEGIDATGGNNQPNIPDVPAHLWYFGLIGTC

SEQ ID NO: 12354 - protein, 268 aa, Thermomyces lanuginosus
EVSQDLFNQFNLFAQYSAAAYCGKNNEAPAGTNITCTGNACPEVEKADATFLYSFEDSGVGDVTGFLALDNTNKLIVLSFRGSRSIENWIGNLNFDLKEINDICSGCRGHDGFTSSWRSVADTLRQKVEDAVREHPDYRVVFTGHSLGGALATVAGADLRGNPYDIDVFSYGAPRVGNRAFAEFLTVQTGGTLYRITHTNDIVPRLPPREFGYSHSSPEYWIKSGTMVPVTRNDIVKIEGIDATGGNNQPNIPDIPAHLWYFGRIGTC

SEQ ID NO: 12355 - protein, 268 aa, Thermomyces lanuginosus
EVSQDLFNQFNLFAQYSAAAYCGKNNRAPAGTQITCTANACPEVEKADATFLYSFEDSGVGDVTGFLALDNTNKLIVLSFRGSRSIENWITNLNFELKEINDICSGCRGHDGFTSSWRSVADTLRQKVEDAVREHPDYRVVFTGHSLGGALATVAGADLRGNGYDIDVFSYGAPRVGNRAFAEFLTVQTGGTLYRITHTNDIVPRLPPREFGYSHSSPEYWIKSGTLVPVTRNDIVKIEGIDATGGNNQPNIPDIPAHLWYFGLIGTC

SEQ ID NO: 12356 - protein, 268 aa, Thermomyces lanuginosus
EVSQDLFNQFNLFAQYSAAAYCGKNNDAPAGTNITCTGNACPEVEKADATFLYSFEDSGVGDVTGFLALDNTNKDIVLSFRGSRSIENWIGNLNFDLKEINDICSGCRGHDGFTSSWRSVADTLRQKVEAAVREHPDYRVVFTGHSLGGALATVAGADLRGNGYDIDVFSYGAPRVGNRAFAEFLTHQTGGTLYRITHTNDIVPRLPPREFGYSHSSPEYWIKSGTLVPVTRNDIVKIEGIDATGGNNQPNIPDIPAHLWYFGLIGTC

SEQ ID NO: 12357 - protein, 268 aa, Thermomyces lanuginosus
EVSQDLFNQFNLFAQYSAAAYCGKNNDAPAGTNITCTGNACPEVEKADATFLYSFEDSGVGDVTGFLALDNTNKLIVLSFRGSRSIENWIGNLNFDLKEINDICSGCRGHDGFTSSWRSVADTLRQKVEDAVREHPDYRVVFTGHSLGGALATVAGADLRGNGYDIDVFSYGAPRVGNRAFAEFLTVQTGGTLYRITDTNDIVPRLPPREFGYSHSSPEYWIKSGTLVPVRRRDIVKIEGIDATGGNNQPNIPDIPAHLWYFGLIGTC

SEQ ID NO: 12358 - protein, 268 aa, Thermomyces lanuginosus
EVSQDLFNQFNLFAQYSAAAYCGKNNDAPAGTNITCTGNACPEVEKADATFLYSFEDSGVGDVTGFLALDNTNKLIVLSFRGSRSIENWIGNLNFDLKEINDICSGCRGHDGFTSSWRSVADTLRQKVEDAVREHPDYRVVFTGHSLGGALATVAGADLRGNGYDIDVFSYGAPRVGNRAFAEFLTVQTGGTLYRITHTNDIVPRLPPREFGYSHSSPEYWIKSGTLVKVRRRDIVKIEGIDATGGNNQPNIPDIPAHLWYFGLIGTC

SEQ ID NO: 12359 - protein, 268 aa, Synthetic construct
EVSQDLFNQFNLFAQYSAAAYCGKNNDAPAGTNITCTGNACPEVEKADATFLYSFEDSGVGDVTGFLALDNTDKLIVLSFRGSRTIKNWIANLKFALKEINDICSGCRGHDGFTSSWRSVADTLRQKVEDAVREHPDYRVVFTGHSLGGALATVAGADLRGNGYDIDVFSYGAPRVGNRAFAEFLTVQTGGTLYRITHTNDIVPRLPPREFGYSHSSPEYWIKSGTLVPVTRNDIVKIEGIDATGGNNQPNIPDIPAHLWYFGLIGTC

SEQ ID NO: 12360 - protein, 268 aa, Thermomyces lanuginosus
EVSQDLFNQFNLFAQYSAAAYCGKNNDAPAGTNITCTGNACPEVEKADATLLYSFEDSGVGDVTGFLALDNTNKLIVLSFRGSRSIENWIGNLNFELKEINDICSGCRGHDGFTSSWRSVADTLRQKVEDAVREHPDYRVVFTGHSLGGALATVAGADLRGNGYDIDVFSYGAPRVGNRAFAEFLTVQTGGTLYRITHTNDIVPRLPPREFGYSHSSPEYWIKSGTLVPVRRRDIVKIEGIDATGGNNQPNIPDIPAHLWYFGLIGTC

SEQ ID NO: 12361 - protein, 268 aa, Thermomyces lanuginosus
EVSQDLFNQFNLFAQYSAAAYCQKNNDAPAGTNITCTGNACPEVEKADATFLYSFEDSGVGDVTGFLALDNTNKQIVLSFRGSRSIENWIGNLNFDLKEINDICSGCRGHDGFTSSWRSVADTLRQKVEDAVREHPDYRVVFTGHSLGGALATVAGADLRGNGYDIDVFSYGAPRVGNRAFAEFLTTQTGGTLYRITHTNDIVPRLPPREFGYSHSSPEYWIKSGTLVPVTRNDIVKIEGIDATGGNNQPNIPDIPAHLWYFGRIGTC

SEQ ID NO: 12362 - protein, 268 aa, Synthetic construct
EVSQDLFNQFNLFAQYSAAAYCGKNNDAPAGTNITCTGNACPEVEKADATFLYSFEGSGVGDVTGFLALDNTNKLIVLSFRGSRSIENWIGNLKFLMKEINDICSGCRGHDGFTSSWRSVADTLRQKVEDAVREHPDYRVVFTGHSLGGALATVAGADLRGNGYDIDVFSYGAPRVGNRAFAEFLTVQTGGTLYRITHTNDIVPRLPPREFGYSHSSPEYWIKSGTLVPVTRNDIVKIEGIDATGGNNQPNIPDIPAHLWYFGLIGTC

SEQ ID NO: 12363 - protein, 268 aa, Thermomyces lanuginosus
EVSQDLFNQFNLFAQYSAAAYCGKNNDAPAGTNITCTGNACPEVEKADATFLYSFEDSGVGDVTGFLALDNTNKLIVLSFRGSRSIENWIGNLNFDLKEINDICSGCRGHDGFTSSWRSVADTLRQKVEDAVREHPDYRVVFTGHSLGGALATVAGADLRGNGYDIDVFSYGAPRVGNRAFAEFLTVQTGGTLYRITHTNDIVPRLPPREFGYSHSSPEYWIKIGTLVPVRRRDIVKIEGIDATGGNNQPNIPDIPAHLWYFGLIGTC

SEQ ID NO: 12364 - protein, 268 aa, Thermomyces lanuginosus
EVSQDLFNQFNLFAQYSAAAYCGKNNDAEAGTDITCTGNACPEVFKADATFLYSFEDSGVGDVTGFLALDNTNKLIVLSFRGSRSIENWIGNLNFDLKEINDICSGCRGHDGFTSSWRSVADTLRQKVEDAVREHPDYRVVFTGHSLGGALATVAGADLRGNGYDIDVFSYGAPRVGNRAFAEFLTVQTGGTLYRITHTNDIVPRLPPREFGYSHSSPEYWIKSGTLVPVTRNDIVKIEGIDATGGNNQPNIPDIPAHLWYFGLIGTC

SEQ ID NO: 12365 - protein, 268 aa, Thermomyces lanuginosus
EVSQDLFNQFNLFAQYSAAAYCGKNNDAPAGTNITCTGNACPEVEKADATFLYSFEDSGLGDVTGFLALDNTNKLIVLSFRGSRSIENWIVNLNFDLKEINDICSGCRGHDGFTSSWRSVADTLRQKVEDAVREHPDYRVVFTGHSLGGALATVAGADLRGNGYDIDVFSYGAPRVGNRAFAEFLTVQTGGTLYRITHTNDIVPRLPPREFGYSHSSPEYWIKSGTLVPVRRRDIVKIEGIDATGGNNQPNIPDIPAHLWYFGLIGTC

SEQ ID NO: 12366 - protein, 268 aa, Thermomyces lanuginosus
EVSQDLFNQFNLFAQYSAAAYCGKNNDAPAGTNITCTGNACPEVEKADATFLYSFEDSGVGDVTGFLALDNTNKLIVLSFRGSRSIENWIGNLNFDLKEINDICSGCRGHDGFTSSWRSVADTLRQKVEDAVREHPDYRVVFTGHSLGGALATVAGADLRGNGYDIDVFSYGAPRVGNRAFAEFLTVQTGGTLYRITHTNDIVPRLPPREFGYSHSSPEYWIKSGTLVPVRRRDIVKIEGIDATGGNNQPNIPDIPAHLTYFGLIGTC

SEQ ID NO: 12367 - protein, 268 aa, Thermomyces lanuginosus
EVSQDLFNQFNLFAQYSAAAYCGKNNDAPAGTNITCTGNACPEVEKADATVLYSFEDSGVGDVTGFLALDNTNKLIVLSFRGSRSIENWIGNLNFELKEINDICSGCRGHDGFTSSWRSVADTLRQKVEDAVREHPDYRVVFTGHSLGGALATVAGADLRGNGYDIDVFSYGAPRVGNRAFAEFLTVQTGGTLYRITHTNDIVPRLPPREFGYSHSSPEYWIKSGTLVPVRRRDIVKIEGIDATGGNNQPNIPDIPAHLWYFGLIGTC

SEQ ID NO: 12368 - protein, 268 aa, Thermomyces lanuginosus
EVSQDLFNQFNLFAQYSAAAYCGKNNDAPAGTNITCTGNACPEVEKADATFLYSFEDSGVGDVTGFLALDNTNKLIVLSFRGSRSIENWIQNLNFDLKEINDICSGCRGHDGFTSSWRSVADTLRQKVEDAVREHPDYRVVFTGHSLGGALATVAGADLRGNGYDIDVFSYGAPRVGNRAFAEFLTVQTGGTLYRITHTNDIVPRLPPRQFGYSHSSPEYWIKSGTLVPVRRNDIVKIEGIDATGGNNQRNIPDIPAHLWYFGLIGTC

SEQ ID NO: 12369 - protein, 268 aa, Synthetic construct
EVSQDLFNQFNLFAQYSAAAYCGKNNDAPAGTNITCTGNACPEVEKADATFLYSFEDSGVGDVTGFLALDNTNKLIVLSFRGSRSIENWIGNLKFLLKEINDICSGCRGHDGFTSSWRSVADTLRQKVEDAVREHPDYRVVFTGHSLGGALATVAGADLRGNGYDIDVFSYGAPRVGNRAFAEFLTVQTGGTLYRITHTNDIVPRLPPREFGYSHSSPEYWIRSGTLVPVTRNDIVKIEGIDATGGNNRPNIPDIPAHLWYFGLIGTC

SEQ ID NO: 12370 - protein, 268 aa, Thermomyces lanuginosus
EVSQDLFNQFNLFAQYSAAAYCGKNNDAPAGTNITCTGNACPEVEKADATFLYSFEDSGVGDVTGFLALDNTNKQIVLSFRGSRSIENWIGNLNFDLKEINDICSGCRGHAGFTSSWRSVADTLRQKVEAAVREHPDYRVVFTGHSLGGALATVAGADLRGNGYDIDVFSYGAPRVGNRAFAEFLTVQTGGTLYRITHTNDIVPRLPPREFGYSHSSPEYWIKSGTLVPVTRNDIVKIEGIDATGGNNQPNIPDIPAHLWYFGLIGTC

SEQ ID NO: 12371 - protein, 268 aa, Thermomyces lanuginosus
EVSQDLFNQFNLFAQYSAAAYCGKNNDAPAGTNITCTGNACPEVEKADATFLYSFEDSGVGDVTGFLALDNTNKLIVLSFRGSRSIENWIGNLNFDLKEINDICSGCRGHDGFTSSWRSVADTLRQKVEDAVREHPDYRVVFTGHSLGGALATVAGADLRGNGYDIDVFSYGAPRVGNRAFAEFLTVQTGGTLYRITHTNDIVPRLPPREFGYSHSSPEYWIKSGTLVPVRRRDIVKIEGIDATGGNNQPNIPDIPAHYWYFGLIGTC

SEQ ID NO: 12372 - protein, 268 aa, Thermomyces lanuginosus
EVSQDLFNQFNLFAQYSAAAYCGKNNDAEAGTNITCTGNACPEVEKADATFLYSFEDSGVGDVTGFLALDNTNKDIVLSFRGSRSIENWIGNLNFDLKEINDICSGCRGHDGFTSSWRSVADTLRQKVEDAVREHPDYRVVFTGHSLGGALATVAGADLRGNGYDIDVFSYGAPRVGNRAFAEFLTVQDGGTLYRITHTNDIVPRLPPREFGYSHSSPEYWIKSGTLVPVTRNDIVKIEGIDATGGNNQPNIPDIPAHLWYFGLIGTC

SEQ ID NO: 12373 - protein, 268 aa, Thermomyces lanuginosus
EVSQDLFNQFNLFAQYSAAAYCGKNNDAPAGTNITCTGNACPEVEKADATFLYSFEDSGVGDVTGFLALDNTNKLIVLSFRGSRSIENWIGNLNFDLKEINDICSGCRGHDGFTSSWRSVADTLRQKVEDAVREHPDYRVVFTGHSLGGALATVAGADLRGNGYDIDVFSYGAPRVGNRAFAEFLTVQTGGTLYRITFTNDIVPRLPPREFGYSHSSPEYWIKSGTLVPVRRRDIVKIEGIDATGGNNQPNIPDIPAHLWYFGLIGTC

SEQ ID NO: 12374 - protein, 268 aa, Thermomyces lanuginosus
EVSQDLFNQFNLFAQYSAAAYCQKNNDAPAGTNITCTGNACPEVEKADATTLYSFEDSGVGDVTGFLALDNTNKLIVLSFRGSRSIENWIGNLNFDLKEINDICSGCRGHDGFTSSWRSVADTLRQKVEDAVREHPDYRVVFTGHSLGGALATVAGADLRGNGYDIDVFSYGAPRVGNRAFAEFLTVQTGGTLYRITHTNDIVPRLPPREFGYSHSSPEYWIKSGTLVPVTRNDIVKIEGIDATGGNNQPNQPDIPAHLWYFGRIGTC

SEQ ID NO: 12375 - protein, 268 aa, Thermomyces lanuginosus
EVSQDLFNQFNLFAQYSAAAYCGKNNDAPAGTQITCTGNACPEVEKADATFLYSFEDSGVGDVTGFLALDNTNKLIVLSFRGSRSIENWIQNLNFDLKEINDICSGCRGHDGFTSSWRSVADTLRQKVEDAVREHPDYRVVFTGHSLGGALATVAGADLRGNGYDIDVFSYGAPRVGNRAFAEFLTVQTGGTLYRITHTNDIVPRLPPREFGYSHSSPEYWIKSGTLVPVRRRDIVKIEGIDATGGNNQPNIPDIPAHLWYFGLIGTC

SEQ ID NO: 12376 - protein, 268 aa, Thermomyces lanuginosus
EVSQDLFNQFNLFAQYSAAAYCGKNNDAPAGTNITCTGNACPEVEKADATFLYSFEDSGVGDVTGFLALDNTNKLIVLSFRGSRSIENWIGNLNFDLKEINDICSGCRGHDGFTSSWRSVADTLRQKVEDAVREHPDYRVVFTGHSLGGALATVAGADLRGNGYDIDVFSYGAPRVGNRAFAEFLTVQTGGTLYRITHTHDIVPRLPPREFGYSHSSPEYWIKSGTLVPVRRRDIVKIEGIDATGGNNQPNIPDIPAHLWYFGLIGTC

SEQ ID NO: 12377 - protein, 268 aa, Thermomyces lanuginosus
EVSQDLFNQFNLFAQYSAAAYCGKNNDAPAGTNITCTGNACPEVEKADATFLYSFEDSGVGDVTGFLALDNTNKLIVLSFRGSRSIENWIGNLNFDLKEINDICSGCRGHDGFTSSWRSVADTLRQKVEDAVREHPDYRVVFTGHSLGGALATVAGADLRGNGYDIDVFSYGAPRVGNRAFAEFLTVQTGGTLYRITTTNDIVPRLPPREFGYSHSSPEYWIKSGTLVPVRRRDIVKIEGIDATGGNNQPNIPDIPAHLWYFGLIGTC

SEQ ID NO: 12378 - protein, 268 aa, Synthetic construct
EVSQDLFNQFNLFAQYSAAAYCGKNNDAPAGTNITCTGNACPEVEKADATFLYSFKDSGVGDVTGFLALDNTNKLIVLSFRGSRSIENWIGNLNFDLKEINDICSGCRGHDGFTSSWRSVADTLRQKVEDAVREHPDYRVVFTGHSLGGALATVAGADLRGNGYDIGVFSYGAPRVGNRAFAEFLTVQTGGTLYRITHTNDIVPRLPPRVFGYSHSSPEYWIKSGTLVPVTRNDIVKIEGIDATGGNNQPNIPDIPAHLWYFGLIGTC

SEQ ID NO: 12379 - protein, 268 aa, Thermomyces lanuginosus
EVSQDLFNQFNLFAQYSAAAYCGKNNDAPAGTNITCTGNACPEVEKADATFLYSFEDSGVGDVTGFLALDNTNKLIVLSFRGSRSIENWIGNLNFDLKEINDICSGCRGHDGFTSSWRSVADTLRQKVEDAVREHPDYRVVFTGHSLGGALATVAGADLRGNGYDIDVFSYGAPRVGNRAFAEFLTVQTGGTLYRITYTNDIVPRLPPREFGYSHSSPEYWIKSGTLVPVRRRDIVKIEGIDATGGNNQPNIPDIPAHLWYFGLIGTC

SEQ ID NO: 12380 - protein, 268 aa, Thermomyces lanuginosus
EVSQDLFNQFNLFAQYSAAAYCGKNNDAPAGTNITCTGNACPEVEKADATFLYSFEDSGVGDVTGFLALDNTNKLIVLSFRGSRSIENWIGNLNFDLKEINDICSGCRGHDGFTSSWRSVADTLRQKVEDAVREHPDYRVVFTGHSLGGALATVAGADLRGNGYDIDVFSYGAPRVGNRAFAEFLTVQTGGTLYRITHTNDIVPRLPPREFGYSHSSPEYWIKYGTLVPVRRRDIVKIEGIDATGGNNQPNIPDIPAHLWYFGLIGTC

SEQ ID NO: 12381 - protein, 268 aa, Thermomyces lanuginosus
EVSQDLFNQFNLFAQYSAAAYCGKNNDAPAGTNITCTGNACPEVEKADATFLYSFEDSGVGDVTGFLALDNTNKLIVLSFRGSRSIENWIGNLNFDLKEINDICSGCRGHDGFTSSWRSVADTLRQKVEDAVREHPDYRVVFTGHSLGGALATVAGADLRGNGYDIDVFSYGAPRVGNRAFAEFLTVQTGGTLYRITHTNDIVPRLPPREFGYSHSSPEYWIKSGTRVPVRRRDIVKIEGIDATGGNNQPNIPDIPAHLWYFGLIGTC

SEQ ID NO: 12382 - protein, 268 aa, Thermomyces lanuginosus
EVSQDLFNQFNLFAQYSAAAYCGKNNDAPAGTNITCTGNACPEVEKADATFLYSFEDSGVGDVTGFLALDNTNKLIVLSFRGSRSIENWIGNLNFDLKEINDICSGCRGHDGFTSSWRSVADTLRQKVEDAVREHPDYRVVFTGHSLGGALATVAGADLRGNGYDIDVFSYGAPRVGNRAFAEFLTVQTGGTLYRITHTNDIVPRLPPREFGYSHSSPEYWIKPGTLVPVRRRDIVKIEGIDATGGNNQPNIPDIPAHLWYFGLIGTC

SEQ ID NO: 12383 - protein, 268 aa, Thermomyces lanuginosus
EVSQDLFNQFKLFAQYSAAAYCGKNNSAPAGTNITCTGNACPEVEKADATFLYSFEDMGVGDVTGFLALDNTNKLIVLSFRGSRSIENWIGNLNFDLKEINDICSGCRGHDGFTSSWRSVADTLRQKVEDAVREHPDYRVVFTGHSLGGALATVAGADLRGNGYDIDVFSYGAPRVGNRAFAEFLTVQTGGTLYRITHTNDIVPRLPPREFGYSHSSPEYWIKSGTLVPVTRNDIVKIEGIDATGGNNQPNIPDIPAHLWYFGLIGTC

SEQ ID NO: 12384 - protein, 268 aa, Thermomyces lanuginosus
EVSQDLFNQFNLFAQYSAAAYCQKNNDAPAGTNITCTGNACPEVEKADATFLYSFEDSGVGDVTGFLALDNTNKQIVLSFRGSRSIENWIGNLNFDLKEINDICSGCRGHDGFTSSWRSVADTLRQKVEAAVREHPDYRVVFTGHSLGGALATVAGADLRGNGYDIDVFSYGAPRVGNRAFAEFLTVQTGGTLYRITHTNDIVPRLPPREFGYSHSSPEYWIKSGTLVPVTRNDIVKIEGIDATGGNNQPNIPDIPAHLWYFGRIGTC

SEQ ID NO: 12385 - protein, 268 aa, Thermomyces lanuginosus
EVSQDLFNQFNLFAQYSAAAYCGKNNSAPAGTNITCTGNACPEVEKADATFLYSFEDSGVGDVTGFLALDNTNKLIVLSFRGSRSIENWIGNLNFDLKEINDICSGCRGHDGFTSSWRSVADTLRQKVEDAVREHPDYRVVFTGHSLGGALATVAGADLRGNGYDIDVFSYGAPRVGNRAFAEFLTVQTGGTLYRITHTNDIVPRLPPREFGYSHSSPEYWIKSGTLVPVTRADIVKIEGIDATGGNNQPNIPDITAHLWYFGLIGTC

SEQ ID NO: 12386 - protein, 268 aa, Thermomyces lanuginosus
EVSQDLFNQFNLFAQYSAAAYCGKNNDAPAGTNITCTGNACPEVEKADATFLYSFEDSGVGDVTGFLALDNTNKLIVLSFRGSRSIENWIGNLNFDLKEINDICSGCRGHDGFTSSWRSVADTLRQKVEDAVREHPDYRVVFTGHSLGGALATVAGADLRGNGYDIDVFSYGAPRVGNRAFAEFLTVQTGGTLYRITHTQDIVPRLPPREFGYSHSSPEYWIKSGTLVPVRRRDIVKIEGIDATGGNNQPNIPDIPAHLWYFGLIGTC

SEQ ID NO: 12387 - protein, 268 aa, Thermomyces lanuginosus
EVSQDLFNQFNLFAQYSAAAYCGKNNDAPAGTQITCTGNACPEVEKADATFLYSFEDSGVGDVTGFLALDNTNKLIVLSFRGSRSIENWIANLNFDLKKINDICSGCRGHDGFTSSWRSVADTLRQKVEDAVREHPDYRVVFTGHSLGGALATVAGADLRGNGYDIDVFSYGAPRVGNRAFAEFLTVQTGGTLYRITHTNDIVPRLPPREFGYSHSSPEYWIKSGTLVPVRRRDIVKIEGIDATGGNNRPNIPDRPAHLWYFGLIGTC

SEQ ID NO: 12388 - protein, 268 aa, Thermomyces lanuginosus
EVSQDLFNQFNLFAQYSAAAYCGKNNDAPAGTNITCTGNACPEVEKADATFLYSFEDSGVGDVTGFLALDNTNKLIVLSFRGSRSIENWIGNLNFDLKEINDICSGCRGHDGFTSSWRSVADTLRQKVEDAVREHPDYRVVFTGHSLGGALATVAGADLRGNGYDIDVFSYGAPRVGNRAFAEFLTVQTGGTLYRITHTNDIVPRLPPREFGYSHSSPEYWIKSGTLVPVRRRDIVKIEGIDATGGNNRPNIPDIPAHLWYFGLIGTC

SEQ ID NO: 12389 - protein, 268 aa, Thermomyces lanuginosus
EVSQDLFNQFNLFAQYSAAAYCGKNNDAPAGTQITCTGNACPEVEKADATFLYSFEDSGVGDVTGFLALDNTNKLIVLSFRGSRSIENWIANLNFDLKKINDICSGCRGHDGFTSSWRSVADTLRQKVEDAVREHPDYRVVFTGHSLGGALATVAGADLRGNGYDIDVFSYGAPRVGNRAFAEFLTVQTGGTLYRITHTNDIVPRLPPREFGYSHSSPEYWIKSGTLVPVRRRDIVKIEGIDARGGNNRPNIPDIPAHLWYFGLIGTC

SEQ ID NO: 12390 - protein, 268 aa, Thermomyces lanuginosus; identical to SEQ ID NO: 8100

SEQ ID NO: 12391 - protein, 268 aa, Synthetic construct
EVSQDLFNQFNLFAQYSAAAYCGKNNDAPAGTNITCTGNACPEVEKADATFLYSFEDSGVGDVTGFLALDNTNKLIVLSFRGSRSIENWIGNLKFLMKEINDICSGCRGHDGFTSSWRSVADTLRQKVEDAVREHPDYRVVFTGHSLGGALATVAGADLRGNGYDIDVFSYGAPRVGNRAFAEFLTVQTGGTLYRITHTNDIVPRLPPREFGYSHSSPEYWIKSGTLVPVTRNDIVKIEGIDATGGNNRPNIPDIPAHLWYFGLIGTC

SEQ ID NO: 12392 - protein, 268 aa, Thermomyces lanuginosus
EVSQDLFNQFNLFAQYSAAAYCGKNNDAPAGTNITCTGNACPEVEKADATFLYSFEDSGVGDVTGFLALDNTNKLIVLSFRGSRSIENWIGNLNFDLKEINDICSGCRGHDGFTSSWRSVADTLRQKVEDAVREHPDYRVVFTGHSLGGALATVAGADLRGNGYDIDVFSYGAPRVGNRAFAEFLTVQTGGTLYRITHTNDIVPRLPPRKFGYSHSSPEYWIKSGTLVPVRRRDIVKIEGIDATGGNNQPNIPDIPAHLWYFGLIGTC

SEQ ID NO: 12393 - protein, 268 aa, Thermomyces lanuginosus
EVSQDLFNQFNLFAQYSAAAYCGKNNDAPAGTQITCTGNACPEVEKADATFLYSFEDSGVGDVTGFLALDNTNKLIVLSFRGSRSIENWIGNLNFDLKEINDICSGCRGHDGFTSSWRSVADTLRQKVEDAVREHPDYRVVFTGHSLGGALATVAGADLRGNGYDIDVFSYGAPRVGNRAFAEFLTVQTGGTLYRITHTNDIVPRLPPREFGYSHSSPEYWIKSGTLVPVTRRDIVKIEGIDATGGNNQPNIPSIPAHLWYFGLIGTC

SEQ ID NO: 12394 - protein, 268 aa, Thermomyces lanuginosus
EVSQDLFNQFNLFAQYSAAAYCGKNNDAPAGTQITCTGNACPEVEKADATFLYSFEDSGVGDVTGFLALDNTNKLIVLSFRGSRSIENWIGNLNFDLKEINDICSGCRGHDGFTSSWRSVADTLRQKVEDAVREHPDYRVVFTGHSLGGALATVAGADLRGNGYDIDVFSYGAPRVGNRAFAEFLTVQTGGTLYRITHTNDIVPRLPPREFGYSHSSPEYWIKSGTLVPVTRRDIVKIEGIDATGGNNQPNIPQIPAHLWYFGLIGTC

SEQ ID NO: 12395 - protein, 268 aa, Thermomyces lanuginosus
EVSQDLFNQFNLFAQYSAAAYCGKNNDAPAGTQITCTGNACPEVEKADATFLYSFEDSGVGDVTGFLALDNTNKLIVLSFRGSRSIENWIGNLNFDLKEINDICSGCRGHDGFTSSWRSVADTLRQKVEDAVREHPDYRVVFTGHSLGGALATVAGADLRGNGYDIDVFSYGAPRVGNRAFAEFLTVQTGGTLYRITHTNDIVPRLPPREFGYSHSSPEYWIKSGTLVPVRRRDIVKIEGIDATGGNNQPNIPDIPAHLWYFGLIGTC

SEQ ID NO: 12396 - protein, 268 aa, Thermomyces lanuginosus
EVSQDLFNQFNLFAQYSAAAYCGKNNDAPAGTNITCTGNACPEVEKADATFLYSFEDSGVGDVTGFLALDNTNKLIVLSFRGSRSIENWIGNLNFDLKEINDICSGCRGHDGFTSSWRSVADTLRQKVEDAVREHPDYRVVFTGHSLGGALATVAGADLRGNGYDIDVFSYGAPRVGNRAFAEFLTVQTGGTLYRITHTNDIVPRLPPREFGYSHSSPEYWIKSGTLVPVRRRDIVKIEGIDATGGNNQPNIPHIPAHLWYFGLIGTC

SEQ ID NO: 12397 - protein, 268 aa, Thermomyces lanuginosus
EVSQDLFNQFNLFAQYSAAAYCGKNNDAPAGTQITCTGNACPEVEKADATFLYSFEDSGVGDVTGFLALDNTNKLIVLSFRGSRSIENWIGNLNFDLKEINDICSGCRGHDGFTSSWRSVADTLRQKVEDAVREHPDYRVVFTGHSLGGALATVAGADLRGNGYDIDVFSYGAPRVGNRAFAEFLTVQTGGTLYRITHTNDIVPRLPPREFGYSHSSPEYWIKSGTLVPVRRNDIVKIEGIDATGGNNQPNIPNIPAHLWYFGLIGTC

SEQ ID NO: 12398 - protein, 268 aa, Thermomyces lanuginosus
EVSQDLFNQFNLFAQYSAAAYCGKNNDAPAGTNITCTGNACPEVEKADATFLYSFEDSGVGDVTGFLALDNTNKLIVLSFRGSRSIENWIGNLNFDLKEINDICSGCRGHDGFTSSWRSVADTLRQKVEDAVREHPDYRVVFTGHSLGGALATVAGADLRGNGYDIDVFSYGAPRVGNRAFAEFLTVQTGGTLYRITHTNDIVPRLPPREFGYSHSSPEYWIKSGTGVPVRRRDIVKIEGIDATGGNNQPNIPDIPAHLWYFGLIGTC

SEQ ID NO: 12399 - protein, 268 aa, Thermomyces lanuginosus
EVSQDLFNQFNLFAQYSAAAYCGKNNDAPAGTQITCTGNACPEVEKADATFLYSFEDSGVGDVTGFLALDNTNKLIVLSFRGSRSIENWIGNLNFDLKEINDICSGCRGHDGFTSSWRSVADTLRQKVEDAVREHPDYRVVFTGHSLGGALATVAGADLRGNGYDIDVFSYGAPRVGNRAFAEFLTVQTGGTLYRITHTNDIVPRLPPREFGYSHSSPEYWIKSGTLVPVRRNDIVKIEGIDATGGNNQPNIPQIPAHLWYFGLIGTC

SEQ ID NO: 12400 - protein, 268 aa, Thermomyces lanuginosus
EVSQDLFNQFNLFAQYSAAAYCGKNNDAPAGTNITCTGNACPEVEKADATFLYSFEDSGVGDVTGFLALDNTNKLIVLSFRGSRSIENWIGNLNFDVKEINDICSGCRGHDGFTSSWRSVADTLRQKVEDAVREHPDYRVVFTGHSLGGALATVAGADLRGNGYDIDVFSYGAPRVGNRAFAEFLTVQTGGTLYRITHTNDIVPRLPPREFGYSHSSPEYWIKSGTLVPVRRRDIVKIEGIDATGGNNQPNIPDIPAHLWYFGLIGTC

SEQ ID NO: 12401 - protein, 268 aa, Thermomyces lanuginosus
EVSQDLFNQFNLFAQYSAAAYCGKNNDAPAGTNITCTGNACPEVEKADATFLYSFEDSGLGDVTGFLALDNTNKLIVLSFRGSRSIENWIMNLNFDLKEINDICSGCRGHDGFTSSWRSVADTLRQKVEDAVREHPDYRVVFTGHSLGGALATVAGADLRGNGYDIDVFSYGAPRVGNRAFAEFLTVQTGGTLYRITHTNDIVPRLPPREFGYSHSSPEYWIKSGTLVPVWRNDIVKIEGIDATGGNNLPNIPDIPAHLWYFGLIGTC

SEQ ID NO: 12402 - protein, 268 aa, Thermomyces lanuginosus
EVSQDLFNQFNLFAQYSAAAYCGKNNDAPAGTNITCTGNACPEVEKADATFLYSFEDSGVGDVTGFLALDNTNKLIVLSFRGSRSIENWIGNLNFDLKEINDICSGCRGHDGFTSSWRSVADTLRQKVEDAVREHPDYRVVFTGHSLGGALATVAGADLRGNGYDIDVFSYGAPRVGNRAFAEFLTVQTGGTLYRITHTNDIVPRLPPREFGYSHSSPEYWIKSGTLVPVRRRDIVKIEGIDATGGNNQPNIPYIPAHLWYFGLIGTC

SEQ ID NO: 12403 - protein, 269 aa, Thermomyces lanuginosus
EVSQDLFNQFNLFAQYSAAAYCGKNNDAPAGTNITCTGNACPEVEKADATFLYSFEDSGVGDVTGFLALDNTNKLIVLSFRGSRSIEETGSGNLNFDLKEINDICSGCRGHDGFTSSWRSVADTLRQKVEDAVREHPDYRVVFTGHSLGGALATVAGADLRGNGYDIDVFSYGAPRVGNRAFAEFLTVQTGGTLYRITHTNDIVPRLPPREFGYSHSSPEYWIKSGTLVPVTRNDIVKIEGIDATGGNNQPNIPDIPAHLWYFGLIGTC

SEQ ID NO: 12404 - protein, 268 aa, Thermomyces lanuginosus
EVSQDLFNQFNLFAQYSAAAYCGKNNDAPAGTNITCTGNACPEVEKADATFLYSFEDSGVGDVTGFLALDNTNKLIVLSFRGSRSIENWIGNLNFDLKEINDICSGCRGHDGFTSSWRSVADTLRQKVEDAVREHPDYRVVFTGHSLGGALATVAGADLRGNGYDIDVFSYGAPRVGNRAFAEFLTVQTGGTLYRITHTNDIVPRLPPREFGYSHSSPEYWIKSGTLVPVRRRDIVKIEGIDATGGNNQPNIPDPPAHLWYFGLIGTC

SEQ ID NO: 12405 - protein, 268 aa, Thermomyces lanuginosus
EVSQDLFNQFNLFAQYSAAAYCGKNNDAPAGTNITCTGNACPEVEKADATFLYSFEDSGVGDVTGFLALDNTNKLIVLSFRGSRSIENWIGNLNFDLKEINDICSGCRGHDGFTSSWRSVADTLRQKVEDAVREHPDYRVVFTGHSLGGALATVAGADLRGNGYDIDVFSYGAPRVGNRAFAEFLTVQTGGTLYRITHTNDIVPRLPPREFGYSHPSPEYWIKSGTLVPVRRRDIVKIEGIDATGGNNQPNIPDIPAHLWYFGLIGTC

SEQ ID NO: 12406 - protein, 268 aa, Thermomyces lanuginosus
EVSQDLFNQFNLFAQYSAAAYCGKNNDAPAGTNITCTGNACPEVEKADATFLYSFEDSGVGDVTGFLALDNTNKLIVLSFRGSRSIQNWIGNLNFDLKEINDICSGCRGHDGFTSSWRSVADTLRQKVEDAVREHPDYRVVFTGHSLGGALATVAGADLRGNGYDIDVFSYGAPRVGNRAFAEFLTVQTGGTLYRITHTNDIVPRLPPRQFGYSHSSPEYWIKSGTLVPVTRNDIVKIEGIDATGGNNQPNIPNIPAHLWYFGLIGTC

SEQ ID NO: 12407 - protein, 268 aa, Thermomyces lanuginosus
EVSQDLFNQFNLFAQYSAAAYCGKNNDAPAGTNITCTGNACPEVEKADATFLYSFEDSGVGDVTGFLALDNTNKLIVLSFRGSRSIENWIGNLNFDLKEINDICSGCRGHDGFTSSWRSVADTLRQKVEDAVREHPDYRVVFTGHSLGGALATVAGADLRGNGYDIDVFSYGAPRVGNRAFAEFLTVQTGGTLYRITHTNDIVPRLPPREFGYSHSSPEYWIKSGTLVPVRRRDIVKIEGIDATGGNNQPNIPNIPAHLWYFGLIGTC

SEQ ID NO: 12408 - protein, 268 aa, Synthetic construct
EVSQDLFNQFNLFAQYSAAAYCGKNNDAPAGTNITCTGNACPEVEKADATFLYSFEGSGVGDVTGFLALDNTNKLIVLSFRGSRSIENWIGNLKFLLKEINDICSGCRGHDGFTSSWRSVADTLRQKVEDAVREHPDYRVVFTGHSLGGALATVAGADLRGNGYDIDVFSYGAPRVGNRAFAEFLTVQTGGTLYRITHTNDIVPRLPPREFGYSHSSPEYWIKSGTLVPVTRNDIVKIEGIDATGGNNQPNIPDITAHLWYFGLIGTC

SEQ ID NO: 12409 - protein, 268 aa, Thermomyces lanuginosus
EVSQDLFNQFNLFAQYSAAAYCGKNNDAPAGTQITCTGNACPEVEKADATFLYSFEDSGVGDVTGFLALDNTNKLIVLSFRGSRSIENWIGNLNFDLKEINDICSGCRGHDGFTSSWRSVADTLRQKVEDAVREHPDYRVVFTGHSLGGALATVAGADLRGNGYDIDVFSYGAPRVGNRAFAEFLTVQTGGTLYRITHTNDIVPRLPPREFGYSHSSPEYWIKSGTLVPVRRNDIVKIEGIDATGGNNQPNIPYIPAHLWYFGLIGTC

SEQ ID NO: 12410 - protein, 268 aa, Thermomyces lanuginosus
EVSQDLFNQFNLFAQYSAAAYCGKNNDAPAGTNITCTGNACPEVEKADATFLYSFEDSGVGDVTGFLALDNTNKLIVLSFRGSRSIENWIGNLNFDLKEINDICSGCRGHDGFTSSWRSVADTLRQKVEDAVREHPDYRVVFTGHSLGGALATVAGADLRGNGYDIDVFSYGAPRVGNRAFAEFLTVQTGGTLYRITHTNDIVPRLPPREFGYSHSSPEYWIKSGTLVPVRRIGIVKIEGIDATGGNNQPNIPDIPAHLWYFGLIGTC

SEQ ID NO: 12411 - protein, 268 aa, Thermomyces lanuginosus
EVSQDLFNQFNLFAQYSAAAYCGKNNDAPAGTNITCTGNACPEVEKADATFLYSFEDSGVGDVTGFLALDNTNKLIVLSFRGSRSIENWIGNLNFDLKEINDICSGCRGHDGFTSSWRSVADTLRQKVEDAVREHPDYRVVFTGHSLGGALATVAGADLRGNGYDIDVFSYGAPRVGNRAFAEFLTVQTGGTLYRITHTNDIVPRLPPREFGYSHSSPEYWIKSGTLVPVRRRGIVKIEGIDATGGNNQPNIPDIPAHLWYFGLIGTC

SEQ ID NO: 12412 - protein, 268 aa, Synthetic construct
EVSQDLFNQFNLFAQYSAAAYCGKNNDAPAGTNITCTGNACPEVEKADATFLYSFEDSGVGDVTGFLALDNTNKLIVLSFRGSRSIENWIGNLKFLLKEINDICSGCRGHDGFTSSWRSVADTLRQKVEDAVREHPDYRVVFTGHSLGGALATVAGADLRGNGYDIDVFSYGAPRVGNRAFAEFLTVQTGGTLYRITHTNDIVPRLPPREFGYSHSSPEYWIKSGTLVPVTRNDIVKICGIDATGGNNRPNIPDIPAHLWYFGLIGTC

SEQ ID NO: 12413 - protein, 268 aa, Thermomyces lanuginosus
EVSQDLFNQFNLFAQYSAAAYCGKNNDAPAGTNITCTGNACPEVEKADATFLYSFEDAGVGDVTGFLALDNTNKLIVLSFRGDRSIENWIGNLNFDLKEINDICSGCRGRDGFTSSWRSVADTLRQKVEDAVREHPDYRVVFTGHSLGGALATVAGADLRGNGYDIDVFSYGAPRVGNRAFAEFLTVQTGGTLYRITHTNDIVPRLPPREFGYSHSSPEYWIKSGTLVPVTRNDIVKIEGIDATGGNNQPNIPDIPAHLWYFGLIGTC

SEQ ID NO: 12414 - protein, 268 aa, Thermomyces lanuginosus
EVSQDLFNQFNLFAQYSAAAYCGKNNDAPAGTNITCTGNACPEVEKADATFLYSFEDSGVGDVTGFLALDNTNKLIVLSFRGSRSIENWIGNLNFDLKEINDICSGCRGHDGFTSSWRSVADTLRQKVEDAVREHPDYRVVFTGHSLGGALATVAGADLRGNGYDIDVFSYGAPRVGNRAFAEFLTVQTGGTLYRITHTNDIVPRLPPREFGYSHSSPEYWIKSGTLVPVRRRDIVKIEGIDATGGNNQPNIPLIPAHLWYFGLIGTC

SEQ ID NO: 12415 - protein, 268 aa, Thermomyces lanuginosus
EVSQDLFNQFNLFAQYSAAAYCGKNNDAPAGTQITCTGNACPEVEKADATFLYSFEDSGVGDVTGFLALDNTNKLIVLSFRGSRSIENWIGNLNFDLKEINDICSGCRGHDGFTSSWRSVADTLRQKVEDAVREHPDYRVVFTGHSLGGALATVAGADLRGNGYDIDVFSYGAPRVGNRAFAEFLTVQTGGTLYRITHTNDIVPRLPPREFGYSHSSPEYWIKSGTLVPVRRNDIVKIEGIDATGGNNQPNIPSIPAHLWYFGLIGTC

SEQ ID NO: 12416 - protein, 268 aa, Thermomyces lanuginosus
EVSQDLFNQFNLFAQYSAAAYCGKNNDAPAGTNITCTGNACPEVEKADATFLYSFEDSGVGDVTGFLALDNTNKLIVLSFRGSRSIENWAGNLNFDLKEINDICSGCRGHDGFTSSWRSVADTLRQKVEDAVREHPDYRVVFTGHSLGGALATVAGADLRGNGYDIDVFSYGAPRVGNRAFAEFLTVQTGGTLYRITHTNDIVPRLPPREFGYSHSSPEYWIKSGTLVPVRRRDIVKIEGIDATGGNNQPNIPDIPAHLWYFGLIGTC

SEQ ID NO: 12417 - protein, 268 aa, Thermomyces lanuginosus
EVSQDLFNQFNLFAQYSAAAYCGKNNDAPAGTQITCTGNACPEVEKADATFLYSFEDSGVGDVTGFLALDNTNKLIVLSFRGSRSIENWIGNLNFDLKEINDICSGCRGHDGFTSSWRSVADTLRQKVEDAVREHPDYRVVFTGHSLGGALATVAGADLRGNGYDIDVFSYGAPRVGNRAFAEFLTVQTGGTLYRITHTNDIVPRLPPREFGYSHSSPEYWIKSGTLVPVTRRDIVKIEGIDATGGNNQPNIPTIPAHLWYFGLIGTC

SEQ ID NO: 12418 - protein, 268 aa, Thermomyces lanuginosus
EVSQDLFNQFNLFAQYSAAAYCGKNNDAPAGTQITCTGNACPEVEKADATFLYSFEDSGVGDVTGFLALDNTNKLIVLSFRGSRSIENWIGNLNFDLKEINDICSGCRGHDGFTSSWRSVADTLRQKVEDAVREHPDYRVVFTGHSLGGALATVAGADLRGNGYDIDVFSYGAPRVGNRAFAEFLTVQTGGTLYRITHTNDIVPRLPPREFGYSHSSPEYWIKSGTLVPVTRRDIVKIEGIDATGGNNQPNIPLIPAHLWYFGLIGTC

SEQ ID NO: 12419 - protein, 268 aa, Thermomyces lanuginosus
EVSQDLFNQFNLFAQYSAAAYCGKNNDAPAGTQITCTGNACPEVEKADATFLYSFEDSGVGDVTGFLALDNTNKLIVLSFRGSRSIENWIGNLNFDLKEINDICSGCRGHDGFTSSWRSVADTLRQKVEDAVREHPDYRVVFTGHSLGGALATVAGADLRGNGYDIDVFSYGAPRVGNRAFAEFLTVQTGGTLYRITHTNDIVPRLPPREFGYSHSSPEYWIKSGTLVPVTRRDIVKIEGIDATGGNNQPNIPNIPAHLWYFGLIGTC

SEQ ID NO: 12420 - protein, 268 aa, Thermomyces lanuginosus
EVSQDLFNQFNLFAQYSAAAYCGKNNDAPAGTNITCTGNACPEVEKADATFLYSFEDSGVGDVTGFLALDNTNKLIVLSFRGSRSIENWIGNLNFDLKEINDICSGCRGHDGFTSSWRSVADTLRQKVEDAVREHPDYRVVFTGHSLGGALATVAGADLRGNGYDIDVFSYGAPRVGNRAFAEFLTVQTGGTLYRITHTNDIVPRLPPREFGYSHSSPEYWIKSGTLVPVRRRDIVKIEGIDATGGNNQPNIPQIPAHLWYFGLIGTC

SEQ ID NO: 12421 - protein, 268 aa, Thermomyces lanuginosus
EVSQDLFNQFNLFAQYSAAAYCGKNNDAPAGTQITCTGNACPEVEKADATFLYSFEDSGVGDVTGFLALDNTNKLIVLSFRGSRSIENWIGNLNFDLKEINDICSGCRGHDGFTSSWRSVADTLRQKVEDAVREHPDYRVVFTGHSLGGALATVAGADLRGNGYDIDVFSYGAPRVGNRAFAEFLTVQTGGTLYRITHTNDIVPRLPPREFGYSHSSPEYWIKSGTLVPVRRNDIVKIEGIDATGGNNQPNIPHIPAHLWYFGLIGTC

SEQ ID NO: 12422 - protein, 268 aa, Synthetic construct
EVSQDLFNQFNLFAQYSAAAYCGKNNDAPAGTNITCTGNACPEVEKADATFLYSFQDSGVGDVTGFLALDNTNKLIVLSFRGSRSIENWIGNLNFDLKEINDICSGCRGHDGFTSSWRSVADTLRQKVEDAVREHPDYRVVFTGHSLGGALATVAGADLRGNGYDIDVFSYGAPRVGNRAFAEFLTVQTGGTLYRITHTNDIVPRVPPREFGYSHSSPEYWIKSGTLVPVTRNDIVKIEGIDATGGNNQPNIPDIPAHIWYFGLIGTC

SEQ ID NO: 12423 - protein, 268 aa, Thermomyces lanuginosus
EVSQDLFNQFNLFAQYSAAAYCGKNNDAPAGTQITCTGNACPEVEKADATFLYSFEDSGVGDVTGFLALDNTNKLIVLSFRGSRSIENWIGNLNFDLKEINDICSGCRGHDGFTSSWRSVADTLRQKVEDAVREHPDYRVVFTGHSLGGALATVAGADLRGNGYDIDVFSYGAPRVGNRAFAEFLTVQTGGTLYRITHTNDIVPRLPPREFGYSHSSPEYWIKSGTLVPVTRRDIVKIEGIDATGGNNQPNIPYIPAHLWYFGLIGTC

SEQ ID NO: 12424 - protein, 268 aa, Thermomyces lanuginosus
EVSQDLFNQFNLFAQYSAAAYCGKNNDAPAGTNITCTGNACPEVEKADATFLYSFEDSGVGDVTGFLALDNTNKLIVLSFRGSRSIENWIGNLNFDLKEINDICSGCRGHDGFTSSWRSVADTLRQKVEDAVREHPDYRVVFTGHSLGGALATVAGADLRGNGYDIDVFSYGAPRVGNRAFAEFLTVQTGGTLYRITHTNDIVPRTPPREFGYSHSSPEYWIKSGTLVPVTRNDIVKIEGIDATGGNNQPNIPDTPAHTWYFGLIGTC

SEQ ID NO: 12425 - protein, 268 aa, Thermomyces lanuginosus
EVSQDLFNQFNLFAQYSAAAYCGKNNDAPAGTQITCTGNACPEVEKADATFLYSFEDSGVGDVTGFLALDNTNKLIVLSFRGSRSIENWIGNLNFDLKEINDICSGCRGHDGFTSSWRSVADTLRQKVEDAVREHPDYRVVFTGHSLGGALATVAGADLRGNGYDIDVFSYGAPRVGNRAFAEFLTVQTGGTLYRITHTNDIVPRLPPREFGYSHSSPEYWIKSGTLVPVRRNDIVKIEGIDATGGNNQPNIPLIPAHLWYFGLIGTC

SEQ ID NO: 12426 - protein, 268 aa, Thermomyces lanuginosus
EVSQDLFNQFNLFAQYSAAAYCGKNNDAPAGTQITCTGNACPEVEKADATFLYSFEDSGVGDVTGFLALDNTNKLIVLSFRGSRSIENWIGNLNFDLKEINDICSGCRGHDGFTSSWRSVADTLRQKVEDAVREHPDYRVVFTGHSLGGALATVAGADLRGNGYDIDVFSYGAPRVGNRAFAEFLTVQTGGTLYRITHTNDIVPRLPPREFGYSHSSPEYWIKSGTLVPVTRRDIVKIEGIDATGGNNQPNIPHIPAHLWYFGLIGTC

SEQ ID NO: 12427 - protein, 268 aa, Thermomyces lanuginosus
EVSQDLFNQFNLFAQYSAAAYCGKNNDAPAGTNITCTGNACPEVEKADATFLYSFEDSGVGDVTGFLALDNTNKLIVLSFRGSRSIENWIGNLNFDLKEINDICSGCRGHDGFTSSWRSVADTLRQKVEDAVREHPDYRVVFTGHSLGGALATVAGADLRGNGYDIDVFSYGAPRVGNRAFAEFLTVQTGGTLYRITHTNDIVPRLPPREFGYSHSSPEYWIKSGTLVPVRRRDIVKIEGIDATGGNNQPNIPTIPAHLWYFGLIGTC

SEQ ID NO: 12428 - protein, 268 aa, Thermomyces lanuginosus
EVSQDLFNQFNLFAQYSAAAYCGKNNDAPAGTQITCTGNACPEVEKADATFLYSFEDSGVGDVTGFLALDNTNKLIVLSFRGSRSIENWIGNLNFDLKEINDICSGCRGHDGFTSSWRSVADTLRQKVEDAVREHPDYRVVFTGHSLGGALATVAGADLRGNGYDIDVFSYGAPRVGNRAFAEFLTVQTGGTLYRITHTNDIVPRLPPREFGYSHSSPEYWIKSGTLVPVRRNDIVKIEGIDATGGNNQPNIPTIPAHLWYFGLIGTC

SEQ ID NO: 12429 - protein, 267 aa, Thermomyces lanuginosus
EVSQDLFNQFNLFAQYSAAAYCGKNNDAPAGTNITCTGNACPEVEKADATFLYSFEDSGVGDVTGFLALDNTNKLIVLSFRGSRSIENWIGNLNFDLKEINDICSGCRGHDGFTSSWRSVADTLRQKVEDAVREHPDYRVVFTGHSLGGALATVAGADLRGNGYDIDVFSYGAPRVGNRAFAEFLTVQTGGTLYRITHTNDIVPRLPPREFGYSHSSPEYWIKRRTRPVTRNDIVKIEGIDATGGNNQPNIPDIPAHLWYFGLIGTC

SEQ ID NO: 12430 - protein, 267 aa, Thermomyces lanuginosus
VSQDLFNQFNLFAQYSAAAYCGKNNDAPAGTQITCTGNACPEVEKADATFLYSFEDSGVGDVTGFLALDNTNKLIVLSFRGSRSIENWIGNLNFDLKEINDICSGCRGHDGFTSSWRSVADTLRQKVEDAVREHPDYRVVFTGHSLGGALATVAGADLRGNGYDIDVFSYGAPRVGNRAFAEFLTVQTGGTLYRITHTNDIVPRLPPREFGYSHSSPEYWIKSGTLVPVRRRDIVKIEGIDATGGNNQPNIPDIPAHLWYFGLIGTC

SEQ ID NO: 12431 - protein, 267 aa, Thermomyces lanuginosus
VSQDLFNQFNLFAQYSAAAYCGKNNDAPAGTNITCTGNACPEVEKADATFLYSFEDSGVGDVTGFLALDNTNKLIVLSFRGSRSIENWIGNLNFDLKEINDICSGCRGHDGFTSSWRSVADTLRQKVEDAVREHPDYRVVFTGHSSGGALATVAGADLRGNGYDIDVFSYGAPRVGNRAFAEFLTVQTGGTLYRITHTNDIVPRLPPREFGYSHSSPEYWIKSGTLVPVTRCDIVKIEGIDATGGNNQPNIPSIPAHLWYFGLIGTC

SEQ ID NO: 12432 - protein, 267 aa, Thermomyces lanuginosus
VSQDLFNQFNLFAQYSAAAYCGKNNRAPAGTNITCTGNACPEVEKADATYLYSFEDSGVGDVTGFLALDNTNKLIVLSFRGSRSIENWIGNLNFDLKEINDICSGCRGHDGFTSSWRSVADTLRQKVEDAVREHPDYRVVFTGHSLGGALATVAGADLRGNGYDIDVFSYGAPRVGNRAFAEFLTVQTGGTLYRITHTNDIVPRLPPREFGYSHSSPEYWIKSGTLVPVTRCDIVKIEGIDATGGNNQPNIPDIPAHLWYFGLIGTC

SEQ ID NO: 12433 - protein, 267 aa, Thermomyces lanuginosus
VSQDLFNQFNLFAQYSAAAYCGKNNDAPAGTNITCTGNACPEVEKADATFLYSFEDSGVGDVTGFLALDNTNKLIVLSFRGSRSIENWIGNLNFDLDNINDICSGCRGHDGFTSSWRSVADTLRQKVEDAVREHPDYRVVFTGHSLGGALATVAGADLRGNGYDIDVFSYGAPRVGNRAFAEFLTVQTGGTLYRITHTNDIVPRLPPREFGYSHSSPEYWIKSGTLVPVTRNDIVKICGIDATGGNNRPNIPDIPAHLWYFGLIGTC

SEQ ID NO: 12434 - protein, 267 aa, Synthetic construct
VSQDLFNQFNLFAQYSAAAYCGKNNDAPAGTNITCTGNACPEVEKADATFLYSFEDSGVGDVTGFLALDNTNKLIVLSFRGSRSIENWIGNLKFLLKEINDICSGCRGHDGFTSSWRSVADTLRQKVEDAVREHPDYRVVFTGHSLGGALATVAGADLRGNGYDIDVFSYGAPRVGNRAFAEFLTVQTGGTLYRITHTNDIVPRLPPREFGYSHSSPEYWIKSGTLVPVTRNDIVKICGIDATGGNNRPNIPDIPAHLWYFGLIGTC

SEQ ID NO: 12435 - protein, 267 aa, Synthetic construct
VSQDLFNQFNLFAQYSAAAYCGKNNDAPAGTNITCTGNACPEVEKADATFLYSFEDSGVGDVTGFLALDNTNKLIVLSFRGSRSIENWFGNLNFLLKKINDICSGCRGHDGFTSSWRSVADTLRQKVEDAVREHPGYRVVFTGHSLGGALATVAGADLRGNGYDIDVFSYGAPRVGNRAFAEFLTAQTGGTLYRITHTNDIVPRLPPREFGYSHSSPEYWIKSGTLVPVTRNDIVKIEGIDATGGNNRPNIPDIPAHLWYFGLIGTC

SEQ ID NO: 12436 - protein, 267 aa, Synthetic construct
VSQDLFNQFNLFAQYSAAAYCGKNNDAPAGTNITCTGNACPEVEKADATFLYSFEDSGVGDVTGFLALDNTNKLIVLSFRGSRSIENWFGNLNFLLKKINDICSGCRGHDGFTSSWRSVADTLRQKVEDAVREHPDYRVVFTGHSLGGALATVAGADLRGNGYDIDVFSYGAPRVGNRAFAEFLTAQTGGTLYRITHTRDIVPRLPPAEFGYSHSSPEYWIKSGTLVPVTRNDIVKIEGIDATGGNNQPNIPDIPAHLWYFGLIGTC

SEQ ID NO: 12437 - protein, 274 aa, Synthetic construct
EVSQDLFNQFNLFAQYSAAAYCGKNNDAPAGTNITCTGNACPEVEKADATFLYSFEDSGVGDVTGFLALDNTNKLIVLSFRGSRSIENWIGNLNFDLKEINDICSGCRGHDGFTSSWRSVADTLRQKVEDAVREHPDYRVVFTGHSLGGALATVAGADLRGNGYDIDVFSYGAPRVGNRAFAEFLTVQTGGTLYRITHTNDIVPRLPPREFGYSHSSPEYWIKSGTLVPVTRNDIVKIEGIDATGGNNQPNIPDIPAHLWYFGLIGTCLAAAGS

SEQ ID NO: 12438 - protein, 272 aa, Thermomyces lanuginosus
EVSQDLFNQFNLFAQYSAAAYCGKNNDAPAGTNITCTGNACPEVEKADATFLYSFEDSGVGDVTGFLALDNTNKLIVLSFRGSRSIENWIANLNFDLKKINDICSGCRGHDGFTSSWRSVADTLRQKVEDAVREHPDYRVVFTGHSLGGALATVAGADLRGNGYDIDVFSYGAPRVGNRAFAEFLTVQTGGTLYRITHTNDIVPRLPPREFGYSHSSPEYWIKSGTLVPVRRRDIVKIEGIDATGGNNRPNIPDIPAHLWYFGLIGTCLSPG

SEQ ID NO: 12439 - protein, 271 aa, Thermomyces lanuginosus
EVSQDLFNQFNLFAQYSAAAYCGKNNDAPAGTNITCTGNACPEVEKADATFLYSFEDSGVGDVTGFLALDNTNKLIVLSFRGSRSIENWIANLNFDLKKINDICSGCRGHDGFTSSWRSVADTLRQKVEDAVREHPDYRVVFTGHSLGGALATVAGADLRGNGYDIDVFSYGAPRVGNRAFAEFLTVQTGGTLYRITHTNDIVPRLPPREFGYSHSSPEYWIKSGTLVPVRRRDIVKIEGIDARGGNNRPNIPDIPAHLWYFGLIGTCLPG

SEQ ID NO: 12440 - protein, 271 aa, Thermomyces lanuginosus
EVSQDLFNQFNLFAQYSAAAYCGKNNDAPAGTQITCTGNACPEVEKADATFLYSFEDSGVGDVTGFLALDNTNKLIVLSFRGSRSIENWIANLNFDLKKINDICSGCRGHDGFTSSWRSVADTLRQKVEDAVREHPDYRVVFTGHSLGGALATVAGADLRGNGYDIDVFSYGAPRVGNRAFAEFLTVQTGGTLYRITHTNDIVPRLPPREFGYSHSSPEYWIKSGTLVPVRRRDIVKIEGIDATGGNNRPNIPDIPAHLWYFGLIGTCLPG

SEQ ID NO: 12441 - protein, 270 aa, Thermomyces lanuginosus
VSQDLFNQFNLFAQYSAAAYCGKNNDAPAGTQITCTGNACPEVEKADATFLYSFEDSGVGDVTGFLALDNTNKLIVLSFRGSRSIENWIANLNFDLKKINDICSGCRGHDGFTSSWRSVADTLRQKVEDAVREHPDYRVVFTGHSLGGALATVAGADLRGNGYDIDVFSYGAPRVGNRAFAEFLTVQTGGTLYRITHTNDIVPRLPPREFGYSHSSPEYWIKSGTLVPVRRRDIVKIEGIDATGGNNRPNIPDIPAHLWYFGLIGTCLPG

SEQ ID NO: 12442 - protein, 268 aa, Thermomyces lanuginosus
EVSRDLFNQFNLFAQYSAAAYCGKNNDAPAGTNITCTGNACPEVEKADATFLYSFEDSGVGDVTGFLALDNTNKLIVLSFRGSRSIENWIGNLNFDLKEINDICSGCRGHDGFTSSWRSVADTLRQKVEDAVREHPDYRVVFTGHSLGGALATVAGADLRGNGYDIDVFSYGAPRVGNRAFAEFLTVQTGGTLYRITHTNDIVPRLPPREFGYSHSSPEYWIKSGTLPPVRRRDIVKIEGIDATGGNNQPNIPDIPAHLWYFGLIGTC

SEQ ID NO: 12443 - protein, 268 aa, Thermomyces lanuginosus
EVSQDLFNQFNLFAQYSAAAYCGKNNDAPAGTNITCTGNACPEVEKADATFLYSFEDSGVGDVTGFLALDNTNKLIVLSFRGSRSIENWIGNLNFDLKEINDICSGCRGHDGFTSSWRSVADTLRQKVEDAVREHPDYRVVFTGHSLGGALATVAGADLRGNGYDIDVFSYGAPRVGNRALAEFLTVQTGGTLYRITHTNDIVPRLPPRVFGYSHSSPEYWIKSGTLVPVRRRDIVKIEGIDATGGNNQPNIPDIPAHLWYFGLIGTC

SEQ ID NO: 12444 - protein, 268 aa, Thermomyces lanuginosus
EVSQDLFNQFNLFAQYSAAAYCGKNNDAPAGTQITCTGNACPEVEKADATFLYSFEDSGVGDVTGFLALDNTNKLIVLSFRGSRSIRNWIGNLNFDLKEINDICSGCRGHDGFTSSWRSVADTLRQKVEDAVREHPDYRVVFTGHSLGGALATVAGADLRGNGYDIDVFSYGAPRVGNRAFAEFLTVQTGGTLYRITHTNDIVPRLPPREFGYSHSSPEYWIKSGTLVPVRRRDIVKIEGIDATGGNNQPNIPDIPAHLWYFGLIGTC

SEQ ID NO: 12445 - protein, 268 aa, Thermomyces lanuginosus
EVSQDLFNQFNLFAQYSAAAYCGKNNDAPAGTNITCTGNACPEVEKADATFLYSFEDSGVGDVTGFLALDNTNKLIVLSFRGSRSIENWIGNLNFDLKEINDICSGCRGHDGFTSSWRSVADTLRQKVEDAVREHPDYRVVFTGHSLGGALATVAGADLRGDGYDIDVFSYGAPRVGNRAFAEFLTVQTGGTLYRITHTNDIVPRLPPREFGYSHSSPEYWIKSGTLPPVRRRDIVKIEGIDATGGNNQPNIPDIPAHLWYFGLIGTC

SEQ ID NO: 12446 - protein, 268 aa, Thermomyces lanuginosus
EVSQDLFNQFNLFAQYSAAAYCGKNNDAPAGTQITCTGNACPEVEKADATFLYSFEDSGVGDVTGFLALDNTNKLIVLSFRGSRSIENWIGNLNFDLKEINDICSGCRGHDGFTSSWRSVADTLRQKVEDAVREHPDYRVVFTGHSLGGALATVAGADLRGNNYDIDVFSYGAPRVGNRAFAEFLTVQTGGTLYRITHTNDIVPRLPPREFGYSHSSPEYWIKSGTLVPVRRRDIVKIEGIDATGGNNQPNIPDIPAHLWYFGLIGTC

SEQ ID NO: 12447 - protein, 268 aa, Thermomyces lanuginosus
EVSQDLFNQFNLFAQYSAAAYCGKNNDAPAGTNITCTGNACPEVEKADATFLYSFEDSGVGDVTGFLALDNTNKLIVLSFRGSRSIENWIINLNFDLKEINDICSGCRGHDGFTSSWRSVADTLRQKVEDAVREHPDYRVVFTGHSLGGALATVAGADLRGNGYDIDVFSYGAPRVGNRAFAEFLTVQTGGTLYRITHTNDIVPRLPPRQFGYSHSSPEYWIKSGTLVPVRRRDIVKIEGIDATGGNNQRNIPDIPAHLWYFGLIGTC

SEQ ID NO: 12448 - protein, 268 aa, Thermomyces lanuginosus
EVSQDLFNQFNLFAQYSAAAYCGKNNDAPAGTQITCTGNACPEVEKADATFLYSFEDSGVGDVTGFLALDNTNKLIVLSFRGSRSIENWIGNLNFDLKEINDICSGCRGHDGFTSSWRSVADTLRQKVEDAVREHPDYRVVFTGHSLGGALATVAGADLRGNGYDIDVFSYGAPRVGNRAFAEFLTVQTGGTLYRITHTNDIVPRLPPRDFGYSHSSPEYWIKSGTLVPVRRRDIVKIEGIDATGGNNQPNIPDIPAHLWYFGLIGTC

SEQ ID NO: 12449 - protein, 268 aa, Thermomyces lanuginosus
EVSQDLFNQFNLFAQYSAAAYCGKNNDAPAGTQITCTGNACPEVEKADATFLYSFEDSGVGDVTGFLALDNTNKLIVLSFRGSRSIENWITNLNFDLKEINDICSGCRGHDGFTSSWRSVADTLRQKVEDAVREHPDYRVVFTGHSLGGALATVAGADLRGNGYDIDVFSYGAPRVGNRAFAEFLTVQTGGTLYRITHTNDIVPRLPPREFGYSHSSPDYWIKSGTLVPVRRRDIVKIEGIDATGGNNQPNIPDIPAHLWYFGLIGTC

SEQ ID NO: 12450 - protein, 268 aa, Thermomyces lanuginosus
EVSQDLFNQFNLFAQYSAAAYCGKNNNAPAGTNITCTGNACPEVEKADATFLYSFKDSGVGDVTGFLALDNTNKLIVLSFRGSRSIENWIGNLNFDLKEINDICSGCRGHDGFTSSWRSVADTLRQKVEDAVREHPDYRVVFTGHSLGGALATVAGADLRGNGYDIDVFSYGAPRVGNRAFAEFLTVQTGGTLYRITHTNDIVPRLPPREFGYSHSSPEYWIKSGTLVPVTRQDIVKIEGIDATGGNNQPNIPDITAHLWYFGLIGTC

SEQ ID NO: 12451 - protein, 268 aa, Thermomyces lanuginosus
EVSQDLFNQFNLFAQYSAAAYCGKNNDAPAGTNITCTGNACPEVEKADATFLYSFEDSGVGDVTGFLALDNTNKLIVLSFRGSRSIENWIGNLNFDLKEINDICSGCRGHDGFTSSWRSVADTLRQKVEDAVREHPDYRVVFTGHSLGGALATVAGADLRGNGYDIDVFSYGAPRVGNRAFAEFLTVQTGGTLYRITHTNDIVPRLPPREFGYSHSSPEYWIKSGTLVPVRRRDIVKIEGIDATGGNNQPNIPSITAHLWYFGLIGTC

SEQ ID NO: 12452 - protein, 268 aa, Thermomyces lanuginosus
EVSQDLFNQFNLFAQYSAAAYCGKNNDAPAGTNITCTGNACPEVEKADATFLYSFEDSGKGDVTGFLALDNTNKLIVLSFRGTRSIENWIGNLNFDLKEINDICSGCRGHDGFTSSWRSVADTLRQKVEDAVREHPDYRVVFTGHSLGGALATVAGADLRGNGYDIDVFSYGAPRVGNRAFAEFLTVQTGGTLYRITHTNDIVPRLPPREFGYSHSSPEYWIKSGTLVPVRRRDIVKIEGIDATGGNNQPNIPDIPAHLWYFGLIGTC

SEQ ID NO: 12453 - protein, 268 aa, Thermomyces lanuginosus
EVSQDLFNQFNLFAQYSAAAYCKKNNDAPAGTNITCTGNACPEVEKADATFLYSFKDSGVGDVTGFLALDNTNKRIVLSFRGSRSIENWIGNLNFDLKEINDICSGCRGHDGFTSSWRSVADTLRQKVEDAVREHPDYRVVFTGHSLGGALATVAGADLRGNGYDIDVFSYGAPRVGNRAFAEFLTTQTGGTLYRITHTNDIVPRLPPREFGYSHSSPEYWIKSGTLVPVTRNDIVKIEGIDATGGNNQPNIPDIPAHLWYFGRIGTC

SEQ ID NO: 12454 - protein, 268 aa, Thermomyces lanuginosus
EVSQDLFNQFNLFAQYSAAAYCQKNNDAPAGTNITCTGNACPEVEKADVTFLYSFEDSGVGDVTGFLALDNTNKLIILSFRGSRSIENWIGNLNFDLKEINDICSGCRGHDGFTSSWRSVADTLRQKVEDAVREHPDYRVVFTGHSLGGALATVAWADLRGNGYDIDVFSYGAPRVGNRAFAEFLTVQTGGTLYRITHTNDIVPRLPPREFGYSHSSPEYWIKSGTLVPVTRNDIVKIEGIDATGGNNQPNIPDIPAHLWYFGLIGTC

SEQ ID NO: 12455 - protein, 268 aa, Thermomyces lanuginosus
EVSQDLFNQFNLFAQYSAAAYCGKNNDAPAGTNITCTGNACPEVEKADATFLYSFEDSGVGDVTGFLALDNTNKLIVLSFRGSRSIENWIGNLNFDLKEINDICSGCRGHDGFTSSWRSVADTLRQKVEDAVREHPDYRVVFTGHSLGGALATVAGADLRGNGYDIDVFSYGAPRVGNRAFAEFLTVQTGGTLYRITSTNDIVPRLPPREFGYSHSSPEYWIKSGTLPPVRRRDIVKIEGIDATGGNNQPNIPDIPAHLWYFGLIGTC

SEQ ID NO: 12456 - protein, 268 aa, Thermomyces lanuginosus
EVSQDLFNQFNLFAQYSAAAYCGKNNDAPAGTNITCTGNACPEVEKADATFLYSFEDSGVGDVTGFLALDNTNKLIVLSFRGSRSIENWIGNLNFDLKEINDICSGCRGHDGFTSSWRSVADTLRQKVEDAVREHPDYRVVFTGHSLGGALATVAGADLRGNGYDIDVFSYGAPRVGNRAFAEFLTVQTGGTLYRITHTNDIVPRLPPRQFGYSHSSPEYWIKSGTLVPVRRRDIVKIEGIDATGGNNQPNIPDAPAHLWYFGLIGTC

SEQ ID NO: 12457 - protein, 268 aa, Thermomyces lanuginosus
EVSQDLFNQFNLFAQYSAAAYCGKNNDAPAGTQITCTGNACPEVEKADATFLYSFEDSGVGDVTGFLALDNTNKLIVLSFRGSRSIENWIGNLNFSLKEINDICSGCRGHDGFTSSWRSVADTLRQKVEDAVREHPDYRVVFTGHSLGGALATVAGADLRGNGYDIDVFSYGAPRVGNRAFAEFLTVQTGGTLYRITHTNDIVPRLPPREFGYSHSSPEYWIKSGTLVPVRRRDIVKIEGIDATGGNNRPNIPDIPAHLWYFGLIGTC

SEQ ID NO: 12458 - protein, 268 aa, Thermomyces lanuginosus
EVSQDLFNQFNLFAQYSAAAYCGKNNDAPAGTQITCTGNACPEVEKADATFLYSFKDSGVGDVTGFLALDNTNKLIVLSFRGSRSIENWIGNLNFDLKEINDICSGCRGHDGFTSSWRSVADTLRQKVEDAVREHPDYRVVFTGHSLGGALATVAGADLRGNGYDIDVFSYGAPRVGNRAFAEFLTVQTGGTLYRITHTNDIVPRLPPREFGYSHSSPEYWIKSGTLVPVRRRDIVKIEGIDATGGNNQPNIPDIPAHLWYFGLIGTC

SEQ ID NO: 12459 - protein, 268 aa, Thermomyces lanuginosus
EVSQDLFNQFNLFAQYSAAAYCGKNNDAPAGTNITCTGNACPEVEKADATFLYSFEDSGVGDVTGFLALDNTNKLIVLSFRGSRSIENWIGNLNFDLKEINDICSGCRGHDGFTSSWRSVADTLRQKVEDAVREHPDYRVVFTGHSLGGALATVAGADLRGNKYDIDVFSYGAPRVGNRAFAEFLTVQTGGTLYRITHTNDIVPRLPPREFGYSHSSPEYWIKSGTLVPVRRRDIVKIEGIDATGGNNQPNIPSIPAHLWYFGLIGTC

SEQ ID NO: 12460 - protein, 268 aa, Thermomyces lanuginosus
EVSQDLFNQFNLFAQYSAAAYCGKNNDAPAGTQITCTGNACPEVEKADATFLYSFEDSGVGDVTGFLALDNTNKLIVLSFRGSRSIENWIGNLNFDLKEINDICSGCRGHDGFTSSWRSVADTLRQKVEDAVREHPDYRVVFTGHSLGGALATVAGADLRGNGYDIDVFSYGAPRVGNRAFAEFLTVQTGGTLYRITHTNDIVPRLPPREFGYSHSSPEYWIKSGTLVPVRRRDIVKIEGIDATGGNNQPNIPDIYAHLWYFGLIGTC

SEQ ID NO: 12461 - protein, 268 aa, Thermomyces lanuginosus
EVSQDLFNQFNLFAQYSAAAYCGKNNDAPAGTQITCTGNACPEVEKADATFLYSFEDSGVGDVTGFLAIDNTNKLIVLSFRGSRSIENWIENLNFDLKEINDICSGCRGHDGFTSSWRSVADTLRQKVEDAVREHPDYRVVFTGHSLGGALATVAGADLRGNGYDIDVFSYGAPRVGNRAFAEFLTVQTGGTLYRITHTNDIVPRLPPREFGYSHSSPEYWIKSGTLVPVRRRDIVKIEGIDATGGNNQPNIPDIPAHLWYFGLIGTC

SEQ ID NO: 12462 - protein, 268 aa, Thermomyces lanuginosus
EVSQDLFNQFNLFAQYSAAAYCGKNNDAPAGTQITCTGNACPEVEKADATFLYSFEDSGVGDVTGFLALDNTNKLIVLSFRGSRSIENWIGNLNFDLKEINDICSGCRGHDGFTSSPRSVADTLRQKVEDAVREHPDYRVVFTGHSLGGALATVAGADLRGNGYDIDVFSYGAPRVGNRAFAEFLTVQTGGTLYRITHTNDIVPRLPPREFGYSHSSPEYWIKSGTLVPVRRRDIVKIEGIDATGGNNQPNIPDIPAHLWYFGLIGTC

SEQ ID NO: 12463 - protein, 268 aa, Thermomyces lanuginosus
EVSQDLFNQFNLFAQYSAAAYCGKNNSAPAGTNITCTGNACPEVFKADATFLYSFEDSGVGDVTGFLALDNTRKLIVLSFRGSRSIENWIGNLNFDLKEINDICSGCRGHDGFTSSWRSVADTLRQKVEDAVREHPDYRVVFTGHSLGGALATVAGADLRGNGYDIDVFSYGAPRVGNRAFAEFLTVQDGGTLYRITHTNDIVPRLPPREFGYSHSSPEYWIKSGTLVPVTRNDIVKIEGIDATGGNNQPNIPDIPAHLWYFGLIGTC

SEQ ID NO: 12464 - protein, 268 aa, Thermomyces lanuginosus
EVSQDLFNQFNLFAQYSAAAYCGKNNDAPAGTNITCTGNACPEVEKADATFLYSFEDSGVGDVTGFLALDNTNKQIILSFRGSRSIENWIGNLNFDLKEINDICSGCRGHDGFTSSWRSVADTLRQKVEDAVREHPDYRVVFTGHSLGGALATVAWADLRGNGYDIDVFSYGAPRVGNRAFAEFLTNQTGGTLYRITHTNDIVPRLPPREFGYSHSSPEYWIKSGTLVPVTRNDIVKIEGIDATGGNNQPNIPDIPAHLWYFGLIGTC

SEQ ID NO: 12465 - protein, 268 aa, Thermomyces lanuginosus
EVSQDLFNQFNLFAQYSAAAYCGKNNDAPAGTNITCTGNACPEVEKADATILYSFEDSGVGDVTGFLALDNTNKLIVLSFRGSRSIENWIGNLNFDLKEINDICSGCRGHDGFTSSWRSVADTLRQKVEDAVREHPDYRVVFTGHSLGGALATVAGADLRGNGYDIDVFSYGAPRVGNRAFAEFLTVQTGGTLYRITHTNDIVPRLPPREFGYSHSSPEYWIKSGTLRPVRRRDIVKIEGIDATGGNNQPNIPDIPAHLWYFGLIGTC

SEQ ID NO: 12466 - protein, 268 aa, Thermomyces lanuginosus
EVSQDLFNQFNLFAQYSAAAYCGKNNDAPAGTQITCTGNACPEVEKADATFLYSFEDSGVGDVTGFLALDNTNKLIVLSFRGSRSIENWIGNLNFDLKEINDICSGCRGHDGFTSSWRSVADTLRQKVEDAVREHPDYRVVFTGHSLGGALATVAGADLRGNVYDIDVFSYGAPRVGNRAFAEFLTVQTGGTLYRITHTNDIVPRLPPREFGYSHSSPEYWIKSGTLVPVRRRDIVKIEGIDATGGNNQPNIPDIPAHLWYFGLIGTC

SEQ ID NO: 12467 - protein, 268 aa, Thermomyces lanuginosus
EVSQDLFNQFNLFAQYSAAAYCGKNNDAEAGTNITCTGNACPEVFKADATFLYSFEDSGVGDVTGFLALDNTNKDIVLSFRGSRSIENWIGNLNFDLKEINDICSGCRGHDGFTSSWRSVADTLRQKVEDAVREHPDYRVVFTGHSLGGALATVAGADLRGNGYDIDVFSYGAPRVGNRAFAEFLTVQDGGTLYRITHTNDIVPRLPPREFGYSHSSPEYWIKSGTLVPVTRNDIVKIEGIDATGGNNQPNIPDIPAHLWYFGLIGTC

SEQ ID NO: 12468 - protein, 268 aa, Thermomyces lanuginosus
EVSQDLFNQFNLFAQYSAAAYCGKNNDAPAGTQITCTGNACPEVEKADATFLYSFEDSGVGDVTGFLALDNTNKLIVLSFRGSRSIKNWIGNLNFDLKEINDICSGCRGHDGFTSSWRSVADTLRQKVEDAVREHPDYRVVFTGHSLGGALATVAGADLRGNGYDIDVFSYGAPRVGNRAFAEFLTVQTGGTLYRITHTNDIVPRLPPREFGYSHSSPEYWIKSGTLVPVRRRDIVKIEGIDATGGNNQPNIPDIPAHLWYFGLIGTC

SEQ ID NO: 12469 - protein, 268 aa, Thermomyces lanuginosus
EVSQDLFNQFNLFAQYSAAAYCGKNNDAPAGTQITCTPNACPEVEKADATFLYSFEDSGVGDVTGFLALDNTNKLIVLSFRGSRSIENWIGNLNFDLKEINDICSGCRGHDGFTSSWRSVADTLRQKVEDAVREHPDYRVVFTGHSLGGALATVAGADLRGNGYDIDVFSYGAPRVGNRAFAEFLTVQTGGTLYRITHTNDIVPRLPPREFGYSHSSPEYWIKSGTLVPVRRRDIVKIEGIDATGGNNQPNIPDIPAHLWYFGLIGTC

SEQ ID NO: 12470 - protein, 268 aa, Thermomyces lanuginosus
EVSQDLFNQFQLFAQYSAAAYCGKNNDAPAGTQITCTGNACPEVEKADATFLYSFEDSGVGDVTGFLALDNTNKLIVLSFRGSRSIENWIGNLNFDLKEINDICSGCRGHDGFTSSWRSVADTLRQKVEDAVREHPDYRVVFTGHSLGGALATVAGADLRGNGYDIDVFSYGAPRVGNRAFAEFLTVQTGGTLYRITHTNDIVPRLPPREFGYSHSSPEYWIKSGTLVPVRRRDIVKIEGIDATGGNNQPNIPDIPAHLWYFGLIGTC

SEQ ID NO: 12471 - protein, 268 aa, Thermomyces lanuginosus
EVSQDLFNQFNLFAQYSAAAYCKKNNDAPAGTNITCTGNACPEVEKADATFLYSFEDSGVGDVTGFLALDNTNKRIVLSFRGSRSIENWIGNLNFDLKEINDICSGCRGHDGFTSSWRSVADTLRQKVEAAVREHPDYRVVFTGHSLGGALATVAGADLRGNGYDIDVFSYGAPRVGNRAFAEFLTNQTGGTLYRITHTNDIVPRLPPREFGYSHSSPEYWIKSGTLVPVTRNDIVKIEGIDATGGNNQPNIPDIPAHLWYFGRIGTC

SEQ ID NO: 12472 - protein, 268 aa, Thermomyces lanuginosus
EVSQDLFNQFNLFAQYSAAAYCGKNNDAPAGTQITCTGNACPEVEKADATFLYSFEDSGVGDVTGFLALDNTNKLIVLSFRGSRSIHNWIGNLNFDLKEINDICSGCRGHDGFTSSWRSVADTLRQKVEDAVREHPDYRVVFTGHSLGGALATVAGADLRGNGYDIDVFSYGAPRVGNRAFAEFLTVQTGGTLYRITHTNDIVPRLPPREFGYSHSSPEYWIKSGTLVPVRRRDIVKIEGIDATGGNNQPNIPDIPAHLWYFGLIGTC

SEQ ID NO: 12473 - protein, 268 aa, Thermomyces lanuginosus
EVSQDLFNQFNLFAQYSAAAYCGKNNDAPAGTNITCTGNACPEVEKADATTLYSFEDSGVGDVTGFLALDNTNKQIVLSFRGSRSIENWIQNLNFDLKEINDICSGCRGHDGFTSSWRSVADTLRQKVEDAVREHPDYRVVFTGHSLGGALATVAGADLRGNGYDIDVFSYGAPRVGNRAFAEFLTHQTGGTLYRITHTNDIVPRLPPREFGYSHSSPEYWIKSGTLVPVTRNDIVKIEGIDATGGNNQPNQPDIPAHLWYFGRIGTC

SEQ ID NO: 12474 - protein, 268 aa, Thermomyces lanuginosus
EVSQDLFNQFNLFAQYSAAAYCGKNNDAPAGTQITCTGNACPEVEKADATFLYSFEDSGVGDVTGFLALDNTNKLIVLSFRGSRSIENWIGNLNFDLKEINDICSGCRGHDGFTSSWRSVADTLRQKVEDAVREHPDYRVVFTGHSLGGALATVAGADLRGNGYDIDVFSYGAPRMGNRAFAEFLTVQTGGTLYRITHTNDIVPRLPPREFGYSHSSPEYWIKSGTLVPVRRRDIVKIEGIDATGGNNQPNIPDIPAHLWYFGLIGTC

SEQ ID NO: 12475 - protein, 268 aa, Thermomyces lanuginosus
EVSQDLFNQFNLFAQYSAAAYCGKNNDAPAGTQITCTGNACPEVEKADATFLYSFEDSGVGDVTGFLALDNTNKLIVLSFRGSRSIENWIGNLNFDLKEINDICSGCRGHDGFTSSWRSVADTLRQKVEDAVREHPDYRVVFTGHSLGGALATVAGADLRGNGYDIDVFSYGAPRHGNRAFAEFLTVQTGGTLYRITHTNDIVPRLPPREFGYSHSSPEYWIKSGTLVPVRRRDIVKIEGIDATGGNNQPNIPDIPAHLWYFGLIGTC

SEQ ID NO: 12476 - protein, 268 aa, Thermomyces lanuginosus
EVSQDLFNQFNLFAQYSAAAYCGKNNDAPAGTNITCTGNACPEVEKADATFLYSFKDSGVGDVTGFLALDNTNKRIVLSFRGSRSIENWIGNLNFDLKEINDICSGCRGHDGFTSSWRSVADTLRQKVEAAVREHPDYRVVFTGHSLGGALATVAGADLRGNGYDIDVFSYGAPRVGNRAFAEFLTTQTGGTLYRITHTNDIVPRLPPREFGYSHSSPEYWIKSGTLVPVTRNDIVKIEGIDATGGNNQPNIPDIPAHLWYFGRIGTC

SEQ ID NO: 12477 - protein, 268 aa, Thermomyces lanuginosus
EVSQDLFNQFNLFAQYSAAAYCGKNNDAPAGTNITCTGNACPEVEKADATFLYSFKDSGVGDVTGFLALDNTNKGIVLSFRGSRSIENWIGNLNFDLKEINDICSGCRGHDGFTSSWRSVADTLRQKVEDAVREHPDYRVVFTGHSLGGALATVAGADLRGNGYDIDVFSYGAPRVGNRAFAEFLTNQTGGTLYRITHTNDIVPRLPPREFGYSHSSPEYWIKSGTLVPVTRNDIVKIEGIDATGGNNQPNQPDIPAHLWYFGRIGTC

SEQ ID NO: 12478 - protein, 268 aa, Thermomyces lanuginosus
EVSQDLFNQFNLFAQYSAAAYCGKNNDAPAGTQITCTGNACPEVEKADATFLYSFEDSGVGDVTGFLALDNTNKLIVLSFRGSRSIENWIVNLNFDMKEINDICSGCRGHDGFTSSWRSVADTLRQKVEDAVREHPDYRVVFTGHSLGGALATVAGADLRGNGYDIDVFSYGAPRVGNRAFAEFLTVQTGGTLYRITHTNDIVPRLPPREFGYSHSSPEYWIKSGTLVPVRRRDIVKIEGIDATGGNNQPNIPDIPAHLWYFGLIGTC

SEQ ID NO: 12479 - protein, 268 aa, Thermomyces lanuginosus
EVSDDLFNQFNLFAQYSAAAYCGKNNQAPAGTNITCTGNACPEVEKADATFLYSFEDSGVGDVTGFLALDNTNKLIVLSFRGSRSIENWIGNLNFDLKEINDICSGCRGHDGFTSSWRSVADTLRQKVEDAVREHPDYRVVFTGHSLGGALATVAGADLRGNGYDIDVFSYGAPRVGNRAFAEFLTVQTGGTLYRITHTNDIVPRLPPREFGYSHSSPEYWIKSGTLVPVTRQDIVKIEGIDATGGNNQPNIPDITAHLWYFGLIGTC

SEQ ID NO: 12480 - protein, 268 aa, Thermomyces lanuginosus
EVSQDLFNQFNLFAQYSAAAYCGKNNSAPAGTNITCTGNACPEVEKADATFLYSFKDSGVGDVTGFLALDNTNKLIVLSFRGSRSIENWIGNLNFDLKEINDICSGCRGHAGFTSSWRSVADTLRQKVEDAVREHPDYRVVFTGHSLGGALATVAGADLRGNGYDIDVFSYGAPRVGNRAFAEFLTNQTGGTLYRITHTNDIVPRLPPREFGYSHSSPEYWIKSGTLVPVTRNDIVKIEGIDATGGNNQPNIPDIPAHLWYFGRIGTC

SEQ ID NO: 12481 - protein, 268 aa, Thermomyces lanuginosus
EVSQDLFNQFNLFAQYSAAAYCGKNNDAPAGTQITCTGNACPEVEKADATFLYSFEDSGVGDVTGFLALDNTNKLIVLSFRGSRSIENWIGNLNFDLKEINDICSGCRGHDGFTSSWRSVADTLRQKVEDAVREHPDYRVVFTGHSLGGALATVAGADLRGNGYDIDVFSYGAPRVANRAFAEFLTVQTGGTLYRITHTNDIVPRLPPREFGYSHSSPEYWIKSGTLVPVRRRDIVKIEGIDATGGNNQPNIPDIPAHLWYFGLIGTC

SEQ ID NO: 12482 - protein, 268 aa, Thermomyces lanuginosus
EVSQDLFNQFNLFAQYSAAAYCGKNNDAPAGTQITCTGNACPEVEKADATFLYSFEDSGVGDVTGFLALDNTNKLIVLSFRGSRSIENWIGNLNFDLKEINDICSGCRGHDGFTSSWRSVADTLRQKVEDAVREHPDYRVVFTGHSLGGALATVAGADLRGNGYDIDVFSYGAPRVGNRAFAEFLTVQTGGTLYRITHTNDIVPRLPPREFGYSHSSPEYWIKSGTLVPVRRRDIVKIEGIDATGGNNQPNIPDITAHLWYFGLIGTC

SEQ ID NO: 12483 - protein, 268 aa, Thermomyces lanuginosus
EVSQDLFNQFNLFAQYSAAAYCGKNNDAPAGTQITCTGNACPEVEKADATFLYSFEDSGVGDVTGFLALDNTNKLIVLSFRGSRSIENWIGNLNFDLKEINDICSGCRGHDGFTSSWRSVADTLRQKVEDAVREHPDYRVVFTGHSLGGALATVAGADLRGNGYDIDVFSYGAPRVGNRAFAEFLTVQTGGTLYRITHTNDIVPRLPPREFGYSHSSPEYWIKSGTLVPVRRRDIVKIEGIDATGGNNQPNIPDINAHLWYFGLIGTC

SEQ ID NO: 12484 - protein, 268 aa, Thermomyces lanuginosus
EVSQDLFNQFNLFAQYSAAAYCGQNNDAPAGTNITCTGNACPEVEKADATFLYSFEDSGVGDVTGFLALDNTNKLIVLSFRGSRSIENWIGNLNFDLKEINDICSGCRGHDGFTSSWRSVADTLRQKVEAAVREHPDYRVVFTGHSLGGALATIAGADLRGNGYDIDVFSYGAPRVGNRAFAEFLTTQTGGTLYRITHTNDIVPRLPPREFGYSHSSPEYWIKSGTLVPVTRNDIVKIEGIDATGGNNQPNIPDIPAHLWYFGLIGTC

SEQ ID NO: 12485 - protein, 268 aa, Thermomyces lanuginosus
EVSQDLFNQFNLFAQYSAAAYCGKNNDAPAGTNITCTGNACPEVEKADATFLYSFEDSGVGDVTGFLALDNTNKLIVLSFRGSRSIENWIGNLNFDLKEINDICSGCRGHDGFTSSWFSVADTLRQKVEDAVREHPDYRVVFTGHSLGGALATVAGADLRGNGYDIDVFSYGAPRVGNRAFAEFLTVQTGGTLYRITHTNDIVPRLPPREFGYSHSSPEYWIKSGTLVPVRRRDIVKIEGIDATGGNNQPNIPDITAHLWYFGLIGTC

SEQ ID NO: 12486 - protein, 268 aa, Thermomyces lanuginosus
EVSQDLFNQFNLFAQYSKAAYCGKNNSAPAGTNITCTGNACPEVFKADATFLYSFEDSGVGDVTGFLALDNTRKLIVLSFRGSRSIENWIGNLNFDLKEINDICSGCRGHDGFTSSWRSVADTLRQKVEDAVREHPDYRVVFTGHSLGGALATVAGADLRGNGYDIDVFSYGAPRVGNRAFAEFLTVQTGGTLYRITHTNDIVPRLPPREFGYSHSSPEYWIKSGTLVPVTRNDIVKIEGIDATGGNNQPNIPDIPAHLWYFGLIGTC

SEQ ID NO: 12487 - protein, 268 aa, Thermomyces lanuginosus
EVSQDLFNQFNLFAQYSAAAYCGKNNDATAGTQITCTGNACPEVEKADATFLYSFEDSGVGDVTGFLALDNTNKLIVLSFRGSRSIENWIGNLNFDLKEINDICSGCRGHDGFTSSWRSVADTLRQKVEDAVREHPDYRVVFTGHSLGGALATVAGADLRGNGYDIDVFSYGAPRVGNRAFAEFLTVQTGGTLYRITHTNDIVPRLPPREFGYSHSSPEYWIKSGTLVPVRRRDIVKIEGIDATGGNNQPNIPDIPAHLWYFGLIGTC

SEQ ID NO: 12488 - protein, 268 aa, Thermomyces lanuginosus
EVSQDLFNQFNLFAQYSAAAYCGKNNDAPAGTNITCTANACPEVEKADATFLYSFEDSGVGDVTGFLALDNTNKLIVLSFRGSRSIENWIGNLNFELKEINDICSGCRGHAGFTSSWRSVADTLRQKVEDAVREHPDYRVVFTGHSLGGALATVAGADLRGNGYDIDVFSYGAPRVGNRAFAEFLTVQTGGTLYRITHTNDIVPRLPPREFGYSHSSPEYWIKSGTLVPVRRRDIVKIEGIDATGGNNQPNIPDIPAHLWYFGLIGTC

SEQ ID NO: 12489 - protein, 268 aa, Thermomyces lanuginosus
EVSQDLFNQFNLFAQYSKAAYCKKNNDAPAGTNITCTGNACPEVEKADATFLYSFEDSGVGDVTGFLALDNTNKLIVLSFRGSRSIENWIGNLNFDLKEINDICSGCRGHAGFTSSWRSVADTLRQKVEDAVREHPDYRVVFTGHSLGGALATVAGADLRGNGYDIDVFSYGAPRVGNRAFAEFLTVQQGGTLYRITHTNDIVPRLPPREFGYSHSSPEYWIKSGTLVPVTRNDIVKIEGIDATGGNNQPNIPDIPAHLWYFGLIGTC

SEQ ID NO: 12490 - protein, 268 aa, Thermomyces lanuginosus
EVSQDLFNQFNLFAQYSAAAYCGKNNSAPAGTNITCTGNACPEVEKADATFLYSFEDSGVGDVTGFLALDNTNKQIVLSFRGSRSIENWIQNLNFDLKEINDICSGCRGHDGFTSSWRSVADTLRQKVEDAVREHPDYRVVFTGHSLGGALATVAGADLRGNGYDIDVFSYGAPRVGNRAFAEFLTHQTGGTLYRITHTNDIVPRLPPREFGYSHSSPEYWIKSGTLVPVTRNDIVKIEGIDATGGNNQPNQPDIPAHLWYFGRIGTC

SEQ ID NO: 12491 - protein, 268 aa, Thermomyces lanuginosus
EVSQDLFNQFNLFAQYSAAAYCGKNNDAPAGTNITCTGNACPEVEKADATTLYSFEDSGVGDVTGFLALDNTNKQIVLSFRGSRSIENWIGNLNFDLKEINDICSGCRGHDGFTSSWRSVADTLRQKVEDAVREHPDYRVVFTGHSLGGALATVAGADLRGNGYDIDVFSYGAPRVGNRAFAEFLTNQTGGTLYRITHTNDIVPRLPPREFGYSHSSPEYWIKSGTLVPVTRNDIVKIEGIDATGGNNQPNQPDIPAHLWYFGRIGTC

SEQ ID NO: 12492 - protein, 268 aa, Thermomyces lanuginosus
EVSQDLFNQFKLFAQYSAAAYCGKNNSAPAGTNITCTGNACPEVEKADATFLYSFEDMGVGDVTGFLALDNTNKLIVLSFRGSRSIENWIGNLNFDLKEINDICSGCRGHDGFTSSWRSVADTLRQKVEDAVREHPDYRVVFTGHSLGGALATVAGADLRGNGYDIDVFSYGAPRVGNRAFAEFLTVQTGGTLYRITHTNDIVPRLPPREFGYSHSSPEYWIKSGTLVPVTRQDIVKIEGIDATGGNNQPNIPDIPAHLWYFGLIGTC

SEQ ID NO: 12493 - protein, 268 aa, Thermomyces lanuginosus
EVSQDLFNQFNLFAQYSAAAYCGKNNDAPAGTNITCTGNACPEVEKADATFLYSFEDMGVGDVTGFLALDNTNKLIVLSFRGSRSIENWIGNLNFDLKEINDICSGCRGHDGFTSSWRSVADTLRQKVEAAVREHPQYRVVFTGHSLGGALATVAGADLRGNPYDIDVFSYGAPRVGNRAFAEFLTVQTGGTLYRITHTNDIVPRLPPREFGYSHSSPEYWIKSGTLVPVTRNDIVKIEGIDATGGNNQPNIPDIPAHLWYFGRIGTC

SEQ ID NO: 12494 - protein, 268 aa, Thermomyces lanuginosus
EVSQDLFNQFNLFAQYSAAAYCGKNNSAPAGTNITCTGNACPEVFKADATFLYSFEDSGVGDVTGFLALDNTRKDIVLSFRGSRSIENWIGNLNFDLKEINDICSGCRGHDGFTSSWRSVADTLRQKVEDAVREHPDYRVVFTGHSLGGALATVAGADLRGNGYDIDVFSYGAPRVGNRAFAEFLTVQTGGTLYRITHTNDIVPRLPPREFGYSHSSPEYWIKSGTLVPVTRNDIVKIEGIDATGGNNQPNIPDIPAHLWYFGLIGTC

SEQ ID NO: 12495 - protein, 268 aa, Thermomyces lanuginosus
EVSQDLFNQFNLFAQYSAAAYCGKNNEAPAGTNITCTGNACPEVEKADATFLYSFEDSGVGDVTGFLALDNTNKLIVLSFRGSRSIENWIGNLNFDLKEINDICSGCRGHDGFTSSWRSVADTLRQKVEAAVREHPDYRVVFTGHSLGGALATVAGADLRGNPYDIDVFSYGAPRVGNRAFAEFLTVQTGGTLYRITHTNDIVPRLPPREFGYSHSSPEYWIKSGTLVPVTRQDIVKIEGIDATGGNNQPNIPDIPAHLWYFGRIGTC

SEQ ID NO: 12496 - protein, 268 aa, Thermomyces lanuginosus
EVSQDLFNQFNLFAQYSAAAYCGKNNDAPAGTNITCTGNACPEVEKADATFLYSFEDSGVGDVTGFLALDNTNKQIVLSFRGSRSIENWIGNLNFDLKEINDICSGCRGHAGFTSSWRSVADTLRQKVEDAVREHPDYRVVFTGHSLGGALATVAGADLRGNGYDIDVFSYGAPRVGNRAFAEFLTNQQGGTLYRITHTNDIVPRLPPREFGYSHSSPEYWIKSGTLVPVTRNDIVKIEGIDATGGNNQPNIPDIPAHLWYFGRIGTC

SEQ ID NO: 12497 - protein, 268 aa, Thermomyces lanuginosus
EVSQDLFNQFNLFAQYSAAAYCGKNNDAPAGTNITCTGNACPEVEKADATFLYSFEDSGVGDVTGFLALDNTNKLIVLSFRGSRSIENWIGNLNFELKEINDICSGCRGHDGFTSSWRSVADTLRQKVEDAVREHPDYRVVFTGHSLGGALATVAGADLRGNKYDIDVFSYGAPRVGNRAFAEFLTVQTGGTLYRITHTNDIVPRLPPREFGYSHSSPEYWIKSGTLVPVRRRDIVKIEGIDATGGNNQPNIPSIPAHLWYFGLIGTC

SEQ ID NO: 12498 - protein, 268 aa, Thermomyces lanuginosus
EVSQDLFNQFNLFAQYSAAAYCGKNNQAPAGTNITCTGNACPEVEKADATTLYSFEDSGVGDVTGFLALDNTNKQIVLSFRGSRSIENWIGNLNFDLKEINDICSGCRGHDGFTSSWRSVADTLRQKVEAAVREHPDYRVVFTGHSLGGALATVAGADLRGNGYDIDVFSYGAPRVGNRAFAEFLTVQTGGTLYRITHTNDIVPRLPPREFGYSHSSPEYWIKSGTLVPVTRNDIVKIEGIDATGGNNQPNIPDIPAHLWYFGRIGTC

SEQ ID NO: 12499 - protein, 268 aa, Thermomyces lanuginosus
EVSQDLFNQFNLFAQYSAAAYCGKNNDAPAGTNITCTGNACPEVEKAQATFLYSFEDSGVGDVTGFLALDNTNKLIVLSFRGSRSIENWIGNLNFDLKEINDICSGCRGHDGFTSSWRSVADTLRQKVEDAVREHPQYRVVFTGHSLGGALATVAGADLRGNPYDIDVFSYGAPRVGNRAFAEFLTVQTGGTLYRITHTNDIVPRLPPREFGYSHSSPEYWIKSGTMVPVTRNDIVKIEGIDATGGNNQPNIPDIPAHLWYFGLIGTC

SEQ ID NO: 12500 - protein, 268 aa, Thermomyces lanuginosus
EVSQDLFNQFNLFAQYSAAAYCGKNNDAPAGTNITCTGNACPEVEKADATFLYSFEDSGVGDVTGFLALDNTNKQIVLSFRGSRSIENWIGNLNFDLKEINDICSGCRGHDGFTSSWRSVADTLRQKVEAAVREHPDYRVVFTGHSLGGALATVAGADLRGNGYDIDVFSYGAPRVGNRAFAEFLTTQQGGTLYRITHTNDIVPRLPPREFGYSHSSPEYWIKSGTLVPVTRNDIVKIEGIDATGGNNQPNIPDIPAHLWYFGRIGTC

SEQ ID NO: 12501 - protein, 268 aa, Thermomyces lanuginosus
EVSQDLFNQFNLFAQYSAAAYCGKNNSAPAGTDITCTGNACPEVFKADATFLYSFEDSGVGDVTGFLALDNTRKLIVLSFRGSRSIENWIGNLNFDLKEINDICSGCRGHDGFTSSWRSVADTLRQKVEDAVREHPDYRVVFTGHSLGGALATVAGADLRGNGYDIDVFSYGAPRVGNRAFAEFLTVQTGGTLYRITHTNDIVPRLPPREFGYSHSSPEYWIKSGTLVPVTRNDIVKIEGIDATGGNNQPNIPDIPAHLWYFGLIGTC

SEQ ID NO: 12502 - protein, 268 aa, Thermomyces lanuginosus
EVSQDLFNQFNLFAQYSAAAYCGKNNDAPAGTNITCTGNACPEVEKADATFLYSFEDSGVGDVTGFLALDNTNKLIVLSFRGSRSIENWVGNLNFDLKEINDICSGCRGHDGFTSSWRSVADTLRQKVEDAVREHPDYRVVFTGHSLGGALATVAGADLRGNGYDIDVFSYGAPRVGNRAFAEFLTVQTGGTLYRITHTNDIVPRLPPREFGYSHSSPEYWIKSGTLVPVRRRDIVKIEGIDATGGNNQPNIPDVPAHLWYFGLIGTC

SEQ ID NO: 12503 - protein, 268 aa, Thermomyces lanuginosus
EVSQDLFNQFNLFAQYSAAAYCGKNNDAPAGTNITCTGNACPEVEKAQATFLYSFEDMGVGDVTGFLALDNTNKLIVLSFRGSRSIENWIGNLNFDLKEINDICSGCRGHDGFTSSWRSVADTLRQKVEAAVREHPDYRVVFTGHSLGGALATVAGADLRGNGYDIDVFSYGAPRVGNRAFAEFLTVQTGGTLYRITHTNDIVPRLPPREFGYSHSSPEYWIKSGTLVPVTRQDIVKIEGIDATGGNNQPNIPDIPAHLWYFGRIGTC

SEQ ID NO: 12504 - protein, 268 aa, Thermomyces lanuginosus
EVSQDLFNQFNLFAQYSKAAYCGKNNDAPAGTNITCTGNACPEVEKADATFLYSFEDSGVGDVTGFLALDNTNKLIVLSFRGSRSIENWIGNLNFDLKEINDICSGCRGHDGFTSSWRSVADTLRQKVEDAVREHPDYRVVFTGHSLGGALATIAWADLRGNGYDIDVFSYGAPRVGNRAFAEFLTTQTGGTLYRITHTNDIVPRLPPREFGYSHSSPEYWIKSGTLVPVTRNDIVKIEGIDATGGNNQPNIPDIPAHLWYFGLIGTC

SEQ ID NO: 12505 - protein, 268 aa, Thermomyces lanuginosus
EVSQDLFNQFNLFAQYSAAAYCGKNNYAPAGTNITCTGNACPEVEKADATFLYSFEDSGVGDVTGFLALDNTNKLIVLSFRGSRSIKNWIGNLNFLLKPINDICSGCRGHDGFTSSWRSVADTLRQKVEDAVREHPDYRVVFTGHSLGGALATVAGADLRGNGYDIDVFSYGAPRVGNRAFAEFLTVQTGGTLYRITHTNDIVPRLPPREFGYSHSSPEYWIKSGTLVPVRRRDIVKIEGIDATGGNNQPNIPDIPAHLWYFGLIGTC

SEQ ID NO: 12506 - protein, 268 aa, Thermomyces lanuginosus
EVSQDLFNQFNLFAQYSKAAYCQKNNDAPAGTNITCTGNACPEVEKADATFLYSFEDSGVGDVTGFLALDNTNKQIVLSFRGSRSIENWIGNLNFDLKEINDICSGCRGHDGFTSSWRSVADTLRQKVEDAVREHPDYRVVFTGHSLGGALATVAGADLRGNGYDIDVFSYGAPRVGNRAFAEFLTTQTGGTLYRITHTNDIVPRLPPREFGYSHSSPEYWIKSGTLVPVTRNDIVKIEGIDATGGNNQPNIPDIPAHLWYFGLIGTC

SEQ ID NO: 12507 - protein, 268 aa, Thermomyces lanuginosus
EVSQDLFNQFNLFAQYSAAAYCGKNNDAPAGTNITCTGNACPEVEKADATFLYSFEDSGVGDVTGFLALDNTNKLIVLSFRGSRSIENWIGNLNFELKEINDICSGCRGHAGFTSSWRSVADTLRQKVEDAVREHPDYRVVFTGHSLGGALATVAGADLRGNGYDIDVFSYGAPRVGNRAFAEFLTVQTGGTLYRITHTNDIVPRLPPREFGYSHSSPEYWIKSGTLVPVRRRDIVKIEGIDATGGNNQPNIPDITAHLWYFGLIGTC

SEQ ID NO: 12508 - protein, 268 aa, Synthetic construct
EVSQDLFNQFNLFAQYSAAAYCGKNNDAPAGTNITCTGNACPEVEKADATFLYSFEDSGVGDVTGFLALDNTNKLIVLSFRGSRSIENWFGNLNFLLKKINDICSGCRGHDGFTSSWRSVADTLRQKVEDAVREHPDYRVVFTGHSLGGALATVAGADLRGNGYDIDVFSYGAPRVGNRAFAEFLTAQTGGTLYRITHRRDIVPRLPPAEFGYSHSSPEYWIKSGTLVPVTRNDIVKIEGIDATGGNNQPNIPDIPAHLWYFGLIGTC

SEQ ID NO: 12509 - protein, 268 aa, Thermomyces lanuginosus
EVSQDLFNQFNLFAQYSAAAYCGKNNDAPAGTNITCTGNACPEVEKADATTLYSFEDSGVGDVTGFLALDNTNKGIVLSFRGSRSIENWIANLNFDLKEINDICSGCRGHDGFTSSWRSVADTLRQKVEAAVREHPDYRVVFTGHSLGGALATVAGADLRGNGYDIDVFSYGAPRVGNRAFAEFLTNQTGGTLYRITHTNDIVPRLPPREFGYSHSSPEYWIKSGTLVPVTRNDIVKIEGIDATGGNNQPNQPDIPAHLWYFGRIGTC

SEQ ID NO: 12510 - protein, 268 aa, Thermomyces lanuginosus
EVSQDLFNQFNLFAQYSAAAYCQKNNSAPAGTNITCTGNACPEVEKADATFLYSFEDSGVGDVTGFLALDNTNKGIVLSFRGSRSIENWIGNLNFDLKEINDICSGCRGHDGFTSSWRSVADTLRQKVEDAVREHPDYRVVFTGHSLGGALATVAGADLRGNGYDIDVFSYGAPRVGNRAFAEFLTVQTGGTLYRITHTNDIVPRLPPREFGYSHSSPEYWIKSGTLVPVTRNDIVKIEGIDATGGNNQPNQPDIPAHLWYFGRIGTC

SEQ ID NO: 12511 - protein, 268 aa, Thermomyces lanuginosus
EVSQDLFNQFNLFAQYSKAAYCGKNNDAPAGTNITCTGNACPEVEKADATFLYSFEDSGVGDVTGFLALDNTNKLIVLSFRGSRSIENWIGNLNFDLKEINDICSGCRGHDGFTSSWRSVADTLRQKVEAAVREHPDYRVVFTGHSLGGALATVAWADLRGNGYDIDVFSYGAPRVGNRAFAEFLTNQTGGTLYRITHTNDIVPRLPPREFGYSHSSPEYWIKSGTLVPVTRNDIVKIEGIDATGGNNQPNIPDIPAHLWYFGRIGTC

SEQ ID NO: 12512 - protein, 268 aa, Thermomyces lanuginosus
EVSQDLFNQFNLFAQYSAAAYCGKNNDAPAGTNITCTGNACPEVEKADATFLYSFEDKGLGDVTGFLALDNTNKLIVLSFRGSRSIENWIGNLNFDLKEINDICSGCRGHDGFTSSWRSVADTLRQKVEDAVREHPDYRVVFTGHSLGGALATVAGADLRGNGYDIDVFSYGAPRVGNRAFAEFLTVQTGGTLYRITHTNDIVPRLPPRVFGYSHSSPEYWIKSGTLVPVTRNDIVKIEGIDATGGNNRPNIPDIPAHLWYFGLIGTC

SEQ ID NO: 12513 - protein, 268 aa, Thermomyces lanuginosus
EVSQDLFNQFNLFAQYSAAAYCGKNNDAPAGTQITCTGNACPEVEKADATFLYSFEDSGVGDVTGFLALDNTNKLIVLSFRGSRSIENWIGNLNFDLKEINDICSGCRGHDGFTSSWRSVADTLRQKAEDAVREHPDYRVVFTGHSLGGALATVAGADLRGNGYDIDVFSYGAPRVGNRAFAEFLTVQTGGTLYRITHTNDIVPRLPPREFGYSHSSPEYWIKSGTLVPVRRRDIVKIEGIDATGGNNQPNIPDIPAHLWYFGLIGTC

SEQ ID NO: 12514 - protein, 268 aa, Thermomyces lanuginosus
EVSQDLFNQFNLFAQYSAAAYCGKNNDAPAGTYITCTGNACPEVEKADATFLYSFEDSGVGDVTGFLALDNTNKLIVLSFRGSRSIENWIWNLKFDLKEINDICSGCRGHDGFTSSWRSVADTLRQKVEDAVREHPDYRVVFTGHSLGGALATVAGADLRGNGYDIDVFSYGAPRVGNRAFAEFLTVQTGGTLYRITHTNDIVPRLPPREFGYSHSSPEYWIKSGTLVPVRRRDIVKIEGIDATGGNNQPNIPDIPAHLWYFGLIGTC

SEQ ID NO: 12515 - protein, 268 aa, Thermomyces lanuginosus
EVSQDLFNQFNLFAQYSAAAYCGKNNDAPAGTQITCTGNACPEVEKADATFLYSFEDSGVGDVTGFLALDNTNKLIVLSFRGSRSIENWIGNLNFDLKEINDICSGCRGHDGFTSSYRSVADTLRQKVEDAVREHPDYRVVFTGHSLGGALATVAGADLRGNGYDIDVFSYGAPRVGNRAFAEFLTVQTGGTLYRITHTNDIVPRLPPREFGYSHSSPEYWIKSGTLVPVRRRDIVKIEGIDATGGNNQPNIPDIPAHLWYFGLIGTC

SEQ ID NO: 12516 - protein, 268 aa, Thermomyces lanuginosus
EVSQDLFNQFNLFAQYSKAAYCGKNNDAPAGTNITCTGNACPEVEKADATFLYSFEDSGVGDVTGFLALDNTNKQIVLSFRGSRSIENWIGNLRFDLKEINDICSGCRGHDGFTSSWRSVADTLRQKVEDAVREHPDYRVVFTGHSLGGALATVAGADLRGNGYDIDVFSYGAPRVGNRAFAEFLTQQTGGTLYRITHTNDIVPRLPPREFGYSHSSPEYWIKSGTLVPVTRNDIVKIEGIDATGGNNQPNIPDIPAHLWYFGLIGTC

SEQ ID NO: 12517 - protein, 268 aa, Thermomyces lanuginosus
EVSQDLFNQFNLFAQYSAAAYCGKNNDAPAGTQITCTGNACPEVEKADATFLYSFEDSGVGDVTGFLALDNTNKLIVLSFRGSRSIENWIGNLNFDLKEINDICSGCRGHDGFTSSWRSVADTLRQKVEDAVREHPDYRVVFTGHSLGGALATVAGADLRGNGYDIDVFSYGAPRAGNRAFAEFLTVQTGGTLYRITHTNDIVPRLPPREFGYSHSSPEYWIKSGTLVPVRRRDIVKIEGIDATGGNNQPNIPDIPAHLWYFGLIGTC

SEQ ID NO: 12518 - protein, 268 aa, Thermomyces lanuginosus
EVSQDLFNQFNLFAQYSAAAYCGKNNSAEAGTNITCTGNACPEVFKADATFLYSFEDSGVGDVTGFLALDNTNKLIVLSFRGSRSIENWIGNLNFDLKEINDICSGCRGHDGFTSSWRSVADTLRQKVEDAVREHPDYRVVFTGHSLGGALATVAGADLRGNGYDIDVFSYGAPRVGNRAFAEFLTVQDGGTLYRITHTNDIVPRLPPREFGYSHSSPEYWIKSGTLVPVTRNDIVKIEGIDATGGNNQPNIPDIPAHLWYFGLIGTC

SEQ ID NO: 12519 - protein, 268 aa, Thermomyces lanuginosus
EVSQDLFNQFNLFAQYSAAAYCKKNNDAPAGTNITCTGNACPEVEKADATFLYSFEDSGVGDVTGFLALDNTNKLIVLSFRGSRSIENWIGNLNFDLKEINDICSGCRGHDGFTSSWRSVADTLRQKVEAAVREHPDYRVVFTGHSLGGALATVAWADLRGNGYDIDVFSYGAPRVGNRAFAEFLTVQQGGTLYRITHTNDIVPRLPPREFGYSHSSPEYWIKSGTLVPVTRNDIVKIEGIDATGGNNQPNIPDIPAHLWYFGLIGTC

SEQ ID NO: 12520 - protein, 268 aa, Thermomyces lanuginosus
EVSQDLFNQFNLFAQYSKAAYCGKNNDAPAGTNITCTGNACPEVEKADATFLYSFEDSGVGDVTGFLALDNTNKQIVLSFRGSRSIENWIGNLNFDLKEINDICSGCRGHDGFTSSWRSVADTLRQKVEDAVREHPDYRVVFTGHSLGGALATVAGADLRGNGYDIDVFSYGAPRVGNRAFAEFLTTQQGGTLYRITHTNDIVPRLPPREFGYSHSSPEYWIKSGTLVPVTRNDIVKIEGIDATGGNNQPNIPDIPAHLWYFGRIGTC

SEQ ID NO: 12521 - protein, 268 aa, Thermomyces lanuginosus
EVSQDLFNQFNLFAQYSAAAYCGKNNDAPAGTNITCTGNACPEVEKADATFLYSFEDSGVGDVTGFLALDNTNKLIVLSFRGSRSIENWAGNLNFDLKEINDICSGCRGHDGFTSSWRSVADTLRQKVEDAVREHPDYRVVFTGHSLGGALATVAGADLRGNGYDIDVFSYGAPRVGNRAFAEFLTVQTGGTLYRITHTNDIVPRLPPREFGYSHSSPEYWIKSGTLVPVRRRDIVKIEGIDATGGNNQPNIPDVPAHLWYFGLIGTC

SEQ ID NO: 12522 - protein, 268 aa, Thermomyces lanuginosus
EVSQDLFNQFNLFAQYSAAAYCGKNNDAPAGTNITCTGNACPEVEKADATFLYSFEDSGVGDVTGFLALDNTNKLIVLSFRGSRSIENWIGNLNFDLKEINDICSGCRGHDGFTSSWRSVADTLRQKVEDAVREHPDYRVVFTGHSLGGALATVAGADLRGNGYDIDVFSYGAPRVGNRAFAEFLTVQTGGTLYRITHTNDLVPRLPPREFGYSHSSPEYWIKSGTLVPVRRRDIVKIEGIDATGGNNQPNIPDAPAHLWYFGLIGTC

SEQ ID NO: 12523 - protein, 268 aa, Thermomyces lanuginosus
EVSQDLFNQFSLFAQYSAAAYCGKNNDAPAGTQITCTGNACPEVEKADATFLYSFEDSGVGDVTGFLALDNTNKLIVLSFRGSRSIENWIGNLNFDLKEINDICSGCRGHDGFTSSWRSVADTLRQKVEDAVREHPDYRVVFTGHSLGGALATVAGADLRGNGYDIDVFSYGAPRVGNRAFAEFLTVQTGGTLYRITHTNDIVPRLPPREFGYSHSSPEYWIKSGTLVPVRRRDIVKIEGIDATGGNNQPNIPDIPAHLWYFGLIGTC

SEQ ID NO: 12524 - protein, 268 aa, Thermomyces lanuginosus
EVSQDLFNQFNLFAQYSAAAYCGKNNDAPAGTQITCTGNACPEVEKADATFLYSFEDSGVGDVTGFLALDNTNKLIVLSFRGSRSIENWIGNLNFDLKEINDICSGCRGHDGFTSSTRSVADTLRQKVEDAVREHPDYRVVFTGHSLGGALATVAGADLRGNGYDIDVFSYGAPRVGNRAFAEFLTVQTGGTLYRITHTNDIVPRLPPREFGYSHSSPEYWIKSGTLVPVRRRDIVKIEGIDATGGNNQPNIPDIPAHLWYFGLIGTC

SEQ ID NO: 12525 - protein, 268 aa, Thermomyces lanuginosus
EVSDDLFNQFNLFAQYSAAAYCGKNNNAPAGTNITCTGNACPEVEKADATFLYSFKDSGVGDVTGFLALDNTNKLIVLSFRGSRSIENWIGNLNFDLKEINDICSGCRGHDGFTSSWRSVADTLRQKVEDAVREHPDYRVVFTGHSLGGALATVAGADLRGNGYDIDVFSYGAPRVGNRAFAEFLTVQTGGTLYRITHTNDIVPRLPPREFGYSHSSPEYWIKSGTLVPVTRNDIVKIEGIDATGGNNQPNIPDITAHLWYFGLIGTC

SEQ ID NO: 12526 - protein, 268 aa, Thermomyces lanuginosus
EVSQDLFNQFNLFAQYSAAAYCGKNNDAPAGTQITCTGNACPEVEKADATFLYSFEDSGVGDVTGFLALDNTNKLIVLSFRGSRSIENWIGNLNFDLKEINDICSGCRGHDGFTSSIRSVADTLRQKVEDAVREHPDYRVVFTGHSLGGALATVAGADLRGNGYDIDVFSYGAPRVGNRAFAEFLTVQTGGTLYRITHTNDIVPRLPPREFGYSHSSPEYWIKSGTLVPVRRRDIVKIEGIDATGGNNQPNIPDIPAHLWYFGLIGTC

SEQ ID NO: 12527 - protein, 268 aa, Thermomyces lanuginosus
EVSQDLFNQFNLFAQYSKAAYCGKNNDAPAGTNITCTGNACPEVEKADATFLYSFEDSGVGDVTGFLALDNTNKQIVLSFRGSRSIENWIGNLNFDLKEINDICSGCRGHDGFTSSWRSVADTLRQKVEDAVREHPDYRVVFTGHSLGGALATVAGADLRGNGYDIDVFSYGAPRVGNRAFAEFLTTQDGGTLYRITHTNDIVPRLPPREFGYSHSSPEYWIKSGTLVPVTRNDIVKIEGIDATGGNNQPNIPDIPAHLWYFGLIGTC

SEQ ID NO: 12528 - protein, 268 aa, Thermomyces lanuginosus
EVSQDLFNQFNLFAQYSAAAYCGKNNDAPAGTQITCTGNACPEVEKADATFLYSFEDSGVGDVTGFLALDNTNKLIVLSFRGSRSIENWIGNLNFDLIEINDICSGCRGHDGFTSSWRSVADTLRQKVEDAVREHPDYRVVFTGHSLGGALATVAGADLRGNGYDIDVFSYGAPRVGNRAFAEFLTVQTGGTLYRITHTNDIVPRLPPREFGYSHSSPEYWIKSGTLVPVRRRDIVKIEGIDATGGNNQPNIPDIPAHLWYFGLIGTC

SEQ ID NO: 12529 - protein, 268 aa, Thermomyces lanuginosus
EVSQDLFNQFNLFAQYSAAAYCGKNNDAPAGTQITCTGNACPEVEKADATFLYSFQDSGVGDVTGFLALDNTNKLIVLSFRGSRSIENWIGNLNFDLKEINDICSGCRGHDGFTSSWRSVADTLRQKVEDAVREHPDYRVVFTGHSLGGALATVAGADLRGNGYDIDVFSYGAPRVGNRAFAEFLTVQTGGTLYRITHTNDIVPRLPPREFGYSHSSPEYWIKSGTLVPVRRRDIVKIEGIDATGGNNQPNIPDIPAHLWYFGLIGTC

SEQ ID NO: 12530 - protein, 268 aa, Thermomyces lanuginosus
EVSQDLFNQFNLFAQYSAAAYCGKNNDAPAGTNITCTGNACPEVEKADATFLYSFEDSGVGDVTGFLALDNTNKLIVLSFRGSRSIENWIGNLNFDLKEINDICSGCRGHDGFTSSWRSVADTLRQKVEDAVREHPDYRVVFTGHSLGGALATVAGADLRGNGYDIDVFSYGAPRVGNRAFAEFLTVQTGGTLYRITHTNDIVPRLPPRQFGYSHSSPEYWIKSGTLPPVRRRDIVKIEGIDATGGNNQPNIPDIPAHLWYFGLIGTC

SEQ ID NO: 12531 - protein, 268 aa, Thermomyces lanuginosus
EVSRDLFNQFNLFAQYSAAAYCGKNNDAPAGTNITCTGNACPEVEKADATFLYSFEDSGVGDVTGFLALDNTNKLIVLSFRGSRSIENWIGNLNFDLKEINDICSGCRGHDGFTSSWRSVADTLRQKVEDAVREHPDYRVVFTGHSLGGALATVAGADLRGNGYDIDVFSYGAPRVGNRAFAEFLTVQTGGTLYRITNTNDIVPRLPPREFGYSHSSPEYWIKSGTLVPVRRRDIVKIEGIDATGGNNQPNIPDIPAHLWYFGLIGTC

SEQ ID NO: 12532 - protein, 268 aa, Thermomyces lanuginosus
EVSQDLFNQFKLFAQYSAAAYCGKNNNAPAGTNITCTGNACPEVEKADATFLYSFEDMGVGDVTGFLALDNTNKLIVLSFRGSRSIENWIGNLNFDLKEINDICSGCRGHDGFTSSWRSVADTLRQKVEDAVREHPDYRVVFTGHSLGGALATVAGADLRGNGYDIDVFSYGAPRVGNRAFAEFLTVQTGGTLYRITHTNDIVPRLPPREFGYSHSSPEYWIKSGTLVPVTRNDIVKIEGIDATGGNNQPNIPDITAHLWYFGLIGTC

SEQ ID NO: 12533 - protein, 268 aa, Thermomyces lanuginosus
EVSQDLFNQFNLFAQYSAAAYCQKNNDAPAGTNITCTGNACPEVEKADATTLYSFEDSGVGDVTGFLALDNTNKLIVLSFRGSRSIENWIQNLNFDLKEINDICSGCRGHDGFTSSWRSVADTLRQKVEDAVREHPDYRVVFTGHSLGGALATVAGADLRGNGYDIDVFSYGAPRVGNRAFAEFLTNQTGGTLYRITHTNDIVPRLPPREFGYSHSSPEYWIKSGTLVPVTRNDIVKIEGIDATGGNNQPNQPDIPAHLWYFGRIGTC

SEQ ID NO: 12534 - protein, 268 aa, Thermomyces lanuginosus
EVSQDLFNQFNLFAQYSAAAYCGKNNDAPAGTNITCTGNACPEVEKADATFLYSFEDSGVGDVTGFLALDNTNKLIVLSFRGSRSIENWIGNLNFELKEINDICSGCRGHAGFTSSWRSVADTLRQKVEDAVREHPDYRVVFTGHSLGGALATVAGADLRGNGYDIDVFSYGAPRVGNRAFAEFLTVQTGGTLYRITHTNDIVPRLPPREFGYSHSSPEYWIKSGTLVPVRRRDIVKIEGIDATGGNNQPNIPSIPAHLWYFGLIGTC

SEQ ID NO: 12535 - protein, 268 aa, Thermomyces lanuginosus
EVSQDLFNQFNLFAQYSAAAYCGKNNSAPAGTNITCTGNACPEVEKADATFLYSFKDSGVGDVTGFLALDNTNKLIVLSFRGSRSIENWFGNLNFDLKEINDICSGCRGHDGFTSSWRSVADTLRQKVEDAVREHPDYRVVFTGHSLGGALATVAGADLRGNGYDIDVFSYGAPRVGNRAFAEFLTVQTGGTLYRITHTNDIVPRLPPREFGYSHSSPEYWIKSGTLVPVTRNDIVKIEGIDATGGNNQPNIPDITAHLWYFGLIGTC

SEQ ID NO: 12536 - protein, 268 aa, Thermomyces lanuginosus
EVSQDLFNQFNLFAQYSAAAYCGKNNDAPAGTNITCTGNACPEVEKADATFLYSFEDSGVGDVTGFLALDNTNKLIVLSFRGSRSIENWIGNLNFELKEINDICSGCRGHAGFTSSWRSVADTLRQKVEDAVREHPDYRVVFTGHSLGGALATVAGADLRGNKYDIDVFSYGAPRVGNRAFAEFLTVQTGGTLYRITHTNDIVPRLPPREFGYSHSSPEYWIKSGTLVPVRRRDIVKIEGIDATGGNNQPNIPDIPAHLWYFGLIGTC

SEQ ID NO: 12537 - protein, 268 aa, Thermomyces lanuginosus
EVSQDLFNQFNLFAQYSAAAYCGKNNDAPAGTNITCTGNACPEVEKADATTLYSFEDSGVGDVTGFLALDNTNKGIVLSFRGSRSIENWIQNLNFDLKEINDICSGCRGHDGFTSSWRSVADTLRQKVEDAVREHPDYRVVFTGHSLGGALATVAGADLRGNGYDIDVFSYGAPRVGNRAFAEFLTTQTGGTLYRITHTNDIVPRLPPREFGYSHSSPEYWIKSGTLVPVTRNDIVKIEGIDATGGNNQPNQPDIPAHLWYFGRIGTC

SEQ ID NO: 12538 - protein, 268 aa, Thermomyces lanuginosus
EVSQDLFNQFNLFAQYSAAAYCGKNNDAPAGTNITCTGNACPEVEKADATILYSFEDSGVGDVTGFLALDNTNKLIVLSFRGSRSIENWIGNLNFDLKEINDICSGCRGHDGFTSSWRSVADTLRQKVEDAVREHPDYRVVFTGHSLGGALATVAGADLRGNGYDIDVFSYGAPRVGNRAFAEFLTVQTGGTLYRITHTNDIVPRLPPREFGYSHSSPEYWIKSGTLPPVRRRDIVKIEGIDATGGNNQPNIPDIPAHLWYFGLIGTC

SEQ ID NO: 12539 - protein, 268 aa, Thermomyces lanuginosus
EVSQDLFNQFNLFAQYSAAAYCGKNNDAPAGTQITCTGNACPEVEKADATFLYSFEDSGVGDVTGFLALDNTNKLIVLSFRGSRSIENWIGNLNFDLKEINDICSGCRGHAGFTSSWRSVADTLRQKVEDAVREHPDYRVVFTGHSLGGALATVAGADLRGNGYDIDVFSYGAPRVGNRAFAEFLTVQTGGTLYRITHTNDIVPRLPPREFGYSHSSPEYWIKSGTLVPVRRRDIVKIEGIDATGGNNQPNIPDIPAHLWYFGLIGTC

SEQ ID NO: 12540 - protein, 268 aa, Thermomyces lanuginosus
EVSQDLFNQFNLFAQYSAAAYCGKNNDAPAGTNITCTGNACPEVEKADATILYSFEDSGVGDVTGFLALDNTNKLIVLSFRGSRSIENWIGNLNFDLKEINDICSGCRGHDGFTSSWRSVADTLRQKVEDAVREHPDYRVVFTGHSLGGALATVAGADLRGNGYDIDVFSYGAPRVGNRAFAEFLTVQTGGTLYRITHTNDIVPRLPPREFGYSHSSPEYWIKSGTLVPVRRRDIVKIEGIDATGGNNQPNIPSIPAHLWYFGLIGTC

SEQ ID NO: 12541 - protein, 268 aa, Thermomyces lanuginosus
EVSQDLFNQFNLFAQYSKAAYCQKNNDAPAGTNITCTGNACPEVEKADATFLYSFEDSGVGDVTGFLALDNTNKLIVLSFRGSRSIENWIGNLNFDLKEINDICSGCRGHDGFTSSWRSVADTLRQKVEDAVREHPDYRVVFTGHSLGGALATVAWADLRGNGYDIDVFSYGAPRVGNRAFAEFLTTQTGGTLYRITHTNDIVPRLPPREFGYSHSSPEYWIKSGTLVPVTRNDIVKIEGIDATGGNNQPNIPDIPAHLWYFGLIGTC

SEQ ID NO: 12542 - protein, 268 aa, Thermomyces lanuginosus
EVSRDLFNQFNLFAQYSAAAYCGKNNDAPAGTNITCTGNACPEVEKADATFLYSFEDSGVGDVTGFLALDNTNKLIVLSFRGSRSIENWIGNLNFDLKEINDICSGCRGHDGFTSSWRSVADTLRQKVEDAVREHPDYRVVFTGHSLGGALATVAGADLRGDGYDIDVFSYGAPRVGNRAFAEFLTVQTGGTLYRITHTNDIVPRLPPREFGYSHSSPEYWIKSGTLVPVRRRDIVKIEGIDATGGNNQPNIPDIPAHLWYFGLIGTC

SEQ ID NO: 12543 - protein, 268 aa, Thermomyces lanuginosus
EVSQDLFNQFNLFAQYSAAAYCQANNDAPAGTNITCTGNACPEVEKADATFLYSFEDSGVGDVTGFLALDNTNKLIVLSFRGSRSIENWIGNLNFDLKEINDICSGCRGHDGFTSSWRSVADTLRQKVEAAVREHPDYRVVFTGHSLGGALATVAWADLRGNGYDIDVFSYGAPRVGNRAFAEFLTVQTGGTLYRITHTNDIVPRLPPREFGYSHSSPEYWIKSGTLVPVTRNDIVKIEGIDATGGNNQPNIPDIPAHLWYFGLIGTC

SEQ ID NO: 12544 - protein, 268 aa, Thermomyces lanuginosus
EVSQDLFNQFNLFAQYSAAAYCGKNNDAPAGTNITCTGNACPEVEKADATFLYSFEDSGVGDVTGFLALDNTNKRIVLSFRGSRSIENWIGNLNFDLKEINDICSGCRGHAGFTSSWRSVADTLRQKVEDAVREHPDYRVVFTGHSLGGALATIAWADLRGNGYDIDVFSYGAPRVGNRAFAEFLTVQTGGTLYRITHTNDIVPRLPPREFGYSHSSPEYWIKSGTLVPVTRNDIVKIEGIDATGGNNQPNIPDIPAHLWYFGLIGTC

SEQ ID NO: 12545 - protein, 268 aa, Thermomyces lanuginosus
EVSQDLFNQFNLFAQYSAAAYCGKNNSAPAGTDITCTGNACPEVFKADATFLYSFEDSGVGDVTGFLALDNTNKLIVLSFRGSRSIENWIGNLNFDLKEINDICSGCRGHDGFTSSWRSVADTLRQKVEDAVREHPDYRVVFTGHSLGGALATVAGADLRGNGYDIDVFSYGAPRVGNRAFAEFLTVQDGGTLYRITHTNDIVPRLPPREFGYSHSSPEYWIKSGTLVPVTRNDIVKIEGIDATGGNNQPNIPDIPAHLWYFGLIGTC

SEQ ID NO: 12546 - protein, 268 aa, Thermomyces lanuginosus
EVSQDLFNQFNLFAQYSAAAYCGKNNDAPAGTQITCTGNACPEVEKADATFLYSFEDSGVGDVTGFLALDNTNKLIVLSFRGSRSIENWIGNLKFDLKEINDICSGCRGHDGFTSSWRSVADTLRQKVEDAVREHPDYRVVFTGHSLGGALATVAGADLRGNGYDIDVFSYGAPRVGNRAFAEFLTVQTGGTLYRITHTNDIVPRLPPREFGYSHSSPEYWIKSGTLVPVRRRDIVKIEGIDATGGNNQPNIPDIPAHLWYFGLIGTC

SEQ ID NO: 12547 - protein, 268 aa, Thermomyces lanuginosus
EVSQDLFNQFNLFAQYSAAAYCGKNNQAPAGTNITCTGNACPEVEKADATFLYSFEDMGVGDVTGFLALDNTNKLIVLSFRGSRSIENWFGNLNFDLKEINDICSGCRGHDGFTSSWRSVADTLRQKVEDAVREHPDYRVVFTGHSLGGALATVAGADLRGNGYDIDVFSYGAPRVGNRAFAEFLTVQTGGTLYRITHTNDIVPRLPPREFGYSHSSPEYWIKSGTLVPVTRNDIVKIEGIDATGGNNQPNIPDITAHLWYFGLIGTC

SEQ ID NO: 12548 - protein, 268 aa, Thermomyces lanuginosus
EVSQDLFNQFKLFAQYSAAAYCGKNNDAPAGTNITCTGNACPEVEKADATFLYSFEDMGVGDVTGFLALDNTNKLIVLSFRGSRSIENWIGNLNFDLKEINDICSGCRGHDGFTSSWRSVADTLRQKVEDAVREHPDYRVVFTGHSLGGALATVAGADLRGNGYDIDVFSYGAPRVGNRAFAEFLTVQTGGTLYRITHTNDIVPRLPPREFGYSHSSPEYWIKSGTLVPVTRQDIVKIEGIDATGGNNQPNIPDITAHLWYFGLIGTC

SEQ ID NO: 12549 - protein, 268 aa, Thermomyces lanuginosus
EVSQDLFNQFNLFAQYSAAAYCGKNNDAPAGTNITCTGNACPEVEKADATFLYSFEDSGVGDVTGFLALDNTNKLIVLSFRGSGSIENWIGNLNFDLKEINDICSGCRGHDGYTSSWRSVADTLRQKVEDAVREHPDYRVVFTGHSLGGALATVAGADLRGNGYDIDVFSYGAPRVGNRAFAEFLTVQTGGTLYRITHTNDIVPRLPPREEGYSHSSPEYWIKSGTLVPVTRNDIVKIEGIDATGGNNQPNIPDNPAHLWYFGLIGTC

SEQ ID NO: 12550 - protein, 268 aa, Thermomyces lanuginosus
EVSQDLFNQFNLFAQYSAAAYCGKNNDAPAGTNITCTGNACPEVEKADATFLYSFEDSGVGDVTGFLALDNTNKLIVLSFRGSRSIENWIGNLNFELKEINDICSGCRGHDGFTSSWRSVADTLRQKVEDAVREHPDYRVVFTGHSLGGALATVAGADLRGNGYDIDVFSYGAPRVGNRAFAEFLTVQTGGTLYRITHTNDIVPRLPPREFGYSHSSPEYWIKSGTLVPVRRRDIVKIEGIDATGGNNQPNIPSITAHLWYFGLIGTC

SEQ ID NO: 12551 - protein, 268 aa, Thermomyces lanuginosus
EVSQDLFNQFNLFAQYSAAAYCGKNNDAPAGTQITCTGNACPEVEKADATFLYSFEDSGVGDVTGFLALDNTNKLIVLSFRGSRSIENWIGNLNFDLKEINDICSGCRGHDGFTSSWRSVADTLRQKVEDAVREHPDYRVVFTGHSLGGALATVAGADLRGNPYDIDVFSYGAPRVGNRAFAEFLTVQTGGTLYRITHTNDIVPRLPPREFGYSHSSPEYWIKSGTLVPVRRRDIVKIEGIDATGGNNQPNIPDIPAHLWYFGLIGTC

SEQ ID NO: 12552 - protein, 268 aa, Thermomyces lanuginosus
EVSQDLFNQFNLFAQYSAAAYCGKNNDAPAGTQITCTGNACPEVEKADATFLYSFRDSGVGDVTGFLALDNTNKLIVLSFRGSRSIENWIGNLNFDLKEINDICSGCRGHDGFTSSWRSVADTLRQKVEDAVREHPDYRVVFTGHSLGGALATVAGADLRGNGYDIDVFSYGAPRVGNRAFAEFLTVQTGGTLYRITHTNDIVPRLPPREFGYSHSSPEYWIKSGTLVPVRRRDIVKIEGIDATGGNNQPNIPDIPAHLWYFGLIGTC

SEQ ID NO: 12553 - protein, 268 aa, Thermomyces lanuginosus
EVSQDLFNQFNLFAQYSAAAYCGKNNDAPAGTQITCTGNACPEVEKADATFLYSFEDSGVGDVTGFLALDNTNKLIVLSFRGSESIENWIGNLNFDLKEINDICSGCRGHDGFTSSWRSVADTLRQKVEDAVREHPDYRVVFTGHSLGGALATVAGADLRGNGYDIDVFSYGAPRVGNRAFAEFLTVQTGGTLYRITHTNDIVPRLPPREFGYSHSSPEYWIKSGTLVPVRRRDIVKIEGIDATGGNNQPNIPDIPAHLWYFGLIGTC

SEQ ID NO: 12554 - protein, 268 aa, Thermomyces lanuginosus
EVSQDLFNQFNLFAQYSAAAYCGKNNSAPAGTNITCTGNACPEVEKADATFLYSFEDSGVGDVTGFLALDNTNKQIVLSFRGSRSIENWIQNLNFDLKEINDICSGCRGHDGFTSSWRSVADTLRQKVEAAVREHPDYRVVFTGHSLGGALATVAGADLRGNGYDIDVFSYGAPRVGNRAFAEFLTTQTGGTLYRITHTNDIVPRLPPREFGYSHSSPEYWIKSGTLVPVTRNDIVKIEGIDATGGNNQPNIPDIPAHLWYFGLIGTC

SEQ ID NO: 12555 - protein, 268 aa, Thermomyces lanuginosus
EVSDDLFNQFKLFAQYSAAAYCGKNNQAPAGTNITCTGNACPEVEKADATFLYSFEDSGVGDVTGFLALDNTNKLIVLSFRGSRSIENWIGNLNFDLKEINDICSGCRGHDGFTSSWRSVADTLRQKVEDAVREHPDYRVVFTGHSLGGALATVAGADLRGNGYDIDVFSYGAPRVGNRAFAEFLTVQTGGTLYRITHTNDIVPRLPPREFGYSHSSPEYWIKSGTLVPVTRQDIVKIEGIDATGGNNQPNIPDIPAHLWYFGLIGTC

SEQ ID NO: 12556 - protein, 268 aa, Thermomyces lanuginosus
EVSQDLFNQFNLFAQYSAAAYCGKNNDAPAGTNITCTGNACPEVEKADATFLYSFEDNGVGGVTGFLALDNTNKLIVLSFRGSRSIENWIGNLNFDLKEINDICSGCRGHDGFTSSWRSVADTLRQKVEDAVREHPDYRVVFTGHSLGGALATVAGADLRGNGYDIDVFSYGAPRVGNRAFAEFLTVQTGGTLYRITHTNDIVPRLPPREFGYSHSSPEYWIKSGTLVPVRRRDIVKIEGIDATGGNNQPNIPDIPAHLWYFGLIGTC

SEQ ID NO: 12557 - protein, 268 aa, Thermomyces lanuginosus
EVSQDLFNQFNLFAQYSAAAYCGKNNDAPAGTQITCTGNACPEVEKADATFLYSFEDSGVGDVTGFLALDNTNKLIVLSFRGSRSIENWIGNLNFDLKEINDICSGCRGHEGFTSSWRSVADTLRQKVEDAVREHPDYRVVFTGHSLGGALATVAGADLRGNGYDIDVFSYGAPRVGNRAFAEFLTVQTGGTLYRITHTNDIVPRLPPREFGYSHSSPEYWIKSGTLVPVRRRDIVKIEGIDATGGNNQPNIPDIPAHLWYFGLIGTC

SEQ ID NO: 12558 - protein, 268 aa, Thermomyces lanuginosus
EVSQDLFNQFNLFAQYSAAAYCGKNNRAPAGTNITCTGNACPEVEKADATFLYSFEDSGVGDVTGFLALDNTNKLIVLSFRGSRSIENWIANLNFDLKEINDICSGCRGHGGFTSSWRSVADTLRQKVEDAVREHPDYRVVFTGHSLGGALATVAGADLRGNGYDIDVFSYGAPRVGNRAFAEFLTVQTGGTLYRITHTNDIVPRLPPREFGYSHPSPEYWIKSGTGVPVTRNDIVKIEGIDATGGNNQPNIPDITAHLWYFGLIGTC

SEQ ID NO: 12559 - protein, 268 aa, Thermomyces lanuginosus
EVSQDLFNQFNLFAQYSAAAYCGKNNDAPAGTNITCTGNACPEVEKADATFLYSFEDSGVGDVTGFLALDNTNKLIVLSFRGSRSIENWIGNLNFDLKEINDICSGCRGHDGFTSSWRSVADTLRQKVEDAVREHPDYRVVFAGHSLGGALATVAGADLRGNGYDIDVFSYGAPRVGNRAFAEFLTVQTGGTLYRITSTNDIVPRLPPREFGYSHSSPEYWIKSGTLVPVRRRDIVKIEGIDATGGNNQPNIPDIPAHLWYFGLIGTC

SEQ ID NO: 12560 - protein, 268 aa, Thermomyces lanuginosus
EVSQDLFNQFNLFAQYSAAAYCGKNNDAPAGTQITCTGNACPEVEKADATFLYSFEDSGVGDVTGFLALDNTNKLIVLSFRGSRSIENWIGNLNFDLKEINDICSGCRGHDGFTSSWRSVADTLRQKVEDAVREHPDYRVVFTGHSLGGALATVAGADLRGNDYDIDVFSYGAPRVGNRAFAEFLTVQTGGTLYRITHTNDIVPRLPPREFGYSHSSPEYWIKSGTLVPVRRRDIVKIEGIDATGGNNQPNIPDIPAHLWYFGLIGTC

SEQ ID NO: 12561 - protein, 268 aa, Thermomyces lanuginosus
EVSQDLFNQFNLFAQYSAAAYCGKNNDAPAGTNITCTGNACPEVEKADATFLYSFEDSGVGDVTGFLALDNTNKLIVLSFRGSRSIENWIGNLNFDLKEINDICSGCRGHDGFTSSWRSVADTLRQKVEDAVREHPDYRVVFTGHSLGGALATVAGADLRGNGYDIDVFSYGAPRVGNRAFAEFLTVQTGGTLYRITHTNDIVPRLPPRVFGYSHSSPEYWIKSGTLVPVRRRDIVKIEGIDATGGNNRPNIPDIPAHLWYFGLIGTC

SEQ ID NO: 12562 - protein, 268 aa, Thermomyces lanuginosus
EVSQDLFNQFNLFAQYSAAAYCGKNNDAPAGTNITCTGNACPEVEKADATFLYSFEDSGVGDVTGFLALDNTNKLIVLSFRGSRSDENLQGNTNFDLKEINDICSGCRGHDGFTSSWRSVADTLRQKVEDAVREHPDYRVVFTGHSLGGALATVAGADLRGNGYDIDVFSYGAPRVGNRAFAEFLTVQTGGTLYRITHTNDIVPRLPPREFGYSHSSPEYWIKSGTLVPVTRNDIVKIEGIDATGGNNQPNIPDIPAHLWYFGLIGTC

SEQ ID NO: 12563 - protein, 268 aa, Thermomyces lanuginosus
EVSQDLFNQFNLFAQYSAAAYCGKNNDAPAGTQITCTGNACPEVEKADATFLYSFEDSGVGDVTGFLALDNTNKLIVLSFRGSRSIENWIGNLNFDLKEINDICSGCRGHDGFTSSVRSVADTLRQKVEDAVREHPDYRVVFTGHSLGGALATVAGADLRGNGYDIDVFSYGAPRVGNRAFAEFLTVQTGGTLYRITHTNDIVPRLPPREFGYSHSSPEYWIKSGTLVPVRRRDIVKIEGIDATGGNNQPNIPDIPAHLWYFGLIGTC

SEQ ID NO: 12564 - protein, 268 aa, Thermomyces lanuginosus
EVSQDLFNQFNLFAQYSAAAYCGKNNDAPAGTNITCTGNACPEVFKADVTFLYSFEDSGVGDVTGFLALDNTNKLIVLSFRGSRSIENWIGNLNFDLKEINDICSGCRGHDGFTSSWRSVADTLRQKVEDAVREHPDYRVVFTGHSLGGALATVAWADLRGNGYDIDVFSYGAPRVGNRAFAEFLTTQTGGTLYRITHTNDIVPRLPPREFGYSHSSPEYWIKSGTLVPVTRNDIVKIEGIDATGGNNQPNIPDIPAHLWYFGLIGTC

SEQ ID NO: 12565 - protein, 268 aa, Thermomyces lanuginosus
EVSDDLFNQFKLFAQYSAAAYCGKNNNAPAGTNITCTGNACPEVEKADATFLYSFEDSGVGDVTGFLALDNTNKLIVLSFRGSRSIENWIGNLNFDLKEINDICSGCRGHDGFTSSWRSVADTLRQKVEDAVREHPDYRVVFTGHSLGGALATVAGADLRGNGYDIDVFSYGAPRVGNRAFAEFLTVQTGGTLYRITHTNDIVPRLPPREFGYSHSSPEYWIKSGTLVPVTRNDIVKIEGIDATGGNNQPNIPDITAHLWYFGLIGTC

SEQ ID NO: 12566 - protein, 268 aa, Thermomyces lanuginosus
EVSQDLFNQFNLFAQYSAAAYCGKNNDAPAGTNITCTGNACPEVEKADATFLYSFEDSGVGDVTGFLALDNTNKLIVLSFRGSRSIENWIGNLNFDLKEINDICSGCRGHDGFTSSWRSVADTLRQKVEDAVREHPDYRVVFAGHSLGGALATVAGADLRGDGYDIDVFSYGAPRVGNRAFAEFLTVQTGGTLYRITHTNDIVPRLPPREFGYSHSSPEYWIKSGTLVPVRRRDIVKIEGIDATGGNNQPNIPDIPAHLWYFGLIGTC

SEQ ID NO: 12567 - protein, 268 aa, Thermomyces lanuginosus
EVSQDLFNQFNLFAQYSAAAYCGKNNRAPAGTNITCTGNACPEVEKADATFLYSFEDSGVGDVTGFLALDNTNKLIVLSFRGSRSIENWIGNLNFELKEINDICSGCRGHAGFTSSWRSVADTLRQKVEDAVREHPDYRVVFTGHSLGGALATVAGADLRGNGYDIDVFSYGAPRVGNRAFAEFLTVQTGGTLYRITHTNDIVPRLPPREFGYSHSSPEYWIKSGTLVPVRRRDIVKIEGIDATGGNNQPNIPDIPAHLWYFGLIGTC

SEQ ID NO: 12568 - protein, 268 aa, Thermomyces lanuginosus
EVSQDLFNQFNLFAQYSAAAYCGKNNSAPAGTNITCTGNACPEVEKADATFLYSFEDSGVGDVTGFLALDNTNKGIVLSFRGSRSIENWIGNLNFDLKEINDICSGCRGHDGFTSSWRSVADTLRQKVEAAVREHPDYRVVFTGHSLGGALATVAGADLRGNGYDIDVFSYGAPRVGNRAFAEFLTVQTGGTLYRITHTNDIVPRLPPREFGYSHSSPEYWIKSGTLVPVTRNDIVKIEGIDATGGNNQPNQPDIPAHLWYFGRIGTC

SEQ ID NO: 12569 - protein, 268 aa, Thermomyces lanuginosus
EVSQDLFNQFNLFAQYSAAAYCGKNNEAPAGTNITCTGNACPEVEKADATFLYSFEDSGVGDVTGFLALDNTNKLIVLSFRGSRSIENWIGNLNFDLKEINDICSGCRGHDGFTSSWRSVADTLRQKVEAAVREHPDYRVVFTGHSLGGALATVAGADLRGNPYDIDVFSYGAPRVGNRAFAEFLTVQTGGTLYRITHTNDIVPRLPPREFGYSHSSPEYWIKSGTMVPVTRNDIVKIEGIDATGGNNQPNIPDIPAHLWYFGRIGTC

SEQ ID NO: 12570 - protein, 268 aa, Thermomyces lanuginosus
EVSQDLFNQFNLFAQYSKAAYCGKNNDAPAGTNITCTGNACPEVFKADVTFLYSFEDSGVGDVTGFLALDNTNKLIVLSFRGSRSIENWIGNLNFDLKEINDICSGCRGHDGFTSSWRSVADTLRQKVEDAVREHPDYRVVFTGHSLGGALATVAGADLRGNGYDIDVFSYGAPRVGNRAFAEFLTTQTGGTLYRITHTNDIVPRLPPREFGYSHSSPEYWIKSGTLVPVTRNDIVKIEGIDATGGNNQPNIPDIPAHLWYFGLIGTC

SEQ ID NO: 12571 - protein, 268 aa, Thermomyces lanuginosus
EVSQDLFNQFNLFAQYSAAAYCGKNNDAPAGTQITCTGNACPEVEKADATFLYSFEDSGVGDVTGFLALDNTNKLIVLSFRGSRSIENWIGNLNFDLKEINDICSGCRGHDGFTSSWRSVADTLRQKVEDAVREHPDYRVVFTGHSLGGALATVAGADLRGNTYDIDVFSYGAPRVGNRAFAEFLTVQTGGTLYRITHTNDIVPRLPPREFGYSHSSPEYWIKSGTLVPVRRRDIVKIEGIDATGGNNQPNIPDIPAHLWYFGLIGTC

SEQ ID NO: 12572 - protein, 268 aa, Thermomyces lanuginosus
EVSQDLFNQFNLFAQYSAAAYCGKNNDAPAGTNITCTGNACPEVEKADATFLYSFEDSGVGDVTGFLALDNTNKQIILSFRGSRSIENWIGNLRFDLKEINDICSGCRGHDGFTSSWRSVADTLRQKVEDAVREHPDYRVVFTGHSLGGALATVAWADLRGNGYDIDVFSYGAPRVGNRAFAEFLTVQTGGTLYRITHTNDIVPRLPPREFGYSHSSPEYWIKSGTLVPVTRNDIVKIEGIDATGGNNQPNIPDIPAHLWYFGLIGTC

SEQ ID NO: 12573 - protein, 268 aa, Thermomyces lanuginosus
EVSQDLFNQFNLFAQYSKAAYCGKNNDAPAGTNITCTGNACPEVEKADATFLYSFEDSGVGDVTGFLALDNTNKQIILSFRGSRSIENWIGNLRFDLKEINDICSGCRGHDGFTSSWRSVADTLRQKVEDAVREHPDYRVVFTGHSLGGALATVAGADLRGNGYDIDVFSYGAPRVGNRAFAEFLTVQTGGTLYRITHTNDIVPRLPPREFGYSHSSPEYWIKSGTLVPVTRNDIVKIEGIDATGGNNQPNIPDIPAHLWYFGLIGTC

SEQ ID NO: 12574 - protein, 268 aa, Thermomyces lanuginosus
EVSQDLFNQFNLFAQYSAAAYCGKNNEAPAGTNITCTGNACPEVEKAQATFLYSFEDSGVGDVTGFLALDNTNKLIVLSFRGSRSIENWIGNLNFDLKEINDICSGCRGHDGFTSSWRSVADTLRQKVEDAVREHPDYRVVFTGHSLGGALATVAGADLRGNPYDIDVFSYGAPRVGNRAFAEFLTVQTGGTLYRITHTNDIVPRLPPREFGYSHSSPEYWIKSGTLVPVTRQDIVKIEGIDATGGNNQPNIPDIPAHLWYFGRIGTC

SEQ ID NO: 12575 - protein, 268 aa, Thermomyces lanuginosus
EVSQDLFNQFNLFAQYSAAAYCKANNDAPAGTNITCTGNACPEVEKADATFLYSFEDSGVGDVTGFLALDNTNKLIVLSFRGSRSIENWIGNLNFDLKEINDICSGCRGHDGFTSSWRSVADTLRQKVEDAVREHPDYRVVFTGHSLGGALATIAGADLRGNGYDIDVFSYGAPRVGNRAFAEFLTNQTGGTLYRITHTNDIVPRLPPREFGYSHSSPEYWIKSGTLVPVTRNDIVKIEGIDATGGNNQPNIPDIPAHLWYFGLIGTC

SEQ ID NO: 12576 - protein, 268 aa, Thermomyces lanuginosus
EVSQDLFNQFNLFAQYSAAAYCGKNNDAPAGTQITCTGNACPEVEKADATFLYSFEDSGVGDVTGFLALDNTNKLIVLSFRGSRSIENWITNLNFDLKEINDICSGCRGHDGFTSSWRSVADTLRQKVEDAVREHPDYRVVFTGHSLGGALATVAGADLRGNWYDIDVFSYGAPRVGNRAFAEFLTVQTGGTLYRITHTNDIVPRLPPREFGYSHSSPEYWIKSGTLVPVRRRDIVKIEGIDATGGNNQPNIPDIPAHLWYFGLIGTC

SEQ ID NO: 12577 - protein, 268 aa, Thermomyces lanuginosus
EVSQDLFNQFNLFAQYSAAAYCGKNNDAPAGTNITCTGNACPEVEKADATFLYSFEDSGVGDVTGFLALDNTNKLIVLSFRGSRSIENWITNLNFDLKEINDICSGCRGHDGFTSSWRSVADTLRQKVEDAVREHPDYRVVFTGHSLGGALATVAGADLRGNGYDIDVFSYGAPRVGNRAFAEFLTVQTGGTLYRITHTNDIVPRLPPREFGYSHSSPEYWIKSGTLVPVRRRDIVKIEGIDATGGNNQPNIPSITAHLWYFGLIGTC

SEQ ID NO: 12578 - protein, 268 aa, Thermomyces lanuginosus
EVSQDLFNQFNLFAQYSAAAYCGKNNDAPAGTQITCTGNACPEVEKADATFLYSFEDSGVGDVTGFLALDNTNKLIVLSFRGSRSIENWIGNLNFDLKEINDICSGCRGHDGFTSSWRSVADTLRQKVEDAVREHPDYRVVFTGHSLGGALATVAGADLRGNRYDIDVFSYGAPRVGNRAFAEFLTVQTGGTLYRITHTNDIVPRLPPREFGYSHSSPEYWIKSGTLVPVRRRDIVKIEGIDATGGNNQPNIPDIPAHLWYFGLIGTC

SEQ ID NO: 12579 - protein, 268 aa, Thermomyces lanuginosus
EVSQDLFNQFNLFAQYSAAAYCGKNNDAPAGTNITCTGNACPEVEKADATFLYSFEDSGVGDVTGFLALDNTNKLIVLSFRGSRSIENWIGNLNFDLKEINDICSGCRGHDGFTSSWRSVADTLRQKVEDAVREHPDYRVVFTGHSLGGALATVAGADLRGNGYDIDVFSYGAPRVGNRAFAEFLTVQTGGTLYRITNTNDIVPRLPPREFGYSHSSPEYWIKSGTLVPVRRRDIVKIEGIDATGGNNQPNIPDISAHLWYFGLIGTC

SEQ ID NO: 12580 - protein, 268 aa, Thermomyces lanuginosus
EVSQDLFNQFNLFAQYSAAAYCGKNNDAPAGTNITCTGNACPEVEKAQATFLYSFEDSGVGDVTGFLALDNTNKLIVLSFRGSRSIENWIGNLNFDLKEINDICSGCRGHDGFTSSWRSVADTLRQKVEAAVREHPQYRVVFTGHSLGGALATVAGADLRGNPYDIDVFSYGAPRVGNRAFAEFLTVQTGGTLYRITHTNDIVPRLPPREFGYSHSSPEYWIKSGTLVPVTRNDIVKIEGIDATGGNNQPNIPDIPAHLWYFGRIGTC

SEQ ID NO: 12581 - protein, 268 aa, Thermomyces lanuginosus
EVSQDLFNQFNLFAQYSAAAYCGKNNDAPAGTQITCTGNACPEVEKADATFLYSFEDSGVGDVTGFLALDNTNKLIVLSFRGSRSIENWIGNLNFDLKEINDICSGCRGHDGFTSSWRSVADTLRQKVEDAVREHPDYRVVFTGHSLGGALATVAGADLRGNWYDIDVFSYGAPRVGNRAFAEFLTVQTGGTLYRITHTNDIVPRLPPREFGYSHSSPEYWIKSGTLVPVRRRDIVKIEGIDATGGNNQPNIPDIPAHLWYFGLIGTC

SEQ ID NO: 12582 - protein, 268 aa, Thermomyces lanuginosus
EVSQDLFNQFNLFAQYSAAAYCQKNNDAPAGTNITCTGNACPEVEKADATFLYSFEDSGVGDVTGFLALDNTNKQIVLSFRGSRSIENWIQNLNFDLKEINDICSGCRGHDGFTSSWRSVADTLRQKVEAAVREHPDYRVVFTGHSLGGALATVAGADLRGNGYDIDVFSYGAPRVGNRAFAEFLTVQTGGTLYRITHTNDIVPRLPPREFGYSHSSPEYWIKSGTLVPVTRNDIVKIEGIDATGGNNQPNQPDIPAHLWYFGRIGTC

SEQ ID NO: 12583 - protein, 268 aa, Thermomyces lanuginosus
EVSQDLFNQFNLFAQYSAAAYCGKNNDAPAGTQITCTGNACPEVEKADATFLYSFEDSGVGDVTGFLALDNTNKLIVLSFRGSRSIANWIGNLNFDLKEINDICSGCRGHDGFTSSWRSVADTLRQKVEDAVREHPDYRVVFTGHSLGGALATVAGADLRGNGYDIDVFSYGAPRVGNRAFAEFLTVQTGGTLYRITHTNDIVPRLPPREFGYSHSSPEYWIKSGTLVPVRRRDIVKIEGIDATGGNNQPNIPDIPAHLWYFGLIGTC

SEQ ID NO: 12584 - protein, 268 aa, Thermomyces lanuginosus
EVSQDLFNQFNLFAQYSAAAYCQKNNDAPAGTNITCTGNACPEVFKADVTFLYSFEDSGVGDVTGFLALDNTNKLIVLSFRGSRSIENWIGNLNFDLKEINDICSGCRGHDGFTSSWRSVADTLRQKVEDAVREHPDYRVVFTGHSLGGALATVAGADLRGNGYDIDVFSYGAPRVGNRAFAEFLTTQTGGTLYRITHTNDIVPRLPPREFGYSHSSPEYWIKSGTLVPVTRNDIVKIEGIDATGGNNQPNIPDIPAHLWYFGLIGTC

SEQ ID NO: 12585 - protein, 268 aa, Thermomyces lanuginosus
EVSQDLFNQFNLFAQYSKAAYCGKNNDAPAGTNITCTGNACPEVFKADATFLYSFEDSGVGDVTGFLALDNTNKQIVLSFRGSRSIENWIGNLNFDLKEINDICSGCRGHDGFTSSWRSVADTLRQKVEDAVREHPDYRVVFTGHSLGGALATVAGADLRGNGYDIDVFSYGAPRVGNRAFAEFLTTQTGGTLYRITHTNDIVPRLPPREFGYSHSSPEYWIKSGTLVPVTRNDIVKIEGIDATGGNNQPNIPDIPAHLWYFGLIGTC

SEQ ID NO: 12586 - protein, 268 aa, Synthetic construct
EVSQDLFNQFNLFAQYSAAAYCGKNNDAPAGTNITCTGNACPEVEKADATFLYSFEDSGVGDVTGFLALDNTNKLIVLSFRGSRSIENWIGNLNFDLKEINDICSGCRGHDGFTSSWRSVADTLRQKVEDAVREHPGYRVVFTGHSLGGALATVAGADLRGNGYDIGVFSYGAPRVGNRAFAEFLTVQTGGTLYRITHTNDIVPRLPPRVFGYSHSSPEYWIKSGTLVPVTRNDIVKIEGIDATGGNNRPNIPDIPAHLWYFGLIGTC

SEQ ID NO: 12587 - protein, 268 aa, Thermomyces lanuginosus
EVSQDLFNQFNLFAQYSAAAYCGKNNDAPAGTNITCTGNACPEVEKADATFLYSFEDSGVGDVTGFLALDNTNKLIVLSFRGSRSIENWIGNLNFDLKEINDICSGCRGHDGFTSSWRSVADTLRQKVEDAVREHPDYRVVFTGHSLGGALATVAGADLRGNGYDIDVFSYGAPRVGNRAFAEFLTVQTGGTLYRITNTNDIVPRLPPREFGYSHSSPEYWIKSGTLRPVRRRDIVKIEGIDATGGNNQPNIPDIPAHLWYFGLIGTC

SEQ ID NO: 12588 - protein, 268 aa, Thermomyces lanuginosus
EVSQDLFNQFNLFAQYSAAAYCGKNNDAPAGTNITCTGNACPEVEKADATILYSFEDSGVGDVTGFLALDNTNKLIVLSFRGSRSIENWIGNLNFDLKEINDICSGCRGHDGFTSSWRSVADTLRQKVEDAVREHPDYRVVFTGHSLGGALATVAGADLRGDGYDIDVFSYGAPRVGNRAFAEFLTVQTGGTLYRITHTNDIVPRLPPREFGYSHSSPEYWIKSGTLVPVRRRDIVKIEGIDATGGNNQPNIPDIPAHLWYFGLIGTC

SEQ ID NO: 12589 - protein, 268 aa, Thermomyces lanuginosus
EVSQDLFNQFNLFAQYSAAAYCGKNNDAPAGTQITCTGNACPEVEKADATFLYSFEDSGVGDVTGFLALDNTNKLIVLSFRGSRSIENWIGNLNFDLKEINDICSGCRGHDGFTSSWRSVADTLRQKVEDAVREHPDYRVVFTGHSLGGALATVAGADLRGNGYDIDVFSYGAPRVGNRAFAEFLTVQTGGTLYRITHTNDIVPRLPPREFGYSHSSPEYWIKSGTLVPVRRRDIVKIEGIDATGGNNQPNIPGIPAHLWYFGLIGTC

SEQ ID NO: 12590 - protein, 268 aa, Thermomyces lanuginosus
EVSVDLFNQFNLFAQYSAAAYCGKNNDAPAGTNITCTGNACPEVEKADATFLYSFEDXGVGDVTGFLALDNTNKLIVLSFRGSRSIENWRGNLNFDLKEINDICSGCRGHDGFTSSWRSVADTLRQKVEDAVREHPDYRVVFTGHSLGGALATVAGADLRGNGYDIDVFSYGAPRVGNRAFAEFLTVQTGGTLYRITHTNDIVPRLPPREFGYSHSSPEYWIKSGTLVPVTRNDIVKIEGIDATGGNNXPNIPDIPAHLWYFGLIGTC

SEQ ID NO: 12591 - protein, 268 aa, Thermomyces lanuginosus
EVSQDLFNQFNLFAQYSAAAYCGKNNDAPAGTQITCTGNACPEVEKADATFLYSFEDSGVGDVTGFLALDNTNKLIVLSFRGSRSIENWIGNLNFDLKEINDICSGCRGHDGFTLSWRSVADTLRQKVEDAVREHPDYRVVFTGHSLGGALATVAGADLRGNGYDIDVFSYGAPRVGNRAFAEFLTVQTGGTLYRITHTNDIVPRLPPREFGYSHSSPEYWIKSGTLVPVRRRDIVKIEGIDATGGNNQPNIPDIPAHLWYFGLIGTC

SEQ ID NO: 12592 - protein, 268 aa, Thermomyces lanuginosus
EVSQDLFNQFNLFAQYSKAAYCGKNNDAPAGTDITCTGNACPEVEKADATFLYSFEDSGVGDVTGFLALDNTNKDIVLSFRGSRSIENWIGNLNFDLKEINDICSGCRGHDGFTSSWRSVADTLRQKVEDAVREHPDYRVVFTGHSLGGALATVAGADLRGNGYDIDVFSYGAPRVGNRAFAEFLTVQDGGTLYRITHTNDIVPRLPPREFGYSHSSPEYWIKSGTLVPVTRNDIVKIEGIDATGGNNQPNIPDIPAHLWYFGLIGTC

SEQ ID NO: 12593 - protein, 268 aa, Thermomyces lanuginosus
EVSDDLFNQFNLFAQYSAAAYCGKNNQAPAGTNITCTGNACPEVEKADATFLYSFEDMGVGDVTGFLALDNTNKLIVLSFRGSRSIENWIGNLNFDLKEINDICSGCRGHDGFTSSWRSVADTLRQKVEDAVREHPDYRVVFTGHSLGGALATVAGADLRGNGYDIDVFSYGAPRVGNRAFAEFLTVQTGGTLYRITHTNDIVPRLPPREFGYSHSSPEYWIKSGTLVPVTRNDIVKIEGIDATGGNNQPNIPDITAHLWYFGLIGTC

SEQ ID NO: 12594 - protein, 268 aa, Thermomyces lanuginosus
EVSQDLFNQFNLFAQYSAAAYCGKNNDAPAGTNITCTGNACPEVEKADATFLYSFEDSGVGDVTGFLALDNTNKLIVLSFRGSRSIENWIGNLNFDLKEINDICSGCRGHEGFTSSWRSVADTLRQKVEDAVREHPDYRVVFTGHSLGGALATVAGADLRGNGYDIDVFSYGAPRVGNRAFAEFLTVQTGGTLYRITHTNDIVPRLPPREFGYSHSSPEYWIKSGTLVPVRRRDIVKIEGIDATGGNNQPNIPSIPAHLWYFGLIGTC

SEQ ID NO: 12595 - protein, 268 aa, Thermomyces lanuginosus
EVSQDLFNQFNLFAQYSAAAYCGKNNDAPAGTQITCTGNACPEVEKADATFLYSFEDSGVGDVTGFLALDNTQKLIVLSFRGSRSIENWIGNLNFDLKEINDICSGCRGHDGFTSSWRSVADTLRQKVEDAVREHPDYRVVFTGHSLGGALATVAGADLRGNGYDIDVFSYGAPRVGNRAFAEFLTVQTGGTLYRITHTNDIVPRLPPREFGYSHSSPEYWIKSGTLVPVRRRDIVKIEGIDATGGNNQPNIPDIPAHLWYFGLIGTC

SEQ ID NO: 12596 - protein, 268 aa, Thermomyces lanuginosus
EVSQDLFNQFNLFAQYSAAAYCGKNNSAEAGTDITCTGNACPEVFKADATFLYSFEDSGVGDVTGFLALDNTNKLIVLSFRGSRSIENWIGNLNFDLKEINDICSGCRGHDGFTSSWRSVADTLRQKVEDAVREHPDYRVVFTGHSLGGALATVAGADLRGNGYDIDVFSYGAPRVGNRAFAEFLTVQTGGTLYRITHTNDIVPRLPPREFGYSHSSPEYWIKSGTLVPVTRNDIVKIEGIDATGGNNQPNIPDIPAHLWYFGLIGTC

SEQ ID NO: 12597 - protein, 268 aa, Thermomyces lanuginosus
EVSQDLFNQFNLFAQYSAAAYCGKNNDAPAGTQITCTKNACPEVEKADATFLYSFEDSGVGDVTGFLALDNTNKLIVLSFRGSRSIENWIGNLNFDLKEINDICSGCRGHDGFTSSWRSVADTLRQKVEDAVREHPDYRVVFTGHSLGGALATVAGADLRGNGYDIDVFSYGAPRVGNRAFAEFLTVQTGGTLYRITHTNDIVPRLPPREFGYSHSSPEYWIKSGTLVPVRRRDIVKIEGIDATGGNNQPNIPDIPAHLWYFGLIGTC

SEQ ID NO: 12598 - protein, 268 aa, Thermomyces lanuginosus
EVSQDLFNQFNLFAQYSAAAYCGKNNDAPAGTNITCTGNACPEVEKADATTLYSFEDSGVGDVTGFLALDNTNKQINLSFRGSRSIENWIGNLNFDLKEINDICSGCRGHDGFTSSWRSVADTLRQKVEDAVREHPDYRVVFTGHSLGGALATVAGADLRGNGYDIDVFSYGAPRVGNRAFAEFLTVQTGGTLYRITHTNDIVPRLPPREFGYSHSSPEYWIKSGTLVPVTRNDIVKIEGIDATGGNNQPNQPDIPAHLWYFGRIGTC

SEQ ID NO: 12599 - protein, 268 aa, Thermomyces lanuginosus
EVSQDLFNQFNLFAQYSAAAYCGKNNDAPAGTQITCTGNACPEVEKADATFLYSFEDSGVGDVTGFLALDNTNKLIVLSFRGSRSIENWIGNLNFDLKEINDICSGCRGHDGFTSSWRSVADTLRQKVEDAVREHPDYRVVFTGHSLGGALATVAGADLRGNGYDIDVFSYGAPRVGNRAFAEFLTVQTGGTLYRITHTNDIVPRLPPREFGYSHSSPEYWIKSGTLVPVRRRDIVKIEGIDATGANNQPNIPDIPAHLWYFGLIGTC

SEQ ID NO: 12600 - protein, 268 aa, Thermomyces lanuginosus
EVSQDLFNQFNLFAQYSAAAYCGKNNDAPAGTNITCTGNACPEVEKADATFLYSFEDSGVGDVTGFLALDNTNKLIVLSFRGSRSIENWIGNLNFDLKEINGICSGCRGHDGFTSSWRSVADTLRQKVEDAVREHPDYRVVFTGHSLGGALATVAGADLRGNGYDIDVFSYGAPRVGNRAFAEFLTVQTGGTLYRITHTNDIVPRLPPREFGYSHSSPEYWIKSGTLVPVRRRDIVKIEGIDATGGNNRPNIPDIPAHLWYFGLIGTC

SEQ ID NO: 12601 - protein, 268 aa, Thermomyces lanuginosus
EVSQDLFNQFNLFAQYSAAAYCGKNNDAPAGTQITCTGNACPEVEKADATFLYSFEDSGVGDVTGFLALDNTNKLIVLSFRGSRSIENWIGNLNFNLKEINDICSGCRGHDGFTSSWRSVADTLRQKVEDAVREHPDYRVVFTGHSLGGALATVAGADLRGNGYDIDVFSYGAPRVGNRAFAEFLTVQTGGTLYRITHTNDIVPRLPPREFGYSHSSPEYWIKSGTLVPVRRRDIVKIEGIDATGGNNQPNIPSIPAHLWYFGLIGTC

SEQ ID NO: 12602 - protein, 268 aa, Thermomyces lanuginosus
EVSQDLFNQFNLFAQYSAAAYCGKNNDAPAGTNITCTGNACPEVEKADATFLYSFEDSGVGDVTGFLALDNTNKQIILSFRGSRSIENWIGNLNFDLKEINDICSGCRGHDGFTSSWRSVADTLRQKVEDAVREHPDYRVVFTGHSLGGALATVAGADLRGNGYDIDVFSYGAPRVGNRAFAEFLTTQDGGTLYRITHTNDIVPRLPPREFGYSHSSPEYWIKSGTLVPVTRNDIVKIEGIDATGGNNQPNIPDIPAHLWYFGLIGTC

SEQ ID NO: 12603 - protein, 268 aa, Thermomyces lanuginosus
EVSQDLFNQFNLFAQYSAAAYCGKNNDAPAGTNITCTGNACPEVEKADATILYSFEDSGVGDVTGFLALDNTNKLIVLSFRGSRSIENWIGNLNFDLKEINDICSGCRGHDGFTSSWRSVADTLRQKVEDAVREHPDYRVVFTGHSLGGALATVAGADLRGNGYDIDVFSYGAPRVGNRAFAEFLTVQTGGTLYRITHTNDIVPRLPPREFGYSHSSPEYWIKSGTLVPVRRRDIVKIEGIDATGGNNQPNIPDITAHLWYFGLIGTC

SEQ ID NO: 12604 - protein, 268 aa, Thermomyces lanuginosus
EVSQDLFNQFNLFAQYSAAAYCQKNNDAPAGTNITCTGNACPEVEKADATFLYSFKDSGVGDVTGFLALDNTNKLIVLSFRGSRSIENWIGNLNFDLKEINDICSGCRGHDGFTSSWRSVADTLRQKVEDAVREHPDYRVVFTGHSLGGALATVAGADLRGNGYDIDVFSYGAPRVGNRAFAEFLTNQTGGTLYRITHTNDIVPRLPPREFGYSHSSPEYWIKSGTLVPVTRNDIVKIEGIDATGGNNQPNQPDIPAHLWYFGRIGTC

SEQ ID NO: 12605 - protein, 268 aa, Thermomyces lanuginosus
EVSQDLFNQFNLFAQYSAAAYCQKNNDAPAGTNITCTGNACPEVEKADVTFLYSFEDSGVGDVTGFLALDNTNKQIVLSFRGSRSIENWIGNLNFDLKEINDICSGCRGHDGFTSSWRSVADTLRQKVEDAVREHPDYRVVFTGHSLGGALATVAGADLRGNGYDIDVFSYGAPRVGNRAFAEFLTVQDGGTLYRITHTNDIVPRLPPREFGYSHSSPEYWIKSGTLVPVTRNDIVKIEGIDATGGNNQPNIPDIPAHLWYFGLIGTC

SEQ ID NO: 12606 - protein, 268 aa, Thermomyces lanuginosus
EVSQDLFNQFNLFAQYSAAAYCGKNNDAPAGTQITCTGNACPEVEKADATFLYSFEDSGVGDVTGFLALDNTNKLIVLSFRGSRSIENWIGNLNFDLKEINDICSGCRGHDGFTSSWRSVADTLRQKVEDAVREHPDYRVVFTGHSLGGALATVAGADLRGNEYDIDVFSYGAPRVGNRAFAEFLTVQTGGTLYRITHTNDIVPRLPPREFGYSHSSPEYWIKSGTLVPVRRRDIVKIEGIDATGGNNQPNIPDIPAHLWYFGLIGTC

SEQ ID NO: 12607 - protein, 268 aa, Thermomyces lanuginosus
EVSQDLFNQFNLFAQYSAAAYCGKNNDAPAGTNITCTGNACPEVEKADATFLYSFEDSGVGDVTGFLALDNTNKQIILSFRGSRSIENWIGNLNFDLKEINDICSGCRGHDGFTSSWRSVADTLRQKVEAAVREHPDYRVVFTGHSLGGALATVAGADLRGNGYDIDVFSYGAPRVGNRAFAEFLTQQTGGTLYRITHTNDIVPRLPPREFGYSHSSPEYWIKSGTLVPVTRNDIVKIEGIDATGGNNQPNIPDIPAHLWYFGLIGTC

SEQ ID NO: 12608 - protein, 268 aa, Thermomyces lanuginosus
EVSQDLFNQFNLFAQYSAAAYCQKNNDAPAGTNITCTGNACPEVFKADVTFLYSFEDSGVGDVTGFLALDNTNKLIVLSFRGSRSIENWIGNLNFDLKEINDICSGCRGHDGFTSSWRSVADTLRQKVEDAVREHPDYRVVFTGHSLGGALATVAGADLRGNGYDIDVFSYGAPRVGNRAFAEFLTVQDGGTLYRITHTNDIVPRLPPREFGYSHSSPEYWIKSGTLVPVTRNDIVKIEGIDATGGNNQPNIPDIPAHLWYFGLIGTC

SEQ ID NO: 12609 - protein, 268 aa, Thermomyces lanuginosus
EVSQDLFNQFNLFAQYSAAAYCGKNNDAPAGTNITCTGNACPEVEKADATFLYSFEDMGVGDVTGFLALDNTNKLIVLSFRGSRSIENWIGNLNFDLKEINDICSGCRGHDGFTSSWRSVADTLRQKVEDAVREHPQYRVVFTGHSLGGALATVAGADLRGNPYDIDVFSYGAPRVGNRAFAEFLTVQTGGTLYRITHTNDIVPRLPPREFGYSHSSPEYWIKSGTMVPVTRNDIVKIEGIDATGGNNQPNIPDIPAHLWYFGRIGTC

SEQ ID NO: 12610 - protein, 268 aa, Thermomyces lanuginosus
EVSQDLFNQFNLFAQYSAAAYCGKNNDAPAGTNITCTGNACPEVEKADATFLYSFEDSGVGDVTGFLALDNTNKLIVLSFRGSRSIENWIGNLNFDLKEINDICSGCRGHDGFTSSWRSVADTLRQKVEDAVREHPDYRVVFAGHSLGGALATVAGADLRGNGYDIDVFSYGAPRVGNRAFAEFLTVQTGGTLYRITNTNDIVPRLPPREFGYSHSSPEYWIKSGTLVPVRRRDIVKIEGIDATGGNNQPNIPDIPAHLWYFGLIGTC

SEQ ID NO: 12611 - protein, 268 aa, Thermomyces lanuginosus
EVSQDLFNQFNLFAQYSAAAYCGKNNDAPAGTNITCTGNACPEVEKADATFLYSFEDSGKGDVTGFLALDNTNKLIVLSFRGSRSIENWIGNLNFDLKEINDICSGCRGHDGFTSSWRSVADTLRQKVEDAVREHPDYRGVFTGHSLGGALATVAGADLRGNGYDIDVFSYGAPRVGNRAFAEFLTVQTGGTLYRITHTNDIVPRLPPREFGYSHSSPEYWIKSGTLVPVRRRDIVKIEGIDATGGNNQPNIPDIPAHLWYFGLIGTC

SEQ ID NO: 12612 - protein, 268 aa, Thermomyces lanuginosus
EVSQDLFNQFNLFAQYSAAAYCGKNNDAPAGTNITCTGNACPEVEKADATILYSFEDSGVGDVTGFLALDNTNKLIVLSFRGSRSIENWIGNLNFDLKEINDICSGCRGHDGFTSSWRSVADTLRQKVEDAVREHPDYRVVFTGHSLGGALATVAGADLRGNGYDIDVFSYGAPRVGNRAFAEFLTVQTGGTLYRITNTNDIVPRLPPREFGYSHSSPEYWIKSGTLVPVRRRDIVKIEGIDATGGNNQPNIPDIPAHLWYFGLIGTC

SEQ ID NO: 12613 - protein, 268 aa, Thermomyces lanuginosus
EVSQDLFNQFNLFAQYSAAAYCGKNNQAPAGTNITCTGNACPEVEKADATFLYSFKDSGVGDVTGFLALDNTNKLIVLSFRGSRSIENWIGNLNFDLKEINDICSGCRGHDGFTSSWRSVADTLRQKVEDAVREHPDYRVVFTGHSLGGALATVAGADLRGNGYDIDVFSYGAPRVGNRAFAEFLTVQTGGTLYRITHTNDIVPRLPPREFGYSHSSPEYWIKSGTLVPVTRQDIVKIEGIDATGGNNQPNIPDITAHLWYFGLIGTC

SEQ ID NO: 12614 - protein, 268 aa, Thermomyces lanuginosus
EVSQDLFNQFNLFAQYSAAAYCGKNNDAPAGTNITCTGNACPEVEKADATFLYSFEDSGVGDVTGFLALDNTNKLIVLSFXGSRSIENWIGNLNFDLKEINDICSGCRGHDGFTSSWRSVADTLRQKVEDAVREHPDYRVVFTGHSXGGXLATVAGADLRGNGYDIDVFSYGAPRVGNRAFAEFLTVQTGGTLYRITHTNDIVPRLPPREFGYSHSSPEYWIKSGTLVPVTRNDIVKIEGIDATGGNNXPNIPDIPAHLWYFGLIGTC

SEQ ID NO: 12615 - protein, 268 aa, Thermomyces lanuginosus
EVSQDLFNQFNLFAQYSAAAYCQKNNDAPAGTNITCTGNACPEVEKADVTFLYSFEDSGVGDVTGFLALDNTNKQIILSFRGSRSIENWIGNLNFDLKEINDICSGCRGHDGFTSSWRSVADTLRQKVEDAVREHPDYRVVFTGHSLGGALATVAGADLRGNGYDIDVFSYGAPRVGNRAFAEFLTVQTGGTLYRITHTNDIVPRLPPREFGYSHSSPEYWIKSGTLVPVTRNDIVKIEGIDATGGNNQPNIPDIPAHLWYFGLIGTC

SEQ ID NO: 12616 - protein, 268 aa, Thermomyces lanuginosus
EVSQDLFNQFNLFAQYSAAAYCGKNNDAPAGTNITCTGNACPEVEKADATILYSFEDSGVGDVTGFLALDNTNKLIVLSFRGSRSIENWIGNLNFDLKEINDICSGCRGHDGFTSSWRSVADTLRQKVEDAVREHPDYRVVFAGHSLGGALATVAGADLRGNGYDIDVFSYGAPRVGNRAFAEFLTVQTGGTLYRITHTNDIVPRLPPREFGYSHSSPEYWIKSGTLVPVRRRDIVKIEGIDATGGNNQPNIPDIPAHLWYFGLIGTC

SEQ ID NO: 12617 - protein, 268 aa, Thermomyces lanuginosus
EVSQDLFNQFNLFAQYSAAAYCGKNNSAEAGTDITCTGNACPEVEKADATFLYSFEDSGVGDVTGFLALDNTRKLIVLSFRGSRSIENWIGNLNFDLKEINDICSGCRGHDGFTSSWRSVADTLRQKVEDAVREHPDYRVVFTGHSLGGALATVAGADLRGNGYDIDVFSYGAPRVGNRAFAEFLTVQTGGTLYRITHTNDIVPRLPPREFGYSHSSPEYWIKSGTLVPVTRNDIVKIEGIDATGGNNQPNIPDIPAHLWYFGLIGTC

SEQ ID NO: 12618 - protein, 268 aa, Thermomyces lanuginosus
EVSQDLFNQFNLFAQYSAAAYCKKNNQAPAGTNITCTGNACPEVEKADATTLYSFEDSGVGDVTGFLALDNTNKGIVLSFRGSRSIENWIGNLNFDLKEINDICSGCRGHDGFTSSWRSVADTLRQKVEDAVREHPDYRVVFTGHSLGGALATVAGADLRGNGYDIDVFSYGAPRVGNRAFAEFLTVQTGGTLYRITHTNDIVPRLPPREFGYSHSSPEYWIKSGTLVPVTRNDIVKIEGIDATGGNNQPNIPDIPAHLWYFGLIGTC

SEQ ID NO: 12619 - protein, 268 aa, Thermomyces lanuginosus
EVSQDLFNQFNLFAQYSAAAYCGKNNEAPAGTNITCTGNACPEVEKADATFLYSFEDSGVGDVTGFLALDNTNKLIVLSFRGSRSIENWIGNLNFDLKEINDICSGCRGHDGFTSSWRSVADTLRQKVEDAVREHPQYRVVFTGHSLGGALATVAGADLRGNPYDIDVFSYGAPRVGNRAFAEFLTVQTGGTLYRITHTNDIVPRLPPREFGYSHSSPEYWIKSGTLVPVTRQDIVKIEGIDATGGNNQPNIPDIPAHLWYFGRIGTC

SEQ ID NO: 12620 - protein, 268 aa, Thermomyces lanuginosus
EVSQDLFNQFNLFAQYSAAAYCGKNNDAPAGTNITCAGNACPEVEKADATFLYSFEDSGVGDVTGFLALDNTNKLIVLSFRGSRSIENWIGNLNFALKEINDICSGCRGHDGFTSSWRSVADTLRQKVEDAVREHPDYRVVFTGHSLGGALATVAGADLRGNGYDIDVFSYGAPRVGNRAFAEFLTVQTGGTLYRITHTNDIVPRLPPREFGYSHSSPEYWIKSGTLVPVRRRDIVKIEGIDATGGNNGPNIPDIPAHLWYFGLIGTC

SEQ ID NO: 12621 - protein, 268 aa, Thermomyces lanuginosus
EVSQDLFNQFNLFAQYSAAAYCGKNNDAPAGTNITCTGNACPEVEKADATFLYSFRDSGVGDVTGFLALDNTNKLIVLSFRGSRSIENWIGNLNFDLKEINDICSGCRGHDGFTSSWFSVADTLRQKVEDAVREHPDYRVVFTGHSLGGALATVAGADLRGNGYDIDVFSYGAPRVGNRAFAEFLTVQTGGTLYRITHTNDIVPRLPPREFGYSHSSPEYWIKSGTLVPVRRRDIVKIEGIDATGGNNQPNIPDIPAHLWYFGLIGTC

SEQ ID NO: 12622 - protein, 268 aa, Thermomyces lanuginosus
EVSQDLFNQFNLFAQYSKAAYCGKNNDAEAGTDITCTGNACPEVEKADATFLYSFEDSGVGDVTGFLALDNTNKDIVLSFRGSRSIENWIGNLNFDLKEINDICSGCRGHDGFTSSWRSVADTLRQKVEDAVREHPDYRVVFTGHSLGGALATVAGADLRGNGYDIDVFSYGAPRVGNRAFAEFLTVQTGGTLYRITHTNDIVPRLPPREFGYSHSSPEYWIKSGTLVPVTRNDIVKIEGIDATGGNNQPNIPDIPAHLWYFGLIGTC

SEQ ID NO: 12623 - protein, 268 aa, Thermomyces lanuginosus
EVSQDLFNQFNLFAQYSAAAYCGKNNDAPAGTNITCTGNACPEVEKADATFLYSFEDSGVGDVTGFLALDNTNKLIVLSFRGSRSIKNWIGNLNFDLKEINDICSGCRGHSGFTSSWRSVADTLRQKVEDAVREHPDYRVVFTGHSLGGALATVAGADLRGNGYDIDVFSYGAPRVGNRAFAEFLTVQTGGTLYRITHTNDIVPRLPPREFGYSHSSPEYWIKSGTLVPVRRRDIVKIEGIDATGGNNQPNIPDIPAHLWYFGLIGTC

SEQ ID NO: 12624 - protein, 268 aa, Thermomyces lanuginosus
EVSQDLFNQFNLFAQYSAAAYCQKNNDAPAGTNITCTGNACPEVFKADATFLYSFEDSGVGDVTGFLALDNTNKQIVLSFRGSRSIENWIGNLNFDLKEINDICSGCRGHDGFTSSWRSVADTLRQKVEDAVREHPDYRVVFTGHSLGGALATVAWADLRGNGYDIDVFSYGAPRVGNRAFAEFLTVQTGGTLYRITHTNDIVPRLPPREFGYSHSSPEYWIKSGTLVPVTRNDIVKIEGIDATGGNNQPNIPDIPAHLWYFGLIGTC

SEQ ID NO: 12625 - protein, 268 aa, Thermomyces lanuginosus
EVSQDLFNQFNLFAQYSAAAYCGKNNDAPAGTQITCTGNACPEVEKADATFLYSFEDSGVGDVTGFLALDNTNKLIVLSFRGSRSIENWITNLNFDLKEINDICSGCRGHDGFTSSWRSVADTLRQKVEDAVREHPDYRVVFTGHSLGGALATVAGADLRGNGYDIDVFSYGAPRVGNRAFAEFLTVQTGGTLYRITHTNDIVPRLPPREFGYSHSSPEYWIKSGTLVPVRRRDIVKIEGIDATGGNNQPNIPDITAHLWYFGLIGTC

SEQ ID NO: 12626 - protein, 268 aa, Thermomyces lanuginosus
EVSQDLFNQFNLFAQYSAAAYCGKNNDAPAGTNITCTGNACPEVEKADATFLYSFEDSGVGDVTGFLALDNTNKLIVLSFRGSRSIENWIGNLNFDLKEINDICSGCRGHDGFTSSWRSVADTLRQKVEDAVREHPDYRVVFTGHSLGGALATVAGADLRGNGYDIDVFSYGAPRVGNRAFAEFLTVQTGGTLYRITHTNDCVPRLPPREFGYSHSSPEYWIKSGTLVPVRRRDIVKIEGIDATGGNNQPNICDIPAHLWYFGLIGTC

SEQ ID NO: 12627 - protein, 268 aa, Thermomyces lanuginosus
EVSQDLFNQFNLFAQYSAAAYCGKNNSAPAGTNITCTGNACPEVEKADATFLYSFEDSGVGDVTGFLALDNTNKLIVLSFRGSRSIENWIQNLNFDLKEINDICSGCRGHDGFTSSWRSVADTLRQKVEAAVREHPDYRVVFTGHSLGGALATVAGADLRGNGYDIDVFSYGAPRVGNRAFAEFLTNQTGGTLYRITHTNDIVPRLPPREFGYSHSSPEYWIKSGTLVPVTRNDIVKIEGIDATGGNNQPNQPDIPAHLWYFGRIGTC

SEQ ID NO: 12628 - protein, 268 aa, Thermomyces lanuginosus
EVSQDLFNQFNLFAQYSAAAYCGKNNEAPAGTNITCTGNACPEVEKAQATFLYSFEDSGVGDVTGFLALDNTNKLIVLSFRGSRSIENWIGNLNFDLKEINDICSGCRGHDGFTSSWRSVADTLRQKVEDAVREHPDYRVVFTGHSLGGALATVAGADLRGNGYDIDVFSYGAPRVGNRAFAEFLTVQTGGTLYRITHTNDIVPRLPPREFGYSHSSPEYWIKSGTMVPVTRQDIVKIEGIDATGGNNQPNIPDIPAHLWYFGRIGTC

SEQ ID NO: 12629 - protein, 268 aa, Thermomyces lanuginosus
EVSQDLFNQFNLFAQYSAAAYCGKNNDAPAGTNITCTGNACPEVEKADATFLYSFEDGGGGDVTGFLALDNTNKLIVLSFRGSRSIENWIGNLNFDLKEINDICSGCRGHDGFTSSWRSVADTLRQKVEDAVREHPDYRVVFTGHSLGGALATVAGADLRGNGYDIDVFSYGAPRVGNRAFAEFLTVQTGGTLYRITHTNDIVPRLPPREFGYSHSSPEYWIKSGTLVPVRRRDIVKIEGIDATGGNNQPNIPDIPAHLWYFGLIGTC

SEQ ID NO: 12630 - protein, 268 aa, Thermomyces lanuginosus
EVSQDLFNQFNLFAQYSAAAYCKKNNDAPAGTNITCTGNACPEVEKADATFLYSFKDSGVGDVTGFLALDNTNKLIVLSFRGSRSIENWIGNLNFDLKEINDICSGCRGHDGFTSSWRSVADTLRQKVEAAVREHPDYRVVFTGHSLGGALATVAGADLRGNGYDIDVFSYGAPRVGNRAFAEFLTTQTGGTLYRITHTNDIVPRLPPREFGYSHSSPEYWIKSGTLVPVTRNDIVKIEGIDATGGNNQPNIPDIPAHLWYFGRIGTC

SEQ ID NO: 12631 - protein, 268 aa, Thermomyces lanuginosus
EVSQDLFNQFNLFAQYSAAAYCGKNNSAPAGTDITCTGNACPEVEKADATFLYSFEDSGVGDVTGFLALDNTRKLIVLSFRGSRSIENWIGNLNFDLKEINDICSGCRGHDGFTSSWRSVADTLRQKVEDAVREHPDYRVVFTGHSLGGALATVAGADLRGNGYDIDVFSYGAPRVGNRAFAEFLTVQDGGTLYRITHTNDIVPRLPPREFGYSHSSPEYWIKSGTLVPVTRNDIVKIEGIDATGGNNQPNIPDIPAHLWYFGLIGTC

SEQ ID NO: 12632 - protein, 268 aa, Thermomyces lanuginosus
EVSQDLFNQFNLFAQYSAAAYCGKNNDAPAGTQITCTGNACPEVEKADATFLYSFEDSGVGDVTGFLALDNTNKLIVLSFRGSRSIENWIGNLNFDLKEINDICSGCRGHDGFTSSWRSVANTLRQKVEDAVREHPDYRVVFTGHSLGGALATVAGADLRGNGYDIDVFSYGAPRVGNRAFAEFLTVQTGGTLYRITHTNDIVPRLPPREFGYSHSSPEYWIKSGTLVPVRRRDIVKIEGIDATGGNNQPNIPDIPAHLWYFGLIGTC

SEQ ID NO: 12633 - protein, 268 aa, Synthetic construct
EWRQDLFNQFNLFAQYSAAAYCGKNNDAPAGTNITCTGNACPEVEKADATFLYSFEDSGVGDVTGFLALDNTNKLIVLSFRGSRSIENWIGNLKFLLKEINDICSGCRGHDGFTSSWRSVADTLRQKVEDAVREHPDYRVVFTGHSLGGALATVAGADLRGNGYDIDVFSYGAPRVGNRAFAEFLTVQTGGTLYRITHTNDIVPRLPPREFGYSHSSPEYWIKSGTLVPVTRNDIVKIEGIDATGGNNRPNIPDIPAHLWYFGLIGTC

SEQ ID NO: 12634 - protein, 268 aa, Thermomyces lanuginosus
EVSQDLFNQFNLFAQYSAAAYCGKNNDAPAGTQITCTYNACPEVEKADATFLYSFEDSGVGDVTGFLALDNTNKLIVLSFRGSRSIENWIGNLNFDLKEINDICSGCRGHDGFTSSWRSVADTLRQKVEDAVREHPDYRVVFTGHSLGGALATVAGADLRGNGYDIDVFSYGAPRVGNRAFAEFLTVQTGGTLYRITHTNDIVPRLPPREFGYSHSSPEYWIKSGTLVPVRRRDIVKIEGIDATGGNNQPNIPDIPAHLWYFGLIGTC

SEQ ID NO: 12635 - protein, 268 aa, Thermomyces lanuginosus
EVSQDLFNQFNLFAQYSAAAYCGKNNDAPAGTQITCTGNACPEVEKADATFLYSFEDSGVGDVTGFLALDNTNKLIVLSFRGSRSIENWIGNLNFDLKEINDICSGCRGHDGFTSSWRSVADTLRQKVEDAVREHPDYRVVFTGHSLGGALATVAGADLRGNAYDIDVFSYGAPRVGNRAFAEFLTVQTGGTLYRITHTNDIVPRLPPREFGYSHSSPEYWIKSGTLVPVRRRDIVKIEGIDATGGNNQPNIPDIPAHLWYFGLIGTC

SEQ ID NO: 12636 - protein, 268 aa, Thermomyces lanuginosus
EVSQDLFNQFNLFAQYSAAAYCQKNNDAPAGTNITCTGNACPEVEKADATFLYSFEDSGVGDVTGFLALDNTNKGIVLSFRGSRSIENWIQNLNFDLKEINDICSGCRGHDGFTSSWRSVADTLRQKVEAAVREHPDYRVVFTGHSLGGALATVAGADLRGNGYDIDVFSYGAPRVGNRAFAEFLTVQTGGTLYRITHTNDIVPRLPPREFGYSHSSPEYWIKSGTLVPVTRNDIVKIEGIDATGGNNQPNQPDIPAHLWYFGRIGTC

SEQ ID NO: 12637 - protein, 268 aa, Thermomyces lanuginosus
EVSQDLFNQFNLFAQYSAAAYCGKNNDAPAGTQITCTGNACPEVEKADATFLYSFEDSGVGDVTGFLALDNTNKLIVLSFRGSRSIENWIGNLKFLLKEINDICSGCRGHDGFTSSWRSVADTLRQKVEDAVREHPDYRVVFTGHSLGGALATVAGADLRGNGYDIDVFSYGAPRVGNRAFAEFLTVQTGGTLYRITHTNDIVPRLPPREFGYSHSSPEYWIKSGTLVPVRRRDIVKIEGIDATGGNNQPNIPDIPAHLWYFGLIGTC

SEQ ID NO: 12638 - protein, 268 aa, Thermomyces lanuginosus
EVSQDLFNQFNLFAQYSAAAYCGKNNRAPAGTNITCTGNACPEVEKADATFLYSFEDSGVGDVTGFLALDNTNKLIVLSFRGSRSIENWIGNLNFDLKEINDICSGCRGHGGFTSSWRSVADTLRQKVEDAVREHPDYRVVFTGHSLGGALATVAGADLRGNGYDIDVFSYGAPRVGNRAFAEFLTVQTGGTLYRITHTNDIVPRLPPREFGYSHPSPEYWIKSGTXVPVTRNDIVKIEGIDATGGNNQPNIPDIPAHLWYFGLIGTC

SEQ ID NO: 12639 - protein, 268 aa, Thermomyces lanuginosus
EVSQDLFNQFNLFAQYSAAAYCGKNNDAPAGTQITCTGNACPEVEKADATFLYSFEDSGVGDVTGFLALDNTNKLIVLSFRGSRSIENWIGNLNFDLKEINDICSGCRGHDGFTSSWRSVADTLRQKVEDAVREHPDYRVVFTGHSLGGALATVAGADLRGNGYDIDVFSYGAPRVGNRAFAEFLTVQTGGTLYRITHTNDIVPRLPPREFGYSHSSPEYWIKSGTLVPVRRRDIVKIEGIDATGGNNQPNIPKIPAHLWYFGLIGTC

SEQ ID NO: 12640 - protein, 268 aa, Thermomyces lanuginosus
EVSQDLFNQFNLFAQYSAAAYCKKNNDAPAGTNITCTGNACPEVEKADATFLYSFEDSGVGDVTGFLALDNTNKLIVLSFRGSRSIENWIGNLNFDLKEINDICSGCRGHDGFTSSWRSVADTLRQKVEAAVREHPDYRVVFTGHSLGGALATVAGADLRGNGYDIDVFSYGAPRVGNRAFAEFLTTQQGGTLYRITHTNDIVPRLPPREFGYSHSSPEYWIKSGTLVPVTRNDIVKIEGIDATGGNNQPNIPDIPAHLWYFGLIGTC

SEQ ID NO: 12641 - protein, 268 aa, Thermomyces lanuginosus
EVSQDLFNQFNLFAQYSAAAYCGKNNDAPAGTQITCTGNACPEVEKADATFLYSFEDSGVGDVTGFLALDNTNKLIVLSFRGSRSIENWIGNLNFDLKEINDICSGCRGHDGFTSSWRSVADTLRQKVEDAVREHPDYRVVFTGHSLGGALATVAGADLRGNGYDIDVFSYGAPRVGNRAFAEFLTVQTGGTLYRITHTNDIVPRLPPREFGYSHSSPEYWIKSPTLVPVRRRDIVKIEGIDATGGNNQPNIPDIPAHLWYFGLIGTC

SEQ ID NO: 12642 - protein, 268 aa, Thermomyces lanuginosus
EVSQDLFNQFNLFAQYSAAAYCGANNDAPAGTNITCTGNACPEVEKADATFLYSFEDSGVGDVTGFLALDNTNKQIVLSFRGSRSIENWIGNLNFDLKEINDICSGCRGHDGFTSSWRSVADTLRQKVEAAVREHPDYRVVFTGHSLGGALATVAWADLRGNGYDIDVFSYGAPRVGNRAFAEFLTVQTGGTLYRITHTNDIVPRLPPREFGYSHSSPEYWIKSGTLVPVTRNDIVKIEGIDATGGNNQPNIPDIPAHLWYFGLIGTC

SEQ ID NO: 12643 - protein, 268 aa, Thermomyces lanuginosus
EVSQDLFNQFNLFAQYSAAAYCGKNNDAPAGTQITCTGNACPEVEKADATFLYSFEDSGVGDVTGFLALDNTNKLIVLSFRGSRSIENWITNLRFDLKEINDICSGCRGHDGFTSSWRSVADTLRQKVEDAVREHPDYRVVFTGHSLGGALATVAGADLRGNGYDIDVFSYGAPRVGNRAFAEFLTVQTGGTLYRITHTNDIVPRLPPREFGYSHSSPEYWIKSGTLVPVRRRDIVKIEGIDATGGNNQPNIPDIPAHLWYFGLIGTC

SEQ ID NO: 12644 - protein, 268 aa, Thermomyces lanuginosus
EVSQDLFNQFNLFAQYSAAAYCGKNNYAPAGTNITCTGNACPEVEKADATFLYSFEDSGVGDVTGFLALDNTNKLIVLSFRGSRSIKNWIGNLNFDLKEINDICSGCRGHDGFTSSWRSVADTLRQKVEDAVREHPDYRVVFTGHSLGGALATVAGADLRGNGYDIDVFSYGAPRVGNRAFAEFLTVQTGGTLYRITHTNDIVPRLPPREFGYSHSSPEYWIKSGTLVPVRRRDIVKIEGIDATGGNNQPNIPDIPAHLWYFGLIGTC

SEQ ID NO: 12645 - protein, 268 aa, Thermomyces lanuginosus
EVSQDLFNQFNLFAQYSAAAYCGKNNDAPAGTQITCTGNACPEVEKADATFLYSFEDSGVGDVTGFLALDNTNKLIVLSFRGSRSIENWIGNLNFDLKEINDICSGCRGHDGFTSSSRSVADTLRQKVEDAVREHPDYRVVFTGHSLGGALATVAGADLRGNGYDIDVFSYGAPRVGNRAFAEFLTVQTGGTLYRITHTNDIVPRLPPREFGYSHSSPEYWIKSGTLVPVRRRDIVKIEGIDATGGNNQPNIPDIPAHLWYFGLIGTC

SEQ ID NO: 12646 - protein, 268 aa, Thermomyces lanuginosus
EVSQDLFNQFNLFAQYSAAAYCGKNNDAPAGTNITCTGNACPEVEKADATILYSFEDSGVGDVTGFLALDNTNKLIVLSFRGSRSIENWIGNLNFDLKEINDICSGCRGHDGFTSSWRSVADTLRQKVEDAVREHPDYRVVFTGHSLGGALATVAGADLRGNGYDIDVFSYGAPRVGNRAFAEFLTVQTGGTLYRITSTNDIVPRLPPREFGYSHSSPEYWIKSGTLVPVRRRDIVKIEGIDATGGNNQPNIPDIPAHLWYFGLIGTC

SEQ ID NO: 12647 - protein, 268 aa, Thermomyces lanuginosus
EVSEDLFNQFNLFAQYSAAAYCGKNNDAPAGTNITCTGNACPEVEKADATFLYSFEDSGVGDVTGFLALDNTNKLIVLSFRGSRSIENWIGNLNFDLKEINDICSGCRGHDGFTSSWRSVADTLRQKVEDAVREHPQYRVVFTGHSLGGALATVAGADLRGNPYDIDVFSYGAPRVGNRAFAEFLTVQTGGTLYRITHTNDIVPRLPPREFGYSHSSPEYWIKSGTMVPVTRNDIVKIEGIDATGGNNQPNIPDIPAHLWYFGRIGTC

SEQ ID NO: 12648 - protein, 268 aa, Thermomyces lanuginosus
EVSQDLFNQFNLFAQYSAAAYCGKNIDAPAGTQITCTGNACPEVEKADATFLYSFEDSGVGDVTGFLALDNTNKLIVLSFRGSRSIENWIGNLNFDLKEINDICSGCRGHDGFTSSWRSVADTLRQKVEDAVREHPDYRVVFTGHSLGGALATVAGADLRGNGYDIDVFSYGAPRVGNRAFAEFLTVQTGGTLYRITHTNDIVPRLPPREFGYSHSSPEYWIKSGTLVPVRRRDIVKIEGIDATGGNNQPNIPDIPAHLWYFGLIGTC

SEQ ID NO: 12649 - protein, 268 aa, Thermomyces lanuginosus
EVSQDLFNQFNLFAQYSAAAYCGKNNDAPAGTNITCTGNACPEVEKADATFLYSFKDSGVGDVTGFLALDNTNKVIVLSFRGSRSIENWIGNLNFDLKEINDICSGCRGHDGFTSSWRSVADTLRQKVEDAVREHPDYRVVFTGHSLGGALATVAGADLRGNGYDIDVFSYGAPRVGNRAFAEFLTNQTGGTLYRITHTNDIVPRLPPREFGYSHSSPEYWIKSGTLVPVTRNDIVKIEGIDATGGNNQPNQPDIPAHLWYFGRIGTC

SEQ ID NO: 12650 - protein, 268 aa, Synthetic construct
EVSQDLFNQFNLFAQYSAAAYCGKNNDAPAGTNITCTGNACPEVEKADATFLYSFEGSGVGDVTGFLALDNTNKLIVLSFRGSRSIENWIGNLKFDMLEINDICSGCRGHDGFTSSWRSVADTLRQKVEDAVREHPDYRVVFTGHSLGGALATVAGADLRGNGYDIDVFSYGAPRVGNRAFAEFLTVQTGGTLYRITHTNDIVPRLPPREFGYSHSSPEYWIKSGTLVPVTRNDIVKIEGIDATGGNNQPNIPDIPAHLWYFGLIGTC

SEQ ID NO: 12651 - protein, 268 aa, Thermomyces lanuginosus
EVSQDLFNQFNLFAQYSAAAYCGKNNDAPAGTQITCTGNACPEVEKADATFLYSFEDSGVGDVTGFLALDNTNKLIVLSFRGSRSIENWIGNLRFDLKEINDICSGCRGHDGFTSSWRSVADTLRQKVEDAVREHPDYRVVFTGHSLGGALATVAGADLRGNGYDIDVFSYGAPRVGNRAFAEFLTVQTGGTLYRITHTNDIVPRLPPREFGYSHSSPEYWIKSGTLVPVRRRDIVKIEGIDATGGNNQPNIPDIPAHLWYFGLIGTC

SEQ ID NO: 12652 - protein, 268 aa, Thermomyces lanuginosus
EVSQDLFNQFNLFAQYSAAAYCGKNNDAPAGTQITCTGNACPEVEKADATFLYSFEDSGVGDVTGFLALDNTNKLIVLSFRGSRSIENWITNLNFDLKEINDICSGCRGHDGFTSSWRSVADTLRQKVEDAVREHPDYRVVFTGHSLGGALATVAGADLRGNKYDIDVFSYGAPRVGNRAFAEFLTVQTGGTLYRITHTNDIVPRLPPREFGYSHSSPEYWIKSGTLVPVRRRDIVKIEGIDATGGNNQPNIPDIPAHLWYFGLIGTC

SEQ ID NO: 12653 - protein, 268 aa, Thermomyces lanuginosus
EVSQDLFNQFNLFAQYSAAAYCGKNNDAPAGTQITCTGHACPEVEKADATFLYSFEDSGVGDVTGFLALDNTNKLIVLSFRGSRSIENWIGNLNFDLKEINDICSGCRGHDGFTSSWRSVADTLRQKVEDAVREHPDYRVVFTGHSLGGALATVAGADLRGNGYDIDVFSYGAPRVGNRAFAEFLTVQTGGTLYRITHTNDIVPRLPPREFGYSHSSPEYWIKSGTLVPVRRRDIVKIEGIDATGGNNQPNIPDIPAHLWYFGLIGTC

SEQ ID NO: 12654 - protein, 268 aa, Thermomyces lanuginosus
EVSQDLFNQFNLFAQYSAAAYCGKNNEAPAGTNITCTGNACPEVEKADATFLYSFEDSGVGDVTGFLALDNTNKLIVLSFRGSRSIENWIGNLNFDLKEINDICSGCRGHDGFTSSWRSVADTLRQKVEDAVREHPQYRVVFTGHSLGGALATVAGADLRGNPYDIDVFSYGAPRVGNRAFAEFLTVQTGGTLYRITHTNDIVPRLPPREFGYSHSSPEYWIKSGTMVPVTRNDIVKIEGIDATGGNNQPNIPDIPAHLWYFGRIGTC

SEQ ID NO: 12655 - protein, 268 aa, Thermomyces lanuginosus
EVSQDLFNQFNLFAQYSAAAYCGANNDAPAGTNITCTGNACPEVEKADATFLYSFEDSGVGDVTGFLALDNTNKRIVLSFRGSRSIENWIGNLNFDLKEINDICSGCRGHDGFTSSWRSVADTLRQKVEDAVREHPDYRVVFTGHSLGGALATVAWADLRGNGYDIDVFSYGAPRVGNRAFAEFLTNQTGGTLYRITHTNDIVPRLPPREFGYSHSSPEYWIKSGTLVPVTRNDIVKIEGIDATGGNNQPNIPDIPAHLWYFGLIGTC

SEQ ID NO: 12656 - protein, 268 aa, Thermomyces lanuginosus
EVSQDLFNQFNLFAQYSAAAYCGKNNDAPAGTNITCTGNACPEVEKADATFLYSFEDSGVGDVTGFLALDNTNKLIVLSFRGSRSIENWIGNLNFDLKEINDICSGCRGHDGFTSSWRSVADTLRQKVEDAVREHPDYRVVFTGHSLGGALATVAGADLRGNGYDIDVFSYGAPRVGNRAFAEFLTVQTGGTLYRITHTNDIVPRLPPREFGYSHSSPEYWIKSGTLVPVRRRDIVKIEGIDATGGNNQPNIPDIPAHFHYFGLIGTC

SEQ ID NO: 12657 - protein, 268 aa, Thermomyces lanuginosus
EVSQDLFNQFNLFAQYSAAAYCGKNNDAPAGTNITCTGNACPEVEKADATFLYSFEDSGVGDVTGFLALDNTNKLIVLSFRGSRSIENWIGNLNFDLKNISDICSGCRGHDGFTSSWRSVADTLRQKVEDAVREHPDYRVVFTGHSLGGALATVAGADLRGNGYDIDVFSYGAPRVGNRAFAEFLTVQTGGTLYRITHTNDIVPRLPPREFGYSHSSPEYWIKSGTLVPVRRRDIVKIEGIDATGGNNRPNIPDIPAHLWYFGLIGTC

SEQ ID NO: 12658 - protein, 268 aa, Thermomyces lanuginosus
EVSQDLFNQFNLFAQYSAAAYCGKNNDAPAGTQITCTGNACPEVEKADATFLYSFEDSGVGDVTGFLALDNTNKLIVLSFRGSRSIENWIGNLNFDLKEINDICSGCRGHDGFTSSWRSVADTLRQKVEDAVREHPDYRVVFTGHSLGGALATVAGADLRGNGYDIDVFSYGAPRIGNRAFAEFLTVQTGGTLYRITHTNDIVPRLPPREFGYSHSSPEYWIKSGTLVPVRRRDIVKIEGIDATGGNNQPNIPDIPAHLWYFGLIGTC

SEQ ID NO: 12659 - protein, 268 aa, Thermomyces lanuginosus
EVSQDLFNQFNLFAQYSAAAYCGKNNDAPAGTQITCTGNACPEVEKADATFLYSFEDSGVGDVTGFLALDNTNKLIVLSFRGSRSIENWIGNLNFDLKEINDICSGCRGHDGFTSSWRSVADTLRQKVEDAVREHPDYRVVFTGHSLGGALATVAGADLRGNGYDIDVFSYGAPRVGNRAFAEFLTVQTGGTLYRITHTNDIVPRLPPREFGYSHSSPEYWIKSGTLVPVRRRDIVKIEGIDATGGNNQPNIPDIAAHLWYFGLIGTC

SEQ ID NO: 12660 - protein, 268 aa, Thermomyces lanuginosus
EVSQDLFNQFNLFAQYSAAAYCGKNNDAPAGTNITCTGNACPEVEKADATTLYSFEDMGVGDVTGFLALDNTNKQIVLSFRGSRSIENWIQNLNFDLKEINDICSGCRGHDGFTSSWRSVADTLRQKVEDAVREHPDYRVVFTGHSLGGALATVAGADLRGNGYDIDVFSYGAPRVGNRAFAEFLTVQTGGTLYRITHTNDIVPRLPPREFGYSHSSPEYWIKSGTLVPVTRNDIVKIEGIDATGGNNQPNQPDIPAHLWYFGLIGTC

SEQ ID NO: 12661 - protein, 268 aa, Thermomyces lanuginosus
EVSQDLFNQFNLFAQYSAAAYCGKNNDAPAGTQITCTGNACPEVEKADATFLYSFEDSGVGDVTGFLALDNTNKLIVLSFRGSRSIENWIGNLNFDLKEINDICSGCRGHDGFTSSWRSVADTLRQKVEDAVREHPDYRVVFTGHSLGGALATVAGADLRGNGYDIDVFSYGAPRVGNRAFAEFLTVQTGGTLYRITHTNDIVPRLPPREFGYSHSSPEYWIKSGTLVPVRRRDIVKIELIDATGGNNQPNIPDIPAHLWYFGLIGTC

SEQ ID NO: 12662 - protein, 268 aa, Thermomyces lanuginosus
EVSQDLFNQFNLFAQYSKAAYCGKNNDAPAGTNITCTGNACPEVEKADATFLYSFEDSGVGDVTGFLALDNTNKQIVLSFRGSRSIENWIGNLRFDLKEINDICSGCRGHDGFTSSWRSVADTLRQKVEAAVREHPDYRVVFTGHSLGGALATVAGADLRGNGYDIDVFSYGAPRVGNRAFAEFLTVQTGGTLYRITHTNDIVPRLPPREFGYSHSSPEYWIKSGTLVPVTRNDIVKIEGIDATGGNNQPNIPDIPAHLWYFGLIGTC

SEQ ID NO: 12663 - protein, 268 aa, Thermomyces lanuginosus
EVSQDLFNQFNLFAQYSAAAYCGKNNDAPAGTNITCTGNACPEVEKADATVLYSFEDSGVGDVTGFLALDNTNKLIVLSFRGSRSIENWIGNLNFDLKEINDICSGCRGHDGFTSSWRSVADTLRQKVEDAVREHPDYRVVFTGHSLGGALATVAGADLRGNGYDIDVFSYGAPRVGNRAFAEFLTVQTGGTLYRITHTNDIVPRLPPREFGYSHSSPEYWIKSGTLVPVRRRDIVKIEGIDATGGNNQPNIPSIPAHLWYFGLIGTC

SEQ ID NO: 12664 - protein, 268 aa, Thermomyces lanuginosus
EVSDDLFNQFNLFAQYSAAAYCGKNNSAPAGTNITCTGNACPEVEKADATFLYSFEDSGVGDVTGFLALDNTNKLIVLSFRGSRSIENWFGNLNFDLKEINDICSGCRGHDGFTSSWRSVADTLRQKVEDAVREHPDYRVVFTGHSLGGALATVAGADLRGNGYDIDVFSYGAPRVGNRAFAEFLTVQTGGTLYRITHTNDIVPRLPPREFGYSHSSPEYWIKSGTLVPVTRNDIVKIEGIDATGGNNQPNIPDITAHLWYFGLIGTC

SEQ ID NO: 12665 - protein, 268 aa, Thermomyces lanuginosus
EVSQDLFNQFNLFAQYSAAAYCGKNNDAPAGTDITCTGNACPEVFKADATFLYSFEDSGVGDVTGFLALDNTRKLIVLSFRGSRSIENWIGNLNFDLKEINDICSGCRGHDGFTSSWRSVADTLRQKVEDAVREHPDYRVVFTGHSLGGALATVAGADLRGNGYDIDVFSYGAPRVGNRAFAEFLTVQAGGTLYRITHTNDIVPRLPPREFGYSHSSPEYWIKSGTLVPVTRNDIVKIEGIDATGGNNQPNIPDIPAHLWYFGLIGTC

SEQ ID NO: 12666 - protein, 268 aa, Thermomyces lanuginosus
EVSQDLFNQFNLFAQYSAAAYCGKNNDAPAGTQITCTGNACPEVEKADATFLYSFEDSGVGDVTGFLALDNTNKLIVLSFRGSRSIENWIGNLNFDLKEINDICSGCRGHDGFTSSWRSVADTLRQKVEDAVREHPDYRVVFTGHSLGGALATVAGADLRGNGYDIDVFSYGAPRVGNRAFAEFLTVQTGGTLYRITHTNDIVPRLPPREFGYSHSSPEYWIKSGTLVPVRRRDIVKIEGIDATGGNNQPNIPDIGAHLWYFGLIGTC

SEQ ID NO: 12667 - protein, 268 aa, Thermomyces lanuginosus
EVSQDLFNQFNLFAQYSAAAYCGKNNSAEAGTNITCTGNACPEVFKADATFLYSFEDSGVGDVTGFLALDNTNKDIVLSFRGSRSIENWIGNLNFDLKEINDICSGCRGHDGFTSSWRSVADTLRQKVEDAVREHPDYRVVFTGHSLGGALATVAGADLRGNGYDIDVFSYGAPRVGNRAFAEFLTVQTGGTLYRITHTNDIVPRLPPREFGYSHSSPEYWIKSGTLVPVTRNDIVKIEGIDATGGNNQPNIPDIPAHLWYFGLIGTC

SEQ ID NO: 12668 - protein, 268 aa, Thermomyces lanuginosus
EVSQDLFNQFNLFAQYSAAAYCGKNNDAPAGTQITCTGNACPEVEKADATFLYSFEDSGVGDVTGFLALDNTNKLIVLSFRGSRSIENWIGNLNFDLKEINDICSGCRGHDGFTSSWRSVADTLRQKVEDAVREHPDYRVVFTGHSLGGALATVAGADLRGNGYDIDVFSYGAPRVGNRAFAEFLTVQTGGTLYRITHTNDIVPRLPPREFGYSHSSPEYWIKSGTLVPVRRRDIVKIEGIDATGGNNQPNIPIIPAHLWYFGLIGTC

SEQ ID NO: 12669 - protein, 268 aa, Thermomyces lanuginosus
EVSQDLFNQFNLFAQYSAAAYCGKNNDAPAGTNITCTGNACPEVEKADATTLYSFEDSGVGDVTGFLALDNTNKGIVLSFRGSRSIENWIGNLNFDLKEINDICSGCRGHDGFTSSWRSVADTLRQKVEAAVREHPDYRVVFTGHSLGGALATVAGADLRGNGYDIDVFSYGAPRVGNRAFAEFLTVQTGGTLYRITHTNDIVPRLPPREFGYSHSSPEYWIKSGTLVPVTRNDIVKIEGIDATGGNNQPNQPDIPAHLWYFGRIGTC

SEQ ID NO: 12670 - protein, 268 aa, Thermomyces lanuginosus
EVSQDLFNQFNLFAQYSAAAYCGKNNPAPAGTNITCTGNACPEVEKADATFLYSFEDSGVGDVTGFLALDNTNKLIVLSFRGSRSIENWIGNLNFDLKEINDICSGCRGHGGFTSSWRSVADTLRQKVEDAVREHPDYRVVFTGHSLGGALATVAGADLRGNGYDIDVFSYGAPRVGNRAFAEFLTVQTGGTLYRITHTNDIVPRLPPREFGYSHPSPEYWIKSGTXVPVTRNDIVKIEGIDATGGNNQPNIPDIPAHLWYFGLIGTC

SEQ ID NO: 12671 - protein, 268 aa, Thermomyces lanuginosus
EVSQDLFNQFNLFAQYSAAAYCGKNNDAPAGTNITCTGNACPEVEKADATTLYSFEDSGVGDVTGFLALDNTNKLIVLSFRGSRSIENWIGNLNFDLKEINDICSGCRGHDGFTSSWRSVADTLRQKVEAAVREHPDYRVVFTGHSLGGALATVAGADLRGNGYDIDVFSYGAPRVGNRAFAEFLTTQTGGTLYRITHTNDIVPRLPPREFGYSHSSPEYWIKSGTLVPVTRNDIVKIEGIDATGGNNQPNQPDIPAHLWYFGRIGTC

SEQ ID NO: 12672 - protein, 268 aa, Thermomyces lanuginosus
EVSQDLFNQFNLFAQYSAAAYCGKNNDAPAGTNITCTGNACPEVEKADATFLYSFEDSGVGDVTGFLALDNTNKGIVLSFRGSRSIENWIGNLNFDLKEINDICSGCRGHDGFTSSWRSVADTLRQKVEAAVREHPDYRVVFTGHSLGGALATVAGADLRGNGYDIDVFSYGAPRVGNRAFAEFLTTQTGGTLYRITHTNDIVPRLPPREFGYSHSSPEYWIKSGTLVPVTRNDIVKIEGIDATGGNNQPNQPDIPAHLWYFGRIGTC

SEQ ID NO: 12673 - protein, 268 aa, Thermomyces lanuginosus
EVSQDLFNQFNLFAQYSAAAYCGKNNRAPAGTNITCTGNACPEVEKADATFLYSFEDSGVGDVTGFLALDNTNKLIVLSFRGSRSIENWIGNLNFELKEINDICSGCRGHDGFTSSWRSVADTLRQKVEDAVREHPDYRVVFTGHSLGGALATVAGADLRGNKYDIDVFSYGAPRVGNRAFAEFLTVQTGGTLYRITHTNDIVPRLPPREFGYSHSSPEYWIKSGTLVPVRRRDIVKIEGIDATGGNNQPNIPDIPAHLWYFGLIGTC

SEQ ID NO: 12674 - protein, 268 aa, Thermomyces lanuginosus
EVSQDLFNQFNLFAQYSAAAYCGKNNDAPAGTQITCTGNACPEVEKADATFLYSFEDSGVGDVTGFLALDNTNKLIVLSFRGSRSIENWIGNLNFDLKEINDICSGCRGHDGFTSSWRSVADTLRQKVEDAVREHPDYRVVFTGHSLGGALATVAGADLRGNGYDIDVFSYGAPRVGNRAFAEFLTVQTGGTLYRITHTNDIVPRLPPREFGYSHSSPEYWIKSGTLVPVRRRDIVKIEGIDATGGNNQPNIPDIHAHLWYFGLIGTC

SEQ ID NO: 12675 - protein, 268 aa, Thermomyces lanuginosus
EVSQDLFNQFNLFAQYSKAAYCGKNNDAEAGTDITCTGNACPEVEKADATFLYSFEDSGVGDVTGFLALDNTNKLIVLSFRGSRSIENWIGNLNFDLKEINDICSGCRGHDGFTSSWRSVADTLRQKVEDAVREHPDYRVVFTGHSLGGALATVAGADLRGNGYDIDVFSYGAPRVGNRAFAEFLTVQDGGTLYRITHTNDIVPRLPPREFGYSHSSPEYWIKSGTLVPVTRNDIVKIEGIDATGGNNQPNIPDIPAHLWYFGLIGTC

SEQ ID NO: 12676 - protein, 268 aa, Thermomyces lanuginosus
EVSQDLFNQFNLFAQYSAAAYCGKNNDAPAGTQITCTGNACPEVEKADATFLYSFEDSGVGDVTGFLALDNTNKLIVLSFRGSRSIENWIGNLNFDLKEINDICSGCRGHDGFTSSWRSVADTLRQKVEDAVREHPDYRVVFTGHSLGGALATVAGADLRGNKYDIDVFSYGAPRVGNRAFAEFLTVQTGGTLYRITHTNDIVPRLPPREFGYSHSSPEYWIKSGTLVPVRRRDIVKIEGIDATGGNNQPNIPDIPAHLWYFGLIGTC

SEQ ID NO: 12677 - protein, 268 aa, Thermomyces lanuginosus
EVSQDLFQQFNLFAQYSAAAYCGKNNDAPAGTQITCTGNACPEVEKADATFLYSFEDSGVGDVTGFLALDNTNKLIVLSFRGSRSIENWIGNLNFDLKEINDICSGCRGHDGFTSSWRSVADTLRQKVEDAVREHPDYRVVFTGHSLGGALATVAGADLRGNGYDIDVFSYGAPRVGNRAFAEFLTVQTGGTLYRITHTNDIVPRLPPREFGYSHSSPEYWIKSGTLVPVRRRDIVKIEGIDATGGNNQPNIPDIPAHLWYFGLIGTC

SEQ ID NO: 12678 - protein, 268 aa, Thermomyces lanuginosus
EVSQDLFNQFNLFAQYSAAAYCGKNNDAPAGTNITCTGNACPEVEKADATFLYSFEDSGVGDVTGFLALDNTNKRIVLSFRGSRSIENWIGNLNFDLKEINDICSGCRGHDGFTSSWRSVADTLRQKVEAAVREHPDYRVVFTGHSLGGALATIAGADLRGNGYDIDVFSYGAPRVGNRAFAEFLTVQQGGTLYRITHTNDIVPRLPPREFGYSHSSPEYWIKSGTLVPVTRNDIVKIEGIDATGGNNQPNIPDIPAHLWYFGRIGTC

SEQ ID NO: 12679 - protein, 268 aa, Thermomyces lanuginosus
EVSQDLFNQFNLFAQYSAAAYCGKNNDAPAGTNITCTGNACPEVEKADATFLYSFEDSGVGDVTGFLALDNTNKLIVLSFRGSRSIENWIGNLNFDLKEINDICSGCRGHDGFTSSWRSVADTLRQKVEDAVREHPDYRVVFTGHSLGGALATVAGADLRGDGYDIDVFSYGAPRVGNRAFAEFLTVQTGGTLYRITSTNDIVPRLPPREFGYSHSSPEYWIKSGTLVPVRRRDIVKIEGIDATGGNNQPNIPDIPAHLWYFGLIGTC

SEQ ID NO: 12680 - protein, 268 aa, Thermomyces lanuginosus
EVSQDLFNQFNLFAQYSAAAYCKKNNDAPAGTNITCTGNACPEVEKADATFLYSFKDSGVGDVTGFLALDNTNKLIVLSFRGSRSIENWIGNLNFDLKEINDICSGCRGHDGFTSSWRSVADTLRQKVEAAVREHPDYRVVFTGHSLGGALATVAGADLRGNGYDIDVFSYGAPRVGNRAFAEFLTNQTGGTLYRITHTNDIVPRLPPREFGYSHSSPEYWIKSGTLVPVTRNDIVKIEGIDATGGNNQPNIPDIPAHLWYFGLIGTC

SEQ ID NO: 12681 - protein, 268 aa, Thermomyces lanuginosus
EVSQDLFNQFNLFAQYSAAAYCGKNNDAPAGTQITCTGNACPEVEKADATFLYSFEDSGVGDVTGFLALDNTNKLIVLSFRGSRSIENWIGNLNFDLKEINDICSGCRGHDGFTSSWRSVADTLRQKVEDAVREHPDYRVVFTGHSLGGALATVAGADLRGNGYDIDVFSYGAPRVGNRAFAEFLTVQTGGTLYRITHTNDIVPRLPPREFGYSHSSPEYWIKSGTLVPVRRRDIVKIEGIEATGGNNQPNIPDIPAHLWYFGLIGTC

SEQ ID NO: 12682 - protein, 268 aa, Thermomyces lanuginosus
EVSQDLFNQFNLFAQYSAAAYCGKNNDAPAGTNITCTGNACPEVEKADATLLYSFEDSGVGDVTGFLALDNTNKLIVLSFRGSRSIENWIGNLNFDLKEINDICSGCRGHDGFTSSWRSVADTLRQKVEDAVREHPDYRVVFTGHSLGGALATVAGADLRGNGYDIDVFSYGAPRVGNRAFAEFLTVQTGGTLYRITHTNDIVPRLPPREFGYSHSSPEYWIKSGTLVPVRRRDIVKIEGIDATGGNNQPNIPSIPAHLWYFGLIGTC

SEQ ID NO: 12683 - protein, 268 aa, Thermomyces lanuginosus
EVSQDLFNQFNLFAQYSAAAYCGKNNDAPAGTNITCTGNACPEVEKADATFLYSFKDSGVGDVTGFLALDNTNKRIVLSFRGSRSIENWIGNLNFDLKEINDICSGCRGHDGFTSSWRSVADTLRQKVEAAVREHPDYRVVFTGHSLGGALATVAGADLRGNGYDIDVFSYGAPRVGNRAFAEFLTNQTGGTLYRITHTNDIVPRLPPREFGYSHSSPEYWIKSGTLVPVTRNDIVKIEGIDATGGNNQPNIPDIPAHLWYFGRIGTC

SEQ ID NO: 12684 - protein, 268 aa, Thermomyces lanuginosus
EVSQDLFNQFNLFAQYSAAAYCGKNNDAPAGTQITCTGNACPEVEKADATFLYSFEDSGVGDVTGFLALDNTNKLIVLSFRGSRSIKNWIGNLNFELKEINDICSGCRGHDGFTSSWRSVADTLRQKVEDAVREHPDYRVVFTGHSLGGALATVAGADLRGNGYDIDVFSYGAPRVGNRAFAEFLTVQTGGTLYRITHTNDIVPRLPPREFGYSHSSPEYWIKSGTLVPVRRRDIVKIEGIDATGGNNQPNIPDIPAHLWYFGLIGTC

SEQ ID NO: 12685 - protein, 268 aa, Thermomyces lanuginosus
EVSQDLFNQFNLFAQYSAAAYCQKNNSAPAGTNITCTGNACPEVEKADATFLYSFEDSGVGDVTGFLALDNTNKLIVLSFRGSRSIENWIGNLNFDLKEINDICSGCRGHAGFTSSWRSVADTLRQKVEDAVREHPDYRVVFTGHSLGGALATVAWADLRGNGYDIDVFSYGAPRVGNRAFAEFLTVQTGGTLYRITHTNDIVPRLPPREFGYSHSSPEYWIKSGTLVPVTRNDIVKIEGIDATGGNNQPNIPDIPAHLWYFGLIGTC

SEQ ID NO: 12686 - protein, 268 aa, Thermomyces lanuginosus
EVSQDLFNQFNLFAQYSKAAYCAKNNDAPAGTNITCTGNACPEVEKADVTFLYSFEDSGVGDVTGFLALDNTNKLIVLSFRGSRSIENWIGNLNFDLKEINDICSGCRGHDGFTSSWRSVADTLRQKVEDAVREHPDYRVVFTGHSLGGALATVAGADLRGNGYDIDVFSYGAPRVGNRAFAEFLTVQDGGTLYRITHTNDIVPRLPPREFGYSHSSPEYWIKSGTLVPVTRNDIVKIEGIDATGGNNQPNIPDIPAHLWYFGLIGTC

SEQ ID NO: 12687 - protein, 268 aa, Thermomyces lanuginosus
EVSQDLFNQFNLFAQYSAAAYCGKNNDAPAGTNITCTGNACPEVEKAQATFLYSFEDMGVGDVTGFLALDNTNKLIVLSFRGSRSIENWIGNLNFDLKEINDICSGCRGHDGFTSSWRSVADTLRQKVEDAVREHPDYRVVFTGHSLGGALATVAGADLRGNPYDIDVFSYGAPRVGNRAFAEFLTVQTGGTLYRITHTNDIVPRLPPREFGYSHSSPEYWIKSGTLVPVTRQDIVKIEGIDATGGNNQPNIPDIPAHLWYFGRIGTC

SEQ ID NO: 12688 - protein, 268 aa, Thermomyces lanuginosus
EVSQDLFNQFNLFAQYSAAAYCGKNADAPAGTQITCTGNACPEVEKADATFLYSFEDSGVGDVTGFLALDNTNKLIVLSFRGSRSIENWIGNLNFDLKEINDICSGCRGHDGFTSSWRSVADTLRQKVEDAVREHPDYRVVFTGHSLGGALATVAGADLRGNGYDIDVFSYGAPRVGNRAFAEFLTVQTGGTLYRITHTNDIVPRLPPREFGYSHSSPEYWIKSGTLVPVRRRDIVKIEGIDATGGNNQPNIPDIPAHLWYFGLIGTC

SEQ ID NO: 12689 - protein, 268 aa, Thermomyces lanuginosus
EVSQDLFNQFNLFAQYSAAAYCGKNNSAEAGTNITCTGNACPEVFKADATFLYSFEDSGVGDVTGFLALDNTRKLIVLSFRGSRSIENWIGNLNFDLKEINDICSGCRGHDGFTSSWRSVADTLRQKVEDAVREHPDYRVVFTGHSLGGALATVAGADLRGNGYDIDVFSYGAPRVGNRAFAEFLTVQTGGTLYRITHTNDIVPRLPPREFGYSHSSPEYWIKSGTLVPVTRNDIVKIEGIDATGGNNQPNIPDIPAHLWYFGLIGTC

SEQ ID NO: 12690 - protein, 268 aa, Thermomyces lanuginosus
EVSQDLFNQFNLFAQYSAAAYCGKNNEAPAGTNITCTGNACPEVEKADATFLYSFEDSGVGDVTGFLALDNTNKLIVLSFRGSRSIENWIGNLNFDLKEINDICSGCRGHDGFTSSWRSVADTLRQKVEDAVREHPDYRVVFTGHSLGGALATVAGADLRGNPYDIDVFSYGAPRVGNRAFAEFLTVQTGGTLYRITHTNDIVPRLPPREFGYSHSSPEYWIKSGTMVPVTRQDIVKIEGIDATGGNNQPNIPDIPAHLWYFGRIGTC

SEQ ID NO: 12691 - protein, 268 aa, Thermomyces lanuginosus
EVSQDLFNQFNLFAQYSAAAYCGKNNDAPAGTNITCTGNACPEVEKADATFLYSFEDSGVGDVTGFLALDNTNKQIILSFRGSRSIENWIGNLNFDLKEINDICSGCRGHDGFTSSWRSVADTLRQKVEDAVREHPDYRVVFTGHSLGGALATIAGADLRGNGYDIDVFSYGAPRVGNRAFAEFLTQQTGGTLYRITHTNDIVPRLPPREFGYSHSSPEYWIKSGTLVPVTRNDIVKIEGIDATGGNNQPNIPDIPAHLWYFGLIGTC

SEQ ID NO: 12692 - protein, 268 aa, Thermomyces lanuginosus
EVSQDLFNQFNLFAQYSAAAYCGKNNQAPAGTQITCTGNACPEVEKADATFLYSFEDSGVGDVTGFLALDNTNKLIVLSFRGSRSIENWIGNLNFDLKEINDICSGCRGHDGFTSSWRSVADTLRQKVEDAVREHPDYRVVFTGHSLGGALATVAGADLRGNGYDIDVFSYGAPRVGNRAFAEFLTVQTGGTLYRITHTNDIVPRLPPREFGYSHSSPEYWIKSGTLVPVRRRDIVKIEGIDATGGNNQPNIPDIPAHLWYFGLIGTC

SEQ ID NO: 12693 - protein, 268 aa, Thermomyces lanuginosus
EVSQDLFNQFNLFAQYSAAAYCGKNNDAPAGTQITCTGNACPEVEKADATFLYSFEDSGVGDVTGFLALDNTNKLIVLSFRGSRSIENWIGNLNFDLKEINDICSGCRGHDGFTSSWRSVADTLRQKVEDAVREHPDYRVVFTGHSLGGALATVAGADLRGTGYDIDVFSYGAPRVGNRAFAEFLTVQTGGTLYRITHTNDIVPRLPPREFGYSHSSPEYWIKSGTLVPVRRRDIVKIEGIDATGGNNQPNIPDIPAHLWYFGLIGTC

SEQ ID NO: 12694 - protein, 268 aa, Thermomyces lanuginosus
EVSQDLFNQFNLFAQYAAAAYCGKNNDAPAGTKITCTGNACPEVEKADATFLYSFEDSGVGDVTGFLALDNTNKLIVLSFRGSRSIENWIANLNFDLKEINDICSGCRAHDGFYSSWRSVADTLRQKVEDAVREHPDYRVVFTGHSLGGALATIAGADLRGNGYDIDVFSYGAPRVGNRAFAEFLTVQTGGTLYRITHTNDIVPRLPPREFGYSHSSPEYWIKSGTLVPVTRNDIVKIEGIDATGGNNQPNIPDIPAHLWYFGLIGTC

SEQ ID NO: 12695 - protein, 268 aa, Thermomyces lanuginosus
EVSQDLFNQFNLFAQYSAAAYCGKNNDALAGTNITCTGNACPEVEKADATFLYSFEDSGVGDVTGFLALDNTNKLIVLSFRGSRSIENWIGNLNFDLKEINDICSGCRGHDGFTSSWRSVADTLRQKVEDAVREHPDYRVVFTGHSLGGALATVAGADLRGNGYDIDVFSYGAPRVGNRAFAEFLTVQTGGTLYRITHTNDIVPRLPPREFGYSHSSPEYWIKSGTLVLVRRRDIVKIEGIDATGGNNQPNIPDIPAHLWYFGLIGTC

SEQ ID NO: 12696 - protein, 268 aa, Thermomyces lanuginosus
EVSQDLFNQFNLFAQYSAAAYCGKNNDAPAGTNITCTGNACPEVEKADATFLYSFEDMGVGDVTGFLALDNTNKLIVLSFRGSRSIENWIGNLNFDLKEINDICSGCRGHDGFTSSWRSVADTLRQKVEDAVREHPDYRVVFTGHSLGGALATVAGADLRGNPYDIDVFSYGAPRVGNRAFAEFLTVQTGGTLYRITHTNDIVPRLPPREFGYSHSSPEYWIKSGTMVPVTRQDIVKIEGIDATGGNNQPNIPDIPAHLWYFGRIGTC

SEQ ID NO: 12697 - protein, 268 aa, Thermomyces lanuginosus
EVSQDLFNQFNLFAQYSKAAYCGKNNDAPAGTNITCTGNACPEVFKADATFLYSFEDSGVGDVTGFLALDNTNKDIVLSFRGSRSIENWIGNLNFDLKEINDICSGCRGHDGFTSSWRSVADTLRQKVEDAVREHPDYRVVFTGHSLGGALATVAGADLRGNGYDIDVFSYGAPRVGNRAFAEFLTVQDGGTLYRITHTNDIVPRLPPREFGYSHSSPEYWIKSGTLVPVTRNDIVKIEGIDATGGNNQPNIPDIPAHLWYFGLIGTC

SEQ ID NO: 12698 - protein, 268 aa, Thermomyces lanuginosus
EVSQDLFNQFNLFAQYSKAAYCQKNNDAPAGTNITCTGNACPEVEKADATFLYSFEDSGVGDVTGFLALDNTNKQIILSFRGSRSIENWIGNLNFDLKEINDICSGCRGHDGFTSSWRSVADTLRQKVEDAVREHPDYRVVFTGHSLGGALATVAGADLRGNGYDIDVFSYGAPRVGNRAFAEFLTVQTGGTLYRITHTNDIVPRLPPREFGYSHSSPEYWIKSGTLVPVTRNDIVKIEGIDATGGNNQPNIPDIPAHLWYFGLIGTC

SEQ ID NO: 12699 - protein, 268 aa, Thermomyces lanuginosus
EVSQDLFNQFNLFAQYSAAAYCGKNNDAPAGTNITCTGNACPEVEKAQATFLYSFEDSGVGDVTGFLALDNTNKLIVLSFRGSRSIENWIGNLNFDLKEINDICSGCRGHDGFTSSWRSVADTLRQKVEDAVREHPQYRVVFTGHSLGGALATVAGADLRGNPYDIDVFSYGAPRVGNRAFAEFLTVQTGGTLYRITHTNDIVPRLPPREFGYSHSSPEYWIKSGTMVPVTRNDIVKIEGIDATGGNNQPNIPDIPAHLWYFGRIGTC

SEQ ID NO: 12700 - protein, 268 aa, Thermomyces lanuginosus
EVSQDLFNQFNLFAQYSAAAYCGKNNDAPAGTQITCTGNACPEVEKADATFLYSFEDSGVGDVTGFLALDNTNKLIVLSFRGSRSIENWIGNLNFDLKEINDICSGCRGHNGFTSSWRSVADTLRQKVEDAVREHPDYRVVFTGHSLGGALATVAGADLRGNGYDIDVFSYGAPRVGNRAFAEFLTVQTGGTLYRITHTNDIVPRLPPREFGYSHSSPEYWIKSGTLVPVRRRDIVKIEGIDATGGNNQPNIPDIPAHLWYFGLIGTC

SEQ ID NO: 12701 - protein, 268 aa, Thermomyces lanuginosus
EVSQDLFNQFNLFAQYSKAAYCGKNNSAEAGTNITCTGNACPEVEKADATFLYSFEDSGVGDVTGFLALDNTNKLIVLSFRGSRSIENWIGNLNFDLKEINDICSGCRGHDGFTSSWRSVADTLRQKVEDAVREHPDYRVVFTGHSLGGALATVAGADLRGNGYDIDVFSYGAPRVGNRAFAEFLTVQDGGTLYRITHTNDIVPRLPPREFGYSHSSPEYWIKSGTLVPVTRNDIVKIEGIDATGGNNQPNIPDIPAHLWYFGLIGTC

SEQ ID NO: 12702 - protein, 268 aa, Thermomyces lanuginosus
EVSQDLFNQFNLFAQYSAAAYCGKNNDAPAGTQITCTGNACPEVEKADATFLYSFEDSGVGDVTGFLALDNTNKLIVLSFRGSRSIENWIGNLNFDLKEINDICSGCRGHDGFTSSWRSVADTLRQKVEDAVREHPDYRVVFTGHSLGGALATVAGADLRGNGYDIDVFSYGAPRVGNRAFAEFLTVQTGGTLYRITHTNDIVPRLPPREFGYSHSSPEYWIKSGTLVPVRRRDIVKIEGIDATGGNNQPNIPDILAHLWYFGLIGTC

SEQ ID NO: 12703 - protein, 268 aa, Thermomyces lanuginosus
EVSQDLFNQFNLFAQYSAAAYCGKNNDAPAGTQITCTGNACPEVEKADATFLYSFEDSGVGDVTGFLALDNTNKLIVLSFRGSRSIENWITNLNFDLKEINDICSGCRGHDGFTSSWRSVADTLRQKVEDAVREHPDYRVVFTGHSLGGALATVAGADLRGNAYDIDVFSYGAPRVGNRAFAEFLTVQTGGTLYRITHTNDIVPRLPPREFGYSHSSPEYWIKSGTLVPVRRRDIVKIEGIDATGGNNQPNIPDIPAHLWYFGLIGTC

SEQ ID NO: 12704 - protein, 268 aa, Thermomyces lanuginosus
EVSQDLFNQFNLFAQYSAAAYCGKNNDAPAGTNITCTGNACPEVEKADATFLYSFEDMGVGDVTGFLALDNTNKLIVLSFRGSRSIENWIGNLNFDLKEINDICSGCRGHDGFTSSWRSVADTLRQKVEDAVREHPQYRVVFTGHSLGGALATVAGADLRGNPYDIDVFSYGAPRVGNRAFAEFLTVQTGGTLYRITHTNDIVPRLPPREFGYSHSSPEYWIKSGTLVPVTRQDIVKIEGIDATGGNNQPNIPDIPAHLWYFGLIGTC

SEQ ID NO: 12705 - protein, 268 aa, Thermomyces lanuginosus
EVSQDLFNQFNLFAQYSAAAYCGKNNDAPAGTNITCTGNACPEVEKADATFLYSFEDSGVGDVTGFLALDNTNKLIVLSFXGSRSIENWIGNLNFDLKEINDICSGCRGHDGFTSSWRSVADTLRQKVEDAVREHPDYRVVFTGHSXGGGLATVAGADLRGNGYDIDVFSYGAPRVGNRAFAEFLTVQTGGTLYRITHTNDIVPRLPPREFGYSHSSPEYWIKSGTLVPVTRNDIVKIEGIDATGGNNXPNIPDIPAHLWYFGLIGTC

SEQ ID NO: 12706 - protein, 268 aa, Thermomyces lanuginosus
EVSQDLFNQFNLFAQYSAAAYCGKNNDAPAGTNITCTGNACPEVEKADATFLYSFEGSGVGDVTGFLALDNTNKLIVLSFRGSRSIENWIGNFNFDLKEINDICSGCRGHDGFTSSWRSVADTLRQKVEDAVREHPDYRVVFTGHSLGGALATVAGADLRGNGYDIDVFSYGAPRVGNRAFAEFLTVQTGGTLYRITHTNDIVPRLPPREFGYSHSSPEYWIKSGTLVPVRRRDIVKIEGIDATGGNNQPNIPDIPAHLWYFGLIGTC

SEQ ID NO: 12707 - protein, 268 aa, Thermomyces lanuginosus
EVSQDLFNQFNLFAQYSAAAYCGKNNSAEAGTDITCTGNACPEVEKADATFLYSFEDSGVGDVTGFLALDNTNKDIVLSFRGSRSIENWIGNLNFDLKEINDICSGCRGHDGFTSSWRSVADTLRQKVEDAVREHPDYRVVFTGHSLGGALATVAGADLRGNGYDIDVFSYGAPRVGNRAFAEFLTVQTGGTLYRITHTNDIVPRLPPREFGYSHSSPEYWIKSGTLVPVTRNDIVKIEGIDATGGNNQPNIPDIPAHLWYFGLIGTC

SEQ ID NO: 12708 - protein, 268 aa, Thermomyces lanuginosus
EVSQDLFNQFNLFAQYSAAAYCGKNNNAPAGTQITCTGNACPEVEKADATFLYSFEDSGVGDVTGFLALDNTNKLIVLSFRGSRSIENWIGNLNFDLKEINDICSGCRGHDGFTSSWRSVADTLRQKVEDAVREHPDYRVVFTGHSLGGALATVAGADLRGNGYDIDVFSYGAPRVGNRAFAEFLTVQTGGTLYRITHTNDIVPRLPPREFGYSHSSPEYWIKSGTLVPVRRRDIVKIEGIDATGGNNQPNIPDIPAHLWYFGLIGTC

SEQ ID NO: 12709 - protein, 268 aa, Thermomyces lanuginosus
EVSQDLFNQFNLFAQYSAAAYCGKNNDAPAGTNITCTGNACPEVEKADATFLYSFKDSGVGDVTGFLALDNTNKLIVLSFRGSRSIENWIGNLNFDLKEINDICSGCRGHDGFTSSWRSVADTLRQKVEAAVREHPDYRVVFTGHSLGGALATVAGADLRGNGYDIDVFSYGAPRVGNRAFAEFLTHQTGGTLYRITHTNDIVPRLPPREFGYSHSSPEYWIKSGTLVPVTRNDIVKIEGIDATGGNNQPNQPDIPAHLWYFGRIGTC

SEQ ID NO: 12710 - protein, 268 aa, Thermomyces lanuginosus
EVSQDLFNQFNLFAQYSAAAYCGKNNDAPAGTNITCTGNACPEVEKADATFLYSFKDSGVGDVTGFLALDNTNKQIVLSFRGSRSIENWIGNLNFDLKEINDICSGCRGHDGFTSSWRSVADTLRQKVEDAVREHPDYRVVFTGHSLGGALATVAWADLRGNGYDIDVFSYGAPRVGNRAFAEFLTVQQGGTLYRITHTNDIVPRLPPREFGYSHSSPEYWIKSGTLVPVTRNDIVKIEGIDATGGNNQPNIPDIPAHLWYFGRIGTC

SEQ ID NO: 12711 - protein, 268 aa, Thermomyces lanuginosus
EVSQDLFNQFNLFAQYSAAAYCGKNNDAPAGTQITCTGNACPEVEKADATFLYSFEDSGVGDVTGFLALDNTNKLIVLSFRGSRSIENWIGNLNFDLKEINDICSGCRGHDGFTSSWRSVADTLRQKVEDAVREHPDYRVVFTGHSLGGALATVAGADLRGNMYDIDVFSYGAPRVGNRAFAEFLTVQTGGTLYRITHTNDIVPRLPPREFGYSHSSPEYWIKSGTLVPVRRRDIVKIEGIDATGGNNQPNIPDIPAHLWYFGLIGTC

SEQ ID NO: 12712 - protein, 268 aa, Thermomyces lanuginosus
EVSQDLFNQFNLFAQYSAAAYCGKNNDAPAGTNITCTGNACPEVEKADATTLYSFEDSGVGDVTGFLALDNTNKGIVLSFRGSRSIENWIGNLNFDLKEINDICSGCRGHDGFTSSWRSVADTLRQKVEDAVREHPDYRVVFTGHSLGGALATVAGADLRGNGYDIDVFSYGAPRVGNRAFAEFLTNQTGGTLYRITHTNDIVPRLPPREFGYSHSSPEYWIKSGTLVPVTRNDIVKIEGIDATGGNNQPNQPDIPAHLWYFGRIGTC

SEQ ID NO: 12713 - protein, 268 aa, Thermomyces lanuginosus
EVSQDLFNQFNLFAQYSAAAYCGKNNDAPAGTQITCTGSACPEVEKADATFLYSFEDSGVGDVTGFLALDNTNKLIVLSFRGSRSIENWIGNLNFDLKEINDICSGCRGHDGFTSSWRSVADTLRQKVEDAVREHPDYRVVFTGHSLGGALATVAGADLRGNGYDIDVFSYGAPRVGNRAFAEFLTVQTGGTLYRITHTNDIVPRLPPREFGYSHSSPEYWIKSGTLVPVRRRDIVKIEGIDATGGNNQPNIPDIPAHLWYFGLIGTC

SEQ ID NO: 12714 - protein, 268 aa, Thermomyces lanuginosus
EVSQDLFNQFNLFAQYSAAAYCGKNNDAPAGTQITCTGNACPEVEKADATFLYSFEDSGVGDVTGFLALDNTNKLIVLSFRGSRSIENWIGNLNFDLKEINDICSGCRGHDGFTSSWRSVADTLRQKVEDAVREHPDYRVVFTGHSLGGALATVAGADLRGNGYDIDVFSYGAPRVGNRAFAEFLTVQTGGTLYRITHTNDIVPRLPPREFGYSHSSPEYWIKSGTLVPVRRRDIVKIEGIDATGGNNQPNIPSIPAHLWYFGLIGTC

SEQ ID NO: 12715 - protein, 268 aa, Thermomyces lanuginosus
EVSQDLFNQFNLFAQYSAAAYCGKNNDAPAGTQITCTGNACPEVEKADATFLYSFEDSGVGDVTGFLALDNTNKLIVLSFRGSRSIENWIMNLNFDLKEINDICSGCRGHDGFTSSWRSVADTLRQKVEDAVREHPDYRVVFTGHSLGGALATVAGADLRGNPYDIDVFSYGAPRVGNRAFAEFLTVQTGGTLYRITHTNDIVPRLPPREFGYSHSSPEYWIKSGTLVPVRRRDIVKIEGIDATGGNNQPNIPDIPAHLWYFGLIGTC

SEQ ID NO: 12716 - protein, 268 aa, Thermomyces lanuginosus
EVSQDLFNQFNLFAQYSAAAYCQANNDAPAGTNITCTGNACPEVEKADATFLYSFEDSGVGDVTGFLALDNTNKRIVLSFRGSRSIENWIGNLNFDLKEINDICSGCRGHDGFTSSWRSVADTLRQKVEDAVREHPDYRVVFTGHSLGGALATIAGADLRGNGYDIDVFSYGAPRVGNRAFAEFLTVQTGGTLYRITHTNDIVPRLPPREFGYSHSSPEYWIKSGTLVPVTRNDIVKIEGIDATGGNNQPNIPDIPAHLWYFGLIGTC

SEQ ID NO: 12717 - protein, 268 aa, Thermomyces lanuginosus
EVSQDLFNQFNLFAQYSAAAYCGKNNDAPAGTNITCTGNACPEVEKADATFLYSFEDSGVGDVTGFLALDNTNKLIVLSFRGSRSIENWIGNLNFDLKEINDICSGCRGHDGFTSSWRSVADTLRQKVEDAVREHPDYRVVFTGHSLGGALATVAGADLRGDGYDIDVFSYGAPRVGNRAFAEFLTVQTGGTLYRITNTNDIVPRLPPREFGYSHSSPEYWIKSGTLVPVRRRDIVKIEGIDATGGNNQPNIPDIPAHLWYFGLIGTC

SEQ ID NO: 12718 - protein, 268 aa, Thermomyces lanuginosus
EVSQDLFNQFNLFAQYSAAAYCGKNNDAPAGTQITCTFNACPEVEKADATFLYSFEDSGVGDVTGFLALDNTNKLIVLSFRGSRSIENWIGNLNFDLKEINDICSGCRGHDGFTSSWRSVADTLRQKVEDAVREHPDYRVVFTGHSLGGALATVAGADLRGNGYDIDVFSYGAPRVGNRAFAEFLTVQTGGTLYRITHTNDIVPRLPPREFGYSHSSPEYWIKSGTLVPVRRRDIVKIEGIDATGGNNQPNIPDIPAHLWYFGLIGTC

SEQ ID NO: 12719 - protein, 268 aa, Thermomyces lanuginosus
EVSQDLFNQFNLFAQYSKAAYCQKNNDAPAGTNITCTGNACPEVEKADATFLYSFEDSGVGDVTGFLALDNTNKLIILSFRGSRSIENWIGNLNFDLKEINDICSGCRGHDGFTSSWRSVADTLRQKVEDAVREHPDYRVVFTGHSLGGALATVAGADLRGNGYDIDVFSYGAPRVGNRAFAEFLTTQTGGTLYRITHTNDIVPRLPPREFGYSHSSPEYWIKSGTLVPVTRNDIVKIEGIDATGGNNQPNIPDIPAHLWYFGLIGTC

SEQ ID NO: 12720 - protein, 268 aa, Thermomyces lanuginosus
EVSQDLFNQFNLFAQYSKAAYCGANNDAPAGTNITCTGNACPEVEKADATFLYSFEDSGVGDVTGFLALDNTNKQIVLSFRGSRSIENWIGNLNFDLKEINDICSGCRGHDGFTSSWRSVADTLRQKVEAAVREHPDYRVVFTGHSLGGALATVAGADLRGNGYDIDVFSYGAPRVGNRAFAEFLTVQTGGTLYRITHTNDIVPRLPPREFGYSHSSPEYWIKSGTLVPVTRNDIVKIEGIDATGGNNQPNIPDIPAHLWYFGRIGTC

SEQ ID NO: 12721 - protein, 268 aa, Thermomyces lanuginosus
EVSQDLFNQFNLFAQYSKAAYCQKNNDAPAGTNITCTGNACPEVFKADATFLYSFEDSGVGDVTGFLALDNTNKLIVLSFRGSRSIENWIGNLNFDLKEINDICSGCRGHDGFTSSWRSVADTLRQKVEDAVREHPDYRVVFTGHSLGGALATVAGADLRGNGYDIDVFSYGAPRVGNRAFAEFLTVQDGGTLYRITHTNDIVPRLPPREFGYSHSSPEYWIKSGTLVPVTRNDIVKIEGIDATGGNNQPNIPDIPAHLWYFGLIGTC

SEQ ID NO: 12722 - protein, 268 aa, Thermomyces lanuginosus
EVSQDLFNQFNLFAQYSAAAYCGKNNDAPAGTQITCTGNACPEVEKADATFLYSFEDSGVGDVTGFLALDNTNKLIVLSFRGSRSIENWIKNLNFDLKEINDICSGCRGHDGFTSSWRSVADTLRQKVEDAVREHPDYRVVFTGHSLGGALATVAGADLRGNWYDIDVFSYGAPRVGNRAFAEFLTVQTGGTLYRITHTNDIVPRLPPREFGYSHSSPEYWIKSGTLVPVRRRDIVKIEGIDATGGNNQPNIPDIPAHLWYFGLIGTC

SEQ ID NO: 12723 - protein, 268 aa, Thermomyces lanuginosus
EVSQDLFNQFNLFAQYSKAAYCGKNNDAPAGTNITCTGNACPEVEKADATFLYSFEDSGVGDVTGFLALDNTNKLIVLSFRGSRSIENWIGNLNFDLKEINDICSGCRGHDGFTSSWRSVADTLRQKVEAAVREHPDYRVVFTGHSLGGALATVAWADLRGNGYDIDVFSYGAPRVGNRAFAEFLTTQTGGTLYRITHTNDIVPRLPPREFGYSHSSPEYWIKSGTLVPVTRNDIVKIEGIDATGGNNQPNIPDIPAHLWYFGRIGTC

SEQ ID NO: 12724 - protein, 268 aa, Thermomyces lanuginosus
EVSQDLFNQFNLFAQYSAAAYCGKNNDAPAGTNITCTGNACPEVEKAQATFLYSFEDMGVGDVTGFLALDNTNKLIVLSFRGSRSIENWIGNLNFDLKEINDICSGCRGHDGFTSSWRSVADTLRQKVEDAVREHPQYRVVFTGHSLGGALATVAGADLRGNPYDIDVFSYGAPRVGNRAFAEFLTVQTGGTLYRITHTNDIVPRLPPREFGYSHSSPEYWIKSGTLVPVTRNDIVKIEGIDATGGNNQPNIPDIPAHLWYFGRIGTC

SEQ ID NO: 12725 - protein, 268 aa, Thermomyces lanuginosus
EVSQDLFNQFNLFAQYSAAAYCGKNNDAPAGTNITCTGNACPEVEKADATFLYSFEDSGVGDVTGFLALDNTNKLIVLSFRGSRSIENWIGNLNFDLKEINDICSGCRGHDGFTSSWRSVADTLRQKVEDAVREHPDYRVVFTGHSLGGALATVAGADLRGNGYDIDVFSYGAPRVGNRAFAEFLTVQTGGTLYRITHTNDGVPRLPPRELGYSHSSPEYWIKSGTLVPVTRNDIVKIEGIDATGGNNQPNIPDXKAHLWYFGLIGTC

SEQ ID NO: 12726 - protein, 268 aa, Thermomyces lanuginosus
EVSQDLFNQFNLFAQYSAAAYCGKNNNAPAGTNITCTGNACPEVEKADATFLYSFEDMGVGDVTGFLALDNTNKLIVLSFRGSRSIENWIGNLNFDLKEINDICSGCRGHDGFTSSWRSVADTLRQKVEDAVREHPDYRVVFTGHSLGGALATVAGADLRGNGYDIDVFSYGAPRVGNRAFAEFLTVQTGGTLYRITHTNDIVPRLPPREFGYSHSSPEYWIKSGTLVPVTRQDIVKIEGIDATGGNNQPNIPDITAHLWYFGLIGTC

SEQ ID NO: 12727 - protein, 268 aa, Thermomyces lanuginosus
EVSQDLFNQFNLFAQYSAAAYCGKNNSAPAGTNITCTGNACPEVEKADATFLYSFKDSGVGDVTGFLALDNTNKLIVLSFRGSRSIENWIGNLNFDLKEINDICSGCRGHAGFTSSWRSVADTLRQKVEDAVREHPDYRVVFTGHSLGGALATIAGADLRGNGYDIDVFSYGAPRVGNRAFAEFLTVQTGGTLYRITHTNDIVPRLPPREFGYSHSSPEYWIKSGTLVPVTRNDIVKIEGIDATGGNNQPNIPDIPAHLWYFGLIGTC

SEQ ID NO: 12728 - protein, 268 aa, Thermomyces lanuginosus
EVSQDLFNQFNLFAQYSAAAYCGKNNDAPAGTQITCTGNACPEVEKADATFLYSFEDSGVGDVTGFLALDNTNKLIVLSFRGSRSIENWIGNLNFDLKEINDICSGCRGHDGFTSSWRSVADTLRQKVEDAVREHPDYRVVFTGHSLGGALATVAGADLRGNGYDIDVFSYGAPRVGNRAFAEFLTVQTGGTLYRITHTNDIVPRLPPREFGYSHSSPEYWIKSGTLVPVRRRDIVKIEGIDATGGNNQPNIPDIWAHLWYFGLIGTC

SEQ ID NO: 12729 - protein, 268 aa, Thermomyces lanuginosus
EVSQDLFNQFNLFAQYSAAAYCGKNNRAPAGTNITCTGNACPEVEKADATFLYSFEDSGVGDVTGFLALDNTNKLIVLSFRGSRSIENWIGNLNFDLKEINDICSGCRGHGGFTSSWRSVADTLRQKVEDAVREHPDYRVVFTGHSLGGALATVAGADLRGNGYDIDVFSYGAPRVGNRAFAEFLTVQTGGTLYRITHTNDIVPRLPPREFGYSHPSPEYWIKSGTGVPVTRNDIVKIEGIDATGGNNQPNIPDIPAHLWYFGLIGTC

SEQ ID NO: 12730 - protein, 268 aa, Thermomyces lanuginosus
EVSQDLFNQFNLFAQYSAAAYCGKNNDAPAGTQITCTGNACPEVEKADATFLYSFEDSGVGDVTGFLALDNTNKLIVLSFRGSRSIENWIGNLNFDLKEINDICSGCRGHDGFTSSWRSVADTLRQKVEDAVREHPDYRVVFTGHSLGGALATVAGADLRGNGYDIDVFSYGAPRVGNRAFAEFLTVQTGGTLYRITHTNDIVPRLPPREFGYSHSSPEYWIKSGTLVPVRRRDIVKIDGIDATGGNNQPNIPDIPAHLWYFGLIGTC

SEQ ID NO: 12731 - protein, 268 aa, Thermomyces lanuginosus
EVSQDLFNQFNLFAQYSAAAYCGKNNDAPAGTNITCTGNACPEVEKADATFLYSFEDSGVGDVTGFLALDNTNKLIVLSFRGSRSIENWIGNLNFDLKEINDICSGCRGHDGFTSSWRSVADTLRQKVEDAVREHPDYRVVFTGHSLGGALATVAGADLRGNGYDIDVFSYGAPRVGNRAFAEFLTVQTGGTLYRITSTNDIVPRLPPREFGYSHSSPEYWIKSGTLRPVRRRDIVKIEGIDATGGNNQPNIPDIPAHLWYFGLIGTC

SEQ ID NO: 12732 - protein, 268 aa, Thermomyces lanuginosus
EVSQDLFNQFNLFAQYSAAAYCKKNNDAPAGTNITCTGNACPEVEKADATFLYSFEDSGVGDVTGFLALDNTNKRIVLSFRGSRSIENWIGNLNFDLKEINDICSGCRGHDGFTSSWRSVADTLRQKVEAAVREHPDYRVVFTGHSLGGALATVAGADLRGNGYDIDVFSYGAPRVGNRAFAEFLTTQTGGTLYRITHTNDIVPRLPPREFGYSHSSPEYWIKSGTLVPVTRNDIVKIEGIDATGGNNQPNIPDIPAHLWYFGRIGTC

SEQ ID NO: 12733 - protein, 268 aa, Thermomyces lanuginosus
EVSQDLFNQFNLFAQYSAAAYCGKNNDAPAGTQITCTGNACPEVEKADATFLYSFEDSGVGDVTGFLALDNTNKLIVLSFRGSRSIENWIGNLNFDLKEINDICSGCRGHDGFTSSDRSVADTLRQKVEDAVREHPDYRVVFTGHSLGGALATVAGADLRGNGYDIDVFSYGAPRVGNRAFAEFLTVQTGGTLYRITHTNDIVPRLPPREFGYSHSSPEYWIKSGTLVPVRRRDIVKIEGIDATGGNNQPNIPDIPAHLWYFGLIGTC

SEQ ID NO: 12734 - protein, 268 aa, Thermomyces lanuginosus
EVSQDLFNQFNLFAQYSAAAYCGKNNDAPAGTQITCTGNACPEVEKADATFLYSFEDSGVGDVTGFLALDNTNKLIVLSFRGSRSIENWIGNLNFDLKEINDICSGCRGHDGFTSSWRSVADTLRQKVEDAVREHPDYRVVFTGHSLGGALATVAGADLRGNIYDIDVFSYGAPRVGNRAFAEFLTVQTGGTLYRITHTNDIVPRLPPREFGYSHSSPEYWIKSGTLVPVRRRDIVKIEGIDATGGNNQPNIPDIPAHLWYFGLIGTC

SEQ ID NO: 12735 - protein, 268 aa, Thermomyces lanuginosus
EVSQDLFNQFKLFAQYSAAAYCGKNNNAPAGTNITCTGNACPEVEKADATFLYSFKDMGVGDVTGFLALDNTNKLIVLSFRGSRSIENWIGNLNFDLKEINDICSGCRGHDGFTSSWRSVADTLRQKVEDAVREHPDYRVVFTGHSLGGALATVAGADLRGNGYDIDVFSYGAPRVGNRAFAEFLTVQTGGTLYRITHTNDIVPRLPPREFGYSHSSPEYWIKSGTLVPVTRNDIVKIEGIDATGGNNQPNIPDIPAHLWYFGLIGTC

SEQ ID NO: 12736 - protein, 268 aa, Thermomyces lanuginosus
EVSQDLFNQFNLFAQYSAAAYCGKNNDAPAGTNITCTGNACPEVFKADATFLYSFEDSGVGDVTGFLALDNTNKQIVLSFRGSRSIENWIGNLNFDLKEINDICSGCRGHDGFTSSWRSVADTLRQKVEDAVREHPDYRVVFTGHSLGGALATVAWADLRGNGYDIDVFSYGAPRVGNRAFAEFLTTQTGGTLYRITHTNDIVPRLPPREFGYSHSSPEYWIKSGTLVPVTRNDIVKIEGIDATGGNNQPNIPDIPAHLWYFGLIGTC

SEQ ID NO: 12737 - protein, 268 aa, Synthetic construct
EVSQDLFNQFNLFAQYSAAAYCGKNNDAPAGTNITCTGNACPEVEKADATFLYSFEGSVVGDVTGFLALDNTNKLIVLSFRGSRSIENWIGNLKFLLKEINDICSGCRGHDGFTSSWRSVADTLRQKVEDAVREHPDYRVVFTGHSLGGALATVAGADLRGNGYDIDVFSYGAPRVGNRAFAEFLTVQTGGTLYRITHTNDIVPRLPPREFGYSHSSPEYWIKSGTLVPVTRNDIVKIEGIDATGGNNRPNIPDIPAHLWYFGLIGTC

SEQ ID NO: 12738 - protein, 268 aa, Thermomyces lanuginosus
EVSQDLFNQFKLFAQYSAAAYCKKNNDAPAGTNITCTGNACPEVEKADATFLYSFEDSGVGDVTGFLALDNTNKLIVLSFRGSRSIENWIGNLNFDLKEINDICSGCRGHAGFTSSWRSVADTLRQKVEDAVREHPDYRVVFTGHSLGGALATVAWADLRGNGYDIDVFSYGAPRVGNRAFAEFLTVQTGGTLYRITHTNDIVPRLPPREFGYSHSSPEYWIKSGTLVPVTRNDIVKIEGIDATGGNNQPNIPDIPAHLWYFGRIGTC

SEQ ID NO: 12739 - protein, 268 aa, Thermomyces lanuginosus
EVSQDLFNQFNLFAQYSAAAYCGKNNDAPAGTQITCTTNACPEVEKADATFLYSFEDSGVGDVTGFLALDNTNKLIVLSFRGSRSIENWIGNLNFDLKEINDICSGCRGHDGFTSSWRSVADTLRQKVEDAVREHPDYRVVFTGHSLGGALATVAGADLRGNGYDIDVFSYGAPRVGNRAFAEFLTVQTGGTLYRITHTNDIVPRLPPREFGYSHSSPEYWIKSGTLVPVRRRDIVKIEGIDATGGNNQPNIPDIPAHLWYFGLIGTC

SEQ ID NO: 12740 - protein, 268 aa, Thermomyces lanuginosus
EVSQDLFNQFNLFAQYSKAAYCQKNNDAPAGTNITCTGNACPEVEKADATFLYSFEDSGVGDVTGFLALDNTNKLIVLSFRGSRSIENWIGNLNFDLKEINDICSGCRGHDGFTSSWRSVADTLRQKVEDAVREHPDYRVVFTGHSLGGALATVAGADLRGNGYDIDVFSYGAPRVGNRAFAEFLTTQDGGTLYRITHTNDIVPRLPPREFGYSHSSPEYWIKSGTLVPVTRNDIVKIEGIDATGGNNQPNIPDIPAHLWYFGLIGTC

SEQ ID NO: 12741 - protein, 268 aa, Thermomyces lanuginosus
EVSQDLFNQFNLFAQYSAAAYCGKNNDAPAGTNITCTGNACPEVEKADATFLYSFEDSGVGDVTGFLALDNTNKLIVLSFRGSRSIENWIGNLNFDLKEIRDICSGCRGHDGFTSSWRSVADTLRQKVEDAVREHPDYRVVFTGHSLGGALATVAGADLRGNGYDIDVFSYGAPRVGNRAFAEFLTVQTGGTLYQITHTNDIVPRLPPEEFGYSHSSPEYWIKSGTLVPVTRNDIVKIEGIDATGGNNQPNIPDIPAHSWYFGLIGTC

SEQ ID NO: 12742 - protein, 268 aa, Synthetic construct
EVSQDLFNQFNLFAQYSAAAYCGKNNDAPAGTNITCTGNACPEVEKADATFLYSFEGSGVGRVTGFLALDNTNKLIVLSFRGSRSIENWIGNLKFLLKEINDICSGCRGHDGFTSSWRSVADTLRQKVEDAVREHPDYRVVFTGHSLGGALATVAGADLRGNGYDIDVFSYGAPRVGNRAFAEFLTVQTGGTLYRITHTNDIVPRLPPREFGYSHSSPEYWIKSGTLVPVTRNDIVKIEGIDATGGNNRPNIPDIPAHLWYFGLIGTC

SEQ ID NO: 12743 - protein, 268 aa, Thermomyces lanuginosus
EVSQDLFNQFNLFAQYSKAAYCQKNNDAPAGTNITCTGNACPEVEKADATFLYSFEDSGVGDVTGFLALDNTNKLIILSFRGSRSIENWIGNLNFDLKEINDICSGCRGHDGFTSSWRSVADTLRQKVEDAVREHPDYRVVFTGHSLGGALATVAWADLRGNGYDIDVFSYGAPRVGNRAFAEFLTVQTGGTLYRITHTNDIVPRLPPREFGYSHSSPEYWIKSGTLVPVTRNDIVKIEGIDATGGNNQPNIPDIPAHLWYFGLIGTC

SEQ ID NO: 12744 - protein, 268 aa, Thermomyces lanuginosus
EVSQDLFNQFNLFAQYSKAAYCGKNNSAPAGTDITCTGNACPEVEKADATFLYSFEDSGVGDVTGFLALDNTNKDIVLSFRGSRSIENWIGNLNFDLKEINDICSGCRGHDGFTSSWRSVADTLRQKVEDAVREHPDYRVVFTGHSLGGALATVAGADLRGNGYDIDVFSYGAPRVGNRAFAEFLTVQTGGTLYRITHTNDIVPRLPPREFGYSHSSPEYWIKSGTLVPVTRNDIVKIEGIDATGGNNQPNIPDIPAHLWYFGLIGTC

SEQ ID NO: 12745 - protein, 268 aa, Thermomyces lanuginosus
EVSQDLFNQFNLFAQYSAAAYCGKNNDAEAGTNITCTGNACPEVEKADATFLYSFEDSGVGDVTGFLALDNTRKDIVLSFRGSRSIENWIGNLNFDLKEINDICSGCRGHDGFTSSWRSVADTLRQKVEDAVREHPDYRVVFTGHSLGGALATVAGADLRGNGYDIDVFSYGAPRVGNRAFAEFLTVQDGGTLYRITHTNDIVPRLPPREFGYSHSSPEYWIKSGTLVPVTRNDIVKIEGIDATGGNNQPNIPDIPAHLWYFGLIGTC

SEQ ID NO: 12746 - protein, 268 aa, Thermomyces lanuginosus
EVSQDLFNQFNLFAQYSAAAYCGKNNNAPAGTNITCTGNACPEVEKADATFLYSFKDMGVGDVTGFLALDNTNKLIVLSFRGSRSIENWIGNLNFDLKEINDICSGCRGHDGFTSSWRSVADTLRQKVEDAVREHPDYRVVFTGHSLGGALATVAGADLRGNGYDIDVFSYGAPRVGNRAFAEFLTVQTGGTLYRITHTNDIVPRLPPREFGYSHSSPEYWIKSGTLVPVTRNDIVKIEGIDATGGNNQPNIPDITAHLWYFGLIGTC

SEQ ID NO: 12747 - protein, 268 aa, Thermomyces lanuginosus
EVSQDLFNQFNLFAQYSAAAYCGKNNDAPAGTQITCTGNACPEVEKADATFLYSFEDSGVGDVTGFLALDNTNKLIVLSFRGSRSIENWIGNLNFDLKEINDICSGCRGHDGFTSSWRSVADTLRQKVEDAVREHPDYRVVFTGHSLGGALATVAGADLRGNGYDIDVFSYGAPRVGNRAFAEFLTVQTGGTLYRITHTSDIVPRLPPREFGYSHSSPEYWIKSGTLVPVRRRDIVKIEGIDATGGNNQPNIPDIPAHLWYFGLIGTC

SEQ ID NO: 12748 - protein, 268 aa, Thermomyces lanuginosus
EVSQDLFNQFNLFAQYSAAAYCGKNNDAPAGTQITCTGNACPEVEKADATFLYSFEDSGVGDVTGFLALDNTNKLIVLSFRGSRSIENWIGNLQFDLKEINDICSGCRGHDGFTSSWRSVADTLRQKVEDAVREHPDYRVVFTGHSLGGALATVAGADLRGNGYDIDVFSYGAPRVGNRAFAEFLTVQTGGTLYRITHTNDIVPRLPPREFGYSHSSPEYWIKSGTLVPVRRRDIVKIEGIDATGGNNQPNIPDIPAHLWYFGLIGTC

SEQ ID NO: 12749 - protein, 268 aa, Thermomyces lanuginosus
EVSQDLFNQFNLFAQYSAAAYCGKNNQAPAGTNITCTGNACPEVEKADATTLYSFEDSGVGDVTGFLALDNTNKLIVLSFRGSRSIENWIQNLNFDLKEINDICSGCRGHDGFTSSWRSVADTLRQKVEAAVREHPDYRVVFTGHSLGGALATVAGADLRGNGYDIDVFSYGAPRVGNRAFAEFLTVQTGGTLYRITHTNDIVPRLPPREFGYSHSSPEYWIKSGTLVPVTRNDIVKIEGIDATGGNNQPNQPDIPAHLWYFGRIGTC

SEQ ID NO: 12750 - protein, 268 aa, Thermomyces lanuginosus
EVSQDLFNQFNLFAQYSAAAYCGKNNDAPAGTNITCTGNACPEVEKADATFLYSFEDSGVGDVTGFLALDNTNKQIVLSFRGSRSIENWIGNLNFDLKEINDICSGCRGHDGFTSSWRSVADTLRQKVEAAVREHPDYRVVFTGHSLGGALATIAWADLRGNGYDIDVFSYGAPRVGNRAFAEFLTVQTGGTLYRITHTNDIVPRLPPREFGYSHSSPEYWIKSGTLVPVTRNDIVKIEGIDATGGNNQPNIPDIPAHLWYFGLIGTC

SEQ ID NO: 12751 - protein, 268 aa, Thermomyces lanuginosus
EVSQDLFNQFNLFAQYSAAAYCGKNNQAPAGTNITCTGNACPEVEKADATFLYSFKDSGVGDVTGFLALDNTNKLIVLSFRGSRSIENWIGNLNFDLKEINDICSGCRGHDGFTSSWRSVADTLRQKVEDAVREHPDYRVVFTGHSLGGALATVAGADLRGNGYDIDVFSYGAPRVGNRAFAEFLTVQTGGTLYRITHTNDIVPRLPPREFGYSHSSPEYWIKSGTLVPVTRADIVKIEGIDATGGNNQPNIPDITAHLWYFGLIGTC

SEQ ID NO: 12752 - protein, 268 aa, Thermomyces lanuginosus
EVSQDLFNQFNLFAQYSAAAYCGKNNDAPAGTQITCTGNACPEVEKADATFLYSFEDSGVGDVTGFLALDNTNKLIVLSFRGSRSIENWIGNLNFDLKEINDICSGCRGHDGFTSSCRSVADTLRQKVEDAVREHPDYRVVFTGHSLGGALATVAGADLRGNGYDIDVFSYGAPRVGNRAFAEFLTVQTGGTLYRITHTNDIVPRLPPREFGYSHSSPEYWIKSGTLVPVRRRDIVKIEGIDATGGNNQPNIPDIPAHLWYFGLIGTC

SEQ ID NO: 12753 - protein, 268 aa, Thermomyces lanuginosus
EVSQDLFNQFNLFAQYSAAAYCGKNNDAPAGTQITCTGNACPEVEKADATFLYSFEDSGVGDVTGFLALDNTNKLIVLSFRGSRSIENWIGNLNFDLKEINDICSGCRGHDGFTSSWRSVADTLRQKVEDAVREHPDYRVVFTGHSLGGALATVAGADLRGNHYDIDVFSYGAPRVGNRAFAEFLTVQTGGTLYRITHTNDIVPRLPPREFGYSHSSPEYWIKSGTLVPVRRRDIVKIEGIDATGGNNQPNIPDIPAHLWYFGLIGTC

SEQ ID NO: 12754 - protein, 268 aa, Thermomyces lanuginosus
EVSQDLFNQFNLFAQYSAAAYCGKNNEAPAGTNITCTGNACPEVEKADATFLYSFEDMGVGDVTGFLALDNTNKLIVLSFRGSRSIENWIGNLNFDLKEINDICSGCRGHDGFTSSWRSVADTLRQKVEAAVREHPDYRVVFTGHSLGGALATVAGADLRGNPYDIDVFSYGAPRVGNRAFAEFLTVQTGGTLYRITHTNDIVPRLPPREFGYSHSSPEYWIKSGTLVPVTRNDIVKIEGIDATGGNNQPNIPDIPAHLWYFGRIGTC

SEQ ID NO: 12755 - protein, 268 aa, Thermomyces lanuginosus
EVSQDLFNQFNLFAQYSKAAYCQKNNDAPAGTNITCTGNACPEVTKADATFLYSFEDSGVGDVTGFLALDNTNKLIVLSFRGSRSIENWIGNLNFDLKEINDICSGCRGHDGFTSSWRSVADTLRQKVEDAVREHPDYRVVFTGHSLGGALATVAGADLRGNGYDIDVFSYGAPRVGNRAFAEFLTVQDGGTLYRITHTNDIVPRLPPREFGYSHSSPEYWIKSGTLVPVTRNDIVKIEGIDATGGNNQPNIPDIPAHLWYFGLIGTC

SEQ ID NO: 12756 - protein, 268 aa, Thermomyces lanuginosus
EVSQDLFNQFNLFAQYSAAAYCGKNNDAPAGTNITCTGNACPEVEKADATFLYSFEDMGVGDVTGFLALDNTNKLIVLSFRGSRSIENWIGNLNFDLKEINDICSGCRGHDGFTSSWRSVADTLRQKVEAAVREHPDYRVVFTGHSLGGALATVAGADLRGNPYDIDVFSYGAPRVGNRAFAEFLTVQTGGTLYRITHTNDIVPRLPPREFGYSHSSPEYWIKSGTMVPVTRNDIVKIEGIDATGGNNQPNIPDIPAHLWYFGRIGTC

SEQ ID NO: 12757 - protein, 268 aa, Thermomyces lanuginosus
EVSQDLFNQFNLFAQYSAAAYCGKNNDAPAGTNITCTGNACPEVEKADATFLYSFEDSGVGDVTGFLALDNTNKQIVLSFRGSRSIENWIQNLNFDLKEINDICSGCRGHDGFTSSWRSVADTLRQKVEAAVREHPDYRVVFTGHSLGGALATVAGADLRGNGYDIDVFSYGAPRVGNRAFAEFLTHQTGGTLYRITHTNDIVPRLPPREFGYSHSSPEYWIKSGTLVPVTRNDIVKIEGIDATGGNNQPNQPDIPAHLWYFGRIGTC

SEQ ID NO: 12758 - protein, 268 aa, Thermomyces lanuginosus
EVSQDLFNQFNLFAQYSAAAYCGKNNDAPAGTNITCTGNACPEVEKADATFLYSFEDSGVGDVTGFLALDNTNKLIVLSFRGSRSIENWIGNLNFDLKEINDICSGCRGHDGFTSSWRSVADTLRQKVEDAVREHPDYRVVFAGHSLGGALATVAGADLRGNGYDIDVFSYGAPRVGNRAFAEFLTVQTGGTLYRITHTNDIVPRLPPREFGYSHSSPEYWIKSGTLPPVRRRDIVKIEGIDATGGNNQPNIPDIPAHLWYFGLIGTC

SEQ ID NO: 12759 - protein, 268 aa, Thermomyces lanuginosus
EVSQDLFNQFNLFAQYSAAAYCDKNNDAPAGTNITCTGNACPEVEKADATFLYSFEDSGVGDVTGFLALDNTNKLIVLSFRGSRSIENWIGNLNFDLKEINDICSGCRGHAGFTSSWRSVADTLRQKVEDAVREHPDYRVVFTGHSLGGALATIAGADLRGNGYDIDVFSYGAPRVGNRAFAEFLTTQTGGTLYRITHTNDIVPRLPPREFGYSHSSPEYWIKSGTLVPVTRNDIVKIEGIDATGGNNQPNIPDIPAHLWYFGRIGTC

SEQ ID NO: 12760 - protein, 268 aa, Thermomyces lanuginosus
EVSQDLFNQFNLFAQYSAAAYCGKNNDAPAGTQITCTGNACPEVEKADATFLYSFEDSGVGDVTGFLALDNTNKLIVLSFRGSRSIENWIGNLNFDLKEINDICSGCRGHDGFTSSWRSVADTLRQKVEDAVREHPDYRVVFTGHSLGGALATVAGADLRGNQYDIDVFSYGAPRVGNRAFAEFLTVQTGGTLYRITHTNDIVPRLPPREFGYSHSSPEYWIKSGTLVPVRRRDIVKIEGIDATGGNNQPNIPDIPAHLWYFGLIGTC

SEQ ID NO: 12761 - protein, 268 aa, Synthetic construct
EVSQDLFNQFNLFAQYSAAAYCGKNNDAPAGTNITCTGNACPEVEKADATFLYSFEDSGVGDVTGFLALDNTNKLIVLSFRGSRSIENWIGNLNFDLKEINDICSGCRGHDGFTSSWRSVADTLRQKVEDAVREHPGYRVVFTGHSLGGALATVAGADLRGNGYDIGVFSYGAPRVGNRAFAEFLTVQTGGTLYRITHTNDIVPRLPPRVFGYSHSSPEYLIKSGTLVPVTRNDIVKIEGIDATGGNNQPNIPDIPAHLWYFGLIGTC

SEQ ID NO: 12762 - protein, 268 aa, Thermomyces lanuginosus
EVSQDLFNQFNLFAQYSAAAYCGKNNDAPAGTQITCTGNACPEVEKADATFLYSFEDSGVGDVTGFLALDNTNKLIVLSFRGSRSLENWIGNLNFDLKEINDICSGCRGHDGFTSSWRSVADTLRQKVEDAVREHPDYRVVFTGHSLGGALATVAGADLRGNGYDIDVFSYGAPRVGNRAFAEFLTVQTGGTLYRITHTNDIVPRLPPREFGYSHSSPEYWIKSGTLVPVRRRDIVKIEGIDATGGNNQPNIPDIPAHLWYFGLIGTC

SEQ ID NO: 12763 - protein, 268 aa, Thermomyces lanuginosus
EVSQDLFNQFNLFAQYSKAAYCQKNNDAPAGTNITCTGNACPEVFKADATFLYSFEDSGVGDVTGFLALDNTNKLIVLSFRGSRSIENWIGNLNFDLKEINDICSGCRGHDGFTSSWRSVADTLRQKVEDAVREHPDYRVVFTGHSLGGALATVAGADLRGNGYDIDVFSYGAPRVGNRAFAEFLTTQTGGTLYRITHTNDIVPRLPPREFGYSHSSPEYWIKSGTLVPVTRNDIVKIEGIDATGGNNQPNIPDIPAHLWYFGLIGTC

SEQ ID NO: 12764 - protein, 268 aa, Thermomyces lanuginosus
EVSQDLFNQFNLFAQYSAAAYCKKNNDAPAGTNITCTGNACPEVEKADATFLYSFEDSGVGDVTGFLALDNTNKLIVLSFRGSRSIENWIGNLNFDLKEINDICSGCRGHAGFTSSWRSVADTLRQKVEDAVREHPDYRVVFTGHSLGGALATIAGADLRGNGYDIDVFSYGAPRVGNRAFAEFLTTQTGGTLYRITHTNDIVPRLPPREFGYSHSSPEYWIKSGTLVPVTRNDIVKIEGIDATGGNNQPNIPDIPAHLWYFGRIGTC

SEQ ID NO: 12765 - protein, 268 aa, Thermomyces lanuginosus
EVSQDLFNQFNLFAQYSAAAYCGKNNDAPAGTQITCTGNACPEVEKADATFLYSFEDSGVGDVTGFLALDNTNKLIVLSFRGSRSIENWIGNLNFDLKEINDICSGCRGHDGFTSSWRSVADTLRQKVEDAVREHPDYRVVFTGHSLGGALATVAGADLRGNGYDIDVFSYGAPRVGNRAFAEFLTVQTGGTLYRITHTNDIVPRLPPREFGYSHSSPEYWIKSGTLVPVRRRDIVKIEGIDATGGNNQPNIPAIPAHLWYFGLIGTC

SEQ ID NO: 12766 - protein, 268 aa, Synthetic construct
ERRQDLFNQFNLFAQYSAAAYCGKNNDAPAGTNITCTGNACPEVEKADATFLYSFEDSGVGDVTGFLALDNTNKLIVLSFRGSRSIENWIGNLKFLLKEINDICSGCRGHDGFTSSWRSVADTLRQKVEDAVREHPDYRVVFTGHSLGGALATVAGADLRGNGYDIDVFSYGAPRVGNRAFAEFLTVQTGGTLYRITHTNDIVPRLPPREFGYSHSSPEYWIKSGTLVPVTRNDIVKIEGIDATGGNNRPNIPDIPAHLWYFGLIGTC

SEQ ID NO: 12767 - protein, 268 aa, Thermomyces lanuginosus
EVSQDLFNQFNLFAQYSKAAYCGKNNDAPAGTNITCTGNACPEVFKADVTFLYSFEDSGVGDVTGFLALDNTNKLIVLSFRGSRSIENWIGNLNFDLKEINDICSGCRGHDGFTSSWRSVADTLRQKVEDAVREHPDYRVVFTGHSLGGALATVAWADLRGNGYDIDVFSYGAPRVGNRAFAEFLTVQTGGTLYRITHTNDIVPRLPPREFGYSHSSPEYWIKSGTLVPVTRNDIVKIEGIDATGGNNQPNIPDIPAHLWYFGLIGTC

SEQ ID NO: 12768 - protein, 268 aa, Thermomyces lanuginosus
EVSQDLFNQFNLFAQYSAAAYCGKNNDAPAGTQITCTGNACPEVEKADATFLYSFEDSGVGDVTGFLALDNTNKLIVLSFRGSRSIENWIGNLNFDLKEINDICSGCRGHDGFTSSWRSVADTLRQKVEDAVREHPDYRVVFTGHSLGGALATVAGADLRGNGYDIDVFSYGAPRVGNRAFAEFLTVQTGGTLYRITHTNDIVPRLPPREFGYSHSSPEYWIKSGTLVPVRRRDIVKIEGIDATGGNNQPNIPLIPAHLWYFGLIGTC

SEQ ID NO: 12769 - protein, 268 aa, Thermomyces lanuginosus
EVSQDLFNQFNLFAQYSAAAYCGKNNSAPAGTNITCTGNACPEVEKADATTLYSFEDSGVGDVTGFLALDNTNKLIVLSFRGSRSIENWIGNLNFDLKEINDICSGCRGHDGFTSSWRSVADTLRQKVEDAVREHPDYRVVFTGHSLGGALATVAGADLRGNGYDIDVFSYGAPRVGNRAFAEFLTNQTGGTLYRITHTNDIVPRLPPREFGYSHSSPEYWIKSGTLVPVTRNDIVKIEGIDATGGNNQPNQPDIPAHLWYFGRIGTC

SEQ ID NO: 12770 - protein, 268 aa, Thermomyces lanuginosus
EVSQDLFNQFNLFAQYSAAAYCQKNNSAPAGTNITCTGNACPEVEKADATFLYSFEDSGVGDVTGFLALDNTNKLIVLSFRGSRSIENWIGNLNFDLKEINDICSGCRGHAGFTSSWRSVADTLRQKVEDAVREHPDYRVVFTGHSLGGALATVAGADLRGNGYDIDVFSYGAPRVGNRAFAEFLTVQQGGTLYRITHTNDIVPRLPPREFGYSHSSPEYWIKSGTLVPVTRNDIVKIEGIDATGGNNQPNIPDIPAHLWYFGRIGTC

SEQ ID NO: 12771 - protein, 268 aa, Thermomyces lanuginosus
EVSQDLFNQFNLFAQYSKAAYCQKNNDAPAGTNITCTGNACPEVEKADVTFLYSFEDSGVGDVTGFLALDNTNKLIVLSFRGSRSIENWIGNLNFDLKEINDICSGCRGHDGFTSSWRSVADTLRQKVEDAVREHPDYRVVFTGHSLGGALATVAGADLRGNGYDIDVFSYGAPRVGNRAFAEFLTVQDGGTLYRITHTNDIVPRLPPREFGYSHSSPEYWIKSGTLVPVTRNDIVKIEGIDATGGNNQPNIPDIPAHLWYFGLIGTC

SEQ ID NO: 12772 - protein, 268 aa, Thermomyces lanuginosus
EVSQDLFNQFNLFAQYSAAAYCGKNNSAPAGTDITCTGNACPEVEKADATFLYSFEDSGVGDVTGFLALDNTNKDIVLSFRGSRSIENWIGNLNFDLKEINDICSGCRGHDGFTSSWRSVADTLRQKVEDAVREHPDYRVVFTGHSLGGALATVAGADLRGNGYDIDVFSYGAPRVGNRAFAEFLTVQDGGTLYRITHTNDIVPRLPPREFGYSHSSPEYWIKSGTLVPVTRNDIVKIEGIDATGGNNQPNIPDIPAHLWYFGLIGTC

SEQ ID NO: 12773 - protein, 268 aa, Thermomyces lanuginosus
EVSQDLFNQFNLFAQYSAAAYCGKNNDAPAGTNITCTGNACPEVEKADATFLYSFEDAGSGDVTGFLALDNTNKLIVLSFRGSRSIENWIGNLNFDLKEINDICSGCRGHDGFTSSWRSVADTLRQKVEDAVREHPDYRVVFTGHSLGGGLATVAGADLRGNGYDIDVFSYGAPRVGNRAFAEFLTVQTGGTLYRITHTNDIVPRLPPREFGYSHSSPEYWIKSGTGVPVTRNDIVKIEGIDATGGNNQPNIPDIPAHLWYFGLIGTC

SEQ ID NO: 12774 - protein, 268 aa, Thermomyces lanuginosus
EVSQDLFNQFNLFAQYSAAAYCGKNNDAPAGTQITCTGNACPEVEKADATFLYSFEDSGVGDVTGFLALDNTNKLIVLSFRGSRSIENWIGNLNFDLKEINDICSGCRGHDGFTSSWRSVADTLRQKVEDAVREHPDYRVVFTGHSLGGALATVAGADLRGNGYDIDVFSYGAPRVGNRAFAEFLTVQTGGTLYRITHTNDIVPRLPPREFGYSHSSPDYWIKSGTLVPVRRRDIVKIEGIDATGGNNQPNIPDIPAHLWYFGLIGTC

SEQ ID NO: 12775 - protein, 268 aa, Thermomyces lanuginosus
EVSQDLFNQFNLFAQYSAAAYCGKNNEAPAGTNITCTGNACPEVEKAQATFLYSFEDSGVGDVTGFLALDNTNKLIVLSFRGSRSIENWIGNLNFDLKEINDICSGCRGHDGFTSSWRSVADTLRQKVEDAVREHPQYRVVFTGHSLGGALATVAGADLRGNGYDIDVFSYGAPRVGNRAFAEFLTVQTGGTLYRITHTNDIVPRLPPREFGYSHSSPEYWIKSGTMVPVTRNDIVKIEGIDATGGNNQPNIPDIPAHLWYFGRIGTC

SEQ ID NO: 12776 - protein, 268 aa, Thermomyces lanuginosus
EVSQDLFNQFNLFAQYSAAAYCGKNNDAPAGTQITCTGNACPEVEKADATFLYSFEDSGVGDVTGFLALDNTNKLIVLSFRGSRSIENWIGNLNFDLKEINDICSGCRGHDGFTSSWRSVADTLRQKVEDAVREHPDYRVVFTGHSLGGALATVAGADLRANGYDIDVFSYGAPRVGNRAFAEFLTVQTGGTLYRITHTNDIVPRLPPREFGYSHSSPEYWIKSGTLVPVRRRDIVKIEGIDATGGNNQPNIPDIPAHLWYFGLIGTC

SEQ ID NO: 12777 - protein, 268 aa, Thermomyces lanuginosus
EVSQDLFNQFNLFAQYSAAAYCGKNNDAPAGTQITCTGNACPEVEKADATFLYSFEDSGVGDVTGFLALDNTNKLIVLSFRGSRSIENWIGNLNFDLKEINDICSGCRGHDGFTSSWRSVADTLRQKVEDAVREHPDYRVVFTGHSLGGALATVAGADLRGNGYDIDVFSYGAPRVGNRAFAEFLTVQTGGTLYRITHTNDIVPRLPPREFGYSHSSPEYWIKSGTLVPVRRRDIVKIEGIDATGGNNQPNIPDIVAHLWYFGLIGTC

SEQ ID NO: 12778 - protein, 268 aa, Thermomyces lanuginosus
EVSQDLFNQFKLFAQYSAAAYCGKNNDAPAGTNITCTGNACPEVEKADATFLYSFKDSGVGDVTGFLALDNTNKLIVLSFRGSRSIENWIGNLNFDLKEINDICSGCRGHDGFTSSWRSVADTLRQKVEDAVREHPDYRVVFTGHSLGGALATVAGADLRGNGYDIDVFSYGAPRVGNRAFAEFLTVQTGGTLYRITHTNDIVPRLPPREFGYSHSSPEYWIKSGTLVPVTRQDIVKIEGIDATGGNNQPNIPDITAHLWYFGLIGTC

SEQ ID NO: 12779 - protein, 268 aa, Thermomyces lanuginosus
EVSRDLFNQFNLFAQYSAAAYCGKNNDAPAGTNITCTGNACPEVEKADATFLYSFEDSGVGDVTGFLALDNTNKLIVLSFRGSRSIENWIGNLNFDLKEINDICSGCRGHDGFTSSWRSVADTLRQKVEDAVREHPDYRVVFTGHSLGGALATVAGADLRGNGYDIDVFSYGAPRVGNRAFAEFLTVQTGGTLYRITSTNDIVPRLPPREFGYSHSSPEYWIKSGTLVPVRRRDIVKIEGIDATGGNNQPNIPDIPAHLWYFGLIGTC

SEQ ID NO: 12780 - protein, 268 aa, Thermomyces lanuginosus
EVSQDLFNQFNLFAQYSAAAYCGKNNDAPAGTQITCTGNACPEVEKADATFLYSFEDSGVGDVTGFLALDNTNKLIVLSFRGSRSIENWIGNLNFDLKEINDICSGCRGHDGFTSSWRSVADTLRQKVEDAVREHPDYRVVFTGHSLGGALATVAGADLRGNGYDIDVFSYGAPRVGNRAFAEFLTVQTGGTLYRITHTQDIVPRLPPREFGYSHSSPEYWIKSGTLVPVRRRDIVKIEGIDATGGNNQPNIPDIPAHLWYFGLIGTC

SEQ ID NO: 12781 - protein, 268 aa, Thermomyces lanuginosus
EVSQDLFNQFNLFAQYSAAAYCGKNNDAPAGTQITCTLNACPEVEKADATFLYSFEDSGVGDVTGFLALDNTNKLIVLSFRGSRSIENWIGNLNFDLKEINDICSGCRGHDGFTSSWRSVADTLRQKVEDAVREHPDYRVVFTGHSLGGALATVAGADLRGNGYDIDVFSYGAPRVGNRAFAEFLTVQTGGTLYRITHTNDIVPRLPPREFGYSHSSPEYWIKSGTLVPVRRRDIVKIEGIDATGGNNQPNIPDIPAHLWYFGLIGTC

SEQ ID NO: 12782 - protein, 268 aa, Thermomyces lanuginosus
EVSQDLFNQFRLFAQYSAAAYCGKNNDAPAGTQITCTGNACPEVEKADATFLYSFEDSGVGDVTGFLALDNTNKLIVLSFRGSRSIENWIGNLNFDLKEINDICSGCRGHDGFTSSWRSVADTLRQKVEDAVREHPDYRVVFTGHSLGGALATVAGADLRGNGYDIDVFSYGAPRVGNRAFAEFLTVQTGGTLYRITHTNDIVPRLPPREFGYSHSSPEYWIKSGTLVPVRRRDIVKIEGIDATGGNNQPNIPDIPAHLWYFGLIGTC

SEQ ID NO: 12783 - protein, 268 aa, Thermomyces lanuginosus
EVSQDLFNQFNLFAQYSAAAYCGKNNDAPAGTQITCTGNACPEVEKADATFLYSFEDSGVGDVTGFLALDNTNKLIVLSFRGSRSIENWIGNLNFDLKEINDICSGCRGHDGFTSSWRSVADTLRQKVEDAVREHPDYRVVFTGHSLGGALATVAGADLRGNGYDIDVFSYGAPRVGNRAFAEFLTVQTGGTLYRITHTNDIVPRLPPREFGYSHSSPEYWIKSGTLVPVRRRDIVKIEGIDATGGNNQPNIPDIFAHLWYFGLIGTC

SEQ ID NO: 12784 - protein, 268 aa, Thermomyces lanuginosus
EVSRDLFNQFNLFAQYSAAAYCGKNNDAPAGTQITCTGNACPEVEKADATFLYSFEDSGVGDVTGFLALDNTNKLIVLSFRGSRSIENWIGNLNFDLKEINDICSGCRGHDGFTSSWRSVADTLRQKVEDAVREHPDYRVVFTGHSLGGALATVAGADLRGNGYDIDVFSYGAPRVGNRAFAEFLTVQTGGTLYRITHTNDIVPRLPPREFGYSHSSPEYWIKSGTLVPVRRRDIVKIEGIDATGGNNQPNIPDIPAHLWYFGLIGTC

SEQ ID NO: 12785 - protein, 268 aa, Thermomyces lanuginosus
EVSQDLFNQFNLFAQYSAAAYCGKNNDAPAGTRITCRGRACPEVEKADATFLYSFEDSGVGDVTGFLALDNTNKLIVLSFRGSRSIENWIGNLNFDLKEINDICSGCRGHDGFTSSWRSVADTLRQKVEDTVREHPDYRVVFTGHSLGGALATVAGADLRGNGYDIDVFSYGAPRVGNRAFAEFLTVQTGGTLYRITHTNDIVPRLPPREFGYSHSSPEYWIKSGTLVPVTRNDIVKIEGIDATGGNNQPNIPDIPAHLWYFGLIGTC

SEQ ID NO: 12786 - protein, 268 aa, Thermomyces lanuginosus
EVSQDLFNQFNLFAQYSAAAYCKKNNDAPAGTNITCTGNACPEVEKADATFLYSFEDSGVGDVTGFLALDNTNKQIVLSFRGSRSIENWIGNLNFDLKEINDICSGCRGHDGFTSSWRSVADTLRQKVEDAVREHPDYRVVFTGHSLGGALATVAWADLRGNGYDIDVFSYGAPRVGNRAFAEFLTNQTGGTLYRITHTNDIVPRLPPREFGYSHSSPEYWIKSGTLVPVTRNDIVKIEGIDATGGNNQPNIPDIPAHLWYFGLIGTC

SEQ ID NO: 12787 - protein, 268 aa, Thermomyces lanuginosus
EVSQDLFNQFNLFAQYSAAAYCGKNNDAPAGTNITCTGNACPEVEKADATFLYSFEDSGVGDVTGFLALDNTNKLIVLSFRGSRSIENWIGNLNFDLKEINDICSGCRGHDGFTSSWRSVADTLRQKVEDAVREHPDYRVVFTGHSLGGALATVAGADLRGNGYDIDVFSYGAPRVGNRAFAEFLTVQTGGTLYRITHTNDIVPRLPPREFGYSHSSPEYWIKSGTLPPVRRRDIVKIEGIDATGGNNQPNIPDITAHLWYFGLIGTC

SEQ ID NO: 12788 - protein, 268 aa, Thermomyces lanuginosus
EVSQDLFNQFNLFAQYSAAAYCGKNNDAPAGTQITCTGNACPEVEKADATFLYSFEDSGVGDVTGFLALDNTNKLIVLSFRGSRSIENWIGNLNFDLKEINDICSGCRGHDGFTSSWRSVADTLRQKVEDAVREHPDYRVVFTGHSLGGALATVAGADLRGNGYDIDVFSYGAPRVGNRAFAEFLTVQTGGTLYRITHTNDIVPRLPPREFGYSHSSPEYWIKSGTLVPVRRRDIVKIEGIDATGGNNQPNIPDIMAHLWYFGLIGTC

SEQ ID NO: 12789 - protein, 268 aa, Thermomyces lanuginosus
EVSQDLFNQFNLFAQYSAAAYCGKNNDAPAGTQITCTGNACPEVEKADATFLYSFEDSGVGDVTGFLALDNTNKLIVLSFRGSRSIENWIGNLNFDLKEINDICSGCRGHDGFTSSWRSVAETLRQKVEDAVREHPDYRVVFTGHSLGGALATVAGADLRGNGYDIDVFSYGAPRVGNRAFAEFLTVQTGGTLYRITHTNDIVPRLPPREFGYSHSSPEYWIKSGTLVPVRRRDIVKIEGIDATGGNNQPNIPDIPAHLWYFGLIGTC

SEQ ID NO: 12790 - protein, 268 aa, Thermomyces lanuginosus
EVSQDLFNQFNLFAQYSAAAYCGKNNDAPAGTNITCTGNACPEVEKAQATFLYSFEDMGVGDVTGFLALDNTNKLIVLSFRGSRSIENWIGNLNFDLKEINDICSGCRGHDGFTSSWRSVADTLRQKVEDAVREHPDYRVVFTGHSLGGALATVAGADLRGNPYDIDVFSYGAPRVGNRAFAEFLTVQTGGTLYRITHTNDIVPRLPPREFGYSHSSPEYWIKSGTMVPVTRNDIVKIEGIDATGGNNQPNIPDIPAHLWYFGRIGTC

SEQ ID NO: 12791 - protein, 268 aa, Thermomyces lanuginosus
EVSQDLFNQFNLFAQYSAAAYCKKNNDAPAGTNITCTGNACPEVEKADATFLYSFEDSGVGDVTGFLALDNTNKQIVLSFRGSRSIENWIGNLNFDLKEINDICSGCRGHDGFTSSWRSVADTLRQKVEAAVREHPDYRVVFTGHSLGGALATVAWADLRGNGYDIDVFSYGAPRVGNRAFAEFLTVQTGGTLYRITHTNDIVPRLPPREFGYSHSSPEYWIKSGTLVPVTRNDIVKIEGIDATGGNNQPNIPDIPAHLWYFGRIGTC

SEQ ID NO: 12792 - protein, 268 aa, Thermomyces lanuginosus
EVSQDLFNQFNLFAQYSAAAYCQKNNSAPAGTNITCTGNACPEVEKADATFLYSFEDSGVGDVTGFLALDNTNKLIVLSFRGSRSIENWIGNLNFDLKEINDICSGCRGHDGFTSSWRSVADTLRQKVEDAVREHPDYRVVFTGHSLGGALATIAGADLRGNGYDIDVFSYGAPRVGNRAFAEFLTNQTGGTLYRITHTNDIVPRLPPREFGYSHSSPEYWIKSGTLVPVTRNDIVKIEGIDATGGNNQPNIPDIPAHLWYFGRIGTC

SEQ ID NO: 12793 - protein, 268 aa, Synthetic construct
EVSQDLFNQFNLFAQYSAAAYCGKNNDAPAGTNITCTGNACPEVEKADATFLYSFEGSGVGDVTGFLALDNTNKLIVLSFRGSRSIENWIGNLKFLLKEINDICSGCRGHDGFTSPWRSVADTLRQKVEDAVREHPDYRVVFTGHSLGGALATVAGADLRGNGYDIDVFSYGAPRVGNRAFAEFLTVQTGGTLYRITHTNDIVPRLPPREFGYSHSSPEYWIKSGTLVPVTRNDIVKIEGIDATGGNNRPNIPDIPAHLWYFGLIGTC

SEQ ID NO: 12794 - protein, 268 aa, Thermomyces lanuginosus
EVSQDLFNQFNLFAQYSAAAYCQKNNDAPAGTNITCTGNACPEVEKADATFLYSFEDSGVGDVTGFLALDNTNKQIVLSFRGSRSIENWIQNLNFDLKEINDICSGCRGHDGFTSSWRSVADTLRQKVEDAVREHPDYRVVFTGHSLGGALATVAGADLRGNGYDIDVFSYGAPRVGNRAFAEFLTNQTGGTLYRITHTNDIVPRLPPREFGYSHSSPEYWIKSGTLVPVTRNDIVKIEGIDATGGNNQPNQPDIPAHLWYFGRIGTC

SEQ ID NO: 12795 - protein, 268 aa, Thermomyces lanuginosus
EVSQDLFNQFNLFAQYSAAAYCGKNNDAPAGTQITCTGNACPEVEKADATFLYSFEDSGVGDVTGFLALDNTNKLIVLSFRGSRSIENWIGNLNFDLKEINDICSGCRGHDGFTSSLRSVADTLRQKVEDAVREHPDYRVVFTGHSLGGALATVAGADLRGNGYDIDVFSYGAPRVGNRAFAEFLTVQTGGTLYRITHTNDIVPRLPPREFGYSHSSPEYWIKSGTLVPVRRRDIVKIEGIDATGGNNQPNIPDIPAHLWYFGLIGTC

SEQ ID NO: 12796 - protein, 268 aa, Thermomyces lanuginosus
EVSQDLFNQFNLFAQYSAAAYCGKNNDAPAGTNITCTGNACLEVEKADATFLYSFENSGVGDVTGFLALDNTNKLIVLSFRGSRSIENWIENLNFDLKEINDICSGCRGHDGFTSSWRSVADTLRQKVEDAVREHPDYRVVFTGHSLGGALATVAGADLRGNGYDIDVFSYGAPRVGNRAFAEFLTVQTGGTLYRITHTNDIVPRLPPREFGYSHSSPEYWIKSGTLVPVRRRDIVKIEGIDATGGNNQPNIPDIPAHLWYFGLIGTC

SEQ ID NO: 12797 - protein, 268 aa, Thermomyces lanuginosus
EVSQDLFNQFNLFAQYSAAAYCGANNDAPAGTNITCTGNACPEVEKADATFLYSFEDSGVGDVTGFLALDNTNKLIVLSFRGSRSIENWIGNLNFDLKEINDICSGCRGHDGFTSSWRSVADTLRQKVEAAVREHPDYRVVFTGHSLGGALATIAGADLRGNGYDIDVFSYGAPRVGNRAFAEFLTTQTGGTLYRITHTNDIVPRLPPREFGYSHSSPEYWIKSGTLVPVTRNDIVKIEGIDATGGNNQPNIPDIPAHLWYFGLIGTC

SEQ ID NO: 12798 - protein, 268 aa, Thermomyces lanuginosus
EVSQDLFNQFNLFAQYSAAAYCKKNNQAPAGTNITCTGNACPEVEKADATTLYSFEDSGVGDVTGFLALDNTNKQIVLSFRGSRSIENWIGNLNFDLKEINDICSGCRGHDGFTSSWRSVADTLRQKVEDAVREHPDYRVVFTGHSLGGALATVAGADLRGNGYDIDVFSYGAPRVGNRAFAEFLTVQTGGTLYRITHTNDIVPRLPPREFGYSHSSPEYWIKSGTLVPVTRNDIVKIEGIDATGGNNQPNIPDIPAHLWYFGLIGTC

SEQ ID NO: 12799 - protein, 268 aa, Thermomyces lanuginosus
EVSQDLFNQFNLFAQYSAAAYCGKNNDAPAGTNITCTGNACPEVEKADATVLYSFEDSGVGDVTGFLALDNTNKLIVLSFRGSRSIENWIGNLNFELKEINDICSGCRGHDGFTSSWRSVADTLRQKVEDAVREHPDYRVVFTGHSLGGALATVAGADLRGNGYDIDVFSYGAPRVGNRAFAEFLTVQTGGTLYRITHTNDIVPRLPPREFGYSHSSPEYWIKSGTLVPVRRRDIVKIEGIDATGGNNQPNIPSIPAHLWYFGLIGTC

SEQ ID NO: 12800 - protein, 268 aa, Thermomyces lanuginosus
EVSQDLFNQFNLFAQYSKAAYCQKNNDAPAGTNITCTGNACPEVEKADATFLYSFEDSGVGDVTGFLALDNTNKQIVLSFRGSRSIENWIGNLNFDLKEINDICSGCRGHDGFTSSWRSVADTLRQKVEDAVREHPDYRVVFTGHSLGGALATVAGADLRGNGYDIDVFSYGAPRVGNRAFAEFLTVQDGGTLYRITHTNDIVPRLPPREFGYSHSSPEYWIKSGTLVPVTRNDIVKIEGIDATGGNNQPNIPDIPAHLWYFGLIGTC

SEQ ID NO: 12801 - protein, 268 aa, Thermomyces lanuginosus
EVSQDLFNQFNLFAQYSAAAYCGKNNDAPAGTNITCTGNACPEVEKAQATFLYSFEDMGVGDVTGFLALDNTNKLIVLSFRGSRSIENWIGNLNFDLKEINDICSGCRGHDGFTSSWRSVADTLRQKVEDAVREHPQYRVVFTGHSLGGALATVAGADLRGNGYDIDVFSYGAPRVGNRAFAEFLTVQTGGTLYRITHTNDIVPRLPPREFGYSHSSPEYWIKSGTLVPVTRQDIVKIEGIDATGGNNQPNIPDIPAHLWYFGRIGTC

SEQ ID NO: 12802 - protein, 268 aa, Thermomyces lanuginosus
EVSQDLFNQFNLFAQYSAAAYCGKNNDAPAGTNITCTGNACPEVEKADATFLYSFEDSGVGDVTGFLALDNTNKLIVLSFRGSRSIKNWIGNLNFDLKEINDICSGCRGHDGFTSSWRSVADTLRQKVEDAVREHPDYRVVFTGHSSGGALATVAGADLRGNGYDIDVFSYGAPRVGNRAFAEFLTVQTGGTLYRITHTNDIVPRLPPREFGYSHSSPEYWIKSGTLVPVRRRDIVKIEGIDATGGNNQPNIPDIPAHLWYFGLIGTC

SEQ ID NO: 12803 - protein, 268 aa, Thermomyces lanuginosus
EVSRDLFNQFNLFAQYSAAAYCGKNNDAPAGTNITCTGNACPEVEKADATFLYSFEDSGVGDVTGFLALDNTNKLIVLSFRGSRSIENWIGNLNFDLKEINDICSGCRGHDGFTSSWRSVADTLRQKVEDAVREHPDYRVVFTGHSLGGALATVAGADLRGNGYDIDVFSYGAPRVGNRAFAEFLTVQTGGTLYRITHTNDIVPRLPPREFGYSHSSPEYWIKSGTLRPVRRRDIVKIEGIDATGGNNQPNIPDIPAHLWYFGLIGTC

SEQ ID NO: 12804 - protein, 268 aa, Thermomyces lanuginosus
EVSQDLFNQFNLFAQYSAAAYCKKNNDAPAGTNITCTGNACPEVEKADATFLYSFKDSGVGDVTGFLALDNTNKLIVLSFRGSRSIENWIGNLNFDLKEINDICSGCRGHDGFTSSWRSVADTLRQKVEDAVREHPDYRVVFTGHSLGGALATVAGADLRGNGYDIDVFSYGAPRVGNRAFAEFLTNQTGGTLYRITHTNDIVPRLPPREFGYSHSSPEYWIKSGTLVPVTRNDIVKIEGIDATGGNNQPNQPDIPAHLWYFGRIGTC

SEQ ID NO: 12805 - protein, 268 aa, Thermomyces lanuginosus
EVSQDLFNQFNLFAQYSAAAYCGKNNDAEAGTDITCTGNACPEVEKADATFLYSFEDSGVGDVTGFLALDNTNKDIVLSFRGSRSIENWIGNLNFDLKEINDICSGCRGHDGFTSSWRSVADTLRQKVEDAVREHPDYRVVFTGHSLGGALATVAGADLRGNGYDIDVFSYGAPRVGNRAFAEFLTVQDGGTLYRITHTNDIVPRLPPREFGYSHSSPEYWIKSGTLVPVTRNDIVKIEGIDATGGNNQPNIPDIPAHLWYFGLIGTC

SEQ ID NO: 12806 - protein, 268 aa, Thermomyces lanuginosus
EVSQDLFNQFNLFAQYSAAAYCGKNNSAEAGTNITCTGNACPEVEKADATFLYSFEDSGVGDVTGFLALDNTNKDIVLSFRGSRSIENWIGNLNFDLKEINDICSGCRGHDGFTSSWRSVADTLRQKVEDAVREHPDYRVVFTGHSLGGALATVAGADLRGNGYDIDVFSYGAPRVGNRAFAEFLTVQDGGTLYRITHTNDIVPRLPPREFGYSHSSPEYWIKSGTLVPVTRNDIVKIEGIDATGGNNQPNIPDIPAHLWYFGLIGTC

SEQ ID NO: 12807 - protein, 268 aa, Thermomyces lanuginosus
EVSQDLFNQFNLFAQYSAAAYCGKNNDAPAGTQITCTGNACPEVEKADATFLYSFEDSGVGDVTGFLALDNTNKLIVLSFRGSRSIENWIMNLNFDLKEINDICSGCRGHDGFTSSWRSVADTLRQKVEDAVREHPDYRVVFTGHSLGGALATVAGADLRGNWYDIDVFSYGAPRVGNRAFAEFLTVQTGGTLYRITHTNDIVPRLPPREFGYSHSSPEYWIKSGTLVPVRRRDIVKIEGIDATGGNNQPNIPDIPAHLWYFGLIGTC

SEQ ID NO: 12808 - protein, 268 aa, Thermomyces lanuginosus
EVSQDLFNQFNLFAQYSAAAYCQKNNDAPAGTNITCTGNACPEVEKADATFLYSFEDSGVGDVTGFLALDNTNKQIVLSFRGSRSIENWIGNLNFDLKEINDICSGCRGHDGFTSSWRSVADTLRQKVEDAVREHPDYRVVFTGHSLGGALATVAWADLRGNGYDIDVFSYGAPRVGNRAFAEFLTNQTGGTLYRITHTNDIVPRLPPREFGYSHSSPEYWIKSGTLVPVTRNDIVKIEGIDATGGNNQPNIPDIPAHLWYFGLIGTC

SEQ ID NO: 12809 - protein, 268 aa, Thermomyces lanuginosus
EVSQDLFNQFNLFAQYSAAAYCGKNNDAPAGTNITCTGNACPEVEKADATFLYSFEDSGVGDVTGFLALDNTNKLIVLSFRGSRSIENWIGNLNFDLKEINDICSGCRGHDGFTSSWRSVADTLRQKVEDAVREHPDYRVVFTGHSLGGALATVAGADLRGNGYDIDVFSYGAPRVGNRAFAEFLTVQTGGTLYRITNTNDIVPRLPPREFGYSHSSPEYWIKSGTLPPVRRRDIVKIEGIDATGGNNQPNIPDIPAHLWYFGLIGTC

SEQ ID NO: 12810 - protein, 268 aa, Thermomyces lanuginosus
EVSQDLFNQFNLFAQYSAAAYCGKNNDAPAGTNITCTGNACPEVEKADATFLYSFEDSGVGDVTGFLALDNTNKLIVLSFRGSRSIENWIGNLNFDLKEINDICSGCRGHDGFTSSWRSVADTLRQKVEDAVREHPDYRVVFTGHSLGGALATVAGADLRGNGYDIDVFSYGAPRVGNRAFAEFLTVQTGGTLYRITHTNDIVPRLPPREFGYSHSSPEYWIKSGTLVPVRRRDIVKIEGIDATGGNNQPNIPDAKAHLWYFGLIGTC

SEQ ID NO: 12811 - protein, 268 aa, Synthetic construct
EVSQDLFNQFNLFAQYSAAAYCGKNNDAPAGTNITCTGNACPEVEKADATFLYSFEGSGVGDVTGFLALDNTNKLIVLSFRGSRSIENWIGNLKLXLKEINDICSGCRGHDGFTSSWRSVADTLRQKVEDAVREHPDYRVVFTGHSLGGALATVAGADLRGNGYDIDVFSYGAPRVGNRAFAEFLTVQTGGTLYRITHTNDIVPRLPPREFGYSHSSPEYWIKSGTLVPVTRNDIVKIEGIDATGGNNRPNIPDIPAHLWYFGLIGTC

SEQ ID NO: 12812 - protein, 268 aa, Thermomyces lanuginosus
EVSQDLFNQFNLFAQYSKAAYCGKNNDAPAGTNITCTGNACPEVEKADATFLYSFEDSGVGDVTGFLALDNTNKLIVLSFRGSRSIENWIGNLNFDLKEINDICSGCRGHAGFTSSWRSVADTLRQKVEDAVREHPDYRVVFTGHSLGGALATVAWADLRGNGYDIDVFSYGAPRVGNRAFAEFLTVQQGGTLYRITHTNDIVPRLPPREFGYSHSSPEYWIKSGTLVPVTRNDIVKIEGIDATGGNNQPNIPDIPAHLWYFGLIGTC

SEQ ID NO: 12813 - protein, 268 aa, Thermomyces lanuginosus
EVSQDLFNQFKLFAQYSAAAYCGKNNSAPAGTNITCTGNACPEVEKADATFLYSFEDSGVGDVTGFLALDNTNKLIVLSFRGSRSIENWIGNLNFDLKEINDICSGCRGHDGFTSSWRSVADTLRQKVEDAVREHPDYRVVFTGHSLGGALATVAGADLRGNGYDIDVFSYGAPRVGNRAFAEFLTVQTGGTLYRITHTNDIVPRLPPREFGYSHSSPEYWIKSGTLVPVTRQDIVKIEGIDATGGNNQPNIPDITAHLWYFGLIGTC

SEQ ID NO: 12814 - protein, 268 aa, Thermomyces lanuginosus
EVSQDLFNQFNLFAQYSAAAYCGKNNDAPAGTQITCTGNACPEVEKADATFLYSFEDSGVGDVTGFLALDNTNKLIVLSFRGSRSIENWIGNLNFDLKEINDICSGCRGHDGFTSSGRSVADTLRQKVEDAVREHPDYRVVFTGHSLGGALATVAGADLRGNGYDIDVFSYGAPRVGNRAFAEFLTVQTGGTLYRITHTNDIVPRLPPREFGYSHSSPEYWIKSGTLVPVRRRDIVKIEGIDATGGNNQPNIPDIPAHLWYFGLIGTC

SEQ ID NO: 12815 - protein, 268 aa, Thermomyces lanuginosus
EVSQDLFNQFNLFAQYSAAAYCGKNNDAEAGTNITCTGNACPEVFKADATFLYSFEDSGVGDVTGFLALDNTRKDIVLSFRGSRSIENWIGNLNFDLKEINDICSGCRGHDGFTSSWRSVADTLRQKVEDAVREHPDYRVVFTGHSLGGALATVAGADLRGNGYDIDVFSYGAPRVGNRAFAEFLTVQTGGTLYRITHTNDIVPRLPPREFGYSHSSPEYWIKSGTLVPVTRNDIVKIEGIDATGGNNQPNIPDIPAHLWYFGLIGTC

SEQ ID NO: 12816 - protein, 268 aa, Thermomyces lanuginosus
EVSQDLFNQFNLFAQYSAAAYCGKNNDAPAGTQITCTGNACPEVEKADATFLYSFEDSGVGDVTGFLALDNTNKLIVLSFRGSRSIENWIGNLNFDLKEINDICSGCRGHDGFTSSWRSVADTLRQKVEDAVREHPDYRVVFTGHSLGGALATVAGADLRGNGYDIDVFSYGAPRDGNRAFAEFLTVQTGGTLYRITHTNDIVPRLPPREFGYSHSSPEYWIKSGTLVPVRRRDIVKIEGIDATGGNNQPNIPDIPAHLWYFGLIGTC

SEQ ID NO: 12817 - protein, 268 aa, Thermomyces lanuginosus
EVSQDLFNQFNLFAQYSKAAYCGANNDAPAGTNITCTGNACPEVEKADATFLYSFEDSGVGDVTGFLALDNTNKLIVLSFRGSRSIENWIGNLNFDLKEINDICSGCRGHDGFTSSWRSVADTLRQKVEAAVREHPDYRVVFTGHSLGGALATVAWADLRGNGYDIDVFSYGAPRVGNRAFAEFLTVQTGGTLYRITHTNDIVPRLPPREFGYSHSSPEYWIKSGTLVPVTRNDIVKIEGIDATGGNNQPNIPDIPAHLWYFGLIGTC

SEQ ID NO: 12818 - protein, 268 aa, Thermomyces lanuginosus
EVSQDLFNQFNLFAQYSAAAYCQKNNDAPAGTNITCTGNACPEVEKADATFLYSFEDSGVGDVTGFLALDNTNKQIVLSFRGSRSIENWIGNLNFDLKEINDICSGCRGHDGFTSSWRSVADTLRQKVEDAVREHPDYRVVFTGHSLGGALATVAWADLRGNGYDIDVFSYGAPRVGNRAFAEFLTTQTGGTLYRITHTNDIVPRLPPREFGYSHSSPEYWIKSGTLVPVTRNDIVKIEGIDATGGNNQPNIPDIPAHLWYFGLIGTC

SEQ ID NO: 12819 - protein, 268 aa, Thermomyces lanuginosus
EVSQDLFNQFNLFAQYSAAAYCQKNNDAPAGTNITCTGNACPEVEKADATFLYSFEDSGVGDVTGFLALDNTNKLIVLSFRGSRSIENWIGNLNFDLKEINDICSGCRGHDGFTSSWRSVADTLRQKVEDAVREHPDYRVVFTGHSLGGALATIAWADLRGNGYDIDVFSYGAPRVGNRAFAEFLTNQTGGTLYRITHTNDIVPRLPPREFGYSHSSPEYWIKSGTLVPVTRNDIVKIEGIDATGGNNQPNIPDIPAHLWYFGLIGTC

SEQ ID NO: 12820 - protein, 268 aa, Thermomyces lanuginosus
EVSQDLFNQFNLFAQYSAAAYCGKNNDAPAGTNITCTGNACPEVEKADATTLYSFEDSGVGDVTGFLALDNTNKGIVLSFRGSRSIENWIQNLNFDLKEINDICSGCRGHDGFTSSWRSVADTLRQKVEDAVREHPDYRVVFTGHSLGGALATVAGADLRGNGYDIDVFSYGAPRVGNRAFAEFLTHQTGGTLYRITHTNDIVPRLPPREFGYSHSSPEYWIKSGTLVPVTRNDIVKIEGIDATGGNNQPNQPDIPAHLWYFGRIGTC

SEQ ID NO: 12821 - protein, 268 aa, Thermomyces lanuginosus
EVSQDLFNQFNLFAQYSAAAYCGKNNDAPAGTQITCTGNACPEVEKADATFLYSFEDSGVGDVTGFLALDNTNKLIVLSFRGSRSIENWIGNLNFDLKEIQDICSGCRGHDGFTSSWRSVADTLRQKVEDAVREHPDYRVVFTGHSLGGALATVAGADLRGNGYDIDVFSYGAPRVGNRAFAEFLTVQTGGTLYRITHTNDIVPRLPPREFGYSHSSPEYWIKSGTLVPVRRRDIVKIEGIDATGGNNQPNIPDIPAHLWYFGLIGTC

SEQ ID NO: 12822 - protein, 268 aa, Thermomyces lanuginosus
EVSQDLFNQFNLFAQYSAAAYCGKNNDAPAGTQITCTGNACPEVEKADATFLYSFEDSGVGDVTGFLALDNTNKLIVLSFRGSRSIENWIGNLNFDLKEINDICSGCRGHDGFTSSHRSVADTLRQKVEDAVREHPDYRVVFTGHSLGGALATVAGADLRGNGYDIDVFSYGAPRVGNRAFAEFLTVQTGGTLYRITHTNDIVPRLPPREFGYSHSSPEYWIKSGTLVPVRRRDIVKIEGIDATGGNNQPNIPDIPAHLWYFGLIGTC

SEQ ID NO: 12823 - protein, 268 aa, Thermomyces lanuginosus
EVSQDLFNQFNLFAQYSAAAYCGKNNEAPAGTNITCTGNACPEVEKADATFLYSFEDMGVGDVTGFLALDNTNKLIVLSFRGSRSIENWIGNLNFDLKEINDICSGCRGHDGFTSSWRSVADTLRQKVEDAVREHPDYRVVFTGHSLGGALATVAGADLRGNPYDIDVFSYGAPRVGNRAFAEFLTVQTGGTLYRITHTNDIVPRLPPREFGYSHSSPEYWIKSGTMVPVTRNDIVKIEGIDATGGNNQPNIPDIPAHLWYFGRIGTC

SEQ ID NO: 12824 - protein, 268 aa, Thermomyces lanuginosus
EVSQDLFNQFNLFAQYSAAAYCGKNNDAPAGTNITCTGNACPEVEKADATLLYSFEDSGVGDVTGFLALDNTNKLIVLSFRGSRSIENWIGNLNFELKEINDICSGCRGHDGFTSSWRSVADTLRQKVEDAVREHPDYRVVFTGHSLGGALATVAGADLRGNGYDIDVFSYGAPRVGNRAFAEFLTVQTGGTLYRITHTNDIVPRLPPREFGYSHSSPEYWIKSGTLVPVRRRDIVKIEGIDATGGNNQPNIPSIPAHLWYFGLIGTC

SEQ ID NO: 12825 - protein, 268 aa, Synthetic construct
EVSQDLFNQFNLFAQYSAAAYCGKNNDAPAGTNITCTGNACPEVEKADATFLYSFEDSGVGDVTGFLALDNTNKLIVLSFRGSRSIENWIGNLNFDLKEINDICSGCRGHDGFTSSWRSVADTLRQKVEDAVREHPDYRVVFTGHSLGGALATVAGADLRGNGYDIGVFSYGAPRVGNRAFAEFLTVQTGGTLYRITHTNDIVPRLPPRVFGYSHSSPEYLIKSGTLVPVTRNDIVKIEGIDATGGNNRPNIPDIPAHLWYFGLIGTC

SEQ ID NO: 12826 - protein, 268 aa, Thermomyces lanuginosus
EVSQDLFNQFKLFAQYSAAAYCGKNNQAPAGTNITCTGNACPEVEKADATFLYSFEDMGVGDVTGFLALDNTNKLIVLSFRGSRSIENWIGNLNFDLKEINDICSGCRGHDGFTSSWRSVADTLRQKVEDAVREHPDYRVVFTGHSLGGALATVAGADLRGNGYDIDVFSYGAPRVGNRAFAEFLTVQTGGTLYRITHTNDIVPRLPPREFGYSHSSPEYWIKSGTLVPVTRNDIVKIEGIDATGGNNQPNIPDITAHLWYFGLIGTC

SEQ ID NO: 12827 - protein, 268 aa, Thermomyces lanuginosus
EVSQDLFNQFNLFAQYSAAAYCGKNNDAPAGTDITCTGNACPEVFKADATFLYSFEDSGVGDVTGFLALDNTRKLIVLSFRGSRSIENWIGNLNFDLKEINDICSGCRGHDGFTSSWRSVADTLRQKVEDAVREHPDYRVVFTGHSLGGALATVAGADLRGNGYDIDVFSYGAPRVGNRAFAEFLTVQQGGTLYRITHTNDIVPRLPPREFGYSHSSPEYWIKSGTLVPVTRNDIVKIEGIDATGGNNQPNIPDIPAHLWYFGLIGTC

SEQ ID NO: 12828 - protein, 268 aa, Thermomyces lanuginosus
EVSQDLFNQFKLFAQYSAAAYCGKNNSAPAGTNITCTGNACPEVEKADATFLYSFKDSGVGDVTGFLALDNTNKLIVLSFRGSRSIENWIGNLNFDLKEINDICSGCRGHDGFTSSWRSVADTLRQKVEDAVREHPDYRVVFTGHSLGGALATVAGADLRGNGYDIDVFSYGAPRVGNRAFAEFLTVQTGGTLYRITHTNDIVPRLPPREFGYSHSSPEYWIKSGTLVPVTRNDIVKIEGIDATGGNNQPNIPDITAHLWYFGLIGTC

SEQ ID NO: 12829 - protein, 268 aa, Thermomyces lanuginosus
EVSQDLFNQFNLFAQYSAAAYCGKNNDAPAGTNITCTGNACPEVEKADATFLYSFEDSGVGDVTGFLALDNTNKLIVLSFRGSRSIENWIGNLNFDLKEINDICSGCRGHDGFTSSWRSVADTLRQKVEDAVREHPDYRVVFTGHSLGGALATVAGADLRGNGYDIDVFSYGAPRVGNRAFAEFLTVQTGGTLYRITHTNDIVPRLPPREFGYSHSSPEYWIKSGTLVPVRRRDIVKIEGIDATGGNNQPNIPDTPVHLWYFGLIGTC

SEQ ID NO: 12830 - protein, 268 aa, Synthetic construct
EVSQDLFNQFNLFAQYSAAAYCGKNNDAPAGTNITCTGNACPEVEKADATFLYSFEDSGVGDVTGFLALDNTNKLIVLSFRGSRSIENWIGNLKFLLKKINDICSGCRGHDGFTSSWRSVADTLRQKVEDAVREHPDYRVVFTGHSLGGALATVAGADLRGNGYDIDVFSYGAPRVGNRAFAEFLTVQTGGTLYRITHTNDIVPRLPPREFGYSHSSPEYWIKSGTLVPVRRRRIVKIEGIDATGGNNRPNIPDIPAHLWYFGLIGTC

SEQ ID NO: 12831 - protein, 268 aa, Thermomyces lanuginosus
EVSQDLFNQFNLFAQYSAAAYCKKNNSAPAGTNITCTGNACPEVEKADATFLYSFKDSGVGDVTGFLALDNTNKLIVLSFRGSRSIENWIGNLNFDLKEINDICSGCRGHDGFTSSWRSVADTLRQKVEDAVREHPDYRVVFTGHSLGGALATVAGADLRGNGYDIDVFSYGAPRVGNRAFAEFLTTQTGGTLYRITHTNDIVPRLPPREFGYSHSSPEYWIKSGTLVPVTRNDIVKIEGIDATGGNNQPNIPDIPAHLWYFGRIGTC

SEQ ID NO: 12832 - protein, 268 aa, Thermomyces lanuginosus
EVSDDLFNQFNLFAQYSAAAYCGKNNNAPAGTNITCTGNACPEVEKADATFLYSFEDMGVGDVTGFLALDNTNKLIVLSFRGSRSIENWIGNLNFDLKEINDICSGCRGHDGFTSSWRSVADTLRQKVEDAVREHPDYRVVFTGHSLGGALATVAGADLRGNGYDIDVFSYGAPRVGNRAFAEFLTVQTGGTLYRITHTNDIVPRLPPREFGYSHSSPEYWIKSGTLVPVTRNDIVKIEGIDATGGNNQPNIPDITAHLWYFGLIGTC

SEQ ID NO: 12833 - protein, 268 aa, Thermomyces lanuginosus
EVSQDLFNQFNLFAQYSAAAYCGKNNDAEAGTNITCTGNACPEVFKADATFLYSFEDSGVGDVTGFLALDNTRKLIVLSFRGSRSIENWIGNLNFDLKEINDICSGCRGHDGFTSSWRSVADTLRQKVEDAVREHPDYRVVFTGHSLGGALATVAGADLRGNGYDIDVFSYGAPRVGNRAFAEFLTVQDGGTLYRITHTNDIVPRLPPREFGYSHSSPEYWIKSGTLVPVTRNDIVKIEGIDATGGNNQPNIPDIPAHLWYFGLIGTC

SEQ ID NO: 12834 - protein, 268 aa, Thermomyces lanuginosus
EVSQDLFNQFNLFAQYSAAAYCGKNNDAPAGTNITCTGNACPEVEKADATFLYSFEDSGVGDVTGFLALDNTNKLIVLSFRGSRSIENWIGNLNFDLKTINDICSGCRGHDGFISSWRSVADTLRQKVEDAVREHPDYRVVFTGHSLGGALATVAGADLRGNGYDIDVFSYGAPRVGNRAFAEFLTVQTGGTLYRITHTNDIVPRLPPREFGYSHSSPEYWIKSGTLVPVRRRDIVKIEGIDATGGNNQPNIPNIPAHLWYFGLIGTC

SEQ ID NO: 12835 - protein, 268 aa, Thermomyces lanuginosus
EVSQDLFNQFNLFAQYSAAAYCGKNNDAPAGTNITCTGNACPEVEKADATFLYSFEDSGVGDVTGFLALDNTNKLIVLSFRGSRSIENWIGNLNFDLKEINDICSGCRGHDGFTSSWRSVADTLRQKVEAAVREHPQYRVVFTGHSLGGALATVAGADLRGNPYDIDVFSYGAPRVGNRAFAEFLTVQTGGTLYRITHTNDIVPRLPPREFGYSHSSPEYWIKSGTMVPVTRNDIVKIEGIDATGGNNQPNIPDIPAHLWYFGRIGTC

SEQ ID NO: 12836 - protein, 268 aa, Thermomyces lanuginosus
EVSQDLFNQFNLFAQYSKAAYCQKNNDAPAGTNITCTGNACPEVEKADATFLYSFEDSGVGDVTGFLALDNTNKRIVLSFRGSRSIENWIGNLNFDLKEINDICSGCRGHDGFTSSWRSVADTLRQKVEAAVREHPDYRVVFTGHSLGGALATVAGADLRGNGYDIDVFSYGAPRVGNRAFAEFLTVQTGGTLYRITHTNDIVPRLPPREFGYSHSSPEYWIKSGTLVPVTRNDIVKIEGIDATGGNNQPNIPDIPAHLWYFGLIGTC

SEQ ID NO: 12837 - protein, 268 aa, Thermomyces lanuginosus
EVSQDLFNQFKLFAQYSAAAYCKKNNDAPAGTNITCTGNACPEVEKADATFLYSFEDSGVGDVTGFLALDNTNKQIVLSFRGSRSIENWIGNLNFDLKEINDICSGCRGHAGFTSSWRSVADTLRQKVEDAVREHPDYRVVFTGHSLGGALATVAGADLRGNGYDIDVFSYGAPRVGNRAFAEFLTVQTGGTLYRITHTNDIVPRLPPREFGYSHSSPEYWIKSGTLVPVTRNDIVKIEGIDATGGNNQPNIPDIPAHLWYFGLIGTC

SEQ ID NO: 12838 - protein, 268 aa, Thermomyces lanuginosus
EVSQDLFNQFNLFAQYSAAAYCGKNNDAPAGTNITCTGNACPEVEKADATFLYSFEDSGVGDVTGFLALDNTNKLIVLSFRGSRSIENWIGNLNFDLKEINDICSGCRGHDGFTSSWRSVADTLRQKVEDAVREHPDYRVVFTGHSLGGALATVAGADLRGDGYDIDVFSYGAPRVGNRAFAEFLTVQTGGTLYRITHTNDIVPRLPPREFGYSHSSPEYWIKSGTLRPVRRRDIVKIEGIDATGGNNQPNIPDIPAHLWYFGLIGTC

SEQ ID NO: 12839 - protein, 268 aa, Thermomyces lanuginosus
EVSQDLFNQFNLFAQYSAAAYCGANNDAPAGTNITCTGNACPEVEKADATFLYSFEDSGVGDVTGFLALDNTNKQIVLSFRGSRSIENWIGNLNFDLKEINDICSGCRGHDGFTSSWRSVADTLRQKVEDAVREHPDYRVVFTGHSLGGALATVAGADLRGNGYDIDVFSYGAPRVGNRAFAEFLTTQQGGTLYRITHTNDIVPRLPPREFGYSHSSPEYWIKSGTLVPVTRNDIVKIEGIDATGGNNQPNIPDIPAHLWYFGLIGTC

SEQ ID NO: 12840 - protein, 268 aa, Thermomyces lanuginosus
EVSQDLFNQFNLFAQYSAAAYCKKNNDAPAGTNITCTGNACPEVEKADATFLYSFEDSGVGDVTGFLALDNTNKQIVLSFRGSRSIENWIGNLNFDLKEINDICSGCRGHDGFTSSWRSVADTLRQKVEAAVREHPDYRVVFTGHSLGGALATVAGADLRGNGYDIDVFSYGAPRVGNRAFAEFLTNQTGGTLYRITHTNDIVPRLPPREFGYSHSSPEYWIKSGTLVPVTRNDIVKIEGIDATGGNNQPNIPDIPAHLWYFGLIGTC

SEQ ID NO: 12841 - protein, 268 aa, Thermomyces lanuginosus
EVSQDLFNQFNLFAQYSAAAYCGKNNDAPAGTNITCTGNACPEVEKADATTLYSFEDSGVGDVTGFLALDNTNKRIVLSFRGSRSIENWIGNLNFDLKEINDICSGCRGHDGFTSSWRSVADTLRQKVEDAVREHPDYRVVFTGHSLGGALATVAGADLRGNGYDIDVFSYGAPRVGNRAFAEFLTNQTGGTLYRITHTNDIVPRLPPREFGYSHSSPEYWIKSGTLVPVTRNDIVKIEGIDATGGNNQPNQPDIPAHLWYFGRIGTC

SEQ ID NO: 12842 - protein, 268 aa, Synthetic construct
EVSQDLFNQFNLFAQYSAPAYCGKNNDAPAGTNITCTGNACPEVEKADATFLYSFEDSGVGDVTGFLALDNTNKLIVLSFRGSRSIENWIGNLNFDLKEINDICSGCRGHDGFTSSWRSVADTLRQKVEDAVREHPDYRVVFTGHSLGGALATVAGADLRGNGYDIGVFSYGAPRVGNRAFAEFLTVQTGGTLYRITHTNDIVPRLPPRVFGYSHSSPEYLIKSGTLVPVTRNDIVKIEGIDATGGNNQPNIPDIPAHLWYFGLIGTC

SEQ ID NO: 12843 - protein, 268 aa, Thermomyces lanuginosus
EVSQDLFNQFNLFAQYSKAAYCGKNNDAPAGTNITCTGNACPEVEKADATFLYSFEDSGVGDVTGFLALDNTNKLIVLSFRGSRSIENWIGNLNFDLKEINDICSGCRGHDGFTSSWRSVADTLRQKVEAAVREHPDYRVVFTGHSLGGALATVAWADLRGNGYDIDVFSYGAPRVGNRAFAEFLTTQTGGTLYRITHTNDIVPRLPPREFGYSHSSPEYWIKSGTLVPVTRNDIVKIEGIDATGGNNQPNIPDIPAHLWYFGLIGTC

SEQ ID NO: 12844 - protein, 268 aa, Thermomyces lanuginosus
EVSQDLFNQFNLFAQYSAAAYCGKNNDAPAGTNITCTGNACPEVEKADATFLYSFSDSGVGDVTGFLALDNTNKLIVLSFRGSRSIKNWIGNLNFDLKEINDICSGCRGHDGFTSSWRSVADTLRQKVEDAVREHPDYRVVFTGHSLGGALATVAGADLRGNGYDIDVFSYGAPRVGNRAFAEFLTVQTGGTLYRITHTNDIVPRLPPREFGYSHSSPEYWIKSGTLVPVRRRDIVKIEGIDATGGNNQPNIPDIPAHLWYFGLIGTC

SEQ ID NO: 12845 - protein, 268 aa, Thermomyces lanuginosus
EVSQDLFNQFNLFAQYSKAAYCGKNNSAPAGTNITCTGNACPEVEKADATFLYSFEDSGVGDVTGFLALDNTNKDIVLSFRGSRSIENWIGNLNFDLKEINDICSGCRGHDGFTSSWRSVADTLRQKVEDAVREHPDYRVVFTGHSLGGALATVAGADLRGNGYDIDVFSYGAPRVGNRAFAEFLTVQDGGTLYRITHTNDIVPRLPPREFGYSHSSPEYWIKSGTLVPVTRNDIVKIEGIDATGGNNQPNIPDIPAHLWYFGLIGTC

SEQ ID NO: 12846 - protein, 268 aa, Thermomyces lanuginosus
EVSQDLFNQFNLFAQYSAAAYCGKNNDAPAGTNITCTGNACPEVEKADATFLYSFEDSGVGDVTGFLALDNTNKGIVLSFRGSRSIENWIGNLNFDLKEINDICSGCRGHDGFTSSWRSVADTLRQKVEAAVREHPDYRVVFTGHSLGGALATVAGADLRGNGYDIDVFSYGAPRVGNRAFAEFLTTQTGGTLYRITHTNDIVPRLPPREFGYSHSSPEYWIKSGTLVPVTRNDIVKIEGIDATGGNNQPNQPDIPAHLWYFGLIGTC

SEQ ID NO: 12847 - protein, 268 aa, Thermomyces lanuginosus
EVSQDLFNQFNLFAQYSAAAYCGKNNDAPAGTNITCTGNACPEVEKADATFLYSFEKSGVGDVTGFLALDNTNKRIVLSFRGSRSIENWIGNLNFDLKEINDICSGCRGHDGFTSSWRSVADTLRQKVEAAVREHPDYRVVFTGHSLGGALATVAGADLRGNGYDIDVFSYGAPRVGNRAFAEFLTTQTGGTLYRITHTNDIVPRLPPREFGYSHSSPEYWIKSGTLVPVTRNDIVKIEGIDATGGNNQPNIPDIPAHLWYFGRIGTC

SEQ ID NO: 12848 - protein, 268 aa, Thermomyces lanuginosus
EVSQDLFNQFNLFAQYSAAAYCQKNNDAPAGTNITCTGNACPEVFKADATFLYSFEDSGVGDVTGFLALDNTNKQIVLSFRGSRSIENWIGNLNFDLKEINDICSGCRGHDGFTSSWRSVADTLRQKVEDAVREHPDYRVVFTGHSLGGALATVAGADLRGNGYDIDVFSYGAPRVGNRAFAEFLTTQTGGTLYRITHTNDIVPRLPPREFGYSHSSPEYWIKSGTLVPVTRNDIVKIEGIDATGGNNQPNIPDIPAHLWYFGLIGTC

SEQ ID NO: 12849 - protein, 268 aa, Synthetic construct
EVSQDLFNQFNLFAQYSAAAYCGKNNDAPAGTNITCTGNACPEVEKADATFLYSFEGSGVGDVTGFLALDNTNKLIVLSFRGSRSIENWIGNLKFLLKEINDICSGCRGHDGFTSSWRSVADTLRQKVEDAVREHPDYRVVFTGHSLGGALATVAGADLRGNGYDIDVFPYGAPRVGNRAFAEFLTVQTGGTLYRITHTNDIVPRLPPREFGYSHSSPEYWIKSGTLVPVTRNDIVKIEGIDATGGNNRPNIPDIPAHLWYFGLIGTC

SEQ ID NO: 12850 - protein, 268 aa, Thermomyces lanuginosus
EVSQDLFNQFNLFAQYSAAAYCGKNNDAEAGTDITCTGNACPEVFKADATFLYSFEDSGVGDVTGFLALDNTNKDIVLSFRGSRSIENWIGNLNFDLKEINDICSGCRGHDGFTSSWRSVADTLRQKVEDAVREHPDYRVVFTGHSLGGALATVAGADLRGNGYDIDVFSYGAPRVGNRAFAEFLTVQTGGTLYRITHTNDIVPRLPPREFGYSHSSPEYWIKSGTLVPVTRNDIVKIEGIDATGGNNQPNIPDIPAHLWYFGLIGTC

SEQ ID NO: 12851 - protein, 268 aa, Thermomyces lanuginosus
EVSQDLFNQFNLFAQYSAAAYCGKNNEAPAGTNITCTGNACPEVEKADATFLYSFEDSGVGDVTGFLALDNTNKLIVLSFRGSRSIENWIGNLNFDLKEINDICSGCRGHDGFTSSWRSVADTLRQKVEDAVREHPQYRVVFTGHSLGGALATVAGADLRGNPYDIDVFSYGAPRVGNRAFAEFLTVQTGGTLYRITHTNDIVPRLPPREFGYSHSSPEYWIKSGTMVPVTRNDIVKIEGIDATGGNNQPNIPDIPAHLWYFGLIGTC

SEQ ID NO: 12852 - protein, 268 aa, Thermomyces lanuginosus
EVSQDLFNQFNLFAQYSAAAYCGKNNDAPAGTNITCTGNACPEVEKAQATFLYSFEDSGVGDVTGFLALDNTNKLIVLSFRGSRSIENWIGNLNFDLKEINDICSGCRGHDGFTSSWRSVADTLRQKVEAAVREHPDYRVVFTGHSLGGALATVAGADLRGNPYDIDVFSYGAPRVGNRAFAEFLTVQTGGTLYRITHTNDIVPRLPPREFGYSHSSPEYWIKSGTMVPVTRNDIVKIEGIDATGGNNQPNIPDIPAHLWYFGRIGTC

SEQ ID NO: 12853 - protein, 268 aa, Thermomyces lanuginosus
EVSQDLFNQFNLFAQYSAAAYCKKNNDAPAGTNITCTGNACPEVEKADATTLYSFEDSGVGDVTGFLALDNTNKLIVLSFRGSRSIENWIQNLNFDLKEINDICSGCRGHDGFTSSWRSVADTLRQKVEAAVREHPDYRVVFTGHSLGGALATVAGADLRGNGYDIDVFSYGAPRVGNRAFAEFLTHQTGGTLYRITHTNDIVPRLPPREFGYSHSSPEYWIKSGTLVPVTRNDIVKIEGIDATGGNNQPNIPDIPAHLWYFGRIGTC

SEQ ID NO: 12854 - protein, 268 aa, Thermomyces lanuginosus
EVSQDLFNQFNLFAQYSAAAYCGKNNSAPAGTNITCTGNACPEVEKADATFLYSFEDSGVGDVTGFLALDNTNKRIVLSFRGSRSIENWIGNLNFDLKEINDICSGCRGHDGFTSSWRSVADTLRQKVEDAVREHPDYRVVFTGHSLGGALATIAGADLRGNGYDIDVFSYGAPRVGNRAFAEFLTVQQGGTLYRITHTNDIVPRLPPREFGYSHSSPEYWIKSGTLVPVTRNDIVKIEGIDATGGNNQPNIPDIPAHLWYFGRIGTC

SEQ ID NO: 12855 - protein, 268 aa, Thermomyces lanuginosus
EVSQDLFNQFNLFAQYSAAAYCGKNNDAPAGTQITCTANACPEVEKADATFLYSFEDSGVGDVTGFLALDNTNKLIVLSFRGSRSIENWIGNLNFDLKEINDICSGCRGHDGFTSSWRSVADTLRQKVEDAVREHPDYRVVFTGHSLGGALATVAGADLRGNGYDIDVFSYGAPRVGNRAFAEFLTVQTGGTLYRITHTNDIVPRLPPREFGYSHSSPEYWIKSGTLVPVRRRDIVKIEGIDATGGNNQPNIPDIPAHLWYFGLIGTC

SEQ ID NO: 12856 - protein, 268 aa, Thermomyces lanuginosus
EVSQDLFNQFNLFAQYSAAAYCGKNNDAPAGTNITCTGNACPEVEKADATFLYSFEDSGVGDVTGFLALDNTNKLIVLSFRGSRSIENWIGNLNFDLIEINDICSGCRGHDGFTSSWRSVADTLRQKVEDAVREHPDYRVVFTGHSLGGALATVAGADLRGNGYDIDVFSYGAPRVGNRAFAEFLTVQTGGTLYRITHTNDIVPRLPPREFGYSHSSPEYWIKSGTLVPVRRRDIVKIEGIDATGGNNQPSIPDIPAHLWYFGLIGTC

SEQ ID NO: 12857 - protein, 268 aa, Thermomyces lanuginosus
EVSQDLFNQFNLFAQYSAAAYCGKNNDAPAGTNITCTGNICPEVEKADATFLYSFEDSGVGDVTGFLALDNTNKLIVLSFRGSRSIENWIGNLNFDLKEINDICSGCRGHDGFTSSWFSVADTLRQKVEDAVREHPDYRVVFTGHSLGGALATVAGADLRGNGYDIDVFSYGAPRVGNRAFAEFLTVQTGGTLYRITHTNDIVPRLPPREFGYSHSSPEYWIKSGTLVPVRRRDIVKIEGIDATGGNNQPNIPDIPAHLWYFGLIGTC

SEQ ID NO: 12858 - protein, 268 aa, Thermomyces lanuginosus
EVSQDLFNQFNLFAQYSAAAYCGKNNDAPAGTNITCTGNACPEVEKADATFLYSFEDSGVGDVTGFLALDNTNKRIVLSFRGSRSIENWIGNLNFDLKEINDICSGCRGHDGFTSSWRSVADTLRQKVEDAVREHPDYRVVFTGHSLGGALATVAWADLRGNGYDIDVFSYGAPRVGNRAFAEFLTTQQGGTLYRITHTNDIVPRLPPREFGYSHSSPEYWIKSGTLVPVTRNDIVKIEGIDATGGNNQPNIPDIPAHLWYFGRIGTC

SEQ ID NO: 12859 - protein, 268 aa, Thermomyces lanuginosus
EVSQDLFNQFNLFAQYSAAAYCGKNNDAPAGTQITCTGNACPEVEKADATFLYSFEDSGVGDVTGFLALDNTNKLIVLSFRGSRSIENWIGNLNFDLKEINDICSGCRGHDGFTSSWRSVADTLRQKVEDAVREHPDYRVVFTGHSLGGALATVAGADLRGNGYDIDVFSYGAPRVGNRAFAEFLTVQTGGTLYRITHTNDIVPRLPPRVFGYSHSSPEYWIKSGTLVPVRRRDIVKIEGIDATGGNNQPNIPDIPAHLWYFGLIGTC

SEQ ID NO: 12860 - protein, 268 aa, Thermomyces lanuginosus
EVSQDLFNQFNLFAQYSAAAYCKKNNDAPAGTNITCTGNACPEVEKADATFLYSFKDSGVGDVTGFLALDNTNKRIVLSFRGSRSIENWIGNLNFDLKEINDICSGCRGHDGFTSSWRSVADTLRQKVEDAVREHPDYRVVFTGHSLGGALATVAGADLRGNGYDIDVFSYGAPRVGNRAFAEFLTNQTGGTLYRITHTNDIVPRLPPREFGYSHSSPEYWIKSGTLVPVTRNDIVKIEGIDATGGNNQPNIPDIPAHLWYFGRIGTC

SEQ ID NO: 12861 - protein, 268 aa, Thermomyces lanuginosus
EVSQDLFNQFNLFAQYSAAAYCGKNNDAPAGTNITCTGNACPEVEKADATFLYSFKDSGVGDVTGFLALDNTNKLIVLSFRGSRSIKNWIGNLNFLLKPINDICSGCRGHDGFTSSWRSVADTLRQKVEDAVREHPDYRVVFTGHSLGGALATVAGADLRGNGYDIDVFSYGAPRVGNRAFAEFLTVQTGGTLYRITHTNDIVPRLPPREFGYSHSSPEYWIKSGTLVPVRRRDIVKIEGIDATGGNNQPNIPDIPAHLWYFGLIGTC

SEQ ID NO: 12862 - protein, 268 aa, Thermomyces lanuginosus
EVSQDLFNQFNLFAQYSAAAYCGKNNDAPAGTQITCTMNACPEVEKADATFLYSFEDSGVGDVTGFLALDNTNKLIVLSFRGSRSIENWIGNLNFDLKEINDICSGCRGHDGFTSSWRSVADTLRQKVEDAVREHPDYRVVFTGHSLGGALATVAGADLRGNGYDIDVFSYGAPRVGNRAFAEFLTVQTGGTLYRITHTNDIVPRLPPREFGYSHSSPEYWIKSGTLVPVRRRDIVKIEGIDATGGNNQPNIPDIPAHLWYFGLIGTC

SEQ ID NO: 12863 - protein, 268 aa, Thermomyces lanuginosus
EVSQDLFNQFNLFAQYSAAAYCGKNNDAPAGTQITCTINACPEVEKADATFLYSFEDSGVGDVTGFLALDNTNKLIVLSFRGSRSIENWIGNLNFDLKEINDICSGCRGHDGFTSSWRSVADTLRQKVEDAVREHPDYRVVFTGHSLGGALATVAGADLRGNGYDIDVFSYGAPRVGNRAFAEFLTVQTGGTLYRITHTNDIVPRLPPREFGYSHSSPEYWIKSGTLVPVRRRDIVKIEGIDATGGNNQPNIPDIPAHLWYFGLIGTC

SEQ ID NO: 12864 - protein, 268 aa, Thermomyces lanuginosus
EVSQDLFNQFNLFAQYSAAAYCGKNNDAPAGTNITCTGNACPEVEKADATFLYSFKDSGVGDVTGFLALDNTNKLIVLSFRGSRSIENWIGNLRFDLKEINDICSGCRGHDGFTSSWRSVADTLRQKVEDAVREHPDYRVVFTGHSLGGALATVAWADLRGNGYDIDVFSYGAPRVGNRAFAEFLTNQTGGTLYRITHTNDIVPRLPPREFGYSHSSPEYWIKSGTLVPVTRNDIVKIEGIDATGGNNQPNIPDIPAHLWYFGRIGTC

SEQ ID NO: 12865 - protein, 268 aa, Thermomyces lanuginosus
EVSQDLFNQFNLFAQYSAAAYCGKNNDAPAGTNITCTGNACPEVEKADATFLYSFEDNGVGDVTGFLALDNTNKLIVLSFRGSRSIENWRGNLNFDLKEINDICSGCRGHDGFTSSWRSVADTLRQKVEDAVREHPDYRVVFTGHSLGGALATVAGADLRGNGYDIDVFSYGAPRVGNRAFAEFLTVQTGGTLYRITHTNDIVPRLPPREFGYSHSSPEYWIKSGTLVPVRRRDIVKIEGIDATGGNNQPNIPDIPAHLWYFGLIGTC

SEQ ID NO: 12866 - protein, 268 aa, Thermomyces lanuginosus
EVSQDLFNQFNLFAQYSAAAYCGKNNDAPAGTQITCTGNACPEVEKADATFLYSFEDSGVGDVTGFLALDNTNKLIVLSFRGSRSIENWIGNLNFDLKEINDICSGCRGHDGFTSSWRSVADTLRQKVEDAVREHPDYRVVFTGHSLGGALATVAGADLRGNGYDIDVFSYGAPRVGNRAFAEFLTVQTGGTLYRITHTNDIVPRLPPREFGYSHSSPEYWIKSGTLVPVRRRDIVKIEGIDATGGNNQPNIPMIPAHLWYFGLIGTC

SEQ ID NO: 12867 - protein, 268 aa, Thermomyces lanuginosus
EVSQDLFNQFNLFAQYSAAAYCGKNNSAPAGTNITCTGNACPEVFKADATFLYSFEDSGVGDVTGFLALDNTRKLIVLSFRGSRSIENWIGNLNFDLKEINDICSGCRGHDGFTSSWRSVADTLRQKVEDAVREHPDYRVVFTGHSLGGALATVAGADLRGNGYDIDVFSYGAPRVGNRAFAEFLTVQQGGTLYRITHTNDIVPRLPPREFGYSHSSPEYWIKSGTLVPVTRNDIVKIEGIDATGGNNQPNIPDIPAHLWYFGLIGTC

SEQ ID NO: 12868 - protein, 268 aa, Synthetic construct
EVSQDLFNQFNLFAQYSAAAYCGKNNDAPAGTNITCTGNACPEVEKADATFLYSFEDSGVGDVTGFLALDNTNKLIVLSFRGSRSIENWFGNLNFLLKKINDICSGCRGHDGFTSSWRSVADTLRQKVEDAVREHPGYRVVFTGHSLGGALATVAGADLRGNGYDIGVFSYGAPRVGNRAFAEFLTAQTGGTLYRITHTNDIVPRLPPREFGYSHSSPEYWIKSGTLVPVTRNDIVKIEGIDATGGNNRPNIPDIPAHLWYFGLIGTC

SEQ ID NO: 12869 - protein, 268 aa, Thermomyces lanuginosus
EVSQDLFNQFNLFAQYSAAAYCGKNNDAPAGTQITCTGNACPEVEKADATFLYSFEDSGVGDVTGFLALDNTNKLIVLSFRGSRSIENWIGNLNFDLKEINDICSGCRGHDGFTSSWRSVADTLRQKVEDAVREHPDYRVVFTGHSLGGALATVAGADLRGNYYDIDVFSYGAPRVGNRAFAEFLTVQTGGTLYRITHTNDIVPRLPPREFGYSHSSPEYWIKSGTLVPVRRRDIVKIEGIDATGGNNQPNIPDIPAHLWYFGLIGTC

SEQ ID NO: 12870 - protein, 268 aa, Thermomyces lanuginosus
EVSRDLFNQFNLFAQYSAAAYCGKNNDAPAGTNITCTGNACPEVEKADATFLYSFEDSGVGDVTGFLALDNTNKLIVLSFRGSRSIENWIGNLNFDLKEINDICSGCRGHDGFTSSWRSVADTLRQKVEDAVREHPDYRVVFAGHSLGGALATVAGADLRGNGYDIDVFSYGAPRVGNRAFAEFLTVQTGGTLYRITHTNDIVPRLPPREFGYSHSSPEYWIKSGTLVPVRRRDIVKIEGIDATGGNNQPNIPDIPAHLWYFGLIGTC

SEQ ID NO: 12871 - protein, 268 aa, Thermomyces lanuginosus
EVSQDLFNQFNLFAQYSAAAYCGKNNDAPTGTQITCTGNACPEVEKADATFLYSFEDSGVGDVTGFLALDNTNKLIVLSFRGSRSIENWIGNLNFDLKEINDICSGCRGHDGFTSSWRSVADTLRQKVEDAVREHPDYRVVFTGHSLGGALATVAGADLRGNGYDIDVFSYGAPRVGNRAFAEFLTVQTGGTLYRITHTNDIVPRLPPREFGYSHSSPEYWIKSGTLVPVRRRDIVKIEGIDATGGNNQPNIPDIPAHLWYFGLIGTC

SEQ ID NO: 12872 - protein, 268 aa, Thermomyces lanuginosus
EVSQDLFNQFNLFAQYSAAAYCQANNDAPAGTNITCTGNACPEVEKADATFLYSFEDSGVGDVTGFLALDNTNKRIVLSFRGSRSIENWIGNLNFDLKEINDICSGCRGHDGFTSSWRSVADTLRQKVEDAVREHPDYRVVFTGHSLGGALATVAWADLRGNGYDIDVFSYGAPRVGNRAFAEFLTVQTGGTLYRITHTNDIVPRLPPREFGYSHSSPEYWIKSGTLVPVTRNDIVKIEGIDATGGNNQPNIPDIPAHLWYFGLIGTC

SEQ ID NO: 12873 - protein, 268 aa, Thermomyces lanuginosus
EVSQDLFNQFNLFAQYSAAAYCGKNNDAPAGTQITCTGNACPEVEKADATFLYSFEDSGVGDVTGFLALDNTNKLIVLSFRGSRSIENWIGNLNFDLKEINDICSGCRGHDGFTSSWRSVADTLRQKVEDAVREHPDYRVVFTGHSLGGALATVAGADLRGNGYDIEVFSYGAPRVGNRAFAEFLTVQTGGTLYRITHTNDIVPRLPPREFGYSHSSPEYWIKSGTLVPVRRRDIVKIEGIDATGGNNQPNIPDIPAHLWYFGLIGTC

SEQ ID NO: 12874 - protein, 268 aa, Thermomyces lanuginosus
EVSQDLFNQFNLFAQYSAAAYCGKNNDAPAGTNITCTGNACPEVEKADATFLYSFRDSGVGDVTGFLALDNTNKLIVLSFRGSRSIKNWIGNLNFLLKEINDICSGCRGHDGFTSSWRSVADTLRQKVEDAVREHPDYRVVFTGHSLGGALATVAGADLRGNGYDIDVFSYGAPRVGNRAFAEFLTVQTGGTLYRITHTNDIVPRLPPREFGYSHSSPEYWIKSGTLVPVRRRDIVKIEGIDATGGNNQPNIPDIPAHLWYFGLIGTC

SEQ ID NO: 12875 - protein, 268 aa, Thermomyces lanuginosus
EVSQDLFNQFNLFAQYSAAAYCGKNNDAPAGTNITCTGNACPEVEKADATFLYSFEDSGVGDVTGFLALDNTNKLIVLSFRGSRSIENWIGNLNFDLKEINDICSGCRGHAGFTSSWRSVADTLRQKVEAAVREHPDYRVVFTGHSLGGALATIAWADLRGNGYDIDVFSYGAPRVGNRAFAEFLTVQTGGTLYRITHTNDIVPRLPPREFGYSHSSPEYWIKSGTLVPVTRNDIVKIEGIDATGGNNQPNIPDIPAHLWYFGLIGTC

SEQ ID NO: 12876 - protein, 268 aa, Thermomyces lanuginosus
EVSQDLFNQFNLFAQYSAAAYCGKNNDAPAGTQITCTGNACPEVEKADATFLYSFEDSGVGDVTGFLALDNTNKLIVLSFRGSRSIENWIMNLNFDLKEINDICSGCRGHDGFTSSWRSVADTLRQKVEDAVREHPDYRVVFTGHSLGGALATVAGADLRGNTYDIDVFSYGAPRVGNRAFAEFLTVQTGGTLYRITHTNDIVPRLPPREFGYSHSSPEYWIKSGTLVPVRRRDIVKIEGIDATGGNNQPNIPDIPAHLWYFGLIGTC

SEQ ID NO: 12877 - protein, 268 aa, Thermomyces lanuginosus
EVSQDLFNQFNLFAQYSAAAYCGKNNDAPAGTQITCTGNACPEVEKADATFLYSFEDSGVGDVTGFLALDNTNKLIVLSFRGSRSIENWIGNLNFDLKEINDICSGCRGHDGFTSSWRSVADTLRQKVEDAVREHPDYRVVFTGHSLGGALATVAGADLRGNCYDIDVFSYGAPRVGNRAFAEFLTVQTGGTLYRITHTNDIVPRLPPREFGYSHSSPEYWIKSGTLVPVRRRDIVKIEGIDATGGNNQPNIPDIPAHLWYFGLIGTC

SEQ ID NO: 12878 - protein, 268 aa, Thermomyces lanuginosus
EVSQDLFNQFNLFAQYSAAAYCQKNNDAPAGTNITCTGNACPEVEKADATFLYSFEDSGVGDVTGFLALDNTNKQIVLSFRGSRSIENWIGNLNFDLKEINDICSGCRGHDGFTSSWRSVADTLRQKVEAAVREHPDYRVVFTGHSLGGALATVAGADLRGNGYDIDVFSYGAPRVGNRAFAEFLTVQTGGTLYRITHTNDIVPRLPPREFGYSHSSPEYWIKSGTLVPVTRNDIVKIEGIDATGGNNQPNQPDIPAHLWYFGRIGTC

SEQ ID NO: 12879 - protein, 268 aa, Thermomyces lanuginosus
EVSDDLFNQFKLFAQYSAAAYCGKNNDAPAGTNITCTGNACPEVEKADATFLYSFKDMGVGDVTGFLALDNTNKLIVLSFRGSRSIENWIGNLNFDLKEINDICSGCRGHDGFTSSWRSVADTLRQKVEDAVREHPDYRVVFTGHSLGGALATVAGADLRGNGYDIDVFSYGAPRVGNRAFAEFLTVQTGGTLYRITHTNDIVPRLPPREFGYSHSSPEYWIKSGTLVPVTRNDIVKIEGIDATGGNNQPNIPDIPAHLWYFGLIGTC

SEQ ID NO: 12880 - protein, 268 aa, Thermomyces lanuginosus
EVSQDLFNQFNLFAQYSAAAYCGKNNDAPAGTNITCTGNACPEVEKADATFLYSFEDSGVGDVTGFLALDNTNKLIVLSFRGSRSVENWIGNLNFDLKEINDICSGCRGHDGFTSSWRSVADTLRQKVEDAVREHPDYRVVFTGHSLGGALATVAGADLRGNGYDIDVFSYGAPRVGNRAFAEFLTVQTGGTLYRITHTNDIVPRLPPREFGYSHSSPEYWIKSGTGVPVRRNDIVKIEGIDATGGNNQPNIPDIKAHLWYFGLIGTC

SEQ ID NO: 12881 - protein, 268 aa, Thermomyces lanuginosus
EVSDDLFNQFKLFAQYSAAAYCGKNNSAPAGTNITCTGNACPEVEKADATFLYSFEDSGVGDVTGFLALDNTNKLIVLSFRGSRSIENWIGNLNFDLKEINDICSGCRGHDGFTSSWRSVADTLRQKVEDAVREHPDYRVVFTGHSLGGALATVAGADLRGNGYDIDVFSYGAPRVGNRAFAEFLTVQTGGTLYRITHTNDIVPRLPPREFGYSHSSPEYWIKSGTLVPVTRNDIVKIEGIDATGGNNQPNIPDITAHLWYFGLIGTC

SEQ ID NO: 12882 - protein, 268 aa, Thermomyces lanuginosus
EVSQDLFNQFNLFAQYSAAAYCKKNNDAPAGTNITCTGNACPEVEKADATFLYSFKDSGVGDVTGFLALDNTNKLIVLSFRGSRSIENWIGNLNFDLKEINDICSGCRGHDGFTSSWRSVADTLRQKVEAAVREHPDYRVVFTGHSLGGALATVAGADLRGNGYDIDVFSYGAPRVGNRAFAEFLTNQTGGTLYRITHTNDIVPRLPPREFGYSHSSPEYWIKSGTLVPVTRNDIVKIEGIDATGGNNQPNIPDIPAHLWYFGRIGTC

SEQ ID NO: 12883 - protein, 268 aa, Thermomyces lanuginosus
EVSQDLFNQFNLFAQYSAAAYCKKNNDAPAGTNITCTGNACPEVEKADATFLYSFEDSGVGDVTGFLALDNTNKQIVLSFRGSRSIENWIGNLNFDLKEINDICSGCRGHDGFTSSWRSVADTLRQKVEDAVREHPDYRVVFTGHSLGGALATVAGADLRGNGYDIDVFSYGAPRVGNRAFAEFLTHQTGGTLYRITHTNDIVPRLPPREFGYSHSSPEYWIKSGTLVPVTRNDIVKIEGIDATGGNNQPNQPDIPAHLWYFGRIGTC

SEQ ID NO: 12884 - protein, 268 aa, Thermomyces lanuginosus
EVSQDLFNQFNLFAQYSAAAYCGKNNDAPAGTQITCTGNACPEVEKADATFLYSFEDSGVGDVTGFLALDNTNKLIVLSFRGSRSIENWIGNLNFDLKEINDICSGCRGHDGFTSSWRSVADTLRQKVEDAVREHPDYRVVFTGHSLGGALATVAGADLRGNGYDIDVFSYGAPRVGNRAFAEFLTVQTGGTLYRITHTNDIVPRLPPRRFGYSHSSPEYWIKSGTLVPVRRRDIVKIEGIDATGGNNQPNIPDIPAHLWYFGLIGTC

SEQ ID NO: 12885 - protein, 268 aa, Thermomyces lanuginosus
EVSQDLFNQFHLFAQYSAAAYCGKNNDAPAGTQITCTGNACPEVEKADATFLYSFEDSGVGDVTGFLALDNTNKLIVLSFRGSRSIENWIGNLNFDLKEINDICSGCRGHDGFTSSWRSVADTLRQKVEDAVREHPDYRVVFTGHSLGGALATVAGADLRGNGYDIDVFSYGAPRVGNRAFAEFLTVQTGGTLYRITHTNDIVPRLPPREFGYSHSSPEYWIKSGTLVPVRRRDIVKIEGIDATGGNNQPNIPDIPAHLWYFGLIGTC

SEQ ID NO: 12886 - protein, 268 aa, Thermomyces lanuginosus
EVSQDLFNQFNLFAQYSAAAYCQANNDAPAGTNITCTGNACPEVEKADATFLYSFEDSGVGDVTGFLALDNTNKLIILSFRGSRSIENWIGNLNFDLKEINDICSGCRGHDGFTSSWRSVADTLRQKVEDAVREHPDYRVVFTGHSLGGALATVAWADLRGNGYDIDVFSYGAPRVGNRAFAEFLTVQTGGTLYRITHTNDIVPRLPPREFGYSHSSPEYWIKSGTLVPVTRNDIVKIEGIDATGGNNQPNIPDIPAHLWYFGLIGTC

SEQ ID NO: 12887 - protein, 268 aa, Thermomyces lanuginosus
EVSQDLFNQFNLFAQYSAAAYCGKNNDAPAGTNITCTGNACPEVEKADATFLYSFSDSGVGDVTGFLALDNTNKLIVLSFRGSRSIKNWIGNLNFLLKDINDICSGCRGHDGFTSSWRSVADTLRQKVEDAVREHPDYRVVFTGHSLGGALATVAGADLRGNGYDIDVFSYGAPRVGNRAFAEFLTVQTGGTLYRITHTNDIVPRLPPREFGYSHSSPEYWIKSGTLVPVRRRDIVKIEGIDATGGNNQPNIPDIPAHLWYFGLIGTC

SEQ ID NO: 12888 - protein, 268 aa, Thermomyces lanuginosus
EVSQDLFNQFNLFAQYSAAAYCGKNNDAPAGTQITCTGNACPEVEKADATFLYSFEDSGVGDVTGFLALDNTNKLIVLSFRGSRSIENWIMNLNFDLKEINDICSGCRGHDGFTSSWRSVADTLRQKVEDAVREHPDYRVVFTGHSLGGALATVAGADLRENGYDIDVFSYGAPRVGNRAFAEFLTVQTGGTLYRITHTNDIVPRLPPREFGYSHSSPEYWIKSGTLVPVRRRDIVKIEGIDATGGNNQPNIPDIPAHLWYFGLIGTC

SEQ ID NO: 12889 - protein, 268 aa, Thermomyces lanuginosus
EVSQDLFNQFNLFAQYSKAAYCGKNNDAPAGTNITCTGNACPEVFKADATFLYSFEDSGVGDVTGFLALDNTNKQIVLSFRGSRSIENWIGNLNFDLKEINDICSGCRGHDGFTSSWRSVADTLRQKVEDAVREHPDYRVVFTGHSLGGALATVAGADLRGNGYDIDVFSYGAPRVGNRAFAEFLTVQDGGTLYRITHTNDIVPRLPPREFGYSHSSPEYWIKSGTLVPVTRNDIVKIEGIDATGGNNQPNIPDIPAHLWYFGLIGTC

SEQ ID NO: 12890 - protein, 268 aa, Thermomyces lanuginosus
EVSQDLFNQFNLFAQYSAAAYCGKNNDAPAGTQITCTGNACPEVEKADATFLYSFEDSGVGDVTGFLALDNTNKLIVLSFRGSRSIENWIGNLNFDLKEINDICSGCRGHDGFTSSFRSVADTLRQKVEDAVREHPDYRVVFTGHSLGGALATVAGADLRGNGYDIDVFSYGAPRVGNRAFAEFLTVQTGGTLYRITHTNDIVPRLPPREFGYSHSSPEYWIKSGTLVPVRRRDIVKIEGIDATGGNNQPNIPDIPAHLWYFGLIGTC

SEQ ID NO: 12891 - protein, 268 aa, Thermomyces lanuginosus
EVSQDLFNQFNLFAQYSAAAYCGKNNDAPAGTNITCTGNACPMVEKADATFLYSFEDSGVGDVTGFLALDNTNKLIVLSFRGSRSIKNWIGNLNFLLKPINDICSGCRGHDGFTSSWRSVADTLRQKVEDAVREHPDYRVVFTGHSLGGALATVAGADLRGNGYDIDVFSYGAPRVGNRAFAEFLTVQTGGTLYRITHTNDIVPRLPPREFGYSHSSPEYWIKSGTLVPVRRRDIVKIEGIDATGGNNQPNIPDIPAHLWYFGLIGTC

SEQ ID NO: 12892 - protein, 268 aa, Thermomyces lanuginosus
EVSQDLFNQFKLFAQYSAAAYCGKNNDAPAGTNITCTGNACPEVEKADATFLYSFKDMGVGDVTGFLALDNTNKLIVLSFRGSRSIENWIGNLNFDLKEINDICSGCRGHDGFTSSWRSVADTLRQKVEDAVREHPDYRVVFTGHSLGGALATVAGADLRGNGYDIDVFSYGAPRVGNRAFAEFLTVQTGGTLYRITHTNDIVPRLPPREFGYSHSSPEYWIKSGTLVPVTRNDIVKIEGIDATGGNNQPNIPDITAHLWYFGLIGTC

SEQ ID NO: 12893 - protein, 268 aa, Thermomyces lanuginosus
EVSQDLFNQFNLFAQYSAAAYCGKNNDAPAGTNITCTGNACPEVEKADATFLYSFEDSGVGDVTGFLALDNTNKLIVLSFRGSRSIENWIGNLNFDLKEINDICSGCRGHDGFTSSWRSVADTLRQKVEAAVREHPDYRVVFTGHSLGGALATVAGADLRGNPYDIDVFSYGAPRVGNRAFAEFLTVQTGGTLYRITHTNDIVPRLPPREFGYSHSSPEYWIKSGTMVPVTRQDIVKIEGIDATGGNNQPNIPDIPAHLWYFGRIGTC

SEQ ID NO: 12894 - protein, 268 aa, Thermomyces lanuginosus
EVSQDLFNQFNLFAQYSAAAYCGKNNDAPAGTNITCTGNACPEVEKADATFLYSFEDSGVGDVTGFLALDNTNKQIVLSFRGSRSIENWIGNLNFDLKEINDICSGCRGHDGFTSSWRSVADTLRQKVEDAVREHPDYRVVFTGHSLGGALATIAGADLRGNGYDIDVFSYGAPRVGNRAFAEFLTNQQGGTLYRITHTNDIVPRLPPREFGYSHSSPEYWIKSGTLVPVTRNDIVKIEGIDATGGNNQPNIPDIPAHLWYFGRIGTC

SEQ ID NO: 12895 - protein, 268 aa, Thermomyces lanuginosus
EVSQDLFNQFNLFAQYSAAAYCQQNNDAPAGTNITCTGNACPEVEKADATFLYSFEDSGVGDVTGFLALDNTNKLIVLSFRGSRSIENWIGNLNFDLKEINDICSGCRGHDGFTSSWRSVADTLRQKVEAAVREHPDYRVVFTGHSLGGALATVAWADLRGNGYDIDVFSYGAPRVGNRAFAEFLTVQTGGTLYRITHTNDIVPRLPPREFGYSHSSPEYWIKSGTLVPVTRNDIVKIEGIDATGGNNQPNIPDIPAHLWYFGLIGTC

SEQ ID NO: 12896 - protein, 268 aa, Thermomyces lanuginosus
EVSQDLFNQFNLFAQYSAAAYCGKNNDAPAGTQITCTHNACPEVEKADATFLYSFEDSGVGDVTGFLALDNTNKLIVLSFRGSRSIENWIGNLNFDLKEINDICSGCRGHDGFTSSWRSVADTLRQKVEDAVREHPDYRVVFTGHSLGGALATVAGADLRGNGYDIDVFSYGAPRVGNRAFAEFLTVQTGGTLYRITHTNDIVPRLPPREFGYSHSSPEYWIKSGTLVPVRRRDIVKIEGIDATGGNNQPNIPDIPAHLWYFGLIGTC

SEQ ID NO: 12897 - protein, 268 aa, Thermomyces lanuginosus
EVSQDLFNQFNLFAQYSAAAYCGKNNDAPAGTQITCTQNACPEVEKADATFLYSFEDSGVGDVTGFLALDNTNKLIVLSFRGSRSIENWIGNLNFDLKEINDICSGCRGHDGFTSSWRSVADTLRQKVEDAVREHPDYRVVFTGHSLGGALATVAGADLRGNGYDIDVFSYGAPRVGNRAFAEFLTVQTGGTLYRITHTNDIVPRLPPREFGYSHSSPEYWIKSGTLVPVRRRDIVKIEGIDATGGNNQPNIPDIPAHLWYFGLIGTC

SEQ ID NO: 12898 - protein, 268 aa, Thermomyces lanuginosus
EVSQDLFNQFNLFAQYSAAAYCGKNNDAPAGTQITCTGNACPEVEKADATFLYSFEDSGVGDVTGFLALDNTNKLIVLSFRGSRSIENWIGNLNFDLKEINDICSGCRGHDGFTSSWRSVADTLRQKVEHAVREHPDYRVVFTGHSLGGALATVAGADLRGNGYDIDVFSYGAPRVGNRAFAEFLTVQTGGTLYRITHTNDIVPRLPPREFGYSHSSPEYWIKSGTLVPVRRRDIVKIEGIDATGGNNQPNIPDIPAHLWYFGLIGTC

SEQ ID NO: 12899 - protein, 268 aa, Thermomyces lanuginosus
EVSRDLFNQFNLFAQYSAAAYCGKNNDAPAGTNITCTGNACPEVEKADATILYSFEDSGVGDVTGFLALDNTNKLIVLSFRGSRSIENWIGNLNFDLKEINDICSGCRGHDGFTSSWRSVADTLRQKVEDAVREHPDYRVVFTGHSLGGALATVAGADLRGNGYDIDVFSYGAPRVGNRAFAEFLTVQTGGTLYRITHTNDIVPRLPPREFGYSHSSPEYWIKSGTLVPVRRRDIVKIEGIDATGGNNQPNIPDIPAHLWYFGLIGTC

SEQ ID NO: 12900 - protein, 268 aa, Thermomyces lanuginosus
EVSQDLFNQFNLFAQYSAAAYCGKNNDAPAGTNITCTGNACPEVEKADATFLYSFEDSGVGDVTGFLALDNTNKRIVLSFRGSRSIENWIGNLNFDLKEINDICSGCRGHDGFTSSWRSVADTLRQKVEAAVREHPDYRVVFTGHSLGGALATVAGADLRGNGYDIDVFSYGAPRVGNRAFAEFLTTQQGGTLYRITHTNDIVPRLPPREFGYSHSSPEYWIKSGTLVPVTRNDIVKIEGIDATGGNNQPNIPDIPAHLWYFGRIGTC

SEQ ID NO: 12901 - protein, 268 aa, Thermomyces lanuginosus
EVSQDLFNQFNLFAQYSAAAYCGKNNDAPAGTNITCTGNACPEVEKADATFLYSFKDSGVGDVTGFLALDNTNKLIVLSFRGSRSIENWIGNLNFGLKEINDICSGCRGHAGFTSSWRSVADTLRQKVEDAVREHPDYRVVFTGHSLGGALATVAGADLRGNGYDIDVFSYGAPRVGNRAFAEFLTVQTGGTLYRITHTNDIVPRLPPREFGYSHSSPEYWIKSGTLVPVRRRDIVKIEGIDATGGNNQPNIPDIPAHLWYFGLIGTC

SEQ ID NO: 12902 - protein, 268 aa, Thermomyces lanuginosus
EVSQDLFNQFNLFAQYSAAAYCGKNNDAPAGTNITCTGNACPEVEKADVTFLYSFEDSGVGDVTGFLALDNTNKQIVLSFRGSRSIENWIGNLNFDLKEINDICSGCRGHDGFTSSWRSVADTLRQKVEDAVREHPDYRVVFTGHSLGGALATVAGADLRGNGYDIDVFSYGAPRVGNRAFAEFLTTQDGGTLYRITHTNDIVPRLPPREFGYSHSSPEYWIKSGTLVPVTRNDIVKIEGIDATGGNNQPNIPDIPAHLWYFGLIGTC

SEQ ID NO: 12903 - protein, 268 aa, Thermomyces lanuginosus
EVSQDLFNQFNLFAQYSAAAYCGKNNDAPAGTQITCTGNACPEVEKADATFLYSFEDSGVGDVTGFLALDNTNKLIVLSFRGSRSIENWIGNLNFDLKEINDICSGCRGHDGFTSSWRSVADTLRQKVEDAVREHPDYRVVFTGHSLGGALATVAGADLRGNGYDIDVFSYGAPRVGNRAFAEFLTVQTGGTLYRITHTNDIVPRLPPREFGYSHSSPEYWIKSGTLVPVRRRDIVKIEGIDATGGNNQPQIPDIPAHLWYFGLIGTC

SEQ ID NO: 12904 - protein, 268 aa, Thermomyces lanuginosus
EVSQDLFNQFNLFAQYSAAAYCGKNNDAPAGTNITCTGNACPEVEKADATFLYSFEDSGVGDVTGFLALDNTNKLIVLSFRGSRSIENWIGNLNFDLKEINDICSGCRGHDGFTSSWRSVADTLRQKVEDAVREHPDYRVVFAGHSLGGALATVAGADLRGNGYDIDVFSYGAPRVGNRAFAEFLTVQTGGTLYRITHTNDIVPRLPPREFGYSHSSPEYWIKSGTLRPVRRRDIVKIEGIDATGGNNQPNIPDIPAHLWYFGLIGTC

SEQ ID NO: 12905 - protein, 268 aa, Thermomyces lanuginosus
EVSQDLFNQFNLFAQYSKAAYCGKNNDAPAGTNITCTGNACPEVEKADATFLYSFEDSGVGDVTGFLALDNTNKQIVLSFRGSRSIENWIGNLRFDLKEINDICSGCRGHDGFTSSWRSVADTLRQKVEDAVREHPDYRVVFTGHSLGGALATVAWADLRGNGYDIDVFSYGAPRVGNRAFAEFLTVQTGGTLYRITHTNDIVPRLPPREFGYSHSSPEYWIKSGTLVPVTRNDIVKIEGIDATGGNNQPNIPDIPAHLWYFGLIGTC

SEQ ID NO: 12906 - protein, 268 aa, Thermomyces lanuginosus
EVSQDLFNQFNLFAQYSAAAYCGKNNDAPAGTQITCTGNACPEVEKADATFLYSFEDSGVGDVTGFLALDNTNKLIVLSFRGSRSIENWIGNLNFDLKEINDICSGCRGHDGFTSSWRSVADTLRQKVEDAVREHPDYRVVFTGHSLGGALATVAGADLRGNGYDIDVFSYGAPRVGNRAFAEFLTVQTGGTLYRITHTNDIVPRLPPREFGYSHSSPEYWIKSGTLVPVRRRDIVKIEGIDATGGNNQPNIPRIPAHLWYFGLIGTC

SEQ ID NO: 12907 - protein, 268 aa, Thermomyces lanuginosus
EVSQDLFNQFNLFAQYSKAAYCGKNNDAPAGTNITCTGNACPEVEKADATFLYSFEDSGVGDVTGFLALDNTNKQIVLSFRGSRSIENWIGNLRFDLKEINDICSGCRGHAGFTSSWRSVADTLRQKVEDAVREHPDYRVVFTGHSLGGALATVAGADLRGNGYDIDVFSYGAPRVGNRAFAEFLTVQTGGTLYRITHTNDIVPRLPPREFGYSHSSPEYWIKSGTLVPVTRNDIVKIEGIDATGGNNQPNIPDIPAHLWYFGLIGTC

SEQ ID NO: 12908 - protein, 268 aa, Thermomyces lanuginosus
EVSQDLFNQFNLFAQYSAAAYCGKNNSAPAGTNITCTGNACPEVEKADATFLYSFEDSGVGDVTGFLALDNTNKRIVLSFRGSRSIENWIGNLNFDLKEINDICSGCRGHDGFTSSWRSVADTLRQKVEDAVREHPDYRVVFTGHSLGGALATTAGADLRGNGYDIDVFSYGAPRVGNRAFAEFLTVQQGGTLYRITHTNDIVPRLPPREFGYSHSSPEYWIKSGTLVPVTRNDIVKIEGIDATGGNNQPNIPDIPAHLWYFGRIGTC

SEQ ID NO: 12909 - protein, 268 aa, Thermomyces lanuginosus
EVSQDLFNQFNLFAQYSAAAYCGKNNDAPAGTNITCTGNACPEVEKAQATFLYSFEDSGVGDVTGFLALDNTNKLIVLSFRGSRSIENWIGNLNFDLKEINDICSGCRGHDGFTSSWRSVADTLRQKVEDAVREHPQYRVVFTGHSLGGALATVAGADLRGNPYDIDVFSYGAPRVGNRAFAEFLTVQTGGTLYRITHTNDIVPRLPPREFGYSHSSPEYWIKSGTLVPVTRQDIVKIEGIDATGGNNQPNIPDIPAHLWYFGRIGTC

SEQ ID NO: 12910 - protein, 268 aa, Thermomyces lanuginosus
EVSQDLFNQFNLFAQYSAAAYCGKNNDAPAGTQITCTGNACPEVEKADATFLYSFEDSGVGDVTGFLALDNTNKLIVLSFRGSRSIENWIGNLNFDLKEINDICSGCRGHDGFTSSKRSVADTLRQKVEDAVREHPDYRVVFTGHSLGGALATVAGADLRGNGYDIDVFSYGAPRVGNRAFAEFLTVQTGGTLYRITHTNDIVPRLPPREFGYSHSSPEYWIKSGTLVPVRRRDIVKIEGIDATGGNNQPNIPDIPAHLWYFGLIGTC

SEQ ID NO: 12911 - protein, 268 aa, Synthetic construct
EVSQDLFNQFNLFAQYSAAAYCGKNNDAPAGTNITCTGNACPEVEKADATFLYSFEDSGVGDVTGFLALDNTNKLIVLSFRGSRSIENWIGNLKFLLKKINDICSGCRGHNGFTSSWRSVADTLRQKVEDAVREHPDYRVVFTGHSLGGALATVAGADLRGNGYDIDVFSYGAPRVGNRAFAEFLTVQTGGTLYRITHTNDIVPRLPPREAGYSHSSPEYWIKSPTLVPVTRNDIVKIEGIDATGGNNRPNIPDIPAHLWYFGLIGRC

SEQ ID NO: 12912 - protein, 268 aa, Thermomyces lanuginosus
EVSQDLFNQFNLFAQYSAAAYCGKNNDAPAGTNITCTGNACPEVEKADATFLYSFCDSGVGDVTGFLALDNTNKLIVLSFRGSRSIKNWIGNLNFDLKEINDICSGCRGHDGFTSSWRSVADTLRQKVEDAVREHPDYRVVFTGHSLGGALATVAGADLRGNGYDIDVFSYGAPRVGNRAFAEFLTVQTGGTLYRITHTNDIVPRLPPREFGYSHSSPEYWIKSGTLVPVRRRDIVKIEGIDATGGNNQPNIPDIPAHLWYFGLIGTC

SEQ ID NO: 12913 - protein, 268 aa, Thermomyces lanuginosus
EVSQDLFNQFNLFAQYSAAAYCGKNNDAPAGTQITCTGNACPEVEKADATFLYSFEDSGVGDVTGFLALDNTNKLIVLSFRGSRSIENWIGNLNFDLKEINDICSGCRGHDGFTSSWRSVADTLRQKVEDAVREHPDYRVVFTGHSLGGALATVAGADLRGNGYDIDVFSYGAPRVGNRAFAEFLTVQTGGTLYRITHTNDIVPRLPPREFGYSHSSPEYWIKSGTLVRVRRRDIVKIEGIDATGGNNQPNIPDIPAHLWYFGLIGTC

SEQ ID NO: 12914 - protein, 268 aa, Thermomyces lanuginosus
EVSQDLFNQFNLFAQYSAAAYCGKNNDAPAGTNITCTGNACPEVEKADATTLYSFEDSGVGDVTGFLALDNTNKGIVLSFRGSRSIENWIQNLNFDLKEINDICSGCRGHDGFTSSWRSVADTLRQKVEAAVREHPDYRVVFTGHSLGGALATVAGADLRGNGYDIDVFSYGAPRVGNRAFAEFLTVQTGGTLYRITHTNDIVPRLPPREFGYSHSSPEYWIKSGTLVPVTRNDIVKIEGIDATGGNNQPNQPDIPAHLWYFGRIGTC

SEQ ID NO: 12915 - protein, 268 aa, Thermomyces lanuginosus
EVSQDLFNQFNLFAQYSAAAYCGKNNDAPAGTNITCTGNACPEVEKADATFLYSFEDSGVGDVTGFLALDNTNKQIVLSFRGSRSIENWIGNLNFDLKEINDICSGCRGHDGFTSSWRSVADTLRQKVEAAVREHPDYRVVFTGHSLGGALATVAWADLRGNGYDIDVFSYGAPRVGNRAFAEFLTNQTGGTLYRITHTNDIVPRLPPREFGYSHSSPEYWIKSGTLVPVTRNDIVKIEGIDATGGNNQPNIPDIPAHLWYFGLIGTC

SEQ ID NO: 12916 - protein, 268 aa, Thermomyces lanuginosus
EVSQDLFNQFNLFAQYSKAAYCGKNNDAPAGTNITCTGNACPEVEKADATFLYSFEDSGVGDVTGFLALDNTRKDIVLSFRGSRSIENWIGNLNFDLKEINDICSGCRGHDGFTSSWRSVADTLRQKVEDAVREHPDYRVVFTGHSLGGALATVAGADLRGNGYDIDVFSYGAPRVGNRAFAEFLTVQDGGTLYRITHTNDIVPRLPPREFGYSHSSPEYWIKSGTLVPVTRNDIVKIEGIDATGGNNQPNIPDIPAHLWYFGLIGTC

SEQ ID NO: 12917 - protein, 268 aa, Thermomyces lanuginosus
EVSQDLFNQFNLFAQYSAAAYCGANNDAPAGTNITCTGNACPEVEKADATFLYSFEDSGVGDVTGFLALDNTNKQIVLSFRGSRSIENWIGNLNFDLKEINDICSGCRGHDGFTSSWRSVADTLRQKVEAAVREHPDYRVVFTGHSLGGALATIAGADLRGNGYDIDVFSYGAPRVGNRAFAEFLTVQTGGTLYRITHTNDIVPRLPPREFGYSHSSPEYWIKSGTLVPVTRNDIVKIEGIDATGGNNQPNIPDIPAHLWYFGLIGTC

SEQ ID NO: 12918 - protein, 268 aa, Thermomyces lanuginosus
EVSQDLFNQFNLFAQYSAAAYCGKNNSAEAGTDITCTGNACPEVEKADATFLYSFEDSGVGDVTGFLALDNTNKLIVLSFRGSRSIENWIGNLNFDLKEINDICSGCRGHDGFTSSWRSVADTLRQKVEDAVREHPDYRVVFTGHSLGGALATVAGADLRGNGYDIDVFSYGAPRVGNRAFAEFLTVQDGGTLYRITHTNDIVPRLPPREFGYSHSSPEYWIKSGTLVPVTRNDIVKIEGIDATGGNNQPNIPDIPAHLWYFGLIGTC

SEQ ID NO: 12919 - protein, 268 aa, Thermomyces lanuginosus
EVSQDLFNQFNLFAQYSAAAYCQKNNDAPAGTNITCTGNACPEVEKADATTLYSFEDSGVGDVTGFLALDNTNKQIVLSFRGSRSIENWIQNLNFDLKEINDICSGCRGHDGFTSSWRSVADTLRQKVEDAVREHPDYRVVFTGHSLGGALATVAGADLRGNGYDIDVFSYGAPRVGNRAFAEFLTVQTGGTLYRITHTNDIVPRLPPREFGYSHSSPEYWIKSGTLVPVTRNDIVKIEGIDATGGNNQPNQPDIPAHLWYFGLIGTC

SEQ ID NO: 12920 - protein, 268 aa, Thermomyces lanuginosus
EVSQDLFNQFNLFAQYSKAAYCGKNNDAEAGTNITCTGNACPEVEKADATFLYSFEDSGVGDVTGFLALDNTRKDIVLSFRGSRSIENWIGNLNFDLKEINDICSGCRGHDGFTSSWRSVADTLRQKVEDAVREHPDYRVVFTGHSLGGALATVAGADLRGNGYDIDVFSYGAPRVGNRAFAEFLTVQTGGTLYRITHTNDIVPRLPPREFGYSHSSPEYWIKSGTLVPVTRNDIVKIEGIDATGGNNQPNIPDIPAHLWYFGLIGTC

SEQ ID NO: 12921 - protein, 268 aa, Thermomyces lanuginosus
EVSQDLFNQFNLFAQYSAAAYCGKNNDAPAGTNITCTGNACPEVEKADATFLYSFEDSGVGDVTGFLALDNTNKLIVLSFRGSRSIENWIGNLNFDLKEINDICSGCRGHDGFTSSWRSVADTLRQKVEAAVREHPQYRVVFTGHSLGGALATVAGADLRGNPYDIDVFSYGAPRVGNRAFAEFLTVQTGGTLYRITHTNDIVPRLPPREFGYSHSSPEYWIKSGTLVPVTRQDIVKIEGIDATGGNNQPNIPDIPAHLWYFGRIGTC

SEQ ID NO: 12922 - protein, 268 aa, Thermomyces lanuginosus
EVSRDLFNQFNLFAQYSAAAYCGKNNDAPAGTNITCTGNACPEVEKADATFLYSFEDSGVGDVTGFLALDNTNKLIVLSFRGSRSIENWIGNLNFDLKEINDICSGCRGHDGFTSSWRSVADTLRQKVEDAVREHPDYRVVFTGHSLGGALATVAGADLRGNGYDIDVFSYGAPRVGNRAFAEFLTVQTGGTLYRITHTNDIVPRLPPREFGYSHSSPEYWIKSGTLVPVRRRDIVKIEGIDATGGNNQPNIPDITAHLWYFGLIGTC

SEQ ID NO: 12923 - protein, 268 aa, Thermomyces lanuginosus
EVSQDLFNQFNLFAQYSAAAYCGKNNDAPAGTNITCTGNACPEVEKADATFLYSFEDSGVGDVTGFLALDNTNKLIVLSFRGSRSIENWIGNLNFDLKEINDICSGCRGHDGFTSSWRSVADTLRQKVEDAVREHPDYRVVFTGHSLGGALATVAGADLRGNGYDIDVFSYGAPRVGNRAFAEFLTVQTGGTLYRITHTNDIVPRLPPRQFGYSHSSPEYWIKSGTLVPVRRRDIVKIEGIDATGGNNQPNIPDISAHLWYFGLIGTC

SEQ ID NO: 12924 - protein, 268 aa, Thermomyces lanuginosus
EVSQDLFNQFNLFAQYSKAAYCGKNNDAPAGTNITCTGNACPEVEKADVTFLYSFEDSGVGDVTGFLALDNTNKQIVLSFRGSRSIENWIGNLNFDLKEINDICSGCRGHDGFTSSWRSVADTLRQKVEDAVREHPDYRVVFTGHSLGGALATVAGADLRGNGYDIDVFSYGAPRVGNRAFAEFLTVQDGGTLYRITHTNDIVPRLPPREFGYSHSSPEYWIKSGTLVPVTRNDIVKIEGIDATGGNNQPNIPDIPAHLWYFGLIGTC

SEQ ID NO: 12925 - protein, 268 aa, Thermomyces lanuginosus
EVSQDLFNQFNLFAQYSAAAYCGKNNDAPAGTQITCTGNACPEVEKADATFLYSFEDSGVGDVTGFLALDNTNKLIVLSFRGSRSIENWIGNLNFDLKEINDICSGCRGHDGFTSSWRSVADTLRQKVEDAVREHPDYRVVFTGHSLGGALATVAGADLRGGGYDIDVFSYGAPRVGNRAFAEFLTVQTGGTLYRITHTNDIVPRLPPREFGYSHSSPEYWIKSGTLVPVRRRDIVKIEGIDATGGNNQPNIPDIPAHLWYFGLIGTC

SEQ ID NO: 12926 - protein, 268 aa, Thermomyces lanuginosus
EVSQDLFNQFNLFAQYSAAAYCGKNNDAPAGTQITCTGNACPEVEKADATFLYSFEDSGVGDVTGFLALDNTNKLIVLSFRGSRSIENWIGNLNFNLKEINDICSGCRGHDGFTSSWRSVADTLRQKVEDAVREHPDYRVVFTGHSLGGALATVAGADLRGNGYDIDVFSYGAPRVGNRAFAEFLTVQTGGTLYRITHTNDIVPRLPPREFGYSHSSPEYWIKSGTLVPVRRRDIVKIEGIDATGGNNRPNIPDIPAHLWYFGLIGTC

SEQ ID NO: 12927 - protein, 268 aa, Thermomyces lanuginosus
EVSQDLFNQFNLFAQYSAAAYCGKNNDAPAGTNITCTGNACPEVEKADATILYSFEDSGVGDVTGFLALDNTNKLIVLSFRGSRSIENWIGNLNFELKEINDICSGCRGHDGFTSSWRSVADTLRQKVEDAVREHPDYRVVFTGHSLGGALATVAGADLRGNGYDIDVFSYGAPRVGNRAFAEFLTVQTGGTLYRITHTNDIVPRLPPREFGYSHSSPEYWIKSGTLVPVRRRDIVKIEGIDATGGNNQPNIPSIPAHLWYFGLIGTC

SEQ ID NO: 12928 - protein, 268 aa, Thermomyces lanuginosus
EVSQDLFNQFNLFAQYSAAAYCGKNNEAPAGTNITCTGNACPEVEKADATFLYSFEDSGVGDVTGFLALDNTNKLIVLSFRGSRSIENWIGNLNFDLKEINDICSGCRGHDGFTSSWRSVADTLRQKVEAAVREHPQYRVVFTGHSLGGALATVAGADLRGNPYDIDVFSYGAPRVGNRAFAEFLTVQTGGTLYRITHTNDIVPRLPPREFGYSHSSPEYWIKSGTLVPVTRNDIVKIEGIDATGGNNQPNIPDIPAHLWYFGRIGTC

SEQ ID NO: 12929 - protein, 268 aa, Thermomyces lanuginosus
EVSQDLFNQFNLFAQYSKAAYCGKNNDAPAGTNITCTGNACPEVEKADVTFLYSFEDSGVGDVTGFLALDNTNKQIVLSFRGSRSIENWIGNLNFDLKEINDICSGCRGHDGFTSSWRSVADTLRQKVEDAVREHPDYRVVFTGHSLGGALATVAGADLRGNGYDIDVFSYGAPRVGNRAFAEFLTTQTGGTLYRITHTNDIVPRLPPREFGYSHSSPEYWIKSGTLVPVTRNDIVKIEGIDATGGNNQPNIPDIPAHLWYFGLIGTC

SEQ ID NO: 12930 - protein, 268 aa, Thermomyces lanuginosus
EVSQDLFNQFNLFAQYSAAAYCGKNNSAPAGTDITCTGNACPEVEKADATFLYSFEDSGVGDVTGFLALDNTRKDIVLSFRGSRSIENWIGNLNFDLKEINDICSGCRGHDGFTSSWRSVADTLRQKVEDAVREHPDYRVVFTGHSLGGALATVAGADLRGNGYDIDVFSYGAPRVGNRAFAEFLTVQTGGTLYRITHTNDIVPRLPPREFGYSHSSPEYWIKSGTLVPVTRNDIVKIEGIDATGGNNQPNIPDIPAHLWYFGLIGTC

SEQ ID NO: 12931 - protein, 268 aa, Thermomyces lanuginosus
EVSQDLFNQFNLFAQYSKAAYCGKNNSAPAGTNITCTGNACPEVFKADATFLYSFEDSGVGDVTGFLALDNTNKLIVLSFRGSRSIENWIGNLNFDLKEINDICSGCRGHDGFTSSWRSVADTLRQKVEDAVREHPDYRVVFTGHSLGGALATVAGADLRGNGYDIDVFSYGAPRVGNRAFAEFLTVQDGGTLYRITHTNDIVPRLPPREFGYSHSSPEYWIKSGTLVPVTRNDIVKIEGIDATGGNNQPNIPDIPAHLWYFGLIGTC

SEQ ID NO: 12932 - protein, 268 aa, Thermomyces lanuginosus
EVSQDLFNQFNLFAQYSAAAYCGKNNDAPAGTNITCTGNACPEVEKADVTFLYSFEDSGVGDVTGFLALDNTNKQIILSFRGSRSIENWIGNLNFDLKEINDICSGCRGHDGFTSSWRSVADTLRQKVEDAVREHPDYRVVFTGHSLGGALATVAGADLRGNGYDIDVFSYGAPRVGNRAFAEFLTVQDGGTLYRITHTNDIVPRLPPREFGYSHSSPEYWIKSGTLVPVTRNDIVKIEGIDATGGNNQPNIPDIPAHLWYFGLIGTC

SEQ ID NO: 12933 - protein, 268 aa, Thermomyces lanuginosus
EVSQDLFNQFNLFAQYSKAAYCQKNNDAPAGTNITCTGNACPEVEKADVTFLYSFEDSGVGDVTGFLALDNTNKLIVLSFRGSRSIENWIGNLNFDLKEINDICSGCRGHDGFTSSWRSVADTLRQKVEDAVREHPDYRVVFTGHSLGGALATVAGADLRGNGYDIDVFSYGAPRVGNRAFAEFLTTQTGGTLYRITHTNDIVPRLPPREFGYSHSSPEYWIKSGTLVPVTRNDIVKIEGIDATGGNNQPNIPDIPAHLWYFGLIGTC

SEQ ID NO: 12934 - protein, 268 aa, Thermomyces lanuginosus
EVSQDLFNQFNLFAQYSAAAYCGKNNSAPAGTNITCTGNACPEVFKADATFLYSFEDSGVGDVTGFLALDNTNKDIVLSFRGSRSIENWIGNLNFDLKEINDICSGCRGHDGFTSSWRSVADTLRQKVEDAVREHPDYRVVFTGHSLGGALATVAGADLRGNGYDIDVFSYGAPRVGNRAFAEFLTVQDGGTLYRITHTNDIVPRLPPREFGYSHSSPEYWIKSGTLVPVTRNDIVKIEGIDATGGNNQPNIPDIPAHLWYFGLIGTC

SEQ ID NO: 12935 - protein, 268 aa, Thermomyces lanuginosus
EVSQDLFNQFNLFAQYSAAAYCGKNNDAPAGTQITCTGNACPEVEKADATFLYSFEDSGVGDVTGFLALDNTNKLIVLSFRGSRSIENWIGNLNFDLKEINDICSGCRGHDGFTSSWRSVADTLRQKVEDAVREHPDYRVVFTGHSLGGALATVAGADLRGNGYDIDVFSYGAPRVGNRAFAEFLTVQTGGTLYRITHTNDIVPRLPPREFGYSHSSPEYWIKSGTLVPVRRRDIVKIEGIDATGGNNRPNIPDIPAHLWYFGLIGTC

SEQ ID NO: 12936 - protein, 268 aa, Thermomyces lanuginosus
EVSQDLFNQFNLFAQYSKAAYCGKNNDAPAGTNITCTGNACPEVEKADATFLYSFEDSGVGDVTGFLALDNTNKQIVLSFRGSRSIENWIGNLNFDLKEINDICSGCRGHDGFTSSWRSVADTLRQKVEDAVREHPDYRVVFTGHSLGGALATVAWADLRGNGYDIDVFSYGAPRVGNRAFAEFLTVQDGGTLYRITHTNDIVPRLPPREFGYSHSSPEYWIKSGTLVPVTRNDIVKIEGIDATGGNNQPNIPDIPAHLWYFGLIGTC

SEQ ID NO: 12937 - protein, 268 aa, Thermomyces lanuginosus
EVSQDLFNQFKLFAQYSAAAYCGKNNSAPAGTNITCTGNACPEVEKADATFLYSFEDMGVGDVTGFLALDNTNKLIVLSFRGSRSIENWIGNLNFDLKEINDICSGCRGHDGFTSSWRSVADTLRQKVEDAVREHPDYRVVFTGHSLGGALATVAGADLRGNGYDIDVFSYGAPRVGNRAFAEFLTVQTGGTLYRITHTNDIVPRLPPREFGYSHSSPEYWIKSGTLVPVTRNDIVKIEGIDATGGNNQPNIPDITAHLWYFGLIGTC

SEQ ID NO: 12938 - protein, 268 aa, Thermomyces lanuginosus
EVSQDLFNQFNLFAQYSAAAYCGKNNDAPAGTNITCTGNACPEVEKADATFLYSFEDSGVGDVTGFLALDNTNKLIVLSFRGSRSIENWIQNLNFDLKEINDICSGCRGHDGFTSSWRSVADTLRQKVEDAVREHPDYRVVFTGHSLGGALATVAGADLRGNGYDIDVFSYGAPRVGNRAFAEFLTVQTGGTLYRITHTNDIVPRLPPRQFGYSHSSPEYWIKSGTLVPVRRRDIVKIEGIDATGGNNQPNIPDAPAHLWYFGLIGTC

SEQ ID NO: 12939 - protein, 268 aa, Thermomyces lanuginosus
EVSQDLFNQFNLFAQYSKAAYCGKNNDAPAGTNITCTGNACPEVEKADATFLYSFEDSGVGDVTGFLALDNTNKQIVLSFRGSRSIENWIGNLNFDLKEINDICSGCRGHDGFTSSWRSVADTLRQKVEDAVREHPDYRVVFTGHSLGGALATVAWADLRGNGYDIDVFSYGAPRVGNRAFAEFLTTQTGGTLYRITHTNDIVPRLPPREFGYSHSSPEYWIKSGTLVPVTRNDIVKIEGIDATGGNNQPNIPDIPAHLWYFGLIGTC

SEQ ID NO: 12940 - protein, 268 aa, Thermomyces lanuginosus
EVSQDLFNQFNLFAQYSAAAYCGKNNDAPAGTQITCTGNACPEVEKADATFLYSFEDSGVGDVTGFLALDNTNKLIVLSFRGSRSIENWIGNLNFDLKEINDICSGCRGHDGFTSSWRSVADTLRQKVEDAVREHPDYRVVFTGHSLGGALATVAGADLRGNGYDIDVFSYGAPRNGNRAFAEFLTVQTGGTLYRITHTNDIVPRLPPREFGYSHSSPEYWIKSGTLVPVRRRDIVKIEGIDATGGNNQPNIPDIPAHLWYFGLIGTC

SEQ ID NO: 12941 - protein, 268 aa, Thermomyces lanuginosus
EVSQDLFNQFNLFAQYSAAAYCGKNNDAPAGTQITCTGNACPEVEKADATFLYSFEDSGVGDVTGFLALDNTNKLIVLSFRGSRSIENWIGNLNFDLKEINDICSGCRGHDGFTSSWRSVADTLRQKVEDAVREHPDYRVVFTGHSLGGALATVAGADLRGNGYDIDVFSYGAPRVGNRAFAEFLTVQTGGTLYRITHTNDIVPRLPPREFGYSHSSPEYWIKSGTLVPVRRRDIVKIEGIDATGGNNQPNIPDISAHLWYFGLIGTC

SEQ ID NO: 12942 - protein, 268 aa, Thermomyces lanuginosus
EVSQDLFNQFNLFAQYSAAAYCGKNNDAPAGTQITCTGNACPEVEKADATFLYSFEDSGVGDVTGFLALDNTNKLIVLSFRGTRSIKNWIANLNFDLKKINDICSGCRGHDGFTSSWRSVADTLRQKVEDAVREHPDYRVVFTGHSLGGALATVAGADLRGNGYDIDVFSYGAPRVGNRAFAEFLTVQTGGTLYRITHTNDIVPRLPPREFGYSHSSPEYWIKSGTLVPVRRRDIVKIEGIDATGGNNRPNIPDIPAHLWYFGLIGTC

SEQ ID NO: 12943 - protein, 268 aa, Thermomyces lanuginosus
EVSQDLFNQFNLFAQYSAAAYCGKNNDAPAGTQITCTGNACPEVEKADATFLYSFEDSGVGDVTGFLALDNTNKLIVLSFRGSRSIENWIGNLNFLLKEINDICSGCRGHDGFTSSWRSVADTLRQKVEDAVREHPDYRVVFTGHSLGGALATVAGADLRGNGYDIDVFSYGAPRVGNRAFAEFLTVQTGGTLYRITHTNDIVPRLPPREFGYSHSSPEYWIKSGTLVPVRRRDIVKIEGIDATGGNNRPNIPDIPAHLWYFGLIGTC

SEQ ID NO: 12944 - protein, 268 aa, Thermomyces lanuginosus
EVSQDLFNQFNLFAQYSAAAYCGCNNDAPAGTNITCTGNACPEVEKADATFLYSFEDSGVGDVTGFLALDNTNKLIVLSFRGSRSIENWIGNLNFSLKEINDICSGCRGHDGFTSSWRSVADTLRQKVEDAVREHPDYRVVFTGHSLGGALATVAGADLRGNGYDIDVFSYGAPRVGNRAFAEFLTVQTGGTLYRITHTNDIVPRLPPREFGYSHSSPEYWIKSGTLVPVRRRDIVKIEGIDATGGNNRPNIPDIPAHLWYFGLIGTC

SEQ ID NO: 12945 - protein, 268 aa, Thermomyces lanuginosus
EVSQDLFNQFNLFAQYSAAAYCGKNNRAPAGTNITCTGNACPEVEKADATFLYSFEDSGVGDVTGFLALDNTNKLIVLSFRGSRSIENWIGNLNFDLKEINDICSGCRGHDGFTSSWRSVADTLRQKVEDAVREHPDYRVVFTGHSLGGALATVAGADLRGNGYDIDVFSYGAPRVGNRAFAEFLTVQTGGTLYRITHTNDIVPRLPPREFGYSHSSPEYWIKSGTGVPVRRRDIVKIEGIDATGGNNQPNIPDIPAHLWYFGLIGTC

SEQ ID NO: 12946 - protein, 268 aa, Thermomyces lanuginosus
EVSQDLFNQFNLFAQYSAAAYCGKNNDAPAGTNITCTGNACPEVEKADATFLYSFEDSGVGDVTGFLALDNTNKLIVLSFRGSRSIENWIGNLNFDLKEINDICSGCRGHDGFTSSWRSVADTLRQKVEDAVREHPDYRVVFTGHSLGGALATVAGADLRGNGYDIDVFSYGAPRVGNRAFAEFLTVQTGGTLYRITHTNDIVPRLPPREFGYSHSSPEYWIKSGTGVPVRRRDIVKIEGIDATGGNNQPNIPDIKAHLWYFGLIGTC

SEQ ID NO: 12947 - protein, 268 aa, Thermomyces lanuginosus
EVSQDLFNQFNLFAQYSAAAYCGKNNDAPAGTNITCTGNACPEVEKADATFLYSFEDSGVGDVTGFLALDNTNKLIVLSFRGSRSIENWIGNLNFDLKEINDICSGCRGHDGFTSSWRSVADTLRQKVEDAVREHPDYRVVFTGHSLGGALATVAGADLRGNGYDIDVFSYGAPRVGNRAFAEFLTVXTGGTLYRITHTNDIVFRLPPREFGYSHSSPEYWIKSGTLVPVTRNDIVKIEGIDATGGNNQFNIPDIFAHLWYFGLIGTC

SEQ ID NO: 12948 - protein, 268 aa, Thermomyces lanuginosus
EVSQDLFNQFNLFAQYSAAAYCGKNNDAPAGTQITCTGNACPEVEKADATFLYSFEDSGVGDVTGFLALDNTNKLIVLSFRGSRSIENWIGNLNFDLKEINDICSGCRGHDGFTSSWRSVADTLRQKVEDAVREHPDYRVVFTGHSLGGALATVAGADLRGNGYDIDVFSYGAPRVGNRAFAEFLTVQTGGTLYRITHTNDIVPRLPPREFGYSHSSPEYWIKSGTLVPVRRRDIVKIEGIDATGGNNQPNIPNIPAHLWYFGLIGTC

SEQ ID NO: 12949 - protein, 268 aa, Synthetic construct
EVSQDLFNQFNLFAQYSAAAYCGKNNDAPAGTNITCTGNACPEVEKADATFLYSFEGSGVGDVTGFLALDNTNKLIVLSFRGSRSIENWIGNLKFLMKEINDICSGCRGHDGFTSSWRSVADTLRQKVEDAVREHPDYRVVFTGHSLGGALATVAGADLRGNGYDIDVFSYGAPRVGNRAFAEFLTVQTGGTLYRITHTNDIVPRLPPREFGYSHSSPEYWIKSGTLVPVTRNDIVKIEGIDATGGNNRPNIPDIPAHLWYFGLIGTC

SEQ ID NO: 12950 - protein, 268 aa, Thermomyces lanuginosus
EVSQDLFNQFNLFAQYSAAAYCGKNNDAPAGTNITCTGNACPEVEKADATFLYSFEDSGVGDVTGFLALDNTNKLIVLSFRGSRSIENWINNLNFDLKEINDICSGCRGHDGFTSSWRSVADTLRQKVEDAVREHPDYRVVFTGHSLGGALATVAGADLRGNGYDIDVFSYGAPRVGNRAFAEFLTVQTGGTLYRITHTNDIVPRLPPRQFGYSHSSPEYWIKSGTLVPVRRRDIVKIEGIDATGGNNQRNIPDIPAHLWYFGLIGTC

SEQ ID NO: 12951 - protein, 268 aa, Thermomyces lanuginosus
EVSQDLFNQFNLFAQYSAAAYCGKNNDAPAGTQITCTGNACPEVEKADATFLYSFEDSGVGDVTGFLALDNTNKLIVLSFRGSRSIENWIGNLNFDLKEINDICSGCRGHDGFTSSWRSVADTLRQKVEDAVREHPDYRVVFTGHSLGGALATVAGADLRGNGYDIDVFSYGAPRVGNRAFAEFLTVQTGGTLYRITHTNDIVPRLPPREFGYSHSSPEYWIKSGTLVPVRRRDIVKIEGIDATGGNNQPNIPTIPAHLWYFGLIGTC

SEQ ID NO: 12952 - protein, 268 aa, Thermomyces lanuginosus
EVSQDLFNQFNLFAQYSAAAYCGKNNDAPAGTNITCTGNACPEVEKADATFLYSFEDSGKGDVTGFLALDNTNKLIVLSFRGSRSIENWIGNLNFDLKEINDICSGCRGHDGFTSSWRSVADTLRQKVEDAVREHPDYRVVFTGHSLGGGLATVAGADLRGNGYDIDVFSYGAPRVGNRAFAEFLTVQTGGTLYRITHTNDIVPRLPPREFGYSHSSPEYWIKSGTLVPVRRRDIVKIEGIDATGGNNQPNIPDIPAHLWYFGLIGTC

SEQ ID NO: 12953 - protein, 268 aa, Thermomyces lanuginosus
EVSQDLFNQFNLFAQYSAAAYCGKNNDAPAGTNITCTGNACPEVEKADATFLYSFEDHGLGDVTGFLALDNTNKLIVLSFRGSRSIENWIGNLNFDLKEINDICSGCRGHDGFTSSWRSVADTLRQKVEDAVREHPDYRVVFTGHSLGGALATVAGADLRGNGYDIDVFSYGAPRVGNRAFAEFLTVQTGGTLYRITHTNDIVPRLPPRVFGYSHSSPEYWIKSGTLVPVTRNDIVKIEGIDATGGNNRPNIPDIPAHLWYFGLIGTC

SEQ ID NO: 12954 - protein, 268 aa, Thermomyces lanuginosus
EVSQDLFNQFNLFAQYSAAAYCGKNNDAPAGTNITCTGNACPEVEKADATFLYSFEDSGVGDVTGFLALDNTNKLIVLSFRGSRSPANWIANLDFIFDEINDICSGCRGHDGFTSSWRSVADTLRQKVEDAVREHPDYRVVFTGHSLGGALATVAGADLRGNGYDIDVFSYGAPRVGNRAFAEFLTVQTGGTLYRITHTNDIVPRLPPREFGYSHSSPEYWIKSGTLVPVTRNDIVKIEGIDATGGNNQPNIPDIPAHLWYFGLIGTC

SEQ ID NO: 12955 - protein, 268 aa, Synthetic construct
EVSQDLFNQFNLFAQYSAAAYCGKNNDAPAGTNITCTGNACPEVEKADATFLYSFEDSGVGDVTGFLALDNTNKLIVLSFRGSRSIENWIGNLNFDLKEINDICSGCRGHDGFTSSWRSVADTLRQKVEDAVREHPGYRVVFTGHSLGGALATVAGADLRGNGYDIGVFSYGAPRVGNRAFAEFLTVQTGGTLYRITHTNDIVPRLPPREFGYSHSSPVYLIKSGTLVPVTRNDIVKIEGIDATGGNNQPNIPDIPAHLWYFGLIGTC

SEQ ID NO: 12956 - protein, 268 aa, Thermomyces lanuginosus
EVSQDLFNQFNLFAQYSAAAYCGKNNDAPAGTQITCTGNACPEVEKADATFLYSFEDSGVGDVTGFLALDNTNKLIVLSFRGSRSIENWIGNLNFDLKEINDICSGCRGHDGFTSSWRSVADTLRQKVEDAVREHPDYRVVFTGHSLGGALATVAGADLRGNGYDIDVFSYGAPRVGNRAFAEFLTVQTGGTLYRITHTNDIVPRLPPREFGYSHSSPEYWIKSGTLVPVRRRDIVKIEGIDATGGNNQPNIPQIPAHLWYFGLIGTC

SEQ ID NO: 12957 - protein, 268 aa, Thermomyces lanuginosus
EVSQDLFNQFNLFAQYSAAAYCGKNNDAPAGTNITCTGNACPEVEKADATFLYSFEDXGVGDVTGFLALDNTNKLIVLSFRGSRSIENWIGNLNFDLKEINDICSGCRGRDGFTSSWRSVADTLRQKVEDAVREHPDYRVVFTGXSLGGALATVAGADLRGNGYDIDVFSYGAPRVGNRAFAEFLTVQTGGTLYRITXTNDIVPRLPPREFGYSHSSPEYWIKSGTLVPVTRNDIVKIEGIDATGGNNQPNIPDIPAHLWYFGLIGTC

SEQ ID NO: 12958 - protein, 268 aa, Thermomyces lanuginosus
EVSQDLFNQFNLFAQYSAAAYCGKNNDAPAGTNITCTGNACPEVEKADATFLYSFEDSGVGDVTGFLALDNTNKLIVLSFRGSRSIENWIGNLNFDLKEINDICSGCRGHDGFTSSWRSVADTLRQKVEDAVREHPDYRVVFTGHSLGGALATVAGADLRGNGYDIDVFSYGAPRVGNRAFAEFLTVQTGGTLYRITHTNDXVPRXPPREXGYSHSSPEYWIKSGTLVPVTRNDIVKIEGIDATGGNNQPNIPDXPAHLWYFGLIGTC

SEQ ID NO: 12959 - protein, 268 aa, Thermomyces lanuginosus
EVSQDLFNQFNLFAQYSAAAYCGKNNDAPAGTQITCTGNACPEVEKADATFLYSFEDSGVGDVTGFLALDNTNKLIVLSFRGSRSIENWIGNLNFDLKEINDICSGCRGHDGFTSSWRSVADTLRQKVEDAVREHPDYRVVFTGHSLGGALATVAGADLRGNGYDIDVFSYGAPRVGNRAFAEFLTVQTGGTLYRITHTNDIVPRLPPREFGYSHSSPEYWIKSGTLVPVRRRDIVKIEGIDATGGNNQPNIPYIPAHLWYFGLIGTC

SEQ ID NO: 12960 - protein, 268 aa, Thermomyces lanuginosus
EVSQDLFNQFNLFAQYSAAAYCGKNNDAPAGTNITCTGNACPEVEKADATFLYSFEDSGVGDVTGFLALDNTNKLIVLSFRGSRSIENWIQNLNFDLKEINDICSGCRGHDGFTSSWRSVADTLRQKVEDAVREHPDYRVVFTGHSLGGALATVAGADLRGNGYDIDVFSYGAPRVGNRAFAEFLTVQTGGTLYRITHTNDIVPRLPPRQFGYSHSSPEYWIKSGTLVPVRRRDIVKIEGIDATGGNNQRNIPDIPAHLWYFGLIGTC

SEQ ID NO: 12961 - protein, 268 aa, Thermomyces lanuginosus
EVSQDLFNQFNLFAQYSAAAYCGKNNDAPAGTQITCTGNACPEVEKADATFLYSFEDSGVGDVTGFLALDNTNKLIVLSFRGSRSIENWIGNLNFDLKEINDICSGCRGHDGFTSSWRSVADTLRQKVEDAVREHPDYRVVFTGHSLGGALATVAGADLRGNGYDIDVFSYGAPRVGNRAFAEFLTVQTGGTLYRITHTNDIVPRLPPREFGYSHSSPEYWIKSGTLVPVRRRDIVKIEGIDATGGNNQPNIPHIPAHLWYFGLIGTC

SEQ ID NO: 12962 - protein, 268 aa, Thermomyces lanuginosus
EVSQDLFNQFNLFAQYSAAAYCGKNNDAPAGTNITCTGNACPEVEKADATFLYSFEDSGVGDVTGFLALDNTNKLIVLSFRGSRSIQNWIGNLNFDLKEINDICSGCRGHDGFTSSWRSVADTLRQKVEDAVREHPDYRVVFTGHSLGGALATVAGADLRGNGYDIDVFSYGAPRVGNRAFAEFLTVQTGGTLYRITHTNDIVPRLPPRQFGYSHSSPEYWIKSGTLVPVTRNDIVKIEGINATGGNNQPNIPNIPAHLWYFGLIGTC

SEQ ID NO: 12963 - protein, 267 aa, Thermomyces lanuginosus
VSQDLFNQFNLFAQYSAAAYCGKNNDAPAGTNITCTGNACPEVEKADATFLYSFEDSGVGDVTGFLALDNTNKLIVLSFRGSRSIENWIGNLNFDLKEINDICSGCRGHDGFTSSWRSVADTLRQKVEDAVREHPDYRVVFTGHSLGGALATVAGADLRGNGYDIDVFSYGAPRVGNRAFAEFLTVQTGGTLYRITNTNDIVPRLPPREFGYSHSSPEYWIKSGTLPPVRRCDIVKIEGIDATGGNNQPNIPDIPAHLWYFGLIGTC

SEQ ID NO: 12964 - protein, 267 aa, Thermomyces lanuginosus
VSQDLFNQFNLFAQYSAAAYCGKNNDAPAGTNITCTGNACPEVEKADATFLYSFEDSGVGDVTGFLALDNTNKLIVLSFRGSRSIENWIGNLNFDLKEINDICSGCRGHDGFTSSWRSVADTLRQKVEDAVREHPDYRVVFTGHSLGGALATVAGADLRGNGYDIDVFSYGAPRVGNRAFAEFLTVQTGGTLYRITSTNDIVPRLPPREFGYSHSSPEYWIKSGTLPPVRRCDIVKIEGIDATGGNNQPNIPDIPAHLWYFGLIGTC

SEQ ID NO: 12965 - protein, 267 aa, Thermomyces lanuginosus
VSQDLFNQFNLFAQYSAAAYCGKNNDAPAGTNITCTGNACPEVEKADATILYSFEDSGVGDVTGFLALDNTNKLIVLSFRGSRSIENWIGNLNFDLKEINDICSGCRGHDGFTSSWRSVADTLRQKVEDAVREHPDYRVVFTGHSLGGALATVAGADLRGNGYDIDVFSYGAPRVGNRAFAEFLTVQTGGTLYRITSTNDIVPRLPPREFGYSHSSPEYWIKSGTLVPVRRCDIVKIEGIDATGGNNQPNIPDIPAHLWYFGLIGTC

SEQ ID NO: 12966 - protein, 267 aa, Synthetic construct
VSQDLFNQFNLFAQYSAAAYCGKNNDAPAGTNITCTGNACPEVEKADATFLYSFEDSGVGDVTGFLALDNTNKLIVLSFRGSRSIENWFGNLNFLLKKINDICSGCRGHDGFTSSWRSVADTLRQKVEDAVREHPDYRVVFTGHSLGGALATVAGADLRGNGYDIDVFSYGAPRVGNRAFAEFLTAQTGGTLYRITHRRDIVPRLPPAEFGYSHSSPEYWIKSGTLVPVTRNDIVKIEGIDATGGNNQPNIPDIPAHLWYFGLIGTC

SEQ ID NO: 12967 - protein, 267 aa, Thermomyces lanuginosus
VSQDLFNQFNLFAQYSAAAYCGKNNDAPAGTNITCTGNACPEVEKADATFLYSFEDSGVGAVTGFLALDNTNKLIVLSFRGTRSIENWIGNLNFDLKNINDICSGCRGHDGFTSSWRSVADTLRQKVEDAVREHPDYRVVFTGHSLGGALATVAGADLRGNGYDIDVFSYGAPRVGNRAFAEFLTVQTGGTLYRITHTNDIVPRLPPREFGYSHSSPEYWIKSGTLVPVTRNDIVKICGIDATGGNNRPNIPDIPAHLWYFGLIGTC

SEQ ID NO: 12968 - protein, 267 aa, Synthetic construct
VSQDLFNQFNLFAQYSAAAYCGKNNDAPAGTNITCTGNACPEVEKADATFLYSFEGSGVGRVTGFLALDNTNKLIVLSFRGSRSIENWIGNLKFLLKEINDICSGCRGHDGFTSSWRSVADTLRQKVEDAVREHPDYRVVFTGHSLGGALATVAGADLRGNGYDIDVFSYGAPRVGNRAFAEFLTVQTGGTLYRITHTNDIVPRLPPREFGYSHSSPEYWIKSGTLVPVTRNDIVKIEGIDATGGNNRPNIPDIPAHLWYFGLIGTC

SEQ ID NO: 12969 - protein, 267 aa, Thermomyces lanuginosus
VSQDLFNQFNLFAQYSAAAKCGKNNDAPAGTNITCTGNACPEVEKADATFLYSFEDSGVGDVTGFLALDNTNKLIVLSFRGSRSIENWIGNLNFDLKNISDICSGCRGHDGFTSSWRSVADTLRQKVEDAVREHPDYRVVFTGHSLGGALATVAGADLRGNGYDIDVFSYGAPRVGNRAFAEFLTVQTGGTLYRITHTNDIVPRLPPREFGYSHSSPEYWIKSGTLVPVTRNDIVKICGIDATGGNNRPNIPDIPAHLWYFGLIGTC

SEQ ID NO: 12970 - protein, 267 aa, Synthetic construct
VSQDLFNQFNLFAQYSAAAYCGKNNDAPAGTNITCTGNACPEVEKADATFLYSFEDSGVGDVTGFLALDNTNKLIVLSFRGSRSIENWFGNLNFLLKKINDICSGCRGHDGFTSSWRSVADTLRQKVEDAVREHPGYRVVFTGHSLGGALATVAGADLRGNGYDIGVFSYGAPRVGNRAFAEFLTAQTGGTLYRITHTNDIVPRLPPREFGYSHSSPEYWIKSGTLVPVTRNDIVKIEGIDATGGNNRPNIPDIPAHLWYFGLIGTC

SEQ ID NO: 12971 - protein, 267 aa, Thermomyces lanuginosus
VSQDLFNQFNLFAQYSAAAYCGKNNDAPAGTNITCTGNACPEVEKADATFLYSFEDSGVGDVTGFLALDNTNKLIVLSFRGTRSIENWIGNLKFLLKEINDICSGCRGHDGFTSSWRSVADTLRQKVEDAVREHPDYRVVFTGHSLGGALATVAGADLRGNGYDIDVFSYGAPRVGNRAFAEFLTVQTGGTLYRITHTNDIVPRLPPREFGYSHSSPEYWIKSGTLVPVTRNDIVKICGIDATGGNNRPNIPDIPAHLWYFGLIGTC

SEQ ID NO: 12972 - protein, 273 aa, Thermomyces lanuginosus
EVSQDLFNQFNLFAQYSAAAYCGKNNDAPAGTNITCTGNACPEVEKADATFLYSFEDSGVGDVTGFLALDNTNKLIVLSFRGSRSIENWIGNLNFDLKEINDICSGCRGHDGFTSSWRSVADTLRQKVEDAVREHPDYRVVFTGHSLGGALATVAGADLRGNGYDIDVFSYGAPRVGNRAFAEFLTVQTGGTLYRITHTNDIVPRLPPREFGYSHSSPEYWIKSGTLVPVRRRDIVKIEGIDATGGNNRPNIPDIPAHLWYFGLIGTCLAGVF

SEQ ID NO: 12973 - protein, 271 aa, Thermomyces lanuginosus
EVSQDLFNQFNLFAQYSAAAYCGKNNDAPAGTQITCTGNACPEVEKADATFLYSFEDSGVGDVTGFLALDNTNKLIVLSFRGSRSIENWIANLNFDLKKINDICSGCRGHDGFTSSWRSVADTLRQKVEDAVREHPDYRVVFTGHSLGGALATVAGADLRGNGYDIDVFSYGAPRVGNRAFAEFLTVQTGGTLYRITHTNDIVPRLPPREFGYSHSSPEYWIKSGTLVPVRRRDIVKIEGIDARGGNNRPNIPDIPAHLWYFGLIGTCLPG

SEQ ID NO: 12974 - protein, 271 aa, Thermomyces lanuginosus
EVSQDLFNQFNLFAQYSAAAYCGKNNDAPAGTNITCTGNACPEVEKADATFLYSFEDSGVGDVTGFLALDNTNKLIVLSFRGSRSIENWIGNLNFLLKEINDICSGCRGHDGFTSSWRSVADTLRQKVEDAVREHPDYRVVFTGHSLGGALATVAGADLRGNGYDIDVFSYGAPRVGNRAFAEFLTVQTGGTLYRITHTNDIVPRLPPREFGYSHSSPEYWIKSGTLVPVRRRDIVKIEGIDATGGNNRPNIPDIPAHLWYFGLIGTCLPG

SEQ ID NO: 12975 - protein, 268 aa, Thermomyces lanuginosus
EVSQDLFNQFNLFAQYSAAAYCGKNNDAPAGTNITCTGNACPEVEKADATFLYSFRDSGVGDVTGFLALDNTNKLIVLSFRGSRSIENWIGNLNFDLKEINDICSGCRGHDGFTSSWFSVADTLRQKVEDAVREHPDYRVVFTGHSLGGALATVAGADLRGNSYDIDVFSYGAPRVGNRAFAEFLTVQTGGTLYRITHTNDIVPRLPPREFGYSHSSPEYWIKSGTLVPVRRRDIVKIEGIDATGGNNQPNIPDIPAHLWYFGLIGTC

SEQ ID NO: 12976 - protein, 268 aa, Thermomyces lanuginosus
EVSQDLFNQFNLFAQYSAAAYCGANNDAPAGTNITCTGNACPEVEKADATFLYSFEDSGVGDVTGFLALDNTNKQIVLSFRGSRSIENWIGNLNFDLKEINDICSGCRGHAGFTSSWRSVADTLRQKVEDAVREHPDYRVVFTGHSLGGALATVAWADLRGNGYDIDVFSYGAPRVGNRAFAEFLTTQTGGTLYRITHTNDIVPRLPPREFGYSHSSPEYWIKSGTLVPVTRNDIVKIEGIDATGGNNQPNIPDIPAHLWYFGLIGTC

SEQ ID NO: 12977 - protein, 268 aa, Thermomyces lanuginosus
EVSQDLFNQFNLFAQYSKAAYCGANNDAPAGTNITCTGNACPEVEKADATFLYSFEDSGVGDVTGFLALDNTNKLIVLSFRGSRSIENWIGNLNFDLKEINDICSGCRGHAGFTSSWRSVADTLRQKVEDAVREHPDYRVVFTGHSLGGALATVAGADLRGNGYDIDVFSYGAPRVGNRAFAEFLTNQQGGTLYRITHTNDIVPRLPPREFGYSHSSPEYWIKSGTLVPVTRNDIVKIEGIDATGGNNQPNIPDIPAHLWYFGRIGTC

SEQ ID NO: 12978 - protein, 268 aa, Thermomyces lanuginosus
EVSQDLFNQFNLFAQYSAAAYCGKNNDAPAGTNITCTGNACPEVEKADTTFLYSFRDSGVGDVTGFLALDNTNKLIVLSFRGSRSIKNWIGNLNFDLKSINDICSGCRGHDGFTSSWRSVADTLRQKVEDAVREHPDYRVVFTGHSLGGALATVAGADLRGNGYDIDVFSYGAPRVGNRAFAEFLTVQTGGTLYRITHTNDIVPRLPPREFGYSHSSPEYWIKSGTLVPVRRRDIVKIEGIDATGGNNQPNIPDIPAHLWYFGLIGTC

SEQ ID NO: 12979 - protein, 268 aa, Thermomyces lanuginosus
EVSQDLFNQFNLFAQYSAAAYCGKNNQAPAGTNITCTGNACPEVEKADATTLYSFEDSGVGDVTGFLALDNTNKQIVLSFRGSRSIENWIGNLNFDLKEINDICSGCRGHDGFTSSWRSVADTLRQKVEAAVREHPDYRVVFTGHSLGGALATVAGADLRGNGYDIDVFSYGAPRVGNRAFAEFLTHQTGGTLYRITHTNDIVPRLPPREFGYSHSSPEYWIKSGTLVPVTRNDIVKIEGIDATGGNNQPNIPDIPAHLWYFGRIGTC

SEQ ID NO: 12980 - protein, 268 aa, Thermomyces lanuginosus
EVSQDLFNQFNLFAQYSAAAYCGKNNDAPAGTQITCTGNACPEVEKADATFLYSFEDSGVGDVTGFLALDNTNKLIVLSFRGSRSIENWIQNLNFDLKEINDICSGCRGHDGFTSSWRSVADTLRQKVEDAVREHPDYRVVFTGHSLGGALATVAGADLRGNGYDIDVFSYGAPRVGNRAFAEFLTVQTGGTLYRITHTNDIVPRLPPRQFGYSHSSPEYWIKSGTLVPVRRRDIVKIEGIDATGGNNQPNIPDNPAHLWYFGLIGTC

SEQ ID NO: 12981 - protein, 268 aa, Thermomyces lanuginosus
EVSQDLFNQFNLFAQYSKAAYCQKNNDAPAGTNITCTGNACPEVEKADATFLYSFEDSGVGDVTGFLALDNTNKLIILSFRGSRSIENWIGNLNFDLKEINDICSGCRGHDGFTSSWRSVADTLRQKVEDAVREHPDYRVVFTGHSLGGALATVAGADLRGNGYDIDVFSYGAPRVGNRAFAEFLTTQDGGTLYRITHTNDIVPRLPPREFGYSHSSPEYWIKSGTLVPVTRNDIVKIEGIDATGGNNQPNIPDIPAHLWYFGLIGTC

SEQ ID NO: 12982 - protein, 268 aa, Thermomyces lanuginosus
EVSQDLFNQFNLFAQYSKAAYCGKNNSAPAGTNITCTGNACPEVEKADATFLYSFEDSGVGDVTGFLALDNTRKDIVLSFRGSRSIENWIGNLNFDLKEINDICSGCRGHDGFTSSWRSVADTLRQKVEDAVREHPDYRVVFTGHSLGGALATVAGADLRGNGYDIDVFSYGAPRVGNRAFAEFLTVQDGGTLYRITHTNDIVPRLPPREFGYSHSSPEYWIKSGTLVPVTRNDIVKIEGIDATGGNNQPNIPDIPAHLWYFGLIGTC

SEQ ID NO: 12983 - protein, 268 aa, Thermomyces lanuginosus
EVSQDLFNQFNLFAQYSAAAYCQKNNSAPAGTNITCTGNACPEVEKADATFLYSFEDSGVGDVTGFLALDNTNKGIVLSFRGSRSIENWIGNLNFDLKEINDICSGCRGHDGFTSSWRSVADTLRQKVEAAVREHPDYRVVFTGHSLGGALATVAGADLRGNGYDIDVFSYGAPRVGNRAFAEFLTNQTGGTLYRITHTNDIVPRLPPREFGYSHSSPEYWIKSGTLVPVTRNDIVKIEGIDATGGNNQPNIPDIPAHLWYFGRIGTC

SEQ ID NO: 12984 - protein, 268 aa, Thermomyces lanuginosus
EVSQDLFNQFNLFAQYSAAAYCGKNNDAPAGTKITCTTNACPEVEKADATFLYSFEDSGVGDVTGFLALDNTNKLIVLSFRGSRSIENWIGNLNFDLKEINDICSGCRGHLGFTSSWRSVADTLRQKVEDAVREHPDYRVVFTGHSLGGALATVAGADLRGNGYDIDVFSYGAPRVGNRAFAEFLTVQTGGTLYRITHTNDIVPRLPPREFGYSHSSPEYWIKSGTLVPVTRSDIVKIEGIDATGGNNQPNIPDIPAHVWYFGLIGTC

SEQ ID NO: 12985 - protein, 268 aa, Thermomyces lanuginosus
EVSQDLFNQFNLFAQYSAAAYCGKNNDAPAGTNITCTGNACPEVEKADATFLYSFEDSGVGDVTGFLALDNTNKLIVLSFRGSRSIENWIGNLNFELKEINDICSGCRGHAGFTSSWRSVADTLRQKVEDAVREHPDYRVVFTGHSLGGALATVAGADLRGNKYDIDVFSYGAPRVGNRAFAEFLTVQTGGTLYRITHTNDIVPRLPPREFGYSHSSPEYWIKSGTLVPVRRRDIVKIEGIDATGGNNQPNIPDITAHLWYFGLIGTC

SEQ ID NO: 12986 - protein, 268 aa, Thermomyces lanuginosus
EVSQDLFNQFNLFAQYSAAAYCQKNNDAPAGTNITCTGNACPEVEKADATTLYSFEDSGVGDVTGFLALDNTNKLIVLSFRGSRSIENWIGNLNFDLKEINDICSGCRGHDGFTSSWRSVADTLRQKVEAAVREHPDYRVVFTGHSLGGALATVAGADLRGNGYDIDVFSYGAPRVGNRAFAEFLTTQTGGTLYRITHTNDIVPRLPPREFGYSHSSPEYWIKSGTLVPVTRNDIVKIEGIDATGGNNQPNQPDIPAHLWYFGRIGTC

SEQ ID NO: 12987 - protein, 268 aa, Thermomyces lanuginosus
EVSQDLFNQFNLFAQYSAAAYCGKNNEAPAGTNITCTGNACPEVEKADATFLYSFKDMGVGDVTGFLALDNTNKLIVLSFRGSRSIENWIGNLNFDLKEINDICSGCRGHDGFTSSWRSVADTLRQKVEDAVREHPDYRVVFTGHSLGGALATVAGADLRGNGYDIDVFSYGAPRVGNRAFAEFLTVQTGGTLYRITHTNDIVPRLPPREFGYSHSSPEYWIKSGTLVPVTRQDIVKIEGIDATGGNNQPNIPDITAHLWYFGLIGTC

SEQ ID NO: 12988 - protein, 268 aa, Thermomyces lanuginosus
EVSQDLFNQFNLFAQYSAAAYCGANNDAPAGTNITCTGNACPEVEKADATFLYSFEDSGVGDVTGFLALDNTNKRIVLSFRGSRSIENWIGNLNFDLKEINDICSGCRGHDGFTSSWRSVADTLRQKVEDAVREHPDYRVVFTGHSLGGALATVAWADLRGNGYDIDVFSYGAPRVGNRAFAEFLTNQQGGTLYRITHTNDIVPRLPPREFGYSHSSPEYWIKSGTLVPVTRNDIVKIEGIDATGGNNQPNIPDIPAHLWYFGLIGTC

SEQ ID NO: 12989 - protein, 268 aa, Thermomyces lanuginosus
EVSQDLFNQFNLFAQYSAAAYCQANNDAPAGTNITCTGNACPEVEKADATFLYSFEDSGVGDVTGFLALDNTNKRIILSFRGSRSIENWIGNLNFDLKEINDICSGCRGHDGFTSSWRSVADTLRQKVEAAVREHPDYRVVFTGHSLGGALATVAGADLRGNGYDIDVFSYGAPRVGNRAFAEFLTVQTGGTLYRITHTNDIVPRLPPREFGYSHSSPEYWIKSGTLVPVTRNDIVKIEGIDATGGNNQPNIPDIPAHLWYFGLIGTC

SEQ ID NO: 12990 - protein, 268 aa, Thermomyces lanuginosus
EVSQDLFNQFNLFAQYSAAAYCGKNNDAPAGTQITCTGNACPEVEKADATFLYSFEDSGVGDVTGFLALDNTNKLIVLSFRGSRSIENWIGNLNFNLKEINDICSGCRGHDGFTSSWRSVADTLRQKVEDAVREHPDYRVVFTGHSLGGALATVAGADLRGNGYDIDVFSYGAPRVGNRAFAEFLTVQTGGTLYRITHTNDIVPRLPPREFGYSHSSPEYWIKSGTGVPVRRRDIVKIEGIDATGGNNRPNIPDIPAHLWYFGLIGTC

SEQ ID NO: 12991 - protein, 268 aa, Thermomyces lanuginosus
EVSQDLFNQFNLFAQYSAAAYCKKNNDAPAGTNITCTGNACPEVEKADATFLYSFEDSGVGDVTGFLALDNTNKGIVLSFRGSRSIENWIGNLNFDLKEINDICSGCRGHDGFTSSWRSVADTLRQKVEAAVREHPDYRVVFTGHSLGGALATVAGADLRGNGYDIDVFSYGAPRVGNRAFAEFLTTQTGGTLYRITHTNDIVPRLPPREFGYSHSSPEYWIKSGTLVPVTRNDIVKIEGIDATGGNNQPNQPDIPAHLWYFGRIGTC

SEQ ID NO: 12992 - protein, 268 aa, Thermomyces lanuginosus
EVSQDLFNQFNLFAQYSKAAYCQKNNDAPAGTNITCTGNACPEVFKADVTFLYSFEDSGVGDVTGFLALDNTNKQIVLSFRGSRSIENWIGNLNFDLKEINDICSGCRGHDGFTSSWRSVADTLRQKVEDAVREHPDYRVVFTGHSLGGALATVAGADLRGNGYDIDVFSYGAPRVGNRAFAEFLTVQTGGTLYRITHTNDIVPRLPPREFGYSHSSPEYWIKSGTLVPVTRNDIVKIEGIDATGGNNQPNIPDIPAHLWYFGLIGTC

SEQ ID NO: 12993 - protein, 268 aa, Thermomyces lanuginosus
EVSQDLFNQFNLFAQYSAAAYCQANNDAPAGTNITCTGNACPEVEKADATFLYSFEDSGVGDVTGFLALDNTNKQIILSFRGSRSIENWIGNLNFDLKEINDICSGCRGHDGFTSSWRSVADTLRQKVEDAVREHPDYRVVFTGHSLGGALATVAGADLRGNGYDIDVFSYGAPRVGNRAFAEFLTQQTGGTLYRITHTNDIVPRLPPREFGYSHSSPEYWIKSGTLVPVTRNDIVKIEGIDATGGNNQPNIPDIPAHLWYFGLIGTC

SEQ ID NO: 12994 - protein, 268 aa, Thermomyces lanuginosus
EVSQDLFNQFNLFAQYSKAAYCGKNNDAPAGTNITCTGNACPEVEKADATFLYSFEDSGVGDVTGFLALDNTNKQIVLSFRGSRSIENWIGNLNFDLKEINDICSGCRGHDGFTSSWRSVADTLRQKVEAAVREHPDYRVVFTGHSLGGALATIAGADLRGNGYDIDVFSYGAPRVGNRAFAEFLTVQQGGTLYRITHTNDIVPRLPPREFGYSHSSPEYWIKSGTLVPVTRNDIVKIEGIDATGGNNQPNIPDIPAHLWYFGRIGTC

SEQ ID NO: 12995 - protein, 268 aa, Thermomyces lanuginosus
EVSQDLFNQFNLFAQYSAAAYCGKNNDAPAGTNITCTGNACPEVEKAQATFLYSFEDSGVGDVTGFLALDNTNKLIVLSFRGSRSIENWIGNLNFDLKEINDICSGCRGHDGFTSSWRSVADTLRQKVEAAVREHPDYRVVFTGHSLGGALATVAGADLRGNPYDIDVFSYGAPRVGNRAFAEFLTVQTGGTLYRITHTNDIVPRLPPREFGYSHSSPEYWIKSGTMVPVTRQDIVKIEGIDATGGNNQPNIPDIPAHLWYFGRIGTC

SEQ ID NO: 12996 - protein, 268 aa, Thermomyces lanuginosus
EVSRDLFNQFNLFAQYSAAAYCGKNNDAPAGTNITCTGNACPEVEKADATFLYSFEDSGVGDVTGFLALDNTNKLIVLSFRGSRSIENWIGNLNFDLKEINDICSGCRGHDGFTSSWRSVADTLRQKVEDAVREHPDYRVVFAGHSLGGALATVAGADLRGDGYDIDVFSYGAPRVGNRAFAEFLTVQTGGTLYRITHTNDIVPRLPPREFGYSHSSPEYWIKSGTLVPVRRRDIVKIEGIDATGGNNQPNIPDIPAHLWYFGLIGTC

SEQ ID NO: 12997 - protein, 268 aa, Thermomyces lanuginosus
EVSQDLFNQFNLFAQYSAAAYCGKNNDAPAGTQITCTGNACPEVEKADATFLYSFEDSGVGDVTGFLALDNTNKLIVLSFRGSRSIENWIGNLNFDLIEINDICSGCRGHDGFTSSWRSVADTLRQKVEDAVREHPDYRVVFTGHSLGGALATVAGADLRGNKYDIDVFSYGAPRVGNRAFAEFLTVQTGGTLYRITHTNDIVPRLPPREFGYSHSSPEYWIKSGTLVPVRRRDIVKIEGIDATGGNNQPNIPDIPAHLWYFGLIGTC

SEQ ID NO: 12998 - protein, 268 aa, Thermomyces lanuginosus
EVSQDLFNQFNLFAQYSAAAYCGKNNDAPAGTNITCTGNICPEVEKADATFLYSFRDSGVGDVTGFLALDNTNKLIVLSFRGSRSIENWIGNLNFDLKEINDICSGCRGHDGFTSSWFSVADTLRQKVEDAVREHPDYRVVFTGHSLGGALATVAGADLRGNGYDIDVFSYGAPRVGNRAFAEFLTVQTGGTLYRITHTNDIVPRLPPREFGYSHSSPEYWIKSGTLVPVRRRDIVKIEGIDATGGNNQPNIPDIPAHLWYFGLIGTC

SEQ ID NO: 12999 - protein, 268 aa, Thermomyces lanuginosus
EVSQDLFNQFNLFAQYSKAAYCQANNDAPAGTNITCTGNACPEVEKADATFLYSFEDSGVGDVTGFLALDNTNKQIVLSFRGSRSIENWIGNLNFDLKEINDICSGCRGHDGFTSSWRSVADTLRQKVEDAVREHPDYRVVFTGHSLGGALATVAWADLRGNGYDIDVFSYGAPRVGNRAFAEFLTVQTGGTLYRITHTNDIVPRLPPREFGYSHSSPEYWIKSGTLVPVTRNDIVKIEGIDATGGNNQPNIPDIPAHLWYFGLIGTC

SEQ ID NO: 13000 - protein, 268 aa, Thermomyces lanuginosus
EVSQDLFNQFNLFAQYSAAAYCGKNNRAPAGTNITCTGNACPEVEKADATFLYSFEDSGVGDVTGFLALDNTNKLIVLSFRGSRSIENWITNLNFDLKEINDICSGCRGHAGFTSSWRSVADTLRQKVEDAVREHPDYRVVFTGHSLGGALATVAGADLRGNGYDIDVFSYGAPRVGNRAFAEFLTVQTGGTLYRITHTNDIVPRLPPREFGYSHPSPEYWIKSGTGVPVTRNDIVKIEGIDATGGNNQPNIPDITAHLWYFGLIGTC

SEQ ID NO: 13001 - protein, 268 aa, Thermomyces lanuginosus
EVSRDLFNQFNLFAQYSAAAYCGKNNDAPAGTNITCTGNACPEVEKADATILYSFEDSGVGDVTGFLALDNTNKLIVLSFRGSRSIENWIGNLNFDLKEINDICSGCRGHDGFTSSWRSVADTLRQKVEDAVREHPDYRVVFTGHSLGGALATVAGADLRGNGYDIDVFSYGAPRVGNRAFAEFLTVQTGGTLYRITHTNDIVPRLPPREFGYSHSSPEYWIKSGTLPPVRRRDIVKIEGIDATGGNNQPNIPDIPAHLWYFGLIGTC

SEQ ID NO: 13002 - protein, 268 aa, Thermomyces lanuginosus
EVSQDLFNQFNLFAQYSAAAYCGKNNDAPAGTQITCTGNACPEVEKADATFLYSFEDSGVGDVTGFLALDNTNKLIVLSFRGSRSIENWLGNLNFDLKEINDICSGCRGHDGFTSSWRSVADTLRQKVEDAVREHPDYRVVFTGHSLGGALATVAGADLRGNLYDIDVFSYGAPRVGNRAFAEFLTVQTGGTLYRITHTNDIVPRLPPREFGYSHSSPEYWIKSGTLVPVRRRDIVKIEGIDATGGNNQPNIPDIPAHLWYFGLIGTC

SEQ ID NO: 13003 - protein, 268 aa, Thermomyces lanuginosus
EVSQDLFNQFNLFAQYSAAAYCGKNNDAPAGTQITCTGNACPEVEKADATFLYSFEDSGVGDVTGFLALDNTNKLIVLSFRGSRSIENWIGNLNFDLKEINDICSGCRGHDGFTSSWRSVADTLRQKVEDAVREHPDYRVVFTGHSLGGALATVAGADLRGNGYDIDVFSYGAPRVANRAFAEFLTVQTGGTLYRITHTNDIVPRLPPREFGYSHSSPEYWIKSGTLVPVRRRDIVKIEGIDATGANNQPNIPDIPAHLWYFGLIGTC

SEQ ID NO: 13004 - protein, 268 aa, Thermomyces lanuginosus
EVSQDLFNQFNLFAQYSAAAYCQKNNDAPAGTNITCTGNACPEVEKADATFLYSFEDSGVGDVTGFLALDNTNKRIVLSFRGSRSIENWIGNLNFDLKEINDICSGCRGHDGFTSSWRSVADTLRQKVEDAVREHPDYRVVFTGHSLGGALATIAWADLRGNGYDIDVFSYGAPRVGNRAFAEFLTNQTGGTLYRITHTNDIVPRLPPREFGYSHSSPEYWIKSGTLVPVTRNDIVKIEGIDATGGNNQPNIPDIPAHLWYFGRIGTC

SEQ ID NO: 13005 - protein, 268 aa, Thermomyces lanuginosus
EVSQDLFNQFNLFAQYSAAAYCQKNNDAPAGTNITCTGNACPEVEKADATFLYSFEDSGVGDVTGFLALDNTNKQIILSFRGSRSIENWIGNLNFDLKEINDICSGCRGHDGFTSSWRSVADTLRQKVEAAVREHPDYRVVFTGHSLGGALATVAWADLRGNGYDIDVFSYGAPRVGNRAFAEFLTVQTGGTLYRITHTNDIVPRLPPREFGYSHSSPEYWIKSGTLVPVTRNDIVKIEGIDATGGNNQPNIPDIPAHLWYFGLIGTC

SEQ ID NO: 13006 - protein, 268 aa, Thermomyces lanuginosus
EVSQDLFNQFNLFAQYSAAAYCGKNNRAPAGTNITCTGNACPEVEKADATFLYSFEDSGVGDVTGFLALDNTNKLIVLSFRGSRSIENWITNLNFNLKEINDICSGCRGHAGFTSSWRSVADTLRQKVEDAVREHPDYRVVFTGHSLGGALATVAGADLRGNGYDIDVFSYGAPRVGNRAFAEFLTVQTGGTLYRITHTNDIVPRLPPREFGYSHSPPEYWIKSGTGVPVTRNDIVKIEGIDATGGNNQPNIPDITAHLWYFGLIGTC

SEQ ID NO: 13007 - protein, 268 aa, Thermomyces lanuginosus
EVSQDLFNQFNLFAQYSKAAYCGKNNSAPAGTDITCTGNACPEVEKADATFLYSFEDSGVGDVTGFLALDNTNKDIVLSFRGSRSIENWIGNLNFDLKEINDICSGCRGHDGFTSSWRSVADTLRQKVEDAVREHPDYRVVFTGHSLGGALATVAGADLRGNGYDIDVFSYGAPRVGNRAFAEFLTVQDGGTLYRITHTNDIVPRLPPREFGYSHSSPEYWIKSGTLVPVTRNDIVKIEGIDATGGNNQPNIPDIPAHLWYFGLIGTC

SEQ ID NO: 13008 - protein, 268 aa, Thermomyces lanuginosus
EVSQDLFNQFNLFAQYSAAAYCGKNNHAPAGTNITCTGNACPEVEKADATFLYSFEDSGVGDVTGFLALDNTNKLIVLSFRGSRSIQNWIGNLNFNLKEINDICSGCRGHDGFTSSWRSVADTLRQKVEDAVREHPDYRVVFTGHSLGGALATVAGADLRGNGYDIDVFSYGAPRVGNRAFAEFLTVQTGGTLYRITHTNDIVPRLPPREFGYSHSSPEYWIKSGTLVPVRRRDIVKIEGIDATGGNNQPNIPVIPAHLWYFGLIGTC

SEQ ID NO: 13009 - protein, 268 aa, Thermomyces lanuginosus
EVSQDLFNQFNLFAQYSAAAYCQKNNDAPAGTNITCTGNACPEVEKADATTLYSFEDMGVGDVTGFLALDNTNKLIVLSFRGSRSIENWIQNLNFDLKEINDICSGCRGHDGFTSSWRSVADTLRQKVEAAVREHPDYRVVFTGHSLGGALATVAGADLRGNGYDIDVFSYGAPRVGNRAFAEFLTVQTGGTLYRITHTNDIVPRLPPREFGYSHSSPEYWIKSGTLVPVTRNDIVKIEGIDATGGNNQPNQPDIPAHLWYFGRIGTC

SEQ ID NO: 13010 - protein, 268 aa, Thermomyces lanuginosus
EVSQDLFNQFNLFAQYSAAAYCGKNNEAPAGTNITCTGNACPEVEKADATFLYSFEDMGVGDVTGFLALDNTNKLIVLSFRGSRSIENWIGNLNFDLKEINDICSGCRGHDGFTSSWRSVADTLRQKVEAAVREHPDYRVVFTGHSLGGALATVAGADLRGNPYDIDVFSYGAPRVGNRAFAEFLTVQTGGTLYRITHTNDIVPRLPPREFGYSHSSPEYWIKSGTMVPVTRNDIVKIEGIDATGGNNQPNIPDIPAHLWYFGRIGTC

SEQ ID NO: 13011 - protein, 268 aa, Thermomyces lanuginosus
EVSQDLFNQFNLFAQYSAAAYCGKNNDAPAGTNITCTGNACPEVEKADATTLYSFKDSGVGDVTGFLALDNTNKQIVLSFRGSRSIENWIGNLNFDLKEINDICSGCRGHDGFTSSWRSVADTLRQKVEDAVREHPDYRVVFTGHSLGGALATVAGADLRGNGYDIDVFSYGAPRVGNRAFAEFLTHQTGGTLYRITHTNDIVPRLPPREFGYSHSSPEYWIKSGTLVPVTRNDIVKIEGIDATGGNNQPNQPDIPAHLWYFGRIGTC

SEQ ID NO: 13012 - protein, 268 aa, Thermomyces lanuginosus
EVSQDLFNQFNLFAQYSAAAYCGKNNRAPAGTNITCTGNACPEVEKADATFLYSFEDSGVGDVTGFLALDNTNKLIVLSFRGSRSIENWIANLNFDLKEINDICSGCRGHAGFTSSWRSVADTLRQKVEDAVREHVDYRVVFTGHSLGGALATVAGADLRGNGYDIDVFSYGAPRVGNRAFAEFLTVQTGGTLYRITHTNDIVPRLPPREFGYSHPSPEYWIKSGTGVPVTRNDIVKIEGIDATGGNNQPNIPDITAHLWYFGLIGTC

SEQ ID NO: 13013 - protein, 268 aa, Thermomyces lanuginosus
EVSQDLFNQFNLFAQYSAAAYCGKNNDAPAGTNITCTGNACPEVEKADATILYSFEDSGVGDVTGFLALDNTNKLIVLSFRGSRSIENWIGNLNFDLKEINDICSGCRGHDGFTSSWRSVADTLRQKVEDAVREHPDYRVVFTGHSLGGALATVAGADLRGNGYDIDVFSYGAPRVGNRAFAEFLTVQTGGTLYRITSTNDIVPRLPPREFGYSHSSPEYWIKSGTLRPVRRRDIVKIEGIDATGGNNQPNIPDIPAHLWYFGLIGTC

SEQ ID NO: 13014 - protein, 268 aa, Thermomyces lanuginosus
EVSQDLFNQFNLFAQYSAAAYCQANNDAPAGTNITCTGNACPEVEKADATFLYSFEDSGVGDVTGFLALDNTNKRIVLSFRGSRSIENWIGNLNFDLKEINDICSGCRGHDGFTSSWRSVADTLRQKVEAAVREHPDYRVVFTGHSLGGALATIAGADLRGNGYDIDVFSYGAPRVGNRAFAEFLTVQTGGTLYRITHTNDIVPRLPPREFGYSHSSPEYWIKSGTLVPVTRNDIVKIEGIDATGGNNQPNIPDIPAHLWYFGLIGTC

SEQ ID NO: 13015 - protein, 268 aa, Thermomyces lanuginosus
EVSQDLFNQFNLFAQYSKAAYCGKNNDAPAGTNITCTGNACPEVEKADATFLYSFEDSGVGDVTGFLALDNTNKQIVLSFRGSRSIENWIGNLNFDLKEINDICSGCRGHAGFTSSWRSVADTLRQKVEAAVREHPDYRVVFTGHSLGGALATVAGADLRGNGYDIDVFSYGAPRVGNRAFAEFLTTQTGGTLYRITHTNDIVPRLPPREFGYSHSSPEYWIKSGTLVPVTRNDIVKIEGIDATGGNNQPNIPDIPAHLWYFGLIGTC

SEQ ID NO: 13016 - protein, 268 aa, Thermomyces lanuginosus
EVSQDLFNQFNLFAQYSAAAYCGKNNDAPAGTNITCTGNACPEVEKADATFLYSFRNSGVGDVTGFLALDNTNKLIVLSFRGSRSIENWIGNLNFDLKEINDICSGCRGHDGFTSSWFSVADTLRQKVEDAVREHPDYRVVFTGHSLGGALATVAGADLRGNGYDIDVFSYGAPRVGNRAFAEFLTVQTGGTLYRITHTNDIVPRLPPREFGYSHSSPEYWIKSGTLVPVRRRDIVKIEGIDATGGNNQPNIPDIPAHLWYFGLIGTC

SEQ ID NO: 13017 - protein, 268 aa, Thermomyces lanuginosus
EVSQDLFNQFNLFAQYSAAAYCGKNNDAPAGTNITCTGNACPEVEKADATFLYSFEDNGSGDVTGFLALDNTNKLIVLSFRGSRSIENWIGNLNFDLKEINDICSGCRGHDGFTSSWRSVADTLRQKVEDAVREHPDYRVVFTGHSLGGALATVAGADLRGNGYDIDVFSYGAPRVGNRAFAEFLTVQTGGTLYRITHTNDIVPRLPPREFGYSHSSPEYWIKSGTLVPVRRRDIVKIEGIDATGGNNLPNIPDIPAHLWYFGLIGTC

SEQ ID NO: 13018 - protein, 268 aa, Thermomyces lanuginosus
EVSQDLFNQFNLFAQYSKAAYCGKNNSAEAGTDITCTGNACPEVEKADATFLYSFEDSGVGDVTGFLALDNTNKDIVLSFRGSRSIENWIGNLNFDLKEINDICSGCRGHDGFTSSWRSVADTLRQKVEDAVREHPDYRVVFTGHSLGGALATVAGADLRGNGYDIDVFSYGAPRVGNRAFAEFLTVQTGGTLYRITHTNDIVPRLPPREFGYSHSSPEYWIKSGTLVPVTRNDIVKIEGIDATGGNNQPNIPDIPAHLWYFGLIGTC

SEQ ID NO: 13019 - protein, 268 aa, Thermomyces lanuginosus
EVSQDLFNQFNLFAQYSAAAYCGKNNDAPAGTQITCTGNACPEVEKADATFLYSFEDSGVGDVTGFLALDNTNKLIVLSFRGSRSIENWITNLSFDLKEINDICSGCRGHAGFTSSWRSVADTLRQKVEDAVREHPDYRVVFTGHSLGGALATVAGADLRGNGYDIDVFSYGAPRVGNRAFAEFLTVQTGGTLYRITHTNDIVPRLPPREFGYSHSSPEYWIKSGTLVPVRRRDIVKIEGIDATGGNNQPNIPDIPAHLWYFGLIGTC

SEQ ID NO: 13020 - protein, 268 aa, Thermomyces lanuginosus
EVSQDLFNQFNLFAQYSKAAYCQKNNDAPAGTNITCTGNACPEVFKADATFLYSFEDSGVGDVTGFLALDNTNKQIVLSFRGSRSIENWIGNLNFDLKEINDICSGCRGHDGFTSSWRSVADTLRQKVEDAVREHPDYRVVFTGHSLGGALATVAGADLRGNGYDIDVFSYGAPRVGNRAFAEFLTTQTGGTLYRITHTNDIVPRLPPREFGYSHSSPEYWIKSGTLVPVTRNDIVKIEGIDATGGNNQPNIPDIPAHLWYFGLIGTC

SEQ ID NO: 13021 - protein, 268 aa, Thermomyces lanuginosus
EVSDDLFNQFNLFAQYSAAAYCGKNNNAPAGTNITCTGNACPEVEKADATFLYSFEDSGVGDVTGFLALDNTNKLIVLSFRGSRSIENWFGNLNFDLKEINDICSGCRGHDGFTSSWRSVADTLRQKVEDAVREHPDYRVVFTGHSLGGALATVAGADLRGNGYDIDVFSYGAPRVGNRAFAEFLTVQTGGTLYRITHTNDIVPRLPPREFGYSHSSPEYWIKSGTLVPVTRQDIVKIEGIDATGGNNQPNIPDITAHLWYFGLIGTC

SEQ ID NO: 13022 - protein, 268 aa, Thermomyces lanuginosus
EVSQDLFNQFNLFAQYSAAAYCGKNNDAPAGTQITCTGNACPEVEKADATFLYSFEDSGVGDVTGFLALDNTNKLIVLSFRGSRSIENWIQNLNFDLKEINDICSGCRGHDGFTSSWRSVADTLRQKVEDAVREHPDYRVVFTGHSLGGALATVAGADLRGNGYDIDVFSYGAPRVGNRAFAEFLTVQTGGTLYRITHTNDIVPRLPPRQFGYSHSSPEYWIKSGTLVPVRRRDIVKIEGIDATGGNNQPNIPDAPAHLWYFGLIGTC

SEQ ID NO: 13023 - protein, 268 aa, Thermomyces lanuginosus
EVSQDLFNQFNLFAQYSKAAYCGANNDAPAGTNITCTGNACPEVEKADATFLYSFEDSGVGDVTGFLALDNTNKRIVLSFRGSRSIENWIGNLRFDLKEINDICSGCRGHDGFTSSWRSVADTLRQKVEAAVREHPDYRVVFTGHSLGGALATVAGADLRGNGYDIDVFSYGAPRVGNRAFAEFLTVQTGGTLYRITHTNDIVPRLPPREFGYSHSSPEYWIKSGTLVPVTRNDIVKIEGIDATGGNNQPNIPDIPAHLWYFGLIGTC

SEQ ID NO: 13024 - protein, 268 aa, Thermomyces lanuginosus
EVSVDLFNQFNLFAQYSAAAYCGKNNDAPAGTNITCTGNACPEVEKADATFLYSFEDNGSGDVTGFLALDNTNKLIVLSFRGSRSIENWIGNLNFDLKEINDICSGCRGHDGFTSSWRSVADTLRQKVEDAVREHPDYRVVFTGHSLGGALATVAGADLRGNGYDIDVFSYGAPRVGNRAFAEFLTVQTGGTLYRITHTNDIVPRLPPREFGYSHSSPEYWIKSGTLVPVRRRDIVKIEGIDATGGNNQPNIPDIPAHLWYFGLIGTC

SEQ ID NO: 13025 - protein, 268 aa, Thermomyces lanuginosus
EVSQDLFNQFNLFAQYSAAAYCGKNNDAPAGTNITCTGNACPEVEKADATFLYSFEDSGVGDVTGFLALDNTNKLIVLSFRGSRSIENWIGNLNFDLKEINDICSGCRGHAGFTSSWRSVADTLRQKVEDAVREHPDYRVVFTGHSLGGALATVAGADLRGNGYDIDVFSYGAPRVGNRAFAEFLTVQTGGTLYRITHTNDIVPRLPPREFGYSHSSPEYWIKSGTLVPVRRRDIVKIEGIDATGGNNQPNIPSITAHLWYFGLIGTC

SEQ ID NO: 13026 - protein, 268 aa, Thermomyces lanuginosus
EVSQDLFNQFNLFAQYSAAAYCGKNNDAPAGTNITCTGNACPEVEKADATTLYSFEDSGVGDVTGFLALDNTNKGIVLSFRGSRSIENWIQNLNFDLKEINDICSGCRGHDGFTSSWRSVADTLRQKVEAAVREHPDYRVVFTGHSLGGALATVAGADLRGNGYDIDVFSYGAPRVGNRAFAEFLTNQTGGTLYRITHTNDIVPRLPPREFGYSHSSPEYWIKSGTLVPVTRNDIVKIEGIDATGGNNQPNQPDIPAHLWYFGRIGTC

SEQ ID NO: 13027 - protein, 268 aa, Thermomyces lanuginosus
EVSQDLFNQFNLFAQYSAAAYCGKNNDAPAGTNITCTGNACPEVEKADATFLYSFRDSGVGDVTGFLALDNTNKLIVLSFRGSRSIENWIGNLNFDLKEINDICSGCRGHDGFTSSWFSVADTLRQKVEDAVREHPDYRVVFTGHSLGGALATVAGADLRGNGYDIDVFSYGAPRVGNRAFAEFLTVQTGGTLYRITHTNDIVPRLPPREFGYSHSSPEFWIKSGTLVPVRRRDIVKIEGIDATGGNNQPNIPDIPAHLWYFGLIGTC

SEQ ID NO: 13028 - protein, 268 aa, Thermomyces lanuginosus
EVSQDLFNQFNLFAQYSAAAYCGKNNDAPAGTNITCTGNACPEVEKADATTLYSFEDSGVGDVTGFLALDNTNKQIVLSFRGSRSIENWIQNLNFDLKEINDICSGCRGHDGFTSSWRSVADTLRQKVEAAVREHPDYRVVFTGHSLGGALATVAGADLRGNGYDIDVFSYGAPRVGNRAFAEFLTHQTGGTLYRITHTNDIVPRLPPREFGYSHSSPEYWIKSGTLVPVTRNDIVKIEGIDATGGNNQPNQPDIPAHLWYFGRIGTC

SEQ ID NO: 13029 - protein, 268 aa, Thermomyces lanuginosus
EVSQDLFNQFNLFAQYSKAAYCQKNNDAPAGTNITCTGNACPEVFKADATFLYSFEDSGVGDVTGFLALDNTNKLIILSFRGSRSIENWIGNLNFDLKEINDICSGCRGHDGFTSSWRSVADTLRQKVEDAVREHPDYRVVFTGHSLGGALATVAGADLRGNGYDIDVFSYGAPRVGNRAFAEFLTVQDGGTLYRITHTNDIVPRLPPREFGYSHSSPEYWIKSGTLVPVTRNDIVKIEGIDATGGNNQPNIPDIPAHLWYFGLIGTC

SEQ ID NO: 13030 - protein, 268 aa, Thermomyces lanuginosus
EVSQDLFNQFNLFAQYSAAAYCQKNNDAPAGTNITCTGNACPEVEKADATFLYSFEDMGVGDVTGFLALDNTNKGIVLSFRGSRSIENWIQNLNFDLKEINDICSGCRGHDGFTSSWRSVADTLRQKVEAAVREHPDYRVVFTGHSLGGALATVAGADLRGNGYDIDVFSYGAPRVGNRAFAEFLTVQTGGTLYRITHTNDIVPRLPPREFGYSHSSPEYWIKSGTLVPVTRNDIVKIEGIDATGGNNQPNQPDIPAHLWYFGRIGTC

SEQ ID NO: 13031 - protein, 268 aa, Thermomyces lanuginosus
EVSQDLFNQFNLFAQYSAAAYCGKNNDAPAGTNITCTGNACPEVEKADATFLYSFKDMGVGDVTGFLALDNTNKLIVLSFRGSRSIENWFGNLNFDLKEINDICSGCRGHDGFTSSWRSVADTLRQKVEDAVREHPDYRVVFTGHSLGGALATVAGADLRGNGYDIDVFSYGAPRVGNRAFAEFLTVQTGGTLYRITHTNDIVPRLPPREFGYSHSSPEYWIKSGTLVPVTRQDIVKIEGIDATGGNNQPNIPDITAHLWYFGLIGTC

SEQ ID NO: 13032 - protein, 268 aa, Thermomyces lanuginosus
EVSQDLFNQFNLFAQYSAAAYCGKNNRAPAGTNITCTGNACPEVEKADATFLYSFEDSGVGDVTGFLALDNTNKLIVLSFRGSRSIENWIGNLNFDLKEINDICSGCRGHDGFTSSWRSVADTLRQKVEDAVREHPDYRVVFTGHSLGGALATVAGADLRGNKYDIDVFSYGAPRVGNRAFAEFLTVQTGGTLYRITHTNDIVPRLPPREFGYSHSSPEYWIKSGTLVPVRRRDIVKIEGIDATGGNNQPNIPSIPAHLWYFGLIGTC

SEQ ID NO: 13033 - protein, 268 aa, Thermomyces lanuginosus
EVSDDLFNQFKLFAQYSAAAYCGKNNQAPAGTNITCTGNACPEVEKADATFLYSFKDSGVGDVTGFLALDNTNKLIVLSFRGSRSIENWIGNLNFDLKEINDICSGCRGHDGFTSSWRSVADTLRQKVEDAVREHPDYRVVFTGHSLGGALATVAGADLRGNGYDIDVFSYGAPRVGNRAFAEFLTVQTGGTLYRITHTNDIVPRLPPREFGYSHSSPEYWIKSGTLVPVTRQDIVKIEGIDATGGNNQPNIPDIPAHLWYFGLIGTC

SEQ ID NO: 13034 - protein, 268 aa, Thermomyces lanuginosus
EVSQDLFNQFNLFAQYSAAAYCGKNNDAPAGTNITCTGNACPEVEKADATFLYSFEDSGKGDVTGFLALDNTNKLIVLSFRGSRSIENWIGNLNFDLKEINDICSGCRGHDGFTSSWRSVADTLRQKVEDAVREHPDYRVVFTGHSLGGGLATVAGADLRGNGYDIDVFSYGAPRVGNRAFAEFLTVQTGGTLYRITHTNDIVPRLPPREFGYSHSSPEYWIKSGTLVPVRRRDIVKIEGIDATGGNNQPNIPDVPAHLWYFGLIGTC

SEQ ID NO: 13035 - protein, 268 aa, Thermomyces lanuginosus
EVSQDLFNQFNLFAQYSAAAYCGANNDAPAGTNITCTGNACPEVEKADATFLYSFEDSGVGDVTGFLALDNTNKQIVLSFRGSRSIENWIGNLNFDLKEINDICSGCRGHDGFTSSWRSVADTLRQKVEDAVREHPDYRVVFTGHSLGGALATIAGADLRGNGYDIDVFSYGAPRVGNRAFAEFLTNQQGGTLYRITHTNDIVPRLPPREFGYSHSSPEYWIKSGTLVPVTRNDIVKIEGIDATGGNNQPNIPDIPAHLWYFGRIGTC

SEQ ID NO: 13036 - protein, 268 aa, Thermomyces lanuginosus
EVSQDLFNQFNLFAQYSKAAYCQKNNDAPAGTNITCTGNACPEVEKADVTFLYSFEDSGVGDVTGFLALDNTNKLIILSFRGSRSIENWIGNLNFDLKEINDICSGCRGHDGFTSSWRSVADTLRQKVEDAVREHPDYRVVFTGHSLGGALATVAGADLRGNGYDIDVFSYGAPRVGNRAFAEFLTTQTGGTLYRITHTNDIVPRLPPREFGYSHSSPEYWIKSGTLVPVTRNDIVKIEGIDATGGNNQPNIPDIPAHLWYFGLIGTC

SEQ ID NO: 13037 - protein, 268 aa, Thermomyces lanuginosus
EVSQDLFNQFNLFAQYSAAAYCKKNNDAPAGTNITCTGNACPEVEKADATFLYSFEDSGVGDVTGFLALDNTNKLIVLSFRGSRSIENWIGNLRFDLKEINDICSGCRGHAGFTSSWRSVADTLRQKVEDAVREHPDYRVVFTGHSLGGALATVAWADLRGNGYDIDVFSYGAPRVGNRAFAEFLTTQTGGTLYRITHTNDIVPRLPPREFGYSHSSPEYWIKSGTLVPVTRNDIVKIEGIDATGGNNQPNIPDIPAHLWYFGRIGTC

SEQ ID NO: 13038 - protein, 268 aa, Thermomyces lanuginosus
EVSQDLFNQFNLFAQYSAAAYCGKNNRAPAGTNITCTGNACPEVEKADATFLYSFEDSGVGDVTGFLALDNTNKLIVLSFRGSRSIENWIGNLNFELKEINDICSGCRGHDGFTSSWRSVADTLRQKVEDAVREHPDYRVVFTGHSLGGALATVAGADLRGNKYDIDVFSYGAPRVGNRAFAEFLTVQTGGTLYRITHTNDIVPRLPPREFGYSHSSPEYWIKSGTLVPVRRRDIVKIEGIDATGGNNQPNIPSIPAHLWYFGLIGTC

SEQ ID NO: 13039 - protein, 268 aa, Thermomyces lanuginosus
EVSQDLFNQFNLFAQYSAAAYCGKNNSAPAGTNITCTGNACPEVEKADATFLYSFEDSGVGDVTGFLALDNTNKQIVLSFRGSRSIENWIGNLNFDLKEINDICSGCRGHAGFTSSWRSVADTLRQKVEAAVREHPDYRVVFTGHSLGGALATVAGADLRGNGYDIDVFSYGAPRVGNRAFAEFLTNQTGGTLYRITHTNDIVPRLPPREFGYSHSSPEYWIKSGTLVPVTRNDIVKIEGIDATGGNNQPNIPDIPAHLWYFGLIGTC

SEQ ID NO: 13040 - protein, 268 aa, Thermomyces lanuginosus
EVSQDLFNQFNLFAQYSAAAYCQKNNDAPAGTNITCTGNACPEVFKADVTFLYSFEDSGVGDVTGFLALDNTNKLIVLSFRGSRSIENWIGNLNFDLKEINDICSGCRGHDGFTSSWRSVADTLRQKVEDAVREHPDYRVVFTGHSLGGALATVAWADLRGNGYDIDVFSYGAPRVGNRAFAEFLTVQDGGTLYRITHTNDIVPRLPPREFGYSHSSPEYWIKSGTLVPVTRNDIVKIEGIDATGGNNQPNIPDIPAHLWYFGLIGTC

SEQ ID NO: 13041 - protein, 268 aa, Thermomyces lanuginosus
EVSVDLFNQFNLFAQYSAAAYCGKNNDAPAGTNITCTGNACPEVEKADATFLYSFEDSGKGDVTGFLALDNTNKLIVLSFRGSRSIENWIGNLNFDLKEINDICSGCRGHDGFTSSWRSVADTLRQKVEDAVREHPDYRVVFTGHSLGGGLATVAGADLRGNGYDIDVFSYGAPRVGNRAFAEFLTVQTGGTLYRITHTNDIVPRLPPREFGYSHSSPEYWIKSGTLVPVRRRDIVKIEGIDATGGNNQPNIPDIPAHLWYFGLIGTC

SEQ ID NO: 13042 - protein, 268 aa, Thermomyces lanuginosus
EVSQDLFNQFNLFAQYSAAAYCGKNNNAPAGTNITCTGNACPEVEKADATFLYSFRDSGVGDVTGFLALDNTNKLIVLSFRGSRSIENWIGNLNFDLKEINDICSGCRGHDGFTSSWFSVADTLRQKVEDAVREHPDYRVVFTGHSLGGALATVAGADLRGNGYDIDVFSYGAPRVGNRAFAEFLTVQTGGTLYRITHTNDIVPRLPPREFGYSHSSPEYWIKSGTLVPVRRRDIVKIEGIDATGGNNQPNIPDIPAHLWYFGLIGTC

SEQ ID NO: 13043 - protein, 268 aa, Thermomyces lanuginosus
EVSQDLFNQFKLFAQYSAAAYCGKNNQAPAGTNITCTGNACPEVEKADATFLYSFKDMGVGDVTGFLALDNTNKLIVLSFRGSRSIENWIGNLNFDLKEINDICSGCRGHDGFTSSWRSVADTLRQKVEDAVREHPDYRVVFTGHSLGGALATVAGADLRGNGYDIDVFSYGAPRVGNRAFAEFLTVQTGGTLYRITHTNDIVPRLPPREFGYSHSSPEYWIKSGTLVPVTRQDIVKIEGIDATGGNNQPNIPDIPAHLWYFGLIGTC

SEQ ID NO: 13044 - protein, 268 aa, Thermomyces lanuginosus
EVSQDLFNQFNLFAQYSKAAYCGKNNDAPAGTNITCTGNACPEVFKADVTFLYSFEDSGVGDVTGFLALDNTNKQIVLSFRGSRSIENWIGNLNFDLKEINDICSGCRGHDGFTSSWRSVADTLRQKVEDAVREHPDYRVVFTGHSLGGALATVAWADLRGNGYDIDVFSYGAPRVGNRAFAEFLTVQTGGTLYRITHTNDIVPRLPPREFGYSHSSPEYWIKSGTLVPVTRNDIVKIEGIDATGGNNQPNIPDIPAHLWYFGLIGTC

SEQ ID NO: 13045 - protein, 268 aa, Thermomyces lanuginosus
EVSQDLFNQFNLFAQYSAAAYCGKNNSAPAGTDITCTGNACPEVEKADATFLYSFEDSGVGDVTGFLALDNTRKDIVLSFRGSRSIENWIGNLNFDLKEINDICSGCRGHDGFTSSWRSVADTLRQKVEDAVREHPDYRVVFTGHSLGGALATVAGADLRGNGYDIDVFSYGAPRVGNRAFAEFLTVQDGGTLYRITHTNDIVPRLPPREFGYSHSSPEYWIKSGTLVPVTRNDIVKIEGIDATGGNNQPNIPDIPAHLWYFGLIGTC

SEQ ID NO: 13046 - protein, 268 aa, Thermomyces lanuginosus
EVSQDLFNQFNLFAQYSAAAYCGANNDAPAGTNITCTGNACPEVEKADATFLYSFEDSGVGDVTGFLALDNTNKQIILSFRGSRSIENWIGNLNFDLKEINDICSGCRGHDGFTSSWRSVADTLRQKVEDAVREHPDYRVVFTGHSLGGALATIAGADLRGNGYDIDVFSYGAPRVGNRAFAEFLTNQTGGTLYRITHTNDIVPRLPPREFGYSHSSPEYWIKSGTLVPVTRNDIVKIEGIDATGGNNQPNIPDIPAHLWYFGLIGTC

SEQ ID NO: 13047 - protein, 268 aa, Thermomyces lanuginosus
EVSRDLFNQFNLFAQYSAAAYCGKNNDAPAGTNITCTGNACPEVEKADATFLYSFEDSGVGDVTGFLALDNTNKLIVLSFRGSRSIENWIGNLNFDLKEINDICSGCRGHDGFTSSWRSVADTLRQKVEDAVREHPDYRVVFAGHSLGGALATVAGADLRGNGYDIDVFSYGAPRVGNRAFAEFLTVQTGGTLYRITHTNDIVPRLPPREFGYSHSSPEYWIKSGTLPPVRRRDIVKIEGIDATGGNNQPNIPDIPAHLWYFGLIGTC

SEQ ID NO: 13048 - protein, 268 aa, Thermomyces lanuginosus
EVSQDLFNQFNLFAQYSAAAYCKKNNDAPAGTNITCTGNACPEVEKADATFLYSFKDSGVGDVTGFLALDNTNKRIVLSFRGSRSIENWIGNLNFDLKEINDICSGCRGHDGFTSSWRSVADTLRQKVEAAVREHPDYRVVFTGHSLGGALATVAGADLRGNGYDIDVFSYGAPRVGNRAFAEFLTVQQGGTLYRITHTNDIVPRLPPREFGYSHSSPEYWIKSGTLVPVTRNDIVKIEGIDATGGNNQPNIPDIPAHLWYFGRIGTC

SEQ ID NO: 13049 - protein, 268 aa, Thermomyces lanuginosus
EVSQDLFNQFNLFAQYSAAAYCGKNNEAPAGTNITCTGNACPEVEKADATFLYSFEDSGVGDVTGFLALDNTNKLIVLSFRGSRSIENWIGNLNFDLKEINDICSGCRGHDGFTSSWRSVADTLRQKVEAAVREHPDYRVVFTGHSLGGALATVAGADLRGNPYDIDVFSYGAPRVGNRAFAEFLTVQTGGTLYRITHTNDIVPRLPPREFGYSHSSPEYWIKSGTMVPVTRADIVKIEGIDATGGNNQPNIPDIPAHLWYFGRIGTC

SEQ ID NO: 13050 - protein, 268 aa, Thermomyces lanuginosus
EVSQDLFNHFNLFAQYSAAAYCGKNNDAPAGTQITCTGNACPEVEKADATFLYSFEDSGVGDVTGFLALDNTNKLIVLSFRGSRSIENWIGNLNFDLKEINEICSGCRGHDGFTSSWRSVADTLRQKVEDAVREHPDYRVVFTGHSLGGALATVAGADLRGNGYDIDVFSYGAPRVGNRAFAEFLTVQTGGTLYRITHTNDIVPRLPPREFGYSHSSPEYWIKSGTLVPVRRRDIVKIEGIDATGGNNQPNIPDIPAHLWYFGLIGTC

SEQ ID NO: 13051 - protein, 268 aa, Thermomyces lanuginosus
EVSRDLFNQFNLFAQYSAAAYCGKNNDAPAGTNITCTGNACPEVEKADATFLYSFEDSGVGDVTGFLALDNTNKLIVLSFRGSRSIENWIGNLNFDLKEINDICSGCRGHDGFTSSWRSVADTLRQKVEDAVREHPDYRVVFTGHSLGGALATVAGADLRGNGYDIDVFSYGAPRVGNRAFAEFLTVQTGGTLYRITSTNDIVPRLPPREFGYSHSSPEYWIKSGTLPPVRRRDIVKIEGIDATGGNNQPNIPDIPAHLWYFGLIGTC

SEQ ID NO: 13052 - protein, 268 aa, Thermomyces lanuginosus
EVSQDLFNQFNLFAQYSAAAYCGKNNDAPAGTNITCTGNACPEVEKADATFLYSFEDSGVGDVTGFLALDNTNKLIVLSFRGSRSIENWIGNLNFDLKEINDICSGCRGHDGFTSSWRSVADTLRQKVEDAVREHPDYRVVFTGHSLGGALATVAGADLRGNGYDIDVFSYGAPRVGNRAFAEFLTVQTGGTLYRITHTNDIVPRLPPREFGYSHSSPEYWIKYWNPCPVTRNDIVKIEGIDATGGNNQPNIPDIPAHLWYFGLIGTC

SEQ ID NO: 13053 - protein, 268 aa, Thermomyces lanuginosus
EVSQDLFNQFNLFAQYSAAAYCGKNNRAPAGTNITCTGNACPEVEKADATFLYSFEDSGVGDVTGFLALDNTNKLIVLSFRGSRSIENWIGNLNFELKEINDICSGCRGHAGFTSSWRSVADTLRQKVEDAVREHPDYRVVFTGHSLGGALATVAGADLRGNKYDIDVFSYGAPRVGNRAFAEFLTVQTGGTLYRITHTNDIVPRLPPREFGYSHSSPEYWIKSGTLVPVRRRDIVKIEGIDATGGNNQPNIPDIPAHLWYFGLIGTC

SEQ ID NO: 13054 - protein, 268 aa, Thermomyces lanuginosus
EVSQDLFNQFNLFAQYSAAAYCGKNNRAPAGTNITCTGNACPEVEKADATFLYSFEDSGVGDVTGFLALDNTNKLIVLSFRGSRSIENWIGNLNFDLKEINDICSGCRGHAGFTSSWRSVADTLRQKVEDAVREHPDYRVVFTGHSLGGALATVAGADLRGNGYDIDVFSYGAPRVGNRAFAEFLTVQTGGTLYRITHTNDIVPRLPPREFGYSHPSPEYWIKSGTGVPVTRNDIVKIEGIDATGGNNQPNIPDITAHLWYFGLIGTC

SEQ ID NO: 13055 - protein, 268 aa, Thermomyces lanuginosus
EVSRDLFNQFNLFAQYSAAAYCGKNNDAPAGTNITCTGNACPEVEKADATFLYSFEDSGVGDVTGFLALDNTNKLIVLSFRGSRSIENWIGNLNFDLKEINDICSGCRGHDGFTSSWRSVADTLRQKVEDAVREHPDYRVVFAGHSLGGALATVAGADLRGNGYDIDVFSYGAPRVGNRAFAEFLTVQTGGTLYRITHTNDIVPRLPPREFGYSHSSPEYWIKSGTLRPVRRRDIVKIEGIDATGGNNQPNIPDIPAHLWYFGLIGTC

SEQ ID NO: 13056 - protein, 268 aa, Thermomyces lanuginosus
EVSQDLFNQFNLFAQYSAAAYCGKNNDAPAGTQITCTGNACPEVEKADATFLYSFEDSGVGDVTGFLALDNTYKLIVLSFRGSRSIENWIGNLNFDLKEINDICSGCRGHDGFTSSWRSVADTLRQKVEDAVREHPDYRVVFTGHSLGGALATVAGADLRGNGYDIDVFSYGAPRVGNRAFAEFLTVQTGGTLYRITHTNDIVPRLPPREFGYSHSSPEYWIKSPTLVPVRRRDIVKIEGIDATGGNNQPNIPDIPAHLWYFGLIGTC

SEQ ID NO: 13057 - protein, 268 aa, Thermomyces lanuginosus
EVSQDLFNQFNLFAQYSAAAYCGKNNQAPAGTNITCTGNACPEVEKADATTLYSFEDSGVGDVTGFLALDNTNKGIVLSFRGSRSIENWIQNLNFDLKEINDICSGCRGHDGFTSSWRSVADTLRQKVEDAVREHPDYRVVFTGHSLGGALATVAGADLRGNGYDIDVFSYGAPRVGNRAFAEFLTNQTGGTLYRITHTNDIVPRLPPREFGYSHSSPEYWIKSGTLVPVTRNDIVKIEGIDATGGNNQPNQPDIPAHLWYFGLIGTC

SEQ ID NO: 13058 - protein, 268 aa, Thermomyces lanuginosus
EVSQDLFNQFNLFAQYSAAAYCGKNNEAPAGTNITCTGNACPEVEKAQATFLYSFEDMGVGDVTGFLALDNTNKLIVLSFRGSRSIENWIGNLNFDLKEINDICSGCRGHDGFTSSWRSVADTLRQKVEDAVREHPDYRVVFTGHSLGGALATVAGADLRGNPYDIDVFSYGAPRVGNRAFAEFLTVQTGGTLYRITHTNDIVPRLPPREFGYSHSSPEYWIKSGTLVPVTRQDIVKIEGIDATGGNNQPNIPDIPAHLWYFGRIGTC

SEQ ID NO: 13059 - protein, 268 aa, Thermomyces lanuginosus
EVSQDLFNQFNLFAQYSAAAYCGKNNDAPAGTNITCTGNACPEVEKADATFLYSFEDSGVGDVTGFLALDNTNKLIVLSFRGSRSIENWIGNLNFDLKEINDICSGCRGHAGFTSSWRSVADTLRQKVEAAVREHPDYRVVFTGHSLGGALATIAWADLRGNGYDIDVFSYGAPRVGNRAFAEFLTNQTGGTLYRITHTNDIVPRLPPREFGYSHSSPEYWIKSGTLVPVTRNDIVKIEGIDATGGNNQPNIPDIPAHLWYFGRIGTC

SEQ ID NO: 13060 - protein, 268 aa, Thermomyces lanuginosus
EVSQDLFNQFNLFAQYSAAAYCGKNNDAPAGTNITCTGNACPEVEKADATFLYSFEDSGVGDVTGFLALDNTNKLIVLSFRGSRSIENWIQNLNFDLKEINDICSGCRGHDGFTSSWRSVADTLRQKVEDAVREHPDYRVVFAGHSLGGALATVAGADLRGNGYDIDVFSYGAPRVGNRAFAEFLTVQTGGTLYRITHTNDIVPRLPPRQFGYSHSSPEYWIKSGTLVPVRRRDIVKIEGIDATGGNNQRNIPDIPAHLWYFGLIGTC

SEQ ID NO: 13061 - protein, 268 aa, Thermomyces lanuginosus
EVSQDLFNQFKLFAQYSAAAYCGKNNNAPAGTNITCTGNACPEVEKADATFLYSFEDMGVGDVTGFLALDNTNKLIVLSFRGSRSIENWIGNLNFDLKEINDICSGCRGHDGFTSSWRSVADTLRQKVEDAVREHPDYRVVFTGHSLGGALATVAGADLRGNGYDIDVFSYGAPRVGNRAFAEFLTVQTGGTLYRITHTNDIVPRLPPREFGYSHSSPEYWIKSGTLVPVTRQDIVKIEGIDATGGNNQPNIPDITAHLWYFGLIGTC

SEQ ID NO: 13062 - protein, 268 aa, Thermomyces lanuginosus
EVSQDLFNQFNLFAQYSKAAYCKKNNDAPAGTNITCTGNACPEVEKADATFLYSFEDSGVGDVTGFLALDNTNKQIVLSFRGSRSIENWIGNLNFDLKEINDICSGCRGHDGFTSSWRSVADTLRQKVEAAVREHPDYRVVFTGHSLGGALATIAGADLRGNGYDIDVFSYGAPRVGNRAFAEFLTVQTGGTLYRITHTNDIVPRLPPREFGYSHSSPEYWIKSGTLVPVTRNDIVKIEGIDATGGNNQPNIPDIPAHLWYFGLIGTC

SEQ ID NO: 13063 - protein, 268 aa, Thermomyces lanuginosus
EVSQDLFNQFNLFAQYSAAAYCQKNNDAPAGTNITCTGNACPEVFKADVTFLYSFEDSGVGDVTGFLALDNTNKQIILSFRGSRSIENWIGNLNFDLKEINDICSGCRGHDGFTSSWRSVADTLRQKVEDAVREHPDYRVVFTGHSLGGALATVAGADLRGNGYDIDVFSYGAPRVGNRAFAEFLTVQTGGTLYRITHTNDIVPRLPPREFGYSHSSPEYWIKSGTLVPVTRNDIVKIEGIDATGGNNQPNIPDIPAHLWYFGLIGTC

SEQ ID NO: 13064 - protein, 268 aa, Thermomyces lanuginosus
EVSQDLFNQFNLFAQYSKAAYCKKNNDAPAGTNITCTGNACPEVEKADATFLYSFEDSGVGDVTGFLALDNTNKQIVLSFRGSRSIENWIGNLNFDLKEINDICSGCRGHDGFTSSWRSVADTLRQKVEDAVREHPDYRVVFTGHSLGGALATVAWADLRGNGYDIDVFSYGAPRVGNRAFAEFLTNQTGGTLYRITHTNDIVPRLPPREFGYSHSSPEYWIKSGTLVPVTRNDIVKIEGIDATGGNNQPNIPDIPAHLWYFGRIGTC

SEQ ID NO: 13065 - protein, 268 aa, Thermomyces lanuginosus
EVSQDLFNQFNLFAQYSKAAYCGKNNDAPAGTNITCTGNACPEVFKADVTFLYSFEDSGVGDVTGFLALDNTNKQIVLSFRGSRSIENWIGNLNFDLKEINDICSGCRGHDGFTSSWRSVADTLRQKVEDAVREHPDYRVVFTGHSLGGALATVAGADLRGNGYDIDVFSYGAPRVGNRAFAEFLTVQDGGTLYRITHTNDIVPRLPPREFGYSHSSPEYWIKSGTLVPVTRNDIVKIEGIDATGGNNQPNIPDIPAHLWYFGLIGTC

SEQ ID NO: 13066 - protein, 268 aa, Thermomyces lanuginosus
EVSQDLFNQFNLFAQYSAAAYCGKNNDAPAGTNITCTGNACPEVEKADATFLYSFEDSGVGDVTGFLALDNTNKQIILSFRGSRSIENWIGNLNFDLKEINDICSGCRGHDGFTSSWRSVADTLRQKVEAAVREHPDYRVVFTGHSLGGALATVAWADLRGNGYDIDVFSYGAPRVGNRAFAEFLTNQTGGTLYRITHTNDIVPRLPPREFGYSHSSPEYWIKSGTLVPVTRNDIVKIEGIDATGGNNQPNIPDIPAHLWYFGLIGTC

SEQ ID NO: 13067 - protein, 268 aa, Thermomyces lanuginosus
EVSRDLFNQFNLFAQYSAAAYCGKNNDAPAGTNITCTGNACPEVEKADATFLYSFEDSGVGDVTGFLALDNTNKLIVLSFRGSRSIENWIGNLNFDLKEINDICSGCRGHDGFTSSWRSVADTLRQKVEDAVREHPDYRVVFTGHSLGGALATVAGADLRGNGYDIDVFSYGAPRVGNRAFAEFLTVQTGGTLYRITSTNDIVPRLPPREFGYSHSSPEYWIKSGTLRPVRRRDIVKIEGIDATGGNNQPNIPDIPAHLWYFGLIGTC

SEQ ID NO: 13068 - protein, 268 aa, Thermomyces lanuginosus
EVSQDLFNQFNLFAQYSAAAYCGKNNDAPAGTNITCTGNACPEVEKADATFLYSFGDSGVGDVTGFLALDNTNKLIVLSFRGSRSIDNWIGNLNFDLKEINDICSGCRGHDGFTSSWRSVADTLRQKVEDAVREHPDYRVVFTGHSLGGALATVAGADLRGNGYDIDVFSYGAPRVGNRAFAEFLTVQTGGTLYRITHTNDIVPRLPPREFGYSHSSPEYWIKSGTLVPVRRRDIVKIEGIDATGGNNQPNIPAIPAHLWYFGLIGTC

SEQ ID NO: 13069 - protein, 268 aa, Thermomyces lanuginosus
EVSQDLFNQFNLFAQYSAAAYCGKNNDAPAGTNITCTGNACPEVEKADATFLYSFEDNGSGDVTGFLALDNTNKLIVLSFRGSRSIENWIGNLNFDLKEINDICSGCRGHDGFTKSWRSVADTLRQKVEDAVREHPDYRVVFTGHSLGGALATVAGADLRGNGYDIDVFSYGAPRVGNRAFAEFLTVQTGGTLYRITHTNDIVPRLPPREFGYSHSSPEYWIKSGTLVPVRRRDIVKIEGIDATGGNNQPNIPDIPAHLWYFGLIGTC

SEQ ID NO: 13070 - protein, 268 aa, Thermomyces lanuginosus
EVSQDLFNQFNLFAQYSAAAYCKKNNSAPAGTNITCTGNACPEVEKADATFLYSFEDSGVGDVTGFLALDNTNKQIVLSFRGSRSIENWIQNLNFDLKEINDICSGCRGHDGFTSSWRSVADTLRQKVEDAVREHPDYRVVFTGHSLGGALATVAGADLRGNGYDIDVFSYGAPRVGNRAFAEFLTTQTGGTLYRITHTNDIVPRLPPREFGYSHSSPEYWIKSGTLVPVTRNDIVKIEGIDATGGNNQPNQPDIPAHLWYFGRIGTC

SEQ ID NO: 13071 - protein, 268 aa, Thermomyces lanuginosus
EVSQDLFNQFNLFAQYSAAAYCGKNNDAPAGTQITCTGNACPEVEKADATFLYSFEDSGVGDVTGFLALDNTNKLIVLSFRGSRSIENWIGNLNFDLKEINDICSGCRGHAGFTSSWRSVADTLRQKVEDAVREHPDYRVVFTGHSLGGALATVAGADLRGNGYDIDVFSYGAPRVGNRAFAEFLTVQTGGTLYRITHTNDIVPRLPPREFGYSHSSPEYWIKSGTLVPVRRRDIVKIEGIDATGGNNQPNIPGIPAHLWYFGLIGTC

SEQ ID NO: 13072 - protein, 268 aa, Thermomyces lanuginosus
EVSQDLFNQFNLFAQYSAAAYCGKNNDAPAGTNITCTGNACPEVEKAQATFLYSFEDMGVGDVTGFLALDNTNKLIVLSFRGSRSIENWIGNLNFDLKEINDICSGCRGHDGFTSSWRSVADTLRQKVEAAVREHPDYRVVFTGHSLGGALATVAGADLRGNPYDIDVFSYGAPRVGNRAFAEFLTVQTGGTLYRITHTNDIVPRLPPREFGYSHSSPEYWIKSGTLVPVTRQDIVKIEGIDATGGNNQPNIPDIPAHLWYFGRIGTC

SEQ ID NO: 13073 - protein, 268 aa, Thermomyces lanuginosus
EVSQDLFNQFNLFAQYSAAAYCGKNNDAPAGTNITCTGNACPEVEKADATFLYSFEDSGVGDVTGFLALDNTNKLIVLSFRGSRSIENWGGNLNFDLKEINDICSGCRGHDGFTSSWRSVADTLRQKVEDAVREHPDYRVVFTGHSLGGALATVAGADLRGNGYDIDVFSYGAPRVGNRAFAEFLTVQTGGTLYRITHTNDLVPRLPPREFGYSHSSPEYWIKSGTLVPVRRRDIVKIEGIDATGGNNQPNIPDSPAHLWYFGLIGTC

SEQ ID NO: 13074 - protein, 268 aa, Thermomyces lanuginosus
EVSDDLFNQFNLFAQYSAAAYCGKNNSAPAGTNITCTGNACPEVEKADATFLYSFKDMGVGDVTGFLALDNTNKLIVLSFRGSRSIENWIGNLNFDLKEINDICSGCRGHDGFTSSWRSVADTLRQKVEDAVREHPDYRVVFTGHSLGGALATVAGADLRGNGYDIDVFSYGAPRVGNRAFAEFLTVQTGGTLYRITHTNDIVPRLPPREFGYSHSSPEYWIKSGTLVPVTRNDIVKIEGIDATGGNNQPNIPDITAHLWYFGLIGTC

SEQ ID NO: 13075 - protein, 268 aa, Thermomyces lanuginosus
EVSQDLFNQFNLFAQYSAAAYCGKNNDAPAGTNITCTGNACPEVEKADATFLYSFEDSGVGDVTGFLALDNTNKLIVLSFRGSRSIENWIGNLNFELKEINDICSGCRGHAGFTSSWRSVADTLRQKVEDAVREHPDYRVVFTGHSLGGALATVAGADLRGNGYDIDVFSYGAPRVGNRAFAEFLTVQTGGTLYRITHTNDIVPRLPPREFGYSHSSPEYWIKSGTLVPVRRRDIVKIEGIDATGGNNQPNIPSITAHLWYFGLIGTC

SEQ ID NO: 13076 - protein, 268 aa, Thermomyces lanuginosus
EVSQDLFNQFNLFAQYSAAAYCGKNNDAPAGTNITCTGNACPEVEKADATTLYSFKDSGVGDVTGFLALDNTNKLIVLSFRGSRSIENWIGNLNFDLKEINDICSGCRGHDGFTSSWRSVADTLRQKVEAAVREHPDYRVVFTGHSLGGALATVAGADLRGNGYDIDVFSYGAPRVGNRAFAEFLTNQTGGTLYRITHTNDIVPRLPPREFGYSHSSPEYWIKSGTLVPVTRNDIVKIEGIDATGGNNQPNQPDIPAHLWYFGRIGTC

SEQ ID NO: 13077 - protein, 268 aa, Thermomyces lanuginosus
EVSQDLFNQFNLFAQYSAAAYCGKNNDAPAGTNITCTGNACPEVEKADATFLYSFEDSGVGDVTGFLALDNTNKLIVLSFRGSRSIKNWIDNLNFLLKEINDICSGCRGHDGFTSSWRSVADTLRQKVEDAVREHPDYRVVFTGHSLGGALATVAGADLRGNGYDIDVFSYGAPRVGNRAFAEFLTVQTGGTLYRITHTNDIVPRLPPREFGYSHSSPEYWIKSPTLVPVRRRDIVKIEGIDATGGNNQPDIPDIPAHLWYFGLIGTC

SEQ ID NO: 13078 - protein, 268 aa, Thermomyces lanuginosus
EVSVDLFNQFNLFAQYSAAAYCGKNNNAPAGTNITCTGNACPEVEKADATFLYSFEDSGKGDVTGFLALDNTNKLIVLSFRGSRSIENWIGNLNFDLKEINDICSGCRGHDGFTSSWRSVADTLRQKVEDAVREHPDYRVVFTGHSLGGALATVAGADLRGNGYDIDVFSYGAPRVGNRAFAEFLTVQTGGTLYRITHTNDIVPRLPPREFGYSHSSPEYWIKSGTLVPVRRRDIVKIEGIDATGGNNQPNIPDIPAHLWYFGLIGTC

SEQ ID NO: 13079 - protein, 268 aa, Thermomyces lanuginosus
EVSQDLFNQFNLFAQYSAAAYCQKNNSAPAGTNITCTGNACPEVEKADATFLYSFEDSGVGDVTGFLALDNTNKQIVLSFRGSRSIENWIGNLNFDLKEINDICSGCRGHAGFTSSWRSVADTLRQKVEDAVREHPDYRVVFTGHSLGGALATVAWADLRGNGYDIDVFSYGAPRVGNRAFAEFLTVQTGGTLYRITHTNDIVPRLPPREFGYSHSSPEYWIKSGTLVPVTRNDIVKIEGIDATGGNNQPNIPDIPAHLWYFGRIGTC

SEQ ID NO: 13080 - protein, 268 aa, Thermomyces lanuginosus
EVSQDLFNQFNLFAQYSKAAYCGKNNSAPAGTDITCTGNACPEVEKADATFLYSFEDSGVGDVTGFLALDNTRKLIVLSFRGSRSIENWIGNLNFDLKEINDICSGCRGHDGFTSSWRSVADTLRQKVEDAVREHPDYRVVFTGHSLGGALATVAGADLRGNGYDIDVFSYGAPRVGNRAFAEFLTVQDGGTLYRITHTNDIVPRLPPREFGYSHSSPEYWIKSGTLVPVTRNDIVKIEGIDATGGNNQPNIPDIPAHLWYFGLIGTC

SEQ ID NO: 13081 - protein, 268 aa, Thermomyces lanuginosus
EVSQDLFNQFNLFAQYSAAAYCGKNNDAPAGTNITCTGNACPEVEKADATFLYQFEDSGVGDVTGFLALDNTNKLIVLSFRGSRSIENWIGNLRFDLKEINDICSGCRGHAGFTSSWRSVADTLRQKVEDAVREHPDYRVVFTGHSLGGALATVAWADLRGNGYDIDVFSYGAPRVGNRAFAEFLTVQQGGTLYRITHTNDIVPRLPPREFGYSHSSPEYWIKSGTLVPVTRNDIVKIEGIDATGGNNQPNIPDIPAHLWYFGRIGTC

SEQ ID NO: 13082 - protein, 268 aa, Thermomyces lanuginosus
EVSQDLFNQFNLFAQYSAAAYCGKNNDAPAGTNITCTGNACPEVEKADATFLYSFEDSGVGDVTGFLALDNTNKLIVLSFRGSRSIENWIGNLNFELKEINDICSGCRGHDGFTSSWRSVADTLRQKVEDAVREHPDYRVVFTGHSLGGALATVAGADLRGNKYDIDVFSYGAPRVGNRAFAEFLTVQTGGTLYRITHTNDIVPRLPPREFGYSHSSPEYWIKSGTLVPVRRRDIVKIEGIDATGGNNQPNIPSITAHLWYFGLIGTC

SEQ ID NO: 13083 - protein, 268 aa, Thermomyces lanuginosus
EVSQDLFNQFNLFAQYSAAAYCGKNNDAPAGTNITCTGNACPEVEKADATFLYSFEDSGGGEVTGFLALDNTNKLIVLSFRGTKSIENWIANLNFDLKKINDICSGCRGHDGFTSSWRSVADTLRQKVEDAVREHPDYRVVFTGHSLGGALATVAGADLRGNGYDIDVFSYGAPRVGNRAFAEFLTVQTGGTLYRITHTNDIVPRLPPREFGYSHSSPEYWIKSGTLVPVRRRDIVKIEGIDATGGNNRPNIPDIPAHLWYFGLIGTC

SEQ ID NO: 13084 - protein, 268 aa, Thermomyces lanuginosus
EVSQDLFNQFNLFAQYSAAAYCGKNNDAPAGTNITCTGNACPEVEKADATFLYSFEDSGVGDVTGFLALDNTNKLIVLSFRGSRSIENWIGNLNFDLKEINDICSGCRGHDGFTSSWRSVADTLRQKVEDAVREHPDYRVVFTGHSLGGALATVAGADLRGNGYDIDVFSYGAPRVGNRAFAEFLTVQTGGTLYRITHTNDXVPRLPPRXXGYSHSSPEYWIKSGTLVPVTRNDIVKIEGIDATGGNNQPNIPDXXAHLWYFGLIGTC

SEQ ID NO: 13085 - protein, 268 aa, Thermomyces lanuginosus
EVSQDLFNQFNLFAQYSAAAYCGKNNRAPAGTNITCTGNACPEVEKADATFLYSFEDSGVGDVTGFLALDNTNKLIVLSFRGSRSIENWIGNLNFDLKEINDICSGCRGHGGFTSSWRSVADTLRQKVEDAVREHPDYRVVFTGHSLGGALATVAGADLRGNGYDIDVFSYGAPRVGNRAFAEFLTVQTGGTLYRITHTNDIVPRLPPREFGYSHPSPEYWIKSGTFVPVTRNDIVKIEGIDATGGNNQPNIPDITAHLWYFGLIGTC

SEQ ID NO: 13086 - protein, 268 aa, Thermomyces lanuginosus
EVSQDLFNQFNLFAQYSKAAYCQANNDAPAGTNITCTGNACPEVEKADATFLYSFEDSGVGDVTGFLALDNTNKLIVLSFRGSRSIENWIGNLNFDLKEINDICSGCRGHDGFTSSWRSVADTLRQKVEAAVREHPDYRVVFTGHSLGGALATVAGADLRGNGYDIDVFSYGAPRVGNRAFAEFLTQQTGGTLYRITHTNDIVPRLPPREFGYSHSSPEYWIKSGTLVPVTRNDIVKIEGIDATGGNNQPNIPDIPAHLWYFGLIGTC

SEQ ID NO: 13087 - protein, 268 aa, Thermomyces lanuginosus
EVSQDLFNQFKLFAQYSAAAYCQKNNDAPAGTNITCTGNACPEVEKADATFLYSFEDSGVGDVTGFLALDNTNKQIVLSFRGSRSIENWIGNLNFDLKEINDICSGCRGHDGFTSSWRSVADTLRQKVEDAVREHPDYRVVFTGHSLGGALATVAGADLRGNGYDIDVFSYGAPRVGNRAFAEFLTNQQGGTLYRITHTNDIVPRLPPREFGYSHSSPEYWIKSGTLVPVTRNDIVKIEGIDATGGNNQPNIPDIPAHLWYFGLIGTC

SEQ ID NO: 13088 - protein, 268 aa, Thermomyces lanuginosus
EVSQDLFNQFNLFAQYSAAAYCGKNNDAPAGTQITCTGNACPEVEKADATFLYSFEDSGVGDVTGFLALDNTNKLIVLSFRGSRSIENWIGNLNFDLKEINDICSGCRGHDGFTSSYRSVADTLRQKVEDAVREHPDYRVVFTGHSLGGALATVAGADLRGNGYDIDVFSYGAPRTGNRAFAEFLTVQTGGTLYRITHTNDIVPRLPPREFGYSHSSPEYWIKSGTLVPVRRRDIVKIEGIDATGGNNQPNIPDIPAHLWYFGLIGTC

SEQ ID NO: 13089 - protein, 268 aa, Thermomyces lanuginosus
EVSQDLFNQFNLFAQYSAAAYCGKNNDAPAGTNITCTGNACPEVEKADATFLYSFAASGVGDVTGFLALDNTNKLIVLSFRGSRSIENWIGNLNFDLKEINDICSGCRGHDGFISSWRSVADTLRQKVEDAVREHPDYRVVFTGHSLGGALATVAGADLRGNGYDIDVFSYGAPRVGNRAFAEFLTVQTGGTLYRITHTNDIVPRLPPREFGYSHSSPEYWIKSGTLVPVRRRDIVKIEGIDATGGNNQPNIPDIPAHLWYFGLIGTC

SEQ ID NO: 13090 - protein, 268 aa, Thermomyces lanuginosus
EVSQDLFNQFNLFAQYSAAAYCGKNNDAPAGTNITCTGNACPEVEKADATILYSFRDSGVGDVTGFLALDNTNKLIVLSFRGSRSIENWIGNLNFDLKEINDICSGCRGHDGFTSSWFSVADTLRQKVEDAVREHPDYRVVFTGHSLGGALATVAGADLRGNGYDIDVFSYGAPRVGNRAFAEFLTVQTGGTLYRITHTNDIVPRLPPREFGYSHSSPEYWIKSGTLVPVRRRDIVKIEGIDATGGNNQPNIPDIPAHLWYFGLIGTC

SEQ ID NO: 13091 - protein, 268 aa, Thermomyces lanuginosus
EVSQDLFNQFNLFAQYSAAAYCGKNNSAPAGTDITCTGNACPEVFKADATFLYSFEDSGVGDVTGFLALDNTRKDIVLSFRGSRSIENWIGNLNFDLKEINDICSGCRGHDGFTSSWRSVADTLRQKVEDAVREHPDYRVVFTGHSLGGALATVAGADLRGNGYDIDVFSYGAPRVGNRAFAEFLTVQTGGTLYRITHTNDIVPRLPPREFGYSHSSPEYWIKSGTLVPVTRNDIVKIEGIDATGGNNQPNIPDIPAHLWYFGLIGTC

SEQ ID NO: 13092 - protein, 268 aa, Thermomyces lanuginosus
EVSQDLFNQFNLFAQYSAAAYCGKNNEAPAGTNITCTGNACPEVEKAQATFLYSFEDSGVGDVTGFLALDNTNKLIVLSFRGSRSIENWIGNLNFDLKEINDICSGCRGHDGFTSSWRSVADTLRQKVEDAVREHPQYRVVFTGHSLGGALATVAGADLRGNPYDIDVFSYGAPRVGNRAFAEFLTVQTGGTLYRITHTNDIVPRLPPREFGYSHSSPEYWIKSGTMVPVTRNDIVKIEGIDATGGNNQPNIPDIPAHLWYFGRIGTC

SEQ ID NO: 13093 - protein, 268 aa, Thermomyces lanuginosus
EVSQDLFNQFNLFAQYSAAAYCGKNNVAPAGTQITCTGNACPEVEKADATFLYSFEDSGSGDVTGFLALDNTNKLIVLSFRGSRSIENWITNLNFWLKEINDICSGCRGHDGFTSSWRSVADTLRQKVEDAVREHPDYRVVFTGHSLGGALATVAGADLRGNGYDIDVFSYGAPRVGNRAFAEFLTVQTGGTLYRITHTNDIVPRLPPREFGYSHSSPEYWIKSGTLVPVRRRDIVKIEGIDATGGNNRPNIPDIPAHLWYFGLIGTC

SEQ ID NO: 13094 - protein, 268 aa, Thermomyces lanuginosus
EVSQDLFNQFNLFAQYSAAAYCGKNNEAPAGTNITCTGNACPEVEKAQATFLYSFEDMGVGDVTGFLALDNTNKLIVLSFRGSRSIENWIGNLNFDLKEINDICSGCRGHDGFTSSWRSVADTLRQKVEAAVREHPDYRVVFTGHSLGGALATVAGADLRGNPYDIDVFSYGAPRVGNRAFAEFLTVQTGGTLYRITHTNDIVPRLPPREFGYSHSSPEYWIKSGTLVPVTRNDIVKIEGIDATGGNNQPNIPDIPAHLWYFGRIGTC

SEQ ID NO: 13095 - protein, 268 aa, Thermomyces lanuginosus
EVSQDLFNQFNLFAQYSAAAYCGKNNDAPAGTNITCTGNACPEVFKADVTFLYSFEDSGVGDVTGFLALDNTNKQIVLSFRGSRSIENWIGNLNFDLKEINDICSGCRGHDGFTSSWRSVADTLRQKVEDAVREHPDYRVVFTGHSLGGALATVAGADLRGNGYDIDVFSYGAPRVGNRAFAEFLTTQDGGTLYRITHTNDIVPRLPPREFGYSHSSPEYWIKSGTLVPVTRNDIVKIEGIDATGGNNQPNIPDIPAHLWYFGLIGTC

SEQ ID NO: 13096 - protein, 268 aa, Thermomyces lanuginosus
EVSQDLFNQFNLFAQYSAAAYCKKNNDAPAGTNITCTGNACPEVEKADATFLYSFKDSGVGDVTGFLALDNTNKRIVLSFRGSRSIENWIGNLNFDLKEINDICSGCRGHDGFTSSWRSVADTLRQKVEAAVREHPDYRVVFTGHSLGGALATVAGADLRGNGYDIDVFSYGAPRVGNRAFAEFLTTQTGGTLYRITHTNDIVPRLPPREFGYSHSSPEYWIKSGTLVPVTRNDIVKIEGIDATGGNNQPNIPDIPAHLWYFGRIGTC

SEQ ID NO: 13097 - protein, 268 aa, Thermomyces lanuginosus
EVSRDLFNQFNLFAQYSAAAYCGKNNDAPAGTNITCTGNACPEVEKADATILYSFEDSGVGDVTGFLALDNTNKLIVLSFRGSRSIENWIGNLNFDLKEINDICSGCRGHDGFTSSWRSVADTLRQKVEDAVREHPDYRVVFTGHSLGGALATVAGADLRGDGYDIDVFSYGAPRVGNRAFAEFLTVQTGGTLYRITHTNDIVPRLPPREFGYSHSSPEYWIKSGTLVPVRRRDIVKIEGIDATGGNNQPNIPDIPAHLWYFGLIGTC

SEQ ID NO: 13098 - protein, 268 aa, Thermomyces lanuginosus
EVSQDLFNQFNLFAQYSAAAYCGKNNDAPAGTNITCTGNACPEVEKADATLLYSFRDSGVGDVTGFLALDNTNKLIVLSFRGSRSIENWIGNLNFDLKEINDICSGCRGHDGFTSSWFSVADTLRQKVEDAVREHPDYRVVFTGHSLGGALATVAGADLRGNGYDIDVFSYGAPRVGNRAFAEFLTVQTGGTLYRITHTNDIVPRLPPREFGYSHSSPEYWIKSGTLVPVRRRDIVKIEGIDATGGNNQPNIPDIPAHLWYFGLIGTC

SEQ ID NO: 13099 - protein, 268 aa, Thermomyces lanuginosus
EVSQDLFNQFNLFAQYSAAAYCGKNNDAEAGTDITCTGNACPEVEKADATFLYSFEDSGVGDVTGFLALDNTRKDIVLSFRGSRSIENWIGNLNFDLKEINDICSGCRGHDGFTSSWRSVADTLRQKVEDAVREHPDYRVVFTGHSLGGALATVAGADLRGNGYDIDVFSYGAPRVGNRAFAEFLTVQDGGTLYRITHTNDIVPRLPPREFGYSHSSPEYWIKSGTLVPVTRNDIVKIEGIDATGGNNQPNIPDIPAHLWYFGLIGTC

SEQ ID NO: 13100 - protein, 268 aa, Thermomyces lanuginosus
EVSQDLFNQFNLFAQYSAAAYCGKNNDAEAGTDITCTGNACPEVFKADATFLYSFEDSGVGDVTGFLALDNTNKDIVLSFRGSRSIENWIGNLNFDLKEINDICSGCRGHDGFTSSWRSVADTLRQKVEDAVREHPDYRVVFTGHSLGGALATVAGADLRGNGYDIDVFSYGAPRVGNRAFAEFLTVQDGGTLYRITHTNDIVPRLPPREFGYSHSSPEYWIKSGTLVPVTRNDIVKIEGIDATGGNNQPNIPDIPAHLWYFGLIGTC

SEQ ID NO: 13101 - protein, 268 aa, Thermomyces lanuginosus
EVSQDLFNQFNLFAQYSAAAYCKKNNDAPAGTNITCTGNACPEVEKADATTLYSFEDSGVGDVTGFLALDNTNKQIVLSFRGSRSIENWIGNLNFDLKEINDICSGCRGHDGFTSSWRSVADTLRQKVEAAVREHPDYRVVFTGHSLGGALATVAGADLRGNGYDIDVFSYGAPRVGNRAFAEFLTVQTGGTLYRITHTNDIVPRLPPREFGYSHSSPEYWIKSGTLVPVTRNDIVKIEGIDATGGNNQPNQPDIPAHLWYFGRIGTC

SEQ ID NO: 13102 - protein, 268 aa, Thermomyces lanuginosus
EVSQDLFNQFNLFAQYSKAAYCGKNNDAPAGTNITCTGNACPEVEKADATFLYSFEDSGVGDVTGFLALDNTNKQIVLSFRGSRSIENWIGNLNFDLKEINDICSGCRGHDGFTSSWRSVADTLRQKVEDAVREHPDYRVVFTGHSLGGALATVAWADLRGNGYDIDVFSYGAPRVGNRAFAEFLTIQDGGTLYRITHTNDIVPRLPPREFGYSHSSPEYWIKSGTLVPVTRNDIVKIEGIDATGGNNQPNIPDIPAHLWYFGLIGTC

SEQ ID NO: 13103 - protein, 268 aa, Thermomyces lanuginosus
EVSQDLFNQFNLFAQYSAAAYCGKNNDAPAGTQITCTGNACPEVEKADATFLYSFEDSGVGDVTGFLALDNTNKLIVLSFRGSRSIENWIGNLNFSLKEINDICSGCRGHDGFTSSWRSVADTLRQKVEDAVREHPDYRVVFTGHSLGGALATVAGADLRGNGYDIDVFSYGAPRVGNRAFAEFLTVQTGGTLYRITHTNDIVPRLPPREFGYSHSSPEYWIKSGTLIPVRRRDIVKIEGIDATGGNNRPNIPDIPAHLWYFGLIGTC

SEQ ID NO: 13104 - protein, 268 aa, Thermomyces lanuginosus
EVSQDLFNQFNLFAQYSAAAYCGKNNDAPAGTQITCTGNACPEVEKADATFLYSFEDSGVGDVTGFLALDNTNKLIVLSFRGSRSIENWIMNLNFDLKEINDICSGCRGHDGFTSSWRSVADTLRQKVEDAVREHPDYRVVFTGHSLGGALATVAGADLRGNADDIDVFSYGAPRVGNRAFAEFLTVQTGGTLYRITHTNDIVPRLPPREFGYSHSSPEYWIKSGTLVPVRRRDIVKIEGIDATGGNNQPNIPDIPAHLWYFGLIGTC

SEQ ID NO: 13105 - protein, 268 aa, Thermomyces lanuginosus
EVSQDLFNQFNLFAQYSAAAYCKKNNDAPAGTNITCTGNACPEVEKADATFLYSFKDSGVGDVTGFLALDNTNKRIVLSFRGSRSIENWIGNLNFDLKEINDICSGCRGHDGFTSSWRSVADTLRQKVEAAVREHPDYRVVFTGHSLGGALATVAGADLRGNGYDIDVFSYGAPRVGNRAFAEFLTTQTGGTLYRITHTNDIVPRLPPREFGYSHSSPEYWIKSGTLVPVTRNDIVKIEGIDATGGNNQPNIPDIPAHLWYFGLIGTC

SEQ ID NO: 13106 - protein, 268 aa, Thermomyces lanuginosus
EVSQDLFNQFNLFAQYSKAAYCGKNNDAEAGTDITCTGNACPEVEKADATFLYSFEDSGVGDVTGFLALDNTRKDIVLSFRGSRSIENWIGNLNFDLKEINDICSGCRGHDGFTSSWRSVADTLRQKVEDAVREHPDYRVVFTGHSLGGALATVAGADLRGNGYDIDVFSYGAPRVGNRAFAEFLTVQTGGTLYRITHTNDIVPRLPPREFGYSHSSPEYWIKSGTLVPVTRNDIVKIEGIDATGGNNQPNIPDIPAHLWYFGLIGTC

SEQ ID NO: 13107 - protein, 268 aa, Thermomyces lanuginosus
EVSQDLFNQFNLFAQYSAAAYCGKNNEAPAGTNITCTGNACPEVEKAQATFLYSFEDSGVGDVTGFLALDNTNKLIVLSFRGSRSIENWIGNLNFDLKEINDICSGCRGHDGFTSSWRSVADTLRQKVEAAVREHPHYRVVFTGHSLGGALATVAGADLRGNPYDIDVFSYGAPRVGNRAFAEFLTVQTGGTLYRITHTNDIVPRLPPREFGYSHSSPEYWIKSGTLVPVTRNDIVKIEGIDATGGNNQPNIPDIPAHLWYFGRIGTC

SEQ ID NO: 13108 - protein, 268 aa, Thermomyces lanuginosus
EVSRDLFNQFNLFAQYSAAAYCGKNNDAPAGTNITCTGNACPEVEKADATILYSFEDSGVGDVTGFLALDNTNKLIVLSFRGSRSIENWIGNLNFDLKEINDICSGCRGHDGFTSSWRSVADTLRQKVEDAVREHPDYRVVFTGHSLGGALATVAGADLRGNGYDIDVFSYGAPRVGNRAFAEFLTVQTGGTLYRITSTNDIVPRLPPREFGYSHSSPEYWIKSGTLVPVRRRDIVKIEGIDATGGNNQPNIPDIPAHLWYFGLIGTC

SEQ ID NO: 13109 - protein, 268 aa, Thermomyces lanuginosus
EVSQDLFNQFNLFAQYSAAAYCGKNNDAPAGTQITCTGNACPEVEKADATFLYSFEDSGVGDVTGFLALDNTNKLIVLSFRGSRSIENWIGNLNFDLKEINDICSGCRGHDGFTSSYRSVADTLRQKVEDAVREHPDYRVVFTGHSLGGALATVAGADLRGNGYDIDVFSYGAPRDGNRAFAEFLTVQTGGTLYRITHTNDIVPRLPPREFGYSHSSPEYWIKSGTLVPVRRRDIVKIEGIDATGGNNQPNIPDIPAHLWYFGLIGTC

SEQ ID NO: 13110 - protein, 268 aa, Thermomyces lanuginosus
EVSQDLFNQFKLFAQYSAAAYCGKNNNAPAGTNITCTGNACPEVEKADATFLYSFEDSGVGDVTGFLALDNTNKLIVLSFRGSRSIENWFGNLNFDLKEINDICSGCRGHDGFTSSWRSVADTLRQKVEDAVREHPDYRVVFTGHSLGGALATVAGADLRGNGYDIDVFSYGAPRVGNRAFAEFLTVQTGGTLYRITHTNDIVPRLPPREFGYSHSSPEYWIKSGTLVPVTRQDIVKIEGIDATGGNNQPNIPDITAHLWYFGLIGTC

SEQ ID NO: 13111 - protein, 268 aa, Thermomyces lanuginosus
EVSRDLFNQFNLFAQYSAAAYCGKNNDAPAGTNITCTGNACPEVEKADATFLYSFEDSGVGDVTGFLALDNTNKLIVLSFRGSRSIENWIGNLNFDLKEINDICSGCRGHDGFTSSWRSVADTLRQKVEDAVREHPDYRVVFTGHSLGGALATVAGADLRGNGYDIDVFSYGAPRVGNRAFAEFLTVQTGGTLYRITNTNDIVPRLPPREFGYSHSSPEYWIKSGTLRPVRRRDIVKIEGIDATGGNNQPNIPDIPAHLWYFGLIGTC

SEQ ID NO: 13112 - protein, 268 aa, Thermomyces lanuginosus
EVSQDLFNQFNLFAQYSAAAYCQKNNDAPAGTNITCTGNACPEVEKADATFLYSFEDSGVGDVTGFLALDNTNKQIILSFRGSRSIENWIGNLNFDLKEINDICSGCRGHDGFTSSWRSVADTLRQKVEDAVREHPDYRVVFTGHSLGGALATVAWADLRGNGYDIDVFSYGAPRVGNRAFAEFLTNQTGGTLYRITHTNDIVPRLPPREFGYSHSSPEYWIKSGTLVPVTRNDIVKIEGIDATGGNNQPNIPDIPAHLWYFGLIGTC

SEQ ID NO: 13113 - protein, 268 aa, Thermomyces lanuginosus
EVSQDLFNQFNLFAQYSAAAYCGKNNEAPAGTNITCTGNACPEVEKADATFLYSFEDMGVGDVTGFLALDNTNKLIVLSFRGSRSIENWIGNLNFDLKEINDICSGCRGHDGFTSSWRSVADTLRQKVEDAVREHPQYRVVFTGHSLGGALATVAGADLRGNPYDIDVFSYGAPRVGNRAFAEFLTVQTGGTLYRITHTNDIVPRLPPREFGYSHSSPEYWIKSGTLVPVTRQDIVKIEGIDATGGNNQPNIPDIPAHLWYFGLIGTC

SEQ ID NO: 13114 - protein, 268 aa, Thermomyces lanuginosus
EVSQDLFNQFNLFAQYSAAAYCGKNNDAPAGTNITCTGNACPEVEKADATILYSFEDSGVGDVTGFLALDNTNKLIVLSFRGSRSIENWIGNLNFDLKEINDICSGCRGHDGFTSSWRSVADTLRQKVEDAVREHPDYRVVFAGHSLGGALATVAGADLRGNGYDIDVFSYGAPRVGNRAFAEFLTVQTGGTLYRITHTNDIVPRLPPREFGYSHSSPEYWIKSGTLRPVRRRDIVKIEGIDATGGNNQPNIPDIPAHLWYFGLIGTC

SEQ ID NO: 13115 - protein, 268 aa, Thermomyces lanuginosus
EVSQDLFNQFNLFAQYSAAAYCQKNNDAPAGTNITCTGNACPEVFKADATFLYSFEDSGVGDVTGFLALDNTNKQIILSFRGSRSIENWIGNLNFDLKEINDICSGCRGHDGFTSSWRSVADTLRQKVEDAVREHPDYRVVFTGHSLGGALATVAGADLRGNGYDIDVFSYGAPRVGNRAFAEFLTTQTGGTLYRITHTNDIVPRLPPREFGYSHSSPEYWIKSGTLVPVTRNDIVKIEGIDATGGNNQPNIPDIPAHLWYFGLIGTC

SEQ ID NO: 13116 - protein, 268 aa, Thermomyces lanuginosus
EVSQDLFNQFNLFAQYSAAAYCGKNNSAEAGTNITCTGNACPEVFKADATFLYSFEDSGVGDVTGFLALDNTRKDIVLSFRGSRSIENWIGNLNFDLKEINDICSGCRGHDGFTSSWRSVADTLRQKVEDAVREHPDYRVVFTGHSLGGALATVAGADLRGNGYDIDVFSYGAPRVGNRAFAEFLTVQTGGTLYRITHTNDIVPRLPPREFGYSHSSPEYWIKSGTLVPVTRNDIVKIEGIDATGGNNQPNIPDIPAHLWYFGLIGTC

SEQ ID NO: 13117 - protein, 268 aa, Thermomyces lanuginosus
EVSRDLFNQFNLFAQYSAAAYCGKNNDAPAGTNITCTGNACPEVEKADATILYSFEDSGVGDVTGFLALDNTNKLIVLSFRGSRSIENWIGNLNFDLKEINDICSGCRGHDGFTSSWRSVADTLRQKVEDAVREHPDYRVVFAGHSLGGALATVAGADLRGNGYDIDVFSYGAPRVGNRAFAEFLTVQTGGTLYRITHTNDIVPRLPPREFGYSHSSPEYWIKSGTLVPVRRRDIVKIEGIDATGGNNQPNIPDIPAHLWYFGLIGTC

SEQ ID NO: 13118 - protein, 268 aa, Thermomyces lanuginosus
EVSRDLFNQFNLFAQYSAAAYCGKNNDAPAGTNITCTGNACPEVEKADATFLYSFEDSGVGDVTGFLALDNTNKLIVLSFRGSRSIENWIGNLNFDLKEINDICSGCRGHDGFTSSWRSVADTLRQKVEDAVREHPDYRVVFTGHSLGGALATVAGADLRGDGYDIDVFSYGAPRVGNRAFAEFLTVQTGGTLYRITNTNDIVPRLPPREFGYSHSSPEYWIKSGTLVPVRRRDIVKIEGIDATGGNNQPNIPDIPAHLWYFGLIGTC

SEQ ID NO: 13119 - protein, 268 aa, Thermomyces lanuginosus
EVSQDLFNQFNLFAQYSAAAYCGKNNDAPAGTNITCTGNACPEVEKADATFLYSFEDNGSGDVTGFLALDNTNKLIVLSFRGSRSIENWRGNLNFDLKEINDICSGCRGHDGFTSSWRSVADTLRQKVEDAVREHPDYRVVFTGHSLGGALATVAGADLRGNGYDIDVFSYGAPRVGNRAFAEFLTVQTGGTLYRITHTNDIVPRLPPREFGYSHSSPEYWIKSGTLVPVRRRDIVKIEGIDATGGNNQPNIPDIPAHLWYFGLIGTC

SEQ ID NO: 13120 - protein, 268 aa, Thermomyces lanuginosus
EVSDDLFNQFNLFAQYSAAAYCGKNNNAPAGTNITCTGNACPEVEKADATFLYSFKDMGVGDVTGFLALDNTNKLIVLSFRGSRSIENWIGNLNFDLKEINDICSGCRGHDGFTSSWRSVADTLRQKVEDAVREHPDYRVVFTGHSLGGALATVAGADLRGNGYDIDVFSYGAPRVGNRAFAEFLTVQTGGTLYRITHTNDIVPRLPPREFGYSHSSPEYWIKSGTLVPVTRNDIVKIEGIDATGGNNQPNIPDITAHLWYFGLIGTC

SEQ ID NO: 13121 - protein, 268 aa, Thermomyces lanuginosus
EVSQDLFNQFNLFAQYSAAAYCGKNNDAPAGTNITCTGNACPEVEKADATFLYSFEDSGVGDVTGFLALDNTNKLIVLSFRGSRSVENWIGNLNFDLKEINDICSGCRGHDGFTSSWRSVADTLRQKVEDAVREHPDYRVVFTGHSLGGALATVAGADLRGNGYDIDVFSYGAPRVGNRAFAEFLTVQTGGTLYRITHTNDIVPRLPPREFGYSHSSPEYWIKSGTGVPVRRRDIVKIEGIDATGGNNQPNIPDIKAHLWYFGLIGTC

SEQ ID NO: 13122 - protein, 268 aa, Thermomyces lanuginosus
EVSQDLFNQFNLFAQYSAAAYCGKNNDAPAGTNITCTGNACPEVEKADATFLYSFEDSGVGDVTGFLALDNTNKLIVLSFRGSRSIENWIGNLNFDLKEINDICSGCRGHDGFTSSWRSVADTLRQKVEDAVREHPDYRVVFAGHSLGGALATVAGADLRGNGYDIDVFSYGAPRVGNRAFAEFLTVQTGGTLYRITSTNDIVPRLPPREFGYSHSSPEYWIKSGTLPPVRRRDIVKIEGIDATGGNNQPNIPDIPAHLWYFGLIGTC

SEQ ID NO: 13123 - protein, 268 aa, Thermomyces lanuginosus
EVSQDLFNQFNLFAQYSAAAYCGKNNDAPAGTNITCTGNACPEVEKADATFLYSFEDSGVGDVTGFLALDNTNKLIVLSFRGSRSIENWIGNLNFDLKEINDICSGCRGHDGFTSSWRSVADTLRQKVEDAVREHPDYRVVFTGHSLGGALATVAGADLRGDGYDIDVFSYGAPRVGNRAFAEFLTVQTGGTLYRITNTNDIVPRLPPREFGYSHSSPEYWIKSGTLPPVRRRDIVKIEGIDATGGNNQPNIPDIPAHLWYFGLIGTC

SEQ ID NO: 13124 - protein, 268 aa, Thermomyces lanuginosus
EVSQDLFNQFNLFAQYSAAAYCGKNNDAPAGTQITCTSNACPEVEKADATFLYSFEDSGVGDVTGFLALDNTNKLIVLSFRGSRSIENWIGNLNFDLKEINDICSGCRGHDGFTSSWRSVADTLRQKVEDAVREHPDYRVVFTGHSLGGALATVAGADLRGNKYDIDVFSYGAPRVGNRAFAEFLTVQTGGTLYRITHTNDIVPRLPPREFGYSHSSPEYWIKSGTLVPVRRRDIVKIEGIDATGGNNQPNIPDIPAHLWYFGLIGTC

SEQ ID NO: 13125 - protein, 268 aa, Thermomyces lanuginosus
EVSQDLFNQFNLFAQYSAAAYCGKNNRAPAGTNITCTGNACPEVEKADATFLYSFEDSGVGDVTGFLALDNTNKLIVLSFRGSRSIENWIWNLNFDLKEINDICSGCRGHAGFTSSWRSVADTLRQKVEDAVREHPDYRVVFTGHSLGGALATVAGADLRGNGYDIDVFSYGAPRVGNRAFAEFLTVQTGGTLYRITHTNDIVPRLPPREFGYSHPSPEYWIKSGTGVPVTRNDIVKIEGIDATGGNNQPNIPDITAHLWYFGLIGTC

SEQ ID NO: 13126 - protein, 268 aa, Thermomyces lanuginosus
EVSQDLFNQFNLFAQYSAAAYCGKNNDAPAGTTITCTGNACPVVEKADATFLYSFKDSGVGDVTGFLALDNTNKLIVLSFRGSRSIENWIGNLNFGLKEINDICSGCRGHDGFTSSWRSVADTLRQKVEDAVREHPDYRVVFTGHSLGGALATVAGADLRGNGYDIDVFSYGAPRVGNRAFAEFLTVQTGGTLYRITHTNDIVPRLPPREFGYSHSSPEYWIKSGTLVPVRRRDIVKIEGIDATGGNNQPNIPDIPAHLWYFGLIGTC

SEQ ID NO: 13127 - protein, 268 aa, Thermomyces lanuginosus
EVSQDLFNQFNLFAQYSAAAYCGKNNDAPAGTNITCTGNACPEVEKADATFLYSFRDSGVGDVTGFLALDNTNKLIVLSFRGSRSIENWIGNLNFDLKEINDICSGCRGHDGFTSSWFSVADTLRQKVEDAVREHPDYRVVFTGHSLGGALATVAGADLRGNGYDIDVFSYGAPRVGNRAFAEFLTVQTGGTLYRITHTNDIVPRLPPREFGYSHSSPEYWIKSGTLVPVRRRDIVKIEGIDATGGNNQPNIPDITAHLWYFGLIGTC

SEQ ID NO: 13128 - protein, 268 aa, Thermomyces lanuginosus
EVSDDLFNQFKLFAQYSAAAYCGKNNNAPAGTNITCTGNACPEVEKADATFLYSFEDSGVGDVTGFLALDNTNKLIVLSFRGSRSIENWIGNLNFDLKEINDICSGCRGHDGFTSSWRSVADTLRQKVEDAVREHPDYRVVFTGHSLGGALATVAGADLRGNGYDIDVFSYGAPRVGNRAFAEFLTVQTGGTLYRITHTNDIVPRLPPREFGYSHSSPEYWIKSGTLVPVTRQDIVKIEGIDATGGNNQPNIPDITAHLWYFGLIGTC

SEQ ID NO: 13129 - protein, 268 aa, Thermomyces lanuginosus
EVSQDLFNQFNLFAQYSAAAYCKANNDAPAGTNITCTGNACPEVEKADATFLYSFEDSGVGDVTGFLALDNTNKRIVLSFRGSRSIENWIGNLNFDLKEINDICSGCRGHDGFTSSWRSVADTLRQKVEAAVREHPDYRVVFTGHSLGGALATVAWADLRGNGYDIDVFSYGAPRVGNRAFAEFLTVQTGGTLYRITHTNDIVPRLPPREFGYSHSSPEYWIKSGTLVPVTRNDIVKIEGIDATGGNNQPNIPDIPAHLWYFGLIGTC

SEQ ID NO: 13130 - protein, 268 aa, Thermomyces lanuginosus
EVSQDLFNQFNLFAQYSAAAYCGKNNDAPAGTQITCTGNACPEVEKADATFLYSFEDSGVGDVTGFLALDNTNKLIVLSFRGSRSIENWIGNLNFDLKEINDICSGCRGHDGFTSSWRSVADTLRQKVEDAVREHPDYRVVFTGHSLGGALATVAGADLRGNGYDIDVFSYGAPRVGNRAFAEFLTVQTGGTLYRITHTNDIVPRLPPRQFGYSHSSPEYWIKSGTLVPVRRRDIVKIEGIDATGGNNQPNIPDAPAHLWYFGLIGTC

SEQ ID NO: 13131 - protein, 268 aa, Thermomyces lanuginosus
EVSQDLFNQFNLFAQYSAAAYCGKNNDAPAGTNITCTGNACPEVEKADATFLYSFEDSGVGDVTGFLALDNTNKQIVLSFRGSRSIENWIGNLNFDLKEINDICSGCRGHDGFTSSWRSVADTLRQKVEAAVREHPDYRVVFTGHSLGGALATIAWADLRGNGYDIDVFSYGAPRVGNRAFAEFLTNQTGGTLYRITHTNDIVPRLPPREFGYSHSSPEYWIKSGTLVPVTRNDIVKIEGIDATGGNNQPNIPDIPAHLWYFGRIGTC

SEQ ID NO: 13132 - protein, 268 aa, Thermomyces lanuginosus
EVSQDLFNQFNLFAQYSAAAYCGKNNDAPAGTNITCTGNACPEVEKAQATFLYSFEDMGVGDVTGFLALDNTNKLIVLSFRGSRSIENWIGNLNFDLKEINDICSGCRGHDGFTSSWRSVADTLRQKVEDAVREHPQYRVVFTGHSLGGALATVAGADLRGNPYDIDVFSYGAPRVGNRAFAEFLTVQTGGTLYRITHTNDIVPRLPPREFGYSHSSPEYWIKSGTLVPVTREDIVKIEGIDATGGNNQPNIPDIPAHLWYFGLIGTC

SEQ ID NO: 13133 - protein, 268 aa, Thermomyces lanuginosus
EVSQDLFNQFNLFAQYSKAAYCGANNDAPAGTNITCTGNACPEVEKADATFLYSFEDSGVGDVTGFLALDNTNKQIVLSFRGSRSIENWIGNLNFDLKEINDICSGCRGHDGFTSSWRSVADTLRQKVEDAVREHPDYRVVFTGHSLGGALATIAWADLRGNGYDIDVFSYGAPRVGNRAFAEFLTVQTGGTLYRITHTNDIVPRLPPREFGYSHSSPEYWIKSGTLVPVTRNDIVKIEGIDATGGNNQPNIPDIPAHLWYFGLIGTC

SEQ ID NO: 13134 - protein, 268 aa, Thermomyces lanuginosus
EVSQDLFNQFNLFAQYSAAAYCGKNNRAPAGTNITCTGNACPEVEKADATFLYSFEDSGVGDVTGFLALDNTNKLIVLSFRGSRSIENWIGNLNFDLKEINDICSGCRGHGGFTSSWRSVADTLRQKVEDAVREHPDYRVVFTGHSLGGALATVAGADLRGNGYDIDVFSYGAPRVGNRAFAEFLTVQTGGTLYRITHTNDIVPRLPPREFGYSHPSPEYWIKSGTPVPVTRNDIVKIEGIDATGGNNQPNIPDITAHLWYFGLIGTC

SEQ ID NO: 13135 - protein, 268 aa, Thermomyces lanuginosus
EVSQDLFNQFNLFAQYSAAAYCQKNNSAPAGTNITCTGNACPEVEKADATFLYSFEDSGVGDVTGFLALDNTNKQIVLSFRGSRSIENWIGNLNFDLKEINDICSGCRGHDGFTSSWRSVADTLRQKVEAAVREHPDYRVVFTGHSLGGALATVAGADLRGNGYDIDVFSYGAPRVGNRAFAEFLTVQTGGTLYRITHTNDIVPRLPPREFGYSHSSPEYWIKSGTLVPVTRNDIVKIEGIDATGGNNQPNQPDIPAHLWYFGRIGTC

SEQ ID NO: 13136 - protein, 268 aa, Thermomyces lanuginosus
EVSQDLFNQFNLFAQYSAAAYCGKNNDAPAGTNITCTGNACPEVEKADATLLYSFEDSGVGDVTGFLALDNTNKLIVLSFRGSRSIENWIGNLNFDLKEINDICSGCRGHEGFTSSWRSVADTLRQKVEDAVREHPDYRVVFTGHSLGGALATVAGADLRGNGYDIDVFSYGAPRVGNRAFAEFLTVQTGGTLYRITHTNDIVPRLPPREFGYSHSSPEYWIKSGTLVPVRRRDIVKIEGIDATGGNNQPNIPSIPAHLWYFGLIGTC

SEQ ID NO: 13137 - protein, 268 aa, Thermomyces lanuginosus
EVSQDLFNQFNLFAQYSAAAYCGKNNRAPAGTNITCTGNACPEVEKADATFLYSFEDSGVGDVTGFLALDNTNKLIVLSFRGSRSIENWISNLNFDLKEINDICSGCRGHAGFTSSWRSVADTLRQKVEDAVREHPDYRVVFTGHSLGGALATVAGADLRGNGYDIDVFSYGAPRVGNRAFAEFLTVQTGGTLYRITHTNDIVPRLPPREFGYSHPSPEYWIKSGTGVPVTRNDIVKIEGIDATGGNNQPNIPDITAHLWYFGLIGTC

SEQ ID NO: 13138 - protein, 268 aa, Thermomyces lanuginosus
EVSQDLFNQFNLFAQYSAAAYCGKNNDAPAGTNITCTGNACPEVEKAQATFLYSFEDMGVGDVTGFLALDNTNKLIVLSFRGSRSIENWIGNLNFDLKEINDICSGCRGHDGFTSSWRSVADTLRQKVEAAVREHPDYRVVFTGHSLGGALATVAGADLRGNGYDIDVFSYGAPRVGNRAFAEFLTVQTGGTLYRITHTNDIVPRLPPREFGYSHSSPEYWIKSGTMVPVTRQDIVKIEGIDATGGNNQPNIPDIPAHLWYFGRIGTC

SEQ ID NO: 13139 - protein, 268 aa, Thermomyces lanuginosus
EVSQDLFNQFNLFAQYSKAAYCGKNNSAPAGTDITCTGNACPEVFKADATFLYSFEDSGVGDVTGFLALDNTNKLIVLSFRGSRSIENWIGNLNFDLKEINDICSGCRGHDGFTSSWRSVADTLRQKVEDAVREHPDYRVVFTGHSLGGALATVAGADLRGNGYDIDVFSYGAPRVGNRAFAEFLTVQDGGTLYRITHTNDIVPRLPPREFGYSHSSPEYWIKSGTLVPVTRNDIVKIEGIDATGGNNQPNIPDIPAHLWYFGLIGTC

SEQ ID NO: 13140 - protein, 268 aa, Thermomyces lanuginosus
EVSQDLFNQFNLFAQYSAAAYCGKNNDAPAGTNITCTGNACPEVEKADATILYSFEDSGVGDVTGFLALDNTNKLIVLSFRGSRSIENWIGNLNFDLKEINDICSGCRGHDGFTSSWRSVADTLRQKVEDAVREHPDYRVVFAGHSLGGALATVAGADLRGNGYDIDVFSYGAPRVGNRAFAEFLTVQTGGTLYRITNTNDIVPRLPPREFGYSHSSPEYWIKSGTLVPVRRRDIVKIEGIDATGGNNQPNIPDIPAHLWYFGLIGTC

SEQ ID NO: 13141 - protein, 268 aa, Thermomyces lanuginosus
EVSQDLFNQFNLFAQYSAAAYCGKNNDAPAGTNITCTGNACPEVEKADATFLYSFEDMGVGDVTGFLALDNTNKLIVLSFRGSRSIENWIGNLNFDLKEINDICSGCRGHDGFTSSWRSVADTLRQKVEDAVREHPQYRVVFTGHSLGGALATVAGADLRGNPYDIDVFSYGAPRVGNRAFAEFLTVQTGGTLYRITHTNDIVPRLPPREFGYSHSSPEYWIKSGTMVPVTRQDIVKIEGIDATGGNNQPNIPDIPAHLWYFGLIGTC

SEQ ID NO: 13142 - protein, 268 aa, Thermomyces lanuginosus
EVSQDLFNQFNLFAQYSKAAYCGANNDAPAGTNITCTGNACPEVEKADATFLYSFEDSGVGDVTGFLALDNTNKRIVLSFRGSRSIENWIGNLNFDLKEINDICSGCRGHDGFTSSWRSVADTLRQKVEAAVREHPDYRVVFTGHSLGGALATIAGADLRGNGYDIDVFSYGAPRVGNRAFAEFLTVQTGGTLYRITHTNDIVPRLPPREFGYSHSSPEYWIKSGTLVPVTRNDIVKIEGIDATGGNNQPNIPDIPAHLWYFGLIGTC

SEQ ID NO: 13143 - protein, 268 aa, Thermomyces lanuginosus
EVSQDLFNQFNLFAQYSKAAYCGKNNDAPAGTNITCTGNACPEVEKADATFLYSFEDSGVGDVTGFLALDNTNKQIVLSFRGSRSIENWIGNLRFDLKEINDICSGCRGHDGFTSSWRSVADTLRQKVEDAVREHPDYRVVFTGHSLGGALATVAWADLRGNGYDIDVFSYGAPRVGNRAFAEFLTNQTGGTLYRITHTNDIVPRLPPREFGYSHSSPEYWIKSGTLVPVTRNDIVKIEGIDATGGNNQPNIPDIPAHLWYFGLIGTC

SEQ ID NO: 13144 - protein, 268 aa, Synthetic construct
EVSQDLFNQFNLFAQYSAAAYCGKNNDAPAGTNITCTGNACPEVEKADATFLYSFEGSGVGDVTGFLALDNTNKLIVLSFRGSRSIENWIGNLKFLLKEINDICSGCRGHDGFTSPWRSVADTLRQKVEDAVREHPDYRVVFTGHSLGGALATVAGADLRGNGYDIDVFPYGAPRVGNRAFAEFLTVQTGGTLYRITHTNDIVPRLPPREFGYSHSSPEYWIKSGTLVPVTRNDIVKIEGIDATGGNNRPNIPDIPAHLWYFGLIGTC

SEQ ID NO: 13145 - protein, 268 aa, Thermomyces lanuginosus
EVSQDLFNQFNLFAQYSAAAYCGKNNNAPAGTNITCTGNACPEVEKADATFLYSFEDMGVGDVTGFLALDNTNKLIVLSFRGSRSIENWFGNLNFDLKEINDICSGCRGHDGFTSSWRSVADTLRQKVEDAVREHPDYRVVFTGHSLGGALATVAGADLRGNGYDIDVFSYGAPRVGNRAFAEFLTVQTGGTLYRITHTNDIVPRLPPREFGYSHSSPEYWIKSGTLVPVTRQDIVKIEGIDATGGNNQPNIPDITAHLWYFGLIGTC

SEQ ID NO: 13146 - protein, 268 aa, Thermomyces lanuginosus
EVSQDLFNQFNLFAQYSAAAYCQKNNDAPAGTNITCTGNACPEVEKADVTFLYSFEDSGVGDVTGFLALDNTNKQIVLSFRGSRSIENWIGNLNFDLKEINDICSGCRGHDGFTSSWRSVADTLRQKVEDAVREHPDYRVVFTGHSLGGALATVAWADLRGNGYDIDVFSYGAPRVGNRAFAEFLTTQTGGTLYRITHTNDIVPRLPPREFGYSHSSPEYWIKSGTLVPVTRNDIVKIEGIDATGGNNQPNIPDIPAHLWYFGLIGTC

SEQ ID NO: 13147 - protein, 268 aa, Thermomyces lanuginosus
EVSQDLFNQFNLFAQYSAAAYCGKNNDAPAGTNITCTGNACPEVEKADATFLYSFEDSGVGDVTGFLALDNTNKQIVLSFRGSRSIENWIGNLNFDLKEINDICSGCRGHAGFTSSWRSVADTLRQKVEAAVREHPDYRVVFTGHSLGGALATVAGADLRGNGYDIDVFSYGAPRVGNRAFAEFLTNQQGGTLYRITHTNDIVPRLPPREFGYSHSSPEYWIKSGTLVPVTRNDIVKIEGIDATGGNNQPNIPDIPAHLWYFGLIGTC

SEQ ID NO: 13148 - protein, 268 aa, Thermomyces lanuginosus
EVSQDLFNQFNLFAQYSAAAYCKKNNDAPAGTNITCTGNACPEVEKADATFLYSFEDSGVGDVTGFLALDNTNKQIVLSFRGSRSIENWIGNLRFDLKEINDICSGCRGHDGFTSSWRSVADTLRQKVEDAVREHPDYRVVFTGHSLGGALATIAGADLRGNGYDIDVFSYGAPRVGNRAFAEFLTTQTGGTLYRITHTNDIVPRLPPREFGYSHSSPEYWIKSGTLVPVTRNDIVKIEGIDATGGNNQPNIPDIPAHLWYFGRIGTC

SEQ ID NO: 13149 - protein, 268 aa, Thermomyces lanuginosus
EVSQDLFNQFNLFAQYSAAAYCGKNNDAPAGTNITCTGNACPEVEKADATFLYSFRDSGVGDVTGFLALDNTNKLIVLSFRGSRSIENWIGNLNFDLKEINDICSGCRGHDGFTSSWFSVADTLRQKVEDAVREHPDYRVVFTGHSLGGALATVAGADLRGNGYDIDVFSYGAPRVGNRAFAEFLTVQTGGTLYRITHTNDIVPRLPPREFGYSHSSPEYWIKSGTLVPVRRRDIVKIEGIDAEGGNNQPNIPDIPAHLWYFGLIGTC

SEQ ID NO: 13150 - protein, 268 aa, Thermomyces lanuginosus
EVSDDLFNQFNLFAQYSAAAYCGKNNSAPAGTNITCTGNACPEVEKADATFLYSFEDMGVGDVTGFLALDNTNKLIVLSFRGSRSIENWIGNLNFDLKEINDICSGCRGHDGFTSSWRSVADTLRQKVEDAVREHPDYRVVFTGHSLGGALATVAGADLRGNGYDIDVFSYGAPRVGNRAFAEFLTVQTGGTLYRITHTNDIVPRLPPREFGYSHSSPEYWIKSGTLVPVTRQDIVKIEGIDATGGNNQPNIPDITAHLWYFGLIGTC

SEQ ID NO: 13151 - protein, 268 aa, Thermomyces lanuginosus
EVSQDLFNQFNLFAQYSAAAYCGKNNSAEAGTNITCTGNACPEVFKADATFLYSFEDSGVGDVTGFLALDNTRKLIVLSFRGSRSIENWIGNLNFDLKEINDICSGCRGHDGFTSSWRSVADTLRQKVEDAVREHPDYRVVFTGHSLGGALATVAGADLRGNGYDIDVFSYGAPRVGNRAFAEFLTVQDGGTLYRITHTNDIVPRLPPREFGYSHSSPEYWIKSGTLVPVTRNDIVKIEGIDATGGNNQPNIPDIPAHLWYFGLIGTC

SEQ ID NO: 13152 - protein, 268 aa, Thermomyces lanuginosus
EVSQDLFNQFNLFAQYSAAAYCQANNDAPAGTNITCTGNACPEVEKADATFLYSFEDSGVGDVTGFLALDNTNKQIVLSFRGSRSIENWIGNLNFDLKEINDICSGCRGHDGFTSSWRSVADTLRQKVEDAVREHPDYRVVFTGHSLGGALATVAWADLRGNGYDIDVFSYGAPRVGNRAFAEFLTNQTGGTLYRITHTNDIVPRLPPREFGYSHSSPEYWIKSGTLVPVTRNDIVKIEGIDATGGNNQPNIPDIPAHLWYFGLIGTC

SEQ ID NO: 13153 - protein, 268 aa, Thermomyces lanuginosus
EVSQDLFNQFNLFAQYSAAAYCQKNNDAPAGTNITCTGNACPEVEKADATFLYSFEDSGVGDVTGFLALDNTNKQIVLSFRGSRSIENWIGNLRFDLKEINDICSGCRGHAGFTSSWRSVADTLRQKVEDAVREHPDYRVVFTGHSLGGALATVAWADLRGNGYDIDVFSYGAPRVGNRAFAEFLTVQTGGTLYRITHTNDIVPRLPPREFGYSHSSPEYWIKSGTLVPVTRNDIVKIEGIDATGGNNQPNIPDIPAHLWYFGRIGTC

SEQ ID NO: 13154 - protein, 268 aa, Thermomyces lanuginosus
EVSQDLFNQFNLFAQYSAAAYCGKNNDAPAGTNITCTGNACPEVEKADATFLYSFEDSGVGDVTGFLALDNTNKLIVLSFRGSRSIENWIGNLNFDLKEINDICSGCRGHDGFTSSWRSVADTLRQKVEDAVREHPDYRVVFAGHSLGGALATVAGADLRGNGYDIDVFSYGAPRVGNRAFAEFLTVQTGGTLYRITHTNDIVPRLPPREFGYSHSSPEYWIKSGTLPPVRRRDIVKIEGIDATGGNNQPNIPDISAHLWYFGLIGTC

SEQ ID NO: 13155 - protein, 268 aa, Thermomyces lanuginosus
EVSQDLFNQFNLFAQYSAAAYCGKNNSAEAGTDITCTGNACPEVEKADATFLYSFEDSGVGDVTGFLALDNTRKDIVLSFRGSRSIENWIGNLNFDLKEINDICSGCRGHDGFTSSWRSVADTLRQKVEDAVREHPDYRVVFTGHSLGGALATVAGADLRGNGYDIDVFSYGAPRVGNRAFAEFLTVQTGGTLYRITHTNDIVPRLPPREFGYSHSSPEYWIKSGTLVPVTRNDIVKIEGIDATGGNNQPNIPDIPAHLWYFGLIGTC

SEQ ID NO: 13156 - protein, 268 aa, Thermomyces lanuginosus
EVSQDLFNQFNLFAQYSAAAYCQKNNDAPAGTNITCTGNACPEVEKADATFLYSFKDSGVGDVTGFLALDNTNKQIVLSFRGSRSIENWIGNLNFDLKEINDICSGCRGHDGFTSSWRSVADTLRQKVEAAVREHPDYRVVFTGHSLGGALATIAGADLRGNGYDIDVFSYGAPRVGNRAFAEFLTVQTGGTLYRITHTNDIVPRLPPREFGYSHSSPEYWIKSGTLVPVTRNDIVKIEGIDATGGNNQPNIPDIPAHLWYFGRIGTC

SEQ ID NO: 13157 - protein, 268 aa, Thermomyces lanuginosus
EVSQDLFNQFNLFAQYSAAAYCGKNNDAPAGTNITCTGNACPEVEKADATFLYSFEDSGVGDVTGFLALDNTNKLIVLSFRGSRSIENWFGNLNFDLKEINDICSGCRGHDGFTSSWRSVADTLRQKVEDAVREHPDYRVVFTGHSLGGALATVAGADLRGNGYDIDVFSYGAPRVGNRAFAEFLTVQTGGTLYRITHTNDPVPRLPPREFGYSHSSPEYWIKSGTLVPVRRRDIVKIEGIDATGGNNQPNIPDLPAHLWYFGLIGTC

SEQ ID NO: 13158 - protein, 268 aa, Thermomyces lanuginosus
EVSQDLFNQFNLFAQYSAAAYCGKNNDAPAGTNITCTGNACPEVEKADATFLYSFEDSGVGDVTGFLALDNTNKLIVLSFRGSRSIENWIQNLNFDLKEINDICSGCRGHDGFTSSWRSVADTLRQKVEDAVREHPDYRVVFTGHSLGGGLATVAGADLRGNGYDIDVFSYGAPRVGNRAFAEFLTVQTGGTLYRITHTNDIVPRLPPRQFGYSHSSPEYWIKSGTLVPVRRRDIVKIEGIDATGGNNQRNIPDIPAHLWYFGLIGTC

SEQ ID NO: 13159 - protein, 268 aa, Thermomyces lanuginosus
EVSQDLFNQFNLFAQYSAAAYCGKNNDAPAGTNITCTGNACPEVEKADATILYSFEDSGVGDVTGFLALDNTNKLIVLSFRGSRSIENWIGNLNFDLKEINDICSGCRGHEGFTSSWRSVADTLRQKVEDAVREHPDYRVVFTGHSLGGALATVAGADLRGNGYDIDVFSYGAPRVGNRAFAEFLTVQTGGTLYRITHTNDIVPRLPPREFGYSHSSPEYWIKSGTLVPVRRRDIVKIEGIDATGGNNQPNIPSIPAHLWYFGLIGTC

SEQ ID NO: 13160 - protein, 268 aa, Thermomyces lanuginosus
EVSQDLFNQFNLFAQYSAAAYCGKNNRAPAGTNITCTGNACPEVEKADATFLYSFEDSGVGDVTGFLALDNTNKLIVLSFRGSRSIENWIGNLNFDLKEINDICSGCRGHDGFTSSWRSVADTLRQKVEDAVREHPDYRVVFTGHSLGGALATVAGADLRGNGYDIDVFSYGAPRVGNRAFAEFLTVQTGGTLYRITHTNDIVPRLPPREFGYSHSSPEYWIKSGTLVPVRRRDIVKIEGIDATGGNNQPNIPSITAHLWYFGLIGTC

SEQ ID NO: 13161 - protein, 268 aa, Thermomyces lanuginosus
EVSQDLFNQFNLFAQYSAAAYCGKNNDAPAGTQITCTGNACPEVEKADATFLYSFEDSGVGDVTGFLALDNTNKLIVLSFRGSRSIENWIGNLNFDLKEINDICSGCRGHAGFTSSWRSVADTLRQKVEDAVREHPDYRVVFTGHSLGGALATVAGADLRGNGYDIDVFSYGAPRVGNRAFAEFLTVQTGGTLYRITHTNDIVPRLPPREFGYSHSSPEYWIKSGTLVPVRRRDIVKIEGIDATGGNNRPNIPDIPAHLWYFGLIGTC

SEQ ID NO: 13162 - protein, 268 aa, Thermomyces lanuginosus
EVSQDLFNQFNLFAQYSAAAYCSKNNDAPAGTNITCTGNACPEVEKADATFLYSFRDSGVGDVTGFLALDNTNKLIVLSFRGSRSIENWIGNLNFDLKEINDICSGCRGHDGFTSSWFSVADTLRQKVEDAVREHPDYRVVFTGHSLGGALATVAGADLRGNGYDIDVFSYGAPRVGNRAFAEFLTVQTGGTLYRITHTNDIVPRLPPREFGYSHSSPEYWIKSGTLVPVRRRDIVKIEGIDATGGNNQPNIPDIPAHLWYFGLIGTC

SEQ ID NO: 13163 - protein, 268 aa, Thermomyces lanuginosus
EVSQDLFNQFNLFAQYSAAAYCGKNNDAPAGTNITCTGNACPEVEKADATILYSFEDSGVGDVTGFLALDNTNKLIVLSFRGSRSIENWIGNLNFDLKEINDICSGCRGHDGFTSSWRSVADTLRQKVEDAVREHPDYRVVFTGHSLGGALATVAGADLRGDGYDIDVFSYGAPRVGNRAFAEFLTVQTGGTLYRITSTNDIVPRLPPREFGYSHSSPEYWIKSGTLVPVRRRDIVKIEGIDATGGNNQPNIPDIPAHLWYFGLIGTC

SEQ ID NO: 13164 - protein, 268 aa, Thermomyces lanuginosus
EVSQDLFNQFNLFAQYSAAAYCGKNNEAPAGTNITCTGNACPEVEKADATFLYSFEDSGVGDVTGFLALDNTNKLIVLSFRGSRSIENWIGNLNFDLKEINDICSGCRGHDGFTSSWRSVADTLRQKVEAAVREHPQYRVVFTGHSLGGALATVAGADLRGNPYDIDVFSYGAPRVGNRAFAEFLTVQTGGTLYRITHTNDIVPRLPPREFGYSHSSPEYWIKSGTLVPVTRQDIVKIEGIDATGGNNQPNIPDIPAHLWYFGRIGTC

SEQ ID NO: 13165 - protein, 268 aa, Thermomyces lanuginosus
EVSQDLFNQFKLFAQYSAAAYCGKNNQAPAGTNITCTGNACPEVEKADATFLYSFEDMGVGDVTGFLALDNTNKLIVLSFRGSRSIENWIGNLNFDLKEINDICSGCRGHDGFTSSWRSVADTLRQKVEDAVREHPDYRVVFTGHSLGGALATVAGADLRGNGYDIDVFSYGAPRVGNRAFAEFLTVQTGGTLYRITHTNDIVPRLPPREFGYSHSSPEYWIKSGTLVPVTRQDIVKIEGIDATGGNNQPNIPDITAHLWYFGLIGTC

SEQ ID NO: 13166 - protein, 268 aa, Thermomyces lanuginosus
EVSDDLFNQFNLFAQYSAAAYCGKNNSAPAGTNITCTGNACPEVEKADATFLYSFKDSGVGDVTGFLALDNTNKLIVLSFRGSRSIENWIGNLNFDLKEINDICSGCRGHDGFTSSWRSVADTLRQKVEDAVREHPDYRVVFTGHSLGGALATVAGADLRGNGYDIDVFSYGAPRVGNRAFAEFLTVQTGGTLYRITHTNDIVPRLPPREFGYSHSSPEYWIKSGTLVPVTRQDIVKIEGIDATGGNNQPNIPDITAHLWYFGLIGTC

SEQ ID NO: 13167 - protein, 268 aa, Thermomyces lanuginosus
EVSQDLFNQFNLFAQYSAAAYCGKNNQAPAGTNITCTGNACPEVEKADATTLYSFEDMGVGDVTGFLALDNTNKQIVLSFRGSRSIENWIQNLNFDLKEINDICSGCRGHDGFTSSWRSVADTLRQKVEDAVREHPDYRVVFTGHSLGGALATVAGADLRGNGYDIDVFSYGAPRVGNRAFAEFLTVQTGGTLYRITHTNDIVPRLPPREFGYSHSSPEYWIKSGTLVPVTRNDIVKIEGIDATGGNNQPNQPDIPAHLWYFGRIGTC

SEQ ID NO: 13168 - protein, 268 aa, Thermomyces lanuginosus
EVSQDLFNQFNLFAQYSAAAYCGKNNDAPAGTNITCTGNACPEVEKADATFLYSFEDSGVGDVTGFLALDNTNKLIVLSFRGSRSIENWVGNLNFDLKEINDICSGCRGHDGFTSSWRSVADTLRQKVEDAVREHPDYRVVFTGHSLGGALATVAGADLRGNGYDIDVFSYGAPRVGNRAFAEFLTVQTGGTLYRITHTNDIVPRLPPREFGYSHSSPEYWIKSGTGVPVRRRDIVKIEGIDATGGNNQPNIPDIKAHLWYFGLIGTC

SEQ ID NO: 13169 - protein, 268 aa, Thermomyces lanuginosus
EVSDDLFNQFKLFAQYSAAAYCGKNNQAPAGTNITCTGNACPEVEKADATFLYSFEDMGVGDVTGFLALDNTNKLIVLSFRGSRSIENWIGNLNFDLKEINDICSGCRGHDGFTSSWRSVADTLRQKVEDAVREHPDYRVVFTGHSLGGALATVAGADLRGNGYDIDVFSYGAPRVGNRAFAEFLTVQTGGTLYRITHTNDIVPRLPPREFGYSHSSPEYWIKSGTLVPVTRQDIVKIEGIDATGGNNQPNIPDIPAHLWYFGLIGTC

SEQ ID NO: 13170 - protein, 268 aa, Thermomyces lanuginosus
EVSQDLFNQFNLFAQYSKAAYCGKNNDAPAGTNITCTGNACPEVEKADATFLYSFEDSGVGDVTGFLALDNTNKLIILSFRGSRSIENWIGNLNFDLKEINDICSGCRGHDGFTSSWRSVADTLRQKVEDAVREHPDYRVVFTGHSLGGALATVAWADLRGNGYDIDVFSYGAPRVGNRAFAEFLTTQDGGTLYRITHTNDIVPRLPPREFGYSHSSPEYWIKSGTLVPVTRNDIVKIEGIDATGGNNQPNIPDIPAHLWYFGLIGTC

SEQ ID NO: 13171 - protein, 268 aa, Thermomyces lanuginosus
EVSQDLFNQFNLFAQYSAAAYCGKNNDAPAGTNITCTGNACPEVEKADATFLYSFEDSGVGDVTGFLALDNTNKQIVLSFRGSRSIENWIGNLRFDLKEINDICSGCRGHAGFTSSWRSVADTLRQKVEDAVREHPDYRVVFTGHSLGGALATVAWADLRGNGYDIDVFSYGAPRVGNRAFAEFLTVQQGGTLYRITHTNDIVPRLPPREFGYSHSSPEYWIKSGTLVPVTRNDIVKIEGIDATGGNNQPNIPDIPAHLWYFGRIGTC

SEQ ID NO: 13172 - protein, 268 aa, Thermomyces lanuginosus
EVSQDLFNQFNLFAQYSAAAYCQKNNDAPAGTNITCTGNACPEVFKADATFLYSFEDSGVGDVTGFLALDNTNKQIVLSFRGSRSIENWIGNLNFDLKEINDICSGCRGHDGFTSSWRSVADTLRQKVEDAVREHPDYRVVFTGHSLGGALATVAWADLRGNGYDIDVFSYGAPRVGNRAFAEFLTVQDGGTLYRITHTNDIVPRLPPREFGYSHSSPEYWIKSGTLVPVTRNDIVKIEGIDATGGNNQPNIPDIPAHLWYFGLIGTC

SEQ ID NO: 13173 - protein, 268 aa, Thermomyces lanuginosus
EVSQDLFNQFNLFAQYSAAAYCGKNNRAPAGTNITCTGNACPEVEKADATFLYSFEDSGVGDVTGFLALDNTNKLIVLSFRGSRSIENWIGNLNFDLKEINDICSGCRGHAGFTSSWRSVADTLRQKVEDAVREHPDYRVVFTGHSLGGALATVAGADLRGNGYDIDVFSYGAPRVGNRAFAEFLTVQTGGTLYRITHTNDIVPRLPPREFGYSHPSPEYWIKSGTGVPVTRNDIVKIEGIDATGGNNQPNIPDITAHLWYFGLFGTC

SEQ ID NO: 13174 - protein, 268 aa, Thermomyces lanuginosus
EVSQDLFNQFNLFAQYSKAAYCGKNNDAPAGTDITCTGNACPEVFKADATFLYSFEDSGVGDVTGFLALDNTNKDIVLSFRGSRSIENWIGNLNFDLKEINDICSGCRGHDGFTSSWRSVADTLRQKVEDAVREHPDYRVVFTGHSLGGALATVAGADLRGNGYDIDVFSYGAPRVGNRAFAEFLTVQDGGTLYRITHTNDIVPRLPPREFGYSHSSPEYWIKSGTLVPVTRNDIVKIEGIDATGGNNQPNIPDIPAHLWYFGLIGTC

SEQ ID NO: 13175 - protein, 268 aa, Thermomyces lanuginosus
EVSQDLFNQFNLFAQYSAAAYCKANNDAPAGTNITCTGNACPEVEKADATFLYSFEDSGVGDVTGFLALDNTNKLIVLSFRGSRSIENWIGNLNFDLKEINDICSGCRGHAGFTSSWRSVADTLRQKVEAAVREHPDYRVVFTGHSLGGALATVAGADLRGNGYDIDVFSYGAPRVGNRAFAEFLTTQTGGTLYRITHTNDIVPRLPPREFGYSHSSPEYWIKSGTLVPVTRNDIVKIEGIDATGGNNQPNIPDIPAHLWYFGLIGTC

SEQ ID NO: 13176 - protein, 268 aa, Thermomyces lanuginosus
EVSQDLFNQFNLFAQYSAAAYCGKNNDAPAGTNITCTGNACPEVEKADATFLYSFEDSGVGDVTGFLALDNTNKLIVLSFRGSRSIENWIGNLNFDLKEINDICSGCRGHDGFTSSWRSVADTLRQKVEDAVREHPDYRVVFAGHSLGGALATVAGADLRGDGYDIDVFSYGAPRVGNRAFAEFLTVQTGGTLYRITSTNDIVPRLPPREFGYSHSSPEYWIKSGTLVPVRRRDIVKIEGIDATGGNNQPNIPDIPAHLWYFGLIGTC

SEQ ID NO: 13177 - protein, 268 aa, Thermomyces lanuginosus
EVSQDLFNQFNLFAQYSAAAYCGANNDAPAGTNITCTGNACPEVEKADATFLYSFEDSGVGDVTGFLALDNTNKRIVLSFRGSRSIENWIGNLNFDLKEINDICSGCRGHAGFTSSWRSVADTLRQKVEDAVREHPDYRVVFTGHSLGGALATIAGADLRGNGYDIDVFSYGAPRVGNRAFAEFLTTQTGGTLYRITHTNDIVPRLPPREFGYSHSSPEYWIKSGTLVPVTRNDIVKIEGIDATGGNNQPNIPDIPAHLWYFGLIGTC

SEQ ID NO: 13178 - protein, 268 aa, Thermomyces lanuginosus
EVSQDLFNQFNLFAQYSAAAYCGKNNDAPAGTNITCTGNACPEVEKADATILYSFEDSGVGDVTGFLALDNTNKLIVLSFRGSRSIENWIGNLNFDLKEINDICSGCRGHDGFTSSWRSVADTLRQKVEDAVREHPDYRVVFAGHSLGGALATVAGADLRGNGYDIDVFSYGAPRVGNRAFAEFLTVQTGGTLYRITHTNDIVPRLPPREFGYSHSSPEYWIKSGTLPPVRRRDIVKIEGIDATGGNNQPNIPDIPAHLWYFGLIGTC

SEQ ID NO: 13179 - protein, 268 aa, Synthetic construct
EVSQDLFNQFNLFAQYSAAAYCGKNNDAPAGTNITCTGNACPEVEKADATFLYSFEGSGVGDVTGFLALDNTNKLIVLSFRGSRSIENWIGNLKFLLKEINDICSGCRGHDGFTSSWRSVADTLRQKVEDAVREHPDYRVVFTGHSLGGALATVAGADLRGNGYDIDVFSYGAPRVGNRAFAEFLTVQTGGTLYRITHRRDIVPRLPPREFGYSHSSPEYWIKSGTLVPVTRNDIVKIEGIDATGGNNRPNIPDIPAHLWYFGLIGTC

SEQ ID NO: 13180 - protein, 268 aa, Thermomyces lanuginosus
EVSQDLFNQFNLFAQYSAAAYCGKNNDAPAGTNITCTGNACPEVEKADATFLYSFEDSGVGDVTGFLALDNTNKLIVLSFRGSRSIENWIGNLNFDLKEINDICSGCRGHDGFTSSWRSVADTLRQKVEDAVREHPDYRVVFAGHSLGGALATVAGADLRGDGYDIDVFSYGAPRVGNRAFAEFLTVQTGGTLYRITNTNDIVPRLPPREFGYSHSSPEYWIKSGTLVPVRRRDIVKIEGIDATGGNNQPNIPDIPAHLWYFGLIGTC

SEQ ID NO: 13181 - protein, 268 aa, Thermomyces lanuginosus
EVSQDLFNQFNLFAQYSAAAYCGKNNQAPAGTNITCTGNACPEVEKADATFLYSFKDMGVGDVTGFLALDNTNKLIVLSFRGSRSIENWIGNLNFDLKEINDICSGCRGHDGFTSSWRSVADTLRQKVEAAVREHPDYRVVFTGHSLGGALATVAGADLRGNGYDIDVFSYGAPRVGNRAFAEFLTVQTGGTLYRITHTNDIVPRLPPREFGYSHSSPEYWIKSGTLVPVTRNDIVKIEGIDATGGNNQPNQPDIPAHLWYFGRIGTC

SEQ ID NO: 13182 - protein, 268 aa, Thermomyces lanuginosus
EVSQDLFNQFNLFAQYSKAAYCQKNNDAPAGTNITCTGNACPEVEKADVTFLYSFEDSGVGDVTGFLALDNTNKQIVLSFRGSRSIENWIGNLNFDLKEINDICSGCRGHDGFTSSWRSVADTLRQKVEDAVREHPDYRVVFTGHSLGGALATVAWADLRGNGYDIDVFSYGAPRVGNRAFAEFLTVQTGGTLYRITHTNDIVPRLPPREFGYSHSSPEYWIKSGTLVPVTRNDIVKIEGIDATGGNNQPNIPDIPAHLWYFGLIGTC

SEQ ID NO: 13183 - protein, 268 aa, Thermomyces lanuginosus
EVSQDLFNQFNLFAQYSAAAYCGKNNSAPAGTNITCTGNACPEVEKADATTLYSFEDSGVGDVTGFLALDNTNKGIVLSFRGSRSIENWIQNLNFDLKEINDICSGCRGHDGFTSSWRSVADTLRQKVEDAVREHPDYRVVFTGHSLGGALATVAGADLRGNGYDIDVFSYGAPRVGNRAFAEFLTTQTGGTLYRITHTNDIVPRLPPREFGYSHSSPEYWIKSGTLVPVTRNDIVKIEGIDATGGNNQPNQPDIPAHLWYFGRIGTC

SEQ ID NO: 13184 - protein, 268 aa, Thermomyces lanuginosus
EVSQDLFNQFNLFAQYSAAAYCKKNNSAPAGTNITCTGNACPEVEKADATTLYSFEDSGVGDVTGFLALDNTNKQIVLSFRGSRSIENWIGNLNFDLKEINDICSGCRGHDGFTSSWRSVADTLRQKVEDAVREHPDYRVVFTGHSLGGALATVAGADLRGNGYDIDVFSYGAPRVGNRAFAEFLTTQTGGTLYRITHTNDIVPRLPPREFGYSHSSPEYWIKSGTLVPVTRNDIVKIEGIDATGGNNQPNIPDIPAHLWYFGRIGTC

SEQ ID NO: 13185 - protein, 268 aa, Thermomyces lanuginosus
EVSQDLFNQFNLFAQYSKAAYCGANNDAPAGTNITCTGNACPEVEKADATFLYSFEDSGVGDVTGFLALDNTNKQIVLSFRGSRSIENWIGNLNFDLKEINDICSGCRGHDGFTSSWRSVADTLRQKVEDAVREHPDYRVVFTGHSLGGALATIAGADLRGNGYDIDVFSYGAPRVGNRAFAEFLTVQDGGTLYRITHTNDIVPRLPPREFGYSHSSPEYWIKSGTLVPVTRNDIVKIEGIDATGGNNQPNIPDIPAHLWYFGLIGTC

SEQ ID NO: 13186 - protein, 268 aa, Thermomyces lanuginosus
EVSQDLFNQFNLFAQYSAAAYCGKNNDAPAGTNITCTGNACPEVEKAQATFLYSFEDMGVGDVTGFLALDNTNKLIVLSFRGSRSIENWIGNLNFDLKEINDICSGCRGHDGFTSSWRSVADTLRQKVEAAVREHPQYRVVFTGHSLGGALATVAGADLRGNPYDIDVFSYGAPRVGNRAFAEFLTVQTGGTLYRITHTNDIVPRLPPREFGYSHSSPEYWIKSGTLVPVTRNDIVKIEGIDATGGNNQPNIPDIPAHLWYFGRIGTC

SEQ ID NO: 13187 - protein, 268 aa, Thermomyces lanuginosus
EVSQDLFNQFNLFAQYSKAAYCQANNDAPAGTNITCTGNACPEVEKADATFLYSFEDSGVGDVTGFLALDNTNKLIVLSFRGSRSIENWIGNLNFDLKEINDICSGCRGHDGFTSSWRSVADTLRQKVEAAVREHPDYRVVFTGHSLGGALATIAGADLRGNGYDIDVFSYGAPRVGNRAFAEFLTVQTGGTLYRITHTNDIVPRLPPREFGYSHSSPEYWIKSGTLVPVTRNDIVKIEGIDATGGNNQPNIPDIPAHLWYFGLIGTC

SEQ ID NO: 13188 - protein, 268 aa, Thermomyces lanuginosus
EVSQDLFNQFKLFAQYSAAAYCGKNNNAPAGTNITCTGNACPEVEKADATFLYSFKDSGVGDVTGFLALDNTNKLIVLSFRGSRSIENWIGNLNFDLKEINDICSGCRGHDGFTSSWRSVADTLRQKVEDAVREHPDYRVVFTGHSLGGALATVAGADLRGNGYDIDVFSYGAPRVGNRAFAEFLTVQTGGTLYRITHTNDIVPRLPPREFGYSHSSPEYWIKSGTLVPVTRQDIVKIEGIDATGGNNQPNIPDITAHLWYFGLIGTC

SEQ ID NO: 13189 - protein, 268 aa, Thermomyces lanuginosus
EVSQDLFNQFNLFAQYSAAAYCQKNNDAPAGTNITCTGNACPEVEKADATTLYSFEDSGVGDVTGFLALDNTNKRIVLSFRGSRSIENWIQNLNFDLKEINDICSGCRGHDGFTSSWRSVADTLRQKVEDAVREHPDYRVVFTGHSLGGALATVAGADLRGNGYDIDVFSYGAPRVGNRAFAEFLTNQTGGTLYRITHTNDIVPRLPPREFGYSHSSPEYWIKSGTLVPVTRNDIVKIEGIDATGGNNQPNQPDIPAHLWYFGRIGTC

SEQ ID NO: 13190 - protein, 268 aa, Thermomyces lanuginosus
EVSQDLFNQFNLFAQYSAAAYCKKNNDAPAGTNITCTGNACPEVEKADATFLYSFKDSGVGDVTGFLALDNTNKRIVLSFRGSRSIENWIGNLNFDLKEINDICSGCRGHDGFTSSWRSVADTLRQKVEAAVREHPDYRVVFTGHSLGGALATVAGADLRGNGYDIDVFSYGAPRVGNRAFAEFLTNQTGGTLYRITHTNDIVPRLPPREFGYSHSSPEYWIKSGTLVPVTRNDIVKIEGIDATGGNNQPNIPDIPAHLWYFGRIGTC

SEQ ID NO: 13191 - protein, 268 aa, Thermomyces lanuginosus
EVSQDLFNQFNLFAQYSKAAYCQKNNDAPAGTNITCTGNACPEVEKADVTFLYSFEDSGVGDVTGFLALDNTNKQIVLSFRGSRSIENWIGNLNFDLKEINDICSGCRGHDGFTSSWRSVADTLRQKVEDAVREHPDYRVVFTGHSLGGALATVAGADLRGNGYDIDVFSYGAPRVGNRAFAEFLTTQTGGTLYRITHTNDIVPRLPPREFGYSHSSPEYWIKSGTLVPVTRNDIVKIEGIDATGGNNQPNIPDIPAHLWYFGLIGTC

SEQ ID NO: 13192 - protein, 268 aa, Thermomyces lanuginosus
EVSQDLFNQFNLFAQYSKAAYCGKNNDAPAGTNITCTGNACPEVEKADVTFLYSFEDSGVGDVTGFLALDNTNKQIVLSFRGSRSIENWIGNLNFDLKEINDICSGCRGHDGFTSSWRSVADTLRQKVEDAVREHPDYRVVFTGHSLGGALATVAGADLRGNGYDIDVFSYGAPRVGNRAFAEFLTTQDGGTLYRITHTNDIVPRLPPREFGYSHSSPEYWIKSGTLVPVTRNDIVKIEGIDATGGNNQPNIPDIPAHLWYFGLIGTC

SEQ ID NO: 13193 - protein, 268 aa, Thermomyces lanuginosus
EVSQDLFNQFNLFAQYSAAAYCQKNNDAPAGTNITCTGNACPEVEKADATTLYSFEDSGVGDVTGFLALDNTNKQIVLSFRGSRSIENWIQNLNFDLKEINDICSGCRGHDGFTSSWRSVADTLRQKVEDAVREHPDYRVVFTGHSLGGALATVAGADLRGNGYDIDVFSYGAPRVGNRAFAEFLTHQTGGTLYRITHTNDIVPRLPPREFGYSHSSPEYWIKSGTLVPVTRNDIVKIEGIDATGGNNQPNQPDIPAHLWYFGRIGTC

SEQ ID NO: 13194 - protein, 268 aa, Thermomyces lanuginosus
EVSQDLFNQFRLFAQYSAAAYCGKNNDAPAGTQITCTGNACPEVEKADATFLYSFEDSGVGDVTGFLALDNTNKLIVLSFRGSRSIENWIGNLNFDLKEINDICSGCRGHDGFTSSWRSVADTLRQKVEDAVREHPDYRVVFTGHSLGGALATVAGADLRGNGYDIDVFSYGAPRVGNRAFAEFLTVQTGGTLYRITHTNDIVPRLPPREFGYSHSSPEYWIKSGTLVPVRRRDIVKIEGIDASGGNNQPNIPDIPAHLWYFGLIGTC

SEQ ID NO: 13195 - protein, 268 aa, Thermomyces lanuginosus
EVSQDLFNQFNLFAQYSAAAYCGKNNEAPAGTNITCTGNACPEVEKADATFLYSFEDMGVGDVTGFLALDNTNKLIVLSFRGSRSIENWIGNLNFDLKEINDICSGCRGHDGFTSSWRSVADTLRQKVEAAVREHPDYRVVFTGHSLGGALATVAGADLRGNGYDIDVFSYGAPRVGNRAFAEFLTVQTGGTLYRITHTNDIVPRLPPREFGYSHSSPEYWIKSGTMVPVTRQDIVKIEGIDATGGNNQPNIPDIPAHLWYFGRIGTC

SEQ ID NO: 13196 - protein, 268 aa, Thermomyces lanuginosus
EVSQDLFNQFNLFAQYSAAAYCGKNNDAPAGTNITCTGNACPEVEKADATFLYSFEDSGVGDVTGFLALDNTNKLIVLSFRGSRSIENWIQNLNFDLKEINDICSGCRGHDGFTSSWRSVADTLRQKVEDAVREHPDYRVVFAGHSLGGALATVAGADLRGNGYDIDVFSYGAPRVGNRAFAEFLTVQTGGTLYRITHTNDIVPRLPPRQFGYSHSSPEYWIKSGTLVPVRRRDIVKIEGIDATGGNNQPNIPDAPAHLWYFGLIGTC

SEQ ID NO: 13197 - protein, 268 aa, Thermomyces lanuginosus
EVSQDLFNQFNLFAQYSAAAYCKKNNDAPAGTNITCTGNACPEVEKADATFLYSFEDSGVGDVTGFLALDNTNKQIILSFRGSRSIENWIGNLNFDLKEINDICSGCRGHDGFTSSWRSVADTLRQKVEAAVREHPDYRVVFTGHSLGGALATVAWADLRGNGYDIDVFSYGAPRVGNRAFAEFLTVQTGGTLYRITHTNDIVPRLPPREFGYSHSSPEYWIKSGTLVPVTRNDIVKIEGIDATGGNNQPNIPDIPAHLWYFGLIGTC

SEQ ID NO: 13198 - protein, 268 aa, Thermomyces lanuginosus
EVSQDLFNQFNLFAQYSAAAYCGKNNRAPAGTNITCTGNACPEVEKADATFLYSFEDSGVGDVTGFLALDNTNKLIVLSFRGSRSIENWIGNLNFDLKEINDICSGCRGHGGFTSSWRSVADTLRQKVEDAVREHPDYRVVFTGHSLGGALATVAGADLRGNGYDIDVFSYGAPRVGNRAFAEFLTVQTGGTLYRITHTNDIVPRLPPREFGYSHPSPEYWIKSGTGVPVTRNDIVKIEGIDATGGNNQPNIPDITAHLWYFGLIGTC

SEQ ID NO: 13199 - protein, 268 aa, Thermomyces lanuginosus
EVSQDLFNQFNLFAQYSAAAYCGKNNRAPAGTNITCTGNACPEVEKADATFLYSFEDSGVGDVTGFLALDNTNKLIVLSFRGSRSIENWISNLNFNLKEINDICSGCRGHAGFTSSWRSVADTLRQKVEDAVREHPDYRVVFTGHSLGGALATVAGADLRGNGYDIDVFSYGAPRVGNRAFAEFLTVQTGGTLYRITHTNDIVPRLPPREFGYSHPSPEYWIKSGTGVPVTRNDIVKIEGIDATGGNNQPNIPDITAHLWYFGLIGTC

SEQ ID NO: 13200 - protein, 268 aa, Thermomyces lanuginosus
EVSQDLFNQFNLFAQYSAAAYCGKNNDAPAGTNITCTGNACPEVEKADATFLYSFEDSGVGDVTGFLALDNTNKLIVLSFRGSRSIENWIGNLNFDLKEINDICSGCRGHDGFTSSWRSVADTLRQKVEDAVREHPDYRVVFTGHSLGGALATVAGADLRGDGYDIDVFSYGAPRVGNRAFAEFLTVQTGGTLYRITNTNDIVPRLPPREFGYSHSSPEYWIKSGTLRPVRRRDIVKIEGIDATGGNNQPNIPDIPAHLWYFGLIGTC

SEQ ID NO: 13201 - protein, 268 aa, Thermomyces lanuginosus
EVSQDLFNQFNLFAQYSAAAYCGKNNDAPAGTNITCTGNACPEVEKADATFLYSFEDSGVGDVTGFLALDNTNKLIVLSFRGSRSIENWIGNLNFDLKEINDICSGCRGHDGFTSSWRSVADTLRQKVEAAVREHPDYRVVFTGHSLGGALATIAWADLRGNGYDIDVFSYGAPRVGNRAFAEFLTNQQGGTLYRITHTNDIVPRLPPREFGYSHSSPEYWIKSGTLVPVTRNDIVKIEGIDATGGNNQPNIPDIPAHLWYFGLIGTC

SEQ ID NO: 13202 - protein, 268 aa, Thermomyces lanuginosus
EVSQDLFNQFNLFAQYSAAAYCGKNNEAPAGTNITCTGNACPEVEKADATFLYSFEDSGVGDVTGFLALDNTNKLIVLSFRGSRSIENWIGNLNFDLKEINDICSGCRGHDGFTSSWRSVADTLRQKVEDAVREHPQYRVVFTGHSLGGALATVAGADLRGNPYDIDVFSYGAPRVGNRAFAEFLTVQTGGTLYRITHTNDIVPRLPPREFGYSHSSPEYWIKSGTMVPVTRQDIVKIEGIDATGGNNQPNIPDIPAHLWYFGRIGTC

SEQ ID NO: 13203 - protein, 268 aa, Thermomyces lanuginosus
EVSQDLFNQFNLFAQYSAAAYCGKNNDAPAGTNITCTGNACPEVEKADATFLYSFEDNGSGDVTGFLALDNTNKLIVLSFRGSRSIENWIGNLNFDLKEINDICSGCRGHDGFTSSWRSVADTLRQKVEDAVREHPDYRVVFTGHSLGGALATVAGADLRGNGYDIDVFSYGAPRVGNRAFAEFLTVQTGGTLYRITHTNDIVPRLPPREFGYSHSSPEYWIKSGTLVPVRRRDIVKIEGIDATGGNNIPNIPDIPAHLWYFGLIGTC

SEQ ID NO: 13204 - protein, 268 aa, Thermomyces lanuginosus
EVSRDLFNQFNLFAQYSAAAYCGKNNDAPAGTNITCTGNACPEVEKADATFLYSFEDSGVGDVTGFLALDNTNKLIVLSFRGSRSIENWIGNLNFDLKEINDICSGCRGHDGFTSSWRSVADTLRQKVEDAVREHPDYRVVFAGHSLGGALATVAGADLRGNGYDIDVFSYGAPRVGNRAFAEFLTVQTGGTLYRITNTNDIVPRLPPREFGYSHSSPEYWIKSGTLVPVRRRDIVKIEGIDATGGNNQPNIPDIPAHLWYFGLIGTC

SEQ ID NO: 13205 - protein, 268 aa, Thermomyces lanuginosus
EVSQDLFNQFNLFAQYSAAAYCGKNNDAPAGTNITCTGNACPEVEKADATFLYSFEDSGVGDVTGFLALDNTNKLIVLSFRGSRSIENWIQNLNFDLKEINDICSGCRGHDGFTSSWRSVADTLRQKVEDAVREHPDYRVVFTGHSLGGGLATVAGADLRGNGYDIDVFSYGAPRVGNRAFAEFLTVQTGGTLYRITHTNDIVPRLPPRQFGYSHSSPEYWIKSGTLVPVRRRDIVKIEGIDATGGNNQPNIPDAPAHLWYFGLIGTC

SEQ ID NO: 13206 - protein, 268 aa, Thermomyces lanuginosus
EVSQDLFNQFNLFAQYSAAAYCKKNNDAPAGTNITCTGNACPEVEKADATFLYSFEDSGVGDVTGFLALDNTNKLIVLSFRGSRSIENWIGNLRFDLKEINDICSGCRGHDGFTSSWRSVADTLRQKVEDAVREHPDYRVVFTGHSLGGALATVAWADLRGNGYDIDVFSYGAPRVGNRAFAEFLTNQQGGTLYRITHTNDIVPRLPPREFGYSHSSPEYWIKSGTLVPVTRNDIVKIEGIDATGGNNQPNIPDIPAHLWYFGLIGTC

SEQ ID NO: 13207 - protein, 268 aa, Thermomyces lanuginosus
EVSQDLFNQFNLFAQYSAAAYCGKNNDAPAGTKITCTGNACPEVEKADATVLYSFEDSGVGDVTGFLALDNTNKLIVLSFRGSRSIENWIGNLNFDLEEINDICSGCRGHDGFTSSWRSVADTLRQKVEDAVREHPDYRVVFTGHSLGGALATVAGADLRGNGYDIDVFSYGAPRVGNRAFAEFLTVQTGGTLYRITHTNDIVPRLPPREFGYSHSSPEYWIKSGTLVPVRRRDIVKIEGIDATGGNNQPNIPDIPAHLWYFGLIGTC

SEQ ID NO: 13208 - protein, 268 aa, Thermomyces lanuginosus
EVSQDLFNQFNLFAQYSAAAYCGKNNDAPAGTQITCTGNACPEVEKADATFLYSFEDSGVGDVTGFLALDNTNKLIVLSFRGSRSIENWITNLRFDLKEINDICSGCRGHDGFTSSWRSVADTLRQKVEDAVREHPDYRVVFTGHSLGGALATVAGADLRGNGYDIDVFSYGAPRVGNRAFAEFLTVQTGGTLYRITHTNDIVPRLPPREFGYSHSSPEYWIKSGTLVPVRRRDIVKIEGIDATGGNNQPNIPSIPAHLWYFGLIGTC

SEQ ID NO: 13209 - protein, 268 aa, Thermomyces lanuginosus
EVSQDLFNQFNLFAQYSAAAYCGKNNDAPAGTNITCTGNACPEVEKADATFLYSFEDSGVGDVTGFLALDNTNKLIVLSFRGSRSIENWIGNLNFDLKEINDICSGCRGHDGFTSSWRSVADTLRQKVEDAVREHPDYRVVFAGHSLGGALATVAGADLRGNGYDIDVFSYGAPRVGNRAFAEFLTVQTGGTLYRITNTNDIVPRLPPREFGYSHSSPEYWIKSGTLRPVRRRDIVKIEGIDATGGNNQPNIPDIPAHLWYFGLIGTC

SEQ ID NO: 13210 - protein, 268 aa, Thermomyces lanuginosus
EVSQDLFNQFKLFAQYSAAAYCGKNNNAPAGTNITCTGNACPEVEKADATFLYSFKDMGVGDVTGFLALDNTNKLIVLSFRGSRSIENWIGNLNFDLKEINDICSGCRGHDGFTSSWRSVADTLRQKVEDAVREHPDYRVVFTGHSLGGALATVAGADLRGNGYDIDVFSYGAPRVGNRAFAEFLTVQTGGTLYRITHTNDIVPRLPPREFGYSHSSPEYWIKSGTLVPVTRNDIVKIEGIDATGGNNQPNIPDITAHLWYFGLIGTC

SEQ ID NO: 13211 - protein, 268 aa, Thermomyces lanuginosus
EVSQDLFNQFNLFAQYSAAAYCKKNNDAPAGTNITCTGNACPEVEKADATFLYSFEDSGVGDVTGFLALDNTNKQIVLSFRGSRSIENWIGNLNFDLKEINDICSGCRGHDGFTSSWRSVADTLRQKVEAAVREHPDYRVVFTGHSLGGALATIAGADLRGNGYDIDVFSYGAPRVGNRAFAEFLTVQQGGTLYRITHTNDIVPRLPPREFGYSHSSPEYWIKSGTLVPVTRNDIVKIEGIDATGGNNQPNIPDIPAHLWYFGLIGTC

SEQ ID NO: 13212 - protein, 268 aa, Thermomyces lanuginosus
EVSQDLFNQFRLFAQYSAAAYCGKNNDAPAGTQITCTGNACPEVEKADATFLYSFEDSGVGDVTGFLALDNTNKLIVLSFRGSRSIENWITNLNFWLKEINDICSGCRGHDGFTSSWRSVADTLRQKVEDAVREHPDYRVVFTGHSLGGALATVAGADLRGNKYDIDVFSYGAPRVGNRAFAEFLTVQTGGTLYRITHTNDIVPRLPPREFGYSHSSPEYWIKSGTLVPVRRRDIVKIEGIDATGGNNQPNIPSIPAHLWYFGLIGTC

SEQ ID NO: 13213 - protein, 268 aa, Thermomyces lanuginosus
EVSQDLFNQFNLFAQYSAAAYCGANNDAPAGTNITCTGNACPEVEKADATFLYSFEDSGVGDVTGFLALDNTNKQIILSFRGSRSIENWIGNLNFDLKEINDICSGCRGHDGFTSSWRSVADTLRQKVEDAVREHPDYRVVFTGHSLGGALATVAWADLRGNGYDIDVFSYGAPRVGNRAFAEFLTNQTGGTLYRITHTNDIVPRLPPREFGYSHSSPEYWIKSGTLVPVTRNDIVKIEGIDATGGNNQPNIPDIPAHLWYFGLIGTC

SEQ ID NO: 13214 - protein, 268 aa, Thermomyces lanuginosus
EVSQDLFNQFNLFAQYSAAAYCQKNNQAPAGTNITCTGNACPEVEKADATFLYSFKDSGVGDVTGFLALDNTNKRIVLSFRGSRSIENWIGNLNFDLKEINDICSGCRGHDGFTSSWRSVADTLRQKVEDAVREHPDYRVVFTGHSLGGALATVAGADLRGNGYDIDVFSYGAPRVGNRAFAEFLTVQTGGTLYRITHTNDIVPRLPPREFGYSHSSPEYWIKSGTLVPVTRNDIVKIEGIDATGGNNQPNQPDIPAHLWYFGRIGTC

SEQ ID NO: 13215 - protein, 268 aa, Thermomyces lanuginosus
EVSQDLFNQFNLFAQYSAAAYCGKNNQAPAGTNITCTGNACPEVEKADATFLYSFEDSGVGDVTGFLALDNTNKQIVLSFRGSRSIENWIGNLNFDLKEINDICSGCRGHDGFTSSWRSVADTLRQKVEAAVREHPDYRVVFTGHSLGGALATVAGADLRGNGYDIDVFSYGAPRVGNRAFAEFLTTQTGGTLYRITHTNDIVPRLPPREFGYSHSSPEYWIKSGTLVPVTRNDIVKIEGIDATGGNNQPNQPDIPAHLWYFGRIGTC

SEQ ID NO: 13216 - protein, 268 aa, Thermomyces lanuginosus
EVSQDLFNQFNLFAQYSKAAYCKANNDAPAGTNITCTGNACPEVEKADATFLYSFEDSGVGDVTGFLALDNTNKRIVLSFRGSRSIENWIGNLNFDLKEINDICSGCRGHAGFTSSWRSVADTLRQKVEDAVREHPDYRVVFTGHSLGGALATVAGADLRGNGYDIDVFSYGAPRVGNRAFAEFLTVQTGGTLYRITHTNDIVPRLPPREFGYSHSSPEYWIKSGTLVPVTRNDIVKIEGIDATGGNNQPNIPDIPAHLWYFGRIGTC

SEQ ID NO: 13217 - protein, 268 aa, Thermomyces lanuginosus
EVSQDLFNQFNLFAQYSAAAYCGKNNRAPAGTNITCTGNACPEVEKADATFLYSFEDSGVGDVTGFLALDNTNKLIVLSFRGSRSIENWLANLNFELKEINDICSGCRGHAGFTSSWRSVADTLRQKVEDAVREHPDYRVVFTGHSLGGALATVAGADLRGNGYDIDVFSYGAPRVGNRAFAEFLTVQTGGTLYRITHTNDIVPRLPPREFGYSHPSPEYWIKSGTGVPVTRNDIVKIEGIDATGGNNQPNIPDITAHLWYFGLIGTC

SEQ ID NO: 13218 - protein, 268 aa, Thermomyces lanuginosus
EVSQDLFNQFNLFAQYSAAAYCGKNNSAPAGTNITCTGNACPEVEKADATFLYSFKDMGVGDVTGFLALDNTNKLIVLSFRGSRSIENWIGNLNFDLKEINDICSGCRGHDGFTSSWRSVADTLRQKVEDAVREHPDYRVVFTGHSLGGALATVAGADLRGNGYDIDVFSYGAPRVGNRAFAEFLTVQTGGTLYRITHTNDIVPRLPPREFGYSHSSPEYWIKSGTLVPVTRQDIVKIEGIDATGGNNQPNIPDITAHLWYFGLIGTC

SEQ ID NO: 13219 - protein, 268 aa, Thermomyces lanuginosus
EVSQDLFNQFNLFAQYSAAAYCGANNDAPAGTNITCTGNACPEVEKADATFLYSFEDSGVGDVTGFLALDNTNKQIVLSFRGSRSIENWIGNLNFDLKEINDICSGCRGHDGFTSSWRSVADTLRQKVEDAVREHPDYRVVFTGHSLGGALATIAWADLRGNGYDIDVFSYGAPRVGNRAFAEFLTVQQGGTLYRITHTNDIVPRLPPREFGYSHSSPEYWIKSGTLVPVTRNDIVKIEGIDATGGNNQPNIPDIPAHLWYFGRIGTC

SEQ ID NO: 13220 - protein, 268 aa, Thermomyces lanuginosus
EVSQDLFNQFNLFAQYSKAAYCKANNDAPAGTNITCTGNACPEVEKADATFLYSFEDSGVGDVTGFLALDNTNKLIVLSFRGSRSIENWIGNLNFDLKEINDICSGCRGHDGFTSSWRSVADTLRQKVEAAVREHPDYRVVFTGHSLGGALATVAWADLRGNGYDIDVFSYGAPRVGNRAFAEFLTVQTGGTLYRITHTNDIVPRLPPREFGYSHSSPEYWIKSGTLVPVTRNDIVKIEGIDATGGNNQPNIPDIPAHLWYFGLIGTC

SEQ ID NO: 13221 - protein, 268 aa, Thermomyces lanuginosus
EVSQDLFNQFNLFAQYSAAAYCGKNNDAPAGTKITCTCNACPEVEKADATFLYSFEDSGVGDVTGFLALDNTNKLIVLSFRGSRSIENWIGNLNFRLKEINDICSGCRGHAGFTSSWRSVADTLRQKVEDAVREHPDYRVVFTGHSLGGALATVAGADLRGNGYDIDVFSYGAPRVGNRAFAEFLTVQTGGTLYRITHTNDIVPRLPPREFGYSHSSPEYWIKSGTLVPVERRDIVKIEGIDATGGNNQPNIPDIPAHLWYFGLIGTC

SEQ ID NO: 13222 - protein, 268 aa, Thermomyces lanuginosus
EVSQDLFNQFNLFAQYSAAAYCQANNDAPAGTNITCTGNACPEVEKADATFLYSFEDSGVGDVTGFLALDNTNKQIVLSFRGSRSIENWIGNLNFDLKEINDICSGCRGHDGFTSSWRSVADTLRQKVEDAVREHPDYRVVFTGHSLGGALATVAWADLRGNGYDIDVFSYGAPRVGNRAFAEFLTQQTGGTLYRITHTNDIVPRLPPREFGYSHSSPEYWIKSGTLVPVTRNDIVKIEGIDATGGNNQPNIPDIPAHLWYFGLIGTC

SEQ ID NO: 13223 - protein, 268 aa, Thermomyces lanuginosus
EVSQDLFNQFNLFAQYSAAAYCGKNNEAPAGTNITCTGNACPEVEKADATFLYSFEDSGVGDVTGFLALDNTNKLIVLSFRGSRSIENWIGNLNFDLKEINDICSGCRGHDGFTSSWRSVADTLRQKVEAAVREHPDYRVVFTGHSLGGALATVAGADLRGNPYDIDVFSYGAPRVGNRAFAEFLTVQTGGTLYRITHTNDIVPRLPPREFGYSHSSPEYWIKSGTMVPVTRQDIVKIEGIDATGGNNQPNIPDIPAHLWYFGRIGTC

SEQ ID NO: 13224 - protein, 268 aa, Thermomyces lanuginosus
EVSQDLFNQFNLFAQYSKAAYCGKNNDAEAGTNITCTGNACPEVFKADATFLYSFEDSGVGDVTGFLALDNTRKDIVLSFRGSRSIENWIGNLNFDLKEINDICSGCRGHDGFTSSWRSVADTLRQKVEDAVREHPDYRVVFTGHSLGGALATVAGADLRGNGYDIDVFSYGAPRVGNRAFAEFLTVQTGGTLYRITHTNDIVPRLPPREFGYSHSSPEYWIKSGTLVPVTRNDIVKIEGIDATGGNNQPNIPDIPAHLWYFGLIGTC

SEQ ID NO: 13225 - protein, 268 aa, Thermomyces lanuginosus
EVSQDLFNQFNLFAQYSAAAYCKKNNDAPAGTNITCTGNACPEVEKADATFLYSFKDSGVGDVTGFLALDNTNKRIVLSFRGSRSIENWIGNLNFDLKEINDICSGCRGHDGFTSSWRSVADTLRQKVEAAVREHPDYRVVFTGHSLGGALATVAGADLRGNGYDIDVFSYGAPRVGNRAFAEFLTVQNGGTLYRITHTNDIVPRLPPREFGYSHSSPEYWIKSGTLVPVTRNDIVKIEGIDATGGNNQPNIPDIPAHLWYFGRIGTC

SEQ ID NO: 13226 - protein, 268 aa, Thermomyces lanuginosus
EVSQDLFNQFNLFAQYSAAAYCGKNNDAPAGTNITCTGNACPEVEKADATFLYSFEDMGVGDVTGFLALDNTNKLIVLSFRGSRSIENWIGNLNFDLKEINDICSGCRGHDGFTSSWRSVADTLRQKVEAAVREHPDYRVVFTGHSLGGALATVAGADLRGNPYDIDVFSYGAPRVGNRAFAEFLTVQTGGTLYRITHTNDIVPRLPPREFGYSHSSPEYWIKSGTMVPVTRQDIVKIEGIDATGGNNQPNIPDIPAHLWYFGRIGTC

SEQ ID NO: 13227 - protein, 268 aa, Thermomyces lanuginosus
EVSQDLFNQFNLFAQYSKAAYCGKNNSAPAGTNITCTGNACPEVFKADATFLYSFEDSGVGDVTGFLALDNTNKDIVLSFRGSRSIENWIGNLNFDLKEINDICSGCRGHDGFTSSWRSVADTLRQKVEDAVREHPDYRVVFTGHSLGGALATVAGADLRGNGYDIDVFSYGAPRVGNRAFAEFLTVQDGGTLYRITHTNDIVPRLPPREFGYSHSSPEYWIKSGTLVPVTRNDIVKIEGIDATGGNNQPNIPDIPAHLWYFGLIGTC

SEQ ID NO: 13228 - protein, 268 aa, Thermomyces lanuginosus
EVSQDLFNQFNLFAQYSAAAYCQANNDAPAGTNITCTGNACPEVEKADATFLYSFEDSGVGDVTGFLALDNTNKLIILSFRGSRSIENWIGNLNFDLKEINDICSGCRGHDGFTSSWRSVADTLRQKVEAAVREHPDYRVVFTGHSLGGALATIAGADLRGNGYDIDVFSYGAPRVGNRAFAEFLTVQTGGTLYRITHTNDIVPRLPPREFGYSHSSPEYWIKSGTLVPVTRNDIVKIEGIDATGGNNQPNIPDIPAHLWYFGLIGTC

SEQ ID NO: 13229 - protein, 268 aa, Thermomyces lanuginosus
EVSQDLFNQFNLFAQYSAAAYCGKNNEAPAGTNITCTGNACPEVEKAQATFLYSFEDSGVGDVTGFLALDNTNKLIVLSFRGSRSIENWIGNLNFDLKEINDICSGCRGHDGFTSSWRSVADTLRQKVEAAVREHPQYRVVFTGHSLGGALATVAGADLRGNPYDIDVFSYGAPRVGNRAFAEFLTVQTGGTLYRITHTNDIVPRLPPREFGYSHSSPEYWIKSGTLVPVTRNDIVKIEGIDATGGNNQPNIPDIPAHLWYFGRIGTC

SEQ ID NO: 13230 - protein, 268 aa, Thermomyces lanuginosus
EVSQDLFNQFNLFAQYSAAAYCQKNNDAPAGTNITCTGNACPEVEKADVTFLYSFEDSGVGDVTGFLALDNTNKQIVLSFRGSRSIENWIGNLNFDLKEINDICSGCRGHDGFTSSWRSVADTLRQKVEDAVREHPDYRVVFTGHSLGGALATVAGADLRGNGYDIDVFSYGAPRVGNRAFAEFLTTQDGGTLYRITHTNDIVPRLPPREFGYSHSSPEYWIKSGTLVPVTRNDIVKIEGIDATGGNNQPNIPDIPAHLWYFGLIGTC

SEQ ID NO: 13231 - protein, 268 aa, Thermomyces lanuginosus
EVSQDLFNQFNLFAQYSAAAYCGKNNNAPAGTNITCTGNACPEVEKADATFLYSFKDSGVGDVTGFLALDNTNKLIVLSFRGSRSIENWFGNLNFDLKEINDICSGCRGHDGFTSSWRSVADTLRQKVEDAVREHPDYRVVFTGHSLGGALATVAGADLRGNGYDIDVFSYGAPRVGNRAFAEFLTVQTGGTLYRITHTNDIVPRLPPREFGYSHSSPEYWIKSGTLVPVTRQDIVKIEGIDATGGNNQPNIPDITAHLWYFGLIGTC

SEQ ID NO: 13232 - protein, 268 aa, Thermomyces lanuginosus
EVSQDLFNQFNLFAQYSKAAYCKANNDAPAGTNITCTGNACPEVEKADATFLYSFEDSGVGDVTGFLALDNTNKRIVLSFRGSRSIENWIGNLRFDLKEINDICSGCRGHDGFTSSWRSVADTLRQKVEDAVREHPDYRVVFTGHSLGGALATVAGADLRGNGYDIDVFSYGAPRVGNRAFAEFLTVQTGGTLYRITHTNDIVPRLPPREFGYSHSSPEYWIKSGTLVPVTRNDIVKIEGIDATGGNNQPNIPDIPAHLWYFGLIGTC

SEQ ID NO: 13233 - protein, 268 aa, Thermomyces lanuginosus
EVSQDLFNQFNLFAQYSAAAYCGKNNDAPAGTNITCTGNACPEVEKADATFLYSFEDSGVGDVTGFLALDNTNKLIVLSFRGSRSIENWIGNLNFDLKEINDICSGCRGHDGFTSSWRSVADTLRQKVEDAVREHPDYRVVFAGHSLGGALATVAGADLRGDGYDIDVFSYGAPRVGNRAFAEFLTVQTGGTLYRITHTNDIVPRLPPREFGYSHSSPEYWIKSGTLPPVRRRDIVKIEGIDATGGNNQPNIPDIPAHLWYFGLIGTC

SEQ ID NO: 13234 - protein, 268 aa, Thermomyces lanuginosus
EVSQDLFNQFNLFAQYSAAAYCGKNNEAPAGTNITCTGNACPEVEKADATFLYSFEDMGVGDVTGFLALDNTNKLIVLSFRGSRSIENWIGNLNFDLKEINDICSGCRGHDGFTSSWRSVADTLRQKVEAAVREHPDYRVVFTGHSLGGALATVAGADLRGNPYDIDVFSYGAPRVGNRAFAEFLTVQTGGTLYRITHTNDIVPRLPPREFGYSHSSPEYWIKSGTLVPVTRQDIVKIEGIDATGGNNQPNIPDIPAHLWYFGRIGTC

SEQ ID NO: 13235 - protein, 268 aa, Thermomyces lanuginosus
EVSQDLFNQFNLFAQYSAAAYCGKNNDAPAGTNITCTGNACPEVEKADATTLYSFEDSGVGDVTGFLALDNTNKRIVLSFRGSRSIENWIGNLNFDLKEINDICSGCRGHDGFTSSWRSVADTLRQKVEAAVREHPDYRVVFTGHSLGGALATVAGADLRGNGYDIDVFSYGAPRVGNRAFAEFLTNQTGGTLYRITHTNDIVPRLPPREFGYSHSSPEYWIKSGTLVPVTRNDIVKIEGIDATGGNNQPNQPDIPAHLWYFGRIGTC

SEQ ID NO: 13236 - protein, 268 aa, Thermomyces lanuginosus
EVSQDLFNQFNLFAQYSAAAYCGKNNDAPAGTNITCTGNACPEVEKADATFLYSFEDMGVGDVTGFLALDNTNKLIVLSFRGSRSIENWIGNLNFDLKEINDICSGCRGHDGFTSSWRSVADTLRQKVEAAVREHPQYRVVFTGHSLGGALATVAGADLRGNPYDIDVFSYGAPRVGNRAFAEFLTVQTGGTLYRITHTNDIVPRLPPREFGYSHSSPEYWIKSGTMVPVTRNDIVKIEGIDATGGNNQPNIPDIPAHLWYFGRIGTC

SEQ ID NO: 13237 - protein, 268 aa, Thermomyces lanuginosus
EVSQDLFNQFNLFAQYSAAAYCGANNDAPAGTNITCTGNACPEVEKADATFLYSFEDSGVGDVTGFLALDNTNKQIVLSFRGSRSIENWIGNLNFDLKEINDICSGCRGHDGFTSSWRSVADTLRQKVEAAVREHPDYRVVFTGHSLGGALATVAWADLRGNGYDIDVFSYGAPRVGNRAFAEFLTVQQGGTLYRITHTNDIVPRLPPREFGYSHSSPEYWIKSGTLVPVTRNDIVKIEGIDATGGNNQPNIPDIPAHLWYFGRIGTC

SEQ ID NO: 13238 - protein, 268 aa, Thermomyces lanuginosus
EVSQDLFNQFNLFAQYSAAAYCGKNNRAPAGTNITCTGNACPEVEKADATFLYSFEDSGVGDVTGFLALDNTNKLIVLSFRGSRSIENWIGNLNFDLKEINDICSGCRGHGGFTSSWRSVADTLRQKVEDAVREHPDYRVVFTGHSLGGALATVAGADLRGNGYDIDVFSYGAPRVGNRAFAEFLTVQTGGTLYRITHTNDIVPRLPPREFGYSHPSPEYWIKSGTVVPVTRNDIVKIEGIDATGGNNQPNIPDITAHLWYFGLIGTC

SEQ ID NO: 13239 - protein, 268 aa, Thermomyces lanuginosus
EVSQDLFNQFNLFAQYSAAAYCGKNNQAPAGTNITCTGNACPEVEKADATTLYSFEDSGVGDVTGFLALDNTNKGIVLSFRGSRSIENWIGNLNFDLKEINDICSGCRGHDGFTSSWRSVADTLRQKVEAAVREHPDYRVVFTGHSLGGALATVAGADLRGNGYDIDVFSYGAPRVGNRAFAEFLTVQTGGTLYRITHTNDIVPRLPPREFGYSHSSPEYWIKSGTLVPVTRNDIVKIEGIDATGGNNQPNQPDIPAHLWYFGRIGTC

SEQ ID NO: 13240 - protein, 268 aa, Thermomyces lanuginosus
EVSQDLFNQFKLFAQYSAAAYCGKNNQAPAGTNITCTGNACPEVEKADATFLYSFEDSGVGDVTGFLALDNTNKLIVLSFRGSRSIENWFGNLNFDLKEINDICSGCRGHDGFTSSWRSVADTLRQKVEDAVREHPDYRVVFTGHSLGGALATVAGADLRGNGYDIDVFSYGAPRVGNRAFAEFLTVQTGGTLYRITHTNDIVPRLPPREFGYSHSSPEYWIKSGTLVPVTRQDIVKIEGIDATGGNNQPNIPDITAHLWYFGLIGTC

SEQ ID NO: 13241 - protein, 268 aa, Thermomyces lanuginosus
EVSQDLFNQFNLFAQYSAAAYCGKNNDAPAGTNITCTGNACPEVEKADATFLYSFEDSGVGDVTGFLALDNTNKLIVLSFRGSRSIENWIGNLNFDLKEINDICSGCRGHDGFTSSWRSVADTLRQKVEDAVREHPDYRVVFAGHSLGGALATVAGADLRGDGYDIDVFSYGAPRVGNRAFAEFLTVQTGGTLYRITHTNDIVPRLPPREFGYSHSSPEYWIKSGTLRPVRRRDIVKIEGIDATGGNNQPNIPDIPAHLWYFGLIGTC

SEQ ID NO: 13242 - protein, 268 aa, Thermomyces lanuginosus
EVSQDLFNQFNLFAQYSAAAYCGKNNDAPVGTQITCTGNACPEVEKADATFLYSFEDSGVGDVTGFLALDNTNKLIVLSFRGSRSIENWIGNLNFDLIEINDICSGCRGHDGFTSSWRSVADTLRQKVEDAVREHPDYRVVFTGHSLGGALATVAGADLRGNGYDIDVFSYGAPRVGNRAFAEFLTVQTGGTLYRITHTNDIVPRLPPREFGYSHSSPEYWIKSGTLVPVRRRDIVKIEGIDATGGNNQPNIPDIPAHLWYFGLIGTC

SEQ ID NO: 13243 - protein, 268 aa, Thermomyces lanuginosus
EVSQDLFNQFNLFAQYSAAAYCQKNNDAPAGTNITCTGNACPEVEKADATTLYSFEDSGVGDVTGFLALDNTNKGIVLSFRGSRSIENWIQNLNFDLKEINDICSGCRGHDGFTSSWRSVADTLRQKVEDAVREHPDYRVVFTGHSLGGALATVAGADLRGNGYDIDVFSYGAPRVGNRAFAEFLTNQTGGTLYRITHTNDIVPRLPPREFGYSHSSPEYWIKSGTLVPVTRNDIVKIEGIDATGGNNQPNQPDIPAHLWYFGLIGTC

SEQ ID NO: 13244 - protein, 268 aa, Thermomyces lanuginosus
EVSQDLFNQFNLFAQYSAAAYCGKNNDAPAGTNITCTGNACPEVEKADATILYSFEDSGVGDVTGFLALDNTNKLIVLSFRGSRSIENWIGNLNFDLKEINDICSGCRGHDGFTSSWRSVADTLRQKVEDAVREHPDYRVVFTGHSLGGALATVAGADLRGDGYDIDVFSYGAPRVGNRAFAEFLTVQTGGTLYRITNTNDIVPRLPPREFGYSHSSPEYWIKSGTLVPVRRRDIVKIEGIDATGGNNQPNIPDIPAHLWYFGLIGTC

SEQ ID NO: 13245 - protein, 268 aa, Synthetic construct
EVSQDLFNQFNLFAQYSAAAYCGKNNDAPAGTNITCTGNACPEVEKADATFLYSFEGSGVGDVTGFLALDNTNKLIVLSFRGSRSIENWIGNLKFLLKEINDICSGCRGHDGFTSSWRSVADTLRQKVEDAVREHPDYRVVFTGHSLGGALATVAGADLRGNGYDIDVFSYGAPRVGNRAFAEFLTVQTGGTLYRITHRNDIVPRLPPAEFGYSHSSPEYWIKSGTLVPVTRNDIVKIEGIDATGGNNRPNIPDIPAHLWYFGLIGTC

SEQ ID NO: 13246 - protein, 268 aa, Thermomyces lanuginosus
EVSQDLFNQFNLFAQYSKAAYCKKNNDAPAGTNITCTGNACPEVEKADATFLYSFEDSGVGDVTGFLALDNTNKLIILSFRGSRSIENWIGNLNFDLKEINDICSGCRGHDGFTSSWRSVADTLRQKVEAAVREHPDYRVVFTGHSLGGALATVAGADLRGNGYDIDVFSYGAPRVGNRAFAEFLTNQTGGTLYRITHTNDIVPRLPPREFGYSHSSPEYWIKSGTLVPVTRNDIVKIEGIDATGGNNQPNIPDIPAHLWYFGLIGTC

SEQ ID NO: 13247 - protein, 268 aa, Thermomyces lanuginosus
EVSQDLFNQFNLFAQYSKAAYCQKNNDAPAGTNITCTGNACPEVEKADATFLYSFEDSGVGDVTGFLALDNTNKQIVLSFRGSRSIENWIGNLNFDLKEINDICSGCRGHDGFTSSWRSVADTLRQKVEDAVREHPDYRVVFTGHSLGGALATVAGADLRGNGYDIDVFSYGAPRVGNRAFAEFLTTQDGGTLYRITHTNDIVPRLPPREFGYSHSSPEYWIKSGTLVPVTRNDIVKIEGIDATGGNNQPNIPDIPAHLWYFGLIGTC

SEQ ID NO: 13248 - protein, 268 aa, Thermomyces lanuginosus
EVSQDLFNQFNLFAQYSAAAYCGKNNDAPAGTNITCTGNACPEVEKADATILYSFEDSGVGDVTGFLALDNTNKLIVLSFRGSRSIENWIGNLNFELKEINDICSGCRGHAGFTSSWRSVADTLRQKVEDAVREHPDYRVVFTGHSLGGALATVAGADLRGNGYDIDVFSYGAPRVGNRAFAEFLTVQTGGTLYRITHTNDIVPRLPPREFGYSHSSPEYWIKSGTLVPVRRRDIVKIEGIDATGGNNQPNIPSIPAHLWYFGLIGTC

SEQ ID NO: 13249 - protein, 268 aa, Thermomyces lanuginosus
EVSQDLFNQFNLFAQYSKAAYCGKNNSAEAGTNITCTGNACPEVFKADATFLYSFEDSGVGDVTGFLALDNTNKLIVLSFRGSRSIENWIGNLNFDLKEINDICSGCRGHDGFTSSWRSVADTLRQKVEDAVREHPDYRVVFTGHSLGGALATVAGADLRGNGYDIDVFSYGAPRVGNRAFAEFLTVQDGGTLYRITHTNDIVPRLPPREFGYSHSSPEYWIKSGTLVPVTRNDIVKIEGIDATGGNNQPNIPDIPAHLWYFGLIGTC

SEQ ID NO: 13250 - protein, 268 aa, Thermomyces lanuginosus
EVSQDLFNQFNLFAQYSAAAYCKKNNSAPAGTNITCTGNACPEVEKADATFLYSFEDSGVGDVTGFLALDNTNKRIVLSFRGSRSIENWIGNLNFDLKEINDICSGCRGHDGFTSSWRSVADTLRQKVEDAVREHPDYRVVFTGHSLGGALATVAGADLRGNGYDIDVFSYGAPRVGNRAFAEFLTNQTGGTLYRITHTNDIVPRLPPREFGYSHSSPEYWIKSGTLVPVTRNDIVKIEGIDATGGNNQPNQPDIPAHLWYFGRIGTC

SEQ ID NO: 13251 - protein, 268 aa, Thermomyces lanuginosus
EVSQDLFNQFNLFAQYSAAAYCGKNNDAPAGTQITCTGNACPEVEKADATFLYSFEDSGVGDVTGFLALDNTNKLIVLSFRGSRSIENWIGNLNFDLKEINDICSGCRGHDGFTSSWRSVADTLRQKVEDAVREHPDYRVVFTGHSLGGALATVAGADLRGNVYDIDVFSYGAPRVGNRAFAEFMTVQTGGTLYRITHTNDIVPRLPPREFGYSHSSPEYWIKSGTLVPVRRRDIVKIEGIDATGGNNQPNIPDIPAHLWYFGLIGTC

SEQ ID NO: 13252 - protein, 268 aa, Thermomyces lanuginosus
EVSDDLFNQFKLFAQYSAAAYCGKNNDAPAGTNITCTGNACPEVEKADATFLYSFEDSGVGDVTGFLALDNTNKLIVLSFRGSRSIENWFGNLNFDLKEINDICSGCRGHDGFTSSWRSVADTLRQKVEDAVREHPDYRVVFTGHSLGGALATVAGADLRGNGYDIDVFSYGAPRVGNRAFAEFLTVQTGGTLYRITHTNDIVPRLPPREFGYSHSSPEYWIKSGTLVPVTRQDIVKIEGIDATGGNNQPNIPDITAHLWYFGLIGTC

SEQ ID NO: 13253 - protein, 268 aa, Thermomyces lanuginosus
EVSRDLFNQFNLFAQYSAAAYCGKNNDAPAGTNITCTGNACPEVEKADATFLYSFEDSGVGDVTGFLALDNTNKLIVLSFRGSRSIENWIGNLNFDLKEINDICSGCRGHDGFTSSWRSVADTLRQKVEDAVREHPDYRVVFAGHSLGGALATVAGADLRGNGYDIDVFSYGAPRVGNRAFAEFLTVQTGGTLYRITSTNDIVPRLPPREFGYSHSSPEYWIKSGTLVPVRRRDIVKIEGIDATGGNNQPNIPDIPAHLWYFGLIGTC

SEQ ID NO: 13254 - protein, 268 aa, Thermomyces lanuginosus
EVSQDLFNQFNLFAQYSAAAYCGKNNDAPAGTNITCTGNACPEVEKADATVLYSFEDSGVGDVTGFLALDNTNKLIVLSFRGSRSIENWIGNLNFDLKEINDICSGCRGHEGFTSSWRSVADTLRQKVEDAVREHPDYRVVFTGHSLGGALATVAGADLRGNGYDIDVFSYGAPRVGNRAFAEFLTVQTGGTLYRITHTNDIVPRLPPREFGYSHSSPEYWIKSGTLVPVRRRDIVKIEGIDATGGNNQPNIPSIPAHLWYFGLIGTC

SEQ ID NO: 13255 - protein, 268 aa, Thermomyces lanuginosus
EVSDDLFNQFNLFAQYSAAAYCGKNNQAPAGTNITCTGNACPEVEKADATFLYSFKDSGVGDVTGFLALDNTNKLIVLSFRGSRSIENWIGNLNFDLKEINDICSGCRGHDGFTSSWRSVADTLRQKVEDAVREHPDYRVVFTGHSLGGALATVAGADLRGNGYDIDVFSYGAPRVGNRAFAEFLTVQTGGTLYRITHTNDIVPRLPPREFGYSHSSPEYWIKSGTLVPVTRQDIVKIEGIDATGGNNQPNIPDITAHLWYFGLIGTC

SEQ ID NO: 13256 - protein, 268 aa, Thermomyces lanuginosus
EVSQDLFNQFNLFAQYSAAAYCGKNNDAPAGTNITCTGNACPEVEKADATVLYSFEDSGVGDVTGFLALDNTNKLIVLSFRGSRSIENWIGNLNFELKEINDICSGCRGHAGFTSSWRSVADTLRQKVEDAVREHPDYRVVFTGHSLGGALATVAGADLRGNGYDIDVFSYGAPRVGNRAFAEFLTVQTGGTLYRITHTNDIVPRLPPREFGYSHSSPEYWIKSGTLVPVRRRDIVKIEGIDATGGNNQPNIPSIPAHLWYFGLIGTC

SEQ ID NO: 13257 - protein, 268 aa, Thermomyces lanuginosus
EVSQDLFNQFKLFAQYSAAAYCGKNNSAPAGTNITCTGNACPEVEKADATFLYSFEDSGVGDVTGFLALDNTNKLIVLSFRGSRSIENWFGNLNFDLKEINDICSGCRGHDGFTSSWRSVADTLRQKVEDAVREHPDYRVVFTGHSLGGALATVAGADLRGNGYDIDVFSYGAPRVGNRAFAEFLTVQTGGTLYRITHTNDIVPRLPPREFGYSHSSPEYWIKSGTLVPVTRQDIVKIEGIDATGGNNQPNIPDITAHLWYFGLIGTC

SEQ ID NO: 13258 - protein, 268 aa, Thermomyces lanuginosus
EVSQDLFNQFNLFAQYSAAAYCGKNNDAPAGTQITCTGNACPEVEKADATFLYSFEDSGVGDVTGFLALDNTNKLIVLSFRGSRSIENWIKNLNFSLKEINDICSGCRGHDGFTSSWRSVADTLRQKVEDAVREHPDYRVVFTGHSLGGALATVAGADLRGNTYDIDVFSYGAPRVGNRAFAEFLTVQTGGTLYRITHTNDIVPRLPPREFGYSHSSPEYWIKSGTLVPVRRRDIVKIEGIDATGGNNRPNIPDIPAHLWYFGLIGTC

SEQ ID NO: 13259 - protein, 268 aa, Thermomyces lanuginosus
EVSQDLFNQFNLFAQYSAAAYCGKNNDAPAGTNITCTGNACPKVEKADATFLYSFSDSGVGDVTGFLALDNTNKLIVLSFRGSRSIKNWIGNLNFDLKEINDICSGCRGHDGFTSSWRSVADTLRQKVEDAVREHPDYRVVFTGHSLGGALATVAGADLRGNGYDIDVFSYGAPRVGNRAFAEFLTVQTGGTLYRITHTNDIVPRLPPREFGYSHSSPEYWIKSGTLVPVRRRDIVKIEGIDATGGNNQPNIPDIPAHLWYFGLIGTC

SEQ ID NO: 13260 - protein, 268 aa, Thermomyces lanuginosus
EVSQDLFNQFNLFAQYSAAAYCGKNNDAPAGTNITCTGNACPEVEKAQATFLYSFEDMGVGDVTGFLALDNTNKLIVLSFRGSRSIENWIGNLNFDLKEINDICSGCRGHDGFTSSWRSVADTLRQKVEDAVREHPQYRVVFTGHSLGGALATVAGADLRGNPYDIDVFSYGAPRVGNRAFAEFLTVQTGGTLYRITHTNDIVPRLPPREFGYSHSSPEYWIKSGTLVPVTRQDIVKIEGIDATGGNNQPNIPDIPAHLWYFGRIGTC

SEQ ID NO: 13261 - protein, 268 aa, Thermomyces lanuginosus
EVSQDLFNQFNLFAQYSAAAYCGKNNDAPAGTQITCTGNACPEVEKADATFLYSFEDSGVGDVTGFLALDNTNKLIVLSFRGSRSIENWIGNLNFDLKEINDICSGCRGHAGFTSSWRSVADTLRQKVEDAVREHPDYRVVFTGHSLGGALATVAGADLRGNGYDIDVFSYGAPRVGNRAFAEFLTVQTGGTLYRITHTNDIVPRLPPREFGYSHSSPEYWIKSGTLVPVRRRDIVKIEGIDATGGNNQPNIPSIPAHLWYFGLIGTC

SEQ ID NO: 13262 - protein, 268 aa, Thermomyces lanuginosus
EVSQDLFNQFNLFAQYSAAAYCQKNNSAPAGTNITCTGNACPEVEKADATFLYSFEDSGVGDVTGFLALDNTNKGIVLSFRGSRSIENWIGNLNFDLKEINDICSGCRGHDGFTSSWRSVADTLRQKVEAAVREHPDYRVVFTGHSLGGALATVAGADLRGNGYDIDVFSYGAPRVGNRAFAEFLTHQTGGTLYRITHTNDIVPRLPPREFGYSHSSPEYWIKSGTLVPVTRNDIVKIEGIDATGGNNQPNIPDIPAHLWYFGRIGTC

SEQ ID NO: 13263 - protein, 268 aa, Thermomyces lanuginosus
EVSQDLFNQFNLFAQYSAAAYCGKNNEAPAGTNITCTGNACPEVEKAQATFLYSFEDSGVGDVTGFLALDNTNKLIVLSFRGSRSIENWIGNLNFDLKEINDICSGCRGHDGFTSSWRSVADTLRQKVEAAVREHPDYRVVFTGHSLGGALATVAGADLRGNPYDIDVFSYGAPRVGNRAFAEFLTVQTGGTLYRITHTNDIVPRLPPREFGYSHSSPEYWIKSGTMVPVTRNDIVKIEGIDATGGNNQPNIPDIPAHLWYFGRIGTC

SEQ ID NO: 13264 - protein, 268 aa, Thermomyces lanuginosus
EVSQDLFNQFNLFAQYSAAAYCGKNNQAPAGTNITCTGNACPEVEKADATFLYSFKDSGVGDVTGFLALDNTNKLIVLSFRGSRSIENWFGNLNFDLKEINDICSGCRGHDGFTSSWRSVADTLRQKVEDAVREHPDYRVVFTGHSLGGALATVAGADLRGNGYDIDVFSYGAPRVGNRAFAEFLTVQTGGTLYRITHTNDIVPRLPPREFGYSHSSPEYWIKSGTLVPVTRQDIVKIEGIDATGGNNQPNIPDITAHLWYFGLIGTC

SEQ ID NO: 13265 - protein, 268 aa, Thermomyces lanuginosus
EVSQDLFNQFNLFAQYSAAAYCGKNNDAPAGTNITCTGNACPEVEKADATFLYSFEDSGVGDVTGFLALDNTNKLIVLSFRGSRSIENWIGNLNFDLKEIRDICSGCRGHDGFTSSWRSVADTLRQKVEDAVREHPDYRVVFTGHSLGGALATVAGADLRGNGYDIDVFSYGAPRVGNRAFAEFLTVQTGGTLYQITHTNDIVPRLPPEEFGYSHSSPEYWIKSGTLVPVTRNDIVKIEGIDATGGNNQPNIPDIPAHSWDFGLIGTC

SEQ ID NO: 13266 - protein, 268 aa, Thermomyces lanuginosus
EVSQDLFNQFNLFAQYSKAAYCGKNNDAPAGTNITCTGNACPEVEKADATFLYSFEDSGVGDVTGFLALDNTNKQIILSFRGSRSIENWIGNLRFDLKEINDICSGCRGHDGFTSSWRSVADTLRQKVEDAVREHPDYRVVFTGHSLGGALATVAWADLRGNGYDIDVFSYGAPRVGNRAFAEFLTVQTGGTLYRITHTNDIVPRLPPREFGYSHSSPEYWIKSGTLVPVTRNDIVKIEGIDATGGNNQPNIPDIPAHLWYFGLIGTC

SEQ ID NO: 13267 - protein, 268 aa, Thermomyces lanuginosus
EVSQDLFNQFNLFAQYSAAAYCGKNNEAPAGTNITCTGNACPEVEKAQATFLYSFEDMGVGDVTGFLALDNTNKLIVLSFRGSRSIENWIGNLNFDLKEINDICSGCRGHDGFTSSWRSVADTLRQKVEDAVREHPDYRVVFTGHSLGGALATVAGADLRGNPYDIDVFSYGAPRVGNRAFAEFLTVQTGGTLYRITHTNDIVPRLPPREFGYSHSSPEYWIKSGTMVPVTRNDIVKIEGIDATGGNNQPNIPDIPAHLWYFGRIGTC

SEQ ID NO: 13268 - protein, 268 aa, Thermomyces lanuginosus
EVSQDLFNQFNLFAQYSAAAYCGKNNDAPAGTNITCTGNACPEVEKADATFLYSFEDSGVGDVTGFLALDNTNKRIILSFRGSRSIENWIGNLRFDLKEINDICSGCRGHDGFTSSWRSVADTLRQKVEDAVREHPDYRVVFTGHSLGGALATIAWADLRGNGYDIDVFSYGAPRVGNRAFAEFLTVQTGGTLYRITHTNDIVPRLPPREFGYSHSSPEYWIKSGTLVPVTRNDIVKIEGIDATGGNNQPNIPDIPAHLWYFGLIGTC

SEQ ID NO: 13269 - protein, 268 aa, Thermomyces lanuginosus
EVSQDLFNQFNLFAQYSAAAYCGKNNDAPAGTQITCTGNACPEVEKADATFLYSFEDSGVGDVTGFLALDNTNKLIVLSFRGSRSIENWIGNLNFDLKEINDICSGCRGHDGFTSSWRSVADTLRQKVEDAVREHPDYRVVFTGHSLGGALATVAGADLRGNGYDIDVFSYGAPRVGNRAFAEFLTVQTGGTLYRITHTNDIVPRLPPRVFGYSHSSPEYWIKSGTLVPVRRRDIVKIEGIDATGGNNQPNIPSIPAHLWYFGLIGTC

SEQ ID NO: 13270 - protein, 268 aa, Thermomyces lanuginosus
EVSQDLFNQFNLFAQYSAAAYCGKNNDAEAGTDITCTGNACPEVEKADATFLYSFEDSGVGDVTGFLALDNTNSDIVLSFRGSRSIENWIGNLNFDLKEINDICSGCRGHDGFTSSWRSVADTLRQKVEDAVREHPDYRVVFTGHSLGGALATVAGADLRGNGYDIDVFSYGAPRVGNRAFAEFLTVQDGGTLYRITHTNDIVPRLPPREFGYSHSSPEYWIKSGTLVPVTRNDIVKIEGIDATGGNNQPNIPDIPAHLWYFGLIGTC

SEQ ID NO: 13271 - protein, 268 aa, Thermomyces lanuginosus
EVSQDLFNQFNLFAQYSKAAYCGKNNDAPAGTNITCTGNACPEVFKADATFLYSFEDSGVGDVTGFLALDNTRKDIVLSFRGSRSIENWIGNLNFDLKEINDICSGCRGHDGFTSSWRSVADTLRQKVEDAVREHPDYRVVFTGHSLGGALATVAGADLRGNGYDIDVFSYGAPRVGNRAFAEFLTVQDGGTLYRITHTNDIVPRLPPREFGYSHSSPEYWIKSGTLVPVTRNDIVKIEGIDATGGNNQPNIPDIPAHLWYFGLIGTC

SEQ ID NO: 13272 - protein, 268 aa, Synthetic construct
EVRQDLFNQFNLFAQYSAAAYCGKNNDAPAGTNITCTGNACPEVEKADATFLYSFEDSGVGDVTGFLALDNTNKLIVLSFRGSRSIENWIGNLNFDLKEINDICSGCRGHDGFTSSWRSVADTLRQKVEDAVREHPGYRVVFTGHSLGGALATVAGADLRGNGYDIGVFSYGAPRVGNRAFAEFLTVQTGGTLYRITHTNDIVPRLPPRVFGYSHSSPEYLIKSGTLVPVTRNDIVKIEGIDATGGNNQPNIPDIPAHLWYFGLIGTC

SEQ ID NO: 13273 - protein, 268 aa, Thermomyces lanuginosus
EVSQDLFNQFNLFAQYSAAAYCGKNNDAPAGTQITCTANACPEVEKADATFLYSFEDSGVGDVTGFLALDNTNKLIVLSFRGSRSIENWIGNLNFDLKEINDICSGCRGHDGFTSSWRSVADTLRQKVEDAVREHPDYRVVFTGHSLGGALATVAGADLRGNAYDIDVFSYGAPRVGNRAFAEFLTVQTGGTLYRITHTNDIVPRLPPREFGYSHSSPEYWIKSGTLVPVRRRDIVKIEGIDATGGNNQPNIPDIPAHLWYFGLIGTC

SEQ ID NO: 13274 - protein, 268 aa, Synthetic construct
EVSQDLFNQFNLFAQYSAAAYCGKNNDAPAGTNITCTGNACPEVEKADATFLYSFEGSVVGDVTGFLALDNTNKLIVLSFRGSRSIENWIGNLKFLLKEINDICSGCRGHDGFTSSWRSVADTLRQKVEDAVREHPDYRVVFTGHSLGGALATVAGADLRGNGYDIDVFPYGAPRVGNRAFAEFLTVQTGGTLYRITHTNDIVPRLPPREFGYSHSSPEYWIKSGTLVPVTRNDIVKIEGIDATGGNNRPNIPDIPAHLWYFGLIGTC

SEQ ID NO: 13275 - protein, 268 aa, Thermomyces lanuginosus
EVSQDLFNQFNLFAQYSAAAYCGKNNDAPAGTNITCTGNACPEVEKADATFLYSFEDSGVGDVTGFLALDNTNKRIVLSFRGSRSIENWIGNLNFDLKEINDICSGCRGHDGFTSSWRSVADTLRQKVEAAVREHPDYRVVFTGHSLGGALATIAWADLRGNGYDIDVFSYGAPRVGNRAFAEFLTNQTGGTLYRITHTNDIVPRLPPREFGYSHSSPEYWIKSGTLVPVTRNDIVKIEGIDATGGNNQPNIPDIPAHLWYFGRIGTC

SEQ ID NO: 13276 - protein, 268 aa, Thermomyces lanuginosus
EVSQDLFNQFNLFAQYSAAAYCGKNNDAPAGTNITCTGNACPDVEKADATFLYSFEDSGVGDVTGFLALDNTNKLIVLSFRGSRSIKNWIGNLNFLLKPINDICSGCRGHDGFTSSWRSVADTLRQKVEDAVREHPDYRVVFTGHSLGGALATVAGADLRGNGYDIDVFSYGAPRVGNRAFAEFLTVQTGGTLYRITHTNDIVPRLPPREFGYSHSSPEYWIKSGTLVPVRRRDIVKIVGIDATGGNNQPNIPDIPAHLWYFGLIGTC

SEQ ID NO: 13277 - protein, 268 aa, Thermomyces lanuginosus
EVSQDLFNQFNLFAQYSAAAYCGKNNQAPAGTNITCTGNACPEVEKADATFLYSFEDSGVGDVTGFLALDNTNKGIVLSFRGSRSIENWIQNLNFDLKEINDICSGCRGHDGFTSSWRSVADTLRQKVEAAVREHPDYRVVFTGHSLGGALATVAGADLRGNGYDIDVFSYGAPRVGNRAFAEFLTHQTGGTLYRITHTNDIVPRLPPREFGYSHSSPEYWIKSGTLVPVTRNDIVKIEGIDATGGNNQPNQPDIPAHLWYFGRIGTC

SEQ ID NO: 13278 - protein, 268 aa, Synthetic construct
EVSQDLFNQFNLFAQYSAAAYCGKNNDAPAGTNITCTGNACPEVEKADATFLYSFEDSGVGDVTGFLALDNTNKLIVLSFRGSRSIENWIGNLNFDLKEINDICSGCRGHDGFTSSWRSVADTLRQKVEDAVREHPGYRVVFTGHSLGGALATVAGADLRGNGYDIGVFSYGAPRVGNRAFAEFLTVQTGGTLYRITHTNDIVPRLPPRVFGYSHSSPEYLIKSGTLVPVTRRDIVKIEGIDATGGNNQPNIPDIPAHLWYFGLIGTC

SEQ ID NO: 13279 - protein, 268 aa, Thermomyces lanuginosus
EVSQDLFNQFNLFAQYSAAAYCGANNDAPAGTNITCTGNACPEVEKADATFLYSFEDSGVGDVTGFLALDNTNKRIVLSFRGSRSIENWIGNLNFDLKEINDICSGCRGHDGFTSSWRSVADTLRQKVEDAVREHPDYRVVFTGHSLGGALATIAWADLRGNGYDIDVFSYGAPRVGNRAFAEFLTQQTGGTLYRITHTNDIVPRLPPREFGYSHSSPEYWIKSGTLVPVTRNDIVKIEGIDATGGNNQPNIPDIPAHLWYFGLIGTC

SEQ ID NO: 13280 - protein, 268 aa, Thermomyces lanuginosus
EVSQDLFNQFNLFAQYSAAAYCGKNNDAPAGTQITCTGNACPEVEKADATFLYSFEDSGVGDVTGFLALDNTNKLIVLSFRGSRSIENWIGNLNFDLKEINDICSGCRGHDGFTSSWRSVADTLRQKVEDAVREHPDYRVVFTGHSLGGVLATVAGADLRGGGYDIDVFSYGAPRVGNRAFAEFLTVQTGGTLYRITHTNDIVPRLPPREFGYSHSSPEYWIKSGTLVPVRRRDIVKIEGIDATGGNNQPNIPDIPAHLWYFGLIGTC

SEQ ID NO: 13281 - protein, 268 aa, Thermomyces lanuginosus
EVSQDLFNQFNLFAQYSAAAYCGKNNEAPAGTNITCTGNACPEVEKADATFLYSFEDMGVGDVTGFLALDNTNKLIVLSFRGSRSIENWIGNLNFDLKEINDICSGCRGHDGFTSSWRSVADTLRQKVEDAVREHPQYRVVFTGHSLGGALATVAGADLRGNPYDIDVFSYGAPRVGNRAFAEFLTVQTGGTLYRITHTNDIVPRLPPREFGYSHSSPEYWIKSGTLVPVTRQDIVKIEGIDATGGNNQPNIPDIPAHLWYFGRIGTC

SEQ ID NO: 13282 - protein, 268 aa, Thermomyces lanuginosus
EVSQDLFNQFNLFAQYSAAAYCKKNNDAPAGTNITCTGNACPEVEKADATTLYSFEDSGVGDVTGFLALDNTNKLIVLSFRGSRSIENWIGNLNFDLKEINDICSGCRGHDGFTSSWRSVADTLRQKVEAAVREHPDYRVVFTGHSLGGALATVAGADLRGNGYDIDVFSYGAPRVGNRAFAEFLTNQTGGTLYRITHTNDIVPRLPPREFGYSHSSPEYWIKSGTLVPVTRNDIVKIEGIDATGGNNQPNQPDIPAHLWYFGRIGTC

SEQ ID NO: 13283 - protein, 268 aa, Thermomyces lanuginosus
EVSQDLFNQFNLFAQYSAAAYCGKNNDAPAGTQITCTGNACPEVEKADATFLYSFEDSGVGDVTGFLALDNTNKLIVLSFRGSRSIENWIGNLNFDLKEINDICSGCRGHDGFTSSLRSVADTLRQKVEDAVREHPDYRVVFTGHSLGGALATVAGADLRGNGYDIDVFSYGAPRVGNRAFAEFLTVQTGGTLYRITHTNDIVPRLPPREFGYSHSSPEYWIKSGTLVPVRRRDIVKIEGIDATGGNNQPNIPSIPAHLWYFGLIGTC

SEQ ID NO: 13284 - protein, 268 aa, Synthetic construct
EVSQDLFNQFNLFAQYSAAAYCGKNNDAPAGTNITCTGNACPEVEKADATFLYSFEGSGVGDVTGFLALDNTNKLIVLSFRGSRSIENWIGNLKFLLKEINDICSGCRGHDGFTSSWRSVADTLRQKVEDAVREHPDYRVVFTGHSLGGALATVAGADLRGNGYDIDVFSYGAPRVGNRAFAEFLTVQTGGTLYRITHTRDIVPRLPPAEFGYSHSSPEYWIKSGTLVPVTRNDIVKIEGIDATGGNNRPNIPDIPAHLWYFGLIGTC

SEQ ID NO: 13285 - protein, 268 aa, Thermomyces lanuginosus
EVSRDLFNQFNLFAQYSAAAYCGKNNDAPAGTNITCTGNACPEVEKADATFLYSFEDSGVGDVTGFLALDNTNKLIVLSFRGSRSIENWIGNLNFDLKEINDICSGCRGHDGFTSSWRSVADTLRQKVEDAVREHPDYRVVFTGHSLGGALATVAGADLRGNGYDIDVFSYGAPRVGNRAFAEFLTVQTGGTLYRITNTNDIVPRLPPREFGYSHSSPEYWIKSGTLPPVRRRDIVKIEGIDATGGNNQPNIPDIPAHLWYFGLIGTC

SEQ ID NO: 13286 - protein, 268 aa, Thermomyces lanuginosus
EVSQDLFNQFNLFAQYSKAAYCQKNNDAPAGTNITCTGNACPEVEKADATFLYSFEDSGVGDVTGFLALDNTNKQIVLSFRGSRSIENWIGNLNFDLKEINDICSGCRGHDGFTSSWRSVADTLRQKVEDAVREHPDYRVVFTGHSLGGALATVAWADLRGNGYDIDVFSYGAPRVGNRAFAEFLTTQTGGTLYRITHTNDIVPRLPPREFGYSHSSPEYWIKSGTLVPVTRNDIVKIEGIDATGGNNQPNIPDIPAHLWYFGLIGTC

SEQ ID NO: 13287 - protein, 268 aa, Thermomyces lanuginosus
EVSQDLFNQFNLFAQYSKAAYCGKNNDAPAGTNITCTGNACPEVEKADATFLYSFEDSGVGDVTGFLALDNTNKQIVLSFRGSRSIENWIGNLNFDLKEINDICSGCRGHDGFTSSWRSVADTLRQKVEAAVREHPDYRVVFTGHSLGGALATVAGADLRGNGYDIDVFSYGAPRVGNRAFAEFLTNQQGGTLYRITHTNDIVPRLPPREFGYSHSSPEYWIKSGTLVPVTRNDIVKIEGIDATGGNNQPNIPDIPAHLWYFGRIGTC

SEQ ID NO: 13288 - protein, 268 aa, Thermomyces lanuginosus
EVSQDLFNQFNLFAQYSAAAYCGKNNSAEAGTNITCTGNACPEVEKADATFLYSFEDSGVGDVTGFLALDNTRKDIVLSFRGSRSIENWIGNLNFDLKEINDICSGCRGHDGFTSSWRSVADTLRQKVEDAVREHPDYRVVFTGHSLGGALATVAGADLRGNGYDIDVFSYGAPRVGNRAFAEFLTVQDGGTLYRITHTNDIVPRLPPREFGYSHSSPEYWIKSGTLVPVTRNDIVKIEGIDATGGNNQPNIPDIPAHLWYFGLIGTC

SEQ ID NO: 13289 - protein, 268 aa, Thermomyces lanuginosus
EVSQDLFNQFNLFAQYSAAAYCGKNNDAPAGTNITCTGNACPEVEKAQATFLYSFEDMGVGDVTGFLALDNTNKLIVLSFRGSRSIENWIGNLNFDLKEINDICSGCRGHDGFTSSWRSVADTLRQKVEDAVREHPDYRVVFTGHSLGGALATVAGADLRGNPYDIDVFSYGAPRVGNRAFAEFLTVQTGGTLYRITHTNDIVPRLPPREFGYSHSSPEYWIKSGTMVPVTRQDIVKIEGIDATGGNNQPNIPDIPAHLWYFGRIGTC

SEQ ID NO: 13290 - protein, 268 aa, Thermomyces lanuginosus
EVSQDLFNQFNLFAQYSAAAYCGKNNEAPAGTNITCTGNACPEVEKAQATFLYSFEDMGVGDVTGFLALDNTNKLIVLSFRGSRSIENWIGNLNFDLKEINDICSGCRGHDGFTSSWRSVADTLRQKVEDAVREHPDYRVVFTGHSLGGALATVAGADLRGNPYDIDVFSYGAPRVGNRAFAEFLTVQTGGTLYRITHTNDIVPRLPPREFGYSHSSPEYWIKSGTLVPVTRQDIVKIEGIDATGGNNQPNIPDIPAHLWYFGLIGTC

SEQ ID NO: 13291 - protein, 268 aa, Thermomyces lanuginosus
EVSDDLFNQFNLFAQYSAAAYCGKNNQAPAGTNITCTGNACPEVEKADATFLYSFKDMGVGDVTGFLALDNTNKLIVLSFRGSRSIENWIGNLNFDLKEINDICSGCRGHDGFTSSWRSVADTLRQKVEDAVREHPDYRVVFTGHSLGGALATVAGADLRGNGYDIDVFSYGAPRVGNRAFAEFLTVQTGGTLYRITHTNDIVPRLPPREFGYSHSSPEYWIKSGTLVPVTRNDIVKIEGIDATGGNNQPNIPDITAHLWYFGLIGTC

SEQ ID NO: 13292 - protein, 268 aa, Thermomyces lanuginosus
EVSQDLFNQFNLFAQYSAAAYCGKNNDAPAGTNITCTGNACPEVEKAQATFLYSFEDMGVGDVTGFLALDNTNKLIVLSFRGSRSIENWIGNLNFDLKEINDICSGCRGHDGFTSSWRSVADTLRQKVEAAVREHPDYRVVFTGHSLGGALATVAGADLRGNPYDIDVFSYGAPRVGNRAFAEFLTVQTGGTLYRITHTNDIVPRLPPREFGYSHSSPEYWIKSGTMVPVTRNDIVKIEGIDATGGNNQPNIPDIPAHLWYFGRIGTC

SEQ ID NO: 13293 - protein, 268 aa, Thermomyces lanuginosus
EVSQDLFNQFNLFAQYSAAAYCGKNNDAPAGTNITCTGNACPEVEKADATFLYSFKDSGVGDVTGFLALDNTNKLIVLSFRGSRSIKNWIGNLNFDLKEINDICSGCRGHAGFTSSWRSVADTLRQKVEDAVREHPDYRVVFTGHSLGGALATVAGADLRGNGYDIDVFSYGAPRVGNRAFAEFLTVQTGGTLYRITHTNDIVPRLPPREFGYSHSSPEYWIKSGTLVPVRRRDIVKIEGIDATGGNNQPNIPDIPAHLWYFGLIGTC

SEQ ID NO: 13294 - protein, 268 aa, Thermomyces lanuginosus
EVSQDLFNQFNLFAQYSAAAYCGKNNDAPAGTNITCTGNACPEVEKADATILYSFEDSGVGDVTGFLALDNTNKLIVLSFRGSRSIENWIGNLNFDLKEINDICSGCRGHDGFTSSWRSVADTLRQKVEDAVREHPDYRVVFTGHSLGGALATVAGADLRGNGYDIDVFSYGAPRVGNRAFAEFLTVQTGGTLYRITNTNDIVPRLPPREFGYSHSSPEYWIKSGTLPPVRRRDIVKIEGIDATGGNNQPNIPDIPAHLWYFGLIGTC

SEQ ID NO: 13295 - protein, 268 aa, Thermomyces lanuginosus
EVSQDLFNQFNLFAQYSAAAYCGANNDAPAGTNITCTGNACPEVEKADATFLYSFEDSGVGDVTGFLALDNTNKLIVLSFRGSRSIENWIGNLNFDLKEINDICSGCRGHAGFTSSWRSVADTLRQKVEAAVREHPDYRVVFTGHSLGGALATVAGADLRGNGYDIDVFSYGAPRVGNRAFAEFLTTQQGGTLYRITHTNDIVPRLPPREFGYSHSSPEYWIKSGTLVPVTRNDIVKIEGIDATGGNNQPNIPDIPAHLWYFGRIGTC

SEQ ID NO: 13296 - protein, 268 aa, Thermomyces lanuginosus
EVSQDLFNQFNLFAQYSAAAYCGKNNDAPAGTNITCTGNACPEVEKADATFLYSFRDSGKGDVTGFLALDNTNKLIVLSFRGSRSIENWIGNLNFDLKEINDICSGCRGHDGFTSSWFSVADTLRQKVEDAVREHPDYRVVFTGHSLGGALATVAGADLRGNGYDIDVFSYGAPRVGNRAFAEFLTVQTGGTLYRITHTNDIVPRLPPREFGYSHSSPEYWIKSGTLVPVRRRDIVKIEGIDATGGNNQPNIPDIPAHLWYFGLIGTC

SEQ ID NO: 13297 - protein, 268 aa, Thermomyces lanuginosus
EVSQDLFNQFNLFAQYSKAAYCGKNNSAPAGTNITCTGNACPEVFKADATFLYSFEDSGVGDVTGFLALDNTRKLIVLSFRGSRSIENWIGNLNFDLKEINDICSGCRGHDGFTSSWRSVADTLRQKVEDAVREHPVYRVVFTGHSLGGALATVAGADLRGNGYDIDVFSYGAPRVGNRAFAEFLTVQTGGTLYRITHTNDIVPRLPPREFGYSHSSPEYWIKSGTLVPVTRNDIVKIEGIDATGGNNQPNIPDIPAHLWYFGLIGTC

SEQ ID NO: 13298 - protein, 268 aa, Thermomyces lanuginosus
EVSQDLFNQFNLFAQYSAAAYCGKNNDAPAGTQITCTGNACPEVEKADATFLYSFEDSGVGDVTGFLALDNTNKLIVLSFRGSRSIENWIGNFNFDLKEINYICSGCRGHDGFTSSWRSVADTLRQKVEDAVREHPDYRVVFTGHSLGGALATVAGADLRGNGYDIDVFSYGAPRVGNRAFAEFLTVQTGGTLYRITHTNDIVPRLPPREFGYSHSSPEYWIKSGTLVPVRRRDIVKIEGIDATGGNNQPNIPDIPAHLWYFGLIGTC

SEQ ID NO: 13299 - protein, 268 aa, Thermomyces lanuginosus
EVSQDLFNQFNLFAQYSKAAYCQKNNDAPAGTNITCTGNACPEVFKADVTFLYSFEDSGVGDVTGFLALDNTNKLIVLSFRGSRSIENWIGNLNFDLKEINDICSGCRGHDGFTSSWRSVADTLRQKVEDAVREHPDYRVVFTGHSLGGALATVAGADLRGNGYDIDVFSYGAPRVGNRAFAEFLTTQTGGTLYRITHTNDIVPRLPPREFGYSHSSPEYWIKSGTLVPVTRNDIVKIEGIDATGGNNQPNIPDIPAHLWYFGLIGTC

SEQ ID NO: 13300 - protein, 268 aa, Thermomyces lanuginosus
EVSQDLFNQFNLFAQYSKAAYCGKNNDAPAGTNITCTGNACPEVEKADATFLYSFEDSGVGDVTGFLALDNTNKQIVLSFRGSRSIENWIGNLNFDLKEINDICSGCRGHDGFTSSWRSVADTLRQKVEDAVREHPDYRVVFTGHSLGGALATVAWADLRGNGYDIDVFSYGAPRVGNRAFAEFLTTQDGGTLYRITHTNDIVPRLPPREFGYSHSSPEYWIKSGTLVPVTRNDIVKIEGIDATGGNNQPNIPDIPAHLWYFGLIGTC

SEQ ID NO: 13301 - protein, 268 aa, Thermomyces lanuginosus
EVSQDLFNQFNLFAQYSAAAYCGKNNDAPAGTNITCTGNACPEVEKADATFLYSFEDSGVGDVTGFLALDNTNKLIVLSFRGSRSIENWIGNLNFDLKEINDICSGCRGHDGFTSSWRSVADTLRQKVEDAVREHPDYRVVFAGHSLGGALATVAGADLRGNGYDIDVFSYGAPRVGNRAFAEFLTVQTGGTLYRITNTNDIVPRLPPREFGYSHSSPEYWIKSGTLPPVRRRDIVKIEGIDATGGNNQPNIPDIPAHLWYFGLIGTC

SEQ ID NO: 13302 - protein, 268 aa, Thermomyces lanuginosus
EVSQDLFNQFNLFAQYSAAAYCGKNNDAPAGTNITCTGNACPEVEKADATFLYSFEDMGVGDVTGFLALDNTNKLIVLSFRGSRSIENWIGNLNFDLKEINDICSGCRGHDGFTSSWRSVADTLRQKVEAAVREHPQYRVVFTGHSLGGALATVAGADLRGNPYDIDVFSYGAPRVGNRAFAEFLTVQTGGTLYRITHTNDIVPRLPPREFGYSHSSPEYWIKSGTLVPVTRQDIVKIEGIDATGGNNQPNIPDIPAHLWYFGRIGTC

SEQ ID NO: 13303 - protein, 268 aa, Thermomyces lanuginosus
EVSQDLFNQFNLFAQYSKAAYCGKNNSAEAGTNITCTGNACPEVEKADATFLYSFEDSGVGDVTGFLALDNTRKDIVLSFRGSRSIENWIGNLNFDLKEINDICSGCRGHDGFTSSWRSVADTLRQKVEDAVREHPDYRVVFTGHSLGGALATVAGADLRGNGYDIDVFSYGAPRVGNRAFAEFLTVQTGGTLYRITHTNDIVPRLPPREFGYSHSSPEYWIKSGTLVPVTRNDIVKIEGIDATGGNNQPNIPDIPAHLWYFGLIGTC

SEQ ID NO: 13304 - protein, 268 aa, Thermomyces lanuginosus
EVSRDLFNQFNLFAQYSAAAYCGKNNDAPAGTNITCTGNACPEVEKADATILYSFEDSGVGDVTGFLALDNTNKLIVLSFRGSRSIENWIGNLNFDLKEINDICSGCRGHDGFTSSWRSVADTLRQKVEDAVREHPDYRVVFTGHSLGGALATVAGADLRGNGYDIDVFSYGAPRVGNRAFAEFLTVQTGGTLYRITHTNDIVPRLPPREFGYSHSSPEYWIKSGTLVPVRRRDIVKIEGIDATGGNNQPNIPDITAHLWYFGLIGTC

SEQ ID NO: 13305 - protein, 268 aa, Thermomyces lanuginosus
EVSQDLFNQFNLFAQYSAAAYCGKNNDAPAGTQITCTGNACPEVEKADATFLYSFEDSGVGDVTGFLALDNTNKLIVLSFRGSRSIENWIGNLNFDLKEINDICSGCRGHDGFTSSERSVADTLRQKVEDAVREHPDYRVVFTGHSLGGALATVAGADLRGNGYDIDVFSYGAPRKGNRAFAEFLTVQTGGTLYRITHTNDIVPRLPPREFGYSHSSPEYWIKSGTLVPVRRRDIVKIEGIDATGGNNQPNIPDIPAHLWYFGLIGTC

SEQ ID NO: 13306 - protein, 268 aa, Thermomyces lanuginosus
EVSQDLFNQFNLFAQYSAAAYCGKNNDAPAGTNITCTGNACPEVEKADATFLYSFEDSGVGDVTGFLALDNTNKLIVLSFRGSRSIENWIGNLNFDLKEINDICSGCRGHDGFTSSWRSVADTLRQKVEDAVREHPDYRVVFTGHSLGGALATVAGADLRGNGYDIDVFSYGAPRVGNRAFAEFLTVQTGGTLYRITHTNDIVPRLPPREFGYSHSSPEYWIKIWNPCPVTRNDIVKIEGIDATGGNNQPNIPDIPAHLWYFGLIGTC

SEQ ID NO: 13307 - protein, 268 aa, Thermomyces lanuginosus
EVSQDLFNQFNLFAQYSKAAYCGKNNDAPAGTNITCTGNACPEVEKADATFLYSFEDSGVGDVTGFLALDNTNKQIVLSFRGSRSIENWIGNLRFDLKEINDICSGCRGHDGFTSSWRSVADTLRQKVEAAVREHPDYRVVFTGHSLGGALATVAGADLRGNGYDIDVFSYGAPRVGNRAFAEFLTNQTGGTLYRITHTNDIVPRLPPREFGYSHSSPEYWIKSGTLVPVTRNDIVKIEGIDATGGNNQPNIPDIPAHLWYFGLIGTC

SEQ ID NO: 13308 - protein, 268 aa, Thermomyces lanuginosus
EVSQDLFNQFNLFAQYSKAAYCKKNNDAPAGTNITCTGNACPEVEKADATFLYSFEDSGVGDVTGFLALDNTNKLIVLSFRGSRSIENWIGNLNFDLKEINDICSGCRGHDGFTSSWRSVADTLRQKVEAAVREHPDYRVVFTGHSLGGALATIAWADLRGNGYDIDVFSYGAPRVGNRAFAEFLTVQTGGTLYRITHTNDIVPRLPPREFGYSHSSPEYWIKSGTLVPVTRNDIVKIEGIDATGGNNQPNIPDIPAHLWYFGLIGTC

SEQ ID NO: 13309 - protein, 268 aa, Thermomyces lanuginosus
EVSQDLFNQFNLFAQYSAAAYCGKNNEAPAGTNITCTGNACPEVEKAQATFLYSFEDSGVGDVTGFLALDNTNKLIVLSFRGSRSIENWIGNLNFDLKEINDICSGCRGHDGFTSSWRSVADTLRQKVEDAVREHPQYRVVFTGHSLGGALATVAGADLRGNPYDIDVFSYGAPRVGNRAFAEFLTVQTGGTLYRITHTNDIVPRLPPREFGYSHSSPEYWIKSGTLVPVTRQDIVKIEGIDATGGNNQPNIPDIPAHLWYFGRIGTC

SEQ ID NO: 13310 - protein, 268 aa, Thermomyces lanuginosus
EVSQDLFNQFNLFAQYSAAAYCGKNNDAPAGTNITCTGNACPEVEKADATFLYSFEDSGVGDVTGFLALDNTNKLIVLSFRGSRSIENWIGNLNFDLKEINDICSGCRGHDGFTSSWRSVADTLRQKVEDAVREHPDYRVVFTGHSLGGALATVAGADLRGDGYDIDVFSYGAPRVGNRAFAEFLTVQTGGTLYRITSTNDIVPRLPPREFGYSHSSPEYWIKSGTLRPVRRRDIVKIEGIDATGGNNQPNIPDIPAHLWYFGLIGTC

SEQ ID NO: 13311 - protein, 268 aa, Thermomyces lanuginosus
EVSQDLFNQFNLFAQYSAAAYCGKNNDAPAGTNITCTGNACPEVEKADATFLYSFEDSGVGDVTGFLALDNTNKRIVLSFRGSRSIENWIGNLNFDLKEINDICSGCRGHAGFTSSWRSVADTLRQKVEAAVREHPDYRVVFTGHSLGGALATVAGADLRGNGYDIDVFSYGAPRVGNRAFAEFLTNQQGGTLYRITHTNDIVPRLPPREFGYSHSSPEYWIKSGTLVPVTRNDIVKIEGIDATGGNNQPNIPDIPAHLWYFGLIGTC

SEQ ID NO: 13312 - protein, 268 aa, Thermomyces lanuginosus
EVSQDLFNQFNLFAQYSAAAYCQQNNDAPAGTNITCTGNACPEVEKADATFLYSFEDSGVGDVTGFLALDNTNKQIVLSFRGSRSIENWIGNLNFDLKEINDICSGCRGHDGFTSSWRSVADTLRQKVEDAVREHPDYRVVFTGHSLGGALATVAWADLRGNGYDIDVFSYGAPRVGNRAFAEFLTQQTGGTLYRITHTNDIVPRLPPREFGYSHSSPEYWIKSGTLVPVTRNDIVKIEGIDATGGNNQPNIPDIPAHLWYFGLIGTC

SEQ ID NO: 13313 - protein, 268 aa, Thermomyces lanuginosus
EVSQDLFNQFNLFAQYSAAAYCGANNDAPAGTNITCTGNACPEVEKADATFLYSFEDSGVGDVTGFLALDNTNKQIVLSFRGSRSIENWIGNLRFDLKEINDICSGCRGHDGFTSSWRSVADTLRQKVEAAVREHPDYRVVFTGHSLGGALATIAGADLRGNGYDIDVFSYGAPRVGNRAFAEFLTVQTGGTLYRITHTNDIVPRLPPREFGYSHSSPEYWIKSGTLVPVTRNDIVKIEGIDATGGNNQPNIPDIPAHLWYFGRIGTC

SEQ ID NO: 13314 - protein, 268 aa, Thermomyces lanuginosus
EVSQDLFNQFNLFAQYSKAAYCGANNDAPAGTNITCTGNACPEVEKADATFLYSFEDSGVGDVTGFLALDNTNKLIVLSFRGSRSIENWIGNLRFDLKEINDICSGCRGHDGFTSSWRSVADTLRQKVEDAVREHPDYRVVFTGHSLGGALATVAWADLRGNGYDIDVFSYGAPRVGNRAFAEFLTTQTGGTLYRITHTNDIVPRLPPREFGYSHSSPEYWIKSGTLVPVTRNDIVKIEGIDATGGNNQPNIPDIPAHLWYFGLIGTC

SEQ ID NO: 13315 - protein, 268 aa, Thermomyces lanuginosus
EVSQDLFNQFNLFAQYSAAAYCKKNNDAPAGTNITCTGNACPEVEKADATFLYSFEDSGVGDVTGFLALDNTNKLIVLSFRGSRSIENWIGNLNFDLKEINDICSGCRGHDGFTSSWRSVADTLRQKVEAAVREHPDYRVVFTGHSLGGALATIAWADLRGNGYDIDVFSYGAPRVGNRAFAEFLTTQTGGTLYRITHTNDIVPRLPPREFGYSHSSPEYWIKSGTLVPVTRNDIVKIEGIDATGGNNQPNIPDIPAHLWYFGRIGTC

SEQ ID NO: 13316 - protein, 268 aa, Thermomyces lanuginosus
EVSQDLFNQFNLFAQYSAAAYCQKNNDAPAGTNITCTGNACPEVEKADVTFLYSFEDSGVGDVTGFLALDNTNKQIVLSFRGSRSIENWIGNLNFDLKEINDICSGCRGHDGFTSSWRSVADTLRQKVEDAVREHPDYRVVFTGHSLGGALATVAWADLRGNGYDIDVFSYGAPRVGNRAFAEFLTVQDGGTLYRITHTNDIVPRLPPREFGYSHSSPEYWIKSGTLVPVTRNDIVKIEGIDATGGNNQPNIPDIPAHLWYFGLIGTC

SEQ ID NO: 13317 - protein, 268 aa, Thermomyces lanuginosus
EVSQDLFNQFNLFAQYSAAAYCGANNDAPAGTNITCTGNACPEVEKADATFLYSFEDSGVGDVTGFLALDNTNKQIVLSFRGSRSIENWIGNLNFDLKEINDICSGCRGHDGFTSSWRSVADTLRQKVEDAVREHPDYRVVFTGHSLGGALATIAGADLRGNGYDIDVFSYGAPRVGNRAFAEFLTTQQGGTLYRITHTNDIVPRLPPREFGYSHSSPEYWIKSGTLVPVTRNDIVKIEGIDATGGNNQPNIPDIPAHLWYFGRIGTC

SEQ ID NO: 13318 - protein, 268 aa, Thermomyces lanuginosus
EVSQDLFNQFNLFAQYSAAAYCGKNNDAPAGTKITCTCNACPEVEKADATFLYSFEDSGVGDVTGFLALDNTNKLIVLSFRGSRSIENWIGNLNFDLKEINDICSGCRGHAGFTSSWRSVADTLRQKVEDAVREHPDYRVVFTGHSLGGALATVAGADLRGNGYDIDVFSYGAPRVGNRAFAEFLTVQTGGTLYRITHTNDIVPRLPPREFGYSHSSPEYWIKSGTLVPVERRDIVKIEGIDATGGNNQPNIPDIPAHLWYFGLIGTC

SEQ ID NO: 13319 - protein, 268 aa, Thermomyces lanuginosus
EVSQDLFNQFNLFAQYSAAAYCQKNNDAPAGTNITCTGNACPEVEKADATFLYSFEDSGVGDVTGFLALDNTNKGIVLSFRGSRSIENWIQNLNFDLKEINDICSGCRGHDGFTSSWRSVADTLRQKVEAAVREHPDYRVVFTGHSLGGALATVAGADLRGNGYDIDVFSYGAPRVGNRAFAEFTTVQTGGTLYRITHTNDIVPRLPPREFGYSHSSPEYWIKSGTLVPVTRNDIVKIEGIDATGGNNQPNQPDIPAHLWYFGRIGTC

SEQ ID NO: 13320 - protein, 268 aa, Thermomyces lanuginosus
EVSQDLFNQFNLFAQYSAAAYCGKNNSAPAGTNITCTGNACPEVEKADATFLYSFKDMGVGDVTGFLALDNTNKLIVLSFRGSRSIENWIGNLNFDLKEINDICSGCRGHDGFTSSWRSVADTLRQKVEDAVREHPDYRVVFTGHSLGGALATVAGADLRGNGYDIDVFSYGAPRVGNRAFAEFLTTQTGGTLYRITHTNDIVPRLPPREFGYSHSSPEYWIKSGTLVPVTRNDIVKIEGIDATGGNNQPNQPDIPAHLWYFGRIGTC

SEQ ID NO: 13321 - protein, 268 aa, Thermomyces lanuginosus
EVSQDLFNQFNLFAQYSAAAYCQKNNDAPAGTNITCTGNACPEVEKADATFLYSFEDSGVGDVTGFLALDNTNKQIVLSFRGSRSIENWIGNLNFDLKEINDICSGCRGHAGFTSSWRSVADTLRQKVEDAVREHPDYRVVFTGHSLGGALATIAGADLRGNGYDIDVFSYGAPRVGNRAFAEFLTVQQGGTLYRITHTNDIVPRLPPREFGYSHSSPEYWIKSGTLVPVTRNDIVKIEGIDATGGNNQPNIPDIPAHLWYFGRIGTC

SEQ ID NO: 13322 - protein, 268 aa, Thermomyces lanuginosus
EVSQDLFNQFNLFAQYSAAAYCQKNNSAPAGTNITCTGNACPEVEKADATFLYSFEDSGVGDVTGFLALDNTNKQIVLSFRGSRSIENWIQNLNFDLKEINDICSGCRGHDGFTSSWRSVADTLRQKVEDAVREHPDYRVVFTGHSLGGALATVAGADLRGNGYDIDVFSYGAPRVGNRAFAEFLTTQTGGTLYRITHTNDIVPRLPPREFGYSHSSPEYWIKSGTLVPVTRNDIVKIEGIDATGGNNQPNQPDIPAHLWYFGRIGTC

SEQ ID NO: 13323 - protein, 268 aa, Thermomyces lanuginosus
EVSQDLFNQFNLFAQYSAAAYCGKNNDAPAGTQITCTINACPEVEKADATFLYSFEDSGVGDVTGFLALDNTNKLIVLSFRGSRSIENWIGNLNFDLKEINDICSGCRGHDGFTSSWRSVADTLRQKVEDAVREHPDYRVVFTGHSLGGALATVAGADLRGNGYDIDVFSYGAPRVANRAFAEFLTVQTGGTLYRITHTNDIVPRLPPREFGYSHSSPEYWIKSGTLVPVRRRDIVKIEGIDATGGNNQPNIPDIPAHLWYFGLIGTC

SEQ ID NO: 13324 - protein, 268 aa, Thermomyces lanuginosus
EVSQDLFNQFNLFAQYSAAAYCKKNNDAPAGTNITCTGNACPEVEKADATFLYSFEDSGVGDVTGFLALDNTNKQIVLSFRGSRSIENWIGNLNFDLKEINDICSGCRGHAGFTSSWRSVADTLRQKVEAAVREHPDYRVVFTGHSLGGALATVAGADLRGNGYDIDVFSYGAPRVGNRAFAEFLTTQTGGTLYRITHTNDIVPRLPPREFGYSHSSPEYWIKSGTLVPVTRNDIVKIEGIDATGGNNQPNIPDIPAHLWYFGLIGTC

SEQ ID NO: 13325 - protein, 268 aa, Thermomyces lanuginosus
EVSQDLFNQFNLFAQYSAAAYCGKNNDAPAGTNITCTGNACPEVEKADATFLYSFEDSGVGDVTGFLALDNTNKLIVLSFRGSRSIENWIGNLNFDLKEINDICSGCRGHDGFTSSWRSVADTLRQKVEDAVREHPDYRVVFTGHSLGGALATVAGADLRGNGYDIDVFSYGAPRVGNRAFAEFLTVQTGGTLYRITHTNDIVPRLPPREFGYSHSSPEYWIKSGTLVPLRRRDIVKIEGIDATGGNNQPNIPDIPAHFHYFGLIGTC

SEQ ID NO: 13326 - protein, 268 aa, Thermomyces lanuginosus
EVSQDLFNQFNLFAQYSAQAYCGKNNDAPAGTNITCTGNACPEVEKADATTLYSFEDSGVGDVTGFLALDNTNKGIVLSFRGSRSIENWIGNLNFDLKEINDICSGCRGHDGFTSSWRSVADTLRQKVEAAVREHPDYRVVFTGHSLGGALATVAGADLRGNGYDIDVFSYGAPRVGNRAFAEFLTVQTGGTLYRITHTNDIVPRLPPREFGYSHSSPEYWIKSGTLVPVTRNDIVKIEGIDATGGNNQPNQPDIPAHLWYFGRIGTC

SEQ ID NO: 13327 - protein, 268 aa, Thermomyces lanuginosus
EVSQDLFNQFNLFAQYSAAAYCQKNNDAPAGTNITCTGNACPEVEKADATTLYSFEDSGVGDVTGFLALDNTNKLIVLSFRGSRSIENWIQNLNFDLKEINDICSGCRGHDGFTSSWRSVADTLRQKVEAAVREHPDYRVVFTGHSLGGALATVAGADLRGNGYDIDVFSYGAPRVGNRAFAEFLTHQTGGTLYRITHTNDIVPRLPPREFGYSHSSPEYWIKSGTLVPVTRNDIVKIEGIDATGGNNQPNQPDIPAHLWYFGRIGTC

SEQ ID NO: 13328 - protein, 268 aa, Thermomyces lanuginosus
EVSQDLFNQFNLFAQYSAAAYCGKNNQAPAGTNITCTGNACPEVEKADATFLYSFEDSGVGDVTGFLALDNTNKQIVLSFRGSRSIENWIQNLNFDLKEINDICSGCRGHDGFTSSWRSVADTLRQKVEAAVREHPDYRVVFTGHSLGGALATVAGADLRGNGYDIDVFSYGAPRVGNRAFAEFLTHQTGGTLYRITHTNDIVPRLPPREFGYSHSSPEYWIKSGTLVPVTRNDIVKIEGIDATGGNNQPNQPDIPAHLWYFGRIGTC

SEQ ID NO: 13329 - protein, 268 aa, Thermomyces lanuginosus
EVSQDLFNQFNLFAQYSAAAYCWKNNDAPAGTNITCTGNACPEVFKADVTFLYSFEDSGVGDVTGFLALDNTNKLIVLSFRGSRSIENWIGNLNFDLKEINDICSGCRGHDGFTSSWRSVADTLRQKVEDAVREHPDYRVVFTGHSLGGALATVAWADLRGNGYDIDVFSYGAPRVGNRAFAEFLTVQDGGTLYRITHTNDIVPRLPPREFGYSHSSPEYWIKSGTLVPVTRNDIVKIEGIDATGGNNQPNIPDIPAHLWYFGLIGTC

SEQ ID NO: 13330 - protein, 268 aa, Thermomyces lanuginosus
EVSQDLFNQFNLFAQYSAAAYCGKNNDAPAGTQITCTGNACPEVEKADATFLYSFEDSGVGDVTGFLALDNTNKLIVLSFRGSRSIENWIGNLNFDLKEINDICSGCRGHNGFTSSWRSVADTLRQKVEDAVREHPDYRVVFTGHSLGGALATVAGADLRGNGYDIDVFSYGAPRVGNRAFAEFLTVQTGGTLYRITHTNDIVPRLPPREFGYSHSSPEYWIKSPTLVPVRRRDIVKIEGIDATGGNNQPNIPDIPAHLWYFGLIGTC

SEQ ID NO: 13331 - protein, 268 aa, Thermomyces lanuginosus
EVSQDLFNQFNLFAQYSAAAYCGKNNDAPAGTNITCTGNACPEVEKADATFLYSFEDSGVGDVTGFLALDNTNKLIVLSFRGSRSIENWIGNLNFDLKEINDICSGCRGHDGFTSSWRSVADTLRQKVEDAVREHPDYRVVFTGHSLGGALATVAGADLRGDGYDIDVFSYGAPRVGNRAFAEFLTVQTGGTLYRITHTNDIVPRLPPREFGYSHSSPEYWIKSGTLPPVRRRDIVKIEGIDATGGNNQPNIPDITAHLWYFGLIGTC

SEQ ID NO: 13332 - protein, 268 aa, Thermomyces lanuginosus
EVSQDLFNQFNLFAQYSAAAYCQKNNDAPAGTNITCTGNACPEVFKADVTFLYSFEDSGVGDVTGFLALDNTNKLIILSFRGSRSIENWIGNLNFDLKEINDICSGCRGHDGFTSSWRSVADTLRQKVEDAVREHPDYRVVFTGHSLGGALATVAGADLRGNGYDIDVFSYGAPRVGNRAFAEFLTVQDGGTLYRITHTNDIVPRLPPREFGYSHSSPEYWIKSGTLVPVTRNDIVKIEGIDATGGNNQPNIPDIPAHLWYFGLIGTC

SEQ ID NO: 13333 - protein, 268 aa, Thermomyces lanuginosus
EVSQDLFNQFNLFAQYSAAAYCGKNNDAPAGTQITCTGNACPEVEKADATFLYSFEDSGVGDVTGFLALDNTNKLIVLSFRGSRSIENWIGNLNFDLKEINDICSGCRGHNGFTSSWRSVADTLRQKVEDAVREHPDYRVVFTGHSLGGALATVAGADLRGNGYDIDVFSYGAPRVGNRAFAEFLTVQTGGTLYRITHTNDIVPRLPPREFGYSHPSPEYWIKSGTLVPVRRRDIVKIEGIDATGGNNQPNIPDIPAHLWYFGLIGTC

SEQ ID NO: 13334 - protein, 268 aa, Thermomyces lanuginosus
EVSQDLFNQFKLFAQYSAAAYCKKNNDAPAGTNITCTGNACPEVEKADATFLYSFKDSGVGDVTGFLALDNTNKQIVLSFRGSRSIENWIGNLNFDLKEINDICSGCRGHDGFTSSWRSVADTLRQKVEDAVREHPDYRVVFTGHSLGGALATVAGADLRGNGYDIDVFSYGAPRVGNRAFAEFLTVQQGGTLYRITHTNDIVPRLPPREFGYSHSSPEYWIKSGTLVPVTRNDIVKIEGIDATGGNNQPNIPDIPAHLWYFGLIGTC

SEQ ID NO: 13335 - protein, 268 aa, Thermomyces lanuginosus
EVSRDLFNQFNLFAQYSAAAYCGKNNDAPAGTNITCTGNACPEVEKADATFLYSFEDSGVGDVTGFLALDNTNKLIVLSFRGSRSIENWIGNLNFDLKEINDICSGCRGHDGFTSSWRSVADTLRQKVEDAVREHPDYRVVFTGHSLGGALATVAGADLRGDGYDIDVFSYGAPRVGNRAFAEFLTVQTGGTLYRITHTNDIVPRLPPREFGYSHSSPEYWIKSGTLPPVRRRDIVKIEGIDATGGNNQPNIPDIPAHLWYFGLIGTC

SEQ ID NO: 13336 - protein, 268 aa, Thermomyces lanuginosus
EVSQDLFNQFNLFAQYSAAAYCGKNNQAPAGTNITCTGNACPEVEKADATTLYSFEDSGVGDVTGFLALDNTNKQIVLSFRGSRSIENWIQNLNFDLKEINDICSGCRGHDGFTSSWRSVADTLRQKVEDAVREHPDYRVVFTGHSLGGALATVAGADLRGNGYDIDVFSYGAPRVGNRAFAEFLTNQTGGTLYRITHTNDIVPRLPPREFGYSHSSPEYWIKSGTLVPVTRNDIVKIEGIDATGGNNQPNQPDIPAHLWYFGLIGTC

SEQ ID NO: 13337 - protein, 268 aa, Thermomyces lanuginosus
EVSQDLFNQFNLFAQYSAAAYCGKNNNAPAGTQITCTGNACPEVEKADATFLYSFRDSGVGDVTGFLALDNTNKLIVLSFRGSRSIENWIGNLNFDLKEINDICSGCRGHDGFTSSWRSVADTLRQKVEDAVREHPDYRVVFTGHSLGGALATVAGADLRGNGYDIDVFSYGAPRVGNRAFAEFLTVQTGGTLYRITHTNDIVPRLPPREFGYSHSSPEYWIKSGTLVPVRRRDIVKIEGIDATGGNNQPNIPDIPAHLWYFGLIGTC

SEQ ID NO: 13338 - protein, 268 aa, Thermomyces lanuginosus
EVSQDLFNQFNLFAQYSAAAYCQANNDAPAGTNITCTGNACPEVEKADATFLYSFEDSGVGDVTGFLALDNTNKRIVLSFRGSRSIENWIGNLNFDLKEINDICSGCRGHDGFTSSWRSVADTLRQKVEDAVREHPDYRVVFTGHSLGGALATVAWADLRGNGYDIDVFSYGAPRVGNRAFAEFLTQQTGGTLYRITHTNDIVPRLPPREFGYSHSSPEYWIKSGTLVPVTRNDIVKIEGIDATGGNNQPNIPDIPAHLWYFGLIGTC

SEQ ID NO: 13339 - protein, 268 aa, Thermomyces lanuginosus
EVSQDLFNQFNLFAQYSKAAYCGKNNDAPAGTNITCTGNACPEVFKADVTFLYSFEDSGVGDVTGFLALDNTNKQIVLSFRGSRSIENWIGNLNFDLKEINDICSGCRGHDGFTSSWRSVADTLRQKVEDAVREHPDYRVVFTGHSLGGALATVAGADLRGNGYDIDVFSYGAPRVGNRAFAEFLTTQTGGTLYRITHTNDIVPRLPPREFGYSHSSPEYWIKSGTLVPVTRNDIVKIEGIDATGGNNQPNIPDIPAHLWYFGLIGTC

SEQ ID NO: 13340 - protein, 268 aa, Thermomyces lanuginosus
EVSQDLFNQFNLFAQYSAAAYCGKNNDAPAGTNITCTGNACPEVEKADATFLYSFEDSGVGDVTGFLALDNTNKLIVLSFRGSRSIENWIGNLNFDLKEINDICSGCRGHDGFTSSWRSVADTLRQKVEDAVREHPDYRVVFAGHSLGGALATVAGADLRGNGYDIDVFSYGAPRVGNRAFAEFLTVQTGGTLYRITHTNDIVPRLPPRQFGYSHSSPEYWIKSGTLVPVRRRDIVKIEGIDATGGNNQPNIPDAPAHLWYFGLIGTC

SEQ ID NO: 13341 - protein, 268 aa, Thermomyces lanuginosus
EVSQDLFNQFNLFAQYSAAAYCGKNNEAPAGTNITCTGNACPEVEKADATFLYSFEDMGVGDVTGFLALDNTNKLIVLSFRGSRSIENWIGNLNFDLKEINDICSGCRGHDGFTSSWRSVADTLRQKVEDAVREHPQYRVVFTGHSLGGALATVAGADLRGNPYDIDVFSYGAPRVGNRAFAEFLTVQTGGTLYRITHTNDIVPRLPPREFGYSHSSPEYWIKSGTMVPVTRNDIVKIEGIDATGGNNQPNIPDIPAHLWYFGRIGTC

SEQ ID NO: 13342 - protein, 268 aa, Thermomyces lanuginosus
EVSQDLFNQFNLFAQYSAAAYCGKNNNAPAGTNITCTGNACPEVEKADATFLYSFKDMGVGDVTGFLALDNTNKLIVLSFRGSRSIENWIGNLNFDLKEINDICSGCRGHDGFTSSWRSVADTLRQKVEDAVREHPDYRVVFTGHSLGGALATVAGADLRGNGYDIDVFSYGAPRVGNRAFAEFLTVQTGGTLYRITHTNDIVPRLPPREFGYSHSSPEYWIKSGTLVPVTRQDIVKIEGIDATGGNNQPNIPDITAHLWYFGLIGTC

SEQ ID NO: 13343 - protein, 268 aa, Thermomyces lanuginosus
EVSQDLFNQFNLFAQYSAAAYCGKNNSAPAGTNITCTGNACPEVEKADATTLYSFEDSGVGDVTGFLALDNTNKQIVLSFRGSRSIENWIGNLNFDLKEINDICSGCRGHDGFTSSWRSVADTLRQKVEAAVREHPDYRVVFTGHSLGGALATVAGADLRGNGYDIDVFSYGAPRVGNRAFAEFLTVQTGGTLYRITHTNDIVPRLPPREFGYSHSSPEYWIKSGTLVPVTRNDIVKIEGIDATGGNNQPNQPDIPAHLWYFGRIGTC

SEQ ID NO: 13344 - protein, 268 aa, Thermomyces lanuginosus
EVSQDLFNQFNLFAQYSAAAYCGKNNDAPAGTNITCTGNACPEVEKADATILYSFEDSGVGDVTGFLALDNTNKLIVLSFRGSRSIENWIGNLNFDLKEINDICSGCRGHDGFTSSWRSVADTLRQKVEDAVREHPDYRVVFTGHSLGGALATVAGADLRGDGYDIDVFSYGAPRVGNRAFAEFLTVQTGGTLYRITHTNDIVPRLPPREFGYSHSSPEYWIKSGTLRPVRRRDIVKIEGIDATGGNNQPNIPDIPAHLWYFGLIGTC

SEQ ID NO: 13345 - protein, 268 aa, Thermomyces lanuginosus
EVSQDLFNQFNLFAQYSAAAYCGKNNDAPAGTNITCTGNACPEVEKADATILYSFEDSGVGDVTGFLALDNTNKLIVLSFRGSRSIENWIGNLNFDLKEINDICSGCRGHDGFTSSWRSVADTLRQKVEDAVREHPDYRVVFAGHSLGGALATVAGADLRGNGYDIDVFSYGAPRVGNRAFAEFLTVQTGGTLYRITSTNDIVPRLPPREFGYSHSSPEYWIKSGTLVPVRRRDIVKIEGIDATGGNNQPNIPDIPAHLWYFGLIGTC

SEQ ID NO: 13346 - protein, 268 aa, Thermomyces lanuginosus
EVSQDLFNQFNLFAQYSAAAYCGKNNDAPAGTQITCTGNACPEVEKADATFLYSFEDSGVGDVTGFLALDNTNKLIVLSFRGSRSIENWITNLNFDLKEINDICSGCRGHDGFTSSWRSVADTLRQKVEDAVREHPDYRVVFTGHSLGGALATVAGADLRGNKYDIDVFSYGAPRVGNRAFAEFLTVQTGGTLYRITHTNDIVPRLPPREFGYSHSSPEYWIKSGTLVPVRRRDIVKIEGIDATGGNNQPNIPGIPAHLWYFGLIGTC

SEQ ID NO: 13347 - protein, 268 aa, Thermomyces lanuginosus
EVSQDLFNQFNLFAQYSAAAYCGKNNDAPAGTNITCTGNACPEVEKADATFLYSFEDSGVGDVTGFLALDNTNKLIVLSFRGSRSIENWIGNLNFDLKEINDICSGCRGHDGFTSSWRSVADTLRQKVEDAVREHPDYRVVFTGHSLGGALATVAGADLRGDGYDIDVFSYGAPRVGNRAFAEFLTVQTGGTLYRITSTNDIVPRLPPREFGYSHSSPEYWIKSGTLPPVRRRDIVKIEGIDATGGNNQPNIPDIPAHLWYFGLIGTC

SEQ ID NO: 13348 - protein, 268 aa, Thermomyces lanuginosus
EVSQDLFNQFNLFAQYSAAAYCGKNNDAPAGTNITCTGNACPEVEKADATFLYSFEDSGVGDVTGFLALDNTNKLIVLSFRGSRSIENWIGNLNFDLKEINDICSGCRGHAGFTSSWRSVADTLRQKVEDAVREHPDYRVVFTGHSLGGALATVAGADLRGNKYDIDVFSYGAPRVGNRAFAEFLTVQTGGTLYRITHTNDIVPRLPPREFGYSHSSPEYWIKSGTLVPVRRRDIVKIEGIDATGGNNQPNIPSIPAHLWYFGLIGTC

SEQ ID NO: 13349 - protein, 268 aa, Thermomyces lanuginosus
EVSQDLFNQFNLFAQYSAAAYCQANNDAPAGTNITCTGNACPEVEKADATFLYSFEDSGVGDVTGFLALDNTNKQIVLSFRGSRSIENWIGNLNFDLKEINDICSGCRGHDGFTSSWRSVADTLRQKVEAAVREHPDYRVVFTGHSLGGALATVAWADLRGNGYDIDVFSYGAPRVGNRAFAEFLTVQTGGTLYRITHTNDIVPRLPPREFGYSHSSPEYWIKSGTLVPVTRNDIVKIEGIDATGGNNQPNIPDIPAHLWYFGLIGTC

SEQ ID NO: 13350 - protein, 268 aa, Thermomyces lanuginosus
EVSRDLFNQFNLFAQYSAAAYCGKNNDAPAGTNITCTGNACPEVEKADATFLYSFEDSGVGDVTGFLALDNTNKLIVLSFRGSRSIENWIGNLNFDLKEINDICSGCRGHDGFTSSWRSVADTLRQKVEDAVREHPDYRVVFTGHSLGGALATVAGADLRGDGYDIDVFSYGAPRVGNRAFAEFLTVQTGGTLYRITSTNDIVPRLPPREFGYSHSSPEYWIKSGTLVPVRRRDIVKIEGIDATGGNNQPNIPDIPAHLWYFGLIGTC

SEQ ID NO: 13351 - protein, 268 aa, Thermomyces lanuginosus
EVSQDLFNQFNLFAQYSKAAYCQKNNDAPAGTNITCTGNACPEVEKADATFLYSFEDSGVGDVTGFLALDNTNKLIILSFRGSRSIENWIGNLNFDLKEINDICSGCRGHDGFTSSWRSVADTLRQKVEAAVREHPDYRVVFTGHSLGGALATVAWADLRGNGYDIDVFSYGAPRVGNRAFAEFLTVQTGGTLYRITHTNDIVPRLPPREFGYSHSSPEYWIKSGTLVPVTRNDIVKIEGIDATGGNNQPNIPDIPAHLWYFGLIGTC

SEQ ID NO: 13352 - protein, 268 aa, Thermomyces lanuginosus
EVSQDLFNQFNLFAQYSAAAYCGKNNRAPAGTNITCTGNACPEVEKADATFLYSFEDSGVGDVTGFLALDNTNKLIVLSFRGSRSIENWITNLNFNLKEINDICSGCRGHAGFTSSWRSVADTLRQKVEDAVREHPDYRVVFTGHSLGGALATVAGADLRGNGYDIDVFSYGAPRVGNRAFAEFLTVQTGGTLYRITHTNDIVPRLPPREFGYSHPSPEYWIKSGTGVPVTRNDIVKIEGIDATGGNNQPNIPDITAHLWYFGLIGTC

SEQ ID NO: 13353 - protein, 268 aa, Thermomyces lanuginosus
EVSDDLFNQFKLFAQYSAAAYCGKNNSAPAGTNITCTGNACPEVEKADATFLYSFEDSGVGDVTGFLALDNTNKLIVLSFRGSRSIENWIGNLNFDLKEINDICSGCRGHDGFTSSWRSVADTLRQKVEDAVREHPDYRVVFTGHSLGGALATVAGADLRGNGYDIDVFSYGAPRVGNRAFAEFLTVQTGGTLYRITHTNDIVPRLPPREFGYSHSSPEYWIKSGTLVPVTRQDIVKIEGIDATGGNNQPNIPDITAHLWYFGLIGTC

SEQ ID NO: 13354 - protein, 268 aa, Thermomyces lanuginosus
EVSQDLFNQFNLFAQYSAAAYCGKNNDAPAGTNITCTGNACPEVEKADATILYSFEDSGVGDVTGFLALDNTNKLIVLSFRGSRSIENWIGNLNFDLKEINDICSGCRGHDGFTSSWRSVADTLRQKVEDAVREHPDYRVVFTGHSLGGALATVAGADLRGNGYDIDVFSYGAPRVGNRAFAEFLTVQTGGTLYRITNTNDIVPRLPPREFGYSHSSPEYWIKSGTLRPVRRRDIVKIEGIDATGGNNQPNIPDIPAHLWYFGLIGTC

SEQ ID NO: 13355 - protein, 268 aa, Thermomyces lanuginosus
EVSQDLFNQFNLFAQYSAAAYCGKNNDAPAGTNITCTGNACPEVEKADATFLYSFEDSGVGDVTGFLALDNTNKLIILSFRGSRSIENWIGNLNFDLKEINDICSGCRGHDGFTSSWRSVADTLRQKVEAAVREHPDYRVVFTGHSLGGALATIAWADLRGNGYDIDVFSYGAPRVGNRAFAEFLTNQTGGTLYRITHTNDIVPRLPPREFGYSHSSPEYWIKSGTLVPVTRNDIVKIEGIDATGGNNQPNIPDIPAHLWYFGLIGTC

SEQ ID NO: 13356 - protein, 268 aa, Thermomyces lanuginosus
EVSRDLFNQFNLFAQYSAAAYCGKNNDAPAGTNITCTGNACPEVEKADATILYSFEDSGVGDVTGFLALDNTNKLIVLSFRGSRSIENWIGNLNFDLKEINDICSGCRGHDGFTSSWRSVADTLRQKVEDAVREHPDYRVVFTGHSLGGALATVAGADLRGNGYDIDVFSYGAPRVGNRAFAEFLTVQTGGTLYRITNTNDIVPRLPPREFGYSHSSPEYWIKSGTLVPVRRRDIVKIEGIDATGGNNQPNIPDIPAHLWYFGLIGTC

SEQ ID NO: 13357 - protein, 268 aa, Thermomyces lanuginosus
EVSQDLFNQFNLFAQYSAAAYCGKNNQAPAGTNITCTGNACPEVEKADATFLYSFKDMGVGDVTGFLALDNTNKLIVLSFRGSRSIENWIGNLNFDLKEINDICSGCRGHDGFTSSWRSVADTLRQKVEDAVREHPDYRVVFTGHSLGGALATVAGADLRGNGYDIDVFSYGAPRVGNRAFAEFLTVQTGGTLYRITHTNDIVPRLPPREFGYSHSSPEYWIKSGTLVPVTRQDIVKIEGIDATGGNNQPNIPDITAHLWYFGLIGTC

SEQ ID NO: 13358 - protein, 268 aa, Thermomyces lanuginosus
EVSQDLFNQFKLFAQYSAAAYCGKNNSAPAGTNITCTGNACPEVEKADATFLYSFKDSGVGDVTGFLALDNTNKLIVLSFRGSRSIENWIGNLNFDLKEINDICSGCRGHDGFTSSWRSVADTLRQKVEDAVREHPDYRVVFTGHSLGGALATVAGADLRGNGYDIDVFSYGAPRVGNRAFAEFLTVQTGGTLYRITHTNDIVPRLPPREFGYSHSSPEYWIKSGTLVPVTRQDIVKIEGIDATGGNNQPNIPDITAHLWYFGLIGTC

SEQ ID NO: 13359 - protein, 268 aa, Thermomyces lanuginosus
EVSQDLFNQFNLFAQYSAAAYCQKNNSAPAGTNITCTGNACPEVEKADATTLYSFEDSGVGDVTGFLALDNTNKQIVLSFRGSRSIENWIGNLNFDLKEINDICSGCRGHDGFTSSWRSVADTLRQKVEDAVREHPDYRVVFTGHSLGGALATVAGADLRGNGYDIDVFSYGAPRVGNRAFAEFLTTQTGGTLYRITHTNDIVPRLPPREFGYSHSSPEYWIKSGTLVPVTRNDIVKIEGIDATGGNNQPNIPDIPAHLWYFGQIGTC

SEQ ID NO: 13360 - protein, 268 aa, Thermomyces lanuginosus
EVSQDLFNQFNLFAQYSAAAYCGKNNDAPAGTNITCTGNACPEVEKADATFLYSFEDSGVGDVTGFLALDNTNKQIVLSFRGSRSIENWIGNLRFDLKEINDICSGCRGHDGFTSSWRSVADTLRQKVEAAVREHPDYRVVFTGHSLGGALATVAWADLRGNGYDIDVFSYGAPRVGNRAFAEFLTTQTGGTLYRITHTNDIVPRLPPREFGYSHSSPEYWIKSGTLVPVTRNDIVKIEGIDATGGNNQPNIPDIPAHLWYFGLIGTC

SEQ ID NO: 13361 - protein, 268 aa, Thermomyces lanuginosus
EVSQDLFNQFNLFAQYSAAAYCGKNNDAPAGTNITCTGNACPEVEKADATILYSFEDSGVGDVTGFLALDNTNKLIVLSFRGSRSIENWIGNLNFDLKEINDICSGCRGHDGFTSSWRSVADTLRQKVEDAVREHPDYRVVFTGHSLGGALATVAGADLRGNGYDIDVFSYGAPRVGNRAFAEFLTVQTGGTLYRITSTNDIVPRLPPREFGYSHSSPEYWIKSGTLPPVRRRDIVKIEGIDATGGNNQPNIPDIPAHLWYFGLIGTC

SEQ ID NO: 13362 - protein, 268 aa, Thermomyces lanuginosus
EVSQDLFNQFNLFAQYSAAAYCGANNDAPAGTNITCTGNACPEVEKADATFLYSFEDSGVGDVTGFLALDNTNKLIVLSFRGSRSIENWIGNLRFDLKEINDICSGCRGHDGFTSSWRSVADTLRQKVEDAVREHPDYRVVFTGHSLGGALATIAWADLRGNGYDIDVFSYGAPRVGNRAFAEFLTVQQGGTLYRITHTNDIVPRLPPREFGYSHSSPEYWIKSGTLVPVTRNDIVKIEGIDATGGNNQPNIPDIPAHLWYFGRIGTC

SEQ ID NO: 13363 - protein, 268 aa, Thermomyces lanuginosus
EVSQDLFNQFNLFAQYSAAAYCQKNNSAPAGTNITCTGNACPEVEKADATTLYSFEDSGVGDVTGFLALDNTNKQIVLSFRGSRSIENWIGNLNFDLKEINDICSGCRGHDGFTSSWRSVADTLRQKVEDAVREHPDYRVVFTGHSLGGALATVAGADLRGNGYDIDVFSYGAPRVGNRAFAEFLTTQTGGTLYRITHTNDIVPRLPPREFGYSHSSPEYWIKSGTLVPVTRNDIVKIEGIDATGGNNQPNIPDIPAHLWYFGRIGTC

SEQ ID NO: 13364 - protein, 268 aa, Thermomyces lanuginosus
EVSQDLFNQFKLFAQYSAAAYCQKNNDAPAGTNITCTGNACPEVEKADATFLYSFEDSGVGDVTGFLALDNTNKQIVLSFRGSRSIENWIGNLRFDLKEINDICSGCRGHDGFTSSWRSVADTLRQKVEAAVREHPDYRVVFTGHSLGGALATVAGADLRGNGYDIDVFSYGAPRVGNRAFAEFLTVQTGGTLYRITHTNDIVPRLPPREFGYSHSSPEYWIKSGTLVPVTRNDIVKIEGIDATGGNNQPNIPDIPAHLWYFGRIGTC

SEQ ID NO: 13365 - protein, 268 aa, Thermomyces lanuginosus
EVSQDLFNQFNLFAQYSAAAYCQKNNSAPAGTNITCTGNACPEVEKADATFLYSFEDSGVGDVTGFLALDNTNKRIVLSFRGSRSIENWIGNLNFDLKEINDICSGCRGHAGFTSSWRSVADTLRQKVEDAVREHPDYRVVFTGHSLGGALATVAGADLRGNGYDIDVFSYGAPRVGNRAFAEFLTNQTGGTLYRITHTNDIVPRLPPREFGYSHSSPEYWIKSGTLVPVTRNDIVKIEGIDATGGNNQPNIPDIPAHLWYFGRIGTC

SEQ ID NO: 13366 - protein, 268 aa, Thermomyces lanuginosus
EVSQDLFNQFNLFAQYSKAAYCGKNNDAPAGTNITCTGNACPEVEKADATFLYSFEDSGVGDVTGFLALDNTNKQIVLSFRGSRSIENWIGNLNFDLKEINDICSGCRGHAGFTSSWRSVADTLRQKVEDAVREHPDYRVVFTGHSLGGALATIAGADLRGNGYDIDVFSYGAPRVGNRAFAEFLTVQQGGTLYRITHTNDIVPRLPPREFGYSHSSPEYWIKSGTLVPVTRNDIVKIEGIDATGGNNQPNIPDIPAHLWYFGRIGTC

SEQ ID NO: 13367 - protein, 268 aa, Thermomyces lanuginosus
EVSQDLFNQFNLFAQYSAAAYCGKNNDAPAGTQITCTGHACPEVEKADATFLYSFEDSGVGDVTGFLALDNTNKLIVLSFRGSRSIENWIGNLNFDLKEINDICSGCRGHDGFTSSWRSVADTLRQKVEDAVREHPDYRVVFTGHSLGGALATVAGADLRGNGYDIDVFSYGAPRVGNRAFAEFLTVQTGGTLYRITHTNDIVPRLPPREFGYSHSSPEYWIKSGTLVPVRRRDIVKIEGIDATGGNNQPNIPRIPAHLWYFGLIGTC

SEQ ID NO: 13368 - protein, 268 aa, Thermomyces lanuginosus
EVSQDLFNQFNLFAQYSKAAYCGANNDAPAGTNITCTGNACPEVEKADATFLYSFEDSGVGDVTGFLALDNTNKLIVLSFRGSRSIENWIGNLRFDLKEINDICSGCRGHDGFTSSWRSVADTLRQKVEAAVREHPDYRVVFTGHSLGGALATVAGADLRGNGYDIDVFSYGAPRVGNRAFAEFLTNQTGGTLYRITHTNDIVPRLPPREFGYSHSSPEYWIKSGTLVPVTRNDIVKIEGIDATGGNNQPNIPDIPAHLWYFGLIGTC

SEQ ID NO: 13369 - protein, 268 aa, Thermomyces lanuginosus
EVSQDLFNQFNLFAQYSAAAYCGKNNEAPAGTNITCTGNACPEVEKADATFLYSFEDSGVGDVTGFLALDNTNKLIVLSFRGSRSIENWIGNLNFDLKEINDICSGCRGHDGFTSSWRSVADTLRQKVEAAVREHPQYRVVFTGHSLGGALATVAGADLRGNPYDIDVFSYGAPRVGNRAFAEFLTVQTGGTLYRITHTNDIVPRLPPREFGYSHSSPEYWIKSGTMVPVTRNDIVKIEGIDATGGNNQPNIPDIPAHLWYFGRIGTC

SEQ ID NO: 13370 - protein, 268 aa, Thermomyces lanuginosus
EVSRDLFNQFNLFAQYSAAAYCGKNNDAPAGTNITCTGNACPEVEKADATILYSFEDSGVGDVTGFLALDNTNKLIVLSFRGSRSIENWIGNLNFDLKEINDICSGCRGHDGFTSSWRSVADTLRQKVEDAVREHPDYRVVFTGHSLGGALATVAGADLRGNGYDIDVFSYGAPRVGNRAFAEFLTVQTGGTLYRITHTNDIVPRLPPREFGYSHSSPEYWIKSGTLRPVRRRDIVKIEGIDATGGNNQPNIPDIPAHLWYFGLIGTC

SEQ ID NO: 13371 - protein, 268 aa, Thermomyces lanuginosus
EVSQDLFNQFNLFAQYSAAAYCGKNNDAPAGTQITCTGNACPEVEKADATFLYSFEDSGVGDVTGFLALDNTNKLIVLSFRGSRSIENWIQNLNFDLKEINDICSGCRGHDGFTSSWRSVADTLRQKVEDAVREHPDYRVVFTGHSLGGALATVAGADLRGNGYDIDVFSYGAPRVGNRAFAEFLTVQTGGTLYRITHTNDIVPRLPPRQFGYSHSSPEYWIKSGTLVPVRRRDIVKIEGIDATGGNNQPNIPDGPAHLWYFGLIGTC

SEQ ID NO: 13372 - protein, 268 aa, Thermomyces lanuginosus
EVSQDLFNQFNLFAQYSAAAYCGKNNDAPAGTNITCTGNACPEVEKADATFLYSFRDSGVGDVTGFLALDNTNKLIVLSFRGSRSIENWIGNLNFDLIEINDICSGCRGHDGFTSSWFSVADTLRQKVEDAVREHPDYRVVFTGHSLGGALATVAGADLRGNGYDIDVFSYGAPRVGNRAFAEFLTVQTGGTLYRITHTNDIVPRLPPREFGYSHSSPEYWIKSGTLVPVRRRDIVKIEGIDATGGNNQPNIPDIPAHLWYFGLIGTC

SEQ ID NO: 13373 - protein, 268 aa, Thermomyces lanuginosus
EVSQDLFNQFNLFAQYSAAAYCGKNNEAPAGTNITCTGNACPEVEKADATFLYSFKDMGVGDVTGFLALDNTNKLIVLSFRGSRSIENWIGNLNFDLKEINDICSGCRGHDGFTSSWRSVADTLRQKVEDAVREHPDYRVVFTGHSLGGALATVAGADLRGNGYDIDVFSYGAPRVGNRAFAEFLTTQTGGTLYRITHTNDIVPRLPPREFGYSHSSPEYWIKSGTLVPVTRNDIVKIEGIDATGGNNQPNQPDIPAHLWYFGRIGTC

SEQ ID NO: 13374 - protein, 268 aa, Thermomyces lanuginosus
EVSQDLFNQFNLFAQYSAAAYCKANNDAPAGTNITCTGNACPEVEKADATFLYSFEDSGVGDVTGFLALDNTNKLIVLSFRGSRSIENWIGNLNFDLKEINDICSGCRGHAGFTSSWRSVADTLRQKVEDAVREHPDYRVVFTGHSLGGALATVAWADLRGNGYDIDVFSYGAPRVGNRAFAEFLTVQQGGTLYRITHTNDIVPRLPPREFGYSHSSPEYWIKSGTLVPVTRNDIVKIEGIDATGGNNQPNIPDIPAHLWYFGLIGTC

SEQ ID NO: 13375 - protein, 268 aa, Synthetic construct
EVSQDLFNQFNLFAQYSAAAYCGKNNDAPAGTNITCTGNACPEVEKADATFLYSFEDSGVGDVTGFLALDNTNKLIVLSFRGSRSIKNWIANLNFRLKEVNDICSGCRGHDGFTSSWRSVADTLRQKVKDAVREHPDYRVVFTGHSLGGALATVAGADLRGNGYDIDVFSYGAPRVGNRAFAEFLTVQTGGTLYRITHTNDIVPRLPPREFGYSHSSPEYWIKSGTLVPVTRNDIVMIEGIDATGGNNQPNLPDITAHLWYFAQIGTC

SEQ ID NO: 13376 - protein, 268 aa, Thermomyces lanuginosus
EVSQDLFNQFNLFAQYSAAAYCGKNNEAPAGTNITCTGNACPEVEKAQATFLYSFEDSGVGDVTGFLALDNTNKLIVLSFRGSRSIENWIGNLNFDLKEINDICSGCRGHDGFTSSWRSVADTLRQKVEDAVREHPDQRVVFTGHSLGGALATVAGADLRGNPYDIDVFSYGAPRVGNRAFAEFLTVQTGGTLYRITHTNDIVPRLPPREFGYSHSSPEYWIKSGTMVPVTRNDIVKIEGIDATGGNNQPNIPDIPAHLWYFGRIGTC

SEQ ID NO: 13377 - protein, 268 aa, Thermomyces lanuginosus
EVSQDLFNQFNLFAQYSAAAYCQKNNDAPAGTNITCTGNACPEVPKADATFLYSFEDSGVGDVTGFLALDNTNKQIILSFRGSRSIENWIGNLNFDLKEINDICSGCRGHDGFTSSWRSVADTLRQKVEDAVREHPDYRVVFTGHSLGGALATVAGADLRGNGYDIDVFSYGAPRVGNRAFAEFLTTQTGGTLYRITHTNDIVPRLPPREFGYSHSSPEYWIKSGTLVPVTRNDIVKIEGIDATGGNNQPNIPDIPAHLWYFGLIGTC

SEQ ID NO: 13378 - protein, 268 aa, Thermomyces lanuginosus
EVSRDLFNQFNLFAQYSAAAYCGKNNDAPAGTNITCTGNACPEVEKADATFLYSFEDSGVGDVTGFLALDNTNKLIVLSFRGSRSIENWIGNLNFDLKEINDICSGCRGHDGFTSSWRSVADTLRQKVEDAVREHPDYRVVFTGHSLGGALATVAGADLRGDGYDIDVFSYGAPRVGNRAFAEFLTVQTGGTLYRITHTNDIVPRLPPREFGYSHSSPEYWIKSGTLRPVRRRDIVKIEGIDATGGNNQPNIPDIPAHLWYFGLIGTC

SEQ ID NO: 13379 - protein, 268 aa, Thermomyces lanuginosus
EVSQDLFNQFKLFAQYSAAAYCGKNNQAPAGTNITCTGNACPEVEKADATFLYSFMDSGVGDVTGFLALDNTNKLIVLSFRGSRSIENWIGNLNFDLKEINDICSGCRGHDGFTSSWRSVADTLRQKVEDAVREHPDYRVVFTGHSLGGALATVAGADLRGNGYDIDVFSYGAPRVGNRAFAEFLTVQTGGTLYRITHTNDIVPRLPPREFGYSHSSPEYWIKSGTLVPVTRQDIVKIEGIDATGGNNQPNIPDITAHLWYFGLIGTC

SEQ ID NO: 13380 - protein, 268 aa, Thermomyces lanuginosus
EVSQDLFNQFNLFAQYSAAAYCGKNNDAPAGTNITCTGNACPEVEKAQATFLYSFEDSGVGDVTGFLALDNTNKLIVLSFRGSRMIENWIGNLNFDLKEINDICSGCRGHDGFTSSWRSVADTLRQKVEAAVREHPDYRVVFTGHSLGGALATVAGADLRGNPYDIDVFSYGAPRVGNRAFAEFLTVQTGGTLYRITHTNDIVPRLPPREFGYSHSSPEYWIKSGTLVPVTRQDIVKIEGIDATGGNNQPNIPDIPAHLWYFGRIGTC

SEQ ID NO: 13381 - protein, 268 aa, Thermomyces lanuginosus
EVSQDLFNQFNLFAQYSAAAYCGKNNDAPAGTQITCTGNACPEVEKADATFLYSFEDSGVGDVTGFLALDNTNKLIVLSFRGSRSIENWIGNLNFDLKEINDICSGCRGHDGFTSSIRSVADTLRQKVEDAVREHPDYRVVFTGHSLGGALATVAGADLRGNGYDIDVFSYGAPRQGNRAFAEFLTVQTGGTLYRITHTNDIVPRLPPREFGYSHSSPEYWIKSGTLVPVRRRDIVKIEGIDATGGNNQPNIPDIPAHLWYFGLIGTC

SEQ ID NO: 13382 - protein, 268 aa, Thermomyces lanuginosus
EVSQDLFNQFNLFAQYSAAAYCGKNNDAPAGTNITCTGNACPEVEKADATILYSFEDSGVGDVTGFLALDNTNKLIVLSFRGSRSIENWIGNLNFDLKEINDICSGCRGHDGFTSSWRSVADTLRQKVEDAVREHPDYRVVFTGHSLGGALATVAGADLRGDGYDIDVFSYGAPRVGNRAFAEFLTVQTGGTLYRITHTNDIVPRLPPREFGYSHSSPEYWIKSGTLPPVRRRDIVKIEGIDATGGNNQPNIPDIPAHLWYFGLIGTC

SEQ ID NO: 13383 - protein, 268 aa, Thermomyces lanuginosus
EVSQDLFNQFNLFAQYSAAAYCGKNNDAPAGTNITCTGNACPEVEKADATILYSFEDSGVGDVTGFLALDNTNKLIVLSFRGSRSIENWIGNLNFDLKEINDICSGCRGHDGFTSSWRSVADTLRQKVEDAVREHPDYRVVFAGHSLGGALATVAGADLRGDGYDIDVFSYGAPRVGNRAFAEFLTVQTGGTLYRITHTNDIVPRLPPREFGYSHSSPEYWIKSGTLVPVRRRDIVKIEGIDATGGNNQPNIPDIPAHLWYFGLIGTC

SEQ ID NO: 13384 - protein, 268 aa, Thermomyces lanuginosus
EVSQDLFNQFNLFAQYSAAAYCGKNNDAPAGTQITCTNNACPEVEKADATFLYSFEDSGVGDVTGFLALDNTQKLIVLSFRGSRSIENWIGNLNFDLKEINDICSGCRGHDGFTSSWRSVADTLRQKVEDAVREHPDYRVVFTGHSLGGALATVAGADLRGNGYDIDVFSYGAPRVGNRAFAEFLTVQTGGTLYRITHTNDIVPRLPPREFGYSHSSPEYWIKSGTLVPVRRRDIVKIEGIDATGGNNQPNIPDIPAHLWYFGLIGTC

SEQ ID NO: 13385 - protein, 268 aa, Thermomyces lanuginosus
EVSQDLFNQFNLFAQYSKAAYCQKNNDAPAGTNITCTGNACPEVEKADVTFLYSFEDSGVGDVTGFLALDNTNKQIILSFRGSRSIENWIGNLNFDLKEINDICSGCRGHDGFTSSWRSVADTLRQKVEDAVREHPDYRVVFTGHSLGGALATVAGADLRGNGYDIDVFSYGAPRVGNRAFAEFLTVQTGGTLYRITHTNDIVPRLPPREFGYSHSSPEYWIKSGTLVPVTRNDIVKIEGIDATGGNNQPNIPDIPAHLWYFGLIGTC

SEQ ID NO: 13386 - protein, 268 aa, Thermomyces lanuginosus
EVSQDLFNQFNLFAQYSAAAYCGKNNDAPAGTNITCTGNACPEVEKADATFLYSFEDSGVGDVTGFLALDNTNKLIVLSFRGSRSIENWIGNLNFDLKEINDICSGCRGHDGFTSSWRSVADTLRQKVEDAVREHPDYRVVFAGHSLGGALATVAGADLRGNGYDIDVFSYGAPRVGNRAFAEFLTVQTGGTLYRITSTNDIVPRLPPREFGYSHSSPEYWIKSGTLRPVRRRDIVKIEGIDATGGNNQPNIPDIPAHLWYFGLIGTC

SEQ ID NO: 13387 - protein, 268 aa, Thermomyces lanuginosus
EVSQDLFNQFNLFAQYSAAAYCGKNNSAEAGTDITCTGNACPEVFKADATFLYSFEDSGVGDVTGFLALDNTRKLIVLSFRGSRSIENWIGNLNFDLKEINDICSGCRGHDGFTSSWRSVADTLRQKVEDAVREHPDYRVVFTGHSLGGALATVAGADLRGNGYDIDVFSYGAPRVGNRAFAEFLTVQTGGTLYRITHTNDIVPRLPPREFGYSHSSPEYWIKSGTLVPVTRNDIVKIEGIDATGGNNQPNIPDIPAHLWYFGLIGTC

SEQ ID NO: 13388 - protein, 268 aa, Thermomyces lanuginosus
EVSQDLFNQFNLFAQYSAAAYCQKNNDAPAGTNITCTGNACPEVEKADATFLYSFEDSGVGDVTGFLALDNTNKGIVLSFRGSRSIENWIQNLNFDLKEINDICSGCRGHDGFTSSWRSVADTLRQKVEAAVREHPDYRVVFTGHSLGGALATVAGADLRGNGYDIDVFSYGAPRVGNRAFAEFLTTQTGGTLYRITHTNDIVPRLPPREFGYSHSSPEYWIKSGTLVPVTRNDIVKIEGIDATGGNNQPNQPDIPAHLWYFGRIGTC

SEQ ID NO: 13389 - protein, 268 aa, Thermomyces lanuginosus
EVSQDLFNQFNLFAQYSAAAYCGKNNDAPAGTNITCTGNACPEVEKAQATFLYSFEDSGVGDVTGFLALDNTNKLIVLSFRGSRSIENWIGNLNFDLKEINDICSGCRGHDGFTSSWRSVADTLRQKVEDAVREHPQYRVVFTGHSLGGALATVAGADLRGNPYDIDVFSYGAPRVGNRAFAEFLTVQTGGTLYRITHTNDIVPRLPPREFGYSHSSPEYWIKSGTMVPVTRQDIVKIEGIDATGGNNQPNIPDIPAHLWYFGRIGTC

SEQ ID NO: 13390 - protein, 268 aa, Thermomyces lanuginosus
EVSQDLFNQFNLFAQYSAAAYCGKNNDAPAGTNITCTGNACPEVEKADATTLYSFEDSGVGDVTGFLALDNTNKRIVLSFRGSRSIENWIQNLNFDLKEINDICSGCRGHDGFTSSWRSVADTLRQKVEAAVREHPDYRVVFTGHSLGGALATVAGADLRGNGYDIDVFSYGAPRVGNRAFAEFLTTQTGGTLYRITHTNDIVPRLPPREFGYSHSSPEYWIKSGTLVPVTRNDIVKIEGIDATGGNNQPNQPDIPAHLWYFGRIGTC

SEQ ID NO: 13391 - protein, 268 aa, Thermomyces lanuginosus
EVSQDLFNQFNLFAQYSAAAYCGKNNDAPAGTQITCTGNACPEVEKADATFLYSFEDSGVGDVTGFLALDNTNKLIVLSFRGSRSIENWIGNLNFDLKEINDICSGCRGHDGFTSSWRSVADTLRQKVEDAVREHPDYRVVFTGHSLGGALATVAGADLRGNGYDIDVFSYGAPRVGNRAFAEFLTVQTGGTLYRITHTNDIVPRLPPREFGYSHSSPEYWIKSGTFVPVRRRDIVKIEGIDATGGNNQPNIPSIPAHLWYFGLIGTC

SEQ ID NO: 13392 - protein, 268 aa, Thermomyces lanuginosus
EVSQDLFNQFNLFAQYSAAAYCGKNNDAPAGTNITCTGNACPEVEKAQATFLYSFEDMGVGDVTGFLALDNTNKLIVLSFRGSRSIENWIGNLNFDLKEINDICSGCRGHDGFTSSWRSVADTLRQKVEDAVREHPQYRVVFTGHSLGGALATVAGADLRGNPYDIDVFSYGAPRVGNRAFAEFLTVQTGGTLYRITHTNDIVPRLPPREFGYSHSSPEYWIKSGTMVPVTRNDIVKIEGIDATGGNNQPNIPDIPAHLWYFGRIGTC

SEQ ID NO: 13393 - protein, 268 aa, Thermomyces lanuginosus
EVSQDLFNQFNLFAQYSAAAYCGKNNDAPAGTNITCTGNACPEVEKADATFLYSFEDSGVGDVTGFLALDNTNKQIVLSFRGSRSIENWIGNLNFDLKEINDICSGCRGHAGFTSSWRSVADTLRQKVEAAVREHPDYRVVFTGHSLGGALATVAGADLRGNGYDIDVFSYGAPRVGNRAFAEFLTTQQGGTLYRITHTNDIVPRLPPREFGYSHSSPEYWIKSGTLVPVTRNDIVKIEGIDATGGNNQPNIPDIPAHLWYFGLIGTC

SEQ ID NO: 13394 - protein, 268 aa, Thermomyces lanuginosus
EVSQDLFNQFNLFAQYSAAAYCGKNNDAPAGTQITCTGNACPEVEKADATFLYSFEDSGVGDVTGFLALDNTNKLIVLSFRGSRSIENWIGNLNFNLKEINDICSGCRGHDGFTSSWRSVADTLRQKVEDAVREHPDYRVVFTGHSLGGALATVARADLRGNGYDIDVFSYGAPRWGNRAFAEFLTVQTGGTLYRITHTNDIVPRLPPREFGYSHSSPEYWIKSGTLVPVRRRDIVKIEGIDATGGNNQPNIPDIPAHLWYFGLIGTC

SEQ ID NO: 13395 - protein, 268 aa, Thermomyces lanuginosus
EVSQDLFNQFNLFAQYSAAAYCGKNNRAPAGTQITCTGNACPEVEKADATFLYSFEDSGVGDVTGFLALDNTNKLIVLSFRGSRSIENWIGNLNFDLKEINDICSGCRGHDGFTSSWRSVADTLRQKVEDAVREHPDYRVVFTGHSLGGALATVAGADLRGNGYDIDVFSYGAPRVGNRAFAEFLTVQTGGTLYRITHTNDIVPRLPPREFGYSHSSPEYWIKSGTGVPVRRRDIVKIEGIDATGGNNQPNIPDIPAHLWYFGLIGTC

SEQ ID NO: 13396 - protein, 268 aa, Thermomyces lanuginosus
EVSQDLFNQFNLFAQYSAAAYCGKNNDAPAGTQITCTGNACPEVEKADATFLYSFEDSGVGDVTGFLALDNTNKLIVLSFRGSRSIENWITNLNFDLKEINDICSGCRGHDGFTSSWRSVADTLRQKVEDAVREHPDYRVVFTGHSLGGALATVAGADLRGNKYDIDVFSYGAPRVGNRAFAEFLTVQTGGTLYRITHTNDIVPRLPPREFGYSHSSPEYWIKSGTLVPVRRRDIVKIEGIDATGGNNQPNIPSIPAHLWYFGLIGTC

SEQ ID NO: 13397 - protein, 268 aa, Thermomyces lanuginosus
EVSQDLFNQFNLFAQYSAAAYCGKNNDAPAGTNITCTGNACPEVEKADATFLYSFEDSGVGDVTGFLALDNTNKLIVLSFRGSRSIENWIGNLNFDLKEINDICSGCRGHDGFTSSWRSVADTLRQKVEDAVREHPDYRVVFTGHSLGGGLATVAGADLRGNGYDIDVFSYGAPRVGNRAFAEFLTVQTGGTLYRITHTNDIVPRLPPRQFGYSHSSPEYWIKSGTLVPVRRRDIVKIEGIDATGGNNQPNIPDAPAHLWYFGLIGTC

SEQ ID NO: 13398 - protein, 268 aa, Thermomyces lanuginosus
EVSQDLFNQFNLFAQYSKAAYCKANNDAPAGTNITCTGNACPEVEKADATFLYSFEDSGVGDVTGFLALDNTNKLIVLSFRGSRSIENWIGNLNFDLKEINDICSGCRGHDGFTSSWRSVADTLRQKVEAAVREHPDYRVVFTGHSLGGALATIAGADLRGNGYDIDVFSYGAPRVGNRAFAEFLTVQTGGTLYRITHTNDIVPRLPPREFGYSHSSPEYWIKSGTLVPVTRNDIVKIEGIDATGGNNQPNIPDIPAHLWYFGLIGTC

SEQ ID NO: 13399 - protein, 268 aa, Thermomyces lanuginosus
EVSQDLFNQFNLFAQYSAAAYCGKNNVAPAGTQITCTGNACPEVEKADATFLYSFEDSGSGDVTGFLALDNTNKLIVLSFRGSRSIENWIGNLNFWLKEINDICSGCRGHDGFTSSWRSVADTLRQKVEDAVREHPDYRVVFTGHSLGGALATVAGADLRGNGYDIDVFSYGAPRVGNRAFAEFLTVQTGGTLYRITHTNDIVPRLPPREFGYSHSSPEYWIKSGTLVPVRRRDIVKIEGIDATGGNNRPNIPDIPAHLWYFGLIGTC

SEQ ID NO: 13400 - protein, 268 aa, Thermomyces lanuginosus
EVSQDLFNQFNLFAQYSAAAYCGKNNDAPAGTQITCTGNACPEVEKADATFLYSFEDSGVGDVTGFLALDNTNKLIVLSFRGSRSIENWIGNLKFLLKEINDICSGCRGHDGFTSSWRSVADTLRQKVEDAVREHPDYRVVFTGHSLGGALATVAGADLRGNGYDIDVFSYGAPRVGNRAFAEFLTVQTGGTLYRITHTNDIVPRLPPREFGYSHSSPEYWIKSGTLVPVRRRDIVKIEGIDATGGNNRPNIPDIPAHLWYFGLIGTC

SEQ ID NO: 13401 - protein, 268 aa, Thermomyces lanuginosus
EVSQDLFNQFNLFAQYSAAAYCGKNNDAPAGTQITCTGNACPEVEKADATFLYSFEDSGVGDVTGFLALDNTNKLIVLSFRGSRSIENWIGNLNFDLKNISDICSGCRGHDGFTSSWRSVADTLRQKVEDAVREHPDYRVVFTGHSLGGALATVAGADLRGNGYDIDVFSYGAPRVGNRAFAEFLTVQTGGTLYRITHTNDIVPRLPPREFGYSHSSPEYWIKSGTLVPVRRRDIVKIEGIDATGGNNRPNIPDIPAHLWYFGLIGTC

SEQ ID NO: 13402 - protein, 268 aa, Thermomyces lanuginosus
EVSQDLFNQFNLFAQYSAAAYCGCNNDAPAGTQITCTGNACPEVEKADATFLYSFEDSGVGDVTGFLALDNTNKLIVLSFRGSRSIENWIGNLNFSLKEINDICSGCRGHDGFTSSWRSVADTLRQKVEDAVREHPDYRVVFTGHSLGGALATVAGADLRGNGYDIDVFSYGAPRVGNRAFAEFLTVQTGGTLYRITHTNDIVPRLPPREFGYSHSSPEYWIKSGTLVPVRRRDIVKIEGIDATGGNNRPNIPDIPAHLWYFGLIGTC

SEQ ID NO: 13403 - protein, 268 aa, Thermomyces lanuginosus
EVSQDLFNQFNLFAQYSAAAYCGKNNDAPAGTNITCTGNACPEVEKADATFLYSFEDSGVGDVTGFLALDNTNKLIVLSFRGSRSIENWIGNLNFDLKEINDICSGCRGHDGFTSSWRSVADTLRQKVEDAVREHPDYRVVFTGHSLGGGLATVAGADLRGNGYDIDVFSYGAPRVGNRAFAEFLTVQTGGTLYRITHTNDIVPRLPPREFGYSHSSPEYWIKSGTGVPVRRRDIVKIEGIDATGGNNQPNIPDIKAHLWYFGLIGTC

SEQ ID NO: 13404 - protein, 268 aa, Thermomyces lanuginosus
EVSQDLFNQFNLFAQYSAAAYCGKNNDAPAGTNITCTGNACPEVEKADATFLYSFEDNGSGDVTGFLALDNTNKLIVLSFRGSRSIENWIGNLNFDLKEINDICSGCRGHDGFTSSWRSVADTLRQKVEDAVREHPDYRVVFTGHSLGGALATVAGANLRGNGYDIDVFSYGAPRVGNRAFAEFLTVQTGGTLYRITHTNDIVPRLPPREFGYSHSSPEYWIKSGTLVPVRRRDIVKIEGIDATGGNNQPNIPDIPAHLWYFGLIGTC

SEQ ID NO: 13405 - protein, 268 aa, Thermomyces lanuginosus
EVSQDLFNQFNLFAQYSAAAYCGKNNDAPAGTNITCTGNACPEVEKADATFLYSFEDSGVGCVTGFLALDNTNKLIVLSFRGSRSPCNWIANLDFIFDEINDICSGCRGHDGFTSSWRSVADTLRQKVEDAVREHPDYRVVFTGHSLGGALATVAGADLRGNGYDIDVFSYGAPRVGNRAFAEFLTVQTGGTLYRITHTNDIVPRLPPREFGYSHSSPEYWIKSGTLVPVTRNDIVKIEGIDATGGNNQPNIPDIPAHLWYFGLIGTC

SEQ ID NO: 13406 - protein, 268 aa, Thermomyces lanuginosus
EVSQDLFNQFNLFAQYSAAAYCGKNNDAPAGTNITCTGNACPEVEKADATFLYSFEDAGAGDVTGFLALDNTNKLIVLSFRGSRSVENWIGNLNFDLKEINDICSGCRGHDGFTSSWRSVADTLRQKVEDAVREHPDYRVVFTGHSLGGALATVAGADLRGNGYDIDVFSYGAPRVGNRAFAEFLTVQTGGTLYRITHTNDIVPRLPPREFGYSHSSPEYWIKSGTLVPVRRRDIVKIEGIDATGGNNQPNIPDIPAHLWYFGLIGTC

SEQ ID NO: 13407 - protein, 269 aa, Synthetic construct
EVSQDLFNQFNLFAQYSAAAYCGKNNDAPAGTNITCTGNACPEVEKADATFLYSFEGSVVGDVTGFLALDNTNKLIVLSFRGSRSIENWIGNLNFLMKEINDICSGCRGHDGFTSPWRSVADTLRQKVEDAVREHPDYRVVFTGHSLGGALATVAGADLRGNGYDIDVFPYGAPRVGNRAFAEFLTVQTGGTLYRITHTNDIVPRLPPREFGYSHSSPEYWIKSGTLVPVTRNDIVKIEGIDATGGNRNQPNIPDIPAHLWYFGLIGTC

SEQ ID NO: 13408 - protein, 268 aa, Thermomyces lanuginosus
EVSQDLFNQFNLFAQYSAAAYCGKNNDAPAGTNITCTGNACPEVEKADATFLYSFRDSGVGDVTGFLALDNTNKLIVLSFRGTRSIENWIADLNFVLKEINDICSGCRGHDGFTSSWFSVADTLRQKVEDAVREHPDYRVVFTGHSLGGALATVAGADLRGNGYDIDVFSYGAPRVGNRAFAEFLTVQTGGTLYRITHTNDIVPRLPPREFGYSHSSPEYWIKSGTLVPVRRRDIVKIEGIDATGGNNQPNIPSIPAHLWYFGAIGTC

SEQ ID NO: 13409 - protein, 267 aa, Thermomyces lanuginosus
VSQDLFNQFNLFAQYSAAAYCGKNNDAPAGTNITCTGNACPEVEKADATFLYSFEDSGVGDVTGFLALDNTNKLIVLSFRGSRSIENWIGNLNFDLKEINDICSGCRGHDGFTSSWRSVADTLRQKVEDAVREHPDYRVVFAGHSLGGALATVAGADLRGNGYDIDVFSYGAPRVGNRAFAEFLTVQTGGTLYRITNTNDIVPRLPPREFGYSHSSPEYWIKSGTLPPVRRCDIVKIEGIDATGGNNQPNIPDIPAHLWYFGLIGTC

SEQ ID NO: 13410 - protein, 267 aa, Thermomyces lanuginosus
VSQDLFNQFNLFAQYSAAAYCGKNNDAPAGTNITCTGNACPEVEKADATILYSFEDSGVGDVTGFLALDNTNKLIVLSFRGSRSIENWIGNLNFDLKEINDICSGCRGHDGFTSSWRSVADTLRQKVEDAVREHPDYRVVFAGHSLGGALATVAGADLRGNGYDIDVFSYGAPRVGNRAFAEFLTVQTGGTLYRITSTNDIVPRLPPREFGYSHSSPEYWIKSGTLVPVRRCDIVKIEGIDATGGNNQPNIPDIPAHLWYFGLIGTC

SEQ ID NO: 13411 - protein, 267 aa, Thermomyces lanuginosus
VSQDLFNQFNLFAQYSAAAYCGKNNDAPAGTNITCTGNACPEVEKADATILYSFEDSGVGDVTGFLALDNTNKLIVLSFRGSRSIENWIGNLNFDLKEINDICSGCRGHDGFTSSWRSVADTLRQKVEDAVREHPDYRVVFTGHSLGGALATVAGADLRGNGYDIDVFSYGAPRVGNRAFAEFLTVQTGGTLYRITNTNDIVPRLPPREFGYSHSSPEYWIKSGTLVPVRRCDIVKIEGIDATGGNNQPNIPDITAHLWYFGLIGTC

SEQ ID NO: 13412 - protein, 267 aa, Synthetic construct
VSQDLFNQFNLFAQYSAAAYCGKNNDAPAGTNITCTGNACPEVEKADATFLCSFEGSGVGDVTGFLALDNTNKLIVLSFRGSRSIENWIGNLKFLLKEINDICSGCRGHDGFTSSWRSVADTLRQCVEDAVREHPDYRVVFTGHSLGGALATVAGADLRGNGYDIDVFSYGAPRVGNRAFAEFLTVQTGGTLYRITHTNDIVPRLPPREFGYSHSSPEYWIKSGTLVPVTRNDIVKIEGIDATGGNNRPNIPDIPAHLWYFGLIGTC

SEQ ID NO: 13413 - protein, 267 aa, Thermomyces lanuginosus
VSQDLFNQFNLFAQYSAAAYCGKNNDAPAGTNITCTGNACPEVEKADATFLYSFEDSGGGDVTGFLALDNTNKLIVLSFRGSRSIENWIGNLNFDLKNINDICSGCRGHDGFTSSWRGVADTLRQKVEDAVREHPDYRVVFTGHSLGGALATVAGADLRGNGYDIDVFSYGAPRVGNRAFAEFLTVQTGGTLYRITHTNDIVPRLPPPEFGYSHSSPEYWIKSGTLVPVTRNDIVKICGIDATGGNNRPNIPDIPAHLWYFGLIGTC

SEQ ID NO: 13414 - protein, 267 aa, Synthetic construct
VSQDLFNQFNLFAQYSAAAYCGKNNDAPAGTNITCTGNACPEVEKADATFLYSFEGSGVGDVTGFLALDNTNKLIVLSFRGSRSIENWIGNLKFLLKEINDICSGCRGHDGFTSSWRSVADTLRQKVEDAVREHPDYRVVFTGHSLGGALATVAGADLRGNGYDIDVFSYGAPRVGNRAFAEFLTVQTGGTLYRITHTRDIVPRLPPAEFGYSHSSPEYWIKSGTLVPVTRNDIVKIEGIDATGGNNRPNIPDIPAHLWYFGLIGTC

SEQ ID NO: 13415 - protein, 267 aa, Synthetic construct
VSQDLFNQFNLFAQYSAAAYCGKNNDAPAGTNITCTGNACPEVEKADATFLYSFEGSGVGDVTGFLALDNTNKLIVLSFRGSRSIENWIGNLKFLLKEINDICSGCRGHDGFTSSWRSVADTLRQKVEDAVREHPDYRVVFTGHSLGGALATVAGADLRGNGYDIDVFSYGAPRVGNRAFAEFLTVQTGGTLYRITHRNDIVPRLPPAEFGYSHSSPEYWIKSGTLVPVTRNDIVKIEGIDATGGNNRPNIPDIPAHLWYFGLIGTC

SEQ ID NO: 13416 - protein, 267 aa, Synthetic construct
VSQDLFNQFNLFAQYSAAAYCGKNNDAPAGTNITCTGNACPEVEKADATFLYSFEGSGVGDVTGFLALDNTNKLIVLSFRGSRSIENWIGNLKFLLKEINDICSGCRGHDGFTSSWRSVADTLRQKVEDAVREHPDYRVVFTGHSLGGALATVAGADLRGNGYDIDVFSYGAPRVGNRAFAEFLTVQTGGTLYRITHRRDIVPRLPPREFGYSHSSPEYWIKSGTLVPVTRNDIVKIEGIDATGGNNRPNIPDIPAHLWYFGLIGTC

SEQ ID NO: 13417 - protein, 266 aa, Thermomyces lanuginosus
SQDLFNQFNLFAQYSAAAYCGKNNDAPAGTKITCTGNACPEVEKADATLLYSFEDSGVGDVTGFLALDNTNKLIVLSFRGSRSIENWIGNLNFDLKEINDICSGCRGHDGFTSSWRSVADTLRQKVEDAVREHPDYRVVFAGHSLGGALATVAGADLRGNGYDIDVFSYGAPRVGNRAFAEFLTVQTGGTLYRITHTNDIVPRLPPREFGYSHSSPEYWIKSGTLVPVRRCDIVKIEGIDATGGNNQPNIPDIPAHLWYFGLIGTC

SEQ ID NO: 13418 - protein, 266 aa, Thermomyces lanuginosus
SQDLFNQFNLFAQYSAAAYCGKNNDAPAGTKITCTGNACPEVEKADATLLYSFEDSGVGDVTGFLALDNTNKLIVLSFRGSRSIENWIGNLNFDLKEINDICSGCRGHDGFTSSWRSVADTLRQKVEDAVREHPDYRVVFTGHSLGGALATVAGADLRGNGYDIDVFSYGAPRVGNRAFAEFLTVQTGGTLYRITNTNDIVPRLPPREFGYSHSSPEYWIKSGTLVPVRRCDIVKIEGIDATGGNNQPNIPDIPAHLWYFGLIGTC

SEQ ID NO: 13419 - protein, 266 aa, Thermomyces lanuginosus
SQDLFNQFNLFAQYSAAAYCGKNNDAPAGTKITCTGNACPEVEKADATILYSFEDSGVGDVTGFLALDNTNKLIVLSFRGSRSIENWIGNLNFDLKEINDICSGCRGHDGFTSSWRSVADTLRQKVEDAVREHPDYRVVFTGHSLGGALATVAGADLRGNGYDIDVFSYGAPRVGNRAFAEFLTVQTGGTLYRITHTNDIVPRLPPREFGYSHSSPEYWIKPGTLVPVRRCDIVKIEGIDATGGNNQPNIPDIPAHLWYFGLIGTC

SEQ ID NO: 13420 - protein, 266 aa, Thermomyces lanuginosus
SQDLFNQFNLFAQYSAAAYCGKNNDAPAGTKITCTGNACPEVEKADATLLYSFEDSGVGDVTGFLALDNTNKLIVLSFRGSRSIENWIGNLNFDLKEINDICSGCRGHDGFTSSWRSVADTLRQKVEDAVREHPDYRVVFTGHSLGGALATVAGADLRGNGYDIDVFSYGAPRVGNRAFAEFLTVQTGGTLYRITLTNDIVPRLPPREFGYSHSSPEYWIKSGTLVPVRRCDIVKIEGIDATGGNNQPNIPDIPAHLWYFGLIGTC

SEQ ID NO: 13421 - protein, 266 aa, Thermomyces lanuginosus
SQDLFNQFNLFAQYSAAAYCGKNNDAPAGTKITCTGNACPEVEKADATILYSFEDSGVGDVTGFLALDNTNKLIVLSFRGSRSIENWIGNLNFDLKEINDICSGCRGHDGFTSSWRSVADTLRQKVEDAVREHPDYRVVFTGHSLGGALATVAGADLRGNGYDIDVFSYGAPRVGNRAFAEFLTVQTGGTLYRITHTNDIVPRLPPREFGYSHSSPEYWIKSGTLVPVRRCDIVKIEGIDATGGNNQPNIPDIPIHLWYFGLIGTC

SEQ ID NO: 13422 - protein, 266 aa, Thermomyces lanuginosus
SQDLFNQFNLFAQYSAAAYCGKNNDAPAGTKITCTGNACPEVEKADATILYSFEDSGVGDVTGFLALDNTNKLIVLSFRGSRSIENWIGNLNFDLKEINDICSGCRGHDGFTSSWRSVADTLRQKVEDAVREHPDYRVVFTGHSLGGALATVAGADLRGNGYDIDVFSYGAPRVGNRAFAEFLTVQTGGTLYRITHTNDIVPRLPPREFGYSHSSPEYWIKSGTDVPVRRCDIVKIEGIDATGGNNQPNIPDIPAHLWYFGLIGTC

SEQ ID NO: 13423 - protein, 266 aa, Thermomyces lanuginosus
SQDLFNQFNLFAQYSAAAYCGKNNDAPAGTKITCTGNACPEVEKADATLLYSFEDSGVGDVTGFLALDNTNKLIVLSFRGSRSIENWIGNLNFDLKEINDICSGCRGHDGFTSSWRSVADTLRQKVEDAVREHPDYRVVFTGHSLGGALATVAGADLRGNGYDIDVFSYGAPRVGNRAFAEFLTVQTGGTLYRITHTNDIVPRLPPREFGYSHSSPEYWIKSGTLVPVRRCDIVKIEGIDATGGNNQPNIPDIPVHLWYFGLIGTC

SEQ ID NO: 13424 - protein, 266 aa, Thermomyces lanuginosus
SQDLFNQFNLFAQYSAAAYCGKNNDAPAGTKITCTGNACPEVEKADATILYSFEDSGVGDVTGFLALDNTNKLIVLSFRGSRSIENWIGNLNFDLKEINDICSGCRGHDGFTSSWRSVADTLRQKVEDAVREHPDYRVVFTGHSLGGALATVAGADLRGNGYDIDVFSYGAPRVGNRAFAEFLTVQTGGTLYRITITNDIVPRLPPREFGYSHSSPEYWIKSGTLVPVRRCDIVKIEGIDATGGNNQPNIPDIPAHLWYFGLIGTC

SEQ ID NO: 13425 - protein, 266 aa, Thermomyces lanuginosus
SQDLFNQFNLFAQYSAAAYCGKNNDAPAGTKITCTGNACPEVEKADATVLYSFEDSGVGDVTGFLALDNTNKLIVLSFRGSRSIENWIGNLNFDLKEINDICSGCRGHDGFTSSWRSVADTLRQKVEDAVREHPDYRVVFTGHSLGGGLATVAGADLRGNGYDIDVFSYGAPRVGNRAFAEFLTVQTGGTLYRITHTNDIVPRLPPREFGYSHSSPEYWIKSGTLVPVRRCDIVKIEGIDATGGNNQPNIPDIPAHLWYFGLIGTC

SEQ ID NO: 13426 - protein, 266 aa, Thermomyces lanuginosus
SQDLFNQFNLFAQYSAAAYCGKNNDAPAGTKITCTGNACPEVEKADATVLYSFEDSGVGDVTGFLALDNTNKLIVLSFRGSRSIENWIGNLNFDLKEINDICSGCRGHDGFTSSWRSVADTLRQKVEDAVREHPDYRVVFTGHSLGGALATVAGADLRGNGYDIDVFSYGAPRVGNRAFAEFLTVQTGGTLYRITHTNDIVPRLPPREFGYSHSSPEYWIKIGTLVPVRRCDIVKIEGIDATGGNNQPNIPDIPAHLWYFGLIGTC

SEQ ID NO: 13427 - protein, 266 aa, Thermomyces lanuginosus
SQDLFNQFNLFAQYSAAAYCGKNNDAPAGTKITCTGNACPEVEKADATILYSFEDSGVGDVTGFLALDNTNKLIVLSFRGSRSIENWIGNLNFDLKEINDICSGCRGHDGFTSSWRSVADTLRQKVEDAVREHPDYRVVFAGHSLGGALATVAGADLRGNGYDIDVFSYGAPRVGNRAFAEFLTVQTGGTLYRITHTNDIVPRLPPREFGYSHSSPEYWIKSGTLVPVRRCDIVKIEGIDATGGNNQPNIPDIPAHLWYFGLIGTC

SEQ ID NO: 13428 - protein, 266 aa, Thermomyces lanuginosus
SQDLFNQFNLFAQYSAAAYCGKNNDAPAGTKITCTGNACPEVEKADATVLYSFEDSGVGDVTGFLALDNTNKLIVLSFRGSRSIENWIGNLNFDLKEINDICSGCRGHDGFTSSWRSVADTLRQKVEDAVREHPDYRVVFTGHSLGGALATVAGADLRGNGYDIDVFSYGAPRVGNRAFAEFLTVQTGGTLYRITLTNDIVPRLPPREFGYSHSSPEYWIKSGTLVPVRRCDIVKIEGIDATGGNNQPNIPDIPAHLWYFGLIGTC

SEQ ID NO: 13429 - protein, 266 aa, Thermomyces lanuginosus
SQDLFNQFNLFAQYSAAAYCGKNNDAPAGTKITCTGNACPEVEKADATVLYSFEDSGVGDVTGFLALDNTNKLIVLSFRGSRSIENWIGNLNFDLKEINDICSGCRGHDGFTSSWRSVADTLRQKVEDAVREHPDYRVVFTGHSLGGALATVAGADLRGNGYDIDVFSYGAPRVGNRAFAEFLTVQTGGTLYRITYTNDIVPRLPPREFGYSHSSPEYWIKSGTLVPVRRCDIVKIEGIDATGGNNQPNIPDIPAHLWYFGLIGTC

SEQ ID NO: 13430 - protein, 266 aa, Thermomyces lanuginosus
SQDLFNQFNLFAQYSAAAYCGKNNDAPAGTKITCTGNACPEVEKADATILYSFEDSGVGDVTGFLALDNTNKLIVLSFRGSRSIENWIGNLNFDLKEINDICSGCRGHDGFTSSWRSVADTLRQKVEDAVREHPDYRVVFTGHSLGGALATVAGADLRGNGYDIDVFSYGAPRVGNRAFAEFLTVQTGGTLYRITYTNDIVPRLPPREFGYSHSSPEYWIKSGTLVPVRRCDIVKIEGIDATGGNNQPNIPDIPAHLWYFGLIGTC

SEQ ID NO: 13431 - protein, 266 aa, Thermomyces lanuginosus
SQDLFNQFNLFAQYSAAAYCGKNNDAPAGTKITCTGNACPEVEKADATILYSFEDSGVGDVTGFLALDNTNKLIVLSFRGSRSIENWIGNLNFDLKEINDICSGCRGHDGFTSSWRSVADTLRQKVEDAVREHPDYRVVFTGHSLGGGLATVAGADLRGNGYDIDVFSYGAPRVGNRAFAEFLTVQTGGTLYRITHTNDIVPRLPPREFGYSHSSPEYWIKSGTLVPVRRCDIVKIEGIDATGGNNQPNIPDIPAHLWYFGLIGTC

SEQ ID NO: 13432 - protein, 266 aa, Thermomyces lanuginosus
SQDLFNQFNLFAQYSAAAYCGKNNDAPAGTKITCTGNACPEVEKADATLLYSFEDSGVGDVTGFLALDNTNKLIVLSFRGSRSIENWIGNLNFDLKEINDICSGCRGHDGFTSSWRSVADTLRQKVEDAVREHPDYRVVFTGHSLGGALATVAGADLRGNGYDIDVFSYGAPRVGNRAFAEFLTVQTGGTLYRITHTNDIVPRLPPREFGYSHSSPEYWIKFGTLVPVRRCDIVKIEGIDATGGNNQPNIPDIPAHLWYFGLIGTC

SEQ ID NO: 13433 - protein, 266 aa, Thermomyces lanuginosus
SQDLFNQFNLFAQYSAAAYCGKNNDAPAGTKITCTGNACPEVEKADATVLYSFEDSGVGDVTGFLALDNTNKLIVLSFRGSRSIENWIGNLNFDLKEINDICSGCRGHDGFTSSWRSVADTLRQKVEDAVREHPDYRVVFTGHSLGGALATVAGADLRGNGYDIDVFSYGAPRVGNRAFAEFLTVQTGGTLYRITHTNDIVPRLPPREFGYSHSSPEYWIKSGTLVPVRRCDIVKIEGIDATGGNNQPNIPDGPAHLWYFGLIGTC

SEQ ID NO: 13434 - protein, 266 aa, Thermomyces lanuginosus
SQDLFNQFNLFAQYSAAAYCGKNNDAPAGTKITCTGNACPEVEKADATILYSFEDSGVGDVTGFLALDNTNKLIVLSFRGSRSIENWIGNLNFDLKEINDICSGCRGHDGFTSSWRSVADTLRQKVEDAVREHPDYRVVFTGHSLGGALATVAGADLRGNGYDIDVFSYGAPRVGNRAFAEFLTVQTGGTLYRITNTNDIVPRLPPREFGYSHSSPEYWIKSGTLVPVRRCDIVKIEGIDATGGNNQPNIPDIPAHLWYFGLIGTC

SEQ ID NO: 13435 - protein, 266 aa, Thermomyces lanuginosus
SQDLFNQFNLFAQYSAAAYCGKNNDAPAGTKITCTGNACPEVEKADATLLYSFEDSGVGDVTGFLALDNTNKLIVLSFRGSRSIENWIGNLNFDLKEINDICSGCRGHDGFTSSWRSVADTLRQKVEDAVREHPDYRVVFTGHSLGGALATVAGADLRGNGYDIDVFSYGAPRVGNRAFAEFLTVQTGGTLYRITHTNDIVPRLPPREFGYSHSSPEYWIKSGTDVPVRRCDIVKIEGIDATGGNNQPNIPDIPAHLWYFGLIGTC

SEQ ID NO: 13436 - protein, 266 aa, Thermomyces lanuginosus
SQDLFNQFNLFAQYSAAAYCGKNNDAPAGTKITCTGNACPEVEKADATVLYSFEDSGVGDVTGFLALDNTNKLIVLSFRGSRSIENWIGNLNFDLKEINDICSGCRGHDGFTSSWRSVADTLRQKVEDAVREHPDYRVVFTGHSLGGALATVAGADLRGNGYDIDVFSYGAPRVGNRAFAEFLTVQTGGTLYRITHTNDIVPRLPPREFGYSHSSPEYWIKSGTLVPVRRCDIVKIEGIDATGGNNQPNIPDIPIHLWYFGLIGTC

SEQ ID NO: 13437 - protein, 266 aa, Thermomyces lanuginosus
SQDLFNQFNLFAQYSAAAYCGKNNDAPAGTKITCTGNACPEVEKADATVLYSFEDSGVGDVTGFLALDNTNKLIVLSFRGSRSIENWIGNLNFDLKEINDICSGCRGHDGFTSSWRSVADTLRQKVEDAVREHPDYRVVFAGHSLGGALATVAGADLRGNGYDIDVFSYGAPRVGNRAFAEFLTVQTGGTLYRITHTNDIVPRLPPREFGYSHSSPEYWIKSGTLVPVRRCDIVKIEGIDATGGNNQPNIPDIPAHLWYFGLIGTC

SEQ ID NO: 13438 - protein, 266 aa, Thermomyces lanuginosus
SQDLFNQFNLFAQYSAAAYCGKNNDAPAGTKITCTGNACPEVEKADATLLYSFEDSGVGDVTGFLALDNTNKLIVLSFRGSRSIENWIGNLNFDLKEINDICSGCRGHDGFTSSWRSVADTLRQKVEDAVREHPDYRVVFTGHSLGGALATVAGADLRGNGYDIDVFSYGAPRVGNRAFAEFLTVQTGGTLYRITHTNDIVPRLPPREFGYSHSSPEYWIKIGTLVPVRRCDIVKIEGIDATGGNNQPNIPDIPAHLWYFGLIGTC

SEQ ID NO: 13439 - protein, 266 aa, Thermomyces lanuginosus
SQDLFNQFNLFAQYSAAAYCGKNNDAPAGTKITCTGNACPEVEKADATILYSFEDSGVGDVTGFLALDNTNKLIVLSFRGSRSIENWIGNLNFDLKEINDICSGCRGHDGFTSSWRSVADTLRQKVEDAVREHPDYRVVFTGHSLGGALATVAGADLRGNGYDIDVFSYGAPRVGNRAFAEFLTVQTGGTLYRITHTNDIVPRLPPREFGYSHSSPEYWIKFGTLVPVRRCDIVKIEGIDATGGNNQPNIPDIPAHLWYFGLIGTC

SEQ ID NO: 13440 - protein, 266 aa, Thermomyces lanuginosus
SQDLFNQFNLFAQYSAAAYCGKNNDAPAGTKITCTGNACPEVEKADATVLYSFEDSGVGDVTGFLALDNTNKLIVLSFRGSRSIENWIGNLNFDLKEINDICSGCRGHDGFTSSWRSVADTLRQKVEDAVREHPDYRVVFTGHSLGGALATVAGADLRGNGYDIDVFSYGAPRVGNRAFAEFLTVQTGGTLYRITHTNDIVPRLPPREFGYSHSSPEYWIKFGTLVPVRRCDIVKIEGIDATGGNNQPNIPDIPAHLWYFGLIGTC

SEQ ID NO: 13441 - protein, 266 aa, Thermomyces lanuginosus
SQDLFNQFNLFAQYSAAAYCGKNNDAPAGTKITCTGNACPEVEKADATVLYSFEDSGVGDVTGFLALDNTNKLIVLSFRGSRSIENWIGNLNFDLKEINDICSGCRGHDGFTSSWRSVADTLRQKVEDAVREHPDYRVVFTGHSLGGALATVAGADLRGNGYDIDVFSYGAPRVGNRAFAEFLTVQTGGTLYRITHTNDIVPRLPPREFGYSHSSPEYWIKSGTDVPVRRCDIVKIEGIDATGGNNQPNIPDIPAHLWYFGLIGTC

SEQ ID NO: 13442 - protein, 266 aa, Thermomyces lanuginosus
SQDLFNQFNLFAQYSAAAYCGKNNDAPAGTKITCTGNACPEVEKADATLLYSFEDSGVGDVTGFLALDNTNKLIVLSFRGSRSIENWIGNLNFDLKEINDICSGCRGHDGFTSSWRSVADTLRQKVEDAVREHPDYRVVFTGHSLGGALATVAGADLRGNGYDIDVFSYGAPRVGNRAFAEFLTVQTGGTLYRITHTNDIVPRLPPREFGYSHSSPEYWIKSGTLVPRRRCDIVKIEGIDATGGNNQPNIPDIPAHLWYFGLIGTC

SEQ ID NO: 13443 - protein, 266 aa, Thermomyces lanuginosus
SQDLFNQFNLFAQYSAAAYCGKNNDAPAGTKITCTGNACPEVEKADATILYSFEDSGVGDVTGFLALDNTNKLIVLSFRGSRSIENWIGNLNFDLKEINDICSGCRGHDGFTSSWRSVADTLRQKVEDAVREHPDYRVVFTGHSLGGALATVAGADLRGNGYDIDVFSYGAPRVGNRAFAEFLTVQTGGTLYRITLTNDIVPRLPPREFGYSHSSPEYWIKSGTLVPVRRCDIVKIEGIDATGGNNQPNIPDIPAHLWYFGLIGTC

SEQ ID NO: 13444 - protein, 266 aa, Thermomyces lanuginosus
SQDLFNQFNLFAQYSAAAYCGKNNDAPAGTKITCTGNACPEVEKADATILYSFEDSGVGDVTGFLALDNTNKLIVLSFRGSRSIENWIGNLNFDLKEINDICSGCRGHDGFTSSWRSVADTLRQKVEDAVREHPDYRVVFTGHSLGGALATVAGADLRGNGYDIDVFSYGAPRVGNRAFAEFLTVQTGGTLYRITHTNDIVPRLPPREFGYSHSSPEYWIKSGTLPPVRRCDIVKIEGIDATGGNNQPNIPDIPAHLWYFGLIGTC

SEQ ID NO: 13445 - protein, 266 aa, Thermomyces lanuginosus
SQDLFNQFNLFAQYSAAAYCGKNNDAPAGTKITCTGNACPEVEKADATVLYSFEDSGVGDVTGFLALDNTNKLIVLSFRGSRSIENWIGNLNFDLKEINDICSGCRGHDGFTSSWRSVADTLRQKVEDAVREHPDYRVVFTGHSLGGALATVAGADLRGNGYDIDVFSYGAPRVGNRAFAEFLTVQTGGTLYRITHTNDIVPRLPPREFGYSHSSPEYWIKSGTLVPRRRCDIVKIEGIDATGGNNQPNIPDIPAHLWYFGLIGTC

SEQ ID NO: 13446 - protein, 266 aa, Thermomyces lanuginosus
SQDLFNQFNLFAQYSAAAYCGKNNDAPAGTKITCTGNACPEVEKADATILYSFEDSGVGDVTGFLALDNTNKLIVLSFRGSRSIENWIGNLNFDLKEINDICSGCRGHDGFTSSWRSVADTLRQKVEDAVREHPDYRVVFTGHSLGGALATVAGADLRGNGYDIDVFSYGAPRVGNRAFAEFLTVQTGGTLYRITHTNDIVPRLPPREFGYSHSSPEYWIKSGTLVPVRRCDIVKIEGIDATGGNNQPNIPDIPVHLWYFGLIGTC

SEQ ID NO: 13447 - protein, 266 aa, Thermomyces lanuginosus
SQDLFNQFNLFAQYSAAAYCGKNNDAPAGTKITCTGNACPEVEKADATLLYSFEDSGVGDVTGFLALDNTNKLIVLSFRGSRSIENWIGNLNFDLKEINDICSGCRGHDGFTSSWRSVADTLRQKVEDAVREHPDYRVVFTGHSLGGALATVAGADLRGNGYDIDVFSYGAPRVGNRAFAEFLTVQTGGTLYRITHTNDIVPRLPPREFGYSHSSPEYWIKSGTLPPVRRCDIVKIEGIDATGGNNQPNIPDIPAHLWYFGLIGTC

SEQ ID NO: 13448 - protein, 266 aa, Thermomyces lanuginosus
SQDLFNQFNLFAQYSAAAYCGKNNDAPAGTKITCTGNACPEVEKADATVLYSFEDSGVGDVTGFLALDNTNKLIVLSFRGSRSIENWIGNLNFDLKEINDICSGCRGHDGFTSSWRSVADTLRQKVEDAVREHPDYRVVFTGHSLGGALATVAGADLRGNGYDIDVFSYGAPRVGNRAFAEFLTVQTGGTLYRITITNDIVPRLPPREFGYSHSSPEYWIKSGTLVPVRRCDIVKIEGIDATGGNNQPNIPDIPAHLWYFGLIGTC

SEQ ID NO: 13449 - protein, 266 aa, Thermomyces lanuginosus
SQDLFNQFNLFAQYSAAAYCGKNNDAPAGTKITCTGNACPEVEKADATVLYSFEDSGVGDVTGFLALDNTNKLIVLSFRGSRSIENWIGNLNFDLKEINDICSGCRGHDGFTSSWRSVADTLRQKVEDAVREHPDYRVVFTGHSLGGALATVAGADLRGNGYDIDVFSYGAPRVGNRAFAEFLTVQTGGTLYRITHTNDIVPRLPPREFGYSHSSPEYWIKPGTLVPVRRCDIVKIEGIDATGGNNQPNIPDIPAHLWYFGLIGTC

SEQ ID NO: 13450 - protein, 266 aa, Thermomyces lanuginosus
SQDLFNQFNLFAQYSAAAYCGKNNDAPAGTKITCTGNACPEVEKADATVLYSFEDSGVGDVTGFLALDNTNKLIVLSFRGSRSIENWIGNLNFDLKEINDICSGCRGHDGFTSSWRSVADTLRQKVEDAVREHPDYRVVFTGHSLGGALATVAGADLRGNGYDIDVFSYGAPRVGNRAFAEFLTVQTGGTLYRITNTNDIVPRLPPREFGYSHSSPEYWIKSGTLVPVRRCDIVKIEGIDATGGNNQPNIPDIPAHLWYFGLIGTC

SEQ ID NO: 13451 - protein, 266 aa, Thermomyces lanuginosus
SQDLFNQFNLFAQYSAAAYCGKNNDAPAGTKITCTGNACPEVEKADATILYSFEDSGVGDVTGFLALDNTNKLIVLSFRGSRSIENWIGNLNFDLKEINDICSGCRGHDGFTSSWRSVADTLRQKVEDAVREHPDYRVVFTGHSLGGALATVAGADLRGNGYDIDVFSYGAPRVGNRAFAEFLTVQTGGTLYRITHTNDIVPRLPPREFGYSHSSPEYWIKSGTLVPVRRCDIVKIEGIDATGGNNQPNIPDGPAHLWYFGLIGTC

SEQ ID NO: 13452 - protein, 266 aa, Thermomyces lanuginosus
SQDLFNQFNLFAQYSAAAYCGKNNDAPAGTKITCTGNACPEVEKADATVLYSFEDSGVGDVTGFLALDNTNKLIVLSFRGSRSIENWIGNLNFDLKEINDICSGCRGHDGFTSSWRSVADTLRQKVEDAVREHPDYRVVFTGHSLGGALATVAGADLRGNGYDIDVFSYGAPRVGNRAFAEFLTVQTGGTLYRITSTNDIVPRLPPREFGYSHSSPEYWIKSGTLVPVRRCDIVKIEGIDATGGNNQPNIPDIPAHLWYFGLIGTC

SEQ ID NO: 13453 - protein, 266 aa, Thermomyces lanuginosus
SQDLFNQFNLFAQYSAAAYCGKNNDAPAGTKITCTGNACPEVEKADATLLYSFEDSGVGDVTGFLALDNTNKLIVLSFRGSRSIENWIGNLNFDLKEINDICSGCRGHDGFTSSWRSVADTLRQKVEDAVREHPDYRVVFTGHSLGGALATVAGADLRGNGYDIDVFSYGAPRVGNRAFAEFLTVQTGGTLYRITITNDIVPRLPPREFGYSHSSPEYWIKSGTLVPVRRCDIVKIEGIDATGGNNQPNIPDIPAHLWYFGLIGTC

SEQ ID NO: 13454 - protein, 266 aa, Thermomyces lanuginosus
SQDLFNQFNLFAQYSAAAYCGKNNDAPAGTKITCTGNACPEVEKADATLLYSFEDSGVGDVTGFLALDNTNKLIVLSFRGSRSIENWIGNLNFDLKEINDICSGCRGHDGFTSSWRSVADTLRQKVEDAVREHPDYRVVFTGHSLGGALATVAGADLRGNGYDIDVFSYGAPRVGNRAFAEFLTVQTGGTLYRITYTNDIVPRLPPREFGYSHSSPEYWIKSGTLVPVRRCDIVKIEGIDATGGNNQPNIPDIPAHLWYFGLIGTC

SEQ ID NO: 13455 - protein, 266 aa, Thermomyces lanuginosus
SQDLFNQFNLFAQYSAAAYCGKNNDAPAGTKITCTGNACPEVEKADATLLYSFEDSGVGDVTGFLALDNTNKLIVLSFRGSRSIENWIGNLNFDLKEINDICSGCRGHDGFTSSWRSVADTLRQKVEDAVREHPDYRVVFTGHSLGGALATVAGADLRGNGYDIDVFSYGAPRVGNRAFAEFLTVQTGGTLYRITHTNDIVPRLPPREFGYSHSSPEYWIKSGTLVPVRRCDIVKIEGIDATGGNNQPNIPDIPIHLWYFGLIGTC

SEQ ID NO: 13456 - protein, 266 aa, Thermomyces lanuginosus
SQDLFNQFNLFAQYSAAAYCGKNNDAPAGTKITCTGNACPEVEKADATLLYSFEDSGVGDVTGFLALDNTNKLIVLSFRGSRSIENWIGNLNFDLKEINDICSGCRGHDGFTSSWRSVADTLRQKVEDAVREHPDYRVVFTGHSLGGALATVAGADLRGNGYDIDVFSYGAPRVGNRAFAEFLTVQTGGTLYRITSTNDIVPRLPPREFGYSHSSPEYWIKSGTLVPVRRCDIVKIEGIDATGGNNQPNIPDIPAHLWYFGLIGTC

SEQ ID NO: 13457 - protein, 266 aa, Thermomyces lanuginosus
SQDLFNQFNLFAQYSAAAYCGKNNDAPAGTKITCTGNACPEVEKADATLLYSFEDSGVGDVTGFLALDNTNKLIVLSFRGSRSIENWIGNLNFDLKEINDICSGCRGHDGFTSSWRSVADTLRQKVEDAVREHPDYRVVFTGHSLGGALATVAGADLRGNGYDIDVFSYGAPRVGNRAFAEFLTVQTGGTLYRITHTNDIVPRLPPREFGYSHSSPEYWIKPGTLVPVRRCDIVKIEGIDATGGNNQPNIPDIPAHLWYFGLIGTC

SEQ ID NO: 13458 - protein, 266 aa, Thermomyces lanuginosus
SQDLFNQFNLFAQYSAAAYCGKNNDAPAGTKITCTGNACPEVEKADATILYSFEDSGVGDVTGFLALDNTNKLIVLSFRGSRSIENWIGNLNFDLKEINDICSGCRGHDGFTSSWRSVADTLRQKVEDAVREHPDYRVVFTGHSLGGALATVAGADLRGNGYDIDVFSYGAPRVGNRAFAEFLTVQTGGTLYRITHTNDIVPRLPPREFGYSHSSPEYWIKSGTLVPRRRCDIVKIEGIDATGGNNQPNIPDIPAHLWYFGLIGTC

SEQ ID NO: 13459 - protein, 266 aa, Thermomyces lanuginosus
SQDLFNQFNLFAQYSAAAYCGKNNDAPAGTKITCTGNACPEVEKADATILYSFEDSGVGDVTGFLALDNTNKLIVLSFRGSRSIENWIGNLNFDLKEINDICSGCRGHDGFTSSWRSVADTLRQKVEDAVREHPDYRVVFTGHSLGGALATVAGADLRGNGYDIDVFSYGAPRVGNRAFAEFLTVQTGGTLYRITHTNDIVPRLPPREFGYSHSSPEYWIKIGTLVPVRRCDIVKIEGIDATGGNNQPNIPDIPAHLWYFGLIGTC

SEQ ID NO: 13460 - protein, 266 aa, Thermomyces lanuginosus
SQDLFNQFNLFAQYSAAAYCGKNNDAPAGTKITCTGNACPEVEKADATVLYSFEDSGVGDVTGFLALDNTNKLIVLSFRGSRSIENWIGNLNFDLKEINDICSGCRGHDGFTSSWRSVADTLRQKVEDAVREHPDYRVVFTGHSLGGALATVAGADLRGNGYDIDVFSYGAPRVGNRAFAEFLTVQTGGTLYRITHTNDIVPRLPPREFGYSHSSPEYWIKSGTLVPVRRCDIVKIEGIDATGGNNQPNIPDIPVHLWYFGLIGTC

SEQ ID NO: 13461 - protein, 266 aa, Thermomyces lanuginosus
SQDLFNQFNLFAQYSAAAYCGKNNDAPAGTKITCTGNACPEVEKADATLLYSFEDSGVGDVTGFLALDNTNKLIVLSFRGSRSIENWIGNLNFDLKEINDICSGCRGHDGFTSSWRSVADTLRQKVEDAVREHPDYRVVFTGHSLGGGLATVAGADLRGNGYDIDVFSYGAPRVGNRAFAEFLTVQTGGTLYRITHTNDIVPRLPPREFGYSHSSPEYWIKSGTLVPVRRCDIVKIEGIDATGGNNQPNIPDIPAHLWYFGLIGTC

SEQ ID NO: 13462 - protein, 266 aa, Thermomyces lanuginosus
SQDLFNQFNLFAQYSAAAYCGKNNDAPAGTKITCTGNACPEVEKADATVLYSFEDSGVGDVTGFLALDNTNKLIVLSFRGSRSIENWIGNLNFDLKEINDICSGCRGHDGFTSSWRSVADTLRQKVEDAVREHPDYRVVFTGHSLGGALATVAGADLRGNGYDIDVFSYGAPRVGNRAFAEFLTVQTGGTLYRITHTNDIVPRLPPREFGYSHSSPEYWIKSGTLPPVRRCDIVKIEGIDATGGNNQPNIPDIPAHLWYFGLIGTC

SEQ ID NO: 13463 - protein, 266 aa, Thermomyces lanuginosus
SQDLFNQFNLFAQYSAAAYCGKNNDAPAGTKITCTGNACPEVEKADATLLYSFEDSGVGDVTGFLALDNTNKLIVLSFRGSRSIENWIGNLNFDLKEINDICSGCRGHDGFTSSWRSVADTLRQKVEDAVREHPDYRVVFTGHSLGGALATVAGADLRGNGYDIDVFSYGAPRVGNRAFAEFLTVQTGGTLYRITHTNDIVPRLPPREFGYSHSSPEYWIKSGTLVPVRRCDIVKIEGIDATGGNNQPNIPDGPAHLWYFGLIGTC

SEQ ID NO: 13464 - protein, 266 aa, Thermomyces lanuginosus
SQDLFNQFNLFAQYSAAAYCGKNNDAPAGTKITCTGNACPEVEKADATILYSFEDSGVGDVTGFLALDNTNKLIVLSFRGSRSIENWIGNLNFDLKEINDICSGCRGHDGFTSSWRSVADTLRQKVEDAVREHPDYRVVFTGHSLGGALATVAGADLRGNGYDIDVFSYGAPRVGNRAFAEFLTVQTGGTLYRITSTNDIVPRLPPREFGYSHSSPEYWIKSGTLVPVRRCDIVKIEGIDATGGNNQPNIPDIPAHLWYFGLIGTC

SEQ ID NO: 13465 - protein, 266 aa, Synthetic construct
TQDLFNQFNLFAQYSAAAYCGKNNDAPAGTNITCTGNACPEVEKADATFLYSFEGSGVGDVTGFLALDNTNKLIVLSFRGSRSIENWIGNLKFLMKEINDICSGCRGHDGFTSSWRSVADTLRQKVEDAVREHPDYRVVFTGHSLGGALATVAGADLRGNGYDIDVFSYGAPRVGNRAFAEFLTVQTGGTLYRITHTNDIVPRLPPREFGYSHSSPEYWIKSGTLVPVTRNDIVKIEGIDATGGNNRPNIPDIPAHLWYFGLIGTC

SEQ ID NO: 13466 - protein, 264 aa, Synthetic construct
ELFNQFNLFAQYSAAAYCGKNNDAPAGTNITCTGNACPEVEKADATFLYSFEGSGVGDVTGFLALDNTNKLIVLSFRGSRSIENWIGNLKFLMKEINDICSGCRGHDGFTSSWRSVADTLRQKVEDAVREHPDYRVVFTGHSLGGALATVAGADLRGNGYDIDVFSYGAPRVGNRAFAEFLTVQTGGTLYRITHTNDIVPRLPPREFGYSHSSPEYWIKSGTLVPVTRNDIVKIEGIDATGGNNRPNIPDIPAHLWYFGLIGTC

SEQ ID NO: 13467 - protein, 272 aa, Unidentified
EVSQDLFNQFNLFAQYSAAAYCGKNNDAPAGTNITCTGNACPEVEKADATFLYSFEGSGVGDVTGFLALDNTNKLIVLSFRGSRSIENWIGNLKFLMKEINDICSGCRGHDGFTSSWRSVADTLRQKVEDAVREHPDYRVVFTGHSLGGALATVAGADLRGNGYDIDVFSYGAPRVGNRAFAEFLTVQTGGTLYRITHTNDIVPRLPPREFGYSHSSPEYWIKSGTLVPVTRNDIVKIEGIDATGGNNRPNIPDIPAHLWYFGLIGTCLAPG

SEQ ID NO: 13468 - protein, 271 aa, Thermomyces lanuginosus
EVSQDLFNQFNLFAQYSAAAYCGKNNDAPAGTQITCTGNACPEVEKADATFLYSFEDSGVGDVTGFLALDNTNKLIVLSFRGSRSIENWIGNLNFLLKEINDICSGCRGHDGFTSSWRSVADTLRQKVEDAVREHPDYRVVFTGHSLGGALATVAGADLRGNGYDIDVFSYGAPRVGNRAFAEFLTVQTGGTLYRITHTNDIVPRLPPREFGYSHSSPEYWIKSGTLVPVRRRDIVKIEGIDATGGNNRPNIPDIPAHLWYFGLIGTCLPG

SEQ ID NO: 13469 - protein, 271 aa, Thermomyces lanuginosus
EVSQDLFNQFNLFAQYSAAAYCGKNNDAPAGTNITCTGNACPEVEKADATFLYSFEDSGVGDVTGFLALDNTNKLIVLSFRGSRSIENWIGNLKFLLKEINDICSGCRGHDGFTSSWRSVADTLRQKVEDAVREHPDYRVVFTGHSLGGALATVAGADLRGNGYDIDVFSYGAPRVGNRAFAEFLTVQTGGTLYRITHTNDIVPRLPPREFGYSHSSPEYWIKSGTLVPVRRRDIVKIEGIDATGGNNRPNIPDIPAHLWYFGLIGTCLPG

SEQ ID NO: 13470 - protein, 271 aa, Thermomyces lanuginosus
EVSQDLFNQFNLFAQYSAAAYCGKNNDAPAGTNITCTGNACPEVEKADATFLYSFEDSGVGDVTGFLALDNTNKLIVLSFRGSRSIENWIGNLNFDLKNISDICSGCRGHDGFTSSWRSVADTLRQKVEDAVREHPDYRVVFTGHSLGGALATVAGADLRGNGYDIDVFSYGAPRVGNRAFAEFLTVQTGGTLYRITHTNDIVPRLPPREFGYSHSSPEYWIKSGTLVPVRRRDIVKIEGIDATGGNNRPNIPDIPAHLWYFGLIGTCLPG

SEQ ID NO: 13471 - protein, 271 aa, Thermomyces lanuginosus
EVSQDLFNQFNLFAQYSAAAYCGKNNDAPAGTQITCTGNACPEVEKADATFLYSFEDSGVGDVTGFLALDNTNKLIVLSFRGSRSIENWIGNLKFLLKEINDICSGCRGHDGFTSSWRSVADTLRQKVEDAVREHPDYRVVFTGHSLGGALATVAGADLRGNGYDIDVFSYGAPRVGNRAFAEFLTVQTGGTLYRITHTNDIVPRLPPREFGYSHSSPEYWIKSGTLVPVRRRDIVKIEGIDATGGNNQPNIPDIPAHLWYFGLIGTCLPG

SEQ ID NO: 13472 - protein, 271 aa, Thermomyces lanuginosus
EVSQDLFNQFNLFAQYSAAAYCGKNNDAPAGTQITCTGNACPEVEKADATFLYSFEDSGVGDVTGFLALDNTNKLIVLSFRGTRSIKNWIANLNFDLKKINDICSGCRGHDGFTSSWRSVADTLRQKVEDAVREHPDYRVVFTGHSLGGALATVAGADLRGNGYDIDVFSYGAPRVGNRAFAEFLTVQTGGTLYRITHTNDIVPRLPPREFGYSHSSPEYWIKSGTLVPVRRRDIVKIEGIDATGGNNRPNIPDIPAHLWYFGLIGTCLPG

SEQ ID NO: 13473 - protein, 268 aa, Thermomyces lanuginosus
EVSQDLFNQFNLFAQYSAAAYCGKNNEAPAGTNITCTGNACPEVEKAQATFLYSFEDMGVGDVTGFLALDNTNKLIVLSFRGSRSIENWIGNLNFDLKEINDICSGCRGHDGFTSSWRSVADTLRQKVEAAVREHPDYRVVFTGHSLGGALATVAGADLRGNPYDIDVFSYGAPRVGNRAFAEFLTVQTGGTLYRITHTNDIVPRLPPREFGYSHSSPEYWIKSGTLVPVTRQDIVKIEGIDATGGNNQPNIPDIPAHLWYFGRIGTC

SEQ ID NO: 13474 - protein, 268 aa, Thermomyces lanuginosus
EVSQDLFNQFNLFAQYSKAAYCKKNNDAPAGTNITCTGNACPEVEKADATFLYSFEDSGVGDVTGFLALDNTNKRIVLSFRGSRSIENWIGNLRFDLKEINDICSGCRGHDGFTSSWRSVADTLRQKVEAAVREHPDYRVVFTGHSLGGALATVAGADLRGNGYDIDVFSYGAPRVGNRAFAEFLTNQTGGTLYRITHTNDIVPRLPPREFGYSHSSPEYWIKSGTLVPVTRNDIVKIEGIDATGGNNQPNIPDIPAHLWYFGLIGTC

SEQ ID NO: 13475 - protein, 268 aa, Thermomyces lanuginosus
EVSQDLFNQFKLFAQYSAAAYCGKNNQAPAGTNITCTGNACPEVEKADATFLYSFEDMGVGDVTGFLALDNTNKLIVLSFRGSRSIENWFGNLNFDLKEINDICSGCRGHDGFTSSWRSVADTLRQKVEDAVREHPDYRVVFTGHSLGGALATVAGADLRGNGYDIDVFSYGAPRVGNRAFAEFLTVQTGGTLYRITHTNDIVPRLPPREFGYSHSSPEYWIKSGTLVPVTRQDIVKIEGIDATGGNNQPNIPDITAHLWYFGLIGTC

SEQ ID NO: 13476 - protein, 268 aa, Thermomyces lanuginosus
EVSQDLFNQFNLFAQYSAAAYCGKNNDAPAGTNITCTGNACPEVEKADATFLYSFEDSGVGDVTGFLALDNTNKLIVLSFRGSRSIENWIGNLNFDLKEINDICSGCRGHDGFTSSWRSVADTLRQKVEDAVREHPDYRVVFAGHSLGGALATVAGADLRGDGYDIDVFSYGAPRVGNRAFAEFLTVQTGGTLYRITNTNDIVPRLPPREFGYSHSSPEYWIKSGTLPPVRRRDIVKIEGIDATGGNNQPNIPDIPAHLWYFGLIGTC

SEQ ID NO: 13477 - protein, 268 aa, Thermomyces lanuginosus
EVSQDLFNQFNLFAQYSAAAYCGKNNDAPAGTNITCTGNACPEVEKADATFLYSFEDNGSGDVTGFLALDNTNKLIVLSFRGSRSIENWIGNLNFDLKEINDICSGCRGHDGFTSSWRSVADTLRQKVEDAVREHPDYRVVFTGHSLGGALATVAGADLRGNGYDIDVFSYGAPRVGNRAFAEFLTVQTGGTLYRITHTNDIVPRLPPRVFGYSHSSPEYWIKSGTLVPVRRRDIVKIEGIDATGGNNRPNIPDIPAHLWYFGLIGTC

SEQ ID NO: 13478 - protein, 268 aa, Thermomyces lanuginosus
EVSQDLFNQFNLFAQYSKAAYCQKNNDAPAGTNITCTGNACPEVEKADATFLYSFEDSGVGDVTGFLALDNTNKLIVLSFRGSRSIENWIGNLRFDLKEINDICSGCRGHDGFTSSWRSVADTLRQKVEAAVREHPDYRVVFTGHSLGGALATVAWADLRGNGYDIDVFSYGAPRVGNRAFAEFLTQQTGGTLYRITHTNDIVPRLPPREFGYSHSSPEYWIKSGTLVPVTRNDIVKIEGIDATGGNNQPNIPDIPAHLWYFGLIGTC

SEQ ID NO: 13479 - protein, 268 aa, Thermomyces lanuginosus
EYSQDLFNQFNLFAQYSAAAYCGKNNDAPAGTKITCTGNACPEVEKADATLLYSFEDSGVGDVTGFLALDNTNKLIVLSFRGSRSIENWIGNLNFDLKEINDICSGCRGHDGFTSSWRSVADTLRQKVEDAVREHPDYRVVFTGHSLGGALATVAGADLRGNGYDIDVFSYGAPRVGNRAFAEFLTVQTGGTLYRITNTNDIVPRLPPREFGYSHSSPEYWIKSGTLVPVRRRDIVKIEGIDATGGNNQPNIPDIPAHLWYFGLIGTC

SEQ ID NO: 13480 - protein, 268 aa, Thermomyces lanuginosus
EKSQDLFNQFNLFAQYSAAAYCGKNNDAPAGTKITCTGNACPEVEKADATVLYSFEDSGVGDVTGFLALDNTNKLIVLSFRGSRSIENWIGNLNFDLKEINDICSGCRGHDGFTSSWRSVADTLRQKVEDAVREHPDYRVVFTGHSLGGALATVAGADLRGNGYDIDVFSYGAPRVGNRAFAEFLTVQTGGTLYRITHTNDIVPRLPPREFGYSHSSPEYWIKSGTDVPVRRRDIVKIEGIDATGGNNQPNIPDIPAHLWYFGLIGTC

SEQ ID NO: 13481 - protein, 268 aa, Thermomyces lanuginosus
EVSQDLFNQFNLFAQYSAAAYCGKNNDAPAGTNITCTGNACPEVEKADATFLYSFEDSGVGDVTGFLALDNTNKLIVLSFRGSRSIENWIGNLNFELKEINDICSGCRGHAGFTSSWRSVADTLRQKVEDAVREHPDYRVVFTGHSLGGALATVAGADLRGNKYDIDVFSYGAPRVGNRAFAEFLTVQTGGTLYRITHTNDIVPRLPPREFGYSHSSPEYWIKSGTLVPVRRRDIVKIEGIDATGGNNQPNIPSITAHLWYFGLIGTC

SEQ ID NO: 13482 - protein, 268 aa, Thermomyces lanuginosus
EVSQDLFNQFNLFAQYSAAAYCKKNNDAPAGTNITCTGNACPEVEKADATFLYSFEDSGVGDVTGFLALDNTNKQIVLSFRGSRSIENWIGNLNFDLKEINDICSGCRGHAGFTSSWRSVADTLRQKVEDAVREHPDYRVVFTGHSLGGALATIAWADLRGNGYDIDVFSYGAPRVGNRAFAEFLTVQQGGTLYRITHTNDIVPRLPPREFGYSHSSPEYWIKSGTLVPVTRNDIVKIEGIDATGGNNQPNIPDIPAHLWYFGRIGTC

SEQ ID NO: 13483 - protein, 268 aa, Thermomyces lanuginosus
EVSQDLFNQFNLFAQYSAAAYCGKNNDAPAGTQITCTANACPEVEKADATFLYSFEDSGVGDVTGFLALDNTNKLIVLSFRGSRSIENWITNLNFDLKEINDICSGCRGHDGFTSSWRSVADTLRQKVEDAVREHPDYRVVFTGHSLGGALATVAGADLRGNAYDIDVFSYGAPRVGNRAFAEFLTVQTGGTLYRITHTNDIVPRLPPREFGYSHSSPEYWIKSGTLVPVRRRDIVKIEGIDATGGNNQPNIPSIPAHLWYFGLIGTC

SEQ ID NO: 13484 - protein, 268 aa, Thermomyces lanuginosus
EVSQDLFNQFNLFAQYSAAAYCGKNNRAPAGTNITCTGNACPEVEKADATFLYSFEDSGVGDVTGFLALDNTNKLIVLSFRGSRSIENWISNFNFDLKEINDICSGCRGHAGFTSSWRSVADTLRQKVEDAVREHPDYRVVFTGHSLGGALATVAGADLRGNGYDIDVFSYGAPRVGNRAFAEFLTVQTGGTLYRITHTNDIVPRLPPREFGYSHPSPEYWIKSGTGVPVTRNDIVKIEGIDATGGNNQPNIPDITAHLWYFGLIGTC

SEQ ID NO: 13485 - protein, 268 aa, Thermomyces lanuginosus
EVSQDLFNQFNLFAQYSAAAYCGKNNSAPAGTNITCTGNACPEVEKADATTLYSFEDMGVGDVTGFLALDNTNKRIVLSFRGSRSIENWIGNLNFDLKEINDICSGCRGHDGFTSSWRSVADTLRQKVEAAVREHPDYRVVFTGHSLGGALATVAGADLRGNGYDIDVFSYGAPRVGNRAFAEFLTVQTGGTLYRITHTNDIVPRLPPREFGYSHSSPEYWIKSGTLVPVTRNDIVKIEGIDATGGNNQPNQPDIPAHLWYFGRIGTC

SEQ ID NO: 13486 - protein, 268 aa, Thermomyces lanuginosus
EVSQDLFNQFNLFAQYSAAAYCGKNNDAPAGTNITCTGNACPEVEKADATILYSFEDSGVGDVTGFLALDNTNKLIVLSFRGSRSIENWIGNLNFDLKEINDICSGCRGHDGFTSSWRSVADTLRQKVEDAVREHPDYRVVFAGHSLGGALATVAGADLRGDGYDIDVFSYGAPRVGNRAFAEFLTVQTGGTLYRITSTNDIVPRLPPREFGYSHSSPEYWIKSGTLVPVRRRDIVKIEGIDATGGNNQPNIPDIPAHLWYFGLIGTC

SEQ ID NO: 13487 - protein, 268 aa, Thermomyces lanuginosus
EVSQDLFNQFNLFAQYSKAAYCQKNNDAPAGTNITCTGNACPEVEKADATFLYSFEDSGVGDVTGFLALDNTNKQIILSFRGSRSIENWIGNLNFDLKEINDICSGCRGHDGFTSSWRSVADTLRQKVEDAVREHPDYRVVFTGHSLGGALATVAWADLRGNGYDIDVFSYGAPRVGNRAFAEFLTNQTGGTLYRITHTNDIVPRLPPREFGYSHSSPEYWIKSGTLVPVTRNDIVKIEGIDATGGNNQPNIPDIPAHLWYFGLIGTC

SEQ ID NO: 13488 - protein, 268 aa, Thermomyces lanuginosus
EVSQDLFNQFNLFAQYSAAAYCQKNNDAPAGTNITCTGNACPEVEKADVTFLYSFEDSGVGDVTGFLALDNTNKQIVLSFRGSRSIENWIGNLNFDLKEINDICSGCRGHDGFTSSWRSVADTLRQKVEDAVREHPDYRVVFTGHSLGGALATVAWADLRGNGYDIDVFSYGAPRVGNRAFAEFLTTQDGGTLYRITHTNDIVPRLPPREFGYSHSSPEYWIKSGTLVPVTRNDIVKIEGIDATGGNNQPNIPDIPAHLWYFGLIGTC

SEQ ID NO: 13489 - protein, 268 aa, Thermomyces lanuginosus
EVSQDLFNQFNLFAQYSAAAYCGKNNDAPAGTNITCTGNACPEVEKADATLLYSFRNSGVGDVTGFLALDNTNKLIVLSFRGSRSIENWIGNLNFDLKEINDICSGCRGHDGFTSSWFSVADTLRQKVEDAVREHPDYRVVFTGHSLGGALATVAGADLRGNGYDIDVFSYGAPRVGNRAFAEFLTVQTGGTLYRITHTNDIVPRLPPREFGYSHSSPEYWIKSGTLVPVRRRDIVKIEGIDATGGNNQPNIPDIPAHLWYFGLIGTC

SEQ ID NO: 13490 - protein, 268 aa, Thermomyces lanuginosus
EYSQDLFNQFNLFAQYSAAAYCGKNNDAPAGTKITCTGNACPEVEKADATVLYSFEDSGVGDVTGFLALDNTNKLIVLSFRGSRSIENWIGNLNFDLKEINDICSGCRGHDGFTSSWRSVADTLRQKVEDAVREHPDYRVVFTGHSLGGALATVAGADLRGNGYDIDVFSYGAPRVGNRAFAEFLTVQTGGTLYRITHTNDIVPRLPPREFGYSHSSPEYWIKSGTDVPVRRRDIVKIEGIDATGGNNQPNIPDIPAHLWYFGLIGTC

SEQ ID NO: 13491 - protein, 268 aa, Thermomyces lanuginosus
EVSQDLFNQFNLFAQYSAAAYCGKNNRAPAGTNITCTGNACPEVEKADATFLYSFEDSGVGDVTGFLALDNTNKLIVLSFRGSRSIENWIGNLNFELKEINDICSGCRGHAGFTSSWRSVADTLRQKVEDAVREHVDYRVVFTGHSLGGALATVAGADLRGNGYDIDVFSYGAPRVGNRAFAEFLTVQTGGTLYRITHTNDIVPRLPPREFGYSHPSPEYWIKSGTGVPVTRNDIVKIEGIDATGGNNQPNIPDITAHLWYFGLIGTC

SEQ ID NO: 13492 - protein, 268 aa, Thermomyces lanuginosus
EVSQDLFNQFNLFAQYSAAAYCQKNNDAPAGTNITCTGNACPEVEKADATFLYSFEDSGVGDVTGFLALDNTNKQIVLSFRGSRSIENWIGNLNFDLKEINDICSGCRGHAGFTSSWRSVADTLRQKVEAAVREHPDYRVVFTGHSLGGALATIAWADLRGNGYDIDVFSYGAPRVGNRAFAEFLTVQTGGTLYRITHTNDIVPRLPPREFGYSHSSPEYWIKSGTLVPVTRNDIVKIEGIDATGGNNQPNIPDIPAHLWYFGRIGTC

SEQ ID NO: 13493 - protein, 268 aa, Thermomyces lanuginosus
EKSQDLFNQFNLFAQYSAAAYCGKNNDAPAGTKITCTGNACPEVEKADATLLYSFEDSGVGDVTGFLALDNTNKLIVLSFRGSRSIENWIGNLNFDLKEINDICSGCRGHDGFTSSWRSVADTLRQKVEDAVREHPDYRVVFAGHSLGGALATVAGADLRGNGYDIDVFSYGAPRVGNRAFAEFLTVQTGGTLYRITHTNDIVPRLPPREFGYSHSSPEYWIKSGTLVPVRRRDIVKIEGIDATGGNNQPNIPDIPAHLWYFGLIGTC

SEQ ID NO: 13494 - protein, 268 aa, Thermomyces lanuginosus
EVSQDLFNQFNLFAQYSAAAYCGKNNDAPAGTNITCTGNACPEVEKADATFLYSFRDSGVGDVTGFLALDNTNKLIVLSFRGSRSIENWIGNLNFDLIEINDICSGCRGHDGFTSSWFSVADTLRQKVEDAVREHPDYRVVFTGHSLGGALATVAGADLRGNGYDIDVFSYGAPRVGNRAFAEFLTVQTGGTLYRITHTNDIVPRLPPREFGYSHSSPEYWIKSGTLVPVRRRDIVKIEGIDAEGGNNQPNIPDIPAHLWYFGLIGTC

SEQ ID NO: 13495 - protein, 268 aa, Thermomyces lanuginosus
EVSQDLFNQFNLFAQYSAAAYCGRNNDAPAGTNITCTGNACPEVERADATFLYSFEDSGVGDVTGFLALDNTNRLIVLSFRGSRSIENWIGNLNFDLKEINDICSGCRGHDGFTSSWRSVADTLRQRVEDAVREHPDYRVVFTGHSLGGALATVAGADLRGNGYDIDVFSYGAPRVGNRAFAEFLTVQTGGTLYRITHTNDIVPRLPPREFGYSHSSPEYWIRSGTLVPVTRNDIVRIEGIDATGGNNQPNIPDIPAHLWYFGLIGKC

SEQ ID NO: 13496 - protein, 268 aa, Thermomyces lanuginosus
EVSQDLFNQFNLFAQYSAAAYCGKNNDAPAGTNITCTGNACPEVEKADATLLYSFRDSGVGDVTGFLALDNTNKLIVLSFRGSRSIENWIGNLNFDLKEINDICSGCRGHDGFTSSWFSVADTLRQKVEDAVREHPDYRVVFTGHSLGGALATVAGADLRGNGYDIDVFSYGAPRVGNRAFAEFLTVQTGGTLYRITHTNDIVPRLPPREFGYSHSSPEYWIKSGTLVPVRRRDIVKIEGIDATGGNNQPNIPDITAHLWYFGLIGTC

SEQ ID NO: 13497 - protein, 268 aa, Thermomyces lanuginosus
EKSQDLFNQFNLFAQYSAAAYCGKNNDAPAGTKITCTGNACPEVEKADATILYSFEDSGVGDVTGFLALDNTNKLIVLSFRGSRSIENWIGNLNFDLKEINDICSGCRGHDGFTSSWRSVADTLRQKVEDAVREHPDYRVVFTGHSLGGALATVAGADLRGNGYDIDVFSYGAPRVGNRAFAEFLTVQTGGTLYRITHTNDIVPRLPPREFGYSHSSPEYWIKFGTLVPVRRRDIVKIEGIDATGGNNQPNIPDIPAHLWYFGLIGTC

SEQ ID NO: 13498 - protein, 268 aa, Thermomyces lanuginosus
EVSQDLFNQFKLFAQYSAAAYCGKNNNAPAGTNITCTGNACPEVEKADATFLYSFKDMGVGDVTGFLALDNTNKLIVLSFRGSRSIENWIGNLNFDLKEINDICSGCRGHDGFTSSWRSVADTLRQKVEDAVREHPDYRVVFTGHSLGGALATVAGADLRGNGYDIDVFSYGAPRVGNRAFAEFLTVQTGGTLYRITHTNDIVPRLPPREFGYSHSSPEYWIKSGTLVPVTRQDIVKIEGIDATGGNNQPNIPDITAHLWYFGLIGTC

SEQ ID NO: 13499 - protein, 268 aa, Thermomyces lanuginosus
EVSQDLFNQFNLFAQYSAAAYCKKNNQAPAGTNITCTGNACPEVEKADATTLYSFEDSGVGDVTGFLALDNTNKGIVLSFRGSRSIENWIGNLNFDLKEINDICSGCRGHDGFTSSWRSVADTLRQKVEAAVREHPDYRVVFTGHSLGGALATVAGADLRGNGYDIDVFSYGAPRVGNRAFAEFLTHQTGGTLYRITHTNDIVPRLPPREFGYSHSSPEYWIKSGTLVPVTRNDIVKIEGIDATGGNNQPNIPDIPAHLWYFGRIGTC

SEQ ID NO: 13500 - protein, 268 aa, Thermomyces lanuginosus
EVSQDLFNQFNLFAQYSAAAYCGKNNDAPAGTNITCTGNACPEVEKADATFLYSFEDNGSGDVTGFLALDNTNKLIVLSFRGSRSIENWIGNLNFDLKEINDICSGCRGHDGFTSSWRSVADTLRQKVEDAVREHPDYRVVFTGHSMGGALATVAGADLRGNGYDIDVFSYGAPRVGNRAFAEFLTVQTGGTLYRITHTNDIVPRLPPRELGYSHSSPEYWIKSGTLVPVRRRDIVKIEGIDATGGNNQPNIPDIPAHLWYFGLIGTC

SEQ ID NO: 13501 - protein, 268 aa, Thermomyces lanuginosus
EVSQDLFNQFNLFAQYSAAAYCGKNNNAPAGTNITCTGNICPEVEKADATFLYSFRDSGVGDVTGFLALDNTNKLIVLSFRGSRSIENWIGNLNFDLKEINDICSGCRGHDGFTSSWFSVADTLRQKVEDAVREHPDYRVVFTGHSLGGALATVAGADLRGNGYDIDVFSYGAPRVGNRAFAEFLTVQTGGTLYRITHTNDIVPRLPPREFGYSHSSPEYWIKSGTLVPVRRRDIVKIEGIDATGGNNQPNIPDIPAHLWYFGLIGTC

SEQ ID NO: 13502 - protein, 268 aa, Thermomyces lanuginosus
EVSQDLFNQFNLFAQYSKAAYCQKNNDAPAGTNITCTGNACPEVEKADATFLYSFEDSGVGDVTGFLALDNTNKQIILSFRGSRSIENWIGNLNFDLKEINDICSGCRGHDGFTSSWRSVADTLRQKVEDAVREHPDYRVVFTGHSLGGALATVAGADLRGNGYDIDVFSYGAPRVGNRAFAEFLTTQDGGTLYRITHTNDIVPRLPPREFGYSHSSPEYWIKSGTLVPVTRNDIVKIEGIDATGGNNQPNIPDIPAHLWYFGLIGTC

SEQ ID NO: 13503 - protein, 268 aa, Thermomyces lanuginosus
EYSQDLFNQFNLFAQYSAAAYCGKNNDAPAGTKITCTGNACPEVEKADATVLYSFEDSGVGDVTGFLALDNTNKLIVLSFRGSRSIENWIGNLNFDLKEINDICSGCRGHDGFTSSWRSVADTLRQKVEDAVREHPDYRVVFTGHSLGGALATVAGADLRGNGYDIDVFSYGAPRVGNRAFAEFLTVQTGGTLYRITLTNDIVPRLPPREFGYSHSSPEYWIKSGTLVPVRRRDIVKIEGIDATGGNNQPNIPDIPAHLWYFGLIGTC

SEQ ID NO: 13504 - protein, 268 aa, Thermomyces lanuginosus
EVSQDLFNQFNLFAQYSKAAYCGANNDAPAGTNITCTGNACPEVEKADATFLYSFEDSGVGDVTGFLALDNTNKLIILSFRGSRSIENWIGNLRFDLKEINDICSGCRGHDGFTSSWRSVADTLRQKVEAAVREHPDYRVVFTGHSLGGALATVAWADLRGNGYDIDVFSYGAPRVGNRAFAEFLTVQTGGTLYRITHTNDIVPRLPPREFGYSHSSPEYWIKSGTLVPVTRNDIVKIEGIDATGGNNQPNIPDIPAHLWYFGLIGTC

SEQ ID NO: 13505 - protein, 268 aa, Thermomyces lanuginosus
EVSRDLFNQFNLFAQYSAAAYCGKNNDAPAGTNITCTGNACPEVEKADATILYSFEDSGVGDVTGFLALDNTNKLIVLSFRGSRSIENWIGNLNFDLKEINDICSGCRGHDGFTSSWRSVADTLRQKVEDAVREHPDYRVVFTGHSLGGALATVAGADLRGNGYDIDVFSYGAPRVGNRAFAEFLTVQTGGTLYRITNTNDIVPRLPPREFGYSHSSPEYWIKSGTLVPVRRRDIVKIEGIDATGGNNQPNIPDITAHLWYFGLIGTC

SEQ ID NO: 13506 - protein, 268 aa, Thermomyces lanuginosus
EVSQDLFNQFNLFAQYSKAAYCQANNDAPAGTNITCTGNACPEVEKADATFLYSFEDSGVGDVTGFLALDNTNKLIVLSFRGSRSIENWIGNLNFDLKEINDICSGCRGHDGFTSSWRSVADTLRQKVEDAVREHPDYRVVFTGHSLGGALATIAWADLRGNGYDIDVFSYGAPRVGNRAFAEFLTQQTGGTLYRITHTNDIVPRLPPREFGYSHSSPEYWIKSGTLVPVTRNDIVKIEGIDATGGNNQPNIPDIPAHLWYFGLIGTC

SEQ ID NO: 13507 - protein, 268 aa, Thermomyces lanuginosus
EVSQDLFNQFNLFAQYSAAAYCGKNNDAPAGTNITCTGNACPEVEKADATFLASFEDNGSGDVTGFLALDNTNKLIVLSFRGSRSIENWIGNLNFDLKEINDICSGCRGHDGFTSSWRSVADTLRQKVEDAVREHPDYRVVFTGHSLGGALATVAGADLRGNGYDIDVFSYGAPRVGNRAFAEFLTVQTGGTLYRITHTNDIVPRLPPREFGYSHSSPEYWIKSGTLVPVRRRDIVKIEGIDATGGNNQPNIPDILAHLWYFGLIGTC

SEQ ID NO: 13508 - protein, 268 aa, Thermomyces lanuginosus
EVSQDLFNQFNLFAQYSAAAYCGKNNDAPAGTQITCTANACPEVEKADATFLYSFEDSGVGDVTGFLALDNTNKLIVLSFRGSRSIENWIGNLNFDLKEINDICSGCRGHDGFTSSWRSVADTLRQKVEDAVREHPDYRVVFTGHSLGGALATVAGADLRGNAYDIDVFSYGAPRVGNRAFAEFLTVQTGGTLYRITHTNDIVPRLPPREFGYSHSSPEYWIKSGTLVPVRRRDIVKIEGIDATGGNNQPNIPDIAAHLWYFGLIGTC

SEQ ID NO: 13509 - protein, 268 aa, Thermomyces lanuginosus
EVSQDLFNQFNLFAQYSKAAYCGANNDAPAGTNITCTGNACPEVEKADATFLYSFEDSGVGDVTGFLALDNTNKQIVLSFRGSRSIENWIGNLRFDLKEINDICSGCRGHDGFTSSWRSVADTLRQKVEDAVREHPDYRVVFTGHSLGGALATIAGADLRGNGYDIDVFSYGAPRVGNRAFAEFLTNQTGGTLYRITHTNDIVPRLPPREFGYSHSSPEYWIKSGTLVPVTRNDIVKIEGIDATGGNNQPNIPDIPAHLWYFGLIGTC

SEQ ID NO: 13510 - protein, 268 aa, Thermomyces lanuginosus
EVSQDLFNQFNLFAQYSAAAYCGKNNDAPAGTNITCTGNACPEVEKADATILYSFEDSGVGDVTGFLALDNTNKLIVLSFRGSRSIENWIGNLNFDLKEINDICSGCRGHDGFTSSWRSVADTLRQKVEDAVREHPDYRVVFAGHSLGGALATVAGADLRGDGYDIDVFSYGAPRVGNRAFAEFLTVQTGGTLYRITHTNDIVPRLPPREFGYSHSSPEYWIKSGTLRPVRRRDIVKIEGIDATGGNNQPNIPDIPAHLWYFGLIGTC

SEQ ID NO: 13511 - protein, 268 aa, Thermomyces lanuginosus
EKSQDLFNQFNLFAQYSAAAYCGKNNDAPAGTKITCTGNACPEVEKADATILYSFEDSGVGDVTGFLALDNTNKLIVLSFRGSRSIENWIGNLNFDLKEINDICSGCRGHDGFTSSWRSVADTLRQKVEDAVREHPDYRVVFTGHSLGGALATVAGADLRGNGYDIDVFSYGAPRVGNRAFAEFLTVQTGGTLYRITHTNDIVPRLPPREFGYSHSSPEYWIKSGTDVPVRRRDIVKIEGIDATGGNNQPNIPDIPAHLWYFGLIGTC

SEQ ID NO: 13512 - protein, 268 aa, Thermomyces lanuginosus
EVSQDLFNQFNLFAQYSAAAYCGKNNQAPAGTNITCTGNACPEVEKADATTLYSFEDSGVGDVTGFLALDNTNKQIVLSFRGSRSIENWIQNLNFDLKEINDICSGCRGHDGFTSSWRSVADTLRQKVEAAVREHPDYRVVFTGHSLGGALATVAGADLRGNGYDIDVFSYGAPRVGNRAFAEFLTTQTGGTLYRITHTNDIVPRLPPREFGYSHSSPEYWIKSGTLVPVTRNDIVKIEGIDATGGNNQPNQPDIPAHLWYFGLIGTC

SEQ ID NO: 13513 - protein, 268 aa, Thermomyces lanuginosus
EVSQDLFNQFNLFAQYSAAAYCGKNNDAPAGTQITCTGNACPEVEKADATFLYSFEDSGVGDVTGFLALDNTNKLIVLSFRGSRSIENWIGNLNFDLKEINDICSGCRGHDGFTSSWRSVADTLRQKVEDAVREHPDYRVVFAGHSLGGALATVAGADLRGNGYDIDVFSYGAPRVGNRAFAEFLTVQTGGTLYRITHTNDIVPRLPPRQFGYSHSSPEYWIKSGTLVPVRRRDIVKIEGIDATGGNNQPNIPDAPAHLWYFGLIGTC

SEQ ID NO: 13514 - protein, 268 aa, Thermomyces lanuginosus
EVSQDLFNQFNLFAQYSAAAYCGKNNDAPAGTNITCTGNACPEVEKADATILYSFRDSGVGDVTGFLALDNTNKLIVLSFRGSRSIENWIGNLNFDLKEINDICSGCRGHDGFTSSWFSVADTLRQKVEDAVREHPDYRVVFTGHSLGGALATVAGADLRGNGYDIDVFSYGAPRVGNRAFAEFLTVQTGGTLYRITHTNDIVPRLPPREFGYSHSSPEYWIKSGTLVPVRRRDIVKIEGIDAEGGNNQPNIPDIPAHLWYFGLIGTC

SEQ ID NO: 13515 - protein, 268 aa, Thermomyces lanuginosus
EVSQDLFNQFNLFAQYSAAAYCGKNNEAPAGTNITCTGNACPEVEKAQATFLYSFEDMGVGDVTGFLALDNTNKLIVLSFRGSRSIENWIGNLNFDLKEINDICSGCRGHDGFTSSWRSVADTLRQKVEAAVREHPQYRVVFTGHSLGGALATVAGADLRGNPYDIDVFSYGAPRVGNRAFAEFLTVQTGGTLYRITHTNDIVPRLPPREFGYSHSSPEYWIKSGTLVPVTRNDIVKIEGIDATGGNNQPNIPDIPAHLWYFGRIGTC

SEQ ID NO: 13516 - protein, 268 aa, Thermomyces lanuginosus
EVSQDLFNQFRLFAQYSAAAYCGKNNDAPAGTQITCTGNACPEVEKADATFLYSFEDSGVGDVTGFLALDNTNKLIVLSFRGSRSIENWITNLNFDLKEINDICSGCRGHDGFTSSWRSVADTLRQKVEDAVREHPDYRVVFTGHSLGGALATVAGADLRGNPYDIDVFSYGAPRVGNRAFAEFLTVQTGGTLYRITHTNDIVPRLPPREFGYSHSSPEYWIKSGTLVPVRRRDIVKIEGIDATGGNNQPNIPSIPAHLWYFGLIGTC

SEQ ID NO: 13517 - protein, 268 aa, Thermomyces lanuginosus
EVSQDLFNQFNLFAQYSAAAYCGKNNDAPAGTNITCTGNACPEVEKADATFLYSFEDSGVGDVTGFLALDNTNKLIVLSFRGSRSIENWIGNLNFDLKEINDICSGCRGHAGFTSSWRSVADTLRQKVEDAVREHPDYRVVFTGHSLGGALATVAGADLRGNKYDIDVFSYGAPRVGNRAFAEFLTVQTGGTLYRITHTNDIVPRLPPREFGYSHSSPEYWIKSGTLVPVRRRDIVKIEGIDATGGNNQPNIPSITAHLWYFGLIGTC

SEQ ID NO: 13518 - protein, 268 aa, Thermomyces lanuginosus
EVSQDLFNQFNLFAQYSKAAYCQKNNDAPAGTNITCTGNACPEVEKADATFLYSFEDSGVGDVTGFLALDNTNKQIILSFRGSRSIENWIGNLNFDLKEINDICSGCRGHDGFTSSWRSVADTLRQKVEAAVREHPDYRVVFTGHSLGGALATVAWADLRGNGYDIDVFSYGAPRVGNRAFAEFLTVQTGGTLYRITHTNDIVPRLPPREFGYSHSSPEYWIKSGTLVPVTRNDIVKIEGIDATGGNNQPNIPDIPAHLWYFGLIGTC

SEQ ID NO: 13519 - protein, 268 aa, Thermomyces lanuginosus
EVSRDLFNQFNLFAQYSAAAYCGKNNDAPAGTNITCTGNACPEVEKADATILYSFEDSGVGDVTGFLALDNTNKLIVLSFRGSRSIENWIGNLNFDLKEINDICSGCRGHDGFTSSWRSVADTLRQKVEDAVREHPDYRVVFTGHSLGGALATVAGADLRGDGYDIDVFSYGAPRVGNRAFAEFLTVQTGGTLYRITNTNDIVPRLPPREFGYSHSSPEYWIKSGTLVPVRRRDIVKIEGIDATGGNNQPNIPDIPAHLWYFGLIGTC

SEQ ID NO: 13520 - protein, 268 aa, Thermomyces lanuginosus
EVSQDLFNQFNLFAQYSAAAYCQKNNQAPAGTNITCTGNACPEVEKADATTLYSFEDSGVGDVTGFLALDNTNKQIVLSFRGSRSIENWIQNLNFDLKEINDICSGCRGHDGFTSSWRSVADTLRQKVEAAVREHPDYRVVFTGHSLGGALATVAGADLRGNGYDIDVFSYGAPRVGNRAFAEFLTVQTGGTLYRITHTNDIVPRLPPREFGYSHSSPEYWIKSGTLVPVTRNDIVKIEGIDATGGNNQPNQPDIPAHLWYFGRIGTC

SEQ ID NO: 13521 - protein, 268 aa, Thermomyces lanuginosus
EVSQDLFNQFNLFAQYSAAAYCGKNNNAPAGTNITCTGNACPEVEKADATILYSFRDSGVGDVTGFLALDNTNKLIVLSFRGSRSIENWIGNLNFDLKEINDICSGCRGHDGFTSSWFSVADTLRQKVEDAVREHPDYRVVFTGHSLGGALATVAGADLRGNGYDIDVFSYGAPRVGNRAFAEFLTVQTGGTLYRITHTNDIVPRLPPREFGYSHSSPEYWIKSGTLVPVRRRDIVKIEGIDATGGNNQPNIPDIPAHLWYFGLIGTC

SEQ ID NO: 13522 - protein, 268 aa, Thermomyces lanuginosus
EYSQDLFNQFNLFAQYSAAAYCGKNNDAPAGTKITCTGNACPEVEKADATILYSFEDSGVGDVTGFLALDNTNKLIVLSFRGSRSIENWIGNLNFDLKEINDICSGCRGHDGFTSSWRSVADTLRQKVEDAVREHPDYRVVFTGHSLGGALATVAGADLRGNGYDIDVFSYGAPRVGNRAFAEFLTVQTGGTLYRITYTNDIVPRLPPREFGYSHSSPEYWIKSGTLVPVRRRDIVKIEGIDATGGNNQPNIPDIPAHLWYFGLIGTC

SEQ ID NO: 13523 - protein, 268 aa, Thermomyces lanuginosus
EVSQDLFNQFNLFAQYSAAAYCQKNNDAPAGTNITCTGNACPEVEKADATFLYSFEDSGVGDVTGFLALDNTNKQIVLSFRGSRSIENWIGNLNFDLKEINDICSGCRGHDGFTSSWRSVADTLRQKVEAAVREHPDYRVVFTGHSLGGALATIAGADLRGNGYDIDVFSYGAPRVGNRAFAEFLTNQQGGTLYRITHTNDIVPRLPPREFGYSHSSPEYWIKSGTLVPVTRNDIVKIEGIDATGGNNQPNIPDIPAHLWYFGRIGTC

SEQ ID NO: 13524 - protein, 268 aa, Thermomyces lanuginosus
EYSQDLFNQFNLFAQYSAAAYCGKNNDAPAGTKITCTGNACPEVEKADATVLYSFEDSGVGDVTGFLALDNTNKLIVLSFRGSRSIENWIGNLNFDLKEINDICSGCRGHDGFTSSWRSVADTLRQKVEDAVREHPDYRVVFTGHSLGGALATVAGADLRGNGYDIDVFSYGAPRVGNRAFAEFLTVQTGGTLYRITHTNDIVPRLPPREFGYSHSSPEYWIKSGTLVPVRRRDIVKIEGIDATGGNNQPNIPDGPAHLWYFGLIGTC

SEQ ID NO: 13525 - protein, 268 aa, Thermomyces lanuginosus
EKSQDLFNQFNLFAQYSAAAYCGKNNDAPAGTKITCTGNACPEVEKADATLLYSFEDSGVGDVTGFLALDNTNKLIVLSFRGSRSIENWIGNLNFDLKEINDICSGCRGHDGFTSSWRSVADTLRQKVEDAVREHPDYRVVFTGHSLGGALATVAGADLRGNGYDIDVFSYGAPRVGNRAFAEFLTVQTGGTLYRITHTNDIVPRLPPREFGYSHSSPEYWIKSGTLVPVRRRDIVKIEGIDATGGNNQPNIPDGPAHLWYFGLIGTC

SEQ ID NO: 13526 - protein, 268 aa, Thermomyces lanuginosus
EVSQDLFNQFDLFAQYSAAAYCGKNNDAPAGTQITCTGNACPEVEKADATFLYSFEDSGVGDVTGFLALDNTNKLIVLSFRGSRSIENWITNLNFDLKEINDICSGCRGHDGFTSSWRSVADTLRQKVEDAVREHPDYRVVFTGHSLGGALATVAGADLRGNKYDIDVFSYGAPRVGNRAFAEFLTVQTGGTLYRITHTNDIVPRLPPREFGYSHSSPEYWIKSGTLVPVRRRDIVKIEGIDATGGNNQPNIPSIPAHLWYFGLIGTC

SEQ ID NO: 13527 - protein, 268 aa, Thermomyces lanuginosus
EVSQDLFNQFNLFAQYSAAAYCQANNDAPAGTNITCTGNACPEVEKADATFLYSFEDSGVGDVTGFLALDNTNKQIVLSFRGSRSIENWIGNLNFDLKEINDICSGCRGHDGFTSSWRSVADTLRQKVEAAVREHPDYRVVFTGHSLGGALATIAWADLRGNGYDIDVFSYGAPRVGNRAFAEFLTVQTGGTLYRITHTNDIVPRLPPREFGYSHSSPEYWIKSGTLVPVTRNDIVKIEGIDATGGNNQPNIPDIPAHLWYFGLIGTC

SEQ ID NO: 13528 - protein, 268 aa, Thermomyces lanuginosus
EVSQDLFNQFNLFAQYSAAAYCGKNNDAPAGTNITCTGNACPEVEKADATFLYSFRDSGVGDVTGFLALDNTNKLIVLSFRGSRSIENWIGNLNFDLIEINDICSGCRGHDGFTSSWFSVADTLRQKVEDAVREHPDYRVVFTGHSLGGALATVAGADLRGNSYDIDVFSYGAPRVGNRAFAEFLTVQTGGTLYRITHTNDIVPRLPPREFGYSHSSPEYWIKSGTLVPVRRRDIVKIEGIDATGGNNQPNIPDIPAHLWYFGLIGTC

SEQ ID NO: 13529 - protein, 268 aa, Thermomyces lanuginosus
EVSQDLFNQFNLFAQYSAAAYCSKNNDAPAGTNITCTGNACPEVEKADATFLYSFRDSGVGDVTGFLALDNTNKLIVLSFRGSRSIENWIGNLNFDLIEINDICSGCRGHDGFTSSWFSVADTLRQKVEDAVREHPDYRVVFTGHSLGGALATVAGADLRGNGYDIDVFSYGAPRVGNRAFAEFLTVQTGGTLYRITHTNDIVPRLPPREFGYSHSSPEYWIKSGTLVPVRRRDIVKIEGIDATGGNNQPNIPDIPAHLWYFGLIGTC

SEQ ID NO: 13530 - protein, 268 aa, Thermomyces lanuginosus
EYSQDLFNQFNLFAQYSAAAYCGKNNDAPAGTKITCTGNACPEVEKADATILYSFEDSGVGDVTGFLALDNTNKLIVLSFRGSRSIENWIGNLNFDLKEINDICSGCRGHDGFTSSWRSVADTLRQKVEDAVREHPDYRVVFTGHSLGGALATVAGADLRGNGYDIDVFSYGAPRVGNRAFAEFLTVQTGGTLYRITLTNDIVPRLPPREFGYSHSSPEYWIKSGTLVPVRRRDIVKIEGIDATGGNNQPNIPDIPAHLWYFGLIGTC

SEQ ID NO: 13531 - protein, 268 aa, Thermomyces lanuginosus
EVSQDLFNQFNLFAQYSAAAYCGKNNDAPAGTQITCTGNACPEVEKADATFLYSFEDSGVGDVTGFLALDNTNKLIVLSFRGSRSIENWIQNLNFDLKEINDICSGCRGHDGFTSSWRSVADTLRQKVEDAVREHPDYRVVFTGHSLGGGLATVAGADLRGNGYDIDVFSYGAPRVGNRAFAEFLTVQTGGTLYRITHTNDIVPRLPPRQFGYSHSSPEYWIKSGTLVPVRRRDIVKIEGIDATGGNNQPNIPDNPAHLWYFGLIGTC

SEQ ID NO: 13532 - protein, 268 aa, Thermomyces lanuginosus
EKSQDLFNQFNLFAQYSAAAYCGKNNDAPAGTKITCTGNACPEVEKADATVLYSFEDSGVGDVTGFLALDNTNKLIVLSFRGSRSIENWIGNLNFDLKEINDICSGCRGHDGFTSSWRSVADTLRQKVEDAVREHPDYRVVFTGHSLGGALATVAGADLRGNGYDIDVFSYGAPRVGNRAFAEFLTVQTGGTLYRITNTNDIVPRLPPREFGYSHSSPEYWIKSGTLVPVRRRDIVKIEGIDATGGNNQPNIPDIPAHLWYFGLIGTC

SEQ ID NO: 13533 - protein, 268 aa, Thermomyces lanuginosus
EVSQDLFNQFNLFAQYSAAAYCGKNNDAPAGTQITCTGNACPEVEKADATFLYSFEDSGVGDVTGFLALDNTNKLIVLSFRGSRSIENWITNLNFELTEINDICSGCRGHDGFISSWRSVADTLRQKVEDAVREHPDYRVVFTGHSLGGALATVAGADLRGNSYDIDVFSYGAPRVGNRAFAEFLTVQTGGTLYRITHTNDIVPRLPPREFGYSHSSPEYWIKSGTLVPVRRRDIVKIEGIDATGGNNQPNIPDIPAHLWYFGLIGTC

SEQ ID NO: 13534 - protein, 268 aa, Synthetic construct
EVSQDLFNQFNLFAQYSAAAYCGKNNDAPAGTNITCTGNACPEVEKADATFLYSFRLSGMGNVTGFLALDNTNKLIVLSFRGTRSIENWIGNLNFPLKEINEICSGCRGHDGFTSSWRSVADTLRQKVEDAVREHPDYRVVFTGHSLGGALATVAGADLRGNGYDIDVFSYGAPRVGNRAFAEFLTVQTGGTLYRITHTNDIVPRLPPREFGYSHSSPEYWIKSGTLVPVTRNDIVKIEGIDATGGNNQPNIPDIPAHLWYFGLIGTC

SEQ ID NO: 13535 - protein, 268 aa, Thermomyces lanuginosus
EVSQDLFNQFNLFAQYSAAAYCGKNNDAPAGTQITCTGNACPEVEKADATFLYSFEDSGVGDVTGFLALDNTNKLIVLSFRGSRSIENWIGNLNFDLKEINDICSGCRGHDGFTSSWRSVADTLRQKVEDAVREHPDYRVVFTGHSLGGALATVAGADLRGNGYDIDVFSYGAPRVGNRAFAEFLTVQTGGTLYRITHTNDIVPRLPPRYFGYSHSSPEYWIKSGTLVPVRRRDIVKIEGIDATGGNNQPNIPYFPAHLWYFGLIGTC

SEQ ID NO: 13536 - protein, 268 aa, Thermomyces lanuginosus
EVSQDLFNQFNLFAQYSAAAYCGKNNDAPAGTQITCTGNACPEVEKADATFLYSFEDSGVGDVTGFLALDNTNKLIVLSFRGSRSIENWITNLSFDLKEINDICSGCRGHAGFTSSWRSVADTLRQKVEDAVREHPDYRVVFTGHSLGGALATVAGADLRGNGYDIDVFSYGAPRVGNRAFAEFLTVQTGGTLYRITHTNDIVPRLPPREFGYSHSSPEYWIKSGTLVPVRRRDIVKIEGIDATGGNNQPNIPDITAHLWYFGLIGTC

SEQ ID NO: 13537 - protein, 268 aa, Thermomyces lanuginosus
EVSQDLFNQFNLFAQYSAAAYCQANNDAPAGTNITCTGNACPEVEKADATFLYSFEDSGVGDVTGFLALDNTNKQIVLSFRGSRSIENWIGNLNFDLKEINDICSGCRGHDGFTSSWRSVADTLRQKVEDAVREHPDYRVVFTGHSLGGALATIAWADLRGNGYDIDVFSYGAPRVGNRAFAEFLTNQTGGTLYRITHTNDIVPRLPPREFGYSHSSPEYWIKSGTLVPVTRNDIVKIEGIDATGGNNQPNIPDIPAHLWYFGLIGTC

SEQ ID NO: 13538 - protein, 268 aa, Thermomyces lanuginosus
EVSRDLFNQFNLFAQYSAAAYCGKNNDAPAGTNITCTGNACPEVEKADATFLYSFEDSGVGDVTGFLALDNTNKLIVLSFRGSRSIENWIGNLNFDLKEINDICSGCRGHDGFTSSWRSVADTLRQKVEDAVREHPDYRVVFTGHSLGGALATVAGADLRGNGYDIDVFSYGAPRVGNRAFAEFLTVQTGGTLYRITHTNDIVPRLPPREFGYSHSSPEYWIKSGTLPPVRRRDIVKCEGIDATCGNNQPNIPDIPAHLWYFGLIGTC

SEQ ID NO: 13539 - protein, 268 aa, Thermomyces lanuginosus
EVSQDLFNQFNLFAQYSAAAYCGKNNDAPAGTNITCTGNACPEVEKADATFLYSFRDSGVGDVTGFLALDNTNKLIVLSFRGSRSIENWIGNLNFDLIEINDICSGCRGHDGFTSSWFSVADTLRQKVEDAVREHPDYRVVFTGHSLGGALATVAGADLRGNGYDIDVFSYGAPRVGNRAFAEFLTVQTGGTLYRITHTNDIVPRLPPREFGYSHSSPEYWIKSGTLVPVRRRDIVKIEGIDATGGNNQPNIPDITAHLWYFGLIGTC

SEQ ID NO: 13540 - protein, 268 aa, Thermomyces lanuginosus
EVSQDLFNQFNLFAQYSAAAYCGKNNDAPAGTNITCTGNICPEVEKADATFLYSFRDSGVGDVTGFLALDNTNKLIVLSFRGSRSIENWIGNLNFDLKEINDICSGCRGHDGFTSSWFSVADTLRQKVEDAVREHPDYRVVFTGHSLGGALATVAGADLRGNGYDIDVFSYGAPRVGNRAFAEFLTVQTGGTLYRITHTNDIVPRLPPREFGYSHSSPEYWIKSGTLVPVRRRDIVKIEGIDAEGGNNQPNIPDIPAHLWYFGLIGTC

SEQ ID NO: 13541 - protein, 268 aa, Thermomyces lanuginosus
EVSQDLFNQFNLFAQYSKAAYCQKNNDAPAGTNITCTGNACPEVFKADVTFLYSFEDSGVGDVTGFLALDNTNKQIVLSFRGSRSIENWIGNLNFDLKEINDICSGCRGHDGFTSSWRSVADTLRQKVEDAVREHPDYRVVFTGHSLGGALATVAGADLRGNGYDIDVFSYGAPRVGNRAFAEFLTTQTGGTLYRITHTNDIVPRLPPREFGYSHSSPEYWIKSGTLVPVTRNDIVKIEGIDATGGNNQPNIPDIPAHLWYFGLIGTC

SEQ ID NO: 13542 - protein, 268 aa, Thermomyces lanuginosus
EYSQDLFNQFNLFAQYSAAAYCGKNNDAPAGTKITCTGNACPEVEKADATLLYSFEDSGVGDVTGFLALDNTNKLIVLSFRGSRSIENWIGNLNFDLKEINDICSGCRGHDGFTSSWRSVADTLRQKVEDAVREHPDYRVVFTGHSLGGALATVAGADLRGNGYDIDVFSYGAPRVGNRAFAEFLTVQTGGTLYRITHTNDIVPRLPPREFGYSHSSPEYWIKSGTLVPVRRRDIVKIEGIDATGGNNQPNIPDIPIHLWYFGLIGTC

SEQ ID NO: 13543 - protein, 268 aa, Thermomyces lanuginosus
EVSQDLFNQFNLFAQYSAAAYCGKNNDAPAGTNITCTGNACPEVEKADATFLYSFRDSGVGDVTGFLALDNTNKLIVLSFRGSRSIENWIGNLNFDLKEINDICSGCRGHDGFTSSWFSVADTLRQKVEDAVREHPDYRVVFTGHSLGGALATVAGADLRGNGYDIDVFSYGAPRVGNRAFAEFLTVQTGGTLYRITHTNDIVPRLPPREFGYSHSSPEFWIKSGTLVPVRRRDIVKIEGIDAEGGNNQPNIPDIPAHLWYFGLIGTC

SEQ ID NO: 13544 - protein, 268 aa, Thermomyces lanuginosus
EVSQDLFNQFRLFAQYSAAAYCGKNNDAPAGTQITCTGNACPEVEKADATFLYSFEDSGVGDVTGFLALDNTNKLIVLSFRGSRSIENWIKNLNFDLKEINDICSGCRGHDGFTSSWRSVADTLRQKVEDAVREHPDYRVVFTGHSLGGALATVAGADLRGNKYDIDVFSYGAPRVGNRAFAEFLTVQTGGTLYRITHTNDIVPRLPPREFGYSHSSPEYWIKSGTLVPVRRRDIVKIEGIDATGGNNQPNIPSIPAHLWYFGLIGTC

SEQ ID NO: 13545 - protein, 268 aa, Thermomyces lanuginosus
EVSQDLFNQFNLFAQYSAAAYCSKNNDAPAGTNITCTGNACPEVEKADATFLYSFRDSGVGDVTGFLALDNTNKLIVLSFRGSRSIENWIGNLNFDLKEINDICSGCRGHDGFTSSWFSVADTLRQKVEDAVREHPDYRVVFTGHSLGGALATVAGADLRGNGYDIDVFSYGAPRVGNRAFAEFLTVQTGGTLYRITHTNDIVPRLPPREFGYSHSSPEYWIKSGTLVPVRRRDIVKIEGIDATGGNNQPNIPDITAHLWYFGLIGTC

SEQ ID NO: 13546 - protein, 268 aa, Thermomyces lanuginosus
EVSQDLFNQFRLFAQYSAAAYCGKNNDAPAGTQITCTGNACPEVEKADATFLYSFEDSGVGDVTGFLALDNTNKLIVLSFRGSRSIENWITNLNFDLKEINDICSGCRGHDGFTSSWRSVADTLRQKVEDAVREHPDYRVVFTGHSLGGALATVAGADLRGNAYDIDVFSYGAPRVGNRAFAEFLTVQTGGTLYRITHTNDIVPRLPPREFGYSHSSPEYWIKSGTLVPVRRRDIVKIEGIDATGGNNQPNIPSIPAHLWYFGLIGTC

SEQ ID NO: 13547 - protein, 268 aa, Thermomyces lanuginosus
EVSQDLFNQFNLFAQYSKAAYCGKNNDAPAGTNITCTGNACPEVEKADATFLYSFEDSGVGDVTGFLALDNTNKLIVLSFRGSRSIENWIGNLRFDLKEINDICSGCRGHAGFTSSWRSVADTLRQKVEAAVREHPDYRVVFTGHSLGGALATIAGADLRGNGYDIDVFSYGAPRVGNRAFAEFLTNQTGGTLYRITHTNDIVPRLPPREFGYSHSSPEYWIKSGTLVPVTRNDIVKIEGIDATGGNNQPNIPDIPAHLWYFGLIGTC

SEQ ID NO: 13548 - protein, 268 aa, Thermomyces lanuginosus
EVSRDLFNQFNLFAQYSAAAYCGKNNDAPAGTNITCTGNACPEVEKADATILYSFEDSGVGDVTGFLALDNTNKLIVLSFRGSRSIENWIGNLNFDLKEINDICSGCRGHDGFTSSWRSVADTLRQKVEDAVREHPDYRVVFTGHSLGGALATVAGADLRGNGYDIDVFSYGAPRVGNRAFAEFLTVQTGGTLYRITSTNDIVPRLPPREFGYSHSSPEYWIKSGTLRPVRRRDIVKIEGIDATGGNNQPNIPDIPAHLWYFGLIGTC

SEQ ID NO: 13549 - protein, 268 aa, Thermomyces lanuginosus
EVSQDLFNQFNLFAQYSKAAYCGANNDAPAGTNITCTGNACPEVEKADATFLYSFEDSGVGDVTGFLALDNTNKQIVLSFRGSRSIENWIGNLFFDLKEINDICSGCRGHDGFTSSWRSVADTLRQKVEDAVREHPDYRVVFTGHSLGGALATIAGADLRGNGYDIDVFSYGAPRVGNRAFAEFLTNQTGGTLYRITHTNDIVPRLPPREFGYSHSSPEYWIKSGTLVPVTRNDIVKIEGIDATGGNNQPNIPDIPAHLWYFGLIGTC

SEQ ID NO: 13550 - protein, 268 aa, Thermomyces lanuginosus
EVSQDLFNQFNLFAQYSAAAYCGKINRAPAGTNITCTGNACPEVEKADATFLYSFEDSGVGDVTGFLALDNTNKLIVLSFRGSRSIENWIGNLNFDLKEINDICSGCRGHAGFTSSWRSVADTLRQKVEDAVREHPDYRVVFTGHSLGGALATVAGADLRGNGYDIDVFSYGAPRVGNRAFAEFLTVQTGGTLYRITHTNDIVPRLPPREFGYSHPSPEYWIKSGTGVPVTRNDIVKIEGIDATGGNNQPNIPDITAHLWYFGLIGTC

SEQ ID NO: 13551 - protein, 268 aa, Thermomyces lanuginosus
EVSQDLFNQFNLFAQYSAAAYCGKNNRAPAGTNITCTGNACPEVEKADATFLYSFEDSGVGDVTGFLALDNTNKLIVLSFRGSRSIENWISNLNFDLKEINDICSGCRGHAGFTSSWRSVADTLRQKVEDAVREHVDYRVVFTGHSLGGALATVAGADLRGNGYDIDVFSYGAPRVGNRAFAEFLTVQTGGTLYRITHTNDIVPRLPPREFGYSHPSPEYWIKSGTGVPVTRNDIVKIEGIDATGGNNQPNIPDITAHLWYFGLIGTC

SEQ ID NO: 13552 - protein, 268 aa, Thermomyces lanuginosus
EVSQDLFNQFNLFAQYSAAAYCGKNNDAPAGTQITCTANACPEVEKADATFLYSFEDSGVGDVTGFLALDNTNKLIVLSFRGSRSIENWITNLNFDLKEINDICSGCRGHDGFTSSWRSVADTLRQKVEDAVREHPDYRVVFTGHSLGGALATVAGADLRGNKYDIDVFSYGAPRVGNRAFAEFLTVQTGGTLYRITHTNDIVPRLPPREFGYSHSSPEYWIKSGTLVPVRRRDIVKIEGIDATGGNNQPNIPSIPAHLWYFGLIGTC

SEQ ID NO: 13553 - protein, 268 aa, Thermomyces lanuginosus
EVSQDLFNQFNLFAQYSAAAYCGKNNNAPAGTNITCTGNACPEVEKADATFLYSFRDSGVGDVTGFLALDNTNKLIVLSFRGSRSIENWIGNLNFDLKEINDICSGCRGHDGFTSSWFSVADTLRQKVEDAVREHPDYRVVFTGHSLGGALATVAGADLRGNGYDIDVFSYGAPRVGNRAFAEFLTVQTGGTLYRITHTNDIVPRLPPREFGYSHSSPEYWIKSGTLVPVRRRDIVKIEGIDAEGGNNQPNIPDIPAHLWYFGLIGTC

SEQ ID NO: 13554 - protein, 268 aa, Thermomyces lanuginosus
EVSRDLFNQFNLFAQYSAAAYCGKNNDAPAGTNITCTGNACPEVEKADATFLYSFEDSGVGDVTGFLALDNTNKLIVLSFRGSRSIENWIGNLNFDLKEINDICSGCRGHDGFTSSWRSVADTLRQKVEDAVREHPDYRVVFAGHSLGGALATVAGADLRGDGYDIDVFSYGAPRVGNRAFAEFLTVQTGGTLYRITHTNDIVPRLPPREFGYSHSSPEYWIKSGTLPPVRRRDIVKIEGIDATGGNNQPNIPDIPAHLWYFGLIGTC

SEQ ID NO: 13555 - protein, 268 aa, Thermomyces lanuginosus
EVSQDLFNQFNLFAQYSAAAYCQKNNDAPAGTNITCTGNACPEVEKADATFLYSFEDMGVGDVTGFLALDNTNKRIVLSFRGSRSIENWIQNLNFDLKEINDICSGCRGHDGFTSSWRSVADTLRQKVEAAVREHPDYRVVFTGHSLGGALATVAGADLRGNGYDIDVFSYGAPRVGNRAFAEFLTHQTGGTLYRITHTNDIVPRLPPREFGYSHSSPEYWIKSGTLVPVTRNDIVKIEGIDATGGNNQPNQPDIPAHLWYFGRIGTC

SEQ ID NO: 13556 - protein, 268 aa, Thermomyces lanuginosus
EVSQDLFNQFNLFAQYSAAAYCQKNNDAPAGTNITCTGNACPEVEKADATFLYSFEDSGVGDVTGFLALDNTNKQIVLSFRGSRSIENWIGNLNFDLKEINDICSGCRGHDGFTSSWRSVADTLRQKVEAAVREHPDYRVVFTGHSLGGALATIAWADLRGNGYDIDVFSYGAPRVGNRAFAEFLTVQQGGTLYRITHTNDIVPRLPPREFGYSHSSPEYWIKSGTLVPVTRNDIVKIEGIDATGGNNQPNIPDIPAHLWYFGRIGTC

SEQ ID NO: 13557 - protein, 268 aa, Thermomyces lanuginosus
EVSQDLFNQFNLFAQYSAAAYCGKNNDAPAGTNITCTGNACPEVEKADATILYSFRDSGVGDVTGFLALDNTNKLIVLSFRGSRSIENWIGNLNFDLIEINDICSGCRGHDGFTSSWFSVADTLRQKVEDAVREHPDYRVVFTGHSLGGALATVAGADLRGNGYDIDVFSYGAPRVGNRAFAEFLTVQTGGTLYRITHTNDIVPRLPPREFGYSHSSPEYWIKSGTLVPVRRRDIVKIEGIDATGGNNQPNIPDIPAHLWYFGLIGTC

SEQ ID NO: 13558 - protein, 268 aa, Thermomyces lanuginosus
EVSQDLFNQFNLFAQYSAAAYCKKNNSAPAGTNITCTGNACPEVEKADATFLYSFEDSGVGDVTGFLALDNTNKQIVLSFRGSRSIENWIGNLNFDLKEINDICSGCRGHDGFTSSWRSVADTLRQKVEDAVREHPDYRVVFTGHSLGGALATIAWADLRGNGYDIDVFSYGAPRVGNRAFAEFLTNQTGGTLYRITHTNDIVPRLPPREFGYSHSSPEYWIKSGTLVPVTRNDIVKIEGIDATGGNNQPNIPDIPAHLWYFGRIGTC

SEQ ID NO: 13559 - protein, 268 aa, Thermomyces lanuginosus
EVSQDLFNQFNLFAQYSAAAYCQKNNSAPAGTNITCTGNACPEVEKADATTLYSFEDSGVGDVTGFLALDNTNKQIVLSFRGSRSIENWIGNLNFDLKEINDICSGCRGHDGFTSSWRSVADTLRQKVEDAVREHPDYRVVFTGHSLGGALATVAGADLRGNGYDIDVFSYGAPRVGNRAFAEFLTTQTGGTLYRITHTNDIVPRLPPREFGYSHSSPEYWIKSGTLVPVTRNDIVKIEGIDATGGNNQPNQPDIPAHLWYFGLIGTC

SEQ ID NO: 13560 - protein, 268 aa, Thermomyces lanuginosus
EVSQDLFNQFRLFAQYSAAAYCGKNNDAPAGTQITCTGNACPEVEKADATFLYSFEDSGVGDVTGFLALDNTNKLIVLSFRGSRSIENWITNLNFDLKEINDICSGCRGHDGFTSSWRSVADTLRQKVEDAVREHPDYRVVFTGHSLGGALATVAGADLRGNKYDIDVFSYGAPRVGNRAFAEFLTVQTGGTLYRITHTNDIVPRLPPREFGYSHSSPEYWIKSGTLVPVRRRDIVKIEGIDATGGNNQPNIPSIPAHLWYFGLIGTC

SEQ ID NO: 13561 - protein, 268 aa, Thermomyces lanuginosus
EVSQDLFNQFNLFAQYSAAAYCGKNNDAPAGTQITCTGNACPEVEKADATFLYSFEDSGVGDVTGFLALDNTNKLIVLSFRGSRSIENWIGNLNFDLKEINDICSGCRGHDGFTSSWRSVADTLRQKVEDAVREHPDYRVVFTGHSLGGALATVARADLRGNGYDIDVFSYGAPRWGNRAFAEFLTVQTGGTLYRITHTNDIVPRLPPREFGYSHSSPEYWIKSGTLVPVRRRDIVKIEGIDATGGNNQPNIPDIIAHLWYFGLIGTC

SEQ ID NO: 13562 - protein, 268 aa, Thermomyces lanuginosus
EKSQDLFNQFNLFAQYSAAAYCGKNNDAPAGTKITCTGNACPEVEKADATVLYSFEDSGVGDVTGFLALDNTNKLIVLSFRGSRSIENWIGNLNFDLKEINDICSGCRGHDGFTSSWRSVADTLRQKVEDAVREHPDYRVVFTGHSLGGALATVAGADLRGNGYDIDVFSYGAPRVGNRAFAEFLTVQTGGTLYRITHTNDIVPRLPPREFGYSHSSPEYWIKIGTLVPVRRRDIVKIEGIDATGGNNQPNIPDIPAHLWYFGLIGTC

SEQ ID NO: 13563 - protein, 268 aa, Thermomyces lanuginosus
EVSQDLFNQFNLFAQYSAAAYCGKNNDAPAGTNITCTGNACPEVEKAQATFLYSFEDSGVGDVTGFLALDNTNKLIVLSFRGSRSIENWIGNLNFDLKEINDICSGCRGHDGFTSSWRSVADTLRQKVEAAVREHPQYRVVFTGHSLGGALATVAGADLRGNPYDIDVFSYGAPRVGNRAFAEFLTVQTGGTLYRITHTNDIVPRLPPREFGYSHSSPEYWIKSGTMVPVTRQDIVKIEGIDATGGNNQPNIPDIPAHLWYFGRIGTC

SEQ ID NO: 13564 - protein, 268 aa, Thermomyces lanuginosus
EVSQDLFNQFNLFAQYSAAAYCQKNNDAPAGTNITCTGNACPEVEKADATTLYSFEDSGVGDVTGFLALDNTNKQIVLSFRGSRSIENWIQNLNFDLKEINDICSGCRGHDGFTSSWRSVADTLRQKVEAAVREHPDYRVVFTGHSLGGALATVAGADLRGNGYDIDVFSYGAPRVGNRAFAEFLTTQTGGTLYRITHTNDIVPRLPPREFGYSHSSPEYWIKSGTLVPVTRNDIVKIEGIDATGGNNQPNQPDIPAHLWYFGRIGTC

SEQ ID NO: 13565 - protein, 268 aa, Thermomyces lanuginosus
EVSQDLFNQFNLFAQYSAAAYCKANNDAPAGTNITCTGNACPEVEKADATFLYSFEDSGVGDVTGFLALDNTNKQIVLSFRGSRSIENWIGNLRFDLKEINDICSGCRGHDGFTSSWRSVADTLRQKVEAAVREHPDYRVVFTGHSLGGALATVAWADLRGNGYDIDVFSYGAPRVGNRAFAEFLTVQTGGTLYRITHTNDIVPRLPPREFGYSHSSPEYWIKSGTLVPVTRNDIVKIEGIDATGGNNQPNIPDIPAHLWYFGLIGTC

SEQ ID NO: 13566 - protein, 268 aa, Thermomyces lanuginosus
EVSQDLFNQFRLFAQYSAAAYCGKNNDAPAGTQITCTGNACPEVEKADATFLYSFEDSGVGDVTGFLALDNTNKLIVLSFRGSRSIENWIGNLNFDLKEINDICSGCRGHDGFTSSWRSVADTLRQKVEDAVREHPDYRVVFTGHSLGGALATVAGADLRGNGYDIDVFSYGAPRVGNRAFAEFLTVQTGGTLYRITHTNDIVPRLPPRVFGYSHSSPEYWIKSGTLVPVRRRDIVKIEGIDATGGNNQPNIPSIPAHLWYFGLIGTC

SEQ ID NO: 13567 - protein, 268 aa, Thermomyces lanuginosus
EKSQDLFNQFNLFAQYSAAAYCGKNNDAPAGTKITCTGNACPEVEKADATVLYSFEDSGVGDVTGFLALDNTNKLIVLSFRGSRSIENWIGNLNFDLKEINDICSGCRGHDGFTSSWRSVADTLRQKVEDAVREHPDYRVVFTGHSLGGALATVAGADLRGNGYDIDVFSYGAPRVGNRAFAEFLTVQTGGTLYRITHTNDIVPRLPPREFGYSHSSPEYWIKPGTLVPVRRRDIVKIEGIDATGGNNQPNIPDIPAHLWYFGLIGTC

SEQ ID NO: 13568 - protein, 268 aa, Thermomyces lanuginosus
EVSQDLFNQFNLFAQYSAAAYCGKNNRAPAGTNITCTGNACPEVEKADATFLYSFEDSGVGDVTGFLALDNTNKLIVLSFRGSRSIENWIANLNFEQKEINDICSGCRGHAGFTSSWRSVADTLRQKVEDAVREHVDYRVVFTGHSLGGALATVAGADLRGNGYDIDVFSYGAPRVGNRAFAEFLTVQTGGTLYRITHTNDIVPRLPPREFGYSHPSPEYWIKSGTGVPVTRNDIVKIEGIDATGGNNQPNIPDITAHLWYFGLIGTC

SEQ ID NO: 13569 - protein, 268 aa, Thermomyces lanuginosus
EYSQDLFNQFNLFAQYSAAAYCGKNNDAPAGTKITCTGNACPEVEKADATLLYSFEDSGVGDVTGFLALDNTNKLIVLSFRGSRSIENWIGNLNFDLKEINDICSGCRGHDGFTSSWRSVADTLRQKVEDAVREHPDYRVVFTGHSLGGALATVAGADLRGNGYDIDVFSYGAPRVGNRAFAEFLTVQTGGTLYRITLTNDIVPRLPPREFGYSHSSPEYWIKSGTLVPVRRRDIVKIEGIDATGGNNQPNIPDIPAHLWYFGLIGTC

SEQ ID NO: 13570 - protein, 268 aa, Thermomyces lanuginosus
EKSQDLFNQFNLFAQYSAAAYCGKNNDAPAGTKITCTGNACPEVEKADATVLYSFEDSGVGDVTGFLALDNTNKLIVLSFRGSRSIENWIGNLNFDLKEINDICSGCRGHDGFTSSWRSVADTLRQKVEDAVREHPDYRVVFTGHSLGGGLATVAGADLRGNGYDIDVFSYGAPRVGNRAFAEFLTVQTGGTLYRITHTNDIVPRLPPREFGYSHSSPEYWIKSGTLVPVRRRDIVKIEGIDATGGNNQPNIPDIPAHLWYFGLIGTC

SEQ ID NO: 13571 - protein, 268 aa, Thermomyces lanuginosus
EVSQDLFNQFNLFAQYSAAAYCGANNDAPAGTNITCTGNACPEVEKADATFLYSFEDSGVGDVTGFLALDNTNKRIVLSFRGSRSIENWIGNLNFDLKEINDICSGCRGHDGFTSSWRSVADTLRQKVEAAVREHPDYRVVFTGHSLGGALATIAWADLRGNGYDIDVFSYGAPRVGNRAFAEFLTVQQGGTLYRITHTNDIVPRLPPREFGYSHSSPEYWIKSGTLVPVTRNDIVKIEGIDATGGNNQPNIPDIPAHLWYFGRIGTC

SEQ ID NO: 13572 - protein, 268 aa, Thermomyces lanuginosus
EVSQDLFNQFNLFAQYSAAAYCGANNDAPAGTNITCTGNACPEVEKADATFLYSFEDSGVGDVTGFLALDNTNKRIVLSFRGSRSIENWIGNLNFDLKEINDICSGCRGHAGFTSSWRSVADTLRQKVEDAVREHPDYRVVFTGHSLGGALATIAWADLRGNGYDIDVFSYGAPRVGNRAFAEFLTNQTGGTLYRITHTNDIVPRLPPREFGYSHSSPEYWIKSGTLVPVTRNDIVKIEGIDATGGNNQPNIPDIPAHLWYFGLIGTC

SEQ ID NO: 13573 - protein, 268 aa, Thermomyces lanuginosus
EVSQDLFNQFNLFAQYSAAAYCKKNNDAPAGTNITCTGNACPEVEKADATFLYSFEDSGVGDVTGFLALDNTNKQIVLSFRGSRSIENWIGNLNFDLKEINDICSGCRGHDGFTSSWRSVADTLRQKVEAAVREHPDYRVVFTGHSLGGALATIAGADLRGNGYDIDVFSYGAPRVGNRAFAEFLTNQQGGTLYRITHTNDIVPRLPPREFGYSHSSPEYWIKSGTLVPVTRNDIVKIEGIDATGGNNQPNIPDIPAHLWYFGRIGTC

SEQ ID NO: 13574 - protein, 268 aa, Thermomyces lanuginosus
EVSQDLFNQFKLFAQYSAAAYCGKNNNAPAGTNITCTGNACPEVEKADATFLYSFKDSGVGDVTGFLALDNTNKLIVLSFRGSRSIENWFGNLNFDLKEINDICSGCRGHDGFTSSWRSVADTLRQKVEDAVREHPDYRVVFTGHSLGGALATVAGADLRGNGYDIDVFSYGAPRVGNRAFAEFLTVQTGGTLYRITHTNDIVPRLPPREFGYSHSSPEYWIKSGTLVPVTRQDIVKIEGIDATGGNNQPNIPDITAHLWYFGLIGTC

SEQ ID NO: 13575 - protein, 268 aa, Thermomyces lanuginosus
EVSQDLFNQFNLFAQYSAAAYCGKNNRAPAGTQITCTGNACPEVEKADATFLYSFEDSGVGDVTGFLALDNTNKLIVLSFRGSRSIENWIANLSFDLKEINDICSGCRGHAGFTSSWRSVADTLRQKVEDAVREHPDYRVVFTGHSLGGALATVAGADLRGNGYDIDVFSYGAPRVGNRAFAEFLTVQTGGTLYRITHTNDIVPRLPPREFGYSHSSPEYWIKSGTLVPVRRRDIVKIEGIDATGGNNQPNIPDITAHLWYFGLIGTC

SEQ ID NO: 13576 - protein, 268 aa, Thermomyces lanuginosus
EVSQDLFNQFNLFAQYSAAAYCGKNNDAPAGTNITCTGNACPEVEKADATFLYSFEDSGVGDVTGFLALDNTNKLIVLSFRGSRSIENWIGNLNFDLKEINDICSGCRGHDGFTSSWRSVADTLRQKVEDAVREHPDYRVVFTGHSLGGGLATVAGADLRGNGYDIDVFSYGAPRVGNRAFAEFLTVQTGGTLYRITHTNDIVPRLPPRVFGYSHSSPEYWIKSGTLVPVRRRDIVKIEGIDATGGNNQPNIPDAKAHLWYFGLIGTC

SEQ ID NO: 13577 - protein, 268 aa, Thermomyces lanuginosus
EVSQDLFNQFNLFAQYSAAAYCGKNNDAPAGTQITCTGNACPEVEKADATFLYSFEDSGVGDVTGFLALDNTNKLIVLSFRGSRSIENWIQNLNFDLKEINDICSGCRGHDGFTSSWRSVADTLRQKVEDAVREHPDYRVVFTGHSLGGGLATVAGADLRGNGYDIDVFSYGAPRVGNRAFAEFLTVQTGGTLYRITHTNDIVPRLPPRQFGYSHSSPEYWIKSGTLVPVRRRDIVKIEGIDATGGNNQPNIPDGPAHLWYFGLIGTC

SEQ ID NO: 13578 - protein, 268 aa, Thermomyces lanuginosus
EVSQDLFNQFNLFAQYSAAAYCGKNNDAPAGTNITCTGNACPEVEKADATFLYSFRNSGVGDVTGFLALDNTNKLIVLSFRGSRSIENWIGNLNFDLIEINDICSGCRGHDGFTSSWFSVADTLRQKVEDAVREHPDYRVVFTGHSLGGALATVAGADLRGNGYDIDVFSYGAPRVGNRAFAEFLTVQTGGTLYRITHTNDIVPRLPPREFGYSHSSPEYWIKSGTLVPVRRRDIVKIEGIDATGGNNQPNIPDIPAHLWYFGLIGTC

SEQ ID NO: 13579 - protein, 268 aa, Thermomyces lanuginosus
EVSQDLFNQFNLFAQYSAAAYCGKNNRAPAGTNITCTGNACPEVEKADATFLYSFEDSGVGDVTGFLALDNTNKLIVLSFRGSRSIENWVSNLNFDLKEINDICSGCRGHAGFTSSWRSVADTLRQKVEDAVREHPDYRVVFTGHSLGGALATVAGADLRGNGYDIDVFSYGAPRVGNRAFAEFLTVQTGGTLYRITHTNDIVPRLPPREFGYSHPSPEYWIKSGTGVPVTRNDIVKIEGIDATGGNNQPNIPDITAHLWYFGLIGTC

SEQ ID NO: 13580 - protein, 268 aa, Thermomyces lanuginosus
EVSRDLFNQFNLFAQYSAAAYCGKNNDAPAGTNITCTGNACPEVEKADATFLYSFEDSGVGDVTGFLALDNTNKLIVLSFRGSRSIENWIGNLNFDLKEINDICSGCRGHDGFTSSWRSVADTLRQKVEDAVREHPDYRVVFAGHSLGGALATVAGADLRGDGYDIDVFSYGAPRVGNRAFAEFLTVQTGGTLYRITHTNDIVPRLPPREFGYSHSSPEYWIKSGTLRPVRRRDIVKIEGIDATGGNNQPNIPDIPAHLWYFGLIGTC

SEQ ID NO: 13581 - protein, 268 aa, Thermomyces lanuginosus
EVSRDLFNQFNLFAQYSAAAYCGKNNDAPAGTNITCTGNACPEVEKADATFLYSFEDSGVGDVTGFLALDNTNKLIVLSFRGSRSIENWIGNLNFDLKEINDICSGCRGHDGFTSSWRSVADTLRQKVEDAVREHPDYRVVFTGHSLGGALATVAGADLRGDGYDIDVFSYGAPRVGNRAFAEFLTVQTGGTLYRITNTNDIVPRLPPREFGYSHSSPEYWIKSGTLRPVRRRDIVKIEGIDATGGNNQPNIPDIPAHLWYFGLIGTC

SEQ ID NO: 13582 - protein, 268 aa, Thermomyces lanuginosus
EVSRDLFNQFNLFAQYSAAAYCGKNNDAPAGTNITCTGNACPEVEKADATILYSFEDSGVGDVTGFLALDNTNKLIVLSFRGSRSIENWIGNLNFDLKEINDICSGCRGHDGFTSSWRSVADTLRQKVEDAVREHPDYRVVFAGHSLGGALATVAGADLRGNGYDIDVFSYGAPRVGNRAFAEFLTVQTGGTLYRITHTNDIVPRLPPREFGYSHSSPEYWIKSGTLPPVRRRDIVKIEGIDATGGNNQPNIPDIPAHLWYFGLIGTC

SEQ ID NO: 13583 - protein, 268 aa, Thermomyces lanuginosus
EVSQDLFNQFNLFAQYSAAAYCGKNNDAPAGTNITCTGNACPEVEKADATILYSFRDSGVGDVTGFLALDNTNKLIVLSFRGSRSIENWIGNLNFDLKEINDICSGCRGHDGFTSSWFSVADTLRQKVEDAVREHPDYRVVFTGHSLGGALATVAGADLRGNGYDIDVFSYGAPRVGNRAFAEFLTVQTGGTLYRITHTNDIVPRLPPREFGYSHSSPEYWIKSGTLVPVRRRDIVKIEGIDATGGNNQPNIPDITAHLWYFGLIGTC

SEQ ID NO: 13584 - protein, 268 aa, Thermomyces lanuginosus
EVSQDLFNQFNLFAQYSAAAYCGKNNDAPAGTNITCTGNACPEVEKAQATFLYSFEDMGVGDVTGFLALDNTNKLIVLSFRGSRSIENWIGNLNFDLKEINDICSGCRGHDGFTSSWRSVADTLRQKVEAAVREHPQYRVVFTGHSLGGALATVAGADLRGNPYDIDVFSYGAPRVGNRAFAEFLTVQTGGTLYRITHTNDIVPRLPPREFGYSHSSPEYWIKSGTMVPVTRNDIVKIEGIDATGGNNQPNIPDIPAHLWYFGRIGTC

SEQ ID NO: 13585 - protein, 268 aa, Thermomyces lanuginosus
EYSQDLFNQFNLFAQYSAAAYCGKNNDAPAGTKITCTGNACPEVEKADATLLYSFEDSGVGDVTGFLALDNTNKLIVLSFRGSRSIENWIGNLNFDLKEINDICSGCRGHDGFTSSWRSVADTLRQKVEDAVREHPDYRVVFTGHSLGGALATVAGADLRGNGYDIDVFSYGAPRVGNRAFAEFLTVQTGGTLYRITHTNDIVPRLPPREFGYSHSSPEYWIKSGTLPPVRRRDIVKIEGIDATGGNNQPNIPDIPAHLWYFGLIGTC

SEQ ID NO: 13586 - protein, 268 aa, Thermomyces lanuginosus
EVSQDLFNQFNLFAQYSKAAYCGKNNDAPAGTNITCTGNACPEVEKADVTFLYSFEDSGVGDVTGFLALDNTNKQIVLSFRGSRSIENWIGNLNFDLKEINDICSGCRGHDGFTSSWRSVADTLRQKVEDAVREHPDYRVVFTGHSLGGALATVAWADLRGNGYDIDVFSYGAPRVGNRAFAEFLTTQDGGTLYRITHTNDIVPRLPPREFGYSHSSPEYWIKSGTLVPVTRNDIVKIEGIDATGGNNQPNIPDIPAHLWYFGLIGTC

SEQ ID NO: 13587 - protein, 268 aa, Thermomyces lanuginosus
EVSQDLFNQFKLFAQYSAAAYCGKNNSAPAGTNITCTGNACPEVEKADATFLYSFKDMGVGDVTGFLALDNTNKLIVLSFRGSRSIENWIGNLNFDLKEINDICSGCRGHDGFTSSWRSVADTLRQKVEDAVREHPDYRVVFTGHSLGGALATVAGADLRGNGYDIDVFSYGAPRVGNRAFAEFLTVQTGGTLYRITHTNDIVPRLPPREFGYSHSSPEYWIKSGTLVPVTRQDIVKIEGIDATGGNNQPNIPDITAHLWYFGLIGTC

SEQ ID NO: 13588 - protein, 268 aa, Thermomyces lanuginosus
EVSQDLFNQFNLFAQYSAAAYCGKNNQAPAGTQITCTGNACPEVEKADATFLYSFEDSGVGDVTGFLALDNTNKLIVLSFRGSRSIENWIGNLNFDLKEINDICSGCRGHDGFTSSWRSVADTLRQKVEDAVREHPDYRVVFTGHSLGGALATVAGADLRGNGYDIDVFSYGAPRVGNRAFAEFLTVQTGGTLYRITHTNDIVPRLPPREFGYSHSSPEYWIKSGTGVPVRRRDIVKIEGIDATGGNNRPNIPDIPAHLWYFGLIGTC

SEQ ID NO: 13589 - protein, 268 aa, Thermomyces lanuginosus
EVSQDLFNQFNLFAQYSKAAYCGKNNSAPAGTDITCTGNACPEVFKADATFLYSFEDSGVGDVTGFLALDNTNKDIVLSFRGSRSIENWIGNLNFDLKEINDICSGCRGHDGFTSSWRSVADTLRQKVEDAVREHPDYRVVFTGHSLGGALATVAGADLRGNGYDIDVFSYGAPRVGNRAFAEFLTVQDGGTLYRITHTNDIVPRLPPREFGYSHSSPEYWIKSGTLVPVTRNDIVKIEGIDATGGNNQPNIPDIPAHLWYFGLIGTC

SEQ ID NO: 13590 - protein, 268 aa, Thermomyces lanuginosus
EVSQDLFNQFNLFAQYSAAAYCGKNNDAPAGTQITCTGNACPEVEKADATFLYSFEDSGVGDVTGFLALDNTNKLIVLSFRGSRSIENWIGNLNFDLKEINDICSGCRGHDGFTSSLRSVADTLRQKVEDAVREHPDYRVVFTGHSLGGALATVAGADLRGNGYDIDVFSYGAPRVGNRAFAEFLTVQTGGTLYRITHTNDIVPRLPPREFGYSHSSPEYWIKSGTGVPVRRRDIVKIEGIDATGGNNRPNIPDIPAHLWYFGLIGTC

SEQ ID NO: 13591 - protein, 268 aa, Thermomyces lanuginosus
EVSRDLFNQFNLFAQYSAAAYCGKNNDAPAGTNITCTGNACPEVEKADATILYSFEDSGVGDVTGFLALDNTNKLIVLSFRGSRSIENWIGNLNFDLKEINDICSGCRGHDGFTSSWRSVADTLRQKVEDAVREHPDYRVVFAGHSLGGALATVAGADLRGNGYDIDVFSYGAPRVGNRAFAEFLTVQTGGTLYRITHTNDIVPRLPPREFGYSHSSPEYWIKSGTLRPVRRRDIVKIEGIDATGGNNQPNIPDIPAHLWYFGLIGTC

SEQ ID NO: 13592 - protein, 268 aa, Thermomyces lanuginosus
EVSQDLFNQFNLFAQYSKAAYCGKNNSAEAGTDITCTGNACPEVFKADATFLYSFEDSGVGDVTGFLALDNTNKDIVLSFRGSRSIENWIGNLNFDLKEINDICSGCRGHDGFTSSWRSVADTLRQKVEDAVREHPDYRVVFTGHSLGGALATVAGADLRGNGYDIDVFSYGAPRVGNRAFAEFLTVQTGGTLYRITHTNDIVPRLPPREFGYSHSSPEYWIKSGTLVPVTRNDIVKIEGIDATGGNNQPNIPDIPAHLWYFGLIGTC

SEQ ID NO: 13593 - protein, 268 aa, Thermomyces lanuginosus
EVSQDLFNQFNLFAQYSAAAYCGKNNRAPAGTNITCTGFACPEVEKADATFLYSFEDSGVGDVTGFLALDNTNKLIVLSFRGSRSIENWIGNLNFDLKEINDICSGCRGHGGFTSSWRSVADTLRQKVEDAVREHPDYRVVFTGHSLGGALATVAGADLRGNGYDIDVFSYGAPRVGNRAFAEFLTVQTGGTLYRITHTNDIVPRLPPREFGYSHPSPEYWIKSGTGVPVTRNDIVKIEGIDATGGNNQPNIPDITAHLWYFGLIGTC

SEQ ID NO: 13594 - protein, 268 aa, Thermomyces lanuginosus
EVSQDLFNQFNLFAQYSAAAYCGKNNDAPAGTNITCTGNACPEVPKADVTFLYSFEDSGVGDVTGFLALDNTNKQIILSFRGSRSIENWIGNLNFDLKEINDICSGCRGHDGFTSSWRSVADTLRQKVEDAVREHPDYRVVFTGHSLGGALATVAGADLRGNGYDIDVFSYGAPRVGNRAFAEFLTTQDGGTLYRITHTNDIVPRLPPREFGYSHSSPEYWIKSGTLVPVTRNDIVKIEGIDATGGNNQPNIPDIPAHLWYFGLIGTC

SEQ ID NO: 13595 - protein, 268 aa, Thermomyces lanuginosus
EVSQDLFNQFNLFAQYSAAAYCGKNNDAPAGTNITCTGNACPEVEKADATFLYSFEDSGVGDVTGFLALDNTNKLIVLSFRGSRSIENWIGNLNFDLKEINDICSGCRGHDGFTSSWRSVADTLRQKVEDAVREHPDYRVVFTGHSLGGALATVAGADLRGNGYDIDVFSYGAPRVGNRAFAEFLTVQTGGTLYRITHTNDIVPRLPPRELGYSHSSPEYWIKSGTGVPVRRRDIVKIEGIDATGGNNQPNIPDLKAHLWYFGLIGTC

SEQ ID NO: 13596 - protein, 268 aa, Thermomyces lanuginosus
EVSQDLFNQFNLFAQYSAAAYCGKNNRAPAGTNITCTGNACPEVEKADATFLYSFEDSGVGDVTGFLALDNTNKLIVLSFRGSRSIENWIRNLNFDLKEINDICSGCRGHAGFTSSWRSVADTLRQKVEDAVREHPDYRVVFTGHSLGGALATVAGADLRGNGYDIDVFSYGAPRVGNRAFAEFLTVQTGGTLYRITHTNDIVPRLPPREFGYSHPSPEYWIKSGTGVPVTRNDIVKVEGIDATGGNNQPNIPDITAHLWYFGLIGTC

SEQ ID NO: 13597 - protein, 268 aa, Thermomyces lanuginosus
EVSQDLFNQFNLFAQYSAAAYCGKNNSAPAGTNITCTGNACPEVEKADATFLYSFEDSGVGDVTGFLALDNTNKQIVLSFRGSRSIENWIGNLNFDLKEINDICSGCRGHAGFTSSWRSVADTLRQKVEDAVREHPDYRVVFTGHSLGGALATVAWADLRGNGYDIDVFSYGAPRVGNRAFAEFLTNQQGGTLYRITHTNDIVPRLPPREFGYSHSSPEYWIKSGTLVPVTRNDIVKIEGIDATGGNNQPNIPDIPAHLWYFGLIGTC

SEQ ID NO: 13598 - protein, 268 aa, Thermomyces lanuginosus
EVSQDLFNQFKLFAQYSAAAYCGKNNSAPAGTNITCTGNACPEVEKADATFLYSFKDMGVGDVTGFLALDNTNKLIVLSFRGSRSIENWFGNLNFDLKEINDICSGCRGHDGFTSSWRSVADTLRQKVEDAVREHPDYRVVFTGHSLGGALATVAGADLRGNGYDIDVFSYGAPRVGNRAFAEFLTVQTGGTLYRITHTNDIVPRLPPREFGYSHSSPEYWIKSGTLVPVTRNDIVKIEGIDATGGNNQPNIPDITAHLWYFGLIGTC

SEQ ID NO: 13599 - protein, 268 aa, Thermomyces lanuginosus
EVSQDLFNQFNLFAQYSAAAYCQKNNSAPAGTNITCTGNACPEVEKADATFLYSFEDMGVGDVTGFLALDNTNKQIVLSFRGSRSIENWIGNLNFDLKEINDICSGCRGHDGFTSSWRSVADTLRQKVEAAVREHPDYRVVFTGHSLGGALATVAGADLRGNGYDIDVFSYGAPRVGNRAFAEFLTVQTGGTLYRITHTNDIVPRLPPREFGYSHSSPEYWIKSGTLVPVTRNDIVKIEGIDATGGNNQPNQPDIPAHLWYFGRIGTC

SEQ ID NO: 13600 - protein, 268 aa, Thermomyces lanuginosus
EVSRDLFNQFNLFAQYSAAAYCGKNNDAPAGTNITCTGNACPEVEKADATILYSFEDSGVGDVTGFLALDNTNKLIVLSFRGSRSIENWIGNLNFDLKEINDICSGCRGHDGFTSSWRSVADTLRQKVEDAVREHPDYRVVFTGHSLGGALATVAGADLRGNGYDIDVFSYGAPRVGNRAFAEFLTVQTGGTLYRITNTNDIVPRLPPREFGYSHSSPEYWIKSGTLPPVRRRDIVKIEGIDATGGNNQPNIPDIPAHLWYFGLIGTC

SEQ ID NO: 13601 - protein, 268 aa, Thermomyces lanuginosus
EVSDDLFNQFKLFAQYSAAAYCGKNNSAPAGTNITCTGNACPEVEKADATFLYSFEDSGVGDVTGFLALDNTNKLIVLSFRGSRSIENWFGNLNFDLKEINDICSGCRGHDGFTSSWRSVADTLRQKVEDAVREHPDYRVVFTGHSLGGALATVAGADLRGNGYDIDVFSYGAPRVGNRAFAEFLTVQTGGTLYRITHTNDIVPRLPPREFGYSHSSPEYWIKSGTLVPVTRQDIVKIEGIDATGGNNQPNIPDITAHLWYFGLIGTC

SEQ ID NO: 13602 - protein, 268 aa, Thermomyces lanuginosus
EVSQDLFNQFNLFAQYSAAAYCGKNNDAPAGTQITCTGNACPEVEKADATFLYSFEDSGVGDVTGFLALDNTNKLIVLSFRGSRSIENWIGNLNFDLKEINDICSGCRGHDGFTSSWRSVADTLRQKVEDAVREHPDYRVVFTGHSLGGALATVAGADLRGNKYDIDVFSYGAPRVANRAFAEFLTVQTGGTLYRITHTNDIVPRLPPREFGYSHSSPEYWIKSGTLVPVRRRDIVKIEGIDATGANNQPNIPDIPAHLWYFGLIGTC

SEQ ID NO: 13603 - protein, 268 aa, Thermomyces lanuginosus
EVSQDLFNQFNLFAQYSAAAYCGKNNEAPAGTNITCTGNACPEVEKADATFLYSFKDMGVGDVTGFLALDNTNKLIVLSFRGSRSIENWFGNLNFDLKEINDICSGCRGHDGFTSSWRSVADTLRQKVEDAVREHPDYRVVFTGHSLGGALATVAGADLRGNGYDIDVFSYGAPRVGNRAFAEFLTVQTGGTLYRITHTNDIVPRLPPREFGYSHSSPEYWIKSGTLVPVTRQDIVKIEGIDATGGNNQPNIPDITAHLWYFGLIGTC

SEQ ID NO: 13604 - protein, 268 aa, Thermomyces lanuginosus
EVSQDLFNQFNLFAQYSAAAYCGKNNDAPAGTQITCTGNACPEVEKADATFLYSFQDSGVGDVTGFLALDNTNKLIVLSFRGSRSIENWIGNLNFDLKEINDICSGCRGHDGFTSSWRSVADTLRQKVEDAVREHPDYRVVFTGHSLGGALATVARADLRGNGYDIDVFSYGAPRWGNRAFAEFLTVQTGGTLYRITHTNDIVPRLPPREFGYSHSSPEYWIKSGTLVPVRRRDIVKIEGIDATGGNNQPNIPDIPAHLWYFGLIGTC

SEQ ID NO: 13605 - protein, 268 aa, Thermomyces lanuginosus
EVSQDLFNQFNLFAQYSKAAYCGANNDAPAGTNITCTGNACPEVEKADATFLYSFEDSGVGDVTGFLALDNTNKQIVLSFRGSRSIENWIGNLRFDLKEINDICSGCRGHDGFTSSWRSVADTLRQKVEDAVREHPDYRVVFTGHSLGGALATIAWADLRGNGYDIDVFSYGAPRVGNRAFAEFLTVQTGGTLYRITHTNDIVPRLPPREFGYSHSSPEYWIKSGTLVPVTRNDIVKIEGIDATGGNNQPNIPDIPAHLWYFGLIGTC

SEQ ID NO: 13606 - protein, 268 aa, Thermomyces lanuginosus
EVSQDLFNQFNLFAQYSAAAYCGKNNDAPAGTNITCTGNACPEVEKADATFLYSFEDSGVGDVTGFLALDNTNKLIVLSFRGSRSIENWIGNLNFDLKEINDICSGCRGHDGFTSSWRSVADTLRQKVEDAVREHPDYRVVFAGHSLGGGLATVAGADLRGNGYDIDVFSYGAPRVGNRAFAEFLTVQTGGTLYRITHTNDIVPRLPPRQFGYSHSSPEYWIKSGTLVPVRRRDIVKIEGIDATGGNNQPNIPDAPAHLWYFGLIGTC

SEQ ID NO: 13607 - protein, 268 aa, Thermomyces lanuginosus
EKSQDLFNQFNLFAQYSAAAYCGKNNDAPAGTKITCTGNACPEVEKADATILYSFEDSGVGDVTGFLALDNTNKLIVLSFRGSRSIENWIGNLNFDLKEINDICSGCRGHDGFTSSWRSVADTLRQKVEDAVREHPDYRVVFTGHSLGGALATVAGADLRGNGYDIDVFSYGAPRVGNRAFAEFLTVQTGGTLYRITNTNDIVPRLPPREFGYSHSSPEYWIKSGTLVPVRRRDIVKIEGIDATGGNNQPNIPDIPAHLWYFGLIGTC

SEQ ID NO: 13608 - protein, 268 aa, Thermomyces lanuginosus
EVSQDLFNQFNLFAQYSAAAYCGKNNDAPAGTNITCTGNACPEVEKADATFLYSFEDSGVGDVTGFLALDNTNKQIVLSFRGSRSIENWIGNLNFDLKEINDICSGCRGHAGFTSSWRSVADTLRQKVEAAVREHPDYRVVFTGHSLGGALATIAWADLRGNGYDIDVFSYGAPRVGNRAFAEFLTVQQGGTLYRITHTNDIVPRLPPREFGYSHSSPEYWIKSGTLVPVTRNDIVKIEGIDATGGNNQPNIPDIPAHLWYFGLIGTC

SEQ ID NO: 13609 - protein, 268 aa, Thermomyces lanuginosus
EVSQDLFNQFNLFAQYSAAAYCGKNNDAPAGTNITCTGNACPEVEKADATFLYSFEDSGVGDVTGFLALDNTNKLIVLSFRGSRSIENWITNLNFELKEINDICSGCRGHAGFTSSWRSVADTLRQKVEDAVREHPDYRVVFTGHSLGGALATVAGADLRGNKYDIDVFSYGAPRVGNRAFAEFLTVQTGGTLYRITHTNDIVPRLPPREFGYSHSSPEYWIKSGTLVPVRRRDIVKIEGIDATGGNNQPNIPSITAHLWYFGLIGTC

SEQ ID NO: 13610 - protein, 268 aa, Thermomyces lanuginosus
EVSQDLFNQFNLFAQYSAAAYCGKNDRAPAGTNITCTGNACPEVEKADATFLYSFEDSGVGDVTGFLALDNTNKLIVLSFRGSRSIENWIGNLNFDLKEINDICSGCRGHAGFTSSWRSVADTLRQKVEDAVREHPDYRVVFTGHSLGGALATVAGADLRGNGYDIDVFSYGAPRVGNRAFAEFLTVQTGGTLYRITHTNDIVPRLPPREFGYSHPSPEYWIKSGTGVPVTRNDIVKIEGIDATGGNNQPNIPDITAHLWYFGLIGTC

SEQ ID NO: 13611 - protein, 268 aa, Thermomyces lanuginosus
EVSQDLFNQFNLFAQYSAAAYCGKNNDAPAGTNITCTGNACPEVEKADATFLYSFRNSGVGDVTGFLALDNTNKLIVLSFRGSRSIENWIGNLNFDLKEINDICSGCRGHDGFTSSWFSVADTLRQKVEDAVREHPDYRVVFTGHSLGGALATVAGADLRGNGYDIDVFSYGAPRVGNRAFAEFLTVQTGGTLYRITHTNDIVPRLPPREFGYSHSSPEYWIKSGTLVPVRRRDIVKIEGIDATGGNNQPNIPDITAHLWYFGLIGTC

SEQ ID NO: 13612 - protein, 268 aa, Thermomyces lanuginosus
EVSQDLFNQFNLFAQYSAAAYCGKNNRAPAGTNITCTGNACPEVEKADATFLYSFEDSGVGDVTGFLALDNTNKLIVLSFRGSRSIENWIGNVNFDLKEINDICSGCRGHAGFTSSWRSVADTLRQKVEDAVREHPDYRVVFTGHSLGGALATVAGADLRGNGYDIDVFSYGAPRVGNRAFAEFLTVQTGGTLYRITHTNDIVPRLPPREFGYSHPSPEYWIKSGTGVPVTRNDIVKIEGIDATGGNNQPNIPDITAHLWYFGLIGTC

SEQ ID NO: 13613 - protein, 268 aa, Thermomyces lanuginosus
EVSQDLFNQFNLFAQYSAAAYCGKNNDAPAGTNITCTGNACPEVEKADATFLYSFEDSGVGDVTGFLALDNTNKLIVLSFRGSRSIENWIGNLNFDLKEINDICSGCRGHDGFTSSWRSVADTLRQKVEDAVREHPDYRVVFTGHSLGGALATVAGADLRGNGYDIDVFSYGAPRVGNRAFAEFLTVQTGGTLYRITNTNDIVPRLPPREFGYSHSSPEYWIKSGTLPPVRRRDIVKCEGIDATCGNNQPNIPDIPAHLWYFGLIGTC

SEQ ID NO: 13614 - protein, 268 aa, Thermomyces lanuginosus
EVSQDLFNQFNLFAQYSAAAYCGKNNRAPAGTNITCTGNACPEVEKADATFLYSFEDSGVGDVTGFLALDNTNKLIVLSFRGSRSIENWIGNLNFDLKEINDICSGCRGHGGFTSSWRSVADTLRQKVEDAVREHPDYRVVFTGHSLGGALATVAGADLRGNGYDIDVFSYGAPRVGNRAFAEFLTVQTGGTLYRITHTNDIVPRLPPREFGYSHPSPEYWIKSPTGVPVTRNDIVKIEGIDATGGNNQPNIPDITAHLWYFGLIGTC

SEQ ID NO: 13615 - protein, 268 aa, Thermomyces lanuginosus
EVSQDLFNQFNLFAQYSAAAYCGKNNRAPAGTNITCTGNACPEVEKADATFLYSFEDSGVGDVTGFLALDNTNKLIVLSFRGSRSIENWINNLNFDLKEINDICSGCRGHAGFTSSWRSVADTLRQKVEDAVREHVDYRVVFTGHSLGGALATVAGADLRGNGYDIDVFSYGAPRVGNRAFAEFLTVQTGGTLYRITHTNDIVPRLPPREFGYSHPSPEYWIKSGTGVPVTRNDIVKIEGIDATGGNNQPNIPDITAHLWYFGLIGTC

SEQ ID NO: 13616 - protein, 268 aa, Thermomyces lanuginosus
EKSQDLFNQFNLFAQYSAAAYCGKNNDAPAGTKITCTGNACPEVEKADATILYSFEDSGVGDVTGFLALDNTNKLIVLSFRGSRSIENWIGNLNFDLKEINDICSGCRGHDGFTSSWRSVADTLRQKVEDAVREHPDYRVVFTGHSLGGALATVAGADLRGNGYDIDVFSYGAPRVGNRAFAEFLTVQTGGTLYRITLTNDIVPRLPPREFGYSHSSPEYWIKSGTLVPVRRRDIVKIEGIDATGGNNQPNIPDIPAHLWYFGLIGTC

SEQ ID NO: 13617 - protein, 268 aa, Thermomyces lanuginosus
EVSQDLFNQFNLFAQYSAAAYCGKNNSAEAGTDITCTGNACPEVEKADATFLYSFEDSGVGDVTGFLALDNTRKDIVLSFRGSRSIENWIGNLNFDLKEINDICSGCRGHDGFTSSWRSVADTLRQKVEDAVREHPDYRVVFTGHSLGGALATVAGADLRGNGYDIDVFSYGAPRVGNRAFAEFLTVQDGGTLYRITHTNDIVPRLPPREFGYSHSSPEYWIKSGTLVPVTRNDIVKIEGIDATGGNNQPNIPDIPAHLWYFGLIGTC

SEQ ID NO: 13618 - protein, 268 aa, Thermomyces lanuginosus
EVSQDLFNQFNLFAQYSKAAYCQKNNDAPAGTNITCTGNACPEVEKADATFLYSFEDSGVGDVTGFLALDNTNKQIILSFRGSRSIENWIGNLNFDLKEINDICSGCRGHDGFTSSWRSVADTLRQKVEAAVREHPDYRVVFTGHSLGGALATVAGADLRGNGYDIDVFSYGAPRVGNRAFAEFLTNQTGGTLYRITHTNDIVPRLPPREFGYSHSSPEYWIKSGTLVPVTRNDIVKIEGIDATGGNNQPNIPDIPAHLWYFGLIGTC

SEQ ID NO: 13619 - protein, 268 aa, Thermomyces lanuginosus
EVSQDLFNQFNLFAQYSAAAYCKANNDAPAGTNITCTGNACPEVEKADATFLYSFEDSGVGDVTGFLALDNTNKQIVLSFRGSRSIENWIGNLNFDLKEINDICSGCRGHDGFTSSWRSVADTLRQKVEDAVREHPDYRVVFTGHSLGGALATIAWADLRGNGYDIDVFSYGAPRVGNRAFAEFLTQQTGGTLYRITHTNDIVPRLPPREFGYSHSSPEYWIKSGTLVPVTRNDIVKIEGIDATGGNNQPNIPDIPAHLWYFGLIGTC

SEQ ID NO: 13620 - protein, 268 aa, Thermomyces lanuginosus
EVSQDLFNQFNLFAQYSAAAYCGKNNDAPAGTNITCTGNACPEVEKADATFLYSFEDSGVGDVTGFLALDNTNKLIVLSFRGSRSIENWIGNLNFDLKEINDICSGCRGHDGFTSSWRSVADTLRQKVEDAVREHPDYRVVFTGHSLGGALATVAGADLRGNGYDIDVFSYGAPRVGNRAFAEFLTVQTGGTLYRITHTNDLVPRLPPRGFGYSHSSPEYWIKSGTLVPVRRRDIVKIEGIDATGGNNQPNIPDAKAHLWYFGLIGTC

SEQ ID NO: 13621 - protein, 268 aa, Thermomyces lanuginosus
EVSQDLFNQFNLFAQYSAAAYCGKNNRAPAGTNITCTGNACPEVEKADATFLYSFEDSGVGDVTGFLALDNTNKLIVLSFRGSRSIENWIGNLNFELKEINDICSGCRGHDGFTSSWRSVADTLRQKVEDAVREHPDYRVVFTGHSLGGALATVAGADLRGNKYDIDVFSYGAPRVGNRAFAEFLTVQTGGTLYRITHTNDIVPRLPPREFGYSHSSPEYWIKSGTLVPVRRRDIVKIEGIDATGGNNQPNIPSITAHLWYFGLIGTC

SEQ ID NO: 13622 - protein, 268 aa, Thermomyces lanuginosus
EVSQDLFNQFNLFAQYSAAAYCGKNNDAPAGTQITCTGNACPEVEKADATFLYSFEDSGVGDVTGFLALDNTNKLIVLSFRGSRSIENWIQNLNFDLKEINDICSGCRGHDGFTSSWRSVADTLRQKVEDAVREHPDYRVVFAGHSLGGALATVAGADLRGNGYDIDVFSYGAPRVGNRAFAEFLTVQTGGTLYRITHTNDIVPRLPPRQFGYSHSSPEYWIKSGTLVPVRRRDIVKIEGIDATGGNNQPNIPDNPAHLWYFGLIGTC

SEQ ID NO: 13623 - protein, 268 aa, Thermomyces lanuginosus
EVSQDLFNQFNLFAQYSAAAYCQKNNDAPAGTNITCTGNACPEVEKADATFLYSFEDSGVGDVTGFLALDNTNKQIILSFRGSRSIENWIGNLRFDLKEINDICSGCRGHDGFTSSWRSVADTLRQKVEAAVREHPDYRVVFTGHSLGGALATVAGADLRGNGYDIDVFSYGAPRVGNRAFAEFLTQQTGGTLYRITHTNDIVPRLPPREFGYSHSSPEYWIKSGTLVPVTRNDIVKIEGIDATGGNNQPNIPDIPAHLWYFGLIGTC

SEQ ID NO: 13624 - protein, 268 aa, Thermomyces lanuginosus
EVSQDLFNQFNLFAQYSAAAYCKKNNDAPAGTNITCTGNACPEVEKADATFLYSFEDSGVGDVTGFLALDNTNKQIVLSFRGSRSIENWIGNLRFDLKEINDICSGCRGHDGFTSSWRSVADTLRQKVEAAVREHPDYRVVFTGHSLGGALATIAGADLRGNGYDIDVFSYGAPRVGNRAFAEFLTNQTGGTLYRITHTNDIVPRLPPREFGYSHSSPEYWIKSGTLVPVTRNDIVKIEGIDATGGNNQPNIPDIPAHLWYFGRIGTC

SEQ ID NO: 13625 - protein, 268 aa, Thermomyces lanuginosus
EVSQDLFNQFNLFAQYSAAAYCGKNNEAPAGTNITCTGNACPEVEKADATFLYSFEDMGVGDVTGFLALDNTNKLIVLSFRGSRSIENWIGNLNFDLKEINDICSGCRGHDGFTSSWRSVADTLRQKVEDAVREHPQYRVVFTGHSLGGALATVAGADLRGNPYDIDVFSYGAPRVGNRAFAEFLTVQTGGTLYRITHTNDIVPRLPPREFGYSHSSPEYWIKSGTMVPVTRNDIVKIEGIDATGGNQQPNIPDIPAHLWYFGRIGTC

SEQ ID NO: 13626 - protein, 268 aa, Thermomyces lanuginosus
EVSQDLFNQFKLFAQYSAAAYCGKNNDAPAGTNITCTGNACPEVEKADATFLYSFKDSGVGDVTGFLALDNTNKQIVLSFRGSRSIENWIGNLNFDLKEINDICSGCRGHDGFTSSWRSVADTLRQKVEAAVREHPDYRVVFTGHSLGGALATVAGADLRGNGYDIDVFSYGAPRVGNRAFAEFLTNQQGGTLYRITHTNDIVPRLPPREFGYSHSSPEYWIKSGTLVPVTRNDIVKIEGIDATGGNNQPNIPDIPAHLWYFGLIGTC

SEQ ID NO: 13627 - protein, 268 aa, Thermomyces lanuginosus
EVSQDLFNQFNLFAQYSAAAYCKKNNDAPAGTNITCTGNACPEVEKADATFLYSFEDSGVGDVTGFLALDNTNKQIVLSFRGSRSIENWIGNLRFDLKEINDICSGCRGHDGFTSSWRSVADTLRQKVEDAVREHPDYRVVFTGHSLGGALATIAWADLRGNGYDIDVFSYGAPRVGNRAFAEFLTTQTGGTLYRITHTNDIVPRLPPREFGYSHSSPEYWIKSGTLVPVTRNDIVKIEGIDATGGNNQPNIPDIPAHLWYFGRIGTC

SEQ ID NO: 13628 - protein, 268 aa, Thermomyces lanuginosus
EYSQDLFNQFNLFAQYSAAAYCGKNNDAPAGTKITCTGNACPEVEKADATILYSFEDSGVGDVTGFLALDNTNKLIVLSFRGSRSIENWIGNLNFDLKEINDICSGCRGHDGFTSSWRSVADTLRQKVEDAVREHPDYRVVFTGHSLGGALATVAGADLRGNGYDIDVFSYGAPRVGNRAFAEFLTVQTGGTLYRITHTNDIVPRLPPREFGYSHSSPEYWIKSGTLVPVRRRDIVKIEGIDATGGNNQPNIPDGPAHLWYFGLIGTC

SEQ ID NO: 13629 - protein, 268 aa, Thermomyces lanuginosus
EVSQDLFNQFNLFAQYSAAAYCKANNDAPAGTNITCTGNACPEVEKADATFLYSFEDSGVGDVTGFLALDNTNKRIVLSFRGSRSIENWIGNLNFDLKEINDICSGCRGHDGFTSSWRSVADTLRQKVEAAVREHPDYRVVFTGHSLGGALATIAGADLRGNGYDIDVFSYGAPRVGNRAFAEFLTNQTGGTLYRITHTNDIVPRLPPREFGYSHSSPEYWIKSGTLVPVTRNDIVKIEGIDATGGNNQPNIPDIPAHLWYFGLIGTC

SEQ ID NO: 13630 - protein, 268 aa, Thermomyces lanuginosus
EVSQDLFNQFNLFAQYSAAAYCSKNNDAPAGTNITCTGNACPEVEKADATILYSFRDSGVGDVTGFLALDNTNKLIVLSFRGSRSIENWIGNLNFDLKEINDICSGCRGHDGFTSSWFSVADTLRQKVEDAVREHPDYRVVFTGHSLGGALATVAGADLRGNGYDIDVFSYGAPRVGNRAFAEFLTVQTGGTLYRITHTNDIVPRLPPREFGYSHSSPEYWIKSGTLVPVRRRDIVKIEGIDATGGNNQPNIPDIPAHLWYFGLIGTC

SEQ ID NO: 13631 - protein, 268 aa, Thermomyces lanuginosus
EVSQDLFNQFNLFAQYSKAAYCQANNDAPAGTNITCTGNACPEVEKADATFLYSFEDSGVGDVTGFLALDNTNKLIILSFRGSRSIENWIGNLNFDLKEINDICSGCRGHDGFTSSWRSVADTLRQKVEDAVREHPDYRVVFTGHSLGGALATIAGADLRGNGYDIDVFSYGAPRVGNRAFAEFLTNQTGGTLYRITHTNDIVPRLPPREFGYSHSSPEYWIKSGTLVPVTRNDIVKIEGIDATGGNNQPNIPDIPAHLWYFGLIGTC

SEQ ID NO: 13632 - protein, 268 aa, Thermomyces lanuginosus
EVSQDLFNQFNLFAQYSKAAYCGKNNDAPAGTNITCTGNACPEVFKADVTFLYSFEDSGVGDVTGFLALDNTNKQIILSFRGSRSIENWIGNLNFDLKEINDICSGCRGHDGFTSSWRSVADTLRQKVEDAVREHPDYRVVFTGHSLGGALATVAGADLRGNGYDIDVFSYGAPRVGNRAFAEFLTTQTGGTLYRITHTNDIVPRLPPREFGYSHSSPEYWIKSGTLVPVTRNDIVKIEGIDATGGNNQPNIPDIPAHLWYFGLIGTC

SEQ ID NO: 13633 - protein, 268 aa, Thermomyces lanuginosus
EKSQDLFNQFNLFAQYSAAAYCGKNNDAPAGTKITCTGNACPEVEKADATLLYSFEDSGVGDVTGFLALDNTNKLIVLSFRGSRSIENWIGNLNFDLKEINDICSGCRGHDGFTSSWRSVADTLRQKVEDAVREHPDYRVVFTGHSLGGALATVAGADLRGNGYDIDVFSYGAPRVGNRAFAEFLTVQTGGTLYRITHTNDIVPRLPPREFGYSHSSPEYWIKSGTLVPRRRRDIVKIEGIDATGGNNQPNIPDIPAHLWYFGLIGTC

SEQ ID NO: 13634 - protein, 268 aa, Thermomyces lanuginosus
EVSQDLFNQFNLFAQYSKAAYCQKNNDAPAGTNITCTGNACPEVFKADVTFLYSFEDSGVGDVTGFLALDNTNKQIVLSFRGSRSIENWIGNLNFDLKEINDICSGCRGHDGFTSSWRSVADTLRQKVEDAVREHPDYRVVFTGHSLGGALATVAGADLRGNGYDIDVFSYGAPRVGNRAFAEFLTVQDGGTLYRITHTNDIVPRLPPREFGYSHSSPEYWIKSGTLVPVTRNDIVKIEGIDATGGNNQPNIPDIPAHLWYFGLIGTC

SEQ ID NO: 13635 - protein, 268 aa, Thermomyces lanuginosus
EYSQDLFNQFNLFAQYSAAAYCGKNNDAPAGTKITCTGNACPEVEKADATILYSFEDSGVGDVTGFLALDNTNKLIVLSFRGSRSIENWIGNLNFDLKEINDICSGCRGHDGFTSSWRSVADTLRQKVEDAVREHPDYRVVFTGHSLGGALATVAGADLRGNGYDIDVFSYGAPRVGNRAFAEFLTVQTGGTLYRITHTNDIVPRLPPREFGYSHSSPEYWIKSGTLPPVRRRDIVKIEGIDATGGNNQPNIPDIPAHLWYFGLIGTC

SEQ ID NO: 13636 - protein, 268 aa, Thermomyces lanuginosus
EVSQDLFNQFRLFAQYSAAAYCGKNNDAPAGTQITCTGNACPEVEKADATFLYSFEDSGVGDVTGFLALDNTNKLIVLSFRGSRSIENWIMNLNFDLKEINDICSGCRGHDGFTSSWRSVADTLRQKVEDAVREHPDYRVVFTGHSLGGALATVAGADLRGNTYDIDVFSYGAPRVGNRAFAEFLTVQTGGTLYRITHTNDIVPRLPPREFGYSHSSPEYWIKSGTLVPVRRRDIVKIEGIDATGGNNQPNIPSIPAHLWYFGLIGTC

SEQ ID NO: 13637 - protein, 268 aa, Aspergillus oryzae
EVSQDLFNQFNLFAQYSAAAYCGKNNRAPAGTNITCTGNACPEVEKADATFLYSFEDSGVGDVTGFLALDNTNKLIVLSFRGSRSIENWINNLRFDLKEINDICSGCRGHAGFTSSWRSVADTLRQKVEDAVREHPDYRVVFTGHSLGGALATVAGADLRGNGYDIDVFSYGAPRVGNRAFAEFLTVQTGGTLYRITHTNDIVPRLPPREFGYSHPSPEYWIKSGTGVPVTRNDIVKIEGIDATGGNNQPNIPDITAHLWYFGLIGTC

SEQ ID NO: 13638 - protein, 268 aa, Thermomyces lanuginosus
EVSQDLFNQFNLFAQYSAAAYCGKNNRAPAGTNITCTGNACPEVEKADATFLYSFEDSGVGDVTGFLALDNTNKLIVLSFRGSRSIENWIGNLNFELKEINDICSGCRGHAGFTSSWRSVADTLRQKVEDAVREHPDYRVVFTGHSLGGALATVAGADLRGNKYDIDVFSYGAPRVGNRAFAEFLTVQTGGTLYRITHTNDIVPRLPPREFGYSHSSPEYWIKSGTLVPVRRRDIVKIEGIDATGGNNQPNIPDITAHLWYFGLIGTC

SEQ ID NO: 13639 - protein, 268 aa, Thermomyces lanuginosus
EVSQDLFNQFNLFAQYSAAAYCSKNNDAPAGTNITCTGNICPEVEKADATFLYSFRDSGVGDVTGFLALDNTNKLIVLSFRGSRSIENWIGNLNFDLKEINDICSGCRGHDGFTSSWFSVADTLRQKVEDAVREHPDYRVVFTGHSLGGALATVAGADLRGNGYDIDVFSYGAPRVGNRAFAEFLTVQTGGTLYRITHTNDIVPRLPPREFGYSHSSPEYWIKSGTLVPVRRRDIVKIEGIDATGGNNQPNIPDIPAHLWYFGLIGTC

SEQ ID NO: 13640 - protein, 268 aa, Thermomyces lanuginosus
EVSQDLFNQFNLFAQYSAAAYCGKNNDAPAGTNITCTGNACPEVEKADATLLYSFRDSGVGDVTGFLALDNTNKLIVLSFRGSRSIENWIGNLNFDLKEINDICSGCRGHDGFTSSWFSVADTLRQKVEDAVREHPDYRVVFTGHSLGGALATVAGADLRGNSYDIDVFSYGAPRVGNRAFAEFLTVQTGGTLYRITHTNDIVPRLPPREFGYSHSSPEYWIKSGTLVPVRRRDIVKIEGIDATGGNNQPNIPDIPAHLWYFGLIGTC

SEQ ID NO: 13641 - protein, 268 aa, Thermomyces lanuginosus
EVSQDLFNQFNLFAQYSAAAYCGKNNDAPAGTQITCTGNACPEVEKADATFLYSFEDSGVGDVTGFLALDNTNKLIVLSFRGSRSIENWIGNLNFDLKEINDICSGCRGHAGFTSSLRSVADTLRQKVEDAVREHPDYRVVFTGHSLGGALATVAGADLRGNGYDIDVFSYGAPRVGNRAFAEFLTVQTGGTLYRITHTNDIVPRLPPREFGYSHSSPEYWIKSGTLVPVRRRDIVKIEGIDATGGNNQPNIPSIPAHLWYFGLIGTC

SEQ ID NO: 13642 - protein, 268 aa, Thermomyces lanuginosus
EVSQDLFNQFNLFAQYSAAAYCQKNNDAPAGTNITCTGNACPEVEKADATTLYSFKDSGVGDVTGFLALDNTNKRIVLSFRGSRSIENWIQNLNFDLKEINDICSGCRGHDGFTSSWRSVADTLRQKVEDAVREHPDYRVVFTGHSLGGALATVAGADLRGNGYDIDVFSYGAPRVGNRAFAEFLTHQTGGTLYRITHTNDIVPRLPPREFGYSHSSPEYWIKSGTLVPVTRNDIVKIEGIDATGGNNQPNQPDIPAHLWYFGLIGTC

SEQ ID NO: 13643 - protein, 268 aa, Thermomyces lanuginosus
EVSQDLFNQFNLFAQYSAAAYCSKNNNAPAGTNITCTGNACPEVEKADATFLYSFRDSGVGDVTGFLALDNTNKLIVLSFRGSRSIENWIGNLNFDLKEINDICSGCRGHDGFTSSWFSVADTLRQKVEDAVREHPDYRVVFTGHSLGGALATVAGADLRGNGYDIDVFSYGAPRVGNRAFAEFLTVQTGGTLYRITHTNDIVPRLPPREFGYSHSSPEYWIKSGTLVPVRRRDIVKIEGIDATGGNNQPNIPDIPAHLWYFGLIGTC

SEQ ID NO: 13644 - protein, 268 aa, Thermomyces lanuginosus
EVSQDLFNQFNLFAQYSAAAYCGKNNDAPAGTNITCTGNACPEVEKADATTLYSFKDSGVGDVTGFLALDNTNKGIVLSFRGSRSIENWIQNLNFDLKEINDICSGCRGHDGFTSSWRSVADTLRQKVEAAVREHPDYRVVFTGHSLGGALATVAGADLRGNGYDIDVFSYGAPRVGNRAFAEFLTHQTGGTLYRITHTNDIVPRLPPREFGYSHSSPEYWIKSGTLVPVTRNDIVKIEGIDATGGNNQPNQPDIPAHLWYFGRIGTC

SEQ ID NO: 13645 - protein, 268 aa, Thermomyces lanuginosus
EVSQDLFNQFNLFAQYSAAAYCQKNNSAPAGTNITCTGNACPEVEKADATFLYSFEDMGVGDVTGFLALDNTNKLIVLSFRGSRSIENWIQNLNFDLKEINDICSGCRGHDGFTSSWRSVADTLRQKVEAAVREHPDYRVVFTGHSLGGALATVAGADLRGNGYDIDVFSYGAPRVGNRAFAEFLTHQTGGTLYRITHTNDIVPRLPPREFGYSHSSPEYWIKSGTLVPVTRNDIVKIEGIDATGGNNQPNQPDIPAHLWYFGRIGTC

SEQ ID NO: 13646 - protein, 268 aa, Thermomyces lanuginosus
EKSQDLFNQFNLFAQYSAAAYCGKNNDAPAGTKITCTGNACPEVEKADATLLYSFEDSGVGDVTGFLALDNTNKLIVLSFRGSRSIENWIGNLNFDLKEINDICSGCRGHDGFTSSWRSVADTLRQKVEDAVREHPDYRVVFTGHSLGGALATVAGADLRGNGYDIDVFSYGAPRVGNRAFAEFLTVQTGGTLYRITLTNDIVPRLPPREFGYSHSSPEYWIKSGTLVPVRRRDIVKIEGIDATGGNNQPNIPDIPAHLWYFGLIGTC

SEQ ID NO: 13647 - protein, 268 aa, Thermomyces lanuginosus
EKSQDLFNQFNLFAQYSAAAYCGKNNDAPAGTKITCTGNACPEVEKADATVLYSFEDSGVGDVTGFLALDNTNKLIVLSFRGSRSIENWIGNLNFDLKEINDICSGCRGHDGFTSSWRSVADTLRQKVEDAVREHPDYRVVFTGHSLGGALATVAGADLRGNGYDIDVFSYGAPRVGNRAFAEFLTVQTGGTLYRITHTNDIVPRLPPREFGYSHSSPEYWIKSGTLVPVRRRDIVKIEGIDATGGNNQPNIPDGPAHLWYFGLIGTC

SEQ ID NO: 13648 - protein, 268 aa, Thermomyces lanuginosus
EVSQDLFNQFNLFAQYSAAAYCGKLNRAPAGTNITCTGNACPEVEKADATFLYSFEDSGVGDVTGFLALDNTNKLIVLSFRGSRSIENWIGNLNFDLKEINDICSGCRGHAGFTSSWRSVADTLRQKVEDAVREHPDYRVVFTGHSLGGALATVAGADLRGNGYDIDVFSYGAPRVGNRAFAEFLTVQTGGTLYRITHTNDIVPRLPPREFGYSHPSPEYWIKSGTGVPVTRNDIVKIEGIDATGGNNQPNIPDITAHLWYFGLIGTC

SEQ ID NO: 13649 - protein, 268 aa, Thermomyces lanuginosus
EVSQDLFNQFNLFAQYSAAAYCGKNNDAPAGTNITCTGNACPEVEKADATILYSFRDSGVGDVTGFLALDNTNKLIVLSFRGSRSIENWIGNLNFDLKEINDICSGCRGHDGFTSSWFSVADTLRQKVEDAVREHPDYRVVFTGHSLGGALATVAGADLRGNGYDIDVFSYGAPRVGNRAFAEFLTVQTGGTLYRITHTNDIVPRLPPREFGYSHSSPEFWIKSGTLVPVRRRDIVKIEGIDATGGNNQPNIPDIPAHLWYFGLIGTC

SEQ ID NO: 13650 - protein, 268 aa, Thermomyces lanuginosus
EVSQDLFNQFNLFAQYSAAAYCKANNDAPAGTNITCTGNACPEVEKADATFLYSFEDSGVGDVTGFLALDNTNKQIVLSFRGSRSIENWIGNLNFDLKEINDICSGCRGHDGFTSSWRSVADTLRQKVEDAVREHPDYRVVFTGHSLGGALATVAWADLRGNGYDIDVFSYGAPRVGNRAFAEFLTTQQGGTLYRITHTNDIVPRLPPREFGYSHSSPEYWIKSGTLVPVTRNDIVKIEGIDATGGNNQPNIPDIPAHLWYFGLIGTC

SEQ ID NO: 13651 - protein, 268 aa, Thermomyces lanuginosus
EVSQDLFNQFNLFAQYSAAAYCQKNNDAPAGTNITCTGNACPEVFKADVTFLYSFEDSGVGDVTGFLALDNTNKQIVLSFRGSRSIENWIGNLNFDLKEINDICSGCRGHDGFTSSWRSVADTLRQKVEDAVREHPDYRVVFTGHSLGGALATVAWADLRGNGYDIDVFSYGAPRVGNRAFAEFLTTQTGGTLYRITHTNDIVPRLPPREFGYSHSSPEYWIKSGTLVPVTRNDIVKIEGIDATGGNNQPNIPDIPAHLWYFGLIGTC

SEQ ID NO: 13652 - protein, 268 aa, Thermomyces lanuginosus
EVSQDLFNQFNLFAQYSAAAYCQKNNSAPAGTNITCTGNACPEVEKADATTLYSFKDSGVGDVTGFLALDNTNKLIVLSFRGSRSIENWIGNLNFDLKEINDICSGCRGHDGFTSSWRSVADTLRQKVEAAVREHPDYRVVFTGHSLGGALATVAGADLRGNGYDIDVFSYGAPRVGNRAFAEFLTVQTGGTLYRITHTNDIVPRLPPREFGYSHSSPEYWIKSGTLVPVTRNDIVKIEGIDATGGNNQPNQPDIPAHLWYFGRIGTC

SEQ ID NO: 13653 - protein, 268 aa, Thermomyces lanuginosus
EVSQDLFNQFKLFAQYSAAAYCGKNNNAPAGTNITCTGNACPEVEKADATFLYSFEDMGVGDVTGFLALDNTNKLIVLSFRGSRSIENWFGNLNFDLKEINDICSGCRGHDGFTSSWRSVADTLRQKVEDAVREHPDYRVVFTGHSLGGALATVAGADLRGNGYDIDVFSYGAPRVGNRAFAEFLTVQTGGTLYRITHTNDIVPRLPPREFGYSHSSPEYWIKSGTLVPVTRQDIVKIEGIDATGGNNQPNIPDITAHLWYFGLIGTC

SEQ ID NO: 13654 - protein, 268 aa, Thermomyces lanuginosus
EVSQDLFNQFKLFAQYSAAAYCGKNNSAPAGTNITCTGNACPEVEKADATFLYSFKDSGVGDVTGFLALDNTNKLIVLSFRGSRSIENWFGNLNFDLKEINDICSGCRGHDGFTSSWRSVADTLRQKVEDAVREHPDYRVVFTGHSLGGALATVAGADLRGNGYDIDVFSYGAPRVGNRAFAEFLTVQTGGTLYRITHTNDIVPRLPPREFGYSHSSPEYWIKSGTLVPVTRQDIVKIEGIDATGGNNQPNIPDITAHLWYFGLIGTC

SEQ ID NO: 13655 - protein, 268 aa, Thermomyces lanuginosus
EKSQDLFNQFNLFAQYSAAAYCGKNNDAPAGTKITCTGNACPEVEKADATILYSFEDSGVGDVTGFLALDNTNKLIVLSFRGSRSIENWIGNLNFDLKEINDICSGCRGHDGFTSSWRSVADTLRQKVEDAVREHPDYRVVFTGHSLGGALATVAGADLRGNGYDIDVFSYGAPRVGNRAFAEFLTVQTGGTLYRITSTNDIVPRLPPREFGYSHSSPEYWIKSGTLVPVRRRDIVKIEGIDATGGNNQPNIPDIPAHLWYFGLIGTC

SEQ ID NO: 13656 - protein, 268 aa, Thermomyces lanuginosus
EVSQDLFNQFNLFAQYSAAAYCQKNNDAPAGTNITCTGNACPEVEKADATTLYSFEDSGVGDVTGFLALDNTNKQIVLSFRGSRSIENWIGNLNFDLKEINDICSGCRGHDGFTSSWRSVADTLRQKVEAAVREHPDYRVVFTGHSLGGALATVAGADLRGNGYDIDVFSYGAPRVGNRAFAEFLTHQTGGTLYRITHTNDIVPRLPPREFGYSHSSPEYWIKSGTLVPVTRNDIVKIEGIDATGGNNQPNQPDIPAHLWYFGLIGTC

SEQ ID NO: 13657 - protein, 268 aa, Thermomyces lanuginosus
EVSQDLFNQFNLFAQYSAAAYCGKNNRAPAGTNITCTGNACPEVEKADATFLYSFEDSGVGDVTGFLALDNTNKLIVLSFRGSRSIENWLTNLNFDLKEINDICSGCRGHAGFTSSWRSVADTLRQKVEDAVREHPDYRVVFTGHSLGGALATVAGADLRGNGYDIDVFSYGAPRVGNRAFAEFLTVQTGGTLYRITHTNDIVPRLPPREFGYSHPSPEYWIKSGTGVPVTRNDIVKIEGIDATGGNNQPNIPDITAHLWYFGLIGTC

SEQ ID NO: 13658 - protein, 268 aa, Thermomyces lanuginosus
EVSQDLFNQFNLFAQYSAAAYCQKNNSAPAGTNITCTGNACPEVEKADATFLYSFKDMGVGDVTGFLALDNTNKGIVLSFRGSRSIENWIQNLNFDLKEINDICSGCRGHDGFTSSWRSVADTLRQKVEDAVREHPDYRVVFTGHSLGGALATVAGADLRGNGYDIDVFSYGAPRVGNRAFAEFLTTQTGGTLYRITHTNDIVPRLPPREFGYSHSSPEYWIKSGTLVPVTRNDIVKIEGIDATGGNNQPNIPDIPAHLWYFGRIGTC

SEQ ID NO: 13659 - protein, 268 aa, Thermomyces lanuginosus
EVSQDLFNQFNLFAQYSAAAYCKKNNDAPAGTNITCTGNACPEVEKADATFLYSFEDSGVGDVTGFLALDNTNKQIVLSFRGSRSIENWIGNLNFDLKEINDICSGCRGHDGFTSSWRSVADTLRQKVEAAVREHPDYRVVFTGHSLGGALATVAWADLRGNGYDIDVFSYGAPRVGNRAFAEFLTNQQGGTLYRITHTNDIVPRLPPREFGYSHSSPEYWIKSGTLVPVTRNDIVKIEGIDATGGNNQPNIPDIPAHLWYFGRIGTC

SEQ ID NO: 13660 - protein, 268 aa, Thermomyces lanuginosus
EYSQDLFNQFNLFAQYSAAAYCGKNNDAPAGTKITCTGNACPEVEKADATILYSFEDSGVGDVTGFLALDNTNKLIVLSFRGSRSIENWIGNLNFDLKEINDICSGCRGHDGFTSSWRSVADTLRQKVEDAVREHPDYRVVFTGHSLGGGLATVAGADLRGNGYDIDVFSYGAPRVGNRAFAEFLTVQTGGTLYRITHTNDIVPRLPPREFGYSHSSPEYWIKSGTLVPVRRRDIVKIEGIDATGGNNQPNIPDIPAHLWYFGLIGTC

SEQ ID NO: 13661 - protein, 268 aa, Thermomyces lanuginosus
EVSRDLFNQFNLFAQYSAAAYCGKNNDAPAGTNITCTGNACPEVEKADATFLYSFEDSGVGDVTGFLALDNTNKLIVLSFRGSRSIENWIGNLNFDLKEINDICSGCRGHDGFTSSWRSVADTLRQKVEDAVREHPDYRVVFAGHSLGGALATVAGADLRGDGYDIDVFSYGAPRVGNRAFAEFLTVQTGGTLYRITSTNDIVPRLPPREFGYSHSSPEYWIKSGTLVPVRRRDIVKIEGIDATGGNNQPNIPDIPAHLWYFGLIGTC

SEQ ID NO: 13662 - protein, 268 aa, Thermomyces lanuginosus
EVSQDLFNQFNLFAQYSAAAYCQKNNDAPAGTNITCTGNACPEVFKADATFLYSFEDSGVGDVTGFLALDNTNKQIILSFRGSRSIENWIGNLNFDLKEINDICSGCRGHDGFTSSWRSVADTLRQKVEDAVREHPDYRVVFTGHSLGGALATVAWADLRGNGYDIDVFSYGAPRVGNRAFAEFLTTQTGGTLYRITHTNDIVPRLPPREFGYSHSSPEYWIKSGTLVPVTRNDIVKIEGIDATGGNNQPNIPDIPAHLWYFGLIGTC

SEQ ID NO: 13663 - protein, 268 aa, Thermomyces lanuginosus
EYSQDLFNQFNLFAQYSAAAYCGKNNDAPAGTKITCTGNACPEVEKADATILYSFEDSGVGDVTGFLALDNTNKLIVLSFRGSRSIENWIGNLNFDLKEINDICSGCRGHDGFTSSWRSVADTLRQKVEDAVREHPDYRVVFTGHSLGGALATVAGADLRGNGYDIDVFSYGAPRVGNRAFAEFLTVQTGGTLYRITSTNDIVPRLPPREFGYSHSSPEYWIKSGTLVPVRRRDIVKIEGIDATGGNNQPNIPDIPAHLWYFGLIGTC

SEQ ID NO: 13664 - protein, 268 aa, Thermomyces lanuginosus
EVSQDLFNQFKLFAQYSAAAYCKKNNSAPAGTNITCTGNACPEVEKADATFLYSFEDSGVGDVTGFLALDNTNKLIVLSFRGSRSIENWIGNLNFDLKEINDICSGCRGHDGFTSSWRSVADTLRQKVEDAVREHPDYRVVFTGHSLGGALATIAWADLRGNGYDIDVFSYGAPRVGNRAFAEFLTVQQGGTLYRITHTNDIVPRLPPREFGYSHSSPEYWIKSGTLVPVTRNDIVKIEGIDATGGNNQPNIPDIPAHLWYFGLIGTC

SEQ ID NO: 13665 - protein, 268 aa, Thermomyces lanuginosus
EVSQDLFNQFNLFAQYSAAAYCGKNNDAPAGTNITCTGNACPEVEKADATILYSFEDSGVGDVTGFLALDNTNKLIVLSFRGSRSIENWIGNLNFDLKEINDICSGCRGHDGFTSSWRSVADTLRQKVEDAVREHPDYRVVFAGHSLGGALATVAGADLRGNGYDIDVFSYGAPRVGNRAFAEFLTVQTGGTLYRITSTNDIVPRLPPREFGYSHSSPEYWIKSGTLRPVRRRDIVKIEGIDATGGNNQPNIPDIPAHLWYFGLIGTC

SEQ ID NO: 13666 - protein, 268 aa, Thermomyces lanuginosus
EVSQDLFNQFNLFAQYSAAAYCKKNNQAPAGTNITCTGNACPEVEKADATTLYSFKDMGVGDVTGFLALDNTNKQIVLSFRGSRSIENWIGNLNFDLKEINDICSGCRGHDGFTSSWRSVADTLRQKVEDAVREHPDYRVVFTGHSLGGALATVAGADLRGNGYDIDVFSYGAPRVGNRAFAEFLTVQTGGTLYRITHTNDIVPRLPPREFGYSHSSPEYWIKSGTLVPVTRNDIVKIEGIDATGGNNQPNIPDIPAHLWYFGLIGTC

SEQ ID NO: 13667 - protein, 268 aa, Thermomyces lanuginosus
EVSQDLFNQFKLFAQYSAAAYCQKNNDAPAGTNITCTGNACPEVEKADATFLYSFEDSGVGDVTGFLALDNTNKQIVLSFRGSRSIENWIGNLNFDLKEINDICSGCRGHDGFTSSWRSVADTLRQKVEDAVREHPDYRVVFTGHSLGGALATIAGADLRGNGYDIDVFSYGAPRVGNRAFAEFLTNQQGGTLYRITHTNDIVPRLPPREFGYSHSSPEYWIKSGTLVPVTRNDIVKIEGIDATGGNNQPNIPDIPAHLWYFGRIGTC

SEQ ID NO: 13668 - protein, 268 aa, Thermomyces lanuginosus
EVSDDLFNQFNLFAQYSAAAYCGKNNNAPAGTNITCTGNACPEVEKADATFLYSFKDMGVGDVTGFLALDNTNKLIVLSFRGSRSIENWIGNLNFDLKEINDICSGCRGHDGFTSSWRSVADTLRQKVEDAVREHPDYRVVFTGHSLGGALATVAGADLRGNGYDIDVFSYGAPRVGNRAFAEFLTVQTGGTLYRITHTNDIVPRLPPREFGYSHSSPEYWIKSGTLVPVTRQDIVKIEGIDATGGNNQPNIPDITAHLWYFGLIGTC

SEQ ID NO: 13669 - protein, 268 aa, Thermomyces lanuginosus
EVSQDLFNQFNLFAQYSKAAYCKKNNDAPAGTNITCTGNACPEVEKADATFLYSFEDSGVGDVTGFLALDNTNKQIVLSFRGSRSIENWIGNLRFDLKEINDICSGCRGHDGFTSSWRSVADTLRQKVEAAVREHPDYRVVFTGHSLGGALATVAGADLRGNGYDIDVFSYGAPRVGNRAFAEFLTNQTGGTLYRITHTNDIVPRLPPREFGYSHSSPEYWIKSGTLVPVTRNDIVKIEGIDATGGNNQPNIPDIPAHLWYFGLIGTC

SEQ ID NO: 13670 - protein, 268 aa, Thermomyces lanuginosus
EKSQDLFNQFNLFAQYSAAAYCGKNNDAPAGTKITCTGNACPEVEKADATLLYSFEDSGVGDVTGFLALDNTNKLIVLSFRGSRSIENWIGNLNFDLKEINDICSGCRGHDGFTSSWRSVADTLRQKVEDAVREHPDYRVVFTGHSLGGALATVAGADLRGNGYDIDVFSYGAPRVGNRAFAEFLTVQTGGTLYRITSTNDIVPRLPPREFGYSHSSPEYWIKSGTLVPVRRRDIVKIEGIDATGGNNQPNIPDIPAHLWYFGLIGTC

SEQ ID NO: 13671 - protein, 268 aa, Thermomyces lanuginosus
EVSQDLFNQFNLFAQYSAAAYCGKNNDAPAGTNITCTGNICPEVEKADATILYSFRDSGVGDVTGFLALDNTNKLIVLSFRGSRSIENWIGNLNFDLKEINDICSGCRGHDGFTSSWFSVADTLRQKVEDAVREHPDYRVVFTGHSLGGALATVAGADLRGNGYDIDVFSYGAPRVGNRAFAEFLTVQTGGTLYRITHTNDIVPRLPPREFGYSHSSPEYWIKSGTLVPVRRRDIVKIEGIDATGGNNQPNIPDIPAHLWYFGLIGTC

SEQ ID NO: 13672 - protein, 268 aa, Thermomyces lanuginosus
EVSQDLFNQFNLFAQYSKAAYCGANNDAPAGTNITCTGNACPEVEKADATFLYSFEDSGVGDVTGFLALDNTNKQIILSFRGSRSIENWIGNLNFDLKEINDICSGCRGHDGFTSSWRSVADTLRQKVEAAVREHPDYRVVFTGHSLGGALATVAGADLRGNGYDIDVFSYGAPRVGNRAFAEFLTNQTGGTLYRITHTNDIVPRLPPREFGYSHSSPEYWIKSGTLVPVTRNDIVKIEGIDATGGNNQPNIPDIPAHLWYFGLIGTC

SEQ ID NO: 13673 - protein, 268 aa, Thermomyces lanuginosus
EVSQDLFNQFNLFAQYSAAAYCGKNNDAPAGTNITCTGNACPEVEKADATFLYSFRNSGVGDVTGFLALDNTNKLIVLSFRGSRSIENWIGNLNFDLKEINDICSGCRGHDGFTSSWFSVADTLRQKVEDAVREHPDYRVVFTGHSLGGALATVAGADLRGNSYDIDVFSYGAPRVGNRAFAEFLTVQTGGTLYRITHTNDIVPRLPPREFGYSHSSPEYWIKSGTLVPVRRRDIVKIEGIDATGGNNQPNIPDIPAHLWYFGLIGTC

SEQ ID NO: 13674 - protein, 268 aa, Thermomyces lanuginosus
EYSQDLFNQFNLFAQYSAAAYCGKNNDAPAGTKITCTGNACPEVEKADATVLYSFEDSGVGDVTGFLALDNTNKLIVLSFRGSRSIENWIGNLNFDLKEINDICSGCRGHDGFTSSWRSVADTLRQKVEDAVREHPDYRVVFTGHSLGGALATVAGADLRGNGYDIDVFSYGAPRVGNRAFAEFLTVQTGGTLYRITSTNDIVPRLPPREFGYSHSSPEYWIKSGTLVPVRRRDIVKIEGIDATGGNNQPNIPDIPAHLWYFGLIGTC

SEQ ID NO: 13675 - protein, 268 aa, Thermomyces lanuginosus
EVSDDLFNQFLLFAQYSAAAYCGKNNSAPAGTNITCTGNACPEVEKADATFLYSFEDMGVGDVTGFLALDNTNKLIVLSFRGSRSIENWIGNLNFDLKEINDICSGCRGHDGFTSSWRSVADTLRQKVEDAVREHPDYRVVFTGHSLGGALATVAGADLRGNGYDIDVFSYGAPRVGNRAFAEFLTVQTGGTLYRITHTNDIVPRLPPREFGYSHSSPEYWIKSGTLVPVTRQDIVKIEGIDATGGNNQPNIPDITAHLWYFGLIGTC

SEQ ID NO: 13676 - protein, 268 aa, Thermomyces lanuginosus
EVSQDLFNQFNLFAQYSKAAYCGKNNSAEAGTNITCTGNACPEVEKADATFLYSFEDSGVGDVTGFLALDNTRKDIVLSFRGSRSIENWIGNLNFDLKEINDICSGCRGHDGFTSSWRSVADTLRQKVEDAVREHPDYRVVFTGHSLGGALATVAGADLRGNGYDIDVFSYGAPRVGNRAFAEFLTVQDGGTLYRITHTNDIVPRLPPREFGYSHSSPEYWIKSGTLVPVTRNDIVKIEGIDATGGNNQPNIPDIPAHLWYFGLIGTC

SEQ ID NO: 13677 - protein, 268 aa, Thermomyces lanuginosus
EVSQDLFNQFNLFAQYSKAAYCKANNDAPAGTNITCTGNACPEVEKADATFLYSFEDSGVGDVTGFLALDNTNKLIVLSFRGSRSIENWIGNLRFDLKEINDICSGCRGHDGFTSSWRSVADTLRQKVEAAVREHPDYRVVFTGHSLGGALATIAGADLRGNGYDIDVFSYGAPRVGNRAFAEFLTVQTGGTLYRITHTNDIVPRLPPREFGYSHSSPEYWIKSGTLVPVTRNDIVKIEGIDATGGNNQPNIPDIPAHLWYFGLIGTC

SEQ ID NO: 13678 - protein, 268 aa, Thermomyces lanuginosus
EVSQDLFNQFNLFAQYSAAAYCQKNNSAPAGTNITCTGNACPEVEKADATFLYSFEDSGVGDVTGFLALDNTNKQIVLSFRGSRSIENWIGNLNFDLKEINDICSGCRGHDGFTSSWRSVADTLRQKVEDAVREHPDYRVVFTGHSLGGALATIAWADLRGNGYDIDVFSYGAPRVGNRAFAEFLTNQTGGTLYRITHTNDIVPRLPPREFGYSHSSPEYWIKSGTLVPVTRNDIVKIEGIDATGGNNQPNIPDIPAHLWYFGRIGTC

SEQ ID NO: 13679 - protein, 268 aa, Thermomyces lanuginosus
EYSQDLFNQFNLFAQYSAAAYCGKNNDAPAGTKITCTGNACPEVEKADATLLYSFEDSGVGDVTGFLALDNTNKLIVLSFRGSRSIENWIGNLNFDLKEINDICSGCRGHDGFTSSWRSVADTLRQKVEDAVREHPDYRVVFTGHSLGGALATVAGADLRGNGYDIDVFSYGAPRVGNRAFAEFLTVQTGGTLYRITHTNDIVPRLPPREFGYSHSSPEYWIKIGTLVPVRRRDIVKIEGIDATGGNNQPNIPDIPAHLWYFGLIGTC

SEQ ID NO: 13680 - protein, 268 aa, Thermomyces lanuginosus
EVSQDLFNQFNLFAQYSAAAYCGKNNNAPAGTNITCTGNACPEVEKADATFLYSFRDSGVGDVTGFLALDNTNKLIVLSFRGSRSIENWIGNLNFDLKEINDICSGCRGHDGFTSSWFSVADTLRQKVEDAVREHPDYRVVFTGHSLGGALATVAGADLRGNGYDIDVFSYGAPRVGNRAFAEFLTVQTGGTLYRITHTNDIVPRLPPREFGYSHSSPEYWIKSGTLVPVRRRDIVKIEGIDATGGNNQPNIPDITAHLWYFGLIGTC

SEQ ID NO: 13681 - protein, 268 aa, Thermomyces lanuginosus
EVSRDLFNQFNLFAQYSAAAYCGKNNDAPAGTNITCTGNACPEVEKADATILYSFEDSGVGDVTGFLALDNTNKLIVLSFRGSRSIENWIGNLNFDLKEINDICSGCRGHDGFTSSWRSVADTLRQKVEDAVREHPDYRVVFAGHSLGGALATVAGADLRGNGYDIDVFSYGAPRVGNRAFAEFLTVQTGGTLYRITSTNDIVPRLPPREFGYSHSSPEYWIKSGTLVPVRRRDIVKIEGIDATGGNNQPNIPDIPAHLWYFGLIGTC

SEQ ID NO: 13682 - protein, 268 aa, Thermomyces lanuginosus
EVSQDLFNQFNLFAQYSAAAYCGKNNEAPAGTNITCTGNACPEVEKADATFLYSFEDMGVGDVTGFLALDNTNKLIVLSFRGSRSIENWIGNLNFDLKEINDICSGCRGHDGFTSSWRSVADTLRQKVEDAVREHPQYRVVFTGHSLGGALATVAGADLRGNPYDIDVFSYGAPRVGNRAFAEFLTVQTGGTLYRITHTNDIVPRLPPREFGYSHSSPEYWIKSGTMVPVTRQDIVKIEGIDATGGNNQPNIPDIPAHLWYFGRIGTC

SEQ ID NO: 13683 - protein, 268 aa, Thermomyces lanuginosus
EVSQDLFNQFNLFAQYSAAAYCGKNNDAPAGTQITCTGNACPEVEKADATFLYSFEDSGVGDVTGFLALDNTNKLIVLSFRGSRSIENWIGNLNFDLKEINDICSGCRGHDGFTSSWRSVADTLRQKVEDAVREHPDYRVVFTGHSLGGALATVAGADLRGNGYDIDVFSYGAPRVGNRAFAEFLTVQTGGTLYRITHTNDIVPRLPPREFGYSHSSPDYWIKSGTGVPVRRRDIVKIEGIDATGGNNRPNIPDIPAHLWYFGLIGTC

SEQ ID NO: 13684 - protein, 268 aa, Thermomyces lanuginosus
EVSQDLFNQFNLFAQYSAAAYCQANNDAPAGTNITCTGNACPEVEKADATFLYSFEDSGVGDVTGFLALDNTNKLIILSFRGSRSIENWIGNLNFDLKEINDICSGCRGHDGFTSSWRSVADTLRQKVEAAVREHPDYRVVFTGHSLGGALATIAWADLRGNGYDIDVFSYGAPRVGNRAFAEFLTVQTGGTLYRITHTNDIVPRLPPREFGYSHSSPEYWIKSGTLVPVTRNDIVKIEGIDATGGNNQPNIPDIPAHLWYFGLIGTC

SEQ ID NO: 13685 - protein, 268 aa, Thermomyces lanuginosus
EYSQDLFNQFNLFAQYSAAAYCGKNNDAPAGTKITCTGNACPEVEKADATVLYSFEDSGVGDVTGFLALDNTNKLIVLSFRGSRSIENWIGNLNFDLKEINDICSGCRGHDGFTSSWRSVADTLRQKVEDAVREHPDYRVVFTGHSLGGALATVAGADLRGNGYDIDVFSYGAPRVGNRAFAEFLTVQTGGTLYRITHTNDIVPRLPPREFGYSHSSPEYWIKSGTLVPVRRRDIVKIEGIDATGGNNQPNIPDIPVHLWYFGLIGTC

SEQ ID NO: 13686 - protein, 268 aa, Thermomyces lanuginosus
EVSQDLFNQFNLFAQYSAAAYCGKNNDAPAGTNITCTGNACPEVEKADATLLYSFRDSGVGDVTGFLALDNTNKLIVLSFRGSRSIENWIGNLNFDLIEINDICSGCRGHDGFTSSWFSVADTLRQKVEDAVREHPDYRVVFTGHSLGGALATVAGADLRGNGYDIDVFSYGAPRVGNRAFAEFLTVQTGGTLYRITHTNDIVPRLPPREFGYSHSSPEYWIKSGTLVPVRRRDIVKIEGIDATGGNNQPNIPDIPAHLWYFGLIGTC

SEQ ID NO: 13687 - protein, 268 aa, Thermomyces lanuginosus
EVSQDLFNQFNLFAQYSKAAYCGKNNDAEAGTDITCTGNACPEVFKADATFLYSFEDSGVGDVTGFLALDNTNKDIVLSFRGSRSIENWIGNLNFDLKEINDICSGCRGHDGFTSSWRSVADTLRQKVEDAVREHPDYRVVFTGHSLGGALATVAGADLRGNGYDIDVFSYGAPRVGNRAFAEFLTVQDGGTLYRITHTNDIVPRLPPREFGYSHSSPEYWIKSGTLVPVTRNDIVKIEGIDATGGNNQPNIPDIPAHLWYFGLIGTC

SEQ ID NO: 13688 - protein, 268 aa, Thermomyces lanuginosus
EVSQDLFNQFNLFAQYSKAAYCGKNNDAPAGTNITCTGNACPEVEKADATFLYSFEDSGVGDVTGFLALDNTNKQIVLSFRGSRSIENWIGNLNFDLKEINDICSGCRGHDGFTSSWRSVADTLRQKVEAAVREHPDYRVVFTGHSLGGALATVAWADLRGNGYDIDVFSYGAPRVGNRAFAEFLTNQQGGTLYRITHTNDIVPRLPPREFGYSHSSPEYWIKSGTLVPVTRNDIVKIEGIDATGGNNQPNIPDIPAHLWYFGRIGTC

SEQ ID NO: 13689 - protein, 268 aa, Thermomyces lanuginosus
EVSRDLFNQFNLFAQYSAAAYCGKNNDAPAGTNITCTGNACPEVEKADATFLYSFEDSGVGDVTGFLALDNTNKLIVLSFRGSRSIENWIGNLNFDLKEINDICSGCRGHDGFTSSWRSVADTLRQKVEDAVREHPDYRVVFAGHSLGGALATVAGADLRGNGYDIDVFSYGAPRVGNRAFAEFLTVQTGGTLYRITSTNDIVPRLPPREFGYSHSSPEYWIKSGTLRPVRRRDIVKIEGIDATGGNNQPNIPDIPAHLWYFGLIGTC

SEQ ID NO: 13690 - protein, 268 aa, Thermomyces lanuginosus
EVSQDLFNQFKLFAQYSAAAYCGKNNSAPAGTNITCTGNACPEVEKADATFLYSFEDMGVGDVTGFLALDNTNKLIVLSFRGSRSIENWFGNLNFDLKEINDICSGCRGHDGFTSSWRSVADTLRQKVEDAVREHPDYRVVFTGHSLGGALATVAGADLRGNGYDIDVFSYGAPRVGNRAFAEFLTVQTGGTLYRITHTNDIVPRLPPREFGYSHSSPEYWIKSGTLVPVTRQDIVKIEGIDATGGNNQPNIPDITAHLWYFGLIGTC

SEQ ID NO: 13691 - protein, 268 aa, Thermomyces lanuginosus
EYSQDLFNQFNLFAQYSAAAYCGKNNDAPAGTKITCTGNACPEVEKADATVLYSFEDSGVGDVTGFLALDNTNKLIVLSFRGSRSIENWIGNLNFDLKEINDICSGCRGHDGFTSSWRSVADTLRQKVEDAVREHPDYRVVFTGHSLGGALATVAGADLRGNGYDIDVFSYGAPRVGNRAFAEFLTVQTGGTLYRITHTNDIVPRLPPREFGYSHSSPEYWIKFGTLVPVRRRDIVKIEGIDATGGNNQPNIPDIPAHLWYFGLIGTC

SEQ ID NO: 13692 - protein, 268 aa, Thermomyces lanuginosus
EVSQDLFNQFNLFAQYSKAAYCQKNNDAPAGTNITCTGNACPEVEKADVTFLYSFEDSGVGDVTGFLALDNTNKQIILSFRGSRSIENWIGNLNFDLKEINDICSGCRGHDGFTSSWRSVADTLRQKVEDAVREHPDYRVVFTGHSLGGALATVAWADLRGNGYDIDVFSYGAPRVGNRAFAEFLTVQTGGTLYRITHTNDIVPRLPPREFGYSHSSPEYWIKSGTLVPVTRNDIVKIEGIDATGGNNQPNIPDIPAHLWYFGLIGTC

SEQ ID NO: 13693 - protein, 268 aa, Thermomyces lanuginosus
EVSQDLFNQFNLFAQYSAAAYCGKNNEAPAGTNITCTGNACPEVEKADATFLYSFEDMGVGDVTGFLALDNTNKLIVLSFRGSRSIENWIGNLNFDLKEINDICSGCRGHDGFTSSWRSVADTLRQKVEAAVREHPQYRVVFTGHSLGGALATVAGADLRGNPYDIDVFSYGAPRVGNRAFAEFLTVQTGGTLYRITHTNDIVPRLPPREFGYSHSSPEYWIKSGTMVPVTRNDIVKIEGIDATGGNNQPNIPDIPAHLWYFGRIGTC

SEQ ID NO: 13694 - protein, 268 aa, Thermomyces lanuginosus
EKSQDLFNQFNLFAQYSAAAYCGKNNDAPAGTKITCTGNACPEVEKADATVLYSFEDSGVGDVTGFLALDNTNKLIVLSFRGSRSIENWIGNLNFDLKEINDICSGCRGHDGFTSSWRSVADTLRQKVEDAVREHPDYRVVFTGHSLGGALATVAGADLRGNGYDIDVFSYGAPRVGNRAFAEFLTVQTGGTLYRITHTNDIVPRLPPREFGYSHSSPEYWIKFGTLVPVRRRDIVKIEGIDATGGNNQPNIPDIPAHLWYFGLIGTC

SEQ ID NO: 13695 - protein, 268 aa, Thermomyces lanuginosus
EVSQDLFNQFNLFAQYSAAAYCGKNNSAPAGTNITCTGNACPEVEKADATTLYSFEDMGVGDVTGFLALDNTNKQIVLSFRGSRSIENWIGNLNFDLKEINDICSGCRGHDGFTSSWRSVADTLRQKVEDAVREHPDYRVVFTGHSLGGALATVAGADLRGNGYDIDVFSYGAPRVGNRAFAEFLTNQTGGTLYRITHTNDIVPRLPPREFGYSHSSPEYWIKSGTLVPVTRNDIVKIEGIDATGGNNQPNQPDIPAHLWYFGRIGTC

SEQ ID NO: 13696 - protein, 268 aa, Thermomyces lanuginosus
EVSQDLFNQFNLFAQYSAAAYCGKNNDAPAGTNITCTGNACPEVEKADATFLYSFRDSGVGDVTGFLALDNTNKLIVLSFRGSRSIENWIGNLNFDLKEINDICSGCRGHDGFTSSWFSVADTLRQKVEDAVREHPDYRVVFTGHSLGGALATVAGADLRGNGYDIDVFSYGAPRVGNRAFAEFLTVQTGGTLYRITHTNDIVPRLPPREFGYSHSSPEYWIKSGTLVPVRRRDIVKIEGIDAEGGNNQPNIPDITAHLWYFGLIGTC

SEQ ID NO: 13697 - protein, 268 aa, Thermomyces lanuginosus
EKSQDLFNQFNLFAQYSAAAYCGKNNDAPAGTKITCTGNACPEVEKADATVLYSFEDSGVGDVTGFLALDNTNKLIVLSFRGSRSIENWIGNLNFDLKEINDICSGCRGHDGFTSSWRSVADTLRQKVEDAVREHPDYRVVFTGHSLGGALATVAGADLRGNGYDIDVFSYGAPRVGNRAFAEFLTVQTGGTLYRITHTNDIVPRLPPREFGYSHSSPEYWIKSGTLPPVRRRDIVKIEGIDATGGNNQPNIPDIPAHLWYFGLIGTC

SEQ ID NO: 13698 - protein, 268 aa, Thermomyces lanuginosus
EVSQDLFNQFNLFAQYSAAAYCKANNDAPAGTNITCTGNACPEVEKADATFLYSFEDSGVGDVTGFLALDNTNKQIVLSFRGSRSIENWIGNLNFDLKEINDICSGCRGHDGFTSSWRSVADTLRQKVEAAVREHPDYRVVFTGHSLGGALATVAGADLRGNGYDIDVFSYGAPRVGNRAFAEFLTTQQGGTLYRITHTNDIVPRLPPREFGYSHSSPEYWIKSGTLVPVTRNDIVKIEGIDATGGNNQPNIPDIPAHLWYFGRIGTC

SEQ ID NO: 13699 - protein, 268 aa, Thermomyces lanuginosus
EYSQDLFNQFNLFAQYSAAAYCGKNNDAPAGTKITCTGNACPEVEKADATVLYSFEDSGVGDVTGFLALDNTNKLIVLSFRGSRSIENWIGNLNFDLKEINDICSGCRGHDGFTSSWRSVADTLRQKVEDAVREHPDYRVVFTGHSLGGALATVAGADLRGNGYDIDVFSYGAPRVGNRAFAEFLTVQTGGTLYRITHTNDIVPRLPPREFGYSHSSPEYWIKIGTLVPVRRRDIVKIEGIDATGGNNQPNIPDIPAHLWYFGLIGTC

SEQ ID NO: 13700 - protein, 268 aa, Thermomyces lanuginosus
EVSQDLFNQFNLFAQYSKAAYCKANNDAPAGTNITCTGNACPEVEKADATFLYSFEDSGVGDVTGFLALDNTNKRIVLSFRGSRSIENWIGNLNFDLKEINDICSGCRGHDGFTSSWRSVADTLRQKVEAAVREHPDYRVVFTGHSLGGALATVAGADLRGNGYDIDVFSYGAPRVGNRAFAEFLTNQTGGTLYRITHTNDIVPRLPPREFGYSHSSPEYWIKSGTLVPVTRNDIVKIEGIDATGGNNQPNIPDIPAHLWYFGLIGTC

SEQ ID NO: 13701 - protein, 268 aa, Thermomyces lanuginosus
EVSQDLFNQFNLFAQYSKAAYCGKNNSAPAGTDITCTGNACPEVEKADATFLYSFEDSGVGDVTGFLALDNTNRDIVLSFRGSRSIENWIGNLNFDLKEINDICSGCRGHDGFTSSWRSVADTLRQKVEDAVREHPDYRVVFTGHSLGGALATVAGADLRGNGYDIDVFSYGAPRVGNRAFAEFLTVQDGGTLYRITHTNDIVPRLPPREFGYSHSSPEYWIKSGTLVPVTRNDIVKIEGIDATGGNNQPNIPDIPAHLWYFGLIGTC

SEQ ID NO: 13702 - protein, 268 aa, Thermomyces lanuginosus
EVSQDLFNQFNLFAQYSAAAYCGKNNRAPAGTNITCTGNACPEVEKADATFLYSFEDSGVGDVTGFLALDNTNKLIVLSFRGSRSIENWIGNLNFDLKEINDICSGCRGHGGFTSSWRSVADTLRQKVEDAVREHPDYRVVFTGHSLGGALATVAGADLRGNGYDIDVFSYGAPRVGNRAFAEFLTVQTGGTLYRITHTNDIVPRLPPREFGYSHPSPEYWIKSGTGVPVTRNDIVKIEGIDAIGGNNQPNIPDITAHLWYFGLIGTC

SEQ ID NO: 13703 - protein, 268 aa, Thermomyces lanuginosus
EVSQDLFNQFNLFAQYSAAAYCGKNNRAPAGTNITCTANACPEVEKADATFLYSFEDSGVGDVTGFLALDNTNKLIVLSFRGSRSIENWITNLNFELKEINDICSGCRGHAGFTSSWRSVADTLRQKVEDAVREHPDYRVVFTGHSLGGALATVAGADLRGNKYDIDVFSYGAPRVGNRAFAEFLTVQTGGTLYRITHTNDIVPRLPPREFGYSHSSPEYWIKSGTLVPVTRRDIVKIEGIDATGGNNQPNIPSIPAHLWYFGLIGTC

SEQ ID NO: 13704 - protein, 268 aa, Thermomyces lanuginosus
EVSQDLFNQFNLFAQYSAAAYCGKNNDAPAGTNITCTGNICPEVEKADATFLYSFRDSGVGDVTGFLALDNTNKLIVLSFRGSRSIENWIGNLNFDLKEINDICSGCRGHDGFTSSWFSVADTLRQKVEDAVREHPDYRVVFTGHSLGGALATVAGADLRGNGYDIDVFSYGAPRVGNRAFAEFLTVQTGGTLYRITHTNDIVPRLPPREFGYSHSSPEYWIKSGTLVPVRRRDIVKIEGIDATGGNNQPNIPDITAHLWYFGLIGTC

SEQ ID NO: 13705 - protein, 268 aa, Thermomyces lanuginosus
EVSQDLFNQFNLFAQYSAAAYCGKNNRAPAGTNITCTCNACPEVEKADATFLYSFEDSGVGDVTGFLALDNTNKLIVLSFRGSRSIENWIGNLNFDLKEINDICSGCRGHGGFTSSWRSVADTLRQKVEDAVREHPDYRVVFTGHSLGGALATVAGADLRGNGYDIDVFSYGAPRVGNRAFAEFLTVQTGGTLYRITHTNDIVPRLPPREFGYSHPSPEYWIKSGTGVPVTRNDIVKIEGIDATGGNNQPNIPDITAHLWYFGLIGTC

SEQ ID NO: 13706 - protein, 268 aa, Thermomyces lanuginosus
EKSQDLFNQFNLFAQYSAAAYCGKNNDAPAGTKITCTGNACPEVEKADATLLYSFEDSGVGDVTGFLALDNTNKLIVLSFRGSRSIENWIGNLNFDLKEINDICSGCRGHDGFTSSWRSVADTLRQKVEDAVREHPDYRVVFTGHSLGGALATVAGADLRGNGYDIDVFSYGAPRVGNRAFAEFLTVQTGGTLYRITHTNDIVPRLPPREFGYSHSSPEYWIKIGTLVPVRRRDIVKIEGIDATGGNNQPNIPDIPAHLWYFGLIGTC

SEQ ID NO: 13707 - protein, 268 aa, Thermomyces lanuginosus
EYSQDLFNQFNLFAQYSAAAYCGKNNDAPAGTKITCTGNACPEVEKADATVLYSFEDSGVGDVTGFLALDNTNKLIVLSFRGSRSIENWIGNLNFDLKEINDICSGCRGHDGFTSSWRSVADTLRQKVEDAVREHPDYRVVFTGHSLGGGLATVAGADLRGNGYDIDVFSYGAPRVGNRAFAEFLTVQTGGTLYRITHTNDIVPRLPPREFGYSHSSPEYWIKSGTLVPVRRRDIVKIEGIDATGGNNQPNIPDIPAHLWYFGLIGTC

SEQ ID NO: 13708 - protein, 268 aa, Thermomyces lanuginosus
EVSQDLFNQFKLFAQYSAAAYCGKNNDAPAGTNITCTGNACPEVEKADATFLYSFKDSGVGDVTGFLALDNTNKQIVLSFRGSRSIENWIGNLNFDLKEINDICSGCRGHAGFTSSWRSVADTLRQKVEAAVREHPDYRVVFTGHSLGGALATIAGADLRGNGYDIDVFSYGAPRVGNRAFAEFLTVQTGGTLYRITHTNDIVPRLPPREFGYSHSSPEYWIKSGTLVPVTRNDIVKIEGIDATGGNNQPNIPDIPAHLWYFGRIGTC

SEQ ID NO: 13709 - protein, 268 aa, Thermomyces lanuginosus
EVSQDLFNQFNLFAQYSKAAYCKANNDAPAGTNITCTGNACPEVEKADATFLYSFEDSGVGDVTGFLALDNTNKLIVLSFRGSRSIENWIGNLRFDLKEINDICSGCRGHDGFTSSWRSVADTLRQKVEDAVREHPDYRVVFTGHSLGGALATIAGADLRGNGYDIDVFSYGAPRVGNRAFAEFLTTQTGGTLYRITHTNDIVPRLPPREFGYSHSSPEYWIKSGTLVPVTRNDIVKIEGIDATGGNNQPNIPDIPAHLWYFGRIGTC

SEQ ID NO: 13710 - protein, 268 aa, Thermomyces lanuginosus
EVSRDLFNQFNLFAQYSAAAYCGKNNDAPAGTNITCTGNACPEVEKADATFLYSFEDSGVGDVTGFLALDNTNKLIVLSFRGSRSIENWIGNLNFDLKEINDICSGCRGHDGFTSSWRSVADTLRQKVEDAVREHPDYRVVFTGHSLGGALATVAGADLRGDGYDIDVFSYGAPRVGNRAFAEFLTVQTGGTLYRITSTNDIVPRLPPREFGYSHSSPEYWIKSGTLPPVRRRDIVKIEGIDATGGNNQPNIPDIPAHLWYFGLIGTC

SEQ ID NO: 13711 - protein, 268 aa, Thermomyces lanuginosus
EVSRDLFNQFNLFAQYSAAAYCGKNNDAPAGTNITCTGNACPEVEKADATFLYSFEDSGVGDVTGFLALDNTNKLIVLSFRGSRSIENWIGNLNFDLKEINDICSGCRGHDGFTSSWRSVADTLRQKVEDAVREHPDYRVVFTGHSLGGALATVAGADLRGNGYDIDVFSYGAPRVGNRAFAEFLTVQTGGTLYRITSTNDIVPRLPPREFGYSHSSPEYWIKSGTLPPVRRRDIVKIEGIDATGGNNQPNIPDISAHLWYFGLIGTC

SEQ ID NO: 13712 - protein, 268 aa, Thermomyces lanuginosus
EVSQDLFNQFNLFAQYSAAAYCGKNNDAPAGTQITCTGNACPEVEKADATFLYSFEDSGVGDVTGFLALDNTNKLIVLSFRGSRSIENWIGNLNFNLKEINDICSGCRGHDGFTSSWRSVADTLRQKVEDAVREHPDYRVVFTGHSLGGALATVARADLRGNGYDIDVFSYGAPRWGNRAFAEFLTVQTGGTLYRITHTNDIVPRLPPREFGYSHSSPEYWIKSGTLVPVRRRDIVKIEGIDATGGNNRPNIPDIPAHLWYFGLIGTC

SEQ ID NO: 13713 - protein, 268 aa, Thermomyces lanuginosus
EVSQDLFNQFNLFAQYSAAAYCKKNNSAPAGTNITCTGNACPEVEKADATTLYSFEDMGVGDVTGFLALDNTNKLIVLSFRGSRSIENWIQNLNFDLKEINDICSGCRGHDGFTSSWRSVADTLRQKVEDAVREHPDYRVVFTGHSLGGALATVAGADLRGNGYDIDVFSYGAPRVGNRAFAEFLTNQTGGTLYRITHTNDIVPRLPPREFGYSHSSPEYWIKSGTLVPVTRNDIVKIEGIDATGGNNQPNQPDIPAHLWYFGLIGTC

SEQ ID NO: 13714 - protein, 268 aa, Thermomyces lanuginosus
EVSQDLFNQFNLFAQYSAAAYCGKNNRAPAGTQITCTGNACPEVEKADATFLYSFEDSGVGDVTGFLALDNTNKLIVLSFRGSRSIENWIGNLNFDLKEINDICSGCRGHDGFTSSWRSVADTLRQKVEDAVREHPDYRVVFTGHSLGGALATVAGADLRGNGYDIDVFSYGAPRVGNRAFAEFLTVQTGGTLYRITHTNDIVPRLPPREFGYSHSSPEYWIKSGTGVPVRRRDIVKIEGIDATGGNNRPNIPDIPAHLWYFGLIGTC

SEQ ID NO: 13715 - protein, 268 aa, Thermomyces lanuginosus
EKSQDLFNQFNLFAQYSAAAYCGKNNDAPAGTKITCTGNACPEVEKADATLLYSFEDSGVGDVTGFLALDNTNKLIVLSFRGSRSIENWIGNLNFDLKEINDICSGCRGHDGFTSSWRSVADTLRQKVEDAVREHPDYRVVFTGHSLGGALATVAGADLRGNGYDIDVFSYGAPRVGNRAFAEFLTVQTGGTLYRITHTNDIVPRLPPREFGYSHSSPEYWIKSGTLVPVRRRDIVKIEGIDATGGNNQPNIPDIPIHLWYFGLIGTC

SEQ ID NO: 13716 - protein, 268 aa, Thermomyces lanuginosus
EVSDDLFNQFKLFAQYSAAAYCGKNNNAPAGTNITCTGNACPEVEKADATFLYSFEDSGVGDVTGFLALDNTNKLIVLSFRGSRSIENWFGNLNFDLKEINDICSGCRGHDGFTSSWRSVADTLRQKVEDAVREHPDYRVVFTGHSLGGALATVAGADLRGNGYDIDVFSYGAPRVGNRAFAEFLTVQTGGTLYRITHTNDIVPRLPPREFGYSHSSPEYWIKSGTLVPVTRQDIVKIEGIDATGGNNQPNIPDITAHLWYFGLIGTC

SEQ ID NO: 13717 - protein, 268 aa, Thermomyces lanuginosus
EKSQDLFNQFNLFAQYSAAAYCGKNNDAPAGTKITCTGNACPEVEKADATVLYSFEDSGVGDVTGFLALDNTNKLIVLSFRGSRSIENWIGNLNFDLKEINDICSGCRGHDGFTSSWRSVADTLRQKVEDAVREHPDYRVVFTGHSLGGALATVAGADLRGNGYDIDVFSYGAPRVGNRAFAEFLTVQTGGTLYRITLTNDIVPRLPPREFGYSHSSPEYWIKSGTLVPVRRRDIVKIEGIDATGGNNQPNIPDIPAHLWYFGLIGTC

SEQ ID NO: 13718 - protein, 268 aa, Thermomyces lanuginosus
EYSQDLFNQFNLFAQYSAAAYCGKNNDAPAGTKITCTGNACPEVEKADATVLYSFEDSGVGDVTGFLALDNTNKLIVLSFRGSRSIENWIGNLNFDLKEINDICSGCRGHDGFTSSWRSVADTLRQKVEDAVREHPDYRVVFAGHSLGGALATVAGADLRGNGYDIDVFSYGAPRVGNRAFAEFLTVQTGGTLYRITHTNDIVPRLPPREFGYSHSSPEYWIKSGTLVPVRRRDIVKIEGIDATGGNNQPNIPDIPAHLWYFGLIGTC

SEQ ID NO: 13719 - protein, 268 aa, Thermomyces lanuginosus
EKSQDLFNQFNLFAQYSAAAYCGKNNDAPAGTKITCTGNACPEVEKADATILYSFEDSGVGDVTGFLALDNTNKLIVLSFRGSRSIENWIGNLNFDLKEINDICSGCRGHDGFTSSWRSVADTLRQKVEDAVREHPDYRVVFTGHSLGGALATVAGADLRGNGYDIDVFSYGAPRVGNRAFAEFLTVQTGGTLYRITHTNDIVPRLPPREFGYSHSSPEYWIKSGTLVPVRRRDIVKIEGIDATGGNNQPNIPDIPIHLWYFGLIGTC

SEQ ID NO: 13720 - protein, 268 aa, Thermomyces lanuginosus
EVSQDLFNQFNLFAQYSAAAYCGKNNEAPAGTNITCTGNACPEVEKAQATFLYSFEDMGVGDVTGFLALDNTNKLIVLSFRGSRSIENWIGNLNFDLKEINDICSGCRGHDGFTSSWRSVADTLRQKVEDAVREHPQYRVVFTGHSLGGALATVAGADLRGNPYDIDVFSYGAPRVGNRAFAEFLTVQTGGTLYRITHTNDIVPRLPPREFGYSHSSPEYWIKSGTMVPVTRNDIVKIEGIDATGGNNQPNIPDIPAHLWYFGRIGTC

SEQ ID NO: 13721 - protein, 268 aa, Thermomyces lanuginosus
EVSRDLFNQFNLFAQYSAAAYCGKNNDAPAGTNITCTGNACPEVEKADATILYSFEDSGVGDVTGFLALDNTNKLIVLSFRGSRSIENWIGNLNFDLKEINDICSGCRGHDGFTSSWRSVADTLRQKVEDAVREHPDYRVVFTGHSLGGALATVAGADLRGDGYDIDVFSYGAPRVGNRAFAEFLTVQTGGTLYRITSTNDIVPRLPPREFGYSHSSPEYWIKSGTLVPVRRRDIVKIEGIDATGGNNQPNIPDIPAHLWYFGLIGTC

SEQ ID NO: 13722 - protein, 268 aa, Thermomyces lanuginosus
EVSQDLFNQFNLFAQYSKAAYCQKNNDAPAGTNITCTGNACPEVFKADVTFLYSFEDSGVGDVTGFLALDNTNKLIVLSFRGSRSIENWIGNLNFDLKEINDICSGCRGHDGFTSSWRSVADTLRQKVEDAVREHPDYRVVFTGHSLGGALATVAWADLRGNGYDIDVFSYGAPRVGNRAFAEFLTTQTGGTLYRITHTNDIVPRLPPREFGYSHSSPEYWIKSGTLVPVTRNDIVKIEGIDATGGNNQPNIPDIPAHLWYFGLIGTC

SEQ ID NO: 13723 - protein, 268 aa, Thermomyces lanuginosus
EVSQDLFNQFNLFAQYSKAAYCGANNDAPAGTNITCTGNACPEVEKADATFLYSFEDSGVGDVTGFLALDNTNKLIVLSFRGSRSIENWIGNLRFDLKEINDICSGCRGHDGFTSSWRSVADTLRQKVEAAVREHPDYRVVFTGHSLGGALATVAWADLRGNGYDIDVFSYGAPRVGNRAFAEFLTTQTGGTLYRITHTNDIVPRLPPREFGYSHSSPEYWIKSGTLVPVTRNDIVKIEGIDATGGNNQPNIPDIPAHLWYFGRIGTC

SEQ ID NO: 13724 - protein, 268 aa, Thermomyces lanuginosus
EVSQDLFNQFNLFAQYSAAAYCGKNNRAPAGTNITCTGNACPEVERADATFLYSFEDSGVGDVTGFLALDNTNKLIVLSFRGSRSIENWIGNLNFDLKEINDICSGCRGHAGFTSSWRSVADTLRQKVEDAVREHPDYRVVFTGHSLGGALATVAGADLRGNGYDIDVFSYGAPRVGNRAFAEFLTVQTGGTLYRITHTNDIVPRLPPREFGYSHPSPEYWIKSGTGVPVTRNDIVKIEGIDATGGNNQPNIPDITAHLWYFGLIGTC

SEQ ID NO: 13725 - protein, 268 aa, Thermomyces lanuginosus
EKSQDLFNQFNLFAQYSAAAYCGKNNDAPAGTKITCTGNACPEVEKADATVLYSFEDSGVGDVTGFLALDNTNKLIVLSFRGSRSIENWIGNLNFDLKEINDICSGCRGHDGFTSSWRSVADTLRQKVEDAVREHPDYRVVFTGHSLGGALATVAGADLRGNGYDIDVFSYGAPRVGNRAFAEFLTVQTGGTLYRITHTNDIVPRLPPREFGYSHSSPEYWIKSGTLVPRRRRDIVKIEGIDATGGNNQPNIPDIPAHLWYFGLIGTC

SEQ ID NO: 13726 - protein, 268 aa, Thermomyces lanuginosus
EVSQDLFNQFNLFAQYSAAAYCGKNNDAPAGTNITCTGNACPEVEKADATFLYSFRDSGVGDVTGFLALDNTNKLIVLSFRGSRSIENWIGNLNFDLKEINDICSGCRGHDGFTSSWFSVADTLRQKVEDAVREHPDYRVVFTGHSLGGALATVAGADLRGNSYDIDVFSYGAPRVGNRAFAEFLTVQTGGTLYRITHTNDIVPRLPPREFGYSHSSPEYWIKSGTLVPVRRRDIVKIEGIDATGGNNQPNIPDITAHLWYFGLIGTC

SEQ ID NO: 13727 - protein, 268 aa, Thermomyces lanuginosus
EYSQDLFNQFNLFAQYSAAAYCGKNNDAPAGTKITCTGNACPEVEKADATLLYSFEDSGVGDVTGFLALDNTNKLIVLSFRGSRSIENWIGNLNFDLKEINDICSGCRGHDGFTSSWRSVADTLRQKVEDAVREHPDYRVVFTGHSLGGALATVAGADLRGNGYDIDVFSYGAPRVGNRAFAEFLTVQTGGTLYRITHTNDIVPRLPPREFGYSHSSPEYWIKSGTLVPVRRRDIVKIEGIDATGGNNQPNIPDIPVHLWYFGLIGTC

SEQ ID NO: 13728 - protein, 268 aa, Thermomyces lanuginosus
EVSQDLFNQFNLFAQYSAAAYCGKNNDAPAGTNITCTGNACPEVEKADATFLYSFEDSGVGDVTGFLALDNTNKLIVLSFRGSRSIENWIGNLNFDLKEINDICSGCRGHDGFTSSWRSVADTLRQKVEDAVREHPDYRVVFAGHSLGGALATVAGADLRGDGYDIDVFSYGAPRVGNRAFAEFLTVQTGGTLYRITNTNDIVPRLPPREFGYSHSSPEYWIKSGTLRPVRRRDIVKIEGIDATGGNNQPNIPDIPAHLWYFGLIGTC

SEQ ID NO: 13729 - protein, 268 aa, Thermomyces lanuginosus
EYSQDLFNQFNLFAQYSAAAYCGKNNDAPAGTKITCTGNACPEVEKADATILYSFEDSGVGDVTGFLALDNTNKLIVLSFRGSRSIENWIGNLNFDLKEINDICSGCRGHDGFTSSWRSVADTLRQKVEDAVREHPDYRVVFTGHSLGGALATVAGADLRGNGYDIDVFSYGAPRVGNRAFAEFLTVQTGGTLYRITHTNDIVPRLPPREFGYSHSSPEYWIKSGTDVPVRRRDIVKIEGIDATGGNNQPNIPDIPAHLWYFGLIGTC

SEQ ID NO: 13730 - protein, 268 aa, Thermomyces lanuginosus
EVSQDLFNQFNLFAQYSAAAYCGKNNRAPAGTNITCTGNACPEVEKADATFLYSFEDSGVGDVTGFLALDNTNKLIVLSFRGSRSIENWIGNLNFDLKEINDICSGCRGHAGFTSSWRSVADTLRQKVEDAVREHPDYRVVFTGHSLGGALATVAGADLRGNGYDIDVFSYGAPRVGNRAFAEFLTVQTGGTLYRITHTNDIVPRLPPREYGYSHPSPEYWIKSGTGVPVTRNDIVKIEGIDATGGNNQPNIPDITAHLWYFGLIGTC

SEQ ID NO: 13731 - protein, 268 aa, Thermomyces lanuginosus
EVSQDLFNQFNLFAQYSKAAYCGKNNSAEAGTDITCTGNACPEVPKADATFLYSFEDSGVGDVTGFLALDNTNKDIVLSFRGSRSIENWIGNLNFDLKEINDICSGCRGHDGFTSSWRSVADTLRQKVEDAVREHPDYRVVFTGHSLGGALATVAGADLRGNGYDIDVFSYGAPRVGNRAFAEFLTVQTGGTLYRITHTNDIVPRLPPREFGYSHSSPEYWIKSGTLVPVTRNDIVKIEGIDATGGNNQPNIPDIPAHLWYFGLIGTC

SEQ ID NO: 13732 - protein, 268 aa, Thermomyces lanuginosus
EVSQDLFNQFNLFAQYSAAAYCGKNNDAPAGTQITCTGNACPEVEKADATFLYSFEDSGVGDVTGFLALDNTNKLIVLSFRGSRSIENWIGNLNFELKEINDICSGCRGHDGFTSSWRSVADTLRQKVEDAVREHPDYRVVFTGHSLGGALATVAGADLRGNGYDIDVFSYGAPRVGNRAFAEFLTVQTGGTLYRITHTNDIVPRLPPREFGYSHSSPDYWIKSGTGVPVRRRDIVKIEGIDATGGNNRPNIPDIPAHLWYFGLIGTC

SEQ ID NO: 13733 - protein, 268 aa, Thermomyces lanuginosus
EVSQDLFNQFNLFAQYSAAAYCGANNDAPAGTNITCTGNACPEVEKADATFLYSFEDSGVGDVTGFLALDNTNKQIILSFRGSRSIENWIGNLRFDLKEINDICSGCRGHDGFTSSWRSVADTLRQKVEAAVREHPDYRVVFTGHSLGGALATVAGADLRGNGYDIDVFSYGAPRVGNRAFAEFLTNQTGGTLYRITHTNDIVPRLPPREFGYSHSSPEYWIKSGTLVPVTRNDIVKIEGIDATGGNNQPNIPDIPAHLWYFGLIGTC

SEQ ID NO: 13734 - protein, 268 aa, Thermomyces lanuginosus
EVSQDLFNQFNLFAQYSKAAYCQKNNDAPAGTNITCTGNACPEVFKADATFLYSFEDSGVGDVTGFLALDNTNKLIVLSFRGSRSIENWIGNLNFDLKEINDICSGCRGHDGFTSSWRSVADTLRQKVEDAVREHPDYRVVFTGHSLGGALATVAWADLRGNGYDIDVFSYGAPRVGNRAFAEFLTTQDGGTLYRITHTNDIVPRLPPREFGYSHSSPEYWIKSGTLVPVTRNDIVKIEGIDATGGNNQPNIPDIPAHLWYFGLIGTC

SEQ ID NO: 13735 - protein, 268 aa, Thermomyces lanuginosus
EVSQDLFNQFNLFAQYSAAAYCGKNNSAEAGTDITCTGNACPEVFKADATFLYSFEDSGVGDVTGFLALDNTRKDIVLSFRGSRSIENWIGNLNFDLKEINDICSGCRGHDGFTSSWRSVADTLRQKVEDAVREHPDYRVVFTGHSLGGALATVAGADLRGNGYDIDVFSYGAPRVGNRAFAEFLTVQTGGTLYRITHTNDIVPRLPPREFGYSHSSPEYWIKSGTLVPVTRNDIVKIEGIDATGGNNQPNIPDIPAHLWYFGLIGTC

SEQ ID NO: 13736 - protein, 268 aa, Thermomyces lanuginosus
EVSRDLFNQFNLFAQYSAAAYCGKNNDAPAGTNITCTGNACPEVEKADATILYSFEDSGVGDVTGFLALDNTNKLIVLSFRGSRSIENWIGNLNFDLKEINDICSGCRGHDGFTSSWRSVADTLRQKVEDAVREHPDYRVVFAGHSLGGALATVAGADLRGDGYDIDVFSYGAPRVGNRAFAEFLTVQTGGTLYRITHTNDIVPRLPPREFGYSHSSPEYWIKSGTLVPVRRRDIVKIEGIDATGGNNQPNIPDIPAHLWYFGLIGTC

SEQ ID NO: 13737 - protein, 268 aa, Thermomyces lanuginosus
EVSQDLFNQFNLFAQYSAAAYCQKNNDAPAGTNITCTGNACPEVEKADATTLYSFEDSGVGDVTGFLALDNTNKRIVLSFRGSRSIENWIQNLNFDLKEINDICSGCRGHDGFTSSWRSVADTLRQKVEAAVREHPDYRVVFTGHSLGGALATVAGADLRGNGYDIDVFSYGAPRVGNRAFAEFLTTQTGGTLYRITHTNDIVPRLPPREFGYSHSSPEYWIKSGTLVPVTRNDIVKIEGIDATGGNNQPNQPDIPAHLWYFGRIGTC

SEQ ID NO: 13738 - protein, 268 aa, Thermomyces lanuginosus
EVSQDLFNQFNLFAQYSAAAYCGKNNQAPAGTQITCTGNACPEVEKADATFLYSFEDSGVGDVTGFLALDNTNKLIVLSFRGSRSIENWITNLNFDLKEINDICSGCRGHDGFTSSWRSVADTLRQKVEDAVREHPDYRVVFTGHSLGGALATVAGADLRGNKYDIDVFSYGAPRVGNRAFAEFLTVQTGGTLYRITHTNDIVPRLPPREFGYSHSSPDYWIKSGTLVPVRRRDIVKIEGIDATGGNNQPNIPDIPAHLWYFGLIGTC

SEQ ID NO: 13739 - protein, 268 aa, Thermomyces lanuginosus
EKSQDLFNQFNLFAQYSAAAYCGKNNDAPAGTKITCTGNACPEVEKADATVLYSFEDSGVGDVTGFLALDNTNKLIVLSFRGSRSIENWIGNLNFDLKEINDICSGCRGHDGFTSSWRSVADTLRQKVEDAVREHPDYRVVFTGHSLGGALATVAGADLRGNGYDIDVFSYGAPRVGNRAFAEFLTVQTGGTLYRITITNDIVPRLPPREFGYSHSSPEYWIKSGTLVPVRRRDIVKIEGIDATGGNNQPNIPDIPAHLWYFGLIGTC

SEQ ID NO: 13740 - protein, 268 aa, Thermomyces lanuginosus
EVSQDLFNQFNLFAQYSAAAYCGKNNEAPAGTNITCTGNACPEVEKADATTLYSFEDSGVGDVTGFLALDNTNKGIVLSFRGSRSIENWIGNLNFDLKEINDICSGCRGHDGFTSSWRSVADTLRQKVEAAVREHPDYRVVFTGHSLGGALATVAGADLRGNGYDIDVFSYGAPRVGNRAFAEFLTHQTGGTLYRITHTNDIVPRLPPREFGYSHSSPEYWIKSGTLVPVTRNDIVKIEGIDATGGNNQPNQPDIPAHLWYFGRIGTC

SEQ ID NO: 13741 - protein, 268 aa, Thermomyces lanuginosus
EVSQDLFNQFNLFAQYSAAAYCGANNDAPAGTNITCTGNACPEVEKADATFLYSFEDSGVGDVTGFLALDNTNKQIVLSFRGSRSIENWIGNLNFDLKEINDICSGCRGHAGFTSSWRSVADTLRQKVEAAVREHPDYRVVFTGHSLGGALATIAWADLRGNGYDIDVFSYGAPRVGNRAFAEFLTVQTGGTLYRITHTNDIVPRLPPREFGYSHSSPEYWIKSGTLVPVTRNDIVKIEGIDATGGNNQPNIPDIPAHLWYFGRIGTC

SEQ ID NO: 13742 - protein, 268 aa, Thermomyces lanuginosus
EVSQDLFNQFNLFAQYSKAAYCQKNNDAPAGTNITCTGNACPEVEKADVTFLYSFEDSGVGDVTGFLALDNTNKLIVLSFRGSRSIENWIGNLNFDLKEINDICSGCRGHDGFTSSWRSVADTLRQKVEDAVREHPDYRVVFTGHSLGGALATVAWADLRGNGYDIDVFSYGAPRVGNRAFAEFLTTQDGGTLYRITHTNDIVPRLPPREFGYSHSSPEYWIKSGTLVPVTRNDIVKIEGIDATGGNNQPNIPDIPAHLWYFGLIGTC

SEQ ID NO: 13743 - protein, 268 aa, Thermomyces lanuginosus
EYSQDLFNQFNLFAQYSAAAYCGKNNDAPAGTKITCTGNACPEVEKADATILYSFEDSGVGDVTGFLALDNTNKLIVLSFRGSRSIENWIGNLNFDLKEINDICSGCRGHDGFTSSWRSVADTLRQKVEDAVREHPDYRVVFAGHSLGGALATVAGADLRGNGYDIDVFSYGAPRVGNRAFAEFLTVQTGGTLYRITHTNDIVPRLPPREFGYSHSSPEYWIKSGTLVPVRRRDIVKIEGIDATGGNNQPNIPDIPAHLWYFGLIGTC

SEQ ID NO: 13744 - protein, 268 aa, Thermomyces lanuginosus
EVSQDLFNQFNLFAQYSAAAYCGKNNRAPAGTNITCSGNACPEVEKADATFLYSFEDSGVGDVTGFLALDNTNKLIVLSFRGSRSIENWIGNLNFDLKEINDICSGCRGHGGFTSSWRSVADTLRQKVEDAVREHPDYRVVFTGHSLGGALATVAGADLRGNGYDIDVFSYGAPRVGNRAFAEFLTVQTGGTLYRITHTNDIVPRLPPREFGYSHPSPEYWIKSGTGVPVTRNDIVKIEGIDATGGNNQPNIPDITAHLWYFGLIGTC

SEQ ID NO: 13745 - protein, 268 aa, Thermomyces lanuginosus
EKSQDLFNQFNLFAQYSAAAYCGKNNDAPAGTKITCTGNACPEVEKADATLLYSFEDSGVGDVTGFLALDNTNKLIVLSFRGSRSIENWIGNLNFDLKEINDICSGCRGHDGFTSSWRSVADTLRQKVEDAVREHPDYRVVFTGHSLGGALATVAGADLRGNGYDIDVFSYGAPRVGNRAFAEFLTVQTGGTLYRITHTNDIVPRLPPREFGYSHSSPEYWIKSGTLPPVRRRDIVKIEGIDATGGNNQPNIPDIPAHLWYFGLIGTC

SEQ ID NO: 13746 - protein, 268 aa, Thermomyces lanuginosus
EVSQDLFNQFNLFAQYSKAAYCGKNNSAPAGTDITCTGNACPEVFKADATFLYSFEDSGVGDVTGFLALDNTRKDIVLSFRGSRSIENWIGNLNFDLKEINDICSGCRGHDGFTSSWRSVADTLRQKVEDAVREHPDYRVVFTGHSLGGALATVAGADLRGNGYDIDVFSYGAPRVGNRAFAEFLTVQTGGTLYRITHTNDIVPRLPPREFGYSHSSPEYWIKSGTLVPVTRNDIVKIEGIDATGGNNQPNIPDIPAHLWYFGLIGTC

SEQ ID NO: 13747 - protein, 268 aa, Thermomyces lanuginosus
EKSQDLFNQFNLFAQYSAAAYCGKNNDAPAGTKITCTGNACPEVEKADATILYSFEDSGVGDVTGFLALDNTNKLIVLSFRGSRSIENWIGNLNFDLKEINDICSGCRGHDGFTSSWRSVADTLRQKVEDAVREHPDYRVVFTGHSLGGALATVAGADLRGNGYDIDVFSYGAPRVGNRAFAEFLTVQTGGTLYRITHTNDIVPRLPPREFGYSHSSPEYWIKSGTLVPRRRRDIVKIEGIDATGGNNQPNIPDIPAHLWYFGLIGTC

SEQ ID NO: 13748 - protein, 268 aa, Thermomyces lanuginosus
EVSQDLFNQFNLFAQYSAAAYCKKNNDAPAGTNITCTGNACPEVEKADATFLYSFEDSGVGDVTGFLALDNTNKQIVLSFRGSRSIENWIGNLNFDLKEINDICSGCRGHAGFTSSWRSVADTLRQKVEAAVREHPDYRVVFTGHSLGGALATIAWADLRGNGYDIDVFSYGAPRVGNRAFAEFLTVQTGGTLYRITHTNDIVPRLPPREFGYSHSSPEYWIKSGTLVPVTRNDIVKIEGIDATGGNNQPNIPDIPAHLWYFGRIGTC

SEQ ID NO: 13749 - protein, 268 aa, Thermomyces lanuginosus
EVSQDLFNQFNLFAQYSAAAYCKKNNDAPAGTNITCTGNACPEVEKADATTLYSFEDSGVGDVTGFLALDNTNKQIVLSFRGSRSIENWIQNLNFDLKEINDICSGCRGHDGFTSSWRSVADTLRQKVEAAVREHPDYRVVFTGHSLGGALATVAGADLRGNGYDIDVFSYGAPRVGNRAFAEFLTHQTGGTLYRITHTNDIVPRLPPREFGYSHSSPEYWIKSGTLVPVTRNDIVKIEGIDATGGNNQPNQPDIPAHLWYFGLIGTC

SEQ ID NO: 13750 - protein, 268 aa, Thermomyces lanuginosus
EVSQDLFNQFNLFAQYSLAAYCGANNDAPAGTNITCTGNACPEVEKADATFLYSFEDSGVGDVTGFLALDNTNKLIVLSFRGSRSIENWIGNLRFDLKEINDICSGCRGHDGFTSSWRSVADTLRQKVEAAVREHPDYRVVFTGHSLGGALATVAWADLRGNGYDIDVFSYGAPRVGNRAFAEFLTTQTGGTLYRITHTNDIVPRLPPREFGYSHSSPEYWIKSGTLVPVTRNDIVKIEGIDATGGNNQPNIPDIPAHLWYFGRIGTC

SEQ ID NO: 13751 - protein, 268 aa, Thermomyces lanuginosus
EVSQDLFNQFNLFAQYSAAAYCGKNNRAPAGTNITCTGNACPEVEKADATFLYSFEDSGVGDVTGFLALDNTNKLIVLSFRGSRSIENWISNLKFDLKEINDICSGCRGHAGFTSSWRSVADTLRQKVEDAVREHPDYRVVFTGHSLGGALATVAGADLRGNGYDIDVFSYGAPRVGNRAFAEFLTVQTGGTLYRITHTNDIVPRLPPREFGYSHPSPEYWIKSGTGVPVTRNDIVKIEGIDATGGNNQPNIPDITAHLWYFGLIGTC

SEQ ID NO: 13752 - protein, 268 aa, Thermomyces lanuginosus
EVSQDLFNQFNLFAQYSAAAYCGKNNEAPAGTNITCTGNACPEVEKADATFLYSFEDMGVGDVTGFLALDNTNKLIVLSFRGSRSIENWIGNLNFDLKEINDICSGCRGHDGFTSSWRSVADTLRQKVEAAVREHPDYRVVFTGHSLGGALATVAGADLRGNPYDIDVFSYGAPRVGNRAFAEFLTVQTGGTLYRITHTNDIVPRLPPREFGYSHSSPEYWIKSGTMVPVTRQDIVKIEGIDATGGNNQPNIPDIPAHLWYFGRIGTC

SEQ ID NO: 13753 - protein, 268 aa, Thermomyces lanuginosus
EVSQDLFNQFNLFAQYSAAAYCGKNNDAPAGTNITCTGNACPEVEKADATFLYSFEDSGVGDVTGFLALDNTNKLIVLSFRGSRSIENWIGNLNFDLKEINDICSGCRGHDGFTSSWRSVADTLRQKVEDAVREHPDYRVVFAGHSLGGALATVAGADLRGDGYDIDVFSYGAPRVGNRAFAEFLTVQTGGTLYRITSTNDIVPRLPPREFGYSHSSPEYWIKSGTLPPVRRRDIVKIEGIDATGGNNQPNIPDIPAHLWYFGLIGTC

SEQ ID NO: 13754 - protein, 268 aa, Thermomyces lanuginosus
EVSQDLFNQFNLFAQYSKAAYCQKNNDAPAGTNITCTGNACPEVEKADVTFLYSFEDSGVGDVTGFLALDNTNKLIILSFRGSRSIENWIGNLNFDLKEINDICSGCRGHDGFTSSWRSVADTLRQKVEDAVREHPDYRVVFTGHSLGGALATVAGADLRGNGYDIDVFSYGAPRVGNRAFAEFLTTQDGGTLYRITHTNDIVPRLPPREFGYSHSSPEYWIKSGTLVPVTRNDIVKIEGIDATGGNNQPNIPDIPAHLWYFGLIGTC

SEQ ID NO: 13755 - protein, 268 aa, Thermomyces lanuginosus
EVSQDLFNQFNLFAQYSAAAYCGKNNDAPAGTNITCTGNACPEVEKAQATFLYSFEDMGVGDVTGFLALDNTNKLIVLSFRGSRSIENWIGNLNFDLKEINDICSGCRGHDGFTSSWRSVADTLRQKVEAAVREHPDYRVVFTGHSLGGALATVAGADLRGNPYDIDVFSYGAPRVGNRAFAEFLTVQTGGTLYRITHTNDIVPRLPPREFGYSHSSPEYWIKSGTMVPVTRQDIVKIEGIDATGGNNQPNIPDIPAHLWYFGRIGTC

SEQ ID NO: 13756 - protein, 268 aa, Thermomyces lanuginosus
EVSQDLFNQFRLFAQYSAAAYCGKNNDAPAGTQITCTGNACPEVEKADATFLYSFEDSGVGDVTGFLALDNTNKLIVLSFRGSRSIENWITNLNFDLKEINDICSGCRGHDGFTSSWRSVADTLRQKVEDAVREHPDYRVVFTGHSLGGALATVAGADLRGNTYDIDVFSYGAPRVGNRAFAEFLTVQTGGTLYRITHTNDIVPRLPPREFGYSHSSPEYWIKSGTLVPVRRRDIVKIEGIDATGGNNQPNIPSIPAHLWYFGLIGTC

SEQ ID NO: 13757 - protein, 268 aa, Thermomyces lanuginosus
EVSQDLFNQFNLFAQYSKAAYCGKNNSAPAGTDITCTGNACPEVEKADATFLYSFEDSGVGDVTGFLALDNTRKDIVLSFRGSRSIENWIGNLNFDLKEINDICSGCRGHDGFTSSWRSVADTLRQKVEDAVREHPDYRVVFTGHSLGGALATVAGADLRGNGYDIDVFSYGAPRVGNRAFAEFLTVQDGGTLYRITHTNDIVPRLPPREFGYSHSSPEYWIKSGTLVPVTRNDIVKIEGIDATGGNNQPNIPDIPAHLWYFGLIGTC

SEQ ID NO: 13758 - protein, 268 aa, Thermomyces lanuginosus
EVSQDLFNQFNLFAQYSAAAYCGKNNDAPAGTNITCTGNACPEVEKADATILYSFEDSGVGDVTGFLALDNTNKLIVLSFRGSRSIENWIGNLNFDLKEINDICSGCRGHDGFTSSWRSVADTLRQKVEDAVREHPDYRVVFAGHSLGGALATVAGADLRGDGYDIDVFSYGAPRVGNRAFAEFLTVQTGGTLYRITNTNDIVPRLPPREFGYSHSSPEYWIKSGTLVPVRRRDIVKIEGIDATGGNNQPNIPDIPAHLWYFGLIGTC

SEQ ID NO: 13759 - protein, 268 aa, Thermomyces lanuginosus
EVSQDLFNQFNLFAQYSAAAYCKKNNDAPAGTNITCTGNACPEVEKADATFLYSFEDSGVGDVTGFLALDNTNKQIILSFRGSRSIENWIGNLNFDLKEINDICSGCRGHDGFTSSWRSVADTLRQKVEAAVREHPDYRVVFTGHSLGGALATVAWADLRGNGYDIDVFSYGAPRVGNRAFAEFLTQQTGGTLYRITHTNDIVPRLPPREFGYSHSSPEYWIKSGTLVPVTRNDIVKIEGIDATGGNNQPNIPDIPAHLWYFGLIGTC

SEQ ID NO: 13760 - protein, 268 aa, Thermomyces lanuginosus
EVSQDLFNQFNLFAQYSAAAYCKANNDAPAGTNITCTGNACPEVEKADATFLYSFEDSGVGDVTGFLALDNTNKQIVLSFRGSRSIENWIGNLNFDLKEINDICSGCRGHAGFTSSWRSVADTLRQKVEAAVREHPDYRVVFTGHSLGGALATVAGADLRGNGYDIDVFSYGAPRVGNRAFAEFLTVQQGGTLYRITHTNDIVPRLPPREFGYSHSSPEYWIKSGTLVPVTRNDIVKIEGIDATGGNNQPNIPDIPAHLWYFGRIGTC

SEQ ID NO: 13761 - protein, 268 aa, Thermomyces lanuginosus
EVSQDLFNQFNLFAQYSAAAYCGANNDAPAGTNITCTGNACPEVEKADATFLYSFEDSGVGDVTGFLALDNTNKQIVLSFRGSRSIENWIGNLNFDLKEINDICSGCRGHAGFTSSWRSVADTLRQKVEAAVREHPDYRVVFTGHSLGGALATVAGADLRGNGYDIDVFSYGAPRVGNRAFAEFLTNQQGGTLYRITHTNDIVPRLPPREFGYSHSSPEYWIKSGTLVPVTRNDIVKIEGIDATGGNNQPNIPDIPAHLWYFGRIGTC

SEQ ID NO: 13762 - protein, 268 aa, Thermomyces lanuginosus
EVSQDLFNQFNLFAQYSAAAYCQKNNDAPAGTNITCTGNACPEVEKADATFLYSFKDSGVGDVTGFLALDNTNKLIVLSFRGSRSIENWIGNLNFDLKEINDICSGCRGHAGFTSSWRSVADTLRQKVEAAVREHPDYRVVFTGHSLGGALATVAGADLRGNGYDIDVFSYGAPRVGNRAFAEFLTNQQGGTLYRITHTNDIVPRLPPREFGYSHSSPEYWIKSGTLVPVTRNDIVKIEGIDATGGNNQPNIPDIPAHLWYFGLIGTC

SEQ ID NO: 13763 - protein, 268 aa, Thermomyces lanuginosus
EVSQDLFNQFNLFAQYSKAAYCQANNDAPAGTNITCTGNACPEVEKADATFLYSFEDSGVGDVTGFLALDNTNKAIVLSFRGSRSIENWIGNLRFDLKEINDICSGCRGHDGFTSSWRSVADTLRQKVEDAVREHPDYRVVFTGHSLGGALATVAWADLRGNGYDIDVFSYGAPRVGNRAFAEFLTVQTGGTLYRITHTNDIVPRLPPREFGYSHSSPEYWIKSGTLVPVTRNDIVKIEGIDATGGNNQPNIPDIPAHLWYFGLIGTC

SEQ ID NO: 13764 - protein, 268 aa, Thermomyces lanuginosus
EVSQDLFNQFNLFAQYSAAAYCGKNNSAPAGTNITCTGNACPEVEKADATFLYSFEDSGVGDVTGFLALDNTNKRIVLSFRGSRSIENWIGNLNFDLKEINDICSGCRGHDGFTSSWRSVADTLRQKVEDAVREHPDYRVVFTGHSLGGALATIAWADLRGNGYDIDVFSYGAPRVGNRAFAEFLTNQQGGTLYRITHTNDIVPRLPPREFGYSHSSPEYWIKSGTLVPVTRNDIVKIEGIDATGGNNQPNIPDIPAHLWYFGRIGTC

SEQ ID NO: 13765 - protein, 268 aa, Thermomyces lanuginosus
EVSQDLFNQFNLFAQYSKAAYCQKNNDAPAGTNITCTGNACPEVFKADVTFLYSFEDSGVGDVTGFLALDNTNKQIILSFRGSRSIENWIGNLNFDLKEINDICSGCRGHDGFTSSWRSVADTLRQKVEDAVREHPDYRVVFTGHSLGGALATVAGADLRGNGYDIDVFSYGAPRVGNRAFAEFLTVQTGGTLYRITHTNDIVPRLPPREFGYSHSSPEYWIKSGTLVPVTRNDIVKIEGIDATGGNNQPNIPDIPAHLWYFGLIGTC

SEQ ID NO: 13766 - protein, 268 aa, Thermomyces lanuginosus
EKSQDLFNQFNLFAQYSAAAYCGKNNDAPAGTKITCTGNACPEVEKADATLLYSFEDSGVGDVTGFLALDNTNKLIVLSFRGSRSIENWIGNLNFDLKEINDICSGCRGHDGFTSSWRSVADTLRQKVEDAVREHPDYRVVFTGHSLGGGLATVAGADLRGNGYDIDVFSYGAPRVGNRAFAEFLTVQTGGTLYRITHTNDIVPRLPPREFGYSHSSPEYWIKSGTLVPVRRRDIVKIEGIDATGGNNQPNIPDIPAHLWYFGLIGTC

SEQ ID NO: 13767 - protein, 268 aa, Thermomyces lanuginosus
EVSQDLFNQFNLFAQYSKAAYCQKNNDAPAGTNITCTGNACPEVFKADATFLYSFEDSGVGDVTGFLALDNTNKQIVLSFRGSRSIENWIGNLNFDLKEINDICSGCRGHDGFTSSWRSVADTLRQKVEDAVREHPDYRVVFTGHSLGGALATVACADLRGNGYDIDVFSYGAPRVGNRAFAEFLTTQTGGTLYRITHTNDIVPRLPPREFGYSHSSPEYWIKSGTLVPVTRNDIVKIEGIDATGGNNQPNIPDIPAHLWYFGLIGTC

SEQ ID NO: 13768 - protein, 268 aa, Thermomyces lanuginosus
EVSQDLFNQFNLFAQYSKAAYCGANNDAPAGTNITCTGNACPEVEKADATFLYSFEDSGVGDVTGFLALDNTNKQIVLSFRGSRSIENWIGNLNFDLKEINDICSGCRGHAGFTSSWRSVADTLRQKVEDAVREHPDYRVVFTGHSLGGALATVAWADLRGNGYDIDVFSYGAPRVGNRAFAEFLTNQTGGTLYRITHTNDIVPRLPPREFGYSHSSPEYWIKSGTLVPVTRNDIVKIEGIDATGGNNQPNIPDIPAHLWYFGRIGTC

SEQ ID NO: 13769 - protein, 268 aa, Thermomyces lanuginosus
EVSQDLFNQFNLFAQYSAAAYCGKNNDAPAGTNITCTGNACPEVEKADATFLYSFEDSGVGDVTGFLALDNTNKLIVLSFRGSRSIENWIGNLNFDLKEINDICSGCRGHDGFTSSWRSVADTLRQKVEDAVREHPDYRVVFTGHSLGGALATVAGADLRGNGYDIDVFSYGAPRVGNRAFAEFLTVQTGGTLYRITHTNDIVPRLPPREFGYSHSSPEYWIKSGTLVPVTRNDIVKIEGIDATGGNGGTLGLDIPAHLWYFGLIGTC

SEQ ID NO: 13770 - protein, 268 aa, Thermomyces lanuginosus
EVSQDLFNQFNLFAQYSAAAYCGKNNDAPAGTQITCTGNACPEVEKADATFLYSFEDSGVGDVTGFLALDNTNKLIVLSFRGSRSIENWIQNLNFDLKEINDICSGCRGHDGFTSSWRSVADTLRQKVEDAVREHPDYRVVFAGHSLGGALATVAGADLRGNGYDIDVFSYGAPRVGNRAFAEFLTVQTGGTLYRITHTNDIVPRLPPRQFGYSHSSPEYWIKSGTLVPVRRRDIVKIEGIDATGGNNQPNIPDGPAHLWYFGLIGTC

SEQ ID NO: 13771 - protein, 268 aa, Thermomyces lanuginosus
EVSQDLFNQFNLFAQYSAAAYCGKNNDAPAGTNITCTGNACPEVEKAQATFLYSFEDMGVGDVTGFLALDNTNKLIVLSFRGSRSIENWIGNLNFDLKEINDICSGCRGHDGFTSSWRSVADTLRQKVEDAVREHPQYRVVFTGHSLGGALATVAGADLRGNPYDIDVFSYGAPRVGNRAFAEFLTVQTGGTLYRITHTNDIVPRLPPREFGYSHSSPEYWIKSGTMVPVTRQDIVKIEGIDATGGNNQPNIPDIPAHLWYFGRIGTC

SEQ ID NO: 13772 - protein, 268 aa, Thermomyces lanuginosus
EVSDDLFNQFNLFAQYSAAAYCGKNNSAPAGTNITCTGNACPEVEKADATFLYSFKDMGVGDVTGFLALDNTNKLIVLSFRGSRSIENWIGNLNFDLKEINDICSGCRGHDGFTSSWRSVADTLRQKVEDAVREHPDYRVVFTGHSLGGALATVAGADLRGNGYDIDVFSYGAPRVGNRAFAEFLTVQTGGTLYRITHTNDIVPRLPPREFGYSHSSPEYWIKSGTLVPVTRQDIVKIEGIDATGGNNQPNIPDITAHLWYFGLIGTC

SEQ ID NO: 13773 - protein, 268 aa, Thermomyces lanuginosus
EVSDDLFNQFKLFAQYSAAAYCGKNNNAPAGTNITCTGNACPEVEKADATFLYSFEDMGVGDVTGFLALDNTNKLIVLSFRGSRSIENWIGNLNFDLKEINDICSGCRGHDGFTSSWRSVADTLRQKVEDAVREHPDYRVVFTGHSLGGALATVAGADLRGNGYDIDVFSYGAPRVGNRAFAEFLTVQTGGTLYRITHTNDIVPRLPPREFGYSHSSPEYWIKSGTLVPVTRQDIVKIEGIDATGGNNQPNIPDITAHLWYFGLIGTC

SEQ ID NO: 13774 - protein, 268 aa, Thermomyces lanuginosus
EVSQDLFNQFNLFAQYSKAAYCLKNNDAPAGTNITCTGNACPEVEKADATFLYSFEDSGVGDVTGFLALDNTNKQIILSFRGSRSIENWIGNLNFDLKEINDICSGCRGHDGFTSSWRSVADTLRQKVEDAVREHPDYRVVFTGHSLGGALATVAWADLRGNGYDIDVFSYGAPRVGNRAFAEFLTQQTGGTLYRITHTNDIVPRLPPREFGYSHSSPEYWIKSGTLVPVTRNDIVKIEGIDATGGNNQPNIPDIPAHLWYFGLIGTC

SEQ ID NO: 13775 - protein, 268 aa, Thermomyces lanuginosus
EVSQDLFNQFNLFAQYSAAAYCGKNNEAPAGTNITCTGNACPEVEKAQATFLYSFEDSGVGDVTGFLALDNTNKLIVLSFRGSRSIENWIGNLNFDLKEINDICSGCRGHDGFTSSWRSVADTLRQKVEDAVREHPQYRVVFTGHSLGGALATVAGADLRGNPYDIDVFSYGAPRVGNRAFAEFLTVQTGGTLYRITHTNDIVPRLPPREFGYSHSSPEYWIKSGTMVPVTRQDIVKIEGIDATGGNNQPNIPDIPAHLWYFGRIGTC

SEQ ID NO: 13776 - protein, 268 aa, Thermomyces lanuginosus
EVSQDLFNQFNLFAQYSAAAYCGKNNNAPAGTQITCTGNACPEVEKADATFLYSFEDSGVGDVTGFLALDNTNKLIVLSFRGSRSIENWITNLNFDLKEINDICSGCRGHDGFTSSWRSVADTLRQKVEDAVREHPDYRVVFTGHSLGGALATVAGADLRGNKYDIDVFSYGAPRVGNRAFAEFLTVQTGGTLYRITHTNDIVPRLPPREFGYSHSSPEYWIKSGTLVPVRRRDIVKIEGIDATGGNNQPNIPSIPAHLWYFGLIGTC

SEQ ID NO: 13777 - protein, 268 aa, Thermomyces lanuginosus
EVSQDLFNQFNLFAQYSAAAYCQANNDAPAGTNITCTGNACPEVEKADATFLYSFEDSGVGDVTGFLALDNTNKLIVLSFRGSRSIENWIGNLNFDLKEINDICSGCRGHDGFTSSWRSVADTLRQKVEAAVREHPDYRVVFTGHSLGGALATIAWADLRGNGYDIDVFSYGAPRVGNRAFAEFLTQQTGGTLYRITHTNDIVPRLPPREFGYSHSSPEYWIKSGTLVPVTRNDIVKIEGIDATGGNNQPNIPDIPAHLWYFGLIGTC

SEQ ID NO: 13778 - protein, 268 aa, Thermomyces lanuginosus
EVSQDLFNQFNLFAQYSAAAYCGKNNRAPAGTQITCTGNACPEVEKADATFLYSFEDSGVGDVTGFLALDNTNKLIVLSFRGSRSIENWIANLNFEQKEINDICSGCRGHAGFTSSWRSVADTLRQKVEDAVREHPDYRVVFTGHSLGGALATVAGADLRGNGYDIDVFSYGAPRVGNRAFAEFLTVQTGGTLYRITHTNDIVPRLPPREFGYSHSSPEYWIKSGTLVPVRRRDIVKIEGIDATGGNNQPNIPDIRAHLWYFGLIGTC

SEQ ID NO: 13779 - protein, 268 aa, Thermomyces lanuginosus
EVSQDLFNQFNLFAQYSKAAYCGANNDAPAGTNITCTGNACPEVEKADATFLYSFEDSGVGDVTGFLALDNTNKLIVLSFRGSRSIENWIGNLNFDLKEINDICSGCRGHDGFTSSWRSVADTLRQKVEAAVREHPDYRVVFTGHSLGGALATIAWADLRGNGYDIDVFSYGAPRVGNRAFAEFLTTQTGGTLYRITHTNDIVPRLPPREFGYSHSSPEYWIKSGTLVPVTRNDIVKIEGIDATGGNNQPNIPDIPAHLWYFGRIGTC

SEQ ID NO: 13780 - protein, 268 aa, Thermomyces lanuginosus
EVSQDLFNQFKLFAQYSAAAYCGKNNQAPAGTNITCTGNACPEVEKADATFLYSFKDMGVGDVTGFLALDNTNKLIVLSFRGSRSIENWIGNLNFDLKEINDICSGCRGHDGFTSSWRSVADTLRQKVEDAVREHPDYRVVFTGHSLGGALATVAGADLRGNGYDIDVFSYGAPRVGNRAFAEFLTVQTGGTLYRITHTNDIVPRLPPREFGYSHSSPEYWIKSGTLVPVTRQDIVKIEGIDATGGNNQPNIPDITAHLWYFGLIGTC

SEQ ID NO: 13781 - protein, 268 aa, Thermomyces lanuginosus
EVSRDLFNQFNLFAQYSAAAYCGKNNDAPAGTNITCTGNACPEVEKADATFLYSFEDSGVGDVTGFLALDNTNKLIVLSFRGSRSIENWIGNLNFDLKEINDICSGCRGHDGFTSSWRSVADTLRQKVEDAVREHPDYRVVFAGHSLGGALATVAGADLRGNGYDIDVFSYGAPRVGNRAFAEFLTVQTGGTLYRITSTNDIVPRLPPREFGYSHSSPEYWIKSGTLPPVRRRDIVKIEGIDATGGNNQPNIPDIPAHLWYFGLIGTC

SEQ ID NO: 13782 - protein, 268 aa, Thermomyces lanuginosus
EKSQDLFNQFNLFAQYSAAAYCGKNNDAPAGTKITCTGNACPEVEKADATVLYSFEDSGVGDVTGFLALDNTNKLIVLSFRGSRSIENWIGNLNFDLKEINDICSGCRGHDGFTSSWRSVADTLRQKVEDAVREHPDYRVVFTGHSLGGALATVAGADLRGNGYDIDVFSYGAPRVGNRAFAEFLTVQTGGTLYRITHTNDIVPRLPPREFGYSHSSPEYWIKSGTLVPVRRRDIVKIEGIDATGGNNQPNIPDIPIHLWYFGLIGTC

SEQ ID NO: 13783 - protein, 268 aa, Thermomyces lanuginosus
EVSQDLFNQFNLFAQYSAAAYCGKNNNAPAGTNITCTGNACPEVEKADATFLYSFRDSGVGDVTGFLALDNTNKLIVLSFRGSRSIENWIGNLNFDLKEINDICSGCRGHDGFTSSWFSVADTLRQKVEDAVREHPDYRVVFTGHSLGGALATVAGADLRGNGYDIDVFSYGAPRVGNRAFAEFLTVQTGGTLYRITHTNDIVPRLPPREFGYSHSSPEFWIKSGTLVPVRRRDIVKIEGIDATGGNNQPNIPDIPAHLWYFGLIGTC

SEQ ID NO: 13784 - protein, 268 aa, Thermomyces lanuginosus
EVSQDLFNQFCLFAQYSAAAYCGKNNDAPAGTQITCTGNACPEVEKADATFLYSFEDSGVGDVTGFLALDNTNKLIVLSFRGSRSIENWITNLNFDLKEINDICSGCRGHDGFTSSWRSVADTLRQKVEDAVREHPDYRVVFTGHSLGGALATVAGADLRGNKYDIDVFSYGAPRVGNRAFAEFLTVQTGGTLYRITHTNDIVPRLPPREFGYSHSSPEYWIKSGTLVPVRRRDIVKIEGIDATGGNNQPNIPSIPAHLWYFGLIGTC

SEQ ID NO: 13785 - protein, 268 aa, Thermomyces lanuginosus
EVSRDLFNQFNLFAQYSAAAYCGKNNDAPAGTNITCTGNACPEVEKADATFLYSFEDSGVGDVTGFLALDNTNKLIVLSFRGSRSIENWIGNLNFDLKEINDICSGCRGHDGFTSSWRSVADTLRQKVEDAVREHPDYRVVFTGHSLGGALATVAGADLRGDGYDIDVFSYGAPRVGNRAFAEFLTVQTGGTLYRITSTNDIVPRLPPREFGYSHSSPEYWIKSGTLRPVRRRDIVKIEGIDATGGNNQPNIPDIPAHLWYFGLIGTC

SEQ ID NO: 13786 - protein, 268 aa, Thermomyces lanuginosus
EVSQDLFNQFNLFAQYSAAAYCGKNNDAPAGTNITCTGNACPEVEKAQATFLYSFEDMGVGDVTGFLALDNTNKLIVLSFRGSRSIENWIGNLNFDLKEINDICSGCRGHDGFTSSWRSVADTLRQKVEAAVREHPQYRVVFTGHSLGGALATVAGADLRGNGYDIDVFSYGAPRVGNRAFAEFLTVQTGGTLYRITHTNDIVPRLPPREFGYSHSSPEYWIKSGTMVPVTRQDIVKIEGIDATGGNNQPNIPDIPAHLWYFGRIGTC

SEQ ID NO: 13787 - protein, 268 aa, Thermomyces lanuginosus
EVSQDLFNQFNLFAQYSKAAYCGKNNDAPAGTDITCTGNACPEVFKADATFLYSFEDSGVGDVTGFLALDNTRKDIVLSFRGSRSIENWIGNLNFDLKEINDICSGCRGHDGFTSSWRSVADTLRQKVEDAVREHPDYRVVFTGHSLGGALATVAGADLRGNGYDIDVFSYGAPRVGNRAFAEFLTVQDGGTLYRITHTNDIVPRLPPREFGYSHSSPEYWIKSGTLVPVTRNDIVKIEGIDATGGNNQPNIPDIPAHLWYFGLIGTC

SEQ ID NO: 13788 - protein, 268 aa, Thermomyces lanuginosus
EVSQDLFNQFPLFAQYSAAAYCGKNNDAPAGTQITCTGNACPEVEKADATFLYSFEDSGVGDVTGFLALDNTNKLIVLSFRGSRSIENWITNLNFDLKEINDICSGCRGHDGFTSSWRSVADTLRQKVEDAVREHPDYRVVFTGHSLGGALATVAGADLRGNKYDIDVFSYGAPRVGNRAFAEFLTVQTGGTLYRITHTNDIVPRLPPREFGYSHSSPEYWIKSGTLVPVRRRDIVKIEGIDATGGNNQPNIPSIPAHLWYFGLIGTC

SEQ ID NO: 13789 - protein, 268 aa, Thermomyces lanuginosus
EKSQDLFNQFNLFAQYSAAAYCGKNNDAPAGTKITCTGNACPEVEKADATILYSFEDSGVGDVTGFLALDNTNKLIVLSFRGSRSIENWIGNLNFDLKEINDICSGCRGHDGFTSSWRSVADTLRQKVEDAVREHPDYRVVFAGHSLGGALATVAGADLRGNGYDIDVFSYGAPRVGNRAFAEFLTVQTGGTLYRITHTNDIVPRLPPREFGYSHSSPEYWIKSGTLVPVRRRDIVKIEGIDATGGNNQPNIPDIPAHLWYFGLIGTC

SEQ ID NO: 13790 - protein, 268 aa, Synthetic construct
EVSQDLFNQFNLFAQYSAAAYCGKNNDAPAGTNITCTGNACPEVEKADATFLYSFEGSVVGDVTGFLALDNTNKLIVLSFRGSRSIENWIGNLKFLLKEINDICSGCRGHDGFTSPWRSVADTLRQKVEDAVREHPDYRVVFTGHSLGGALATVAGADLRGNGYDIDVFPYGAPRVGNRAFAEFLTVQTGGTLYRITHTNDIVPRLPPREFGYSHSSPEYWIKSGTLVPVTRNDIVKIEGIDATGGNNRPNIPDIPAHLWYFGLIGTC

SEQ ID NO: 13791 - protein, 268 aa, Thermomyces lanuginosus
EVSQDLFNQFNLFAQYSAAAYCGKNNQAPAGTNITCTGNACPEVEKADATTLYSFEDSGVGDVTGFLALDNTNKGIVLSFRGSRSIENWIGNLNFDLKEINDICSGCRGHDGFTSSWRSVADTLRQKVEAAVREHPDYRVVFTGHSLGGALATVAGADLRGNGYDIDVFSYGAPRVGNRAFAEFLTHQTGGTLYRITHTNDIVPRLPPREFGYSHSSPEYWIKSGTLVPVTRNDIVKIEGIDATGGNNQPNQPDIPAHLWYFGRIGTC

SEQ ID NO: 13792 - protein, 268 aa, Thermomyces lanuginosus
EVSQDLFNQFNLFAQYSKAAYCKKNNDAPAGTNITCTGNACPEVEKADATFLYSFEDSGVGDVTGFLALDNTNKRIILSFRGSRSIENWIGNLNFDLKEINDICSGCRGHDGFTSSWRSVADTLRQKVEAAVREHPDYRVVFTGHSLGGALATIAGADLRGNGYDIDVFSYGAPRVGNRAFAEFLTVQTGGTLYRITHTNDIVPRLPPREFGYSHSSPEYWIKSGTLVPVTRNDIVKIEGIDATGGNNQPNIPDIPAHLWYFGLIGTC

SEQ ID NO: 13793 - protein, 268 aa, Thermomyces lanuginosus
EVSQDLFNQFNLFAQYSAAAYCGKNNDAPAGTNITCTGNACPEVEKADATFLYSFRDSGVGDVTGFLALDNTNKLIVLSFRGSRSIENWIGNLNFDLIEINDICSGCRGHDGFTSSWFSVADTLRQKVEDAVREHPDYRVVFTGHSLGGALATVAGADLRGNGYDIDVFSYGAPRVGNRAFAEFLTVQTGGTLYRITHTNDIVPRLPPREFGYSHSSPEFWIKSGTLVPVRRRDIVKIEGIDATGGNNQPNIPDIPAHLWYFGLIGTC

SEQ ID NO: 13794 - protein, 268 aa, Thermomyces lanuginosus
EYSQDLFNQFNLFAQYSAAAYCGKNNDAPAGTKITCTGNACPEVEKADATILYSFEDSGVGDVTGFLALDNTNKLIVLSFRGSRSIENWIGNLNFDLKEINDICSGCRGHDGFTSSWRSVADTLRQKVEDAVREHPDYRVVFTGHSLGGALATVAGADLRGNGYDIDVFSYGAPRVGNRAFAEFLTVQTGGTLYRITITNDIVPRLPPREFGYSHSSPEYWIKSGTLVPVRRRDIVKIEGIDATGGNNQPNIPDIPAHLWYFGLIGTC

SEQ ID NO: 13795 - protein, 268 aa, Thermomyces lanuginosus
EVSQDLFNQFNLFAQYSKAAYCGKNNDAPAGTNITCTGNACPEVEKADATFLYSFEDSGVGDVTGFLALDNTNKQIVLSFRGSRSIENWIGNLNFDLKEINDICSGCRGHAGFTSSWRSVADTLRQKVEDAVREHPDYRVVFTGHSLGGALATIAGADLRGNGYDIDVFSYGAPRVGNRAFAEFLTTQQGGTLYRITHTNDIVPRLPPREFGYSHSSPEYWIKSGTLVPVTRNDIVKIEGIDATGGNNQPNIPDIPAHLWYFGRIGTC

SEQ ID NO: 13796 - protein, 268 aa, Thermomyces lanuginosus
EKSQDLFNQFNLFAQYSAAAYCGKNNDAPAGTKITCTGNACPEVEKADATVLYSFEDSGVGDVTGFLALDNTNKLIVLSFRGSRSIENWIGNLNFDLKEINDICSGCRGHDGFTSSWRSVADTLRQKVEDAVREHPDYRVVFTGHSLGGALATVAGADLRGNGYDIDVFSYGAPRVGNRAFAEFLTVQTGGTLYRITHTNDIVPRLPPREFGYSHSSPEYWIKSGTLVPVRRRDIVKIEGIDATGGNNQPNIPDIPVHLWYFGLIGTC

SEQ ID NO: 13797 - protein, 268 aa, Thermomyces lanuginosus
EYSQDLFNQFNLFAQYSAAAYCGKNNDAPAGTKITCTGNACPEVEKADATLLYSFEDSGVGDVTGFLALDNTNKLIVLSFRGSRSIENWIGNLNFDLKEINDICSGCRGHDGFTSSWRSVADTLRQKVEDAVREHPDYRVVFTGHSLGGALATVAGADLRGNGYDIDVFSYGAPRVGNRAFAEFLTVQTGGTLYRITYTNDIVPRLPPREFGYSHSSPEYWIKSGTLVPVRRRDIVKIEGIDATGGNNQPNIPDIPAHLWYFGLIGTC

SEQ ID NO: 13798 - protein, 268 aa, Thermomyces lanuginosus
EVSQDLFNQFNLFAQYSAAAYCGKNNDAPAGTNITCTGNICPEVEKADATFLYSFRNSGVGDVTGFLALDNTNKLIVLSFRGSRSIENWIGNLNFDLKEINDICSGCRGHDGFTSSWFSVADTLRQKVEDAVREHPDYRVVFTGHSLGGALATVAGADLRGNGYDIDVFSYGAPRVGNRAFAEFLTVQTGGTLYRITHTNDIVPRLPPREFGYSHSSPEYWIKSGTLVPVRRRDIVKIEGIDATGGNNQPNIPDIPAHLWYFGLIGTC

SEQ ID NO: 13799 - protein, 268 aa, Thermomyces lanuginosus
EVSQDLFNQFNLFAQYSAAAYCGKNNSAEAGTDITCTGNACPEVFKADATFLYSFEDSGVGDVTGFLALDNTRKLIVLSFRGSRSIENWIGNLNFDLKEINDICSGCRGHDGFTSSWRSVADTLRQKVEDAVREHPDYRVVFTGHSLGGALATVAGADLRGNGYDIDVFSYGAPRVGNRAFAEFLTVQDGGTLYRITHTNDIVPRLPPREFGYSHSSPEYWIKSGTLVPVTRNDIVKIEGIDATGGNNQPNIPDIPAHLWYFGLIGTC

SEQ ID NO: 13800 - protein, 268 aa, Thermomyces lanuginosus
EVSQDLFNQFNLFAQYSAAAYCQKNNDAPAGTNITCTGNACPEVEKADATTLYSFEDSGVGDVTGFLALDNTNKQIVLSFRGSRSIENWIQNLNFDLKEINDICSGCRGHDGFTSSWRSVADTLRQKVEAAVREHPDYRVVFTGHSLGGALATVAGADLRGNGYDIDVFSYGAPRVGNRAFAEFLTHQTGGTLYRITHTNDIVPRLPPREFGYSHSSPEYWIKSGTLVPVTRNDIVKIEGIDATGGNNQPNQPDIPAHLWYFGRIGTC

SEQ ID NO: 13801 - protein, 268 aa, Thermomyces lanuginosus
EYSQDLFNQFNLFAQYSAAAYCGKNNDAPAGTKITCTGNACPEVEKADATLLYSFEDSGVGDVTGFLALDNTNKLIVLSFRGSRSIENWIGNLNFDLKEINDICSGCRGHDGFTSSWRSVADTLRQKVEDAVREHPDYRVVFAGHSLGGALATVAGADLRGNGYDIDVFSYGAPRVGNRAFAEFLTVQTGGTLYRITHTNDIVPRLPPREFGYSHSSPEYWIKSGTLVPVRRRDIVKIEGIDATGGNNQPNIPDIPAHLWYFGLIGTC

SEQ ID NO: 13802 - protein, 268 aa, Thermomyces lanuginosus
EVSQDLFNQFNLFAQYSAAAYCGKNNDAPAGTQITCTGNACPEVEKADATFLYSFEDSGVGDVTGFLALDNTNKLIVLSFRGSRSIENWITNLRFDLKEINDICSGCRGHAGFTSSLRSVADTLRQKVEDAVREHPDYRVVFTGHSLGGALATVAGADLRGNGYDIDVFSYGAPRVGNRAFAEFLTVQTGGTLYRITHTNDIVPRLPPREFGYSHSSPEYWIKSGTLVPVRRRDIVKIEGIDATGGNNQPNIPDIPAHLWYFGLIGTC

SEQ ID NO: 13803 - protein, 268 aa, Thermomyces lanuginosus
EVSDDLFNQFKLFAQYSAAAYCGKNNSAPAGTNITCTGNACPEVEKADATFLYSFEDMGVGDVTGFLALDNTNKLIVLSFRGSRSIENWIGNLNFDLKEINDICSGCRGHDGFTSSWRSVADTLRQKVEDAVREHPDYRVVFTGHSLGGALATVAGADLRGNGYDIDVFSYGAPRVGNRAFAEFLTVQTGGTLYRITHTNDIVPRLPPREFGYSHSSPEYWIKSGTLVPVTRQDIVKIEGIDATGGNNQPNIPDITAHLWYFGLIGTC

SEQ ID NO: 13804 - protein, 268 aa, Thermomyces lanuginosus
EYSQDLFNQFNLFAQYSAAAYCGKNNDAPAGTKITCTGNACPEVEKADATLLYSFEDSGVGDVTGFLALDNTNKLIVLSFRGSRSIENWIGNLNFDLKEINDICSGCRGHDGFTSSWRSVADTLRQKVEDAVREHPDYRVVFTGHSLGGALATVAGADLRGNGYDIDVFSYGAPRVGNRAFAEFLTVQTGGTLYRITSTNDIVPRLPPREFGYSHSSPEYWIKSGTLVPVRRRDIVKIEGIDATGGNNQPNIPDIPAHLWYFGLIGTC

SEQ ID NO: 13805 - protein, 268 aa, Thermomyces lanuginosus
EVSQDLFNQFNLFAQYSKAAYCGKNNDAPAGTNITCTGNACPEVEKADATFLYSFEDSGVGDVTGFLALDNTNKQIVLSFRGSRSIENWIGNLRFDLKEINDICSGCRGHAGFTSSWRSVADTLRQKVEDAVREHPDYRVVFTGHSLGGALATIAGADLRGNGYDIDVFSYGAPRVGNRAFAEFLTTQTGGTLYRITHTNDIVPRLPPREFGYSHSSPEYWIKSGTLVPVTRNDIVKIEGIDATGGNNQPNIPDIPAHLWYFGRIGTC

SEQ ID NO: 13806 - protein, 268 aa, Thermomyces lanuginosus
EVSQDLFNQFNLFAQYSKAAYCGKNNDAPAGTNITCTGNACPEVEKADATFLYSFEDSGVGDVTGFLALDNTNKQIVLSFRGSRSIENWIGNLNFDLKEINDICSGCRGHAGFTSSWRSVADTLRQKVEAAVREHPDYRVVFTGHSLGGALATIAWADLRGNGYDIDVFSYGAPRVGNRAFAEFLTVQTGGTLYRITHTNDIVPRLPPREFGYSHSSPEYWIKSGTLVPVTRNDIVKIEGIDATGGNNQPNIPDIPAHLWYFGRIGTC

SEQ ID NO: 13807 - protein, 268 aa, Thermomyces lanuginosus
EVSQDLFNQFNLFAQYSAAAYCGKNNDAPAGTNITCTGNACPEVEKADATFLYSFRDSGVGDVTGFLALDNTNKLIVLSFRGSRSIENWIGNLNFDLKEINDICSGCRGHDGFTSSWFSVADTLRQKVEDAVREHPDYRVVFTGHSLGGALATVAGADLRGNGYDIDVFSYGAPRVGNRAFAEFLTVQTGGTLYRITHTNDIVPRLPPREFGYSHSSPEFWIKSGTLVPVRRRDIVKIEGIDATGGNNQPNIPDITAHLWYFGLIGTC

SEQ ID NO: 13808 - protein, 268 aa, Thermomyces lanuginosus
EVSQDLFNQFNLFAQYSKAAYCQKNNDAPAGTNITCTGNACPEVFKADATFLYSFEDSGVGDVTGFLALDNTNKQIVLSFRGSRSIENWIGNLNFDLKEINDICSGCRGHDGFTSSWRSVADTLRQKVEDAVREHPDYRVVFTGHSLGGALATVAWADLRGNGYDIDVFSYGAPRVGNRAFAEFLTTQTGGTLYRITHTNDIVPRLPPREFGYSHSSPEYWIKSGTLVPVTRNDIVKIEGIDATGGNNQPNIPDIPAHLWYFGLIGTC

SEQ ID NO: 13809 - protein, 268 aa, Thermomyces lanuginosus
EVSQDLFNQFNLFAQYSAAAYCGKNNDAPAGTQITCTGNACPEVEKADATFLYSFEDSGVGDVTGFLALDNTNKLIVLSFRGSRSIENWITNLSFDLKEINDICSGCRGHAGFTSSWRSVADTLRQKVEDAVREHPDYRVVFTGHSLGGALATVAGADLRGNGYDIDVFSYGAPRIGNRAFAEFLTVQTGGTLYRITHTNDIVPRLPPREFGYSHSSPEYWIKSGTLVPVRRRDIVKIEGIDATGGNNQPNIPDIPAHLWYFGLIGTC

SEQ ID NO: 13810 - protein, 268 aa, Thermomyces lanuginosus
EYSQDLFNQFNLFAQYSAAAYCGKNNDAPAGTKITCTGNACPEVEKADATILYSFEDSGVGDVTGFLALDNTNKLIVLSFRGSRSIENWIGNLNFDLKEINDICSGCRGHDGFTSSWRSVADTLRQKVEDAVREHPDYRVVFTGHSLGGALATVAGADLRGNGYDIDVFSYGAPRVGNRAFAEFLTVQTGGTLYRITHTNDIVPRLPPREFGYSHSSPEYWIKSGTLVPVRRRDIVKIEGIDATGGNNQPNIPDIPIHLWYFGLIGTC

SEQ ID NO: 13811 - protein, 268 aa, Thermomyces lanuginosus
EVSQDLFNQFNLFAQYSAAAYCGANNDAPAGTNITCTGNACPEVEKADATFLYSFEDSGVGDVTGFLALDNTNKQIVLSFRGSRSIENWIGNLNFDLKEINDICSGCRGHAGFTSSWRSVADTLRQKVEDAVREHPDYRVVFTGHSLGGALATIAGADLRGNGYDIDVFSYGAPRVGNRAFAEFLTNQQGGTLYRITHTNDIVPRLPPREFGYSHSSPEYWIKSGTLVPVTRNDIVKIEGIDATGGNNQPNIPDIPAHLWYFGLIGTC

SEQ ID NO: 13812 - protein, 268 aa, Thermomyces lanuginosus
EVSQDLFNQFNLFAQYSKAAYCGSNNDAPAGTNITCTGNACPEVEKADATFLYSFEDSGVGDVTGFLALDNTNKLIILSFRGSRSIENWIGNLRFDLKEINDICSGCRGHDGFTSSWRSVADTLRQKVEAAVREHPDYRVVFTGHSLGGALATVAWADLRGNGYDIDVFSYGAPRVGNRAFAEFLTVQTGGTLYRITHTNDIVPRLPPREFGYSHSSPEYWIKSGTLVPVTRNDIVKIEGIDATGGNNQPNIPDIPAHLWYFGLIGTC

SEQ ID NO: 13813 - protein, 268 aa, Thermomyces lanuginosus
EYSQDLFNQFNLFAQYSAAAYCGKNNDAPAGTKITCTGNACPEVEKADATILYSFEDSGVGDVTGFLALDNTNKLIVLSFRGSRSIENWIGNLNFDLKEINDICSGCRGHDGFTSSWRSVADTLRQKVEDAVREHPDYRVVFTGHSLGGALATVAGADLRGNGYDIDVFSYGAPRVGNRAFAEFLTVQTGGTLYRITHTNDIVPRLPPREFGYSHSSPEYWIKSGTLVPRRRRDIVKIEGIDATGGNNQPNIPDIPAHLWYFGLIGTC

SEQ ID NO: 13814 - protein, 268 aa, Thermomyces lanuginosus
EKSQDLFNQFNLFAQYSAAAYCGKNNDAPAGTKITCTGNACPEVEKADATLLYSFEDSGVGDVTGFLALDNTNKLIVLSFRGSRSIENWIGNLNFDLKEINDICSGCRGHDGFTSSWRSVADTLRQKVEDAVREHPDYRVVFTGHSLGGALATVAGADLRGNGYDIDVFSYGAPRVGNRAFAEFLTVQTGGTLYRITHTNDIVPRLPPREFGYSHSSPEYWIKSGTDVPVRRRDIVKIEGIDATGGNNQPNIPDIPAHLWYFGLIGTC

SEQ ID NO: 13815 - protein, 268 aa, Thermomyces lanuginosus
EVSQDLFNQFNLFAQYSAAAYCKKNNSAPAGTNITCTGNACPEVEKADATFLYSFEDSGVGDVTGFLALDNTNKRIVLSFRGSRSIENWIGNLNFDLKEINDICSGCRGHDGFTSSWRSVADTLRQKVEAAVREHPDYRVVFTGHSLGGALATVAGADLRGNGYDIDVFSYGAPRVGNRAFAEFLTTQTGGTLYRITHTNDIVPRLPPREFGYSHSSPEYWIKSGTLVPVTRNDIVKIEGIDATGGNNQPNQPDIPAHLWYFGLIGTC

SEQ ID NO: 13816 - protein, 268 aa, Thermomyces lanuginosus
EVSQDLFNQFNLFAQYSKAAYCQKNNDAPAGTNITCTGNACPEVEKADATFLYSFEDSGVGDVTGFLALDNTNKQIVLSFRGSRSIENWIGNLNFDLKEINDICSGCRGHDGFTSSWRSVADTLRQKVEDAVREHPDYRVVFTGHSLGGALATVAWADLRGNGYDIDVFSYGAPRVGNRAFAEFLTTQDGGTLYRITHTNDIVPRLPPREFGYSHSSPEYWIKSGTLVPVTRNDIVKIEGIDATGGNNQPNIPDIPAHLWYFGLIGTC

SEQ ID NO: 13817 - protein, 268 aa, Synthetic construct
EGTQDLFNQFNLFAQYSAAAYCGKNNDAPAGTNITCTGNACPEVEKADATFLYSFEGSGVGDVTGFLALDNTNKLIVLSFRGSRSIENWIGNLKFLMKEINDICSGCRGHDGFTSSWRSVADTLRQKVEDAVREHPDYRVVFTGHSLGGALATVAGADLRGNGYDIDVFSYGAPRVGNRAFAEFLTVQTGGTLYRITHTNDIVPRLPPREFGYSHSSPEYWIKSGTLVPVTRNDIVKIEGIDATGGNNRPNIPDIPAHLWYFGLIGTC

SEQ ID NO: 13818 - protein, 268 aa, Thermomyces lanuginosus
EVSQDLFNQFNLFAQYSAAAYCGKNNDAPAGTNITCTGNACPEVEKADATILYSFEDSGVGDVTGFLALDNTNKLIVLSFRGSRSIENWIGNLNFDLKEINDICSGCRGHDGFTSSWRSVADTLRQKVEDAVREHPDYRVVFAGHSLGGALATVAGADLRGNGYDIDVFSYGAPRVGNRAFAEFLTVQTGGTLYRITNTNDIVPRLPPREFGYSHSSPEYWIKSGTLRPVRRRDIVKIEGIDATGGNNQPNIPDIPAHLWYFGLIGTC

SEQ ID NO: 13819 - protein, 268 aa, Thermomyces lanuginosus
EVSQDLFNQFNLFAQYSKAAYCKKNNDAPAGTNITCTGNACPEVEKADATFLYSFEDSGVGDVTGFLALDNTNKQIVLSFRGSRSIENWIGNLNFDLKEINDICSGCRGHDGFTSSWRSVADTLRQKVEAAVREHPDYRVVFTGHSLGGALATVAWADLRGNGYDIDVFSYGAPRVGNRAFAEFLTNQTGGTLYRITHTNDIVPRLPPREFGYSHSSPEYWIKSGTLVPVTRNDIVKIEGIDATGGNNQPNIPDIPAHLWYFGLIGTC

SEQ ID NO: 13820 - protein, 268 aa, Thermomyces lanuginosus
EVSQDLFNQFNLFAQYSAAAYCQKNNSAPAGTNITCTGNACPEVEKADATFLYSFEDSGVGDVTGFLALDNTNKQIVLSFRGSRSIENWIGNLNFDLKEINDICSGCRGHDGFTSSWRSVADTLRQKVEAAVREHPDYRVVFTGHSLGGALATVAGADLRGNGYDIDVFSYGAPRVGNRAFAEFLTTQTGGTLYRITHTNDIVPRLPPREFGYSHSSPEYWIKSGTLVPVTRNDIVKIEGIDATGGNNQPNQPDIPAHLWYFGLIGTC

SEQ ID NO: 13821 - protein, 268 aa, Thermomyces lanuginosus
EKSQDLFNQFNLFAQYSAAAYCGKNNDAPAGTKITCTGNACPEVEKADATLLYSFEDSGVGDVTGFLALDNTNKLIVLSFRGSRSIENWIGNLNFDLKEINDICSGCRGHDGFTSSWRSVADTLRQKVEDAVREHPDYRVVFTGHSLGGALATVAGADLRGNGYDIDVFSYGAPRVGNRAFAEFLTVQTGGTLYRITHTNDIVPRLPPREFGYSHSSPEYWIKSGTLVPVRRRDIVKIEGIDATGGNNQPNIPDIPVHLWYFGLIGTC

SEQ ID NO: 13822 - protein, 268 aa, Thermomyces lanuginosus
EVSQDLFNQFNLFAQYSAAAYCQKNNDAPAGTNITCTGNACPEVFKADVTFLYSFEDSGVGDVTGFLALDNTNKQIILSFRGSRSIENWIGNLNFDLKEINDICSGCRGHDGFTSSWRSVADTLRQKVEDAVREHPDYRVVFTGHSLGGALATVAGADLRGNGYDIDVFSYGAPRVGNRAFAEFLTTQTGGTLYRITHTNDIVPRLPPREFGYSHSSPEYWIKSGTLVPVTRNDIVKIEGIDATGGNNQPNIPDIPAHLWYFGLIGTC

SEQ ID NO: 13823 - protein, 268 aa, Thermomyces lanuginosus
EVSQDLFNQFNLFAQYSAAAYCKKNNDAPAGTNITCTGNACPEVEKADATFLYSFEDSGVGDVTGFLALDNTNKQIVLSFRGSRSIENWIGNLNFDLKEINDICSGCRGHAGFTSSWRSVADTLRQKVEAAVREHPDYRVVFTGHSLGGALATIAGADLRGNGYDIDVFSYGAPRVGNRAFAEFLTNQTGGTLYRITHTNDIVPRLPPREFGYSHSSPEYWIKSGTLVPVTRNDIVKIEGIDATGGNNQPNIPDIPAHLWYFGLIGTC

SEQ ID NO: 13824 - protein, 268 aa, Thermomyces lanuginosus
EKSQDLFNQFNLFAQYSAAAYCGKNNDAPAGTKITCTGNACPEVEKADATLLYSFEDSGVGDVTGFLALDNTNKLIVLSFRGSRSIENWIGNLNFDLKEINDICSGCRGHDGFTSSWRSVADTLRQKVEDAVREHPDYRVVFTGHSLGGALATVAGADLRGNGYDIDVFSYGAPRVGNRAFAEFLTVQTGGTLYRITYTNDIVPRLPPREFGYSHSSPEYWIKSGTLVPVRRRDIVKIEGIDATGGNNQPNIPDIPAHLWYFGLIGTC

SEQ ID NO: 13825 - protein, 268 aa, Thermomyces lanuginosus
EYSQDLFNQFNLFAQYSAAAYCGKNNDAPAGTKITCTGNACPEVEKADATILYSFEDSGVGDVTGFLALDNTNKLIVLSFRGSRSIENWIGNLNFDLKEINDICSGCRGHDGFTSSWRSVADTLRQKVEDAVREHPDYRVVFTGHSLGGALATVAGADLRGNGYDIDVFSYGAPRVGNRAFAEFLTVQTGGTLYRITHTNDIVPRLPPREFGYSHSSPEYWIKIGTLVPVRRRDIVKIEGIDATGGNNQPNIPDIPAHLWYFGLIGTC

SEQ ID NO: 13826 - protein, 268 aa, Thermomyces lanuginosus
EVSQDLFNQFNLFAQYSAAAYCQKNNSAPAGTNITCTGNACPEVEKADATFLYSFEDSGVGDVTGFLALDNTNKLIVLSFRGSRSIENWIGNLRFDLKEINDICSGCRGHDGFTSSWRSVADTLRQKVEDAVREHPDYRVVFTGHSLGGALATIAWADLRGNGYDIDVFSYGAPRVGNRAFAEFLTVQQGGTLYRITHTNDIVPRLPPREFGYSHSSPEYWIKSGTLVPVTRNDIVKIEGIDATGGNNQPNIPDIPAHLWYFGLIGTC

SEQ ID NO: 13827 - protein, 268 aa, Thermomyces lanuginosus
EVSQDLFNQFNLFAQYSAAAYCGKNNDAPAGTQITCTANACPEVEKADATFLYSFEDSGVGDVTGFLALDNTNKLIVLSFRGSRSIENWIGNLNFDLKEINDICSGCRGHDGFTSSWRSVADTLRQKVEDAVREHPDYRVVFTGHSLGGALATVAGADLRGNAYDIDVFSYGAPRVGNRAFAEFLTVQTGGTLYRITHTNDIVPRLPPREFGYSHSSPEYWIKSGTLVPVRRRDIVKIEGIDATGGNNQPNIPIIPAHLWYFGLIGTC

SEQ ID NO: 13828 - protein, 268 aa, Thermomyces lanuginosus
EVSQDLFNQFNLFAQYSAAAYCGKNNDAPAGTNITCTGNACPEVEKADATILYSFEDSGVGDVTGFLALDNTNKLIVLSFRGSRSIENWIGNLNFDLKEINDICSGCRGHDGFTSSWRSVADTLRQKVEDAVREHPDYRVVFAGHSLGGALATVAGADLRGNGYDIDVFSYGAPRVGNRAFAEFLTVQTGGTLYRITSTNDIVPRLPPREFGYSHSSPEYWIKSGTLPPVRRRDIVKIEGIDATGGNNQPNIPDIPAHLWYFGLIGTC

SEQ ID NO: 13829 - protein, 268 aa, Thermomyces lanuginosus
EKSQDLFNQFNLFAQYSAAAYCGKNNDAPAGTKITCTGNACPEVEKADATILYSFEDSGVGDVTGFLALDNTNKLIVLSFRGSRSIENWIGNLNFDLKEINDICSGCRGHDGFTSSWRSVADTLRQKVEDAVREHPDYRVVFTGHSLGGALATVAGADLRGNGYDIDVFSYGAPRVGNRAFAEFLTVQTGGTLYRITITNDIVPRLPPREFGYSHSSPEYWIKSGTLVPVRRRDIVKIEGIDATGGNNQPNIPDIPAHLWYFGLIGTC

SEQ ID NO: 13830 - protein, 268 aa, Thermomyces lanuginosus
EVSQDLFNQFNLFAQYSAAAYCGKNNRAPAGTNITCTGNACPEVEKADATFLYSFEDSGVGDVTGFLALDNTNKLIVLSFRGSRSIENWITNLKFDLKEINDICSGCRGHAGFTSSWRSVADTLRQKVEDAVREHPDYRVVFTGHSLGGALATVAGADLRGNGYDIDVFSYGAPRVGNRAFAEFLTVQTGGTLYRITHTNDIVPRLPPREFGYSHPSPEYWIKSGTGVPVTRNDIVKIEGIDATGGNNQPNIPDITAHLWYFGLIGTC

SEQ ID NO: 13831 - protein, 268 aa, Thermomyces lanuginosus
EVSQDLFNQFNLFAQYSAAAYCGKNNDAPAGTNITCTGNACPEVEKADATFLYSFEDSGVGDVTGFLALDNTNKQIVLSFRGSRSIENWIGNLNFDLKEINDICSGCRGHAGFTSSWRSVADTLRQKVEAAVREHPDYRVVFTGHSLGGALATVAWADLRGNGYDIDVFSYGAPRVGNRAFAEFLTNQQGGTLYRITHTNDIVPRLPPREFGYSHSSPEYWIKSGTLVPVTRNDIVKIEGIDATGGNNQPNIPDIPAHLWYFGRIGTC

SEQ ID NO: 13832 - protein, 268 aa, Thermomyces lanuginosus
EVSQDLFNQFNLFAQYSKAAYCKANNDAPAGTNITCTGNACPEVEKADATFLYSFEDSGVGDVTGFLALDNTNKLIILSFRGSRSIENWIGNLNFDLKEINDICSGCRGHDGFTSSWRSVADTLRQKVEDAVREHPDYRVVFTGHSLGGALATVAWADLRGNGYDIDVFSYGAPRVGNRAFAEFLTQQTGGTLYRITHTNDIVPRLPPREFGYSHSSPEYWIKSGTLVPVTRNDIVKIEGIDATGGNNQPNIPDIPAHLWYFGLIGTC

SEQ ID NO: 13833 - protein, 268 aa, Thermomyces lanuginosus
EVSQDLFNQFNLFAQYSAAAYCGKNNRAPAGTNITCTGNACPEVEKADATFLYSFEDSGVGDVTGFLALDNTNKLIVLSFRGSRSIENWIGNLNFELKEINDICSGCRGHAGFTSSWRSVADTLRQKVEDAVREHPDYRVVFTGHSLGGALATVAGADLRGNKYDIDVFSYGAPRVGNRAFAEFLTVQTGGTLYRITHTNDIVPRLPPREFGYSHSSPEYWIKSGTLVPVRRRDIVKIEGIDATGGNNQPNIPSIPAHLWYFGLIGTC

SEQ ID NO: 13834 - protein, 268 aa, Thermomyces lanuginosus
EVSQDLFNQFNLFAQYSKAAYCQKNNDAPAGTNITCTGNACPEVEKADVTFLYSFEDSGVGDVTGFLALDNTNKQIILSFRGSRSIENWIGNLNFDLKEINDICSGCRGHDGFTSSWRSVADTLRQKVEDAVREHPDYRVVFTGHSLGGALATVAGADLRGNGYDIDVFSYGAPRVGNRAFAEFLTTQTGGTLYRITHTNDIVPRLPPREFGYSHSSPEYWIKSGTLVPVTRNDIVKIEGIDATGGNNQPNIPDIPAHLWYFGLIGTC

SEQ ID NO: 13835 - protein, 268 aa, Thermomyces lanuginosus
EVSQDLFNQFNLFAQYSKAAYCKKNNDAPAGTNITCTGNACPEVEKADATFLYSFEDSGVGDVTGFLALDNTNKLIVLSFRGSRSIENWIGNLNFDLKEINDICSGCRGHAGFTSSWRSVADTLRQKVEAAVREHPDYRVVFTGHSLGGALATIAGADLRGNGYDIDVFSYGAPRVGNRAFAEFLTVQQGGTLYRITHTNDIVPRLPPREFGYSHSSPEYWIKSGTLVPVTRNDIVKIEGIDATGGNNQPNIPDIPAHLWYFGLIGTC

SEQ ID NO: 13836 - protein, 268 aa, Thermomyces lanuginosus
EVSQDLFNQFNLFAQYSAAAYCGKNNDAEAGTDITCTGNACPEVEKADATFLYSFEDSGVGDVTGFLALDNTNSDIVLSFRGSRSIENWIGNLNFDLKEIDDICSGCRGHDGFTSSWRSVADTLRQKVEDAVREHPDYRVVFTGHSLGGALATVAGADLRGNGYDIDVFSYGAPRVGNRAFAEFLTVQDGGTLYRITHTNDIVPRLPPREFGYSHSSPEYWIKSGTLVPVTRNDIVKIEGIDATGGNNQPNIPDIPAHLWYFGLIGTC

SEQ ID NO: 13837 - protein, 268 aa, Thermomyces lanuginosus
EVSQDLFNQFNLFAQYSAAAYCGKNNSAPAGTNITCTGNACPEVEKADATFLYSFKDSGVGDVTGFLALDNTNKRIVLSFRGSRSIENWIGNLNFDLKEINDICSGCRGHAGFTSSWRSVADTLRQKVEDAVREHPDYRVVFTGHSLGGALATVAWADLRGNGYDIDVFSYGAPRVGNRAFAEFLTNQTGGTLYRITHTNDIVPRLPPREFGYSHSSPEYWIKSGTLVPVTRNDIVKIEGIDATGGNNQPNIPDIPAHLWYFGRIGTC

SEQ ID NO: 13838 - protein, 268 aa, Thermomyces lanuginosus
EYSQDLFNQFNLFAQYSAAAYCGKNNDAPAGTKITCTGNACPEVEKADATLLYSFEDSGVGDVTGFLALDNTNKLIVLSFRGSRSIENWIGNLNFDLKEINDICSGCRGHDGFTSSWRSVADTLRQKVEDAVREHPDYRVVFTGHSLGGALATVAGADLRGNGYDIDVFSYGAPRVGNRAFAEFLTVQTGGTLYRITHTNDIVPRLPPREFGYSHSSPEYWIKPGTLVPVRRRDIVKIEGIDATGGNNQPNIPDIPAHLWYFGLIGTC

SEQ ID NO: 13839 - protein, 268 aa, Thermomyces lanuginosus
EVSRDLFNQFNLFAQYSAAAYCGKNNDAPAGTNITCTGNACPEVEKADATFLYSFEDSGVGDVTGFLALDNTNKLIVLSFRGSRSIENWIGNLNFDLKEINDICSGCRGHDGFTSSWRSVADTLRQKVEDAVREHPDYRVVFTGHSLGGALATVAGADLRGDGYDIDVFSYGAPRVGNRAFAEFLTVQTGGTLYRITNTNDIVPRLPPREFGYSHSSPEYWIKSGTLPPVRRRDIVKIEGIDATGGNNQPNIPDIPAHLWYFGLIGTC

SEQ ID NO: 13840 - protein, 268 aa, Thermomyces lanuginosus
EVSQDLFNQFNLFAQYSAAAYCGKNNDAPAGTQITCTGNACPEVEKADATFLYSFEDSGVGDVTGFLALDNTNKLIVLSFRGSRSIENWIGNLNFDLKEINDICSGCRGHDGFTSSIRSVADTLRQKVEDAVREHPDYRVVFTGHSLGGALATVAGADLRGNGYDIDVFSYGAPRQGNRAFAEFLTVQTGGTLYRITHTNDIVPRLPPREFGYSHSSPEYWIKSGTLVPVRRRDIVKIEGIDATGGNNQPNIPDIAAHLWYFGLIGTC

SEQ ID NO: 13841 - protein, 268 aa, Thermomyces lanuginosus
EVSQDLFNQFNLFAQYSAAAYCSKNNDAPAGTNITCTGNACPEVEKADATFLYSFRDSGVGDVTGFLALDNTNKLIVLSFRGSRSIENWIGNLNFDLKEINDICSGCRGHDGFTSSWFSVADTLRQKVEDAVREHPDYRVVFTGHSLGGALATVAGADLRGNGYDIDVFSYGAPRVGNRAFAEFLTVQTGGTLYRITHTNDIVPRLPPREFGYSHSSPEFWIKSGTLVPVRRRDIVKIEGIDATGGNNQPNIPDIPAHLWYFGLIGTC

SEQ ID NO: 13842 - protein, 268 aa, Thermomyces lanuginosus
EVSQDLFNQFNLFAQYSAAAYCGKNNRAPAGTNITCTGNACPEVEKADATFLYSFEDSGVGDVTGFLALDNTNKLIVLSFRGSRSIENWITNLSFDLKEINDICSGCRGHAGFTSSWRSVADTLRQKVEDAVREHPDYRVVFTGHSLGGALATVAGADLRGNGYDIDVFSYGAPRVGNRAFAEFLTVQTGGTLYRITHTNDIVPRLPPREFGYSHPSPEYWIKSGTGVPVTRNDIVKIEGIDATGGNNQPNIPDITAHLWYFGLIGTC

SEQ ID NO: 13843 - protein, 268 aa, Thermomyces lanuginosus
EKSQDLFNQFNLFAQYSAAAYCGKNNDAPAGTKITCTGNACPEVEKADATLLYSFEDSGVGDVTGFLALDNTNKLIVLSFRGSRSIENWIGNLNFDLKEINDICSGCRGHDGFTSSWRSVADTLRQKVEDAVREHPDYRVVFTGHSLGGALATVAGADLRGNGYDIDVFSYGAPRVGNRAFAEFLTVQTGGTLYRITHTNDIVPRLPPREFGYSHSSPEYWIKFGTLVPVRRRDIVKIEGIDATGGNNQPNIPDIPAHLWYFGLIGTC

SEQ ID NO: 13844 - protein, 268 aa, Thermomyces lanuginosus
EVSQDLFNQFNLFAQYSAAAYCGKNNDAPAGTQITCTGNACPEVEKADATFLYSFEDSGVGDVTGFLALDNTNKLIVLSFRGSRSIENWIGNLNFDLKEINDICSGCRGHDGFTSSWRSVADTLRQKVEDAVREHPDYRVVFTGHSLGGGLATVAGADLRGNGYDIDVFSYGAPRVGNRAFAEFLTVQTGGTLYRITHTNDIVPRLPPRQFGYSHSSPEYWIKSGTLVPVRRRDIVKIEGIDATGGNNQPNIPDAPAHLWYFGLIGTC

SEQ ID NO: 13845 - protein, 268 aa, Thermomyces lanuginosus
EVSQDLFNQFNLFAQYSAAAYCQKNNDAPAGTNITCTGNACPEVFKADATFLYSFEDSGVGDVTGFLALDNTNKQIILSFRGSRSIENWIGNLNFDLKEINDICSGCRGHDGFTSSWRSVADTLRQKVEDAVREHPDYRVVFTGHSLGGALATVAGADLRGNGYDIDVFSYGAPRVGNRAFAEFLTTQDGGTLYRITHTNDIVPRLPPREFGYSHSSPEYWIKSGTLVPVTRNDIVKIEGIDATGGNNQPNIPDIPAHLWYFGLIGTC

SEQ ID NO: 13846 - protein, 268 aa, Thermomyces lanuginosus
EVSQDLFNQFNLFAQYSAAAYCGKNNEAPAGTNITCTGNACPEVEKAQATFLYSFEDSGVGDVTGFLALDNTNKLIVLSFRGSRSIENWIGNLNFDLKEINDICSGCRGHDGFTSSWRSVADTLRQKVEAAVREHPQYRVVFTGHSLGGALATVAGADLRGNPYDIDVFSYGAPRVGNRAFAEFLTVQTGGTLYRITHTNDIVPRLPPREFGYSHSSPEYWIKSGTLVPVTRQDIVKIEGIDATGGNNQPNIPDIPAHLWYFGRIGTC

SEQ ID NO: 13847 - protein, 268 aa, Thermomyces lanuginosus
EYSQDLFNQFNLFAQYSAAAYCGKNNDAPAGTKITCTGNACPEVEKADATVLYSFEDSGVGDVTGFLALDNTNKLIVLSFRGSRSIENWIGNLNFDLKEINDICSGCRGHDGFTSSWRSVADTLRQKVEDAVREHPDYRVVFTGHSLGGALATVAGADLRGNGYDIDVFSYGAPRVGNRAFAEFLTVQTGGTLYRITITNDIVPRLPPREFGYSHSSPEYWIKSGTLVPVRRRDIVKIEGIDATGGNNQPNIPDIPAHLWYFGLIGTC

SEQ ID NO: 13848 - protein, 268 aa, Thermomyces lanuginosus
EVSQDLFNQFNLFAQYSAAAYCGKNNDAPAGTNITCTGNACPEVEKADATILYSFEDSGVGDVTGFLALDNTNKLIVLSFRGSRSIENWIGNLNFDLKEINDICSGCRGHDGFTSSWRSVADTLRQKVEDAVREHPDYRVVFAGHSLGGALATVAGADLRGDGYDIDVFSYGAPRVGNRAFAEFLTVQTGGTLYRITHTNDIVPRLPPREFGYSHSSPEYWIKSGTLPPVRRRDIVKIEGIDATGGNNQPNIPDIPAHLWYFGLIGTC

SEQ ID NO: 13849 - protein, 268 aa, Thermomyces lanuginosus
EYSQDLFNQFNLFAQYSAAAYCGKNNDAPAGTKITCTGNACPEVEKADATVLYSFEDSGVGDVTGFLALDNTNKLIVLSFRGSRSIENWIGNLNFDLKEINDICSGCRGHDGFTSSWRSVADTLRQKVEDAVREHPDYRVVFTGHSLGGALATVAGADLRGNGYDIDVFSYGAPRVGNRAFAEFLTVQTGGTLYRITHTNDIVPRLPPREFGYSHSSPEYWIKSGTLPPVRRRDIVKIEGIDATGGNNQPNIPDIPAHLWYFGLIGTC

SEQ ID NO: 13850 - protein, 268 aa, Thermomyces lanuginosus
EVSQDLFNQFNLFAQYSAAAYCGKNNEAPAGTNITCTGNACPEVEKADATTLYSFEDSGVGDVTGFLALDNTNKQIVLSFRGSRSIENWIGNLNFDLKEINDICSGCRGHDGFTSSWRSVADTLRQKVEAAVREHPDYRVVFTGHSLGGALATVAGADLRGNGYDIDVFSYGAPRVGNRAFAEFLTTQTGGTLYRITHTNDIVPRLPPREFGYSHSSPEYWIKSGTLVPVTRNDIVKIEGIDATGGNNQPNQPDIPAHLWYFGRIGTC

SEQ ID NO: 13851 - protein, 268 aa, Thermomyces lanuginosus
EVSQDLFNQFNLFAQYSAAAYCGKNNDAPAGTNITCTGNICPEVEKADATLLYSFRDSGVGDVTGFLALDNTNKLIVLSFRGSRSIENWIGNLNFDLKEINDICSGCRGHDGFTSSWFSVADTLRQKVEDAVREHPDYRVVFTGHSLGGALATVAGADLRGNGYDIDVFSYGAPRVGNRAFAEFLTVQTGGTLYRITHTNDIVPRLPPREFGYSHSSPEYWIKSGTLVPVRRRDIVKIEGIDATGGNNQPNIPDIPAHLWYFGLIGTC

SEQ ID NO: 13852 - protein, 268 aa, Thermomyces lanuginosus
EYSQDLFNQFNLFAQYSAAAYCGKNNDAPAGTKITCTGNACPEVEKADATVLYSFEDSGVGDVTGFLALDNTNKLIVLSFRGSRSIENWIGNLNFDLKEINDICSGCRGHDGFTSSWRSVADTLRQKVEDAVREHPDYRVVFTGHSLGGALATVAGADLRGNGYDIDVFSYGAPRVGNRAFAEFLTVQTGGTLYRITYTNDIVPRLPPREFGYSHSSPEYWIKSGTLVPVRRRDIVKIEGIDATGGNNQPNIPDIPAHLWYFGLIGTC

SEQ ID NO: 13853 - protein, 268 aa, Thermomyces lanuginosus
EYSQDLFNQFNLFAQYSAAAYCGKNNDAPAGTKITCTGNACPEVEKADATVLYSFEDSGVGDVTGFLALDNTNKLIVLSFRGSRSIENWIGNLNFDLKEINDICSGCRGHDGFTSSWRSVADTLRQKVEDAVREHPDYRVVFTGHSLGGALATVAGADLRGNGYDIDVFSYGAPRVGNRAFAEFLTVQTGGTLYRITHTNDIVPRLPPREFGYSHSSPEYWIKPGTLVPVRRRDIVKIEGIDATGGNNQPNIPDIPAHLWYFGLIGTC

SEQ ID NO: 13854 - protein, 268 aa, Thermomyces lanuginosus
EKSQDLFNQFNLFAQYSAAAYCGKNNDAPAGTKITCTGNACPEVEKADATILYSFEDSGVGDVTGFLALDNTNKLIVLSFRGSRSIENWIGNLNFDLKEINDICSGCRGHDGFTSSWRSVADTLRQKVEDAVREHPDYRVVFTGHSLGGALATVAGADLRGNGYDIDVFSYGAPRVGNRAFAEFLTVQTGGTLYRITHTNDIVPRLPPREFGYSHSSPEYWIKSGTLVPVRRRDIVKIEGIDATGGNNQPNIPDGPAHLWYFGLIGTC

SEQ ID NO: 13855 - protein, 268 aa, Thermomyces lanuginosus
EVSQDLFNQFRLFAQYSAAAYCGKNNDAPAGTQITCTGNACPEVEKADATFLYSFEDSGVGDVTGFLALDNTNKLIVLSFRGSRSIENWLGNLNFDLKEINDICSGCRGHDGFTSSWRSVADTLRQKVEDAVREHPDYRVVFTGHSLGGALATVAGADLRGNLYDIDVFSYGAPRVGNRAFAEFLTVQTGGTLYRITHTNDIVPRLPPREFGYSHSSPEYWIKSGTLVPVRRRDIVKIEGIDATGGNNQPNIPDIPAHLWYFGLIGTC

SEQ ID NO: 13856 - protein, 268 aa, Thermomyces lanuginosus
EKSQDLFNQFNLFAQYSAAAYCGKNNDAPAGTKITCTGNACPEVEKADATILYSFEDSGVGDVTGFLALDNTNKLIVLSFRGSRSIENWIGNLNFDLKEINDICSGCRGHDGFTSSWRSVADTLRQKVEDAVREHPDYRVVFTGHSLGGALATVAGADLRGNGYDIDVFSYGAPRVGNRAFAEFLTVQTGGTLYRITYTNDIVPRLPPREFGYSHSSPEYWIKSGTLVPVRRRDIVKIEGIDATGGNNQPNIPDIPAHLWYFGLIGTC

SEQ ID NO: 13857 - protein, 268 aa, Thermomyces lanuginosus
EVSQDLFNQFNLFAQYSAAAYCGKNNDAPAGTNITCTGNACPEVEKADATFLYSFEDSGVGDVTGFLALDNTNKLIVLSFRGSRSIENWIQNLNFDLKEINDICSGCRGHDGFTSSWRSVADTLRQKVEDAVREHPDYRVVFAGHSLGGGLATVAGADLRGNGYDIDVFSYGAPRVGNRAFAEFLTVQTGGTLYRITHTNDIVPRLPPRQFGYSHSSPEYWIKSGTLVPVRRRDIVKIEGIDATGGNNQPNIPDAPAHLWYFGLIGTC

SEQ ID NO: 13858 - protein, 268 aa, Thermomyces lanuginosus
EVSQDLFNQFNLFAQYSAAAYCGKNNDAPAGTNITCTGNACPEVEKADATILYSFEDSGVGDVTGFLALDNTNKLIVLSFRGSRSIENWIGNLNFDLKEINDICSGCRGHDGFTSSWRSVADTLRQKVEDAVREHPDYRVVFAGHSLGGALATVAGADLRGNGYDIDVFSYGAPRVGNRAFAEFLTVQTGGTLYRITNTNDIVPRLPPREFGYSHSSPEYWIKSGTLPPVRRRDIVKIEGIDATGGNNQPNIPDIPAHLWYFGLIGTC

SEQ ID NO: 13859 - protein, 268 aa, Thermomyces lanuginosus
EYSQDLFNQFNLFAQYSAAAYCGKNNDAPAGTKITCTGNACPEVEKADATILYSFEDSGVGDVTGFLALDNTNKLIVLSFRGSRSIENWIGNLNFDLKEINDICSGCRGHDGFTSSWRSVADTLRQKVEDAVREHPDYRVVFTGHSLGGALATVAGADLRGNGYDIDVFSYGAPRVGNRAFAEFLTVQTGGTLYRITHTNDIVPRLPPREFGYSHSSPEYWIKPGTLVPVRRRDIVKIEGIDATGGNNQPNIPDIPAHLWYFGLIGTC

SEQ ID NO: 13860 - protein, 268 aa, Thermomyces lanuginosus
EVSRDLFNQFNLFAQYSAAAYCGKNNDAPAGTNITCTGNACPEVEKADATILYSFEDSGVGDVTGFLALDNTNKLIVLSFRGSRSIENWIGNLNFDLKEINDICSGCRGHDGFTSSWRSVADTLRQKVEDAVREHPDYRVVFTGHSLGGALATVAGADLRGNGYDIDVFSYGAPRVGNRAFAEFLTVQTGGTLYRITSTNDIVPRLPPREFGYSHSSPEYWIKSGTLPPVRRRDIVKIEGIDATGGNNQPNIPDIPAHLWYFGLIGTC

SEQ ID NO: 13861 - protein, 268 aa, Thermomyces lanuginosus
EVSQDLFNQFNLFAQYSKAAYCKKNNDAPAGTNITCTGNACPEVEKADATFLYSFEDSGVGDVTGFLALDNTNKQIILSFRGSRSIENWIGNLNFDLKEINDICSGCRGHDGFTSSWRSVADTLRQKVEDAVREHPDYRVVFTGHSLGGALATVAWADLRGNGYDIDVFSYGAPRVGNRAFAEFLTQQTGGTLYRITHTNDIVPRLPPREFGYSHSSPEYWIKSGTLVPVTRNDIVKIEGIDATGGNNQPNIPDIPAHLWYFGLIGTC

SEQ ID NO: 13862 - protein, 268 aa, Thermomyces lanuginosus
EVSQDLFNQFNLFAQYSAAAYCKKNNDAPAGTNITCTGNACPEVEKADATTLYSFKDSGVGDVTGFLALDNTNKRIVLSFRGSRSIENWIQNLNFDLKEINDICSGCRGHDGFTSSWRSVADTLRQKVEAAVREHPDYRVVFTGHSLGGALATVAGADLRGNGYDIDVFSYGAPRVGNRAFAEFLTTQTGGTLYRITHTNDIVPRLPPREFGYSHSSPEYWIKSGTLVPVTRNDIVKIEGIDATGGNNQPNIPDIPAHLWYFGRIGTC

SEQ ID NO: 13863 - protein, 268 aa, Thermomyces lanuginosus
EVSQDLFNQFNLFAQYSAAAYCGKNNDAPAGTQITCTGNACPEVEKADATFLYSFEDSGVGDVTGFLALDNTNKLIVLSFRGSRSIENWITNLNFDLKEINDICSGCRGHAGFTSSWRSVADTLRQKVEDAVREHPDYRVVFTGHSLGGALATVAGADLRGNGYDIDVFSYGAPRIGNRAFAEFLTVQTGGTLYRITHTNDIVPRLPPREFGYSHSSPEYWIKSGTLVPVRRRDIVKIEGIDATGGNNQPNIPSIPAHLWYFGLIGTC

SEQ ID NO: 13864 - protein, 268 aa, Thermomyces lanuginosus
EVSRDLFNQFNLFAQYSAAAYCGKNNDAPAGTNITCTGNACPEVEKADATILYSFEDSGVGDVTGFLALDNTNKLIVLSFRGSRSIENWIGNLNFDLKEINDICSGCRGHDGFTSSWRSVADTLRQKVEDAVREHPDYRVVFTGHSLGGALATVAGADLRGDGYDIDVFSYGAPRVGNRAFAEFLTVQTGGTLYRITHTNDIVPRLPPREFGYSHSSPEYWIKSGTLPPVRRRDIVKIEGIDATGGNNQPNIPDIPAHLWYFGLIGTC

SEQ ID NO: 13865 - protein, 268 aa, Thermomyces lanuginosus
EVSQDLFNQFNLFAQYSAAAYCSKNNDAPAGTNITCTGNACPEVEKADATFLYSFRDSGVGDVTGFLALDNTNKLIVLSFRGSRSIENWIGNLNFDLKEINDICSGCRGHDGFTSSWFSVADTLRQKVEDAVREHPDYRVVFTGHSLGGALATVAGADLRGNGYDIDVFSYGAPRVGNRAFAEFLTVQTGGTLYRITHTNDIVPRLPPREFGYSHSSPEYWIKSGTLVPVRRRDIVKIEGIDAEGGNNQPNIPDIPAHLWYFGLIGTC

SEQ ID NO: 13866 - protein, 268 aa, Thermomyces lanuginosus
EKSQDLFNQFNLFAQYSAAAYCGKNNDAPAGTKITCTGNACPEVEKADATLLYSFEDSGVGDVTGFLALDNTNKLIVLSFRGSRSIENWIGNLNFDLKEINDICSGCRGHDGFTSSWRSVADTLRQKVEDAVREHPDYRVVFTGHSLGGALATVAGADLRGNGYDIDVFSYGAPRVGNRAFAEFLTVQTGGTLYRITITNDIVPRLPPREFGYSHSSPEYWIKSGTLVPVRRRDIVKIEGIDATGGNNQPNIPDIPAHLWYFGLIGTC

SEQ ID NO: 13867 - protein, 268 aa, Thermomyces lanuginosus
EVSQDLFNQFNLFAQYSAAAYCGKNNVAPAGTQITCTGNACPEVEKADATFLYSFEDSGSGDVTGFLALDNTNKLIVLSFRGSRSIENWIGNLNFDLKEINDICSGCRGHDGFTSSWRSVADTLRQKVEDAVREHPDYRVVFTGHSLGGALATVAGADLRGNGYDIDVFSYGAPRVGNRAFAEFLTVQTGGTLYRITHTNDIVPRLPPREFGYSHSSPEYWIKSGTLVPVRRRDIVKIEGIDATGGNNRPNIPDIPAHLWYFGLIGTC

SEQ ID NO: 13868 - protein, 268 aa, Thermomyces lanuginosus
EVSQDLFNQFKLFAQYSAAAYCQKNNDAPAGTNITCTGNACPEVEKADATFLYSFEDSGVGDVTGFLALDNTNKQIVLSFRGSRSIENWIGNLNFDLKEINDICSGCRGHDGFTSSWRSVADTLRQKVEAAVREHPDYRVVFTGHSLGGALATVAGADLRGNGYDIDVFSYGAPRVGNRAFAEFLTNQQGGTLYRITHTNDIVPRLPPREFGYSHSSPEYWIKSGTLVPVTRNDIVKIEGIDATGGNNQPNIPDIPAHLWYFGLIGTC

SEQ ID NO: 13869 - protein, 268 aa, Thermomyces lanuginosus
EVSQDLFNQFNLFAQYSAAAYCGKNNRAPAGTNITCTGNACPEVEKADATLLYSFEDSGVGDVTGFLALDNTNKLIVLSFRGSRSIENWIGNLNFDLKEINDICSGCRGHAGFTSSWRSVADTLRQKVEDAVREHPDYRVVFTGHSLGGALATVAGADLRGNGYDIDVFSYGAPRVGNRAFAEFLTVQTGGTLYRITHTNDIVPRLPPREFGYSHPSPEYWIKSGTGVPVTRNDIVKIEGIDATGGNNQPNIPDITAHLWYFGLIGTC

SEQ ID NO: 13870 - protein, 268 aa, Thermomyces lanuginosus
EYSQDLFNQFNLFAQYSAAAYCGKNNDAPAGTKITCTGNACPEVEKADATVLYSFEDSGVGDVTGFLALDNTNKLIVLSFRGSRSIENWIGNLNFDLKEINDICSGCRGHDGFTSSWRSVADTLRQKVEDAVREHPDYRVVFTGHSLGGALATVAGADLRGNGYDIDVFSYGAPRVGNRAFAEFLTVQTGGTLYRITNTNDIVPRLPPREFGYSHSSPEYWIKSGTLVPVRRRDIVKIEGIDATGGNNQPNIPDIPAHLWYFGLIGTC

SEQ ID NO: 13871 - protein, 268 aa, Thermomyces lanuginosus
EVSQDLFNQFNLFAQYSAAAYCGKNNQAPAGTNITCTGNACPEVEKADATTLYSFEDSGVGDVTGFLALDNTNKQIVLSFRGSRSIENWIGNLNFDLKEINDICSGCRGHDGFTSSWRSVADTLRQKVEAAVREHPDYRVVFTGHSLGGALATVAGADLRGNGYDIDVFSYGAPRVGNRAFAEFLTTQTGGTLYRITHTNDIVPRLPPREFGYSHSSPEYWIKSGTLVPVTRNDIVKIEGIDATGGNNQPNQPDIPAHLWYFGRIGTC

SEQ ID NO: 13872 - protein, 268 aa, Thermomyces lanuginosus
EVSQDLFNQFNLFAQYSAAAYCGKNNDAPAGTNITCTGNACPEVEKADATFLYSFEDSGVGDVTGFLALDNTNKLIVLSFRGSRSIENWIGNLNFDLKEINDICSGCRGHDGFTSSWRSVADTLRQKVEDAVREHPDYRVVFAGHSLGGALATVAGADLRGDGYDIDVFSYGAPRVGNRAFAEFLTVQTGGTLYRITSTNDIVPRLPPREFGYSHSSPEYWIKSGTLRPVRRRDIVKIEGIDATGGNNQPNIPDIPAHLWYFGLIGTC

SEQ ID NO: 13873 - protein, 268 aa, Thermomyces lanuginosus
EYSQDLFNQFNLFAQYSAAAYCGKNNDAPAGTKITCTGNACPEVEKADATLLYSFEDSGVGDVTGFLALDNTNKLIVLSFRGSRSIENWIGNLNFDLKEINDICSGCRGHDGFTSSWRSVADTLRQKVEDAVREHPDYRVVFTGHSLGGALATVAGADLRGNGYDIDVFSYGAPRVGNRAFAEFLTVQTGGTLYRITITNDIVPRLPPREFGYSHSSPEYWIKSGTLVPVRRRDIVKIEGIDATGGNNQPNIPDIPAHLWYFGLIGTC

SEQ ID NO: 13874 - protein, 268 aa, Thermomyces lanuginosus
EVSQDLFNQFNLFAQYSAAAYCGKNNVAPAGTQITCTGNACPEVEKADATFLYSFEDSGVGDVTGFLALDNTNKLIVLSFRGSRSIENWIGNLNFDLKEINDICSGCRGHDGFTSSWRSVADTLRQKVEDAVREHPDYRVVFTGHSLGGALATVAGADLRGNGYDIDVFSYGAPRVGNRAFAEFLTVQTGGTLYRITHTNDIVPRLPPREFGYSHSSPEYWIKSGTFVPVRRRDIVKIEGIDATGGNNRPNIPDIPAHLWYFGLIGTC

SEQ ID NO: 13875 - protein, 268 aa, Thermomyces lanuginosus
EVSQDLFNQFNLFAQYSKAAYCGKNNDAPAGTNITCTGNACPEVEKADATFLYSFEDSGVGDVTGFLALDNTNKRIVLSFRGSRSIENWIGNLNFDLKEINDICSGCRGHDGFTSSWRSVADTLRQKVEAAVREHPDYRVVFTGHSLGGALATIAWADLRGNGYDIDVFSYGAPRVGNRAFAEFLTNQTGGTLYRITHTNDIVPRLPPREFGYSHSSPEYWIKSGTLVPVTRNDIVKIEGIDATGGNNQPNIPDIPAHLWYFGLIGTC

SEQ ID NO: 13876 - protein, 268 aa, Thermomyces lanuginosus
EVSQDLFNQFNLFAQYSAAAYCGKNNEAPAGTNITCTGNACPEVEKAQATFLYSFEDMGVGDVTGFLALDNTNKLIVLSFRGSRSIENWIGNLNFDLKEINDICSGCRGHDGFTSSWRSVADTLRQKVEAAVREHPDYRVVFTGHSLGGALATVAGADLRGNPYDIDVFSYGAPRVGNRAFAEFLTVQTGGTLYRITHTNDIVPRLPPREFGYSHSSPEYWIKSGTMVPVTRNDIVKIEGIDATGGNNQPNIPDIPAHLWYFGRIGTC

SEQ ID NO: 13877 - protein, 268 aa, Thermomyces lanuginosus
EVSRDLFNQFNLFAQYSAAAYCGKNNDAPAGTNITCTGNACPEVEKADATILYSFEDSGVGDVTGFLALDNTNKLIVLSFRGSRSIENWIGNLNFDLKEINDICSGCRGHDGFTSSWRSVADTLRQKVEDAVREHPDYRVVFAGHSLGGALATVAGADLRGNGYDIDVFSYGAPRVGNRAFAEFLTVQTGGTLYRITNTNDIVPRLPPREFGYSHSSPEYWIKSGTLVPVRRRDIVKIEGIDATGGNNQPNIPDIPAHLWYFGLIGTC

SEQ ID NO: 13878 - protein, 268 aa, Thermomyces lanuginosus
EVSRDLFNQFNLFAQYSAAAYCGKNNDAPAGTNITCTGNACPEVEKADATILYSFEDSGVGDVTGFLALDNTNKLIVLSFRGSRSIENWIGNLNFDLKEINDICSGCRGHDGFTSSWRSVADTLRQKVEDAVREHPDYRVVFTGHSLGGALATVAGADLRGDGYDIDVFSYGAPRVGNRAFAEFLTVQTGGTLYRITHTNDIVPRLPPREFGYSHSSPEYWIKSGTLRPVRRRDIVKIEGIDATGGNNQPNIPDIPAHLWYFGLIGTC

SEQ ID NO: 13879 - protein, 268 aa, Thermomyces lanuginosus
EVSQDLFNQFNLFAQYSAAAYCGKNNDAPAGTNITCTGNACPEVEKADATILYSFEDSGVGDVTGFLALDNTNKLIVLSFRGSRSIENWIGNLNFDLKEINDICSGCRGHDGFTSSWRSVADTLRQKVEDAVREHPDYRVVFTGHSLGGALATVAGADLRGDGYDIDVFSYGAPRVGNRAFAEFLTVQTGGTLYRITSTNDIVPRLPPREFGYSHSSPEYWIKSGTLRPVRRRDIVKIEGIDATGGNNQPNIPDIPAHLWYFGLIGTC

SEQ ID NO: 13880 - protein, 268 aa, Thermomyces lanuginosus
EKSQDLFNQFNLFAQYSAAAYCGKNNDAPAGTKITCTGNACPEVEKADATILYSFEDSGVGDVTGFLALDNTNKLIVLSFRGSRSIENWIGNLNFDLKEINDICSGCRGHDGFTSSWRSVADTLRQKVEDAVREHPDYRVVFTGHSLGGALATVAGADLRGNGYDIDVFSYGAPRVGNRAFAEFLTVQTGGTLYRITHTNDIVPRLPPREFGYSHSSPEYWIKPGTLVPVRRRDIVKIEGIDATGGNNQPNIPDIPAHLWYFGLIGTC

SEQ ID NO: 13881 - protein, 268 aa, Thermomyces lanuginosus
EVSQDLFNQFNLFAQYSAAAYCGKNNDAPAGTNITCTGNICPEVEKADATFLYSFRDSGVGDVTGFLALDNTNKLIVLSFRGSRSIENWIGNLNFDLIEINDICSGCRGHDGFTSSWFSVADTLRQKVEDAVREHPDYRVVFTGHSLGGALATVAGADLRGNGYDIDVFSYGAPRVGNRAFAEFLTVQTGGTLYRITHTNDIVPRLPPREFGYSHSSPEYWIKSGTLVPVRRRDIVKIEGIDATGGNNQPNIPDIPAHLWYFGLIGTC

SEQ ID NO: 13882 - protein, 268 aa, Thermomyces lanuginosus
EYSQDLFNQFNLFAQYSAAAYCGKNNDAPAGTKITCTGNACPEVEKADATLLYSFEDSGVGDVTGFLALDNTNKLIVLSFRGSRSIENWIGNLNFDLKEINDICSGCRGHDGFTSSWRSVADTLRQKVEDAVREHPDYRVVFTGHSLGGALATVAGADLRGNGYDIDVFSYGAPRVGNRAFAEFLTVQTGGTLYRITHTNDIVPRLPPREFGYSHSSPEYWIKSGTDVPVRRRDIVKIEGIDATGGNNQPNIPDIPAHLWYFGLIGTC

SEQ ID NO: 13883 - protein, 268 aa, Thermomyces lanuginosus
EVSQDLFNQFNLFAQYSKAAYCQANNDAPAGTNITCTGNACPEVEKADATFLYSFEDSGVGDVTGFLALDNTNKRIVLSFRGSRSIENWIGNLRFDLKEINDICSGCRGHDGFTSSWRSVADTLRQKVEDAVREHPDYRVVFTGHSLGGALATVAWADLRGNGYDIDVFSYGAPRVGNRAFAEFLTVQTGGTLYRITHTNDIVPRLPPREFGYSHSSPEYWIKSGTLVPVTRNDIVKIEGIDATGGNNQPNIPDIPAHLWYFGLIGTC

SEQ ID NO: 13884 - protein, 268 aa, Thermomyces lanuginosus
EVSQDLFNQFNLFAQYSAAAYCGKNNDAPAGTQITCTGNACPEVEKADATFLYSFEDSGVGDVTGFLALDNTNKLIVLSFRGSRSIENWIQNLNFDLKEINDICSGCRGHDGFTSSWRSVADTLRQKVEDAVREHPDYRVVFTGHSLGGALATVAGADLRGNGYDIDVFSYGAPRVGNRAFAEFLTVQTGGTLYRITHTNDIVPRLPPRQFGYSHSSPEYWIKSGTLVPVRRRDIVKIEGIDATGGNNQPNIPDATAHLWYFGLIGTC

SEQ ID NO: 13885 - protein, 268 aa, Thermomyces lanuginosus
EVSQDLFNQFNLFAQYSAAAYCGKNNDAPAGTQITCTGNACPEVEKADATFLYSFEDSGVGDVTGFLALDNTNKLIVLSFRGSRSIENWIGNLNFDLKEINDICSGCRGHDGFTSSWRSVADTLRQKVEDAVREHPDYRVVFTGHSLGGALATVAGADLRGNGYDIDVFSYGAPRVGNRAFAEFLTVQTGGTLYRITHTNDIVPRLPPREFGYSHPSPEYWIKSGTGVPVRRRDIVKIEGIDATGGNNRPNIPDIPAHLWYFGLIGTC

SEQ ID NO: 13886 - protein, 268 aa, Thermomyces lanuginosus
EVSQDLFNQFNLFAQYSAAAYCKANNDAPAGTNITCTGNACPEVEKADATFLYSFEDSGVGDVTGFLALDNTNKQIVLSFRGSRSIENWIGNLNFDLKEINDICSGCRGHAGFTSSWRSVADTLRQKVEAAVREHPDYRVVFTGHSLGGALATVAGADLRGNGYDIDVFSYGAPRVGNRAFAEFLTVQQGGTLYRITHTNDIVPRLPPREFGYSHSSPEYWIKSGTLVPVTRNDIVKIEGIDATGGNNQPNIPDIPAHLWYFGLIGTC

SEQ ID NO: 13887 - protein, 268 aa, Thermomyces lanuginosus
EVSQDLFNQFNLFAQYSAAAYCGKNNDAPAGTQITCTGNACPEVEKADATFLYSFEDSGVGDVTGFLALDNTNKLIVLSFRGSRSIENWIGNLNFDLKEINDICSGCRGHDGFTSSWRSVADTLRQKVEDAVREHPDYRVVFTGHSLGGALATVARADLRGNGYDIDVFSYGAPRWGNRAFAEFLTVQTGGTLYRITHTNDIVPRLPPREFGYSHSSPEYWIKSGTLVPVRRRDIVKIEGIDATGGNNRPNIPDIPAHLWYFGLIGTC

SEQ ID NO: 13888 - protein, 268 aa, Thermomyces lanuginosus
EVSQDLFNQFNLFAQYSAAAYCGKNNDAPAGTNITCTGNACPEVEKADATILYSFEDSGVGDVTGFLALDNTNKLIVLSFRGSRSIENWIGNLNFDLKEINDICSGCRGHDGFTSSWRSVADTLRQKVEDAVREHPDYRVVFTGHSLGGALATVAGADLRGDGYDIDVFSYGAPRVGNRAFAEFLTVQTGGTLYRITNTNDIVPRLPPREFGYSHSSPEYWIKSGTLRPVRRRDIVKIEGIDATGGNNQPNIPDIPAHLWYFGLIGTC

SEQ ID NO: 13889 - protein, 268 aa, Thermomyces lanuginosus
EVSQDLFNQFNLFAQYSKAAYCGKNNSAEAGTDITCTGNACPEVEKADATFLYSFEDSGVGDVTGFLALDNTNKDIVLSFRGSRSIENWIGNLNFDLKEINDICSGCRGHDGFTSSWRSVADTLRQKVEDAVREHPDYRVVFTGHSLGGALATVAGADLRGNGYDIDVFSYGAPRVGNRAFAEFLTVQDGGTLYRITHTNDIVPRLPPREFGYSHSSPEYWIKSGTLVPVTRNDIVKIEGIDATGGNNQPNIPDIPAHLWYFGLIGTC

SEQ ID NO: 13890 - protein, 268 aa, Thermomyces lanuginosus
EKSQDLFNQFNLFAQYSAAAYCGKNNDAPAGTKITCTGNACPEVEKADATVLYSFEDSGVGDVTGFLALDNTNKLIVLSFRGSRSIENWIGNLNFDLKEINDICSGCRGHDGFTSSWRSVADTLRQKVEDAVREHPDYRVVFTGHSLGGALATVAGADLRGNGYDIDVFSYGAPRVGNRAFAEFLTVQTGGTLYRITSTNDIVPRLPPREFGYSHSSPEYWIKSGTLVPVRRRDIVKIEGIDATGGNNQPNIPDIPAHLWYFGLIGTC

SEQ ID NO: 13891 - protein, 268 aa, Thermomyces lanuginosus
EKSQDLFNQFNLFAQYSAAAYCGKNNDAPAGTKITCTGNACPEVEKADATILYSFEDSGVGDVTGFLALDNTNKLIVLSFRGSRSIENWIGNLNFDLKEINDICSGCRGHDGFTSSWRSVADTLRQKVEDAVREHPDYRVVFTGHSLGGGLATVAGADLRGNGYDIDVFSYGAPRVGNRAFAEFLTVQTGGTLYRITHTNDIVPRLPPREFGYSHSSPEYWIKSGTLVPVRRRDIVKIEGIDATGGNNQPNIPDIPAHLWYFGLIGTC

SEQ ID NO: 13892 - protein, 268 aa, Thermomyces lanuginosus
EVSQDLFNQFNLFAQYSAAAYCGKNNDAPAGTNITCTGNACPEVEKADATFLYSFEDSGVGDVTGFLALDNTNKQIVLSFRGSRSIENWIGNLNFDLKEINDICSGCRGHAGFTSSWRSVADTLRQKVEAAVREHPDYRVVFTGHSLGGALATIAGADLRGNGYDIDVFSYGAPRVGNRAFAEFLTNQQGGTLYRITHTNDIVPRLPPREFGYSHSSPEYWIKSGTLVPVTRNDIVKIEGIDATGGNNQPNIPDIPAHLWYFGLIGTC

SEQ ID NO: 13893 - protein, 268 aa, Thermomyces lanuginosus
EVSQDLFNQFNLFAQYSAAAYCGKNNDAPAGTQITCTGHACPEVEKADATFLYSFEDSGVGDVTGFLALDNTNKLIVLSFRGSRSIENWIGNLNFDLKEINDICSGCRGHDGFTSSWRSVADTLRQKVEDAVREHPDYRVVFTGHSLGGALATVAGADLRGNGYDIDVFSYGAPRVGNRAFAEFLTVQTGGTLYRITHTQDIVPRLPPREFGYSHSSPEYWIKSGTLVPVRRRDIVKIEGIDATGGNNQPSIPDIPAHLWYFGLIGTC

SEQ ID NO: 13894 - protein, 268 aa, Thermomyces lanuginosus
EVSQDLFNQFNLFAQYSKAAYCGANNDAPAGTNITCTGNACPEVEKADATFLYSFEDSGVGDVTGFLALDNTNKRIVLSFRGSRSIENWIGNLNFDLKEINDICSGCRGHDGFTSSWRSVADTLRQKVEAAVREHPDYRVVFTGHSLGGALATVAGADLRGNGYDIDVFSYGAPRVGNRAFAEFLTNQQGGTLYRITHTNDIVPRLPPREFGYSHSSPEYWIKSGTLVPVTRNDIVKIEGIDATGGNNQPNIPDIPAHLWYFGLIGTC

SEQ ID NO: 13895 - protein, 268 aa, Thermomyces lanuginosus
EYSQDLFNQFNLFAQYSAAAYCGKNNDAPAGTKITCTGNACPEVEKADATLLYSFEDSGVGDVTGFLALDNTNKLIVLSFRGSRSIENWIGNLNFDLKEINDICSGCRGHDGFTSSWRSVADTLRQKVEDAVREHPDYRVVFTGHSLGGALATVAGADLRGNGYDIDVFSYGAPRVGNRAFAEFLTVQTGGTLYRITHTNDIVPRLPPREFGYSHSSPEYWIKFGTLVPVRRRDIVKIEGIDATGGNNQPNIPDIPAHLWYFGLIGTC

SEQ ID NO: 13896 - protein, 268 aa, Thermomyces lanuginosus
EVSQDLFNQFNLFAQYSAAAYCGKNNDAPAGTNITCTGNACPEVEKADATFLYSFEDSGVGDVTGFLALDNTNKLIVLSFRGSRSIKNWIDNLNFLLKEINDICSGCRGHDGFTSSWRSVADTLRQKVEDAVREHPDYRVVFTGHSLGGALATVAGADLRGNGYDIDVFSYGAPRVGNRAFAEFLTVQTGGTLYRITHTNDIVPRLPPREFGYSHSSPEYWIKSPTLVPVRRRDIVKIEGIDATGGNNRPDIPDIPAHLWYFGLIGTC

SEQ ID NO: 13897 - protein, 268 aa, Thermomyces lanuginosus
EVSQDLFNQFLLFAQYSAAAYCGKNNDAPAGTQITCTGNACPEVEKADATFLYSFEDSGVGDVTGFLALDNTNKLIVLSFRGSRSIENWITNLNFDLKEINDICSGCRGHDGFTSSWRSVADTLRQKVEDAVREHPDYRVVFTGHSLGGALATVAGADLRGNKYDIDVFSYGAPRVGNRAFAEFLTVQTGGTLYRITHTNDIVPRLPPREFGYSHSSPEYWIKSGTLVPVRRRDIVKIEGIDATGGNNQPNIPSIPAHLWYFGLIGTC

SEQ ID NO: 13898 - protein, 268 aa, Thermomyces lanuginosus
EVSRDLFNQFNLFAQYSAAAYCGKNNDAPAGTNITCTGNACPEVEKADATFLYSFEDSGVGDVTGFLALDNTNKLIVLSFRGSRSIENWIGNLNFDLKEINDICSGCRGHDGFTSSWRSVADTLRQKVEDAVREHPDYRVVFAGHSLGGALATVAGADLRGNGYDIDVFSYGAPRVGNRAFAEFLTVQTGGTLYRITNTNDIVPRLPPREFGYSHSSPEYWIKSGTLPPVRRRDIVKIEGIDATGGNNQPNIPDIPAHLWYFGLIGTC

SEQ ID NO: 13899 - protein, 268 aa, Thermomyces lanuginosus
EVSQDLFNQFRLFAQYSAAAYCGKNNDAPAGTQITCTGNACPEVEKADATFLYSFEDSGVGDVTGFLALDNTNKLIVLSFRGSRSIENWITNLNFDLKEINDICSGCRGHDGFTSSWRSVADTLRQKVEDAVREHPDYRVVFTGHSLGGALATVAGADLRGNWYDIDVFSYGAPRVGNRAFAEFLTVQTGGTLYRITHTNDIVPRLPPREFGYSHSSPEYWIKSGTLVPVRRRDIVKIEGIDATGGNNQPNIPSIPAHLWYFGLIGTC

SEQ ID NO: 13900 - protein, 268 aa, Thermomyces lanuginosus
EVSQDLFNQFNLFAQYSAAAYCGKNNNAPAGTNITCTGNACPEVEKADATFLYSFRDSGVGDVTGFLALDNTNKLIVLSFRGSRSIENWIGNLNFDLIEINDICSGCRGHDGFTSSWFSVADTLRQKVEDAVREHPDYRVVFTGHSLGGALATVAGADLRGNGYDIDVFSYGAPRVGNRAFAEFLTVQTGGTLYRITHTNDIVPRLPPREFGYSHSSPEYWIKSGTLVPVRRRDIVKIEGIDATGGNNQPNIPDIPAHLWYFGLIGTC

SEQ ID NO: 13901 - protein, 268 aa, Thermomyces lanuginosus
EVSQDLFNQFRLFAQYSAAAYCGKNNDAPAGTQITCTGNACPEVEKADATFLYSFEDSGVGDVTGFLALDNTNKLIVLSFRGSRSIENWITNLNFDLKEINDICSGCRGHDGFTSSWRSVADTLRQKVEDAVREHPDYRVVFTGHSLGGALATVAGADLRGNNYDIDVFSYGAPRVGNRAFAEFLTVQTGGTLYRITHTNDIVPRLPPREFGYSHSSPEYWIKSGTLVPVRRRDIVKIEGIDATGGNNQPNIPSIPAHLWYFGLIGTC

SEQ ID NO: 13902 - protein, 268 aa, Thermomyces lanuginosus
EVSRDLFNQFNLFAQYSAAAYCGKNNDAPAGTNITCTGNACPEVEKADATFLYSFEDSGVGDVTGFLALDNTNKLIVLSFRGSRSIENWIGNLNFDLKEINDICSGCRGHDGFTSSWRSVADTLRQKVEDAVREHPDYRVVFAGHSLGGALATVAGADLRGDGYDIDVFSYGAPRVGNRAFAEFLTVQTGGTLYRITNTNDIVPRLPPREFGYSHSSPEYWIKSGTLVPVRRRDIVKIEGIDATGGNNQPNIPDIPAHLWYFGLIGTC

SEQ ID NO: 13903 - protein, 268 aa, Thermomyces lanuginosus
EVSQDLFNQFNLFAQYSAAAYCGKNNDAPAGTNITCTGNACPEVEKAQATFLYSFEDMGVGDVTGFLALDNTNKLIVLSFRGSRSIENWIGNLNFDLKEINDICSGCRGHDGFTSSWRSVADTLRQKVEQAVREHPDYRVVFTGHSLGGALATVAGADLRGNPYDIDVFSYGAPRVGNRAFAEFLTVQTGGTLYRITHTNDIVPRLPPREFGYSHSSPEYWIKSGTMVPVTRQDIVKIEGIDATGGNNQPNIPDIPAHLWYFGRIGTC

SEQ ID NO: 13904 - protein, 268 aa, Thermomyces lanuginosus
EVSQDLFNQFNLFAQYSAAAYCGKNNDAPAGTNITCTGNACPEVEKADATLLYSFEDSGVGDVTGFLALDNTNKLIVLSFRGSRSIENWIGNLNFDLKEINDICSGCRGHDGFTSSWRSVADTLRQKVEDAVREHPDYRVVFTGHSLGGALATVAGADLRGDGYDIDVFSYGAPRVGNRAFAEFLTVQTGGTLYRITSTNDIVPRLPPREFGYSHSSPEYWIKSGTLPPVRRRDIVKIEGIDATGGNNQPNIPDIPAHLWYFGLIGTC

SEQ ID NO: 13905 - protein, 268 aa, Thermomyces lanuginosus
EVSQDLFNQFNLFAQYSAAAYCQANNDAPAGTNITCTGNACPEVEKADATFLYSFEDSGVGDVTGFLALDNTNKLIILSFRGSRSIENWIGNLNFDLKEINDICSGCRGHDGFTSSWRSVADTLRQKVEAAVREHPDYRVVFTGHSLGGALATVAWADLRGNGYDIDVFSYGAPRVGNRAFAEFLTNQTGGTLYRITHTNDIVPRLPPREFGYSHSSPEYWIKSGTLVPVTRNDIVKIEGIDATGGNNQPNIPDIPAHLWYFGLIGTC

SEQ ID NO: 13906 - protein, 268 aa, Thermomyces lanuginosus
EVSRDLFNQFNLFAQYSAAAYCGKNNDAPAGTNITCTGNACPEVEKADATFLYSFEDSGVGDVTGFLALDNTNKLIVLSFRGSRSIENWIGNLNFDLKEINDICSGCRGHDGFTSSWRSVADTLRQKVEDAVREHPDYRVVFAGHSLGGALATVAGADLRGNGYDIDVFSYGAPRVGNRAFAEFLTVQTGGTLYRITNTNDIVPRLPPREFGYSHSSPEYWIKSGTLRPVRRRDIVKIEGIDATGGNNQPNIPDIPAHLWYFGLIGTC

SEQ ID NO: 13907 - protein, 268 aa, Thermomyces lanuginosus
EYSQDLFNQFNLFAQYSAAAYCGKNNDAPAGTKITCTGNACPEVEKADATLLYSFEDSGVGDVTGFLALDNTNKLIVLSFRGSRSIENWIGNLNFDLKEINDICSGCRGHDGFTSSWRSVADTLRQKVEDAVREHPDYRVVFTGHSLGGALATVAGADLRGNGYDIDVFSYGAPRVGNRAFAEFLTVQTGGTLYRITHTNDIVPRLPPREFGYSHSSPEYWIKSGTLVPVRRRDIVKIEGIDATGGNNQPNIPDGPAHLWYFGLIGTC

SEQ ID NO: 13908 - protein, 268 aa, Thermomyces lanuginosus
EVSRDLFNQFNLFAQYSAAAYCGKNNDAPAGTNITCTGNACPEVEKADATILYSFEDSGVGDVTGFLALDNTNKLIVLSFRGSRSIENWIGNLNFDLKEINDICSGCRGHDGFTSSWRSVADTLRQKVEDAVREHPDYRVVFTGHSLGGALATVAGADLRGNGYDIDVFSYGAPRVGNRAFAEFLTVQTGGTLYRITNTNDIVPRLPPREFGYSHSSPEYWIKSGTLRPVRRRDIVKIEGIDATGGNNQPNIPDIPAHLWYFGLIGTC

SEQ ID NO: 13909 - protein, 268 aa, Thermomyces lanuginosus
EKSQDLFNQFNLFAQYSAAAYCGKNNDAPAGTKITCTGNACPEVEKADATLLYSFEDSGVGDVTGFLALDNTNKLIVLSFRGSRSIENWIGNLNFDLKEINDICSGCRGHDGFTSSWRSVADTLRQKVEDAVREHPDYRVVFTGHSLGGALATVAGADLRGNGYDIDVFSYGAPRVGNRAFAEFLTVQTGGTLYRITNTNDIVPRLPPREFGYSHSSPEYWIKSGTLVPVRRRDIVKIEGIDATGGNNQPNIPDIPAHLWYFGLIGTC

SEQ ID NO: 13910 - protein, 268 aa, Thermomyces lanuginosus
EKSQDLFNQFNLFAQYSAAAYCGKNNDAPAGTKITCTGNACPEVEKADATLLYSFEDSGVGDVTGFLALDNTNKLIVLSFRGSRSIENWIGNLNFDLKEINDICSGCRGHDGFTSSWRSVADTLRQKVEDAVREHPDYRVVFTGHSLGGALATVAGADLRGNGYDIDVFSYGAPRVGNRAFAEFLTVQTGGTLYRITHTNDIVPRLPPREFGYSHSSPEYWIKPGTLVPVRRRDIVKIEGIDATGGNNQPNIPDIPAHLWYFGLIGTC

SEQ ID NO: 13911 - protein, 268 aa, Thermomyces lanuginosus
EVSQDLFNQFNLFAQYSAAAYCGKNNDAPAGTNITCTGNACPKVEKADATFLYSFADSGVGDVTGFLALDNTNKLIVLSFRGSRSIKNWIGNLNFDLKEINDICSGCRGHDGFTSSWRSVADTLRQKVEDAVREHPDYRVVFTGHSLGGALATVAGADLRGNGYDIDVFSYGAPRVGNRAFAEFLTVQTGGTLYRITHTNDIVPRLPPREFGYSHSSPEYWIKSGTLVPVRRRKIVKIEGIDATGGNNQPNIPDIPAHLWYFGLIGTC

SEQ ID NO: 13912 - protein, 268 aa, Thermomyces lanuginosus
EVSQDLFNQFNLFAQYSAAAYCKKNNDAPAGTNITCTGNACPEVEKADATFLYSFEDSGVGDVTGFLALDNTNKRIVLSFRGSRSIENWIGNLRFDLKEINDICSGCRGHDGFTSSWRSVADTLRQKVEDAVREHPDYRVVFTGHSLGGALATIAWADLRGNGYDIDVFSYGAPRVGNRAFAEFLTNQTGGTLYRITHTNDIVPRLPPREFGYSHSSPEYWIKSGTLVPVTRNDIVKIEGIDATGGNNQPNIPDIPAHLWYFGRIGTC

SEQ ID NO: 13913 - protein, 268 aa, Thermomyces lanuginosus
EVSQDLFNQFRLFAQYSAAAYCGKNNDAPAGTQITCTGNACPEVEKADATFLYSFEDSGVGDVTGFLALDNTNKLIVLSFRGSRSIENWITNLNFDLKEINDICSGCRGHDGFTSSWRSVADTLRQKVEDAVREHPDYRVVFTGHSLGGALATVAGADLRGNLYDIDVFSYGAPRVGNRAFAEFLTVQTGGTLYRITHTNDIVPRLPPREFGYSHSSPEYWIKSGTLVPVRRRDIVKIEGIDATGGNNQPNIPSIPAHLWYFGLIGTC

SEQ ID NO: 13914 - protein, 268 aa, Thermomyces lanuginosus
EVSQDLFNQFNLFAQYSAAAYCGKNNRAPAGTQITCTGNACPEVEKADATFLYSFEDSGVGDVTGFLALDNTNKLIVLSFRGSRSIENWIANLNFELKEINDICSGCRGHAGFTSSWRSVADTLRQKVEDAVREHPDYRVVFTGHSLGGALATVAGADLRGNGYDIDVFSYGAPRVGNRAFAEFLTVQTGGTLYRITHTNDIVPRLPPREFGYSHSSPEYWIKSGTLVPVRRRDIVKIEGIDATGGNNQPNIPGITAHLWYFGLIGTC

SEQ ID NO: 13915 - protein, 268 aa, Thermomyces lanuginosus
EYSQDLFNQFNLFAQYSAAAYCGKNNDAPAGTKITCTGNACPEVEKADATILYSFEDSGVGDVTGFLALDNTNKLIVLSFRGSRSIENWIGNLNFDLKEINDICSGCRGHDGFTSSWRSVADTLRQKVEDAVREHPDYRVVFTGHSLGGALATVAGADLRGNGYDIDVFSYGAPRVGNRAFAEFLTVQTGGTLYRITNTNDIVPRLPPREFGYSHSSPEYWIKSGTLVPVRRRDIVKIEGIDATGGNNQPNIPDIPAHLWYFGLIGTC

SEQ ID NO: 13916 - protein, 268 aa, Thermomyces lanuginosus
EYSQDLFNQFNLFAQYSAAAYCGKNNDAPAGTKITCTGNACPEVEKADATILYSFEDSGVGDVTGFLALDNTNKLIVLSFRGSRSIENWIGNLNFDLKEINDICSGCRGHDGFTSSWRSVADTLRQKVEDAVREHPDYRVVFTGHSLGGALATVAGADLRGNGYDIDVFSYGAPRVGNRAFAEFLTVQTGGTLYRITHTNDIVPRLPPREFGYSHSSPEYWIKFGTLVPVRRRDIVKIEGIDATGGNNQPNIPDIPAHLWYFGLIGTC

SEQ ID NO: 13917 - protein, 268 aa, Thermomyces lanuginosus
EKSQDLFNQFNLFAQYSAAAYCGKNNDAPAGTKITCTGNACPEVEKADATVLYSFEDSGVGDVTGFLALDNTNKLIVLSFRGSRSIENWIGNLNFDLKEINDICSGCRGHDGFTSSWRSVADTLRQKVEDAVREHPDYRVVFTGHSLGGALATVAGADLRGNGYDIDVFSYGAPRVGNRAFAEFLTVQTGGTLYRITYTNDIVPRLPPREFGYSHSSPEYWIKSGTLVPVRRRDIVKIEGIDATGGNNQPNIPDIPAHLWYFGLIGTC

SEQ ID NO: 13918 - protein, 268 aa, Thermomyces lanuginosus
EVSQDLFNQFNLFAQYSAAAYCGKNNEAPAGTNITCTGNACPEVEKADATFLYSFEDMGVGDVTGFLALDNTNKLIVLSFRGSRSIENWIGNLNFDLKEINDICSGCRGHDGFTSSWRSVADTLRQKVEAAVREHPQYRVVFTGHSLGGALATVAGADLRGNPYDIDVFSYGAPRVGNRAFAEFLTVQTGGTLYRITHTNDIVPRLPPREFGYSHSSPEYWIKSGTLVPVTRQDIVKIEGIDATGGNNQPNIPDIPAHLWYFGRIGTC

SEQ ID NO: 13919 - protein, 268 aa, Thermomyces lanuginosus
EVSQDLFNQFNLFAQYSAAAYCGKNNRAPAGTNITCTGNACPEVEKADATFLYSFEDSGVGDVTGFLALDNTNKLIVLSFRGSRSIENWIGNLNFDLKEINDICSGCRGHAGFTSSWRSVADTLRQKVEDAVREHADYRVVFTGHSLGGALATVAGADLRGNGYDIDVFSYGAPRVGNRAFAEFLTVQTGGTLYRITHTNDIVPRLPPREFGYSHPSPEYWIKSGTGVPVTRNDIVKIEGIDATGGNNQPNIPDITAHLWYFGLIGTC

SEQ ID NO: 13920 - protein, 268 aa, Thermomyces lanuginosus
EYSQDLFNQFNLFAQYSAAAYCGKNNDAPAGTKITCTGNACPEVEKADATVLYSFEDSGVGDVTGFLALDNTNKLIVLSFRGSRSIENWIGNLNFDLKEINDICSGCRGHDGFTSSWRSVADTLRQKVEDAVREHPDYRVVFTGHSLGGALATVAGADLRGNGYDIDVFSYGAPRVGNRAFAEFLTVQTGGTLYRITHTNDIVPRLPPREFGYSHSSPEYWIKSGTLVPVRRRDIVKIEGIDATGGNNQPNIPDIPIHLWYFGLIGTC

SEQ ID NO: 13921 - protein, 268 aa, Thermomyces lanuginosus
EVSQDLFNQFNLFAQYSAAAYCGKNNDAPAGTNITCTGNACPEVEKADATILYSFEDSGVGDVTGFLALDNTNKLIVLSFRGSRSIENWIGNLNFDLKEINDICSGCRGHDGFTSSWRSVADTLRQKVEDAVREHPDYRVVFTGHSLGGALATVAGADLRGNGYDIDVFSYGAPRVGNRAFAEFLTVQTGGTLYRITNTNDIVPRLPPRQFGYSHSSPEYWIKSGTLPPVRRRDIVKIEGIDATGGNNQPNIPDIPAHLWYFGLIGTC

SEQ ID NO: 13922 - protein, 268 aa, Thermomyces lanuginosus
EVSQDLFNQFNLFAQYSKAAYCQKNNDAPAGTNITCTGNACPEVEKADATFLYSFEDSGVGDVTGFLALDNTNKQIILSFRGSRSIENWIGNLRFDLKEINDICSGCRGHDGFTSSWRSVADTLRQKVEDAVREHPDYRVVFTGHSLGGALATIAGADLRGNGYDIDVFSYGAPRVGNRAFAEFLTVQTGGTLYRITHTNDIVPRLPPREFGYSHSSPEYWIKSGTLVPVTRNDIVKIEGIDATGGNNQPNIPDIPAHLWYFGLIGTC

SEQ ID NO: 13923 - protein, 268 aa, Thermomyces lanuginosus
EVSQDLFNQFNLFAQYSAAAYCGKNNDAPAGTNITCTGNACPEVEKADATILYSFEDSGVGDVTGFLALDNTNKLIVLSFRGSRSIENWIGNLNFDLKEINDICSGCRGHDGFTSSWRSVADTLRQKVEDAVREHPDYRVVFTGHSLGGALATVAGADLRGDGYDIDVFSYGAPRVGNRAFAEFLTVQTGGTLYRITNTNDIVPRLPPREFGYSHSSPEYWIKSGTLPPVRRRDIVKIEGIDATGGNNQPNIPDIPAHLWYFGLIGTC

SEQ ID NO: 13924 - protein, 268 aa, Thermomyces lanuginosus
EVSQDLFNQFNLFAQYSAAAYCGKNNQAPAGTNITCTGNACPEVEKADATFLYSFEDMGVGDVTGFLALDNTNKRIVLSFRGSRSIENWIGNLNFDLKEINDICSGCRGHDGFTSSWRSVADTLRQKVEAAVREHPDYRVVFTGHSLGGALATVAGADLRGNGYDIDVFSYGAPRVGNRAFAEFLTTQTGGTLYRITHTNDIVPRLPPREFGYSHSSPEYWIKSGTLVPVTRNDIVKIEGIDATGGNNQPNQPDIPAHLWYFGLIGTC

SEQ ID NO: 13925 - protein, 268 aa, Thermomyces lanuginosus
EVSDDLFNQFKLFAQYSAAAYCGKNNQAPAGTNITCTGNACPEVEKADATFLYSFKDMGVGDVTGFLALDNTNKLIVLSFRGSRSIENWIGNLNFDLKEINDICSGCRGHDGFTSSWRSVADTLRQKVEDAVREHPDYRVVFTGHSLGGALATVAGADLRGNGYDIDVFSYGAPRVGNRAFAEFLTVQTGGTLYRITHTNDIVPRLPPREFGYSHSSPEYWIKSGTLVPVTRQDIVKIEGIDATGGNNQPNIPDIPAHLWYFGLIGTC

SEQ ID NO: 13926 - protein, 268 aa, Thermomyces lanuginosus
EVSQDLFNQFNLFAQYSAAAYCGKNNRAPAGTNITCTGNACPEVEKADATFLYSFEDSGVGDVTGFLALDNTNKLIVLSFRGSRSIENWIGNLNFDLKEINDICSGCRGHAGFTSSWRSVADTLRQKVEDAVREHPDYRVVFTGHSLGGALATVAGADLRGNGYDIDVFSYGAPRVGNRAFAEFLTIQTGGTLYRITHTNDIVPRLPPREFGYSHPSPEYWIKSGTGVPVTRNDIVKIEGIDATGGNNQPNIPDITAHLWYFGLIGTC

SEQ ID NO: 13927 - protein, 268 aa, Thermomyces lanuginosus
EKSQDLFNQFNLFAQYSAAAYCGKNNDAPAGTKITCTGNACPEVEKADATILYSFEDSGVGDVTGFLALDNTNKLIVLSFRGSRSIENWIGNLNFDLKEINDICSGCRGHDGFTSSWRSVADTLRQKVEDAVREHPDYRVVFTGHSLGGALATVAGADLRGNGYDIDVFSYGAPRVGNRAFAEFLTVQTGGTLYRITHTNDIVPRLPPREFGYSHSSPEYWIKSGTLPPVRRRDIVKIEGIDATGGNNQPNIPDIPAHLWYFGLIGTC

SEQ ID NO: 13928 - protein, 268 aa, Thermomyces lanuginosus
EVSQDLFNQFRLFAQYSAAAYCGKNNDAPAGTQITCTGNACPEVEKADATFLYSFEDSGVGDVTGFLALDNTNKLIVLSFRGSRSIENWITNLNFDLKEINDICSGCRGHDGFTSSWRSVADTLRQKVEDAVREHPDYRVVFTGHSLGGALATVAGADLRGNKYDIDVFSYGAPRVGNRAFAEFLTVQTGGTLYRITHTNDIVPRLPPREFGYSHSSPEYWIKSGTLVPVRRRDIVKIEGIDATGGNNQPNIPDIFAHLWYFGLIGTC

SEQ ID NO: 13929 - protein, 268 aa, Thermomyces lanuginosus
EVSQDLFNQFNLFAQYSAAAYCQKNNDAPAGTNITCTGNACPEVEKADATFLYSFKDSGVGDVTGFLALDNTNKQIVLSFRGSRSIENWIGNLNFDLKEINDICSGCRGHAGFTSSWRSVADTLRQKVEDAVREHPDYRVVFTGHSLGGALATVAWADLRGNGYDIDVFSYGAPRVGNRAFAEFLTNQTGGTLYRITHTNDIVPRLPPREFGYSHSSPEYWIKSGTLVPVTRNDIVKIEGIDATGGNNQPNIPDIPAHLWYFGRIGTC

SEQ ID NO: 13930 - protein, 268 aa, Thermomyces lanuginosus
EVSQDLFNQFNLFAQYSAAAYCGKNNDAPAGTNITCTGNICPEVEKADATFLYSFRDSGVGDVTGFLALDNTNKLIVLSFRGSRSIENWIGNLNFDLKEINDICSGCRGHDGFTSSWFSVADTLRQKVEDAVREHPDYRVVFTGHSLGGALATVAGADLRGNSYDIDVFSYGAPRVGNRAFAEFLTVQTGGTLYRITHTNDIVPRLPPREFGYSHSSPEYWIKSGTLVPVRRRDIVKIEGIDATGGNNQPNIPDIPAHLWYFGLIGTC

SEQ ID NO: 13931 - protein, 268 aa, Thermomyces lanuginosus
EKSQDLFNQFNLFAQYSAAAYCGKNNDAPAGTKITCTGNACPEVEKADATVLYSFEDSGVGDVTGFLALDNTNKLIVLSFRGSRSIENWIGNLNFDLKEINDICSGCRGHDGFTSSWRSVADTLRQKVEDAVREHPDYRVVFAGHSLGGALATVAGADLRGNGYDIDVFSYGAPRVGNRAFAEFLTVQTGGTLYRITHTNDIVPRLPPREFGYSHSSPEYWIKSGTLVPVRRRDIVKIEGIDATGGNNQPNIPDIPAHLWYFGLIGTC

SEQ ID NO: 13932 - protein, 268 aa, Thermomyces lanuginosus
EKSQDLFNQFNLFAQYSAAAYCGKNNDAPAGTKITCTGNACPEVEKADATILYSFEDSGVGDVTGFLALDNTNKLIVLSFRGSRSIENWIGNLNFDLKEINDICSGCRGHDGFTSSWRSVADTLRQKVEDAVREHPDYRVVFTGHSLGGALATVAGADLRGNGYDIDVFSYGAPRVGNRAFAEFLTVQTGGTLYRITHTNDIVPRLPPREFGYSHSSPEYWIKIGTLVPVRRRDIVKIEGIDATGGNNQPNIPDIPAHLWYFGLIGTC

SEQ ID NO: 13933 - protein, 268 aa, Thermomyces lanuginosus
EVSQDLFNQFNLFAQYSAAAYCGKNNQAPAGTNITCTGNACPEVEKADATFLYSFKDMGVGDVTGFLALDNTNKLIVLSFRGSRSIENWFGNLNFDLKEINDICSGCRGHDGFTSSWRSVADTLRQKVEDAVREHPDYRVVFTGHSLGGALATVAGADLRGNGYDIDVFSYGAPRVGNRAFAEFLTVQTGGTLYRITHTNDIVPRLPPREFGYSHSSPEYWIKSGTLVPVTRQDIVKIEGIDATGGNNQPNIPDITAHLWYFGLIGTC

SEQ ID NO: 13934 - protein, 268 aa, Thermomyces lanuginosus
EYSQDLFNQFNLFAQYSAAAYCGKNNDAPAGTKITCTGNACPEVEKADATILYSFEDSGVGDVTGFLALDNTNKLIVLSFRGSRSIENWIGNLNFDLKEINDICSGCRGHDGFTSSWRSVADTLRQKVEDAVREHPDYRVVFTGHSLGGALATVAGADLRGNGYDIDVFSYGAPRVGNRAFAEFLTVQTGGTLYRITHTNDIVPRLPPREFGYSHSSPEYWIKSGTLVPVRRRDIVKIEGIDATGGNNQPNIPDIPVHLWYFGLIGTC

SEQ ID NO: 13935 - protein, 268 aa, Thermomyces lanuginosus
EVSQDLFNQFNLFAQYSAAAYCGKNNDAPAGTQITCTGNACPEVEKADATFLYSFEDSGVGDVTGFLALDNTNKLIVLSFRGSRSIENWIQNLNFDLKEINDICSGCRGHDGFTSSWRSVADTLRQKVEDAVREHPDYRVVFTGHSLGGGLATVAGADLRGNGYDIDVFSYGAPRVGNRAFAEFLTVQTGGTLYRITHTNDIVPRLPPRQFGYSHSSPEYWIKSGTLVPVRRRDIVKIEGIDATGGNNQPNIPDAPAHLWYFGLIGTC

SEQ ID NO: 13936 - protein, 268 aa, Thermomyces lanuginosus
EVSQDLFNQFNLFAQYSAAAYCGKNNEAPAGTNITCTGNACPEVEKAQATFLYSFEDMGVGDVTGFLALDNTNKLIVLSFRGSRSIENWIGNLNFDLKEINDICSGCRGHDGFTSSWRSVADTLRQKVEAAVREHPDYRVVFTGHSLGGALATVAGADLRGNGYDIDVFSYGAPRVGNRAFAEFLTVQTGGTLYRITHTNDIVPRLPPREFGYSHSSPEYWIKSGTMVPVTRQDIVKIEGIDATGGNNQPNIPDIPAHLWYFGLIGTC

SEQ ID NO: 13937 - protein, 268 aa, Thermomyces lanuginosus
EVSQDLFNQFNLFAQYSKAAYCGKNNDAPAGTNITCTGNACPEVEKADATFLYSFEDSGVGDVTGFLALDNTNKQIVLSFRGSRSIENWIGNLNFDLKEINDICSGCRGHAGFTSSWRSVADTLRQKVEDAVREHPDYRVVFTGHSLGGALATIAWADLRGNGYDIDVFSYGAPRVGNRAFAEFLTNQTGGTLYRITHTNDIVPRLPPREFGYSHSSPEYWIKSGTLVPVTRNDIVKIEGIDATGGNNQPNIPDIPAHLWYFGLIGTC

SEQ ID NO: 13938 - protein, 268 aa, Thermomyces lanuginosus
EVSQDLFNQFRLFAQYSAAAYCGKNNDAPAGTQITCTGNACPEVEKADATFLYSFEDSGVGDVTGFLALDNTNKLIVLSFRGSRSIENWITNLNFDLKEINDICSGCRGHDGFTSSWRSVADTLRQKVEDAVREHPDYRVVFTGHSLGGALATVAGADLRGNKYDIDVFSYGAPRVGNRAFAEFLTVQTGGTLYRITHTNDIVPRLPPREFGYSHSSPEYWIKSGTLVPVRRRDIVKIEGIDATGGNNQPNIPIIPAHLWYFGLIGTC

SEQ ID NO: 13939 - protein, 268 aa, Thermomyces lanuginosus
EVSQDLFNQFNLFAQYSAAAYCQANNDAPAGTNITCTGNACPEVEKADATFLYSFEDSGVGDVTGFLALDNTNKQIVLSFRGSRSIENWIGNLNFDLKEINDICSGCRGHDGFTSSWRSVADTLRQKVEAAVREHPDYRVVFTGHSLGGALATIAGADLRGNGYDIDVFSYGAPRVGNRAFAEFLTNQTGGTLYRITHTNDIVPRLPPREFGYSHSSPEYWIKSGTLVPVTRNDIVKIEGIDATGGNNQPNIPDIPAHLWYFGLIGTC

SEQ ID NO: 13940 - protein, 268 aa, Thermomyces lanuginosus
EVSQDLFNQFNLFAQYSAAAYCGKNNDAPAGTNITCTGNACPEVFKADVTFLYSFEDSGVGDVTGFLALDNTNKQIILSFRGSRSIENWIGNLNFDLKEINDICSGCRGHDGFTSSWRSVADTLRQKVEDAVREHPDYRVVFTGHSLGGALATVAGADLRGNGYDIDVFSYGAPRVGNRAFAEFLTTQDGGTLYRITHTNDIVPRLPPREFGYSHSSPEYWIKSGTLVPVTRNDIVKIEGIDATGGNNQPNIPDIPAHLWYFGLIGTC

SEQ ID NO: 13941 - protein, 268 aa, Thermomyces lanuginosus
EVSQDLFNQFNLFAQYSAAAYCGKNNRAPAGTKITCTCNACPEVEKADATFLYSFEDSGVGDVTGFLALDNTNKLIVLSFRGSRSIENWIGNLNFRLKEINDICSGCRGHAGFTSSWRSVADTLRQKVEDAVREHPDYRVVFTGHSLGGALATVAGADLRGNGYDIDVFSYGAPRVGNRAFAEFLTVQTGGTLYRITHTNDIVPRLPPREFGYSHSSPEYWIKSGTLVPVERRDIVKIEGIDATGGNNQPNIPDIPAHLWYFGLIGTC

SEQ ID NO: 13942 - protein, 268 aa, Thermomyces lanuginosus
EVSQDLFNQFNLFAQYSAAAYCGKNNRAPAGTNITCTGNACPEVEKADATFLYSFEDSGNGDVTGFLALDNTNKLIVLSFRGSRSIENWIGNLNFDLKEINDICSGCRGHAGFTSSWRSVADTLRQKVEDAVREHPDYRVVFTGHSLGGALATVAGADLRGNGYDIDVFSYGAPRVGNRAFAEFLTVQTGGTLYRITHTNDIVPRLPPREFGYSHPSPEYWIKSGTGVPVTRNDIVKIEGIDATGGNNQPNIPDITAHLWYFGLIGTC

SEQ ID NO: 13943 - protein, 268 aa, Thermomyces lanuginosus
EVSQDLFNQFNLFAQYSAAAYCGKNNDAPAGTQITCTGNACPEVEKADATFLYSFEDSGVGDVTGFLALDNTNKLIVLSFRGSRSIENWIQNLNFDLKEINDICSGCRGHDGFTSSWRSVADTLRQKVEDAVREHPDYRVVFAGHSLGGALATVAGADLRGNGYDIDVFSYGAPRVGNRAFAEFLTVQTGGTLYRITHTNDIVPRLPPRQFGYSHSSPEYWIKSGTLVPVRRRDIVKIEGIDATGGNNQPNIPDAPAHLWYFGLIGTC

SEQ ID NO: 13944 - protein, 268 aa, Thermomyces lanuginosus
EKSQDLFNQFNLFAQYSAAAYCGKNNDAPAGTKITCTGNACPEVEKADATILYSFEDSGVGDVTGFLALDNTNKLIVLSFRGSRSIENWIGNLNFDLKEINDICSGCRGHDGFTSSWRSVADTLRQKVEDAVREHPDYRVVFTGHSLGGALATVAGADLRGNGYDIDVFSYGAPRVGNRAFAEFLTVQTGGTLYRITHTNDIVPRLPPREFGYSHSSPEYWIKSGTLVPVRRRDIVKIEGIDATGGNNQPNIPDIPVHLWYFGLIGTC

SEQ ID NO: 13945 - protein, 268 aa, Thermomyces lanuginosus
EVSQDLFNQFKLFAQYSAAAYCGKNNNAPAGTNITCTGNACPEVEKADATFLYSFKDMGVGDVTGFLALDNTNKLIVLSFRGSRSIENWFGNLNFDLKEINDICSGCRGHDGFTSSWRSVADTLRQKVEDAVREHPDYRVVFTGHSLGGALATVAGADLRGNGYDIDVFSYGAPRVGNRAFAEFLTVQTGGTLYRITHTNDIVPRLPPREFGYSHSSPEYWIKSGTLVPVTRNDIVKIEGIDATGGNNQPNIPDITAHLWYFGLIGTC

SEQ ID NO: 13946 - protein, 268 aa, Thermomyces lanuginosus
EVSQDLFNQFNLFAQYSAAAYCGKNNEAPAGTNITCTGNACPEVEKADATFLYSFEDSGVGDVTGFLALDNTNKLIVLSFRGSRSIENWIGNLNFDLKEINDICSGCRGHDGFTSSWRSVADTLRQKVEAAVREHPQYRVVFTGHSLGGALATVAGADLRGNPYDIDVFSYGAPRVGNRAFAEFLTVQTGGTLYRITHTNDIVPRLPPREFGYSHSSPEYWIKSGTMVPVTRQDIVKIEGIDATGGNNQPNIPDIPAHLWYFGRIGTC

SEQ ID NO: 13947 - protein, 268 aa, Thermomyces lanuginosus
EYSQDLFNQFNLFAQYSAAAYCGKNNDAPAGTKITCTGNACPEVEKADATVLYSFEDSGVGDVTGFLALDNTNKLIVLSFRGSRSIENWIGNLNFDLKEINDICSGCRGHDGFTSSWRSVADTLRQKVEDAVREHPDYRVVFTGHSLGGALATVAGADLRGNGYDIDVFSYGAPRVGNRAFAEFLTVQTGGTLYRITHTNDIVPRLPPREFGYSHSSPEYWIKSGTLVPRRRRDIVKIEGIDATGGNNQPNIPDIPAHLWYFGLIGTC

SEQ ID NO: 13948 - protein, 268 aa, Thermomyces lanuginosus
EVSQDLFNQFNLFAQYSAAAYCGKNNDAPAGTQITCTGNACPEVEKADATFLYSFEDSGVGDVTGFLALDNTNKLIVLSFRGSRSIENWITNLNFDLKEINDICSGCRGHDGFISSWRSVADTLRQKVEDAVREHPDYRVVFTGHSLGGALATVAGADLRGNKYDIDVFSYGAPRVGNRAFAEFLTVQTGGTLYRITHTNDIVPRLPPRDFGYSHSSPEYWIKSGTLVPVRRRDIVKIEGIDATGGNNQPNIPDIPAHLWYFGLIGTC

SEQ ID NO: 13949 - protein, 268 aa, Thermomyces lanuginosus
EVSDDLFNQFLLFAQYSAAAYCGKNNNAPAGTNITCTGNACPEVEKADATFLYSFEDMGVGDVTGFLALDNTNKLIVLSFRGSRSIENWIGNLNFDLKEINDICSGCRGHDGFTSSWRSVADTLRQKVEDAVREHPDYRVVFTGHSLGGALATVAGADLRGNGYDIDVFSYGAPRVGNRAFAEFLTVQTGGTLYRITHTNDIVPRLPPREFGYSHSSPEYWIKSGTLVPVTRQDIVKIEGIDATGGNNQPNIPDITAHLWYFGLIGTC

SEQ ID NO: 13950 - protein, 268 aa, Thermomyces lanuginosus
EVSQDLFNQFNLFAQYSAAAYCGKNNDAPAGTNITCTGNACPEVEKADATFLYSFRDSGVGDVTGFLALDNTNKLIVLSFRGSRSIENWIADLNFILIEINDICSGCRGHDGFTSSWFSVADTLRQKVEDAVREHPDYRVVFTGHSLGGALATVAGADLRGNGYDIDVFSYGAPRVGNRAFAEFLTVQTGGTLYRITHTNDIVPRLPPREFGYSHSSPEYWIKSGTLVPVRRRDIVKIEGIDATGGNNQPNIPSVPAHLWYFGAIGTC

SEQ ID NO: 13951 - protein, 268 aa, Thermomyces lanuginosus
EVSQDLFNQFNLFAQYSAAAYCGKNNDAPAGTNITCTGNACPEVEKADATFLYSFRDSGVGDVTGFLALDNTNKLIVLSFRGSRSIENWIADLNFILIEINDICSGCRGHDGFTSSWFSVADTLRQKVEDAVREHPDYRVVFTGHSLGGALATVAGADLRGNGYDIDVFSYGAPRVGNRAFAEFLTVQTGGTLYRITHTNDIVPRLPPREFGYSHSSPEYWIKSGTLVPVRRRDIVKIEGIDATGGNNQPNIPGIRAHLWYFGAIGTC

SEQ ID NO: 13952 - protein, 268 aa, Thermomyces lanuginosus
EVSQDLFNQFNLFAQYSAAAYCGKNNDAPAGTNITCTGNACPEVEKADATFLYSFRDSGVGDVTGFLALDNTNKLIVLSFRGSRSIENWIADLNFILIEINDICSGCRGHDGFTSSWFSVADTLRQKVEDAVREHPDYRVVFTGHSLGGALATVAGADLRGNGYDIDVFSYGAPRVGNRAFAEFLTVQTGGTLYRITHTNDIVPRLPPREFGYSHSSPEYWIKSGTLVPVRRRDIVKIEGIDATGGNNQPNIPTINAHLWYFGAIGTC

SEQ ID NO: 13953 - protein, 268 aa, Thermomyces lanuginosus
EVSQDLFNQFNLFAQYSAAAYCGKNNDAPAGTNITCTGNACPEVEKADATFLYSFRDSGVGDVTGFLALDNTNKLIVLSFRGSRSIENWIADLNFILIEINDICSGCRGHDGFTSSWFSVADTLRQKVEDAVREHPDYRVVFTGHSLGGALATVAGADLRGNGYDIDVFSYGAPRVGNRAFAEFLTVQTGGTLYRITHTNDIVPRLPPREFGYSHSSPEYWIKSGTLVPVRRRDIVKIEGIDATGGNNQPNIPLISAHLWYFGAIGTC

SEQ ID NO: 13954 - protein, 268 aa, Thermomyces lanuginosus
EVSVDLFNQFNLFAQYSAAAYCGKNNDAPAGTNITCTGNACPEVEKADATFLYSVEDSGVGDVTGFLALDNTNKLIVLSFRGSRSVENWIGNLNFDLKEINDICSGCRGHDGFTSSWRSVADTLRQKVEDAVREHPDYRVVFTGHSLGGALATVAGADLRGNGYDIDVFSYGAPRVGNRAFAEFLTVQTGGTLYRITHTNDIVPRLPPREFGYSHSSPEYWIKSGTLVPVRRRDIVKIEGIDATGGNNQPNIPDVPAHLWYFGLIGTC

SEQ ID NO: 13955 - protein, 268 aa, Thermomyces lanuginosus
EVSQDLFNQFNLFAQYSAAAYCGKNNDAPAGTNITCTGNACPEVEKADATFLYSFRDSGVGDVTGFLALDNTNKLIVLSFRGSRSIENWIADLNFILIEINDICSGCRGHDGFTSSWFSVADTLRQKVEDAVREHPDYRVVFTGHSLGGALATVAGADLRGNGYDIDVFSYGAPRVGNRAFAEFLTVQTGGTLYRITHTNDIVPRLPPREFGYSHSSPEYWIKSGTLVPVRRRDIVKIEGIDATGGNNQPNIPSIRAHLWYFGAIGTC

SEQ ID NO: 13956 - protein, 268 aa, Thermomyces lanuginosus
EVSVDLFNQFNLFAQYSAAAYCGKNNDAPAGTNITCTGNACPEVEKADATFLYSFEDSGKGDVTGFLALDNTNKLIVLSFRGSRSIENWRGNLNFDLKEINDICSGCRGHDGFTSSWRSVADTLRQKVEDAVREHPDYRVVFTGHSLGGALATVAGADLRGNGYDIDVFSYGAPRVGNRAFAEFLTVQTGGTLYRITHTNDIVPRLPPREFGYSHSSPEYWIKSGTLVPVRRRDIVKIEGIDATGGNNQPNIPDVPAHLWYFGLIGTC

SEQ ID NO: 13957 - protein, 268 aa, Thermomyces lanuginosus
EVSQDLFNQFNLFAQYSAAAYCGKNNDAPAGTNITCTGNACPEVEKADATFLYSFRDSGVGDVTGFLALDNTNKLIVLSFRGSRSIENWIADLNFILIEINDICSGCRGHDGFTSSWFSVADTLRQKVEDAVREHPDYRVVFTGHSLGGALATVAGADLRGNGYDIDVFSYGAPRVGNRAFAEFLTVQTGGTLYRITHTNDIVPRLPPREFGYSHSSPEYWIKSGTLVPVRRRDIVKIEGIDATGGNNQPNIPSIGAHLWYFGAIGTC

SEQ ID NO: 13958 - protein, 268 aa, Thermomyces lanuginosus
EVSQDLFNQFNLFAQYSAAAYCGKNNDAPAGTNITCTGNACPEVEKADATFLYSFEDNGSGDVTGFLALDNTNKLIVLSFRGSRSPENWIGNLNFDLKEINDICSGCRGHDGFTSSWRSVADTLRQKVEDAVREHPDYRVVFTGHSLGGALATVAGADLRGNGYDIDVFSYGAPRVGNRAFAEFLTVQTGGTLYRITHTNDIVPRLPPREFGYSHSSPEYWIKSGTLVPVRRRDIVKIEGIDATGGNNQPNIPDISAHLWYFGLIGTC

SEQ ID NO: 13959 - protein, 268 aa, Thermomyces lanuginosus
EVSQDLFNQFNLFAQYSAAAYCGKNNDAPAGTNITCTGNACPEVEKADATFLYSFRDSGVGDVTGFLALDNTNKLIVLSFRGSRSIENWIADLNFILIEINDICSGCRGHDGFTSSWFSVADTLRQKVEDAVREHPDYRVVFTGHSLGGALATVAGADLRGNGYDIDVFSYGAPRVGNRAFAEFLTVQTGGTLYRITHTNDIVPRLPPREFGYSHSSPEYWIKSGTLVPVRRRDIVKIEGIDATGGNNQPNIPSILAHLWYFGAIGTC

SEQ ID NO: 13960 - protein, 268 aa, Thermomyces lanuginosus
EVSQDLFNQFNLFAQYSAAAYCGKNNDAPAGTNITCTGNACPEVEKADATFLYSFRDSGVGDVTGFLALDNTNKLIVLSFRGSRSLENWIADLNFHLQEINDICSGCRGHDGFTSSWFSVADTLRQKVEDAVREHPDYRVVFTGHSLGGALATVAGADLRGNGYDIDVFSYGAPRVGNRAFAEFLTVQTGGTLYRITHTNDIVPRLPPREFGYSHSSPEYWIKSGTLVPVRRRDIVKIEGIDATGGNNQPNIPSIPAHLWYFGAIGTC

SEQ ID NO: 13961 - protein, 268 aa, Thermomyces lanuginosus
EVSQDLFNQFNLFAQYSAAAYCGKNNDAPAGTNITCTGNACPEVEKADATFLYSFEDXGVGDVTGFLALDNTNKLIVLSFRGSRSXENWIGNLNFDLKEINDICSGCRGXDGFTSSWRSVADTLRQKVEDAVREHPDYRVVFTGXSLGGALATVAGADLRGNGYDIDVFSYGAPRVGNRAFAEFLTVQTGGTLYRITXTNDIVPRLPPREFGYXHSSPEYWIKSGTLVPVTRNDIVKIEGIDATGGNNQPNIPDIPAHLWYFGLIGTC

SEQ ID NO: 13962 - protein, 268 aa, Thermomyces lanuginosus
EVSQDLFNQFNLFAQYSAAAYCGKNNDAPAGTNITCTGNACPEVEKADATFLYSFRDSGVGDVTGFLALDNTNKLIVLSFRGSRSIENWIADLEFILIEINDICSGCRGHDGFTSSWFSVADTLRQKVEDAVREHPDYRVVFTGHSLGGALATVAGADLRGNGYDIDVFSYGAPRVGNRAFAEFLTVQTGGTLYRITHTNDIVPRLPPREFGYSHSSPEYWIKSGTLVPVRRRDIVKIEGIDATGGNNQPNIPSIPAHLWYFGAIGTC

SEQ ID NO: 13963 - protein, 268 aa, Thermomyces lanuginosus; identical to SEQ ID NO: 8932

SEQ ID NO: 13964 - protein, 268 aa, Thermomyces lanuginosus
EVSQDLFNQFNLFAQYSAAAYCGKNNDAPAGTNITCTGNACPEVEKADATFLYSFEDSGVGDVTGFLALDNTNKLIVLSFRGTRSITNWILDLNYTPQEINDICSGCRGHDGFTSSWRSVADTLRQKVEDAVREHPDYRVVFTGHSLGGALATVAGADLRGNGYDIDVFSYGAPRVGNRAFAEFLTVQTGGTLYRITHTNDIVPRLPPREFGYSHSSPEYWIKSGTLVPVTRNDIVKIEGIDATGGNNQPNIPDIPAHLWYFGLIGTC

SEQ ID NO: 13965 - protein, 268 aa, Thermomyces lanuginosus
EVSQDLFNQFNLFAQYSAAAYCGKNNDAPAGTNITCTGNACPEVEKADATFLYSFEDTGKGDVTGFLALDNTNKLIVLSFRGSRSIENWIGNLNFDLKEINDICSGCRGHDGFTSSWRSVADTLRQKVEDAVREHPDYRVVFTGHSLGGGLATVAGADLRGNGYDIDVFSYGAPRVGNRAFAEFLTVQTGGTLYRITHTNDIVPRLPPREFGYSHSSPEYWIKSGTLVPVRRIGIVKIEGIDATGGNNQPNIPDIPAHLWYFGLIGTC

SEQ ID NO: 13966 - protein, 268 aa, Thermomyces lanuginosus
EVSQDLFNQFNLFAQYSAAAYCGKNNDAPAGTNITCTGNACPEVEKADATFLYSFEDSGVGDVTGFLALDNTNKLIVLSFRGSRSPANWIANLDFIFDEINDICSGCRGHDGFTSSWRSVADTLRQKVEDAVREHPDYRVVFTGHSLGGALATVAGADLRGNGYDIDVFSYGAPRVGNRAFAEFLTVQTGGTLYRITHTNDIVPRLPPREFGYSHSSPEYWIKSGTLVPVRRRDIVKIEGIDATGGNNQPNIPDIPAHLWYFGLIGTC

SEQ ID NO: 13967 - protein, 268 aa, Thermomyces lanuginosus
EVSQDLFNQFNLFAQYSAAAYCGKNNDAPAGTNITCTGNACPEVEKADATFLYSFRDSGVGDVTGFLALDNTNKLIVLSFRGSRSIENWIADLNFILIEINDICSGCRGHDGFTSSWFSVADTLRQKVEDAVREHPDYRVVFTGHSLGGALATVAGADLRGNGYDIDVFSYGAPRVGNRAFAEFLTVQTGGTLYRITHTNDIVPRLPPREFGYSHSSPEYWIKSGTLVPVRRRDIVKIEGIDATGGNNQPNIPSITAHLWYFGAIGTC

SEQ ID NO: 13968 - protein, 268 aa, Thermomyces lanuginosus
EVSQDLFNQFNLFAQYSAAAYCGKNNDAPAGTNITCTGNACPEVEKADATFLYSFEDAGAGDVTGFLALDNTNKLIVLSFRGSRSVENWIGNLNFDLKEINDICSGCRGHDGFTSSWRSVADTLRQKVEDAVREHPDYRVVFTGHSLGGGLATVAGADLRGNGYDIDVFSYGAPRVGNRAFAEFLTVQTGGTLYRITHTNDIVPRLPPREFGYSHSSPEYWIKSGTLVPVRRRDIVKIEGIDATGGNNQPNIPDIPAHLWYFGLIGTC

SEQ ID NO: 13969 - protein, 268 aa, Thermomyces lanuginosus
EVSQDLFNQFNLFAQYSAAAYCGKNNDAPAGTNITCTGNACPEVEKADATFLYSFRDSGVGDVTGFLALDNTNKLIVLSFRGSRSIENWIADLNFILIEINDICSGCRGHDGFTSSWFSVADTLRQKVEDAVREHPDYRVVFTGHSLGGALATVAGADLRGNGYDIDVFSYGAPRVGNRAFAEFLTVQTGGTLYRITHTNDIVPRLPPREFGYSHSSPEYWIKSGTLVPVRRRDIVKIEGIDATGGNNQPNIPSISAHLWYFGAIGTC

SEQ ID NO: 13970 - protein, 268 aa, Thermomyces lanuginosus
EVSQDLFNQFNLFAQYSAAAYCGKNNDAPAGTNITCTGNACPEVEKADATFLYSFRDSGVGDVTGFLALDNTNKLIVLSFRGSRSIENWIADLNFILIEINDICSGCRGHDGFTSSWFSVADTLRQKVEDAVREHPDYRVVFTGHSLGGALATVAGADLRGNGYDIDVFSYGAPRVGNRAFAEFLTVQTGGTLYRITHTNDIVPRLPPREFGYSHSSPEYWIKSGTLVPVRRRDIVKIEGIDATGGNNQPNIPGLPAHLWYFGAIGTC

SEQ ID NO: 13971 - protein, 268 aa, Thermomyces lanuginosus
EVSQDLFNQFNLFAQYSAAAYCGKNNDAPAGTNITCTGNACPEVEKADATFLYSFRDSGVGDVTGFLALDNTNKLIVLSFRGSRSIENWIADLNFILIEINDICSGCRGHDGFTSSWFSVADTLRQKVEDAVREHPDYRVVFTGHSLGGALATVAGADLRGNGYDIDVFSYGAPRVGNRAFAEFLTVQTGGTLYRITHTNDIVPRLPPREFGYSHSSPEYWIKSGTLVPVRRRDIVKIEGIDATGGNNQPNIPSIPAHLWYFGPIGTC

SEQ ID NO: 13972 - protein, 268 aa, Thermomyces lanuginosus
EVSQDLFNQFNLFAQYSAAAYCGKNNDAPAGTNITCTGNACPEVEKADATFLYSFRDSGVGDVTGFLALDNTNKLIVLSFRGSRSIENWIADLNFILIEINDICSGCRGHDGFTSSWFSVADTLRQKVEDAVREHPDYRVVFTGHSLGGALATVAGADLRGNGYDIDVFSYGAPRVGNRAFAEFLTVQTGGTLYRITHTNDIVPRLPPREFGYSHSSPEYWIKSGTLVPVRRRDIVKIEGIDATGGNNQPNIPSIQAHLWYFGAIGTC

SEQ ID NO: 13973 - protein, 268 aa, Thermomyces lanuginosus
EVSQDLFNQFNLFAQYSAAAYCGKNNDAPAGTNITCTGNACPEVEKADATFLYSFRDSGVGDVTGFLALDNTNKLIVLSFRGSRSIENWIADLNFILIEINDICSGCRGHDGFTSSWFSVADTLRQKVEDAVREHPDYRVVFTGHSLGGALATVAGADLRGNGYDIDVFSYGAPRVGNRAFAEFLTVQTGGTLYRITHTNDIVPRLPPREFGYSHSSPEYWIKSGTLVPVRRRDIVKIEGIDATGGNNQPNIPAIYAHLWYFGAIGTC

SEQ ID NO: 13974 - protein, 268 aa, Thermomyces lanuginosus
EVSQDLFNQFNLFAQYSAAAYCGKNNDAPAGTNITCTGNACPEVEKADATFLYSFEDAGVGDVTGFLALDNTNKLIVLSFRGSRSIENWIGNLNFDLKEINDICSGCRGRDGFTSSWRSVADTLRQKVEDAVREHPDYRVVFTGXSLGGALATVAGADLRGNGYDIDVFSYGAPRVGNRAFAEFLTVQTGGTLYRITXTNDIVPRLPPREFGYXXSSPEYWIKSGTLVPVTRNDIVKIEGIDATGGNNQPNIPDIPAHLWYFGLIGTC

SEQ ID NO: 13975 - protein, 268 aa, Thermomyces lanuginosus
EVSQDLFNQFNLFAQYSAAAYCGKNNDAPAGTNITCTGNACPEVEKADATFLYSFRDSGVGDVTGFLALDNTNKLIVLSFRGSRSIENWIADLNFILIEINDICSGCRGHDGFTSSWFSVADTLRQKVEDAVREHPDYRVVFTGHSLGGALATVAGADLRGNGYDIDVFSYGAPRVGNRAFAEFLTVQTGGTLYRITHTNDIVPRLPPREFGYSHSSPEYWIKSGTLVPVRRRDIVKIEGIDATGGNNQPNIPGVPAHLWYFGAIGTC

SEQ ID NO: 13976 - protein, 267 aa, Thermomyces lanuginosus
VSQDLFNQFNLFAQYSAAAYCGKNNDAPAGTQITCTANACPEVEKADATFLYSFEDSGVGDVTGFLALDNTNKLIVLSFRGSRSIENWITNLNFDLKEINDICSGCRGHDGFTSSWRSVADTLRQKVEDAVREHPDYRVVFTGHSLGGALATVAGADLRGNPYDIDVFSYGAPRFGNRAFAEFLTVQTGGTLYRITHTNDIVPRLPPREFGYSHSSPEYWIKSGTLVPVRRRDIVKIEGIDATGGNNQPNIPDIPAHLWYFGLIGTC

SEQ ID NO: 13977 - protein, 267 aa, Thermomyces lanuginosus
VSQDLFNQFNLFAQYSAAAYCGKNNRAPAGTNITCTGNACPEVEKADATILYSFRDSGVGDVTGFLALDNTNKLIVLSFRGSRSIENWIGNLNFDLEEINDICSGCRGHDGFTSSWRSVADTLRQKVEDAVREHPDYRVVFTGHSLGGALATVAGADLRGNGYDIDVFSYGAPRVGNRAFAEFLTVQTGGTLYRITHTNDIVPRLPPREFGYSHSSPEYWIKSGTLVPVRRCDIVKIEGIDATGGNNQPNIPDIPAHLWYFGLIGTC

SEQ ID NO: 13978 - protein, 267 aa, Thermomyces lanuginosus
VSQDLFNQFNLFAQYSAAAYCGKNNDAPAGTNITCTGNACPEVEKADATFLYSFEDSGVGDVTGFLALDNTNKLIVLSFRGSRSIENWIGNLNFDLKNISDICSGCRGHDGFTSSWRSVADTLRQKVEDAVREHPDYRVVFTGHSLGGALATVAGADLRGNGYDIDVFSYGAPRVGNRAFAEFLTVQTGGTLYRITHTNDIVPRLPPREFGYSHSSPEYWIKSGTLVPVKGNGIVKICGIDATGGNNRPNIPDIPAHLWYFGLIGTC

SEQ ID NO: 13979 - protein, 266 aa, Synthetic construct
SQQMFNQFNLFAQYSAAAYCGKNNDAPAGTNITCTGNACPEVEKADATFLYSFEGSGVGDVTGFLALDNTNKLIVLSFRGSRSIENWIGNLKFLMKEINDICSGCRGHDGFTSSWRSVADTLRQKVEDAVREHPDYRVVFTGHSLGGALATVAGADLRGNGYDIDVFSYGAPRVGNRAFAEFLTVQTGGTLYRITHTNDIVPRLPPREFGYSHSSPEYWIKSGTLVPVTRNDIVKIEGIDATGGNNRPNIPDIPAHLWYFGLIGTC

SEQ ID NO: 13980 - protein, 271 aa, Thermomyces lanuginosus
EVSQDLFNQFNLFAQYSAAAYCGKNNDAPAGTQITCTGNACPEVEKADATFLYSFEDSGVGDVTGFLALDNTNKLIVLSFRGSRSIENWIGNLNFDLKNISDICSGCRGHDGFTSSWRSVADTLRQKVEDAVREHPDYRVVFTGHSLGGALATVAGADLRGNGYDIDVFSYGAPRVGNRAFAEFLTVQTGGTLYRITHTNDIVPRLPPREFGYSHSSPEYWIKSGTLVPVRRRDIVKIEGIDATGGNNRPNIPDIPAHLWYFGLIGTCLPG

SEQ ID NO: 13981 - protein, 268 aa, Thermomyces lanuginosus
EVSQDLFNQFNLFAQYSAAAYCKANNDAPAGTNITCTGNACPEVEKADATFLYSFEDSGVGDVTGFLALDNTNKQIVLSFRGSRSIENWIGNLRFDLKEINDICSGCRGHDGFTSSWRSVADTLRQKVEDAVREHPDYRVVFTGHSLGGALATIAWADLRGNGYDIDVFSYGAPRVGNRAFAEFLTTQTGGTLYRITHTNDIVPRLPPREFGYSHSSPEYWIKSGTLVPVTRNDIVKIEGIDATGGNNQPNIPDIPAHLWYFGRIGTC

SEQ ID NO: 13982 - protein, 268 aa, Thermomyces lanuginosus
EVSQDLFNQFRLFAQYSAAAYCGKNNDAPAGTQITCTGNACPEVEKADATFLYSFEDSGVGDVTGFLALDNTNKLIVLSFRGSRSIENWITNLNFDLKEINDICSGCRGHDGFTLSWRSVADTLRQKVEDAVREHPDYRVVFTGHSLGGALATVAGADLRGNKYDIDVFSYGAPRVGNRAFAEFLTVQTGGTLYRITHTNDIVPRLPPREFGYSHSSPEYWIKSGTLVPVRRRDIVKIEGIDATGGNNQPNIPSIPAHLWYFGLIGTC

SEQ ID NO: 13983 - protein, 268 aa, Thermomyces lanuginosus
EVSRDLFNQFNLFAQYSAAAYCGKNNDAPAGTNITCTGNACPEVEKADATILYSFEDSGVGDVTGFLALDNTNKLIVLSFRGSRSIENWIGNLNFDLKEINDICSGCRGHDGFTSSWRSVADTLRQKVEDAVREHPDYRVVFAGHSLGGALATVAGADLRGNGYDIDVFSYGAPRVGNRAFAEFLTVQTGGTLYRITNTNDIVPRLPPREFGYSHSSPEYWIKSGTLPPVRRRDIVKIEGIDATGGNNQPNIPDIPAHLWYFGLIGTC

SEQ ID NO: 13984 - protein, 268 aa, Thermomyces lanuginosus
EVSQDLFNQFNLFAQYSAAAYCKKNNSAPAGTNITCTGNACPEVEKADATTLYSFEDMGVGDVTGFLALDNTNKQIVLSFRGSRSIENWIGNLNFDLKEINDICSGCRGHDGFTSSWRSVADTLRQKVEAAVREHPDYRVVFTGHSLGGALATVAGADLRGNGYDIDVFSYGAPRVGNRAFAEFLTNQTGGTLYRITHTNDIVPRLPPREFGYSHSSPEYWIKSGTLVPVTRNDIVKIEGIDATGGNNQPNIPDIPAHLWYFGLIGTC

SEQ ID NO: 13985 - protein, 268 aa, Thermomyces lanuginosus; identical to SEQ ID NO: 7753

SEQ ID NO: 13986 - protein, 268 aa, Thermomyces lanuginosus
EVSDDLFNQFKLFAQYSAAAYCGKNNNAPAGTNITCTGNACPEVEKADATFLYSFEDMGVGDVTGFLALDNTNKLIVLSFRGSRSIENWFGNLNFDLKEINDICSGCRGHDGFTSSWRSVADTLRQKVEDAVREHPDYRVVFTGHSLGGALATVAGADLRGNGYDIDVFSYGAPRVGNRAFAEFLTVQTGGTLYRITHTNDIVPRLPPREFGYSHSSPEYWIKSGTLVPVTRQDIVKIEGIDATGGNNQPNIPDITAHLWYFGLIGTC

SEQ ID NO: 13987 - protein, 268 aa, Thermomyces lanuginosus
EYSQDLFNQFNLFAQYSAAAYCGKNNDAPAGTKITCTGNACPEVEKADATLLYSFEDSGVGDVTGFLALDNTNKLIVLSFRGSRSIENWIGNLNFDLKEINDICSGCRGHDGFTSSWRSVADTLRQKVEDAVREHPDYRVVFTGHSLGGGLATVAGADLRGNGYDIDVFSYGAPRVGNRAFAEFLTVQTGGTLYRITHTNDIVPRLPPREFGYSHSSPEYWIKSGTLVPRRRRDIVKIEGIDATGGNNQPNIPDIPAHLWYFGLIGTC

SEQ ID NO: 13988 - protein, 268 aa, Thermomyces lanuginosus
EVSQDLFNQFNLFAQYSAAAYCSKNNDAPAGTNITCTGNACPEVEKADATFLYSFRDSGVGDVTGFLALDNTNKLIVLSFRGSRSIENWIGNLNFDLKEINDICSGCRGHDGFTSSWFSVADTLRQKVEDAVREHPDYRVVFTGHSLGGALATVAGADLRGNGYDIDVFSYGAPRVGNRAFAEFLTVQTGGTLYRITHTNDIVPRLPPREFGYSHSSPEYWIKSGTLVPVRRRDIVKIEGIDAEGGNNQPNIPDITAHLWYFGLIGTC

SEQ ID NO: 13989 - protein, 268 aa, Thermomyces lanuginosus
EVSQDLFNQFRLFAQYSAAAYCGKNNDAPAGTQITCKGNACPEVEKADATFLYSFEDSGVGDVTGFLALDNTNKLIVLSFRGSRSIENWITNLNFDLKEINDICSGCRGHDGFTSSWRSVADTLRQKVEDAVREHPDYRVVFTGHSLGGALATVAGADLRGNKYDIDVFSYGAPRVGNRAFAEFLTVQTGGTLYRITHTNDIVPRLPPREFGYSHSSPEYWIKSGTLVPVRRRDIVKIEGIDATGGNNQPNIPSIPAHLWYFGLIGTC

SEQ ID NO: 13990 - protein, 268 aa, Thermomyces lanuginosus
EVSQDLFNQFNLFAQYSKAAYCGANNDAPAGTNITCTGNACPEVEKADATFLYSFEDSGVGDVTGFLALDNTNKRIVLSFRGSRSIENWIGNLNFDLKEINDICSGCRGHDGFTSSWRSVADTLRQKVEAAVREHPDYRVVFTGHSLGGALATIAWADLRGNGYDIDVFSYGAPRVGNRAFAEFLTTQTGGTLYRITHTNDIVPRLPPREFGYSHSSPEYWIKSGTLVPVTRNDIVKIEGIDATGGNNQPNIPDIPAHLWYFGRIGTC

SEQ ID NO: 13991 - protein, 268 aa, Thermomyces lanuginosus
EVSQDLFNQFNLFAQYSAAAYCGKNNDAPAGTNITCTGNACPEVEKADATFLYSFEDSGKGDVTGFLALDNTNKLIVLSFRGSRSVENWIGNLNFDLKEINDICSGCRGHDGFTSSWRSVADTLRQKVEDAVREHPDYRVVFTGHSLGGGLATVAGADLRGNGYDIDVFSYGAPRVGNRAFAEFLTVQTGGTLYRITHTNDIVPRLPPREFGYSHSSPEYWIKSGTGVPVRRRDIVKIEGIDATGGNNQPNIPDIKAHLWYFGLIGTC

SEQ ID NO: 13992 - protein, 268 aa, Thermomyces lanuginosus
EVSQDLFNQFNLFAQYSAAAYCKKNNSAPAGTNITCTGNACPEVEKADATFLYSFKDMGVGDVTGFLALDNTNKRIVLSFRGSRSIENWIQNLNFDLKEINDICSGCRGHDGFTSSWRSVADTLRQKVEDAVREHPDYRVVFTGHSLGGALATVAGADLRGNGYDIDVFSYGAPRVGNRAFAEFLTNQTGGTLYRITHTNDIVPRLPPREFGYSHSSPEYWIKSGTLVPVTRNDIVKIEGIDATGGNNQPNQPDIPAHLWYFGLIGTC

SEQ ID NO: 13993 - protein, 268 aa, Thermomyces lanuginosus
EVSQDLFNQFNLFAQYSAAAYCGKNNDAPAGTNITCTGNACPEVEKADATLLYSFRDSGVGDVTGFLALDNTNKLIVLSFRGSRSIENWIGNLNFDLIEINDICSGCRGHDGFTSSWFSVADTLRQKVEDAVREHPDYRVVFTGHSLGGALATVAGADLRGNSYDIDVFSYGAPRVGNRAFAEFLTVQTGGTLYRITHTNDIVPRLPPREFGYSHSSPEYWIKSGTLVPVRRRDIVKIEGIDATGGNNQPNIPDIPAHLWYFGLIGTC

SEQ ID NO: 13994 - protein, 268 aa, Synthetic construct
EGSQQMFNQFNLFAQYSAAAYCGKNNDAPAGTNITCTGNACPEVEKADATFLYSFEGSGVGDVTGFLALDNTNKLIVLSFRGSRSIENWIGNLKFLMKEINDICSGCRGHDGFTSSWRSVADTLRQKVEDAVREHPDYRVVFTGHSLGGALATVAGADLRGNGYDIDVFSYGAPRVGNRAFAEFLTVQTGGTLYRITHTNDIVPRLPPREFGYSHSSPEYWIKSGTLVPVTRNDIVKIEGIDATGGNNRPNIPDIPAHLWYFGLIGTC

SEQ ID NO: 13995 - protein, 268 aa, Thermomyces lanuginosus
EVSQDLFNQFKLFAQYSAAAYCGKNNNAPAGTNITCTGNACPEVEKADATFLYSFKDMGVGDVTGFLALDNTNKLIVLSFRGSRSIENWFGNLNFDLKEINDICSGCRGHDGFTSSWRSVADTLRQKVEDAVREHPDYRVVFTGHSLGGALATVAGADLRGNGYDIDVFSYGAPRVGNRAFAEFLTVQTGGTLYRITHTNDIVPRLPPREFGYSHSSPEYWIKSGTLVPVTRQDIVKIEGIDATGGNNQPNIPDITAHLWYFGLIGTC

SEQ ID NO: 13996 - protein, 268 aa, Thermomyces lanuginosus
EVSQDLFNQFNLFAQYSAAAYCGKNNDAPAGTNITCTGNACPEVEKADATLLYSFRDSGVGDVTGFLALDNTNKLIVLSFRGSRSIENWIGNLNFDLKEINDICSGCRGHDGFTSSWFSVADTLRQKVEDAVREHPDYRVVFTGHSLGGALATVAGADLRGNSYDIDVFSYGAPRVGNRAFAEFLTVQTGGTLYRITHTNDIVPRLPPREFGYSHSSPEYWIKSGTLVPVRRRDIVKIEGIDATGGNNQPNIPDITAHLWYFGLIGTC

SEQ ID NO: 13997 - protein, 268 aa, Thermomyces lanuginosus
EVSQDLFNQFNLFAQYSAAAYCQKNNDAPAGTNITCTGNACPEVFKADATFLYSFEDSGVGDVTGFLALDNTNKQIILSFRGSRSIENWIGNLNFDLKEINDICSGCRGHDGFTSSWRSVADTLRQKVEDAVREHPDYRVVFTGHSLGGALATVAWADLRGNGYDIDVFSYGAPRVGNRAFAEFLTTQDGGTLYRITHTNDIVPRLPPREFGYSHSSPEYWIKSGTLVPVTRNDIVKIEGIDATGGNNQPNIPDIPAHLWYFGLIGTC

SEQ ID NO: 13998 - protein, 268 aa, Thermomyces lanuginosus
EVSQDLFNQFNLFAQYSAAAYCGKNNDAPAGTNITCTGNACPEVEKADATFLYSFEDSGKGDVTGFLALDNTNKLIVLSFRGSRSIENWIGNLNFDLKEINDICSGCRGHDGFTSSWRSVADTLRQKVEDAVREHPDYRVVFTGHSLGGALATVAGADLRGNGYDIDVFSYGAPRVGNRAFAEFLTVQTGGTLYRITHTNDVVPRLPPRKFGYSHSSPEYWIKSGTLVPVRRRDIVKIEGIDATGGNNQPNIPDAKAHLWYFGLIGTC

SEQ ID NO: 13999 - protein, 268 aa, Thermomyces lanuginosus
EVSQDLFNQFNLFAQYSAAAYCGKNNDAPAGTNITCTGNICPEVEKADATFLYSFRDSGVGDVTGFLALDNTNKLIVLSFRGSRSIENWIGNLNFDLKEINDICSGCRGHDGFTSSWFSVADTLRQKVEDAVREHPDYRVVFTGHSLGGALATVAGADLRGNGYDIDVFSYGAPRVGNRAFAEFLTVQTGGTLYRITHTNDIVPRLPPREFGYSHSSPEYWIKSGTLVPVRRRDIVKIEGIDAEGGNNQPNIPDITAHLWYFGLIGTC

SEQ ID NO: 14000 - protein, 268 aa, Thermomyces lanuginosus
EVSQDLFNQFNLFAQYSAAAYCGKNNDAPAGTNITCTGNACPEVEKADATLLYSFRNSGVGDVTGFLALDNTNKLIVLSFRGSRSIENWIGNLNFDLKEINDICSGCRGHDGFTSSWFSVADTLRQKVEDAVREHPDYRVVFTGHSLGGALATVAGADLRGNGYDIDVFSYGAPRVGNRAFAEFLTVQTGGTLYRITHTNDIVPRLPPREFGYSHSSPEYWIKSGTLVPVRRRDIVKIEGIDATGGNNQPNIPDITAHLWYFGLIGTC

SEQ ID NO: 14001 - protein, 268 aa, Thermomyces lanuginosus
EVSQDLFNQFNLFAQYSAAAYCGKNNRAPAGTNITCTGNACPEVEKADATFLYSFEDSGVGDVTGFLALDNTNKLIVLSFRGSRSIENWITNLNFELKEINDICSGCRGHAGFTSSWRSVADTLRQKVEDAVREHPDYRVVFTGHSLGGALATVAGADLRGNKYDIDVFSYGAPRVGNRAFAEFLTVQTGGTLYRITHTNDIVPRLPPREFGYSHSSPEYWIKSGTLVPVRRRDIVKIEGIDATGGNNQPNIPSITAHLWYFGLIGTC

SEQ ID NO: 14002 - protein, 268 aa, Thermomyces lanuginosus
EVSQDLFNQFNLFAQYSAAAYCGKNNDAPAGTKITCTGNACPEVEKADATLLYSFEDSGVGDVTGFLALDNTNKLIVLSFRGSRSIENWIGNLNFDLEEIDDICSGCRGHDGFTSSWRSVADTLRQKVEDAVREHPDYRVVFTGHSLGGALATVAGADLRGNGYDIDVFSYGAPRVGNRAFAEFLTVQTGGTLYRITSTNDIVPRLPPREFGYSHSSPEYWIKSGTLVPVRRRDIVKIEGIDATGGNNQPNIPDIPAHLWYFGLIGTC

SEQ ID NO: 14003 - protein, 268 aa, Thermomyces lanuginosus
EVSQDLFNQFNLFAQYSAAAYCGKNNDAPAGTNITCTGNACPEVEKADATFLYSFEDSGVGDVTGFLALDNTNKLIVLSFRGSRSIENWIGNLNFDLKEINDICSGCRGHDGFTSSWRSVADTLRQKVEDAVREHPDYRVVFTGHSLGGALATVAGADLRGNGYDIDVFSYGAPRVGNRAFAEFLTVQTGGTLYRITHTNDIVPRLPPREFGYSHSSPEYWIKSGTLVPVTRNDIVKIEGIDALGGNGGTLGLDIPAHLWYFGLIGTC

SEQ ID NO: 14004 - protein, 268 aa, Thermomyces lanuginosus
EVSQDLFNQFNLFAQYSAAAYCGKNNRAPAGTNITCTANACPEVEKADATFLYSFEDSGVGDVTGFLALDNTNKLIVLSFRGSRSIENWIGNLNFELKEINDICSGCRGHAGFTSSWRSVADTLRQKVEDAVREHPDYRVVFTGHSLGGALATVAGADLRGNKYDIDVFSYGAPRVGNRAFAEFLTVQTGGTLYRITHTNDIVPRLPPREFGYSHSSPEYWIKSGTLVPVRRRDIVKIEGIDATGGNNQPNIPSIPAHLWYFGLIGTC

SEQ ID NO: 14005 - protein, 268 aa, Thermomyces lanuginosus
EVSQDLFNQFNLFAQYSAAAYCQKNNQAPAGTNITCTGNACPEVEKADATTLYSFEDMGVGDVTGFLALDNTNKRIVLSFRGSRSIENWIGNLNFDLKEINDICSGCRGHDGFTSSWRSVADTLRQKVEAAVREHPDYRVVFTGHSLGGALATVAGADLRGNGYDIDVFSYGAPRVGNRAFAEFLTTQTGGTLYRITHTNDIVPRLPPREFGYSHSSPEYWIKSGTLVPVTRNDIVKIEGIDATGGNNQPNIPDIPAHLWYFGRIGTC

SEQ ID NO: 14006 - protein, 268 aa, Thermomyces lanuginosus
EVSQDLFNQFNLFAQYSAAAYCGKNNRAPAGTNITCTANACPEVEKADATFLYSFEDSGVGDVTGFLALDNTNKLIVLSFRGSRSIENWIGNLNFELKEINDICSGCRGHDGFTSSWRSVADTLRQKVEDAVREHPDYRVVFTGHSLGGALATVAGADLRGNKYDIDVFSYGAPRVGNRAFAEFLTVQTGGTLYRITHTNDIVPRLPPREFGYSHSSPEYWIKSGTLVPVRRRDIVKIEGIDATGGNNQPNIPSITAHLWYFGLIGTC

SEQ ID NO: 14007 - protein, 268 aa, Thermomyces lanuginosus
EVSQDLFNQFNLFAQYSAAAYCGKNNRAPAGTQITCTGNACPEVEKADATFLYSFEDSGVGDVTGFLALDNTNKLIVLSFRGSRSIENWITNLNFDLKEINDICSGCRGHDGFISSWRSVADTLRQKVEDAVREHPDYRVVFTGHSLGGALATVAGADLRGNWYDIDVFSYGAPRVGNRAFAEFLTVQTGGTLYRITHTNDIVPRLPPRDFGYSHSSPEYWIKSGTLVPVRRRDIVKIEGIDATGGNNQPNIPDIPAHLWYFGLIGTC

SEQ ID NO: 14008 - protein, 268 aa, Thermomyces lanuginosus
EVSQDLFNQFNLFAQYSAAAYCQKNNDAPAGTNITCTGNACPEVEKADATFLYSFEDSGVGDVTGFLALDNTNKQIILSFRGSRSIENWIGNLRFDLKEINDICSGCRGHDGFTSSWRSVADTLRQKVEAAVREHPDYRVVFTGHSLGGALATVAWADLRGNGYDIDVFSYGAPRVGNRAFAEFLTQQTGGTLYRITHTNDIVPRLPPREFGYSHSSPEYWIKSGTLVPVTRNDIVKIEGIDATGGNNQPNIPDIPAHLWYFGLIGTC

SEQ ID NO: 14009 - protein, 268 aa, Thermomyces lanuginosus
EVSQDLFNQFNLFAQYSAAAYCGKNNDAPAGTNITCTGNICPEVEKADATLLYSFRNSGVGDVTGFLALDNTNKLIVLSFRGSRSIENWIGNLNFDLKEINDICSGCRGHDGFTSSWFSVADTLRQKVEDAVREHPDYRVVFTGHSLGGALATVAGADLRGNGYDIDVFSYGAPRVGNRAFAEFLTVQTGGTLYRITHTNDIVPRLPPREFGYSHSSPEYWIKSGTLVPVRRRDIVKIEGIDATGGNNQPNIPDIPAHLWYFGLIGTC

SEQ ID NO: 14010 - protein, 268 aa, Thermomyces lanuginosus
EVSRDLFNQFNLFAQYSAAAYCGKNNDAPAGTNITCTGNACPEVEKADATFLYSFEDSGVGDVTGFLALDNTNKLIVLSFRGSRSIENWIGNLNFDLKEINDICSGCRGHDGFTSSWRSVADTLRQKVEDAVREHPDYRVVFAGHSLGGALATVAGADLRGDGYDIDVFSYGAPRVGNRAFAEFLTVQTGGTLYRITNTNDIVPRLPPREFGYSHSSPEYWIKSGTLPPVRRRDIVKIEGIDATGGNNQPNIPDIPAHLWYFGLIGTC

SEQ ID NO: 14011 - protein, 268 aa, Thermomyces lanuginosus
EVSQDLFNQFNLFAQYSAAAYCGKNNNAPAGTNITCTGNICPEVEKADATFLYSFRDSGVGDVTGFLALDNTNKLIVLSFRGSRSIENWIGNLNFDLKEINDICSGCRGHDGFTSSWFSVADTLRQKVEDAVREHPDYRVVFTGHSLGGALATVAGADLRGNGYDIDVFSYGAPRVGNRAFAEFLTVQTGGTLYRITHTNDIVPRLPPREFGYSHSSPEYWIKSGTLVPVRRRDIVKIEGIDAEGGNNQPNIPDIPAHLWYFGLIGTC

SEQ ID NO: 14012 - protein, 268 aa, Thermomyces lanuginosus
EVSQDLFNQFNLFAQYSAAAYCGKNNDAPAGTNITCTGNACPEVEKADATFLYSFRDSGVGDVTGFLALDNTNKLIVLSFRGSRSIENWIGNLNFDLKEINDICSGCRGHDGFTSSWFSVADTLRQKVEDAVREHPDYRVVFTGHSLGGALATVAGADLRGNGYDIDVFSYGAPRVGNRAFAEFLTVQTGGTLYRITHTNDIVPRLPPREFGYSHSSPEFWIKSGTLVPVRRRDIVKIEGIDAEGGNNQPNIPDITAHLWYFGLIGTC

SEQ ID NO: 14013 - protein, 268 aa, Thermomyces lanuginosus
EVSQDLFNQFNLFAQYSKAAYCQANNDAPAGTNITCTGNACPEVEKADATFLYSFEDSGVGDVTGFLALDNTNKRIILSFRGSRSIENWIGNLNFDLKEINDICSGCRGHDGFTSSWRSVADTLRQKVEAAVREHPDYRVVFTGHSLGGALATVAWADLRGNGYDIDVFSYGAPRVGNRAFAEFLTVQTGGTLYRITHTNDIVPRLPPREFGYSHSSPEYWIKSGTLVPVTRNDIVKIEGIDATGGNNQPNIPDIPAHLWYFGLIGTC

SEQ ID NO: 14014 - protein, 268 aa, Thermomyces lanuginosus
EVSRDLFNQFNLFAQYSAAAYCGKNNDAPAGTNITCTGNACPEVEKADATILYSFEDSGVGDVTGFLALDNTNKLIVLSFRGSRSIENWIGNLNFDLKEINDICSGCRGHDGFTSSWRSVADTLRQKVEDAVREHPDYRVVFAGHSLGGALATVAGADLRGNGYDIDVFSYGAPRVGNRAFAEFLTVQTGGTLYRITSTNDIVPRLPPREFGYSHSSPEYWIKSGTLRPVRRRDIVKIEGIDATGGNNQPNIPDIPAHLWYFGLIGTC

SEQ ID NO: 14015 - protein, 268 aa, Thermomyces lanuginosus
EVSQDLFNQFNLFAQYSAAAYCGKNNDAPAGTNITCTGNICPEVEKADATFLYSFRNSGVGDVTGFLALDNTNKLIVLSFRGSRSIENWIGNLNFDLIEINDICSGCRGHDGFTSSWFSVADTLRQKVEDAVREHPDYRVVFTGHSLGGALATVAGADLRGNGYDIDVFSYGAPRVGNRAFAEFLTVQTGGTLYRITHTNDIVPRLPPREFGYSHSSPEYWIKSGTLVPVRRRDIVKIEGIDATGGNNQPNIPDIPAHLWYFGLIGTC

SEQ ID NO: 14016 - protein, 268 aa, Thermomyces lanuginosus
EVSQDLFNQFNLFAQYSAAAYCSKNNDAPAGTNITCTGNACPEVEKADATFLYSFRDSGVGDVTGFLALDNTNKLIVLSFRGSRSIENWIGNLNFDLIEINDICSGCRGHDGFTSSWFSVADTLRQKVEDAVREHPDYRVVFTGHSLGGALATVAGADLRGNGYDIDVFSYGAPRVGNRAFAEFLTVQTGGTLYRITHTNDIVPRLPPREFGYSHSSPEFWIKSGTLVPVRRRDIVKIEGIDATGGNNQPNIPDIPAHLWYFGLIGTC

SEQ ID NO: 14017 - protein, 268 aa, Thermomyces lanuginosus
EVSQDLFNQFNLFAQYSKAAYCQANNDAPAGTNITCTGNACPEVEKADATFLYSFEDSGVGDVTGFLALDNTNKQIILSFRGSRSIENWIGNLNFDLKEINDICSGCRGHDGFTSSWRSVADTLRQKVEAAVREHPDYRVVFTGHSLGGALATVAWADLRGNGYDIDVFSYGAPRVGNRAFAEFLTVQTGGTLYRITHTNDIVPRLPPREFGYSHSSPEYWIKSGTLVPVTRNDIVKIEGIDATGGNNQPNIPDIPAHLWYFGLIGTC

SEQ ID NO: 14018 - protein, 268 aa, Thermomyces lanuginosus
EVSQDLFNQFNLFAQYSKAAYCKANNDAPAGTNITCTGNACPEVEKADATFLYSFEDSGVGDVTGFLALDNTNKQIVLSFRGSRSIENWIGNLNFDLKEINDICSGCRGHDGFTSSWRSVADTLRQKVEAAVREHPDYRVVFTGHSLGGALATVAWADLRGNGYDIDVFSYGAPRVGNRAFAEFLTNQTGGTLYRITHTNDIVPRLPPREFGYSHSSPEYWIKSGTLVPVTRNDIVKIEGIDATGGNNQPNIPDIPAHLWYFGLIGTC

SEQ ID NO: 14019 - protein, 268 aa, Thermomyces lanuginosus
EVSQDLFNQFNLFAQYSAAAYCGKNNRAPAGTNITCTGNACPEVEKADATFLYSFEDSGVGDVTGFLALDNTNKLIVLSFRGSRSIENWLGNFNFNLKEINDICSGCRGHAGFTSSWRSVADTLRQKVEDAVREHPDYRVVFTGHSLGGALATVAGADLRGNGYDIDVFSYGAPRVGNRAFAEFLTVQTGGTLYRITHTNDIVPRLPPREFGYSHPSPEYWIKSGTGVPVTRNDIVKIEGIDATGGNNQPNIPDITAHLWYFGLIGTC

SEQ ID NO: 14020 - protein, 268 aa, Thermomyces lanuginosus
EVSQDLFNQFNLFAQYSAAAYCGKNNRAPAGTQITCTGNACPEVEKADATFLYSFEDSGVGDVTGFLALDNTNKLIVLSFRGSRSIENWIANLNFEQKEINDICSGCRGHAGFTSSWRSVADTLRQKVEDAVREHPDYRVVFTGHSLGGALATVAGADLRGNGYDIDVFSYGAPRVGNRAFAEFLTVQTGGTLYRITHTNDIVPRLPPREFGYSHSSPEYWIKSGTLVPVRRRDIVKIEGIDATGGNNQPNIPSITAHLWYFGLIGTC

SEQ ID NO: 14021 - protein, 268 aa, Thermomyces lanuginosus
EVSQDLFNQFNLFAQYSAAAYCGKNNDAPAGTNITCTGNACPEVEKADATFLYSFEDSGVGDVTGFLALDNTNKLIVLSFRGSRSIENWIGNLNFDLKEINDICSGCRGHDGFTSSWRSVADTLRQKVEDAVREHPDYRVVFTGHSLGGALATVAGADLRGDGYDIDVFSYGAPRVGNRAFAEFLTVQTGGTLYRITNTNDCVPRLPPREFGYSHSSPEYWIKSGTLPPVRRRDIVKIEGIDATGGNNQPNICDIPAHLWYFGLIGTC

SEQ ID NO: 14022 - protein, 268 aa, Thermomyces lanuginosus
EVSQDLFNQFNLFAQYSAAAYCGKNNRAPAGTNITCTGNACPEVEKADATFLYSFEDSGVGDVTGFLALDNTNKLIVLSFRGSRSIENWISNFNINLKEINDICSGCRGHAGFTSSWRSVADTLRQKVEDAVREHPDYRVVFTGHSLGGALATVAGADLRGNGYDIDVFSYGAPRVGNRAFAEFLTVQTGGTLYRITHTNDIVPRLPPREFGYSHPSPEYWIKSGTGVPVTRNDIVKIEGIDATGGNNQPNIPDITAHLWYFGLIGTC

SEQ ID NO: 14023 - protein, 268 aa, Thermomyces lanuginosus
EVSQDLFNQFNLFAQYSAAAYCQKNNSAPAGTNITCTGNACPEVEKADATFLYSFKDSGVGDVTGFLALDNTNKRIVLSFRGSRSIENWIGNLNFDLKEINDICSGCRGHAGFTSSWRSVADTLRQKVEDAVREHPDYRVVFTGHSLGGALATIAWADLRGNGYDIDVFSYGAPRVGNRAFAEFLTVQTGGTLYRITHTNDIVPRLPPREFGYSHSSPEYWIKSGTLVPVTRNDIVKIEGIDATGGNNQPNIPDIPAHLWYFGRIGTC

SEQ ID NO: 14024 - protein, 268 aa, Thermomyces lanuginosus
EVSQDLFNQFNLFAQYSAAAYCGKNNDAPAGTNITCTGNACPEVEKADATILYSFEDSGVGDVTGFLALDNTNKLIVLSFRGSRSIENWIGNLNFDLKEINDICSGCRGHDGFTSSWRSVADTLRQKVEDAVREHPDYRVVFAGHSLGGALATVAGADLRGDGYDIDVFSYGAPRVGNRAFAEFLTVQTGGTLYRITNTNDIVPRLPPREFGYSHSSPEYWIKSGTLRPVRRRDIVKIEGIDATGGNNQPNIPDIPAHLWYFGLIGTC

SEQ ID NO: 14025 - protein, 268 aa, Thermomyces lanuginosus
EVSQDLFNQFNLFAQYSAAAYCGKNNDAPAGTNITCTGNACPEVELADATFLYSFEDNGSGDVTGFLALDNTNKLIVLSFRGSRSIENWIGNLNFDLKEINDICSGCRGHDGFTSSWRSVADTLRQKVEDAVREHPDYRVVFTGHSLGGALATVAGADLRGNGYDIDVFSYGAPRVGNRAFAEFLTVQTGGTLYRITHTNDIVPRLPPREFGYSHSSPEYWIISGTLVPVRRRDIVKIEGIDATGGNNQPNIPIIPAHLWYFGLIGTC

SEQ ID NO: 14026 - protein, 268 aa, Thermomyces lanuginosus
EVSQDLFNQFNLFAQYSAAAYCSKNNNAPAGTNITCTGNACPEVEKADATFLYSFRDSGVGDVTGFLALDNTNKLIVLSFRGSRSIENWIGNLNFDLKEINDICSGCRGHDGFTSSWFSVADTLRQKVEDAVREHPDYRVVFTGHSLGGALATVAGADLRGNGYDIDVFSYGAPRVGNRAFAEFLTVQTGGTLYRITHTNDIVPRLPPREFGYSHSSPEYWIKSGTLVPVRRRDIVKIEGIDAEGGNNQPNIPDIPAHLWYFGLIGTC

SEQ ID NO: 14027 - protein, 268 aa, Thermomyces lanuginosus
EVSLDLFNQFNLFAQYSAAAYCGKNNDAPAGTNITCTGNACPEVEKADATFLYSFEDNGSGDVTGFLALDNTNKLIVLSFRGSRSIENWIGNLNFDLKEINDICSGCRGHDGFTSSWRSVADTLRQKVEDAVREHPDYRVVFTGHSLGGALATVAGADLRGNGYDIDVFSYGAPRVGNRAFAEFLTVQTGGTLYRITHTNDIVPRLPPREFGYSHSSPEYWIKSGTLVPVRRRDIVKIEGIDATGGNNLPNIPIIPAHLWYFGLIGTC

SEQ ID NO: 14028 - protein, 268 aa, Thermomyces lanuginosus
EVSQDLFNQFNLFAQYSKAAYCGKNNSAEAGTDITCTGNACPEVEKADATFLYSFEDSGVGDVTGFLALDNTRKDIVLSFRGSRSIENWIGNLNFDLKEINDICSGCRGHDGFTSSWRSVADTLRQKVEDAVREHPDYRVVFTGHSLGGALATVAGADLRGNGYDIDVFSYGAPRVGNRAFAEFLTVQDGGTLYRITHTNDIVPRLPPREFGYSHSSPEYWIKSGTLVPVTRNDIVKIEGIDATGGNNQPNIPDIPAHLWYFGLIGTC

SEQ ID NO: 14029 - protein, 268 aa, Thermomyces lanuginosus
EVSQDLFNQFNLFAQYSAAAYCGKNNDAPAGTQITCTGNACPEVEKADATFLYSFEDSGVGDVTGFLALDNTNKLIVLSFRGSRSIENWITNLNFDLKEINDICSGCRGHDGFISSWRSVADTLRQKVEDAVREHPDYRVVFTGHSLGGALATVAGADLRGNKYDIDVFSYGAPRVGNRAFAEFLTVQTGGTLYRITHTNDIVPRLPPREFGYSHSSPEYWIKSGTLVPVRRRDIVKIEGIDATGGNNQPNIPSILAHLWYFGLIGTC

SEQ ID NO: 14030 - protein, 268 aa, Thermomyces lanuginosus
EVSQDLFNQFNLFAQYSAAAYCGKNNDAPAGTNITCTGNACPEVEKADATFLYSFRNSGVGDVTGFLALDNTNKLIVLSFRGSRSIENWIGNLNFDLIEINDICSGCRGHDGFTSSWFSVADTLRQKVEDAVREHPDYRVVFTGHSLGGALATVAGADLRGNSYDIDVFSYGAPRVGNRAFAEFLTVQTGGTLYRITHTNDIVPRLPPREFGYSHSSPEYWIKSGTLVPVRRRDIVKIEGIDATGGNNQPNIPDIPAHLWYFGLIGTC

SEQ ID NO: 14031 - protein, 268 aa, Thermomyces lanuginosus
EVSQDLFNQFNLFAQYSAAAYCGKNNDAPAGTNITCTGNACPEVEKADATFLYSFRNSGVGDVTGFLALDNTNKLIVLSFRGSRSIENWIGNLNFDLKEINDICSGCRGHDGFTSSWFSVADTLRQKVEDAVREHPDYRVVFTGHSLGGALATVAGADLRGNSYDIDVFSYGAPRVGNRAFAEFLTVQTGGTLYRITHTNDIVPRLPPREFGYSHSSPEYWIKSGTLVPVRRRDIVKIEGIDATGGNNQPNIPDITAHLWYFGLIGTC

SEQ ID NO: 14032 - protein, 268 aa, Thermomyces lanuginosus
EVSQDLFNQFNLFAQYSAAAYCGKNNDAPAGTNITCTGNACPEVEKADATFLYSFEDSGVGDVTGFLALDNTNKLIVLSFRGSRSIENWIGNLNPDLKEINDICSGCRGHDGFTSSWRGVADTLRQKVEDAVREHPDYRVVFTGHSLGGALATVAGADLRGNGYDTDVFSYGAPRVGNRAFAEFLTVQTGGTLYRITHTNDIVPRLPPREFGYSHSSPEYWIKSGTLVPVTRNDTVKTEGTDATGGNNQPNTPDTPAHLWYFGLTGTC

SEQ ID NO: 14033 - protein, 268 aa, Thermomyces lanuginosus
EVSRDLFNQFNLFAQYSAAAYCGKNNDAPAGTNITCTGNACPEVEKADATFLYSFEDSGVGDVTGFLALDNTNKLIVLSFRGSRSIENWIGNLNFDLKEINDICSGCRGHDGFTSSWRSVADTLRQKVEDAVREHPDYRVVFAGHSLGGALATVAGADLRGDGYDIDVFSYGAPRVGNRAFAEFLTVQTGGTLYRITNTNDIVPRLPPREFGYSHSSPEYWIKSGTLRPVRRRDIVKIEGIDATGGNNQPNIPDIPAHLWYFGLIGTC

SEQ ID NO: 14034 - protein, 268 aa, Thermomyces lanuginosus
EVSQDLFNQFNLFAQYSAAAYCQKNNDAPAGTNITCTGNACPEVEKADATFLYSFEDSGVGDVTGFLALDNTNKQIVLSFRGSRSIENWIGNLRFDLKEINDICSGCRGHAGFTSSWRSVADTLRQKVEAAVREHPDYRVVFTGHSLGGALATVAWADLRGNGYDIDVFSYGAPRVGNRAFAEFLTVQQGGTLYRITHTNDIVPRLPPREFGYSHSSPEYWIKSGTLVPVTRNDIVKIEGIDATGGNNQPNIPDIPAHLWYFGRIGTC

SEQ ID NO: 14035 - protein, 268 aa, Thermomyces lanuginosus
EVSQDLFNQFNLFAQYSAAAYCSKNNDAPAGTNITCTGNACPEVEKADATILYSFRDSGVGDVTGFLALDNTNKLIVLSFRGSRSIENWIGNLNFDLKEINDICSGCRGHDGFTSSWFSVADTLRQKVEDAVREHPDYRVVFTGHSLGGALATVAGADLRGNGYDIDVFSYGAPRVGNRAFAEFLTVQTGGTLYRITHTNDIVPRLPPREFGYSHSSPEYWIKSGTLVPVRRRDIVKIEGIDAEGGNNQPNIPDIPAHLWYFGLIGTC

SEQ ID NO: 14036 - protein, 268 aa, Thermomyces lanuginosus
EVSQDLFNQFNLFAQYSAAAYCGKNNNAPAGTNITCTGNACPEVEKADATILYSFRDSGVGDVTGFLALDNTNKLIVLSFRGSRSIENWIGNLNFDLKEINDICSGCRGHDGFTSSWFSVADTLRQKVEDAVREHPDYRVVFTGHSLGGALATVAGADLRGNGYDIDVFSYGAPRVGNRAFAEFLTVQTGGTLYRITHTNDIVPRLPPREFGYSHSSPEYWIKSGTLVPVRRRDIVKIEGIDAEGGNNQPNIPDIPAHLWYFGLIGTC

SEQ ID NO: 14037 - protein, 268 aa, Thermomyces lanuginosus
EVSQDLFNQFNLFAQYSAAAYCSKNNDAPAGTNITCTGNICPEVEKADATILYSFRDSGVGDVTGFLALDNTNKLIVLSFRGSRSIENWIGNLNFDLKEINDICSGCRGHDGFTSSWFSVADTLRQKVEDAVREHPDYRVVFTGHSLGGALATVAGADLRGNGYDIDVFSYGAPRVGNRAFAEFLTVQTGGTLYRITHTNDIVPRLPPREFGYSHSSPEYWIKSGTLVPVRRRDIVKIEGIDATGGNNQPNIPDIPAHLWYFGLIGTC

SEQ ID NO: 14038 - protein, 268 aa, Thermomyces lanuginosus
EVSVDLFNQFNLFAQYSAAAYCGKNNDAPAGTNITCTGNACPEVEKADATFLYSFEDNGSGDVTGFLALDNTNKLIVLSFRGSRSIENWIGNLNFDLKEINDICSGCRGHDGFTSSWRSVADTLRQKVEDAVREHPDYRVVFTGHSLGGGLATVAGADLRGNGYDIDVFSYGAPRVGNRAFAEFLTVQTGGTLYRITHTNDIVPRLPPREFGYSHSSPEYWIKSGTLVPVRRRDIVKIEGIDATGGNNQPNIPDVPAHLWYFGLIGTC

SEQ ID NO: 14039 - protein, 268 aa, Thermomyces lanuginosus
EVSQDLFNQFNLFAQYSAAAYCGKNNRAPAGTNITCTGNACPEVEKADATFLYSFEDSGVGDVTGFLALDNTNKLIVLSFRGSRSIENWLANLKFDLKEINDICSGCRGHAGFTSSWRSVADTLRQKVEDAVREHVDYRVVFTGHSLGGALATVAGADLRGNGYDIDVFSYGAPRVGNRAFAEFLTVQTGGTLYRITHTNDIVPRLPPREFGYSHPSPEYWIKSGTGVPVTRNDIVKIEGIDATGGNNQPNIPDITAHLWYFGLIGTC

SEQ ID NO: 14040 - protein, 268 aa, Thermomyces lanuginosus
EVSQDLFNQFNLFAQYSAAAYCGKNNDAPAGTQITCTGNACPEVEKADATFLYSFEDSGVGDVTGFLALDNTNKLIVLSFRGSRSIENWITNLSFDLKEINDICSGCRGHAGFTSSWRSVADTLRQKVEDAVREHPDYRVVFTGHSLGGALATVAGADLRGNTYDIDVFSYGAPRWGNRAFAEFLTVQTGGTLYRITHTNDIVPRLPPREFGYSHSSPEYWIKSGTLVPVRRRDIVKIEGIDATGGNNQPNIPDIPAHLWYFGLIGTC

SEQ ID NO: 14041 - protein, 268 aa, Thermomyces lanuginosus
EVSQDLFNQFNLFAQYSAAAYCKKNNSAPAGTNITCTGNACPEVEKADATTLYSFKDSGVGDVTGFLALDNTNKQIVLSFRGSRSIENWIQNLNFDLKEINDICSGCRGHDGFTSSWRSVADTLRQKVEDAVREHPDYRVVFTGHSLGGALATVAGADLRGNGYDIDVFSYGAPRVGNRAFAEFLTHQTGGTLYRITHTNDIVPRLPPREFGYSHSSPEYWIKSGTLVPVTRNDIVKIEGIDATGGNNQPNQPDIPAHLWYFGLIGTC

SEQ ID NO: 14042 - protein, 268 aa, Thermomyces lanuginosus
EVSQDLFNQFNLFAQYSAAAYCGKNNRAPAGTNITCTGNACPEVEKADATFLYSFEDSGVGDVTGFLALDNTNKLIVLSFRGSRSIENWIGNLNFELKEINDICSGCRGHAGFTSSWRSVADTLRQKVEDAVREHPDYRVVFTGHSLGGALATVAGADLRGNKYDIDVFSYGAPRVGNRAFAEFLTVQTGGTLYRITHTNDIVPRLPPREFGYSHSSPEYWIKSGTLVPVRRRDIVKIEGIDATGGNNQPNIPSITAHLWYFGLIGTC

SEQ ID NO: 14043 - protein, 268 aa, Thermomyces lanuginosus
EVSQDLFNQFNLFAQYSAAAYCGKNNDAPAGTNITCTGNICPEVEKADATFLYSFRDSGVGDVTGFLALDNTNKLIVLSFRGSRSIENWIGNLNFDLIEINDICSGCRGHDGFTSSWFSVADTLRQKVEDAVREHPDYRVVFTGHSLGGALATVAGADLRGNSYDIDVFSYGAPRVGNRAFAEFLTVQTGGTLYRITHTNDIVPRLPPREFGYSHSSPEYWIKSGTLVPVRRRDIVKIEGIDATGGNNQPNIPDIPAHLWYFGLIGTC

SEQ ID NO: 14044 - protein, 268 aa, Thermomyces lanuginosus
EVSDDLFNQFKLFAQYSAAAYCGKNNQAPAGTNITCTGNACPEVEKADATFLYSFEDMGVGDVTGFLALDNTNKLIVLSFRGSRSIENWFGNLNFDLKEINDICSGCRGHDGFTSSWRSVADTLRQKVEDAVREHPDYRVVFTGHSLGGALATVAGADLRGNGYDIDVFSYGAPRVGNRAFAEFLTVQTGGTLYRITHTNDIVPRLPPREFGYSHSSPEYWIKSGTLVPVTRQDIVKIEGIDATGGNNQPNIPDITAHLWYFGLIGTC

SEQ ID NO: 14045 - protein, 268 aa, Thermomyces lanuginosus
EVSQDLFNQFNLFAQYSAAAYCSKNNNAPAGTNITCTGNACPEVEKADATFLYSFRDSGVGDVTGFLALDNTNKLIVLSFRGSRSIENWIGNLNFDLIEINDICSGCRGHDGFTSSWFSVADTLRQKVEDAVREHPDYRVVFTGHSLGGALATVAGADLRGNGYDIDVFSYGAPRVGNRAFAEFLTVQTGGTLYRITHTNDIVPRLPPREFGYSHSSPEYWIKSGTLVPVRRRDIVKIEGIDATGGNNQPNIPDIPAHLWYFGLIGTC

SEQ ID NO: 14046 - protein, 268 aa, Thermomyces lanuginosus
EVSQDLFNQFNLFAQYSAAAYCGKNNDAPAGTNITCTGNACPEVEKADATILYSFRDSGVGDVTGFLALDNTNKLIVLSFRGSRSIENWIGNLNFDLIEINDICSGCRGHDGFTSSWFSVADTLRQKVEDAVREHPDYRVVFTGHSLGGALATVAGADLRGNGYDIDVFSYGAPRVGNRAFAEFLTVQTGGTLYRITHTNDIVPRLPPREFGYSHSSPEYWIKSGTLVPVRRRDIVKIEGIDAEGGNNQPNIPDIPAHLWYFGLIGTC

SEQ ID NO: 14047 - protein, 268 aa, Thermomyces lanuginosus
EVSQDLFNQFNLFAQYSAAAYCGKNNQAPAGTNITCTGNACPEVEKADATTLYSFEDMGVGDVTGFLALDNTNKGIVLSFRGSRSIENWIQNLNFDLKEINDICSGCRGHDGFTSSWRSVADTLRQKVEAAVREHPDYRVVFTGHSLGGALATVAGADLRGNGYDIDVFSYGAPRVGNRAFAEFLTTQTGGTLYRITHTNDIVPRLPPREFGYSHSSPEYWIKSGTLVPVTRNDIVKIEGIDATGGNNQPNQPDIPAHLWYFGRIGTC

SEQ ID NO: 14048 - protein, 268 aa, Thermomyces lanuginosus
EVSQDLFNQFNLFAQYSAAAYCSKNNDAPAGTNITCTGNACPEVEKADATFLYSFRDSGVGDVTGFLALDNTNKLIVLSFRGSRSIENWIGNLNFDLIEINDICSGCRGHDGFTSSWFSVADTLRQKVEDAVREHPDYRVVFTGHSLGGALATVAGADLRGNGYDIDVFSYGAPRVGNRAFAEFLTVQTGGTLYRITHTNDIVPRLPPREFGYSHSSPEYWIKSGTLVPVRRRDIVKIEGIDATGGNNQPNIPDITAHLWYFGLIGTC

SEQ ID NO: 14049 - protein, 268 aa, Thermomyces lanuginosus
EVSQDLFNQFRLFAQYSAAAYCGKNNDAPAGTQITCTGNACPEVEKADATFLYSFEDSGVGDVTGFLALDNTNKLIVLSFRGSRSIENWITNLNFDLKEINDICSGCRGHDGFTSSWRSVADTLRQKVEDAVREHPDYRVVFTGHSLGGALATVAGADLRGNKYDIDVFSYGAPRQGNRAFAEFLTVQTGGTLYRITHTNDIVPRLPPREFGYSHSSPEYWIKSGTLVPVRRRDIVKIEGIDATGGNNQPNIPSIPAHLWYFGLIGTC

SEQ ID NO: 14050 - protein, 268 aa, Synthetic construct
EVSQDLFNQFNLFAQYSAAAYCGKNNDAPAGTNITCTGNACPEVEKADATFLYSFEDSGVGDVTGFLALDNTNKLIVLSFRGSRSIENWIGNLKFLLKKINDICSGCRGHNGFTSSWRSVADTLRQKVEDAVREHPDYRVVFTGHSLGGALATVAGADLRGNGYDIDVFSYGAPRVGNRAFAEFLTVQTGGTLYRITHTNDIVPRLPPREAGYSHSSPEYWIKSPTLVPVRRRRIVKIEGIDATGGNNRPNIPDIPAHLWYFGLIGRC

SEQ ID NO: 14051 - protein, 268 aa, Thermomyces lanuginosus
EVSQDLFNQFNLFAQYSAAAYCGKNNDAPAGTNITCTGNACPEVEIADATFLYSFEDNGSGDVTGFLALDNTNKLIVLSFRGSRSIENWIGNLNFDLKEINDICSGCRGHDGFTSSWRSVADTLRQKVEDAVREHPDYRVVFTGHSLGGALATVAGADLRGNGYDIDVFSYGAPRVGNRAFAEFLTVQTGGTLYRITHTNDIVPRLPPREFGYSHSSPEYWIKSGTLVPVRRRDIVKIEGIDATGGNNLPNIPLIPAHLWYFGLIGTC

SEQ ID NO: 14052 - protein, 268 aa, Thermomyces lanuginosus
EVSQDLFNQFNLFAQYSAAAYCGKNNDAPAGTNITCTGNACPEVEKADATILYSFEDSGVGDVTGFLALDNTNKLIVLSFRGSRSIENWIGNLNFDLKEINDICSGCRGHDGFTSSWRSVADTLRQKVEDAVREHPDYRVVFTGHSLGGALATVAGADLRGNGYDIDVFSYGAPRVGNRAFAEFLTVQTGGTLYRITNTNDIVPRLPPREFGYSHSSPEYWIKSGTLPPVRRRDIVKCEGIDATCGNNQPNIPDIPAHLWYFGLIGTC

SEQ ID NO: 14053 - protein, 268 aa, Thermomyces lanuginosus
EVSQDLFNQFNLFAQYSAAAYCSKNNDAPAGTNITCTGNACPEVEKADATILYSFRDSGVGDVTGFLALDNTNKLIVLSFRGSRSIENWIGNLNFDLKEINDICSGCRGHDGFTSSWFSVADTLRQKVEDAVREHPDYRVVFTGHSLGGALATVAGADLRGNGYDIDVFSYGAPRVGNRAFAEFLTVQTGGTLYRITHTNDIVPRLPPREFGYSHSSPEYWIKSGTLVPVRRRDIVKIEGIDATGGNNQPNIPDITAHLWYFGLIGTC

SEQ ID NO: 14054 - protein, 268 aa, Thermomyces lanuginosus
EVSQDLFNQFNLFAQYSAAAYCSKNNNAPAGTNITCTGNACPEVEKADATILYSFRDSGVGDVTGFLALDNTNKLIVLSFRGSRSIENWIGNLNFDLKEINDICSGCRGHDGFTSSWFSVADTLRQKVEDAVREHPDYRVVFTGHSLGGALATVAGADLRGNGYDIDVFSYGAPRVGNRAFAEFLTVQTGGTLYRITHTNDIVPRLPPREFGYSHSSPEYWIKSGTLVPVRRRDIVKIEGIDATGGNNQPNIPDIPAHLWYFGLIGTC

SEQ ID NO: 14055 - protein, 268 aa, Thermomyces lanuginosus
EVSRDLFNQFNLFAQYSAAAYCGKNNDAPAGTNITCTGNACPEVEKADATFLYSFEDSGVGDVTGFLALDNTNKLIVLSFRGSRSIENWIGNLNFDLKEINDICSGCRGHDGFTSSWRSVADTLRQKVEDAVREHPDYRVVFAGHSLGGALATVAGADLRGNGYDIDVFSYGAPRVGNRAFAEFLTVQTGGTLYRITHTNDIVPRLPPREFGYSHSSPEYWIKSGTLPPVRRRDIVKCEGIDATCGNNQPNIPDIPAHLWYFGLIGTC

SEQ ID NO: 14056 - protein, 268 aa, Thermomyces lanuginosus
EVSQDLFNQFNLFAQYSKAAYCGANNDAPAGTNITCTGNACPEVEKADATFLYSFEDSGVGDVTGFLALDNTNKQIILSFRGSRSIENWIGNLRFDLKEINDICSGCRGHDGFTSSWRSVADTLRQKVEAAVREHPDYRVVFTGHSLGGALATVAWADLRGNGYDIDVFSYGAPRVGNRAFAEFLTVQTGGTLYRITHTNDIVPRLPPREFGYSHSSPEYWIKSGTLVPVTRNDIVKIEGIDATGGNNQPNIPDIPAHLWYFGLIGTC

SEQ ID NO: 14057 - protein, 268 aa, Thermomyces lanuginosus
EVSQDLFNQFNLFAQYSAAAYCQANNDAPAGTNITCTGNACPEVEKADATFLYSFEDSGVGDVTGFLALDNTNKQIILSFRGSRSIENWIGNLNFDLKEINDICSGCRGHDGFTSSWRSVADTLRQKVEAAVREHPDYRVVFTGHSLGGALATVAWADLRGNGYDIDVFSYGAPRVGNRAFAEFLTNQTGGTLYRITHTNDIVPRLPPREFGYSHSSPEYWIKSGTLVPVTRNDIVKIEGIDATGGNNQPNIPDIPAHLWYFGLIGTC

SEQ ID NO: 14058 - protein, 268 aa, Thermomyces lanuginosus
EVSQDLFNQFRLFAQYSAAAYCGKNNDAPAGTQITCTANACPEVEKADATFLYSFEDSGVGDVTGFLALDNTNKLIVLSFRGSRSIENWITNLNFDLKEINDICSGCRGHDGFTSSWRSVADTLRQKVEDAVREHPDYRVVFTGHSLGGALATVAGADLRGNKYDIDVFSYGAPRVGNRAFAEFLTVQTGGTLYRITHTNDIVPRLPPREFGYSHSSPEYWIKSGTLVPVRRRDIVKIEGIDATGGNNQPNIPSIPAHLWYFGLIGTC

SEQ ID NO: 14059 - protein, 268 aa, Thermomyces lanuginosus
EVSQDLFNQFNLFAQYSAAAYCGKNNDAPAGTQITCTGNACPEVEKADATFLYSFEDSGVGDVTGFLALDNTNKLIVLSFRGSRSIENWIANLKFDLKEINDICSGCRGHAGFTSSWRSVADTLRQKVEDAVREHPDYRVVFTGHSLGGALATVAGADLRGNKYDIDVFSYGAPRVGNRAFAEFLTVQTGGTLYRITHTNDIVPRLPPREFGYSHSSPEYWIKSGTFVPVRRRDIVKIEGIDATGGNNRPNIPDIPAHLWYFGLIGTC

SEQ ID NO: 14060 - protein, 268 aa, Thermomyces lanuginosus
EVSQDLFNQFNLFAQYSAAAYCGKNNNAPAGTNITCTGNACPEVEKADATFLYSFRDSGVGDVTGFLALDNTNKLIVLSFRGSRSIENWIGNLNFDLKEINDICSGCRGHDGFTSSWFSVADTLRQKVEDAVREHPDYRVVFTGHSLGGALATVAGADLRGNGYDIDVFSYGAPRVGNRAFAEFLTVQTGGTLYRITHTNDIVPRLPPREFGYSHSSPEYWIKSGTLVPVRRRDIVKIEGIDAEGGNNQPNIPDITAHLWYFGLIGTC

SEQ ID NO: 14061 - protein, 268 aa, Thermomyces lanuginosus
EVSQDLFNQFNLFAQYSAAAYCQKNNSAPAGTNITCTGNACPEVEKADATFLYSFKDMGVGDVTGFLALDNTNKRIVLSFRGSRSIENWIQNLNFDLKEINDICSGCRGHDGFTSSWRSVADTLRQKVEDAVREHPDYRVVFTGHSLGGALATVAGADLRGNGYDIDVFSYGAPRVGNRAFAEFLTNQTGGTLYRITHTNDIVPRLPPREFGYSHSSPEYWIKSGTLVPVTRNDIVKIEGIDATGGNNQPNQPDIPAHLWYFGLIGTC

SEQ ID NO: 14062 - protein, 268 aa, Thermomyces lanuginosus
EVSQDLFNQFNLFAQYSAAAYCGKNNDAPAGTNITCTGNICPEVEKADATLLYSFRDSGVGDVTGFLALDNTNKLIVLSFRGSRSIENWIGNLNFDLKEINDICSGCRGHDGFTSSWFSVADTLRQKVEDAVREHPDYRVVFTGHSLGGALATVAGADLRGNGYDIDVFSYGAPRVGNRAFAEFLTVQTGGTLYRITHTNDIVPRLPPREFGYSHSSPEYWIKSGTLVPVRRRDIVKIEGIDATGGNNQPNIPDITAHLWYFGLIGTC

SEQ ID NO: 14063 - protein, 268 aa, Thermomyces lanuginosus
EVSQDLFNQFNLFAQYSAAAYCGKNNRAPAGTQITCTGNACPEVEKADATFLYSFEDSGVGDVTGFLALDNTNKLIVLSFRGSRSIENWIGNLNFDLKEINDICSGCRGHDGFTSSWRSVADTLRQKVEDAVREHPDYRVVFTGHSLGGALATVAGADLRGNGYDIDVFSYGAPRVGNRAFAEFLTVQTGGTLYRITHTNDIVPRLPPREFGYSHPSPEYWIKSGTGVPVRRRDIVKIEGIDATGGNNRPNIPDIPAHLWYFGLIGTC

SEQ ID NO: 14064 - protein, 268 aa, Thermomyces lanuginosus
EVSQDLFNQFNLFAQYSAAAYCGKNNDAPAGTNITCTGNICPEVEKADATILYSFRDSGVGDVTGFLALDNTNKLIVLSFRGSRSIENWIGNLNFDLKEINDICSGCRGHDGFTSSWFSVADTLRQKVEDAVREHPDYRVVFTGHSLGGALATVAGADLRGNGYDIDVFSYGAPRVGNRAFAEFLTVQTGGTLYRITHTNDIVPRLPPREFGYSHSSPEYWIKSGTLVPVRRRDIVKIEGIDAEGGNNQPNIPDIPAHLWYFGLIGTC

SEQ ID NO: 14065 - protein, 268 aa, Thermomyces lanuginosus
EVSQDLFNQFNLFAQYSAAAYCGKNNDAPAGTNITCTGNACPEVEKADATFLYSFEDSGVGDVTGFLALDNTNKLIVLSFRGSRSIENWIGNLNFDLKEINDICSGCRGHDGFTSSWRSVADTLRQKVEDAVREHPDYRVVFTGHSLGGALATVAGADLRGDGYDIDVFSYGAPRVGNRAFAEFLTVQTGGTLYRITNTNDIVPRLPPREFGYSHSSPEYWIKSGTLPPVRRRDIVKCEGIDATCGNNQPNIPDIPAHLWYFGLIGTC

SEQ ID NO: 14066 - protein, 268 aa, Thermomyces lanuginosus
EVSQDLFNQFNLFAQYSAAAYCKANNDAPAGTNITCTGNACPEVEKADATFLYSFEDSGVGDVTGFLALDNTNKQIILSFRGSRSIENWIGNLNFDLKEINDICSGCRGHDGFTSSWRSVADTLRQKVEAAVREHPDYRVVFTGHSLGGALATVAWADLRGNGYDIDVFSYGAPRVGNRAFAEFLTQQTGGTLYRITHTNDIVPRLPPREFGYSHSSPEYWIKSGTLVPVTRNDIVKIEGIDATGGNNQPNIPDIPAHLWYFGLIGTC

SEQ ID NO: 14067 - protein, 268 aa, Thermomyces lanuginosus
EVSQDLFNQFRLFAQYSAAAYCGKNNDAPAGTQITCTGNACPEVEKADATFLYSFEDSGVGDVTGFLALDNTNKLIVLSFRGSRSIENWITNLNFDLKEINDICSGCRGHDGFTSSWRSVADTLRQKVEDAVREHPDYRVVFTGHSLGGALATVAGADLRGNKYDIDVFSYGAPRTGNRAFAEFLTVQTGGTLYRITHTNDIVPRLPPREFGYSHSSPEYWIKSGTLVPVRRRDIVKIEGIDATGGNNQPNIPSIPAHLWYFGLIGTC

SEQ ID NO: 14068 - protein, 268 aa, Thermomyces lanuginosus
EVSQDLFNQFNLFAQYSQAAYCGKNNDAPAGTNITCTGNACPEVEKADATFLYSFEDMGVGDVTGFLALDNTNKLIVLSFRGSRSIENWIGNLNFDLKEINDICSGCRGHDGFTSSWRSVADTLRQKVEAAVREHPQYRVVFTGHSLGGALATVAGADLRGNPYDIDVFSYGAPRVGNRAFAEFLTVQTGGTLYRITHTNDIVPRLPPREFGYSHSSPEYWIKSGTMVPVTRQDIVKIEGIDATGGNNQPNIPDIPAHLWYFGRIGTC

SEQ ID NO: 14069 - protein, 268 aa, Thermomyces lanuginosus
EVSQDLFNQFNLFAQYSAAAYCQKNNDAPAGTNITCTGNACPEVEKADATTLYSFEDMGVGDVTGFLALDNTNKQIVLSFRGSRSIENWIQNLNFDLKEINDICSGCRGHDGFTSSWRSVADTLRQKVEAAVREHPDYRVVFTGHSLGGALATVAGADLRGNGYDIDVFSYGAPRVGNRAFAEFLTHQTGGTLYRITHTNDIVPRLPPREFGYSHSSPEYWIKSGTLVPVTRNDIVKIEGIDATGGNNQPNQPDIPAHLWYFGRIGTC

SEQ ID NO: 14070 - protein, 268 aa, Thermomyces lanuginosus
EVSQDLFNQFNLFAQYSAAAYCGKNNDAPAGTQITCTGNACPEVEKADATFLYSFEDSGVGDVTGFLALDNTNKLIVLSFRGSRSIENWIGNLNFELKEINDICSGCRGHAGFTSSWRSVADTLRQKVEDAVREHPDYRVVFTGHSLGGALATVAGADLRGNKYDIDVFSYGAPRVGNRAFAEFLTVQTGGTLYRITHTNDIVPRLPPREFGYSHSSPEYWIKSGTLVPVRRRDIVKIEGIDATGGNNQPNIPSITAHLWYFGLIGTC

SEQ ID NO: 14071 - protein, 268 aa, Thermomyces lanuginosus
EVSRDLFNQFNLFAQYSAAAYCGKNNDAPAGTNITCTGNACPEVEKADATILYSFEDSGVGDVTGFLALDNTNKLIVLSFRGSRSIENWIGNLNFDLKEINDICSGCRGHDGFTSSWRSVADTLRQKVEDAVREHPDYRVVFAGHSLGGALATVAGADLRGDGYDIDVFSYGAPRVGNRAFAEFLTVQTGGTLYRITSTNDIVPRLPPREFGYSHSSPEYWIKSGTLVPVRRRDIVKIEGIDATGGNNQPNIPDIPAHLWYFGLIGTC

SEQ ID NO: 14072 - protein, 268 aa, Thermomyces lanuginosus
EVSQDLFNQFRLFAQYSAAAYCGKNNDAPAGTQITCTGNACPEVEKADATFRYSFEDSGVGDVTGFLALDNTNKLIVLSFRGSRSIENWITNLNFDLKEINDICSGCRGHDGFTSSWRSVADTLRQKVEDAVREHPDYRVVFTGHSLGGALATVAGADLRGNKYDIDVFSYGAPRVGNRAFAEFLTVQTGGTLYRITHTNDIVPRLPPREFGYSHSSPEYWIKSGTLVPVRRRDIVKIEGIDATGGNNQPNIPSIPAHLWYFGLIGTC

SEQ ID NO: 14073 - protein, 268 aa, Thermomyces lanuginosus
EVSQDLFNQFNLFAQYSAAAYCGKNNRAPAGTNITCTANACPEVEKADATFLYSFEDSGVGDVTGFLALDNTNKLIVLSFRGSRSIENWITNLNFELKEINDICSGCRGHDGFTSSWRSVADTLRQKVEDAVREHPDYRVVFTGHSLGGALATVAGADLRGNKYDIDVFSYGAPRVGNRAFAEFLTVQTGGTLYRITHTNDIVPRLPPREFGYSHSSPEYWIKSGTLVPVRRRDIVKIEGIDATGGNNQPNIPSITAHLWYFGLIGTC

SEQ ID NO: 14074 - protein, 268 aa, Thermomyces lanuginosus
EVSQDLFNQFNLFAQYSAAAYCGKNNDAPAGTNITCTGNICPEVEKADATILYSFRDSGVGDVTGFLALDNTNKLIVLSFRGSRSIENWIGNLNFDLKEINDICSGCRGHDGFTSSWFSVADTLRQKVEDAVREHPDYRVVFTGHSLGGALATVAGADLRGNGYDIDVFSYGAPRVGNRAFAEFLTVQTGGTLYRITHTNDIVPRLPPREFGYSHSSPEYWIKSGTLVPVRRRDIVKIEGIDATGGNNQPNIPDITAHLWYFGLIGTC

SEQ ID NO: 14075 - protein, 268 aa, Thermomyces lanuginosus
EVSQDLFNQFNLFAQYSAAAYCSKNNDAPAGTNITCTGNICPEVEKADATFLYSFRDSGVGDVTGFLALDNTNKLIVLSFRGSRSIENWIGNLNFDLKEINDICSGCRGHDGFTSSWFSVADTLRQKVEDAVREHPDYRVVFTGHSLGGALATVAGADLRGNGYDIDVFSYGAPRVGNRAFAEFLTVQTGGTLYRITHTNDIVPRLPPREFGYSHSSPEYWIKSGTLVPVRRRDIVKIEGIDAEGGNNQPNIPDIPAHLWYFGLIGTC

SEQ ID NO: 14076 - protein, 268 aa, Thermomyces lanuginosus
EVSQDLFNQFNLFAQYSAAAYCGKNNDAPAGTQITCTSNACPEVEKADATFLYSFEDSGVGDVTGFLALDNTNKLIVLSFRGSRSIENWIGNLNFDLKEINDICSGCRGHDGFTSSWRSVADTLRQKVEDAVREHPDYRVVFTGHSLGGALATVARADLRGNKYDIDVFSYGAPRWGNRAFAEFLTVQTGGTLYRITHTNDIVPRLPPREFGYSHSSPEYWIKSGTLVPVRRRDIVKIEGIDATGGNNQPNIPDIPAHLWYFGLIGTC

SEQ ID NO: 14077 - protein, 268 aa, Thermomyces lanuginosus
EVSQDLFNQFNLFAQYSAAAYCSKNNNAPAGTNITCTGNICPEVEKADATFLYSFRDSGVGDVTGFLALDNTNKLIVLSFRGSRSIENWIGNLNFDLKEINDICSGCRGHDGFTSSWFSVADTLRQKVEDAVREHPDYRVVFTGHSLGGALATVAGADLRGNGYDIDVFSYGAPRVGNRAFAEFLTVQTGGTLYRITHTNDIVPRLPPREFGYSHSSPEYWIKSGTLVPVRRRDIVKIEGIDATGGNNQPNIPDIPAHLWYFGLIGTC

SEQ ID NO: 14078 - protein, 268 aa, Thermomyces lanuginosus
EVSQDLFNQFNLFAQYSAAAYCKKNNSAPAGTNITCTGNACPEVEKADATFLYSFEDSGVGDVTGFLALDNTNKQIVLSFRGSRSIENWIGNLRFDLKEINDICSGCRGHDGFTSSWRSVADTLRQKVEDAVREHPDYRVVFTGHSLGGALATIAWADLRGNGYDIDVFSYGAPRVGNRAFAEFLTVQQGGTLYRITHTNDIVPRLPPREFGYSHSSPEYWIKSGTLVPVTRNDIVKIEGIDATGGNNQPNIPDIPAHLWYFGLIGTC

SEQ ID NO: 14079 - protein, 268 aa, Thermomyces lanuginosus
EVSQDLFNQFNLFAQYSAAAYCGKNNDAPAGTNITCTGNACPEVEKADATFLYSFEDSGVGDVTGFLALDNTNKLIVLSFRGSRSIENWIGNLNFDLKEINDICSGCRGHDGFTSSWRSVADTLRQKVEDAVREHPDYRVVFTGHSLGGALATVAGADLRGDGYDIDVFSYGAPRVGNRAFAEFLTVQTGGTLYRITSTNDIVPRLPPREFGYSHSSPEYWIKSGTLPPVRRRDIVKCEGIDATCGNNQPNIPDIPAHLWYFGLIGTC

SEQ ID NO: 14080 - protein, 268 aa, Thermomyces lanuginosus
EVSQDLFNQFNLFAQYSAAAYCKKNNSAPAGTNITCTGNACPEVEKADATFLYSFKDSGVGDVTGFLALDNTNKGIVLSFRGSRSIENWIGNLNFDLKEINDICSGCRGHDGFTSSWRSVADTLRQKVEAAVREHPDYRVVFTGHSLGGALATVAGADLRGNGYDIDVFSYGAPRVGNRAFAEFLTTQTGGTLYRITHTNDIVPRLPPREFGYSHSSPEYWIKSGTLVPVTRNDIVKIEGIDATGGNNQPNQPDIPAHLWYFGRIGTC

SEQ ID NO: 14081 - protein, 268 aa, Thermomyces lanuginosus
EVSQDLFNQFNLFAQYSAAAYCGKNNDAPAGTQITCTGNACPEVEKADATFLYSFEDSGVGDVTGFLALDNTNKLIVLSFRGSRSIENWIGNLNFDLIEINDICSGCRGHDGFTSSWRSVADTLRQKVEDAVREHPDYRVVFTGHSLGGALATVAGADLRGNKYDIDVFSYGAPRVGNRAFAEFLTVQTGGTLYRITHTQDIVPRLPPREFGYSHSSPEYWIKSGTLVPVRRRDIVKIEGIDATGGNNQPSIPDIPAHLWYFGLIGTC

SEQ ID NO: 14082 - protein, 268 aa, Thermomyces lanuginosus
EVSQDLFNQFNLFAQYSAAAYCGKNNDAPAGTNITCTGNACPEVEKADATFLYSFEDNGSGDVTGFLALDNTNKLIVLSFRGSRSIENWIGNLNFDLKEINDICSGCRGHDGFTSSWRSVADTLRQKVEDAVREHPDYRVVFTGHSMGGGLATVAGADLRGNGYDIDVFSYGAPRVGNRAFAEFLTVQTGGTLYRITHTNDIVPRLPPRELGYSHSSPEYWIKSGTLVPVRRRDIVKIEGIDATGGNNQPNIPDIPAHLWYFGLIGTC

SEQ ID NO: 14083 - protein, 268 aa, Thermomyces lanuginosus
EVSQDLFNQFRLFAQYSAAAYCGKNNDAPAGTQITCTGNACPEVEKADATFLYSFEDSGVGDVTGFLALDNTNKLIVLSFRGSRSIENWLGNLNFDLKEINDICSGCRGHDGFTSSWRSVADTLRQKVEDAVREHPDYRVVFTGHSLGGALATVAGADLRGNLYDIDVFSYGAPRVGNRAFAEFLTVQTGGTLYRITHTNDIVPRLPPREFGYSHSSPEYWIKSGTLVPVRRRDIVKIEGIDATGGNNQPNIPSIPAHLWYFGLIGTC

SEQ ID NO: 14084 - protein, 268 aa, Thermomyces lanuginosus
EVSQDLFNQFNLFAQYSAAAYCGRNNDAPAGTNITCTGNACPEVERADATFLYSFEDSGVGDVTGFLALDNTNRLIVLSFRGSRSIENWIGNLNFDLREINDICSGCRGHDGFTSSWRSVADTLRQRVEDAVREHPDYRVVFTGHSLGGALATVAGADLRGNGYDIDVFSYGAPRVGNRAFAEFLTVQTGGTLYRITHTNDIVPRLPPREFGYSHSSPEYWIRSGTLVPVTRNDIVRIEGIDATGGNNQPNIPDIPAHLWYFGLIGTC

SEQ ID NO: 14085 - protein, 268 aa, Thermomyces lanuginosus
EVSQDLFNQFNLFAQYSAAAYCGKNNRAPAGTNITCTANACPEVEKADATFLYSFEDSGVGDVTGFLALDNTNKLIVLSFRGSRSIENWIGNLNFELKEINDICSGCRGHAGFTSSWRSVADTLRQKVEDAVREHPDYRVVFTGHSLGGALATVAGADLRGNKYDIDVFSYGAPRVGNRAFAEFLTVQTGGTLYRITHTNDIVPRLPPREFGYSHSSPEYWIKSGTLVPVRRRDIVKIEGIDATGGNNQPNIPDITAHLWYFGLIGTC

SEQ ID NO: 14086 - protein, 268 aa, Thermomyces lanuginosus
EVSQDLFNQFNLFAQYSAAAYCGKNNDAPAGTNITCTGNICPEVEKADATFLYSFRDSGVGDVTGFLALDNTNKLIVLSFRGSRSIENWIGNLNFDLKEINDICSGCRGHDGFTSSWFSVADTLRQKVEDAVREHPDYRVVFTGHSLGGALATVAGADLRGNSYDIDVFSYGAPRVGNRAFAEFLTVQTGGTLYRITHTNDIVPRLPPREFGYSHSSPEYWIKSGTLVPVRRRDIVKIEGIDATGGNNQPNIPDITAHLWYFGLIGTC

SEQ ID NO: 14087 - protein, 268 aa, Thermomyces lanuginosus
EVSQDLFNQFNLFAQYSAAAYCGKNNDAPAGTNITCTGNACPEVEKADATLLYSFRDSGVGDVTGFLALDNTNKLIVLSFRGSRSIENWIGNLNFDLIEINDICSGCRGHDGFTSSWFSVADTLRQKVEDAVREHPDYRVVFTGHSLGGALATVAGADLRGNGYDIDVFSYGAPRVGNRAFAEFLTVQTGGTLYRITHTNDIVPRLPPREFGYSHSSPEYWIKSGTLVPVRRRDIVKIEGIDATGGNNQPNIPDITAHLWYFGLIGTC

SEQ ID NO: 14088 - protein, 268 aa, Thermomyces lanuginosus
EVSQDLFNQFNLFAQYSAAAYCGKNNRAPAGTQITCTGNACPEVEKADATFLYSFEDSGVGDVTGFLALDNTNKLIVLSFRGSRSIENWITNLNFELKEINDICSGCRGHAGFTSSWRSVADTLRQKVEDAVREHPDYRVVFTGHSLGGALATVAGADLRGNGYDIDVFSYGAPRVGNRAFAEFLTVQTGGTLYRITHTNDIVPRLPPREFGYSHSSPEYWIKSGTLVPVRRRDIVKIEGIDATGGNNQPNIPSITAHLWYFGLIGTC

SEQ ID NO: 14089 - protein, 268 aa, Thermomyces lanuginosus
EVSQDLFNQFRLFAQYSAAAYCGKNNDAPAGTQITCTGNACPEVEKADATFLYSFEDSGVGDVTGFLALDNTNKLIVLSFRGSRSIENWLGNLNFDLKEINDICSGCRGHDGFTSSWRSVADTLRQKVEDAVREHPDYRVVFTGHSLGGALATVAGADLRGNKYDIDVFSYGAPRVGNRAFAEFLTVQTGGTLYRITHTNDIVPRLPPREFGYSHSSPEYWIKSGTLVPVRRRDIVKIEGIDATGGNNQPNIPSIPAHLWYFGLIGTC

SEQ ID NO: 14090 - protein, 268 aa, Thermomyces lanuginosus
EVSQDLFNQFNLFAQYSAAAYCQKNNSAPAGTNITCTGNACPEVEKADATTLYSFKDSGVGDVTGFLALDNTNKGIVLSFRGSRSIENWIQNLNFDLKEINDICSGCRGHDGFTSSWRSVADTLRQKVEDAVREHPDYRVVFTGHSLGGALATVAGADLRGNGYDIDVFSYGAPRVGNRAFAEFLTNQTGGTLYRITHTNDIVPRLPPREFGYSHSSPEYWIKSGTLVPVTRNDIVKIEGIDATGGNNQPNQPDIPAHLWYFGRIGTC

SEQ ID NO: 14091 - protein, 268 aa, Thermomyces lanuginosus
EVSQDLFNQFNLFAQYSAAAYCQKNNDAPAGTNITCTGNACPEVEKADATFLYSFKDSGVGDVTGFLALDNTNKQIVLSFRGSRSIENWIGNLNFDLKEINDICSGCRGHDGFTSSWRSVADTLRQKVEAAVREHPDYRVVFTGHSLGGALATIAWADLRGNGYDIDVFSYGAPRVGNRAFAEFLTVQQGGTLYRITHTNDIVPRLPPREFGYSHSSPEYWIKSGTLVPVTRNDIVKIEGIDATGGNNQPNIPDIPAHLWYFGLIGTC

SEQ ID NO: 14092 - protein, 268 aa, Thermomyces lanuginosus
EVSQDLFNQFRLFAQYSAAAYCGKNNDAPAGTQITCTGNACPEVEKADATFLYSFEDSGVGDVTGFLALDNTNKLIVLSFRGSRSIENWITNLNFDLKEINDICSGCRGHDGFTSSWRSVADTLRQKVEDAVREHPDYRVVFTGHSLGGALATVAGADLRGNKYDIDVFSYGAPRIGNRAFAEFLTVQTGGTLYRITHTNDIVPRLPPREFGYSHSSPEYWIKSGTLVPVRRRDIVKIEGIDATGGNNQPNIPSIPAHLWYFGLIGTC

SEQ ID NO: 14093 - protein, 268 aa, Thermomyces lanuginosus
EVSDDLFNQFKLFAQYSAAAYCGKNNQAPAGTNITCTGNACPEVEKADATFLYSFQDMGVGDVTGFLALDNTNKLIVLSFRGSRSIENWIGNLNFDLKEINDICSGCRGHDGFTSSWRSVADTLRQKVEDAVREHPDYRVVFTGHSLGGALATVAGADLRGNGYDIDVFSYGAPRVGNRAFAEFLTVQTGGTLYRITHTNDIVPRLPPREFGYSHSSPEYWIKSGTLVPVTRQDIVKIEGIDATGGNNQPNIPDITAHLWYFGLIGTC

SEQ ID NO: 14094 - protein, 268 aa, Thermomyces lanuginosus
EVSQDLFNQFNLFAQYSAAAYCGKNNDAPAGTNITCTGNACPEVEKADATLLYSFRNSGVGDVTGFLALDNTNKLIVLSFRGSRSIENWIGNLNFDLKEINDICSGCRGHDGFTSSWFSVADTLRQKVEDAVREHPDYRVVFTGHSLGGALATVAGADLRGNSYDIDVFSYGAPRVGNRAFAEFLTVQTGGTLYRITHTNDIVPRLPPREFGYSHSSPEYWIKSGTLVPVRRRDIVKIEGIDATGGNNQPNIPDIPAHLWYFGLIGTC

SEQ ID NO: 14095 - protein, 268 aa, Thermomyces lanuginosus
EVSQDLFNQFKLFAQYSAAAYCGKNNDAPAGTNITCTGNACPEVEKADATFLYSFKDSGVGDVTGFLALDNTNKQIVLSFRGSRSIENWIGNLNFDLKEINDICSGCRGHDGFTSSWRSVADTLRQKVEAAVREHPDYRVVFTGHSLGGALATIAGADLRGNGYDIDVFSYGAPRVGNRAFAEFLTNQQGGTLYRITHTNDIVPRLPPREFGYSHSSPEYWIKSGTLVPVTRNDIVKIEGIDATGGNNQPNIPDIPAHLWYFGLIGTC

SEQ ID NO: 14096 - protein, 268 aa, Thermomyces lanuginosus
EVSQDLFNQFNLFAQYSAAAYCQKNNSAPAGTNITCTGNACPEVEKADATFLYSFKDMGVGDVTGFLALDNTNKRIVLSFRGSRSIENWIQNLNFDLKEINDICSGCRGHDGFTSSWRSVADTLRQKVEDAVREHPDYRVVFTGHSLGGALATVAGADLRGNGYDIDVFSYGAPRVGNRAFAEFLTTQTGGTLYRITHTNDIVPRLPPREFGYSHSSPEYWIKSGTLVPVTRNDIVKIEGIDATGGNNQPNQPDIPAHLWYFGLIGTC

SEQ ID NO: 14097 - protein, 268 aa, Thermomyces lanuginosus
EVSQDLFNQFNLFAQYSAAAYCGKNNDAPAGTNITCTGNACPEVEKADATILYSFRDSGVGDVTGFLALDNTNKLIVLSFRGSRSIENWIGNLNFDLIEINDICSGCRGHDGFTSSWFSVADTLRQKVEDAVREHPDYRVVFTGHSLGGALATVAGADLRGNGYDIDVFSYGAPRVGNRAFAEFLTVQTGGTLYRITHTNDIVPRLPPREFGYSHSSPEYWIKSGTLVPVRRRDIVKIEGIDATGGNNQPNIPDITAHLWYFGLIGTC

SEQ ID NO: 14098 - protein, 268 aa, Thermomyces lanuginosus
EVSQDLFNQFNLFAQYSAAAYCGKNNQAPAGTQITCTGNACPEVEKADATFLYSFEDSGVGDVTGFLALDNTNKLIVLSFRGSRSIENWIGNLNFDLKEINDICSGCRGHDGFTSSWRSVADTLRQKVEDAVREHPDYRVVFTGHSLGGALATVAGADLRGNGYDIDVFSYGAPRVGNRAFAEFLTVQTGGTLYRITHTNDIVPRLPPREFGYSHSSPDYWIKSGTGVPVRRRDIVKIEGIDATGGNNRPNIPDIPAHLWYFGLIGTC

SEQ ID NO: 14099 - protein, 268 aa, Thermomyces lanuginosus
EVSQDLFNQFNLFAQYSAAAYCGKNNNAPAGTNITCTGNICPEVEKADATILYSFRDSGVGDVTGFLALDNTNKLIVLSFRGSRSIENWIGNLNFDLKEINDICSGCRGHDGFTSSWFSVADTLRQKVEDAVREHPDYRVVFTGHSLGGALATVAGADLRGNGYDIDVFSYGAPRVGNRAFAEFLTVQTGGTLYRITHTNDIVPRLPPREFGYSHSSPEYWIKSGTLVPVRRRDIVKIEGIDATGGNNQPNIPDIPAHLWYFGLIGTC

SEQ ID NO: 14100 - protein, 268 aa, Thermomyces lanuginosus
EVSQDLFNQFNLFAQYSKAAYCKANNDAPAGTNITCTGNACPEVEKADATFLYSFEDSGVGDVTGFLALDNTNKRIVLSFRGSRSIENWIGNLRFDLKEINDICSGCRGHDGFTSSWRSVADTLRQKVEAAVREHPDYRVVFTGHSLGGALATIAGADLRGNGYDIDVFSYGAPRVGNRAFAEFLTVQTGGTLYRITHTNDIVPRLPPREFGYSHSSPEYWIKSGTLVPVTRNDIVKIEGIDATGGNNQPNIPDIPAHLWYFGLIGTC

SEQ ID NO: 14101 - protein, 268 aa, Thermomyces lanuginosus
EVSQDLFNQFNLFAQYSAAAYCGKNNDAPAGTNITCTGNACPEVEKADATILYSFEDSGVGDVTGFLALDNTNKLIVLSFRGSRSIENWIGNLNFDLKEINDICSGCRGHDGFTSSWRSVADTLRQKVEDAVREHPDYRVVFAGHSLGGALATVAGADLRGDGYDIDVFSYGAPRVGNRAFAEFLTVQTGGTLYRITNTNDIVPRLPPREFGYSHSSPEYWIKSGTLPPVRRRDIVKIEGIDATGGNNQPNIPDIPAHLWYFGLIGTC

SEQ ID NO: 14102 - protein, 268 aa, Thermomyces lanuginosus
EVSQDLFNQFNLFAQYSAAAYCGKNNNAPAGTNITCTGNACPEVEKADATFLYSFRDSGVGDVTGFLALDNTNKLIVLSFRGSRSIENWIGNLNFDLKEINDICSGCRGHDGFTSSWFSVADTLRQKVEDAVREHPDYRVVFTGHSLGGALATVAGADLRGNGYDIDVFSYGAPRVGNRAFAEFLTVQTGGTLYRITHTNDIVPRLPPREFGYSHSSPEFWIKSGTLVPVRRRDIVKIEGIDATGGNNQPNIPDITAHLWYFGLIGTC

SEQ ID NO: 14103 - protein, 268 aa, Thermomyces lanuginosus
EVSQDLFNQFNLFAQYSAAAYCGKNNRAPAGSNITCTGNACPEVEKADATFLYSFEDSGVGDVTGFLALDNTNKLIVLSFRGSRSIENWIGNLNFDLKEINDICSGCRGHAGFTSSWRSVADTLRQKVEDAVREYPDYRVVFTGHSLGGALATVAGADLRGNGYDIDVFSYGAPRVGNRAFAEFLTVQTGGTLYRITHTNDIVPRLPPREFGYSHPSPEYWIKSGTGVPVTRNDIVKIEGIDATGGNNQPNIPDITAHLWYFGLIGTC

SEQ ID NO: 14104 - protein, 268 aa, Thermomyces lanuginosus
EVSQDLFNQFNLFAQYSAAAYCGKNNNAPAGTNITCTGNACPEVEKADATILYSFRDSGVGDVTGFLALDNTNKLIVLSFRGSRSIENWIGNLNFDLKEINDICSGCRGHDGFTSSWFSVADTLRQKVEDAVREHPDYRVVFTGHSLGGALATVAGADLRGNGYDIDVFSYGAPRVGNRAFAEFLTVQTGGTLYRITHTNDIVPRLPPREFGYSHSSPEFWIKSGTLVPVRRRDIVKIEGIDATGGNNQPNIPDIPAHLWYFGLIGTC

SEQ ID NO: 14105 - protein, 268 aa, Thermomyces lanuginosus
EVSQDLFNQFNLFAQYSAAAYCGKNNRAPAGTNITCTANACPEVEKADATFLYSFEDSGVGDVTGFLALDNTNKLIVLSFRGSRSIENWIGNLNFELKEINDICSGCRGHAGFTSSWRSVADTLRQKVEDAVREHPDYRVVFTGHSLGGALATVAGADLRGNGYDIDVFSYGAPRVGNRAFAEFLTVQTGGTLYRITHTNDIVPRLPPREFGYSHSSPEYWIKSGTLVPVRRRDIVKIEGIDATGGNNQPNIPSITAHLWYFGLIGTC

SEQ ID NO: 14106 - protein, 268 aa, Thermomyces lanuginosus
EVSQDLFNQFNLFAQYSAAAYCGKNNRAPAGTNITCTGNACPEVEKADATFLYSFEDYGVGDVTGFLALDNTNKLIVLSFRGSRSIENWIGNLNFDLKEINDICSGCRGHAGFTSSWRSVADTLRQKVEDAVREHVDYRVVFTGHSLGGALATVAGADLRGNGYDIDVFSYGAPRVGNRAFAEFLTVQTGGTLYRITHTNDIVPRLPPREFGYSHPSPEYWIKSGTGVPVTRNDIVKIEGIDATGGNNQPNIPDITAHLWYFGLIGTC

SEQ ID NO: 14107 - protein, 268 aa, Thermomyces lanuginosus
EVSQDLFNQFNLFAQYSAAAYCGKNNDAPAGTKITCTGNACPEVEKADATVLYSFEDSGVGDVTGFLALDNTNKLIVLSFRGSRSIENWIGNLNFDLEEIDDICSGCRGHDGFTSSWRSVADTLRQKVEDAVREHPDYRVVFTGHSLGGALATVAGADLRGNGYDIDVFSYGAPRVGNRAFAEFLTVQTGGTLYRITSTNDIVPRLPPREFGYSHSSPEYWIKSGTLVPVRRRDIVKIEGIDATGGNNQPNIPDIPAHLWYFGLIGTC

SEQ ID NO: 14108 - protein, 268 aa, Thermomyces lanuginosus
EVSQDLFNQFKLFAQYSAAAYCGKNNSAPAGTNITCTGNACPEVEKADATFLYSFEDSGVGDVTGFLALDNTNKLIVLSFRGSRSIENWIGNLNFDLKEINDICSGCRGHAGFTSSWRSVADTLRQKVEAAVREHPDYRVVFTGHSLGGALATIAGADLRGNGYDIDVFSYGAPRVGNRAFAEFLTNQQGGTLYRITHTNDIVPRLPPREFGYSHSSPEYWIKSGTLVPVTRNDIVKIEGIDATGGNNQPNIPDIPAHLWYFGLIGTC

SEQ ID NO: 14109 - protein, 268 aa, Thermomyces lanuginosus
EVSQDLFNQFNLFAQYSAAAYCKKNNSAPAGTNITCTGNACPEVEKADATTLYSFKDSGVGDVTGFLALDNTNKRIVLSFRGSRSIENWIGNLNFDLKEINDICSGCRGHDGFTSSWRSVADTLRQKVEAAVREHPDYRVVFTGHSLGGALATVAGADLRGNGYDIDVFSYGAPRVGNRAFAEFLTTQTGGTLYRITHTNDIVPRLPPREFGYSHSSPEYWIKSGTLVPVTRNDIVKIEGIDATGGNNQPNIPDIPAHLWYFGRIGTC

SEQ ID NO: 14110 - protein, 268 aa, Thermomyces lanuginosus
EVSQDLFNQFNLFAQYSKAAYCQANNDAPAGTNITCTGNACPEVEKADATFLYSFEDSGVGDVTGFLALDNTNKRIVLSFRGSRSIENWIGNLNFDLKEINDICSGCRGHDGFTSSWRSVADTLRQKVEAAVREHPDYRVVFTGHSLGGALATIAGADLRGNGYDIDVFSYGAPRVGNRAFAEFLTNQTGGTLYRITHTNDIVPRLPPREFGYSHSSPEYWIKSGTLVPVTRNDIVKIEGIDATGGNNQPNIPDIPAHLWYFGLIGTC

SEQ ID NO: 14111 - protein, 268 aa, Thermomyces lanuginosus
EVSQDLFNQFNLFAQYSAAAYCGKNNNAPAGTNITCTGNACPEVEKADATILYSFRDSGVGDVTGFLALDNTNKLIVLSFRGSRSIENWIGNLNFDLKEINDICSGCRGHDGFTSSWFSVADTLRQKVEDAVREHPDYRVVFTGHSLGGALATVAGADLRGNGYDIDVFSYGAPRVGNRAFAEFLTVQTGGTLYRITHTNDIVPRLPPREFGYSHSSPEYWIKSGTLVPVRRRDIVKIEGIDATGGNNQPNIPDITAHLWYFGLIGTC

SEQ ID NO: 14112 - protein, 268 aa, Thermomyces lanuginosus
EVSQDLFNQFNLFAQYSAAAYCGKNNNAPAGTNITCTGNACPEVEKADATFLYSFRDSGVGDVTGFLALDNTNKLIVLSFRGSRSIENWIGNLNFDLIEINDICSGCRGHDGFTSSWFSVADTLRQKVEDAVREHPDYRVVFTGHSLGGALATVAGADLRGNGYDIDVFSYGAPRVGNRAFAEFLTVQTGGTLYRITHTNDIVPRLPPREFGYSHSSPEYWIKSGTLVPVRRRDIVKIEGIDAEGGNNQPNIPDIPAHLWYFGLIGTC

SEQ ID NO: 14113 - protein, 268 aa, Synthetic construct
EVSQDLFNQFNLFAQYSAAAYCGKNNDAPAGTNITCTGNACPEVEKADATFLYSFKGSGVGRVTGFLALDNTNKLIVLSFRGTRFIENWIGNLNFLLKEINYICSGCRGHDGFTSSWRSVADTLRQKVEDAVREHPDYRVVFTGHSLGGALATVAGADLRGNGYDIDVFSYGAPRVGNRAFAEFLTVQTGGTLYRITHTNDIVPRLPPRKFGYSHSSPEYWIKSGTLVPVTRNDIVKIEGIDATGGNNQPNIPDIPAHLWYFGLIGTC

SEQ ID NO: 14114 - protein, 268 aa, Thermomyces lanuginosus
EVSQDLFNQFRLFAQYSAAAYCGKNNDAPAGTQITCTGNACPEVEKADATFLYSFEDSGVGDVTGFLALDNTNKLIVLSFRGSRSIENWITNLNFDLKEINDICSGCRGHDGFTSSWRSVADTLRQKVEDAVREHPDYRVVFTGHSLGGALATVAGADLRGNKYDIDVFSYGAPRVGNRAFAEFLTVQTGGTLYRITHTNDIVPRLPPREFGYSHSSPEYWIKSGTLVPVRRRDIVKIEGIDATGGNNQPNIPSIFAHLWYFGLIGTC

SEQ ID NO: 14115 - protein, 268 aa, Thermomyces lanuginosus
EVSQDLFNQFNLFAQYSAAAYCGKNNDAPAGTQITCTGNACPEVEKADATFLYSFEDSGVGDVTGFLALDNTNKLIVLSFRGSRSIENWIQNLNFDLKEINDICSGCRGHDGFTSSWRSVADTLRQKVEDAVREHPDYRVVFAGHSLGGGLATVAGADLRGNGYDIDVFSYGAPRVGNRAFAEFLTVQTGGTLYRITHTNDIVPRLPPRQFGYSHSSPEYWIKSGTLVPVRRRDIVKIEGIDATGGNNQPNIPDAPAHLWYFGLIGTC

SEQ ID NO: 14116 - protein, 268 aa, Thermomyces lanuginosus
EVSQDLFLQFRLFAQYSAAAYCGKNNDAPAGTQITCTGNACPEVEKADATFLYSFEDSGVGDVTGFLALDNTNKLIVLSFRGSRSIENWITNLNFDLKEINDICSGCRGHDGFTSSWRSVADTLRQKVEDAVREHPDYRVVFTGHSLGGALATVAGADLRGNKYDIDVFSYGAPRVGNRAFAEFLTVQTGGTLYRITHTNDIVPRLPPREFGYSHSSPEYWIKSGTLVPVRRRDIVKIEGIDATGGNNQPNIPSIPAHLWYFGLIGTC

SEQ ID NO: 14117 - protein, 268 aa, Thermomyces lanuginosus
EVSQDLFNQFNLFAQYSAAAYCGKNNDAPAGTQITCTGNACPEVEKADATFLYSFEDSGVGDVTGFLALDNTNKLIVLSFRGSRSIENWITNLSFDLKEINDICSGCRGHAGFTSSWRSVADTLRQKVEDAVREHPDYRVVFTGHSLGGALATVAGADLRGNGYDIDVFSYGAPRIGNRAFAEFLTVQTGGTLYRITHTNDIVPRLPPREFGYSHSSPEYWIKSGTLVPVRRRDIVKIEGIDATGGNNQPNIPSIPAHLWYFGLIGTC

SEQ ID NO: 14118 - protein, 268 aa, Thermomyces lanuginosus
EVSQDLFNQFNLFAQYSAAAYCAKNNDAPAGTNITCTGNACPEVEKADATFLYSFEDSGVGDVTGFLALDNTNKQIVLSFRGSRSIENWIGNLRFDLKEINDICSGCRGHAGFTSSWRSVADTLRQKVEAAVREHPDYRVVFTGHSLGGALATVAWADLRGNGYDIDVFSYGAPRVGNRAFAEFLTVQQGGTLYRITHTNDIVPRLPPREFGYSHSSPEYWIKSGTLVPVTRNDIVKIEGIDATGGNNQPNIPDIPAHLWYFGRIGTC

SEQ ID NO: 14119 - protein, 268 aa, Thermomyces lanuginosus
EVSQDLFNQFNLFAQYSAAAYCGKNNDAPAGTNITCTGNACPEVEKADATFLYSFEDSGVGDVTGFLALDNTNKLIVLSFRGSRSIENWIGNLNFDLKEINDICSGCRGHDGFTSSWRSVADTLRQKVEDAVREHPDYRVVFTGHSLGGALATVAGADLRGNGYDIDVFSYGAPRVGNRAFAEFLTVQTGGTLYRITHTNDIVPRLPPLEFGYSHSSPEYWIKSGTLVPVTRNDIVKIEGIDATGGNGGTLGLDIPAHLWYFGLIGTC

SEQ ID NO: 14120 - protein, 268 aa, Thermomyces lanuginosus
EVSQDLFNQFNLFAQYSAAAYCQKNNDAPAGTNITCTGNACPEVEKADATFLYSFEDSGVGDVTGFLALDNTNKQIILSFRGSRSIENWIGNLRFDLKEINDICSGCRGHDGFTSSWRSVADTLRQKVEAAVREHPDYRVVFTGHSLGGALATVAWADLRGNGYDIDVFSYGAPRVGNRAFAEFLTNQTGGTLYRITHTNDIVPRLPPREFGYSHSSPEYWIKSGTLVPVTRNDIVKIEGIDATGGNNQPNIPDIPAHLWYFGLIGTC

SEQ ID NO: 14121 - protein, 268 aa, Thermomyces lanuginosus
EVSQDLFNQFNLFAQYSKAAYCKANNDAPAGTNITCTGNACPEVEKADATFLYSFEDSGVGDVTGFLALDNTNKQIVLSFRGSRSIENWIGNLRFDLKEINDICSGCRGHDGFTSSWRSVADTLRQKVEDAVREHPDYRVVFTGHSLGGALATVAWADLRGNGYDIDVFSYGAPRVGNRAFAEFLTQQTGGTLYRITHTNDIVPRLPPREFGYSHSSPEYWIKSGTLVPVTRNDIVKIEGIDATGGNNQPNIPDIPAHLWYFGLIGTC

SEQ ID NO: 14122 - protein, 268 aa, Thermomyces lanuginosus
EVSQDLFNQFNLFAQYSAAAYCKKNNSAPAGTNITCTGNACPEVEKADATTLYSFEDMGVGDVTGFLALDNTNKQIVLSFRGSRSIENWIGNLNFDLKEINDICSGCRGHDGFTSSWRSVADTLRQKVEDAVREHPDYRVVFTGHSLGGALATVAGADLRGNGYDIDVFSYGAPRVGNRAFAEFLTHQTGGTLYRITHTNDIVPRLPPREFGYSHSSPEYWIKSGTLVPVTRNDIVKIEGIDATGGNNQPNQPDIPAHLWYFGRIGTC

SEQ ID NO: 14123 - protein, 268 aa, Thermomyces lanuginosus
EVSQDLFNQFNLFAQYSAAAYCGKNNRAPAGTQITCTGNACPEVEKADATFLYSFEDSGVGDVTGFLALDNTNKLIVLSFRGSRSIENWIGNLNFDLKEINDICSGCRGHDGFTSSWRSVADTLRQKVEDAVREHPDYRVVFTGHSLGGALATVAGADLRGNGYDIDVFSYGAPRVGNRAFAEFLTVQTGGTLYRITHTNDIVPRLPPREFGYSHSSPEYWIKSGTGVPVRRRDIVKIEGIDATGGNNRPNIPSIPAHLWYFGLIGTC

SEQ ID NO: 14124 - protein, 268 aa, Thermomyces lanuginosus
EVSQDLFNQFNLFAQYSAAAYCSKNNDAPAGTNITCTGNACPEVEKADATILYSFRDSGVGDVTGFLALDNTNKLIVLSFRGSRSIENWIGNLNFDLKEINDICSGCRGHDGFTSSWFSVADTLRQKVEDAVREHPDYRVVFTGHSLGGALATVAGADLRGNGYDIDVFSYGAPRVGNRAFAEFLTVQTGGTLYRITHTNDIVPRLPPREFGYSHSSPEFWIKSGTLVPVRRRDIVKIEGIDATGGNNQPNIPDIPAHLWYFGLIGTC

SEQ ID NO: 14125 - protein, 268 aa, Thermomyces lanuginosus
EVSQDLFNQFNLFAQYSAAAYCSKNNNAPAGTNITCTGNACPEVEKADATFLYSFRDSGVGDVTGFLALDNTNKLIVLSFRGSRSIENWIGNLNFDLKEINDICSGCRGHDGFTSSWFSVADTLRQKVEDAVREHPDYRVVFTGHSLGGALATVAGADLRGNGYDIDVFSYGAPRVGNRAFAEFLTVQTGGTLYRITHTNDIVPRLPPREFGYSHSSPEYWIKSGTLVPVRRRDIVKIEGIDATGGNNQPNIPDITAHLWYFGLIGTC

SEQ ID NO: 14126 - protein, 268 aa, Thermomyces lanuginosus
EVSQDLFNQFRLFAQYSAAAYCGKNNDAPAGTQITCTGNACPEVEKADATFLYSFEDSGVGDVTGFLALDNTNKLIVLSFRGSRSIENWITNLNFDLKEINDICSGCRGHDGFTSSWRSVADTLRQKVEDAVREHPDYRVVFTGHSLGGALATVAGADLRGNLYDIDVFSYGAPRIGNRAFAEFLTVQTGGTLYRITHTNDIVPRLPPREFGYSHSSPEYWIKSGTLVPVRRRDIVKIEGIDATGGNNQPNIPSIPAHLWYFGLIGTC

SEQ ID NO: 14127 - protein, 268 aa, Thermomyces lanuginosus
EVSQDLFNQFNLFAQYSAAAYCGKNNDAPAGTNITCTGNICPEVEKADATLLYSFRDSGVGDVTGFLALDNTNKLIVLSFRGSRSIENWIGNLNFDLKEINDICSGCRGHDGFTSSWFSVADTLRQKVEDAVREHPDYRVVFTGHSLGGALATVAGADLRGNSYDIDVFSYGAPRVGNRAFAEFLTVQTGGTLYRITHTNDIVPRLPPREFGYSHSSPEYWIKSGTLVPVRRRDIVKIEGIDATGGNNQPNIPDIPAHLWYFGLIGTC

SEQ ID NO: 14128 - protein, 268 aa, Thermomyces lanuginosus
EVSRDLFNQFNLFAQYSAAAYCGKNNDAPAGTNITCTGNACPEVEKADATILYSFEDSGVGDVTGFLALDNTNKLIVLSFRGSRSIENWIGNLNFDLKEINDICSGCRGHDGFTSSWRSVADTLRQKVEDAVREHPDYRVVFAGHSLGGALATVAGADLRGDGYDIDVFSYGAPRVGNRAFAEFLTVQTGGTLYRITNTNDIVPRLPPREFGYSHSSPEYWIKSGTLVPVRRRDIVKIEGIDATGGNNQPNIPDIPAHLWYFGLIGTC

SEQ ID NO: 14129 - protein, 268 aa, Thermomyces lanuginosus
EVSQDLFNQFNLFAQYSAAAYCGKNNDAPAGTNITCTGNICPEVEKADATLLYSFRDSGVGDVTGFLALDNTNKLIVLSFRGSRSIENWIGNLNFDLIEINDICSGCRGHDGFTSSWFSVADTLRQKVEDAVREHPDYRVVFTGHSLGGALATVAGADLRGNGYDIDVFSYGAPRVGNRAFAEFLTVQTGGTLYRITHTNDIVPRLPPREFGYSHSSPEYWIKSGTLVPVRRRDIVKIEGIDATGGNNQPNIPDIPAHLWYFGLIGTC

SEQ ID NO: 14130 - protein, 268 aa, Thermomyces lanuginosus
EVSQDLFNQFNLFAQYSAAAYCGKNNDAPAGTQITCTGNACPEVEKADATFLYSFEDSGVGDVTGFLALDNTNKLIVLSFRGSRSIENWIGNLNFDLKEINDICSGCRGHDGFTSSWRSVADTLRQKVEDAVREHPDYRVVFAGHSLGGGLATVAGADLRGNGYDIDVFSYGAPRVGNRAFAEFLTVQTGGTLYRITHTNDIVPRLPPRQFGYSHSSPEYWIKSGTLVPVRRRDIVKIEGIDATGGNNQPNIPDAPAHLWYFGLIGTC

SEQ ID NO: 14131 - protein, 268 aa, Thermomyces lanuginosus
EVSQDLFNQFNLFAQYSAAAYCGKNNRAPAGTNITCTANACPEVEKADATFLYSFEDSGVGDVTGFLALDNTNKLIVLSFRGSRSIENWIANLNFELKEINDICSGCRGHAGFTSSWRSVADTLRQKVEDAVREHPDYRVVFTGHSLGGALATVAGADLRGNKYDIDVFSYGAPRVGNRAFAEFLTVQTGGTLYRITHTNDIVPRLPPREFGYSHSSPEYWIKSGTLVPVRRRDIVKIEGIDATGGNNQPNIPSITAHLWYFGLIGTC

SEQ ID NO: 14132 - protein, 268 aa, Thermomyces lanuginosus
EVSQDLFNQFNLFAQYSKAAYCGKNNDAPAGTNITCTGNACPEVEKADATFLYSFEDSGVGDVTGFLALDNTNKQIVLSFRGSRSIENWIGNLRFDLKEINDICSGCRGHAGFTSSWRSVADTLRQKVEDAVREHPDYRVVFTGHSLGGALATIAWADLRGNGYDIDVFSYGAPRVGNRAFAEFLTVQQGGTLYRITHTNDIVPRLPPREFGYSHSSPEYWIKSGTLVPVTRNDIVKIEGIDATGGNNQPNIPDIPAHLWYFGRIGTC

SEQ ID NO: 14133 - protein, 268 aa, Thermomyces lanuginosus
EVSQDLFNQFRLFAQYSAAAYCGKNNDAPAGTQITCTGNACPEVEKADATFLYSFEDSGVGDVTGFLALDNTNKLIVLSFRGSRSIENWITNLNFDLKEINDICSGCRGHDGFTSSWRSVADTLRQKVEDAVREHPDYRVVFTGHSLGGALATVAGADLRGNKYDIDVFSYGAPRVGNRAFAEFLTVQTGGTLYRITHTNDIVPRLPPREFGYSHSSPEYWIKSGTLVPVRRRDIVKIEGIDATGGNNQPNIPSIIAHLWYFGLIGTC

SEQ ID NO: 14134 - protein, 268 aa, Thermomyces lanuginosus
EVSQDLFNQFNLFAQYSAAAYCSKNNDAPAGTNITCTGNACPEVEKADATILYSFRDSGVGDVTGFLALDNTNKLIVLSFRGSRSIENWIGNLNFDLIEINDICSGCRGHDGFTSSWFSVADTLRQKVEDAVREHPDYRVVFTGHSLGGALATVAGADLRGNGYDIDVFSYGAPRVGNRAFAEFLTVQTGGTLYRITHTNDIVPRLPPREFGYSHSSPEYWIKSGTLVPVRRRDIVKIEGIDATGGNNQPNIPDIPAHLWYFGLIGTC

SEQ ID NO: 14135 - protein, 268 aa, Thermomyces lanuginosus
EVSQDLFNQFNLFAQYSAAAYCGKNNRAPAGTNITCTGNACPEVEKADATFLYSFEDSGVGDVTGFLALDNTNKLIVLSFRGSRSIENWIGNLNFDLKEINDICSGCRGHAGFTSSWRSVADTLRQKVEDAVREHPDYRVVFTGHSLGGALATVAGADLRGNKYDIDVFSYGAPRVGNRAFAEFLTVQTGGTLYRITHTNDIVPRLPPREFGYSHSSPEYWIKSGTLVPVRRRDIVKIEGIDATGGNNQPNIPSITAHLWYFGLIGTC

SEQ ID NO: 14136 - protein, 268 aa, Thermomyces lanuginosus
EVSRDLFNQFNLFAQYSAAAYCGKNNDAPAGTNITCTGNACPEVEKADATFLYSFEDSGVGDVTGFLALDNTNKLIVLSFRGSRSIENWIGNLNFDLKEINDICSGCRGHDGFTSSWRSVADTLRQKVEDAVREHPDYRVVFAGHSLGGALATVAGADLRGDGYDIDVFSYGAPRVGNRAFAEFLTVQTGGTLYRITSTNDIVPRLPPREFGYSHSSPEYWIKSGTLPPVRRRDIVKIEGIDATGGNNQPNIPDIPAHLWYFGLIGTC

SEQ ID NO: 14137 - protein, 268 aa, Thermomyces lanuginosus
EVSQDLFNQFNLFAQYSAAAYCSKNNDAPAGTNITCTGNACPEVEKADATFLYSFRDSGVGDVTGFLALDNTNKLIVLSFRGSRSIENWIGNLNFDLKEINDICSGCRGHDGFTSSWFSVADTLRQKVEDAVREHPDYRVVFTGHSLGGALATVAGADLRGNGYDIDVFSYGAPRVGNRAFAEFLTVQTGGTLYRITHTNDIVPRLPPREFGYSHSSPEFWIKSGTLVPVRRRDIVKIEGIDAEGGNNQPNIPDIPAHLWYFGLIGTC

SEQ ID NO: 14138 - protein, 268 aa, Thermomyces lanuginosus
EVSQDLFNQFNLFAQYSAAAYCQKNNDAPAGTNITCTGNACPEVFKADVTFLYSFEDSGVGDVTGFLALDNTNKLIILSFRGSRSIENWIGNLNFDLKEINDICSGCRGHDGFTSSWRSVADTLRQKVEDAVREHPDYRVVFTGHSLGGALATVAWADLRGNGYDIDVFSYGAPRVGNRAFAEFLTTQDGGTLYRITHTNDIVPRLPPREFGYSHSSPEYWIKSGTLVPVTRNDIVKIEGIDATGGNNQPNIPDIPAHLWYFGLIGTC

SEQ ID NO: 14139 - protein, 268 aa, Thermomyces lanuginosus
EVSQDLFNQFNLFAQYSKAAYCKANNDAPAGTNITCTGNACPEVEKADATFLYSFEDSGVGDVTGFLALDNTNKQIVLSFRGSRSIENWIGNLRFDLKEINDICSGCRGHDGFTSSWRSVADTLRQKVEDAVREHPDYRVVFTGHSLGGALATIAGADLRGNGYDIDVFSYGAPRVGNRAFAEFLTQQTGGTLYRITHTNDIVPRLPPREFGYSHSSPEYWIKSGTLVPVTRNDIVKIEGIDATGGNNQPNIPDIPAHLWYFGLIGTC

SEQ ID NO: 14140 - protein, 268 aa, Synthetic construct
EVSQDLFNQFNLFAQYSAAAYCGKNNDAPAGTNITCTGNACPEVEKADATFLYSFEDSGVGDVTGFLALDNTNKLIVLSFRGSRSIENWIGNLKLHLKEISDICSGCRGHDGFTSSWRSVADTLRQKVEDAVREHPDYRVVFTGHSLGGALATVAGADLRGNGYDIDVFSYGAPRVGNRALAEFLTVQTGGTLYRITHTNDIVPRLPPREFGYSHSSPEYWIKSGTLVPVTRNYIVKIEGIDATGGNNQPNLPDITAHLWYFAQIGTC

SEQ ID NO: 14141 - protein, 268 aa, Thermomyces lanuginosus
EVSQDLFNQFNLFAQYSKAAYCQKNNDAPAGTNITCTGNACPEVEKADATFLYSFEDSGVGDVTGFLALDNTNKRIILSFRGSRSIENWIGNLRFDLKEINDICSGCRGHDGFTSSWRSVADTLRQKVEDAVREHPDYRVVFTGHSLGGALATVAWADLRGNGYDIDVFSYGAPRVGNRAFAEFLTNQTGGTLYRITHTNDIVPRLPPREFGYSHSSPEYWIKSGTLVPVTRNDIVKIEGIDATGGNNQPNIPDIPAHLWYFGLIGTC

SEQ ID NO: 14142 - protein, 268 aa, Thermomyces lanuginosus
EVSQDLFNQFNLFAQYSAAAYCGKNNDAPAGTNITCTGNACPEVEKADATILYSFRDSGVGDVTGFLALDNTNKLIVLSFRGSRSIENWIGNLNFDLKEINDICSGCRGHDGFTSSWFSVADTLRQKVEDAVREHPDYRVVFTGHSLGGALATVAGADLRGNGYDIDVFSYGAPRVGNRAFAEFLTVQTGGTLYRITHTNDIVPRLPPREFGYSHSSPEYWIKSGTLVPVRRRDIVKIEGIDAEGGNNQPNIPDITAHLWYFGLIGTC

SEQ ID NO: 14143 - protein, 268 aa, Thermomyces lanuginosus
EVSRDLFNQFNLFAQYSAAAYCGKNNDAPAGTNITCTGNACPEVEKADATILYSFEDSGVGDVTGFLALDNTNKLIVLSFRGSRSIENWIGNLNFDLKEINDICSGCRGHDGFTSSWRSVADTLRQKVEDAVREHPDYRVVFTGHSLGGALATVAGADLRGDGYDIDVFSYGAPRVGNRAFAEFLTVQTGGTLYRITNTNDIVPRLPPREFGYSHSSPEYWIKSGTLRPVRRRDIVKIEGIDATGGNNQPNIPDIPAHLWYFGLIGTC

SEQ ID NO: 14144 - protein, 268 aa, Thermomyces lanuginosus
EVSQDLFNQFNLFAQYSAAAYCQKNNDAPAGTNITCTGNACPEVEKADATTLYSFEDMGVGDVTGFLALDNTNKGIVLSFRGSRSIENWIQNLNFDLKEINDICSGCRGHDGFTSSWRSVADTLRQKVEAAVREHPDYRVVFTGHSLGGALATVAGADLRGNGYDIDVFSYGAPRVGNRAFAEFLTTQTGGTLYRITHTNDIVPRLPPREFGYSHSSPEYWIKSGTLVPVTRNDIVKIEGIDATGGNNQPNQPDIPAHLWYFGRIGTC

SEQ ID NO: 14145 - protein, 268 aa, Thermomyces lanuginosus
EVSQDLFNQFNLFAQYSKAAYCQKNNDAPAGTNITCTGNACPEVFKADATFLYSFEDSGVGDVTGFLALDNTNKQIVLSFRGSRSIENWIGNLNFDLKEINDICSGCRGHDGFTSSWRSVADTLRQKVEDAVREHPDYRVVFTGHSLGGALATVAWADLRGNGYDIDVFSYGAPRVGNRAFAEFLTTQDGGTLYRITHTNDIVPRLPPREFGYSHSSPEYWIKSGTLVPVTRNDIVKIEGIDATGGNNQPNIPDIPAHLWYFGLIGTC

SEQ ID NO: 14146 - protein, 268 aa, Thermomyces lanuginosus
EVSQDLFNQFRLFAQYSAAAYCGKNNDAPAGTQITCTGNACPEVEKADATFLYSFEDSGVGDVTGFLVLDNTNKLIVLSFRGSRSIENWITNLNFDLKEINDICSGCRGHDGFTSSWRSVADTLRQKVEDAVREHPDYRVVFTGHSLGGALATVAGADLRGNKYDIDVFSYGAPRVGNRAFAEFLTVQTGGTLYRITHTNDIVPRLPPREFGYSHSSPEYWIKSGTLVPVRRRDIVKIEGIDATGGNNQPNIPSIPAHLWYFGLIGTC

SEQ ID NO: 14147 - protein, 268 aa, Thermomyces lanuginosus
EVSQDLFNQFNLFAQYSAAAYCGKNNDAPAGTNITCTGNACPEVEKADATFLYSFRDSGVGDVTGFLALDNTNKLIVLSFRGSRSIENWIGNLNFDLIEINDICSGCRGHDGFTSSWFSVADTLRQKVEDAVREHPDYRVVFTGHSLGGALATVAGADLRGNSYDIDVFSYGAPRVGNRAFAEFLTVQTGGTLYRITHTNDIVPRLPPREFGYSHSSPEYWIKSGTLVPVRRRDIVKIEGIDATGGNNQPNIPDITAHLWYFGLIGTC

SEQ ID NO: 14148 - protein, 268 aa, Thermomyces lanuginosus
EVSQDLFNQFNLFAQYSAAAYCGKNNDAPAGTNITCTGNACPEVEKADATFLYSFEDNGSGDVTGFLALDNTNKLIVLSFRGSRSIENWIGNLNFDLKEINDICSGCRGHDGFTSSWRSVADTLRQKVEDAVREHPDYRVVFTGHSLGGALATVAGADLRGNGYDIDVFSYGAPRVGNRAFAEFLTVQTGGTLYRITHTNDIVPRLPPREFGYSHSSPEYWIKSGTLVPVRRRDIVKIEGIDATGGNNIPNIPDLKAHLWYFGLIGTC

SEQ ID NO: 14149 - protein, 268 aa, Thermomyces lanuginosus
EVSQDLFNQFNLFAQYSAAAYCKKNNDAPAGTNITCTGNACPEVEKADATFLYSFEDSGVGDVTGFLALDNTNKQIVLSFRGSRSIENWIGNLRFDLKEINDICSGCRGHDGFTSSWRSVADTLRQKVEAAVREHPDYRVVFTGHSLGGALATIAWADLRGNGYDIDVFSYGAPRVGNRAFAEFLTNQTGGTLYRITHTNDIVPRLPPREFGYSHSSPEYWIKSGTLVPVTRNDIVKIEGIDATGGNNQPNIPDIPAHLWYFGRIGTC

SEQ ID NO: 14150 - protein, 268 aa, Thermomyces lanuginosus
EVSQDLFNQFNLFAQYSKAAYCGKNNDAPAGTNITCTGNACPEVEKADATFLYSFEDSGVGDVTGFLALDNTNKLIVLSFRGSRSIENWIGNLNFDLKEINDICSGCRGHAGFTSSWRSVADTLRQKVEAAVREHPDYRVVFTGHSLGGALATIAWADLRGNGYDIDVFSYGAPRVGNRAFAEFLTTQQGGTLYRITHTNDIVPRLPPREFGYSHSSPEYWIKSGTLVPVTRNDIVKIEGIDATGGNNQPNIPDIPAHLWYFGLIGTC

SEQ ID NO: 14151 - protein, 268 aa, Thermomyces lanuginosus
EVSQDLFNQFNLFAQYSAAAYCGKNNDAPAGTNITCTGNACPEVEKADATFLYSFEDNGSGDVTGFLALDNTNKLIVLSFRGSRSSENWIGNLNFDLKEINDICSGCRGHDGFTSSWRSVADTLRQKVEDAVREHPDYRVVFTGHSLGGALATVAGADLRGNGYDIDVFSYGAPRVGNRAFAEFLTVQTGGTLYRITHTNDIVPRLPPREFGYSHSSPEYWIKSGTGVPVRRRDIVKIEGIDATGGNNQPNIPDISAHLWYFGLIGTC

SEQ ID NO: 14152 - protein, 268 aa, Synthetic construct
EVSQDLFNQFNLFAQYSAAAYCGKNNDAPAGTNITCTGNACPEVEKADATFLYSFEGSVVGDVTGFLALDNTNKLIVLSFRGSRSIENWIGNLKFLMKEINDICSGCRGHDGFTSPWRSVADTLRQKVEDAVREHPDYRVVFTGHSLGGALATVAGADLRGNGYDIDVFPYGAPRVGNRAFAEFLTVQTGGTLYRITHTNDIVPRLPPREFGYSHSSPEYWIKSGTLVPVTRNDIVKIEGIDATGGNNRPNIPDIPAHLWYFGLIGTC

SEQ ID NO: 14153 - protein, 268 aa, Thermomyces lanuginosus
EVSQDLFNQFNLFAQYSAAAYCGKNNDAPAGTNITCTGNACPEVEKADATFLYSFEDNGSGDVTGFLALDNTNKLIVLSFRGSRSTENWIGNLNFDLKEINDICSGCRGHDGFTSSWRSVADTLRQKVEDAVREHPDYRVVFTGHSLGGALATVAGADLRGNGYDIDVFSYGAPRVGNRAFAEFLTVQTGGTLYRITHTNDIVPRLPPREFGYSHSSPEYWIKSGTGVPVRRRDIVKIEGIDATGGNNQPNIPDILAHLWYFGLIGTC

SEQ ID NO: 14154 - protein, 268 aa, Thermomyces lanuginosus
EVSQDLFNQFNLFAQYSAAAYCGKNNDAPAGTNITCTGNACPEVEKADATFLYSFRDSGVGDVTGFLALDNTNKLIVLSFRGSRSIENWIGNLNFDLIEINDICSGCRGHDGFTSSWFSVADTLRQKVEDAVREHPDYRVVFTGHSLGGALATVAGADLRGNGYDIDVFSYGAPRVGNRAFAEFLTVQTGGTLYRITHTNDIVPRLPPREFGYSHSSPEFWIKSGTLVPVRRRDIVKIEGIDATGGNNQPNIPDITAHLWYFGLIGTC

SEQ ID NO: 14155 - protein, 268 aa, Thermomyces lanuginosus
EVSQDLFNQFNLFAQYSAAAYCQKNNDAPAGTNITCTGNACPEVEKADATFLYSFEDSGVGDVTGFLALDNTNKQIVLSFRGSRSIENWIGNLNFDLKEINDICSGCRGHAGFTSSWRSVADTLRQKVEAAVREHPDYRVVFTGHSLGGALATIAWADLRGNGYDIDVFSYGAPRVGNRAFAEFLTNQTGGTLYRITHTNDIVPRLPPREFGYSHSSPEYWIKSGTLVPVTRNDIVKIEGIDATGGNNQPNIPDIPAHLWYFGRIGTC

SEQ ID NO: 14156 - protein, 268 aa, Thermomyces lanuginosus
EVSDDLFNQFKLFAQYSAAAYCGKNNSAPAGTNITCTGNACPEVEKADATFLYSFKDMGVGDVTGFLALDNTNKLIVLSFRGSRSIENWIGNLNFDLKEINDICSGCRGHDGFTSSWRSVADTLRQKVEDAVREHPDYRVVFTGHSLGGALATVAGADLRGNGYDIDVFSYGAPRVGNRAFAEFLTVQTGGTLYRITHTNDIVPRLPPREFGYSHSSPEYWIKSGTLVPVTRQDIVKIEGIDATGGNNQPNIPDITAHLWYFGLIGTC

SEQ ID NO: 14157 - protein, 268 aa, Thermomyces lanuginosus
EVSQDLFNQFNLFAQYSAAAYCGKNNSAPAGTQITCTGNACPEVEKADATFLYSFEDSGVGDVTGFLALDNTNKLIVLSFRGSRSIENWIANLNFEQKEINDICSGCRGHAGFTSSWRSVADTLRQKVEDAVREHPDYRVVFTGHSLGGALATVAGADLRGNGYDIDVFSYGAPRVGNRAFAEFLTVQTGGTLYRITHTNDIVPRLPPREFGYSHPSPEYWIKSGTLVPVRRRDIVKIEGIDATGGNNQPNIPDITAHLWYFGLIGTC

SEQ ID NO: 14158 - protein, 268 aa, Thermomyces lanuginosus
EVSQDLFNQFNLFAQYSAAAYCGKNNDAPAGTNITCTGNACPEVEKADATLLYSFRNSGVGDVTGFLALDNTNKLIVLSFRGSRSIENWIGNLNFDLIEINDICSGCRGHDGFTSSWFSVADTLRQKVEDAVREHPDYRVVFTGHSLGGALATVAGADLRGNGYDIDVFSYGAPRVGNRAFAEFLTVQTGGTLYRITHTNDIVPRLPPREFGYSHSSPEYWIKSGTLVPVRRRDIVKIEGIDATGGNNQPNIPDIPAHLWYFGLIGTC

SEQ ID NO: 14159 - protein, 268 aa, Thermomyces lanuginosus
EVSQDLFNQFNLFAQYSAAAYCGKNNNAPAGTNITCTGNICPEVEKADATFLYSFRDSGVGDVTGFLALDNTNKLIVLSFRGSRSIENWIGNLNFDLKEINDICSGCRGHDGFTSSWFSVADTLRQKVEDAVREHPDYRVVFTGHSLGGALATVAGADLRGNGYDIDVFSYGAPRVGNRAFAEFLTVQTGGTLYRITHTNDIVPRLPPREFGYSHSSPEYWIKSGTLVPVRRRDIVKIEGIDATGGNNQPNIPDITAHLWYFGLIGTC

SEQ ID NO: 14160 - protein, 268 aa, Thermomyces lanuginosus
EVSQDLFNQFNLFAQYSAAAYCGKNNDAPAGTNITCTGNACPEVEKADATILYSFRDSGVGDVTGFLALDNTNKLIVLSFRGSRSIENWIGNLNFDLIEINDICSGCRGHDGFTSSWFSVADTLRQKVEDAVREHPDYRVVFTGHSLGGALATVAGADLRGNGYDIDVFSYGAPRVGNRAFAEFLTVQTGGTLYRITHTNDIVPRLPPREFGYSHSSPEFWIKSGTLVPVRRRDIVKIEGIDATGGNNQPNIPDIPAHLWYFGLIGTC

SEQ ID NO: 14161 - protein, 268 aa, Thermomyces lanuginosus
EVSQDLFNQFNLFAQYSAAAYCKKNNSAPAGTNITCTGNACPEVEKADATTLYSFKDSGVGDVTGFLALDNTNKGIVLSFRGSRSIENWIQNLNFDLKEINDICSGCRGHDGFTSSWRSVADTLRQKVEDAVREHPDYRVVFTGHSLGGALATVAGADLRGNGYDIDVFSYGAPRVGNRAFAEFLTNQTGGTLYRITHTNDIVPRLPPREFGYSHSSPEYWIKSGTLVPVTRNDIVKIEGIDATGGNNQPNQPDIPAHLWYFGRIGTC

SEQ ID NO: 14162 - protein, 268 aa, Thermomyces lanuginosus
EVSQDLFNQFNLFAQYSAAAYCGKNNDAPAGTNITCTGNACPDVEKADATFLYSFAASGVGDVTGFLALDNTNKLIVLSFRGSRSIKNWIGNLNFDLKEINDICSGCRGHAGFTSSWRSVADTLRQKVEDAVREHPDYRVVFTGHSLGGALATVAGADLRGNGYDIDVFSYGAPRVGNRAFAEFLTVQTGGTLYRITHTNDIVPRLPPREFGYSHSSPEYWIKSGTLVPVRRRDIVKIEGIDATGGNNQPNIPDIPAHLWYFGLIGTC

SEQ ID NO: 14163 - protein, 268 aa, Thermomyces lanuginosus
EVSQDLFNQFNLFAQYSAAAYCGRNNDAPAGTNITCTGNACPEVEKADATFLYSFEDSGVGDVTGFLALDNTNRLIVLSFRGSRSIENWIGNLNFDLREINDICSGCRGHDGFTSSWRSVADTLRQRVEDAVREHPDYRVVFTGHSLGGALATVAGADLRGNGYDIDVFSYGAPKVGNRAFAEFLTVQTGGTLYRITHTNDIVPRLPPREFGYSHSSPEYWIRSGTLVPVTRNDIVRIEGIDATGGNNQPNIPDIPAHLWYFGLIGTC

SEQ ID NO: 14164 - protein, 268 aa, Thermomyces lanuginosus
EVSRDLFNQFNLFAQYSAAAYCGKNNDAPAGTNITCTGNACPEVEKADATILYSFEDSGVGDVTGFLALDNTNKLIVLSFRGSRSIENWIGNLNFDLKEINDICSGCRGHDGFTSSWRSVADTLRQKVEDAVREHPDYRVVFTGHSLGGALATVAGADLRGDGYDIDVFSYGAPRVGNRAFAEFLTVQTGGTLYRITSTNDIVPRLPPREFGYSHSSPEYWIKSGTLRPVRRRDIVKIEGIDATGGNNQPNIPDIPAHLWYFGLIGTC

SEQ ID NO: 14165 - protein, 268 aa, Thermomyces lanuginosus
EVSQDLFNQFNLFAQYSAAAYCGKNNDAPAGTQITCTWNACPEVEKADATFLYSFEDSGVGDVTGFLALDNTNKLIVLSFRGSRSIENWITNLNFDLKEINDICSGCRGHDGFISSWRSVADTLRQKVEDAVREHPDYRVVFTGHSLGGALATVAGADLRGNKYDIDVFSYGAPRVGNRAFAEFLTVQTGGTLYRITHTNDIVPRLPPRVFGYSHSSPEYWIKSGTLVPVRRRDIVKIEGIDATGGNNQPNIPDIPAHLWYFGLIGTC

SEQ ID NO: 14166 - protein, 268 aa, Thermomyces lanuginosus
EVSQDLFNQFNLFAQYSAAAYCGANNDAPAGTNITCTGNACPEVEKADATFLYSFEDSGVGDVTGFLALDNTNKLIVLSFRGSRSIENWIGNLNFDLKEINDICSGCRGHAGFTSSWRSVADTLRQKVEAAVREHPDYRVVFTGHSLGGALATIAWADLRGNGYDIDVFSYGAPRVGNRAFAEFLTTQQGGTLYRITHTNDIVPRLPPREFGYSHSSPEYWIKSGTLVPVTRNDIVKIEGIDATGGNNQPNIPDIPAHLWYFGRIGTC

SEQ ID NO: 14167 - protein, 268 aa, Thermomyces lanuginosus
EVSRDLFNQFNLFAQYSAAAYCGKNNDAPAGTNITCTGNACPEVEKADATILYSFEDSGVGDVTGFLALDNTNKLIVLSFRGSRSIENWIGNLNFDLKEINDICSGCRGHDGFTSSWRSVADTLRQKVEDAVREHPDYRVVFTGHSLGGALATVAGADLRGDGYDIDVFSYGAPRVGNRAFAEFLTVQTGGTLYRITNTNDIVPRLPPREFGYSHSSPEYWIKSGTLPPVRRRDIVKIEGIDATGGNNQPNIPDIPAHLWYFGLIGTC

SEQ ID NO: 14168 - protein, 268 aa, Thermomyces lanuginosus
EVSQDLFNQFNLFAQYSAAAYCGKNNDAPAGTNITCTGNACPEVEKADATFLYSFEDSGVGDVTGFLALDNTNKLIVLSFRGSRSIENWIGNLNFDLKEINDICSGCRGHDGFTSSWRSVADTLRQKVEDAVREHPDYRVVFAGHSLGGALATVAGADLRGNGYDIDVFSYGAPRVGNRAFAEFLTVQTGGTLYRITHTNDIVPRLPPREFGYSHSSPEYWIKSGTLPPVRRRDIVKCEGIDATCGNNQPNIPDITAHLWYFGLIGTC

SEQ ID NO: 14169 - protein, 268 aa, Thermomyces lanuginosus
EVSQDLFNQFNLFAQYSAAAYCGKNNDAPAGTNITCTGNACPEVEKADATFLYSFRDSGVGDVTGFLALDNTNKLIVLSFRGSRSIENWIGNLNFDLIEINDICSGCRGHDGFTSSWFSVADTLRQKVEDAVREHPDYRVVFTGHSLGGALATVAGADLRGNGYDIDVFSYGAPRVGNRAFAEFLTVQTGGTLYRITHTNDIVPRLPPREFGYSHSSPEFWIKSGTLVPVRRRDIVKIEGIDAEGGNNQPNIPDIPAHLWYFGLIGTC

SEQ ID NO: 14170 - protein, 268 aa, Thermomyces lanuginosus
EVSQDLFNQFNLFAQYSAAAYCSKNNNAPAGTNITCTGNACPEVEKADATFLYSFRDSGVGDVTGFLALDNTNKLIVLSFRGSRSIENWIGNLNFDLKEINDICSGCRGHDGFTSSWFSVADTLRQKVEDAVREHPDYRVVFTGHSLGGALATVAGADLRGNGYDIDVFSYGAPRVGNRAFAEFLTVQTGGTLYRITHTNDIVPRLPPREFGYSHSSPEFWIKSGTLVPVRRRDIVKIEGIDATGGNNQPNIPDIPAHLWYFGLIGTC

SEQ ID NO: 14171 - protein, 268 aa, Thermomyces lanuginosus
EVSQDLFNQFNLFAQYSAAAYCQKNNDAPAGTNITCTGNACPEVEKADATFLYSFKDSGVGDVTGFLALDNTNKQIVLSFRGSRSIENWIGNLNFDLKEINDICSGCRGHAGFTSSWRSVADTLRQKVEDAVREHPDYRVVFTGHSLGGALATIAGADLRGNGYDIDVFSYGAPRVGNRAFAEFLTNQQGGTLYRITHTNDIVPRLPPREFGYSHSSPEYWIKSGTLVPVTRNDIVKIEGIDATGGNNQPNIPDIPAHLWYFGRIGTC

SEQ ID NO: 14172 - protein, 268 aa, Thermomyces lanuginosus
EVSQDLFNQFNLFAQYSAAAYCQKNNDAPAGTNITCTGNACPEVEKADATFLYSFKDSGVGDVTGFLALDNTNKRIVLSFRGSRSIENWIGNLNFDLKEINDICSGCRGHAGFTSSWRSVADTLRQKVEAAVREHPDYRVVFTGHSLGGALATVAGADLRGNGYDIDVFSYGAPRVGNRAFAEFLTNQQGGTLYRITHTNDIVPRLPPREFGYSHSSPEYWIKSGTLVPVTRNDIVKIEGIDATGGNNQPNIPDIPAHLWYFGLIGTC

SEQ ID NO: 14173 - protein, 268 aa, Thermomyces lanuginosus
EVSQDLFNQFNLFAQYSAAAYCGKNNNAPAGTNITCTGNACPEVEKADATFLYSFRDSGVGDVTGFLALDNTNKLIVLSFRGSRSIENWIGNLNFDLIEINDICSGCRGHDGFTSSWFSVADTLRQKVEDAVREHPDYRVVFTGHSLGGALATVAGADLRGNGYDIDVFSYGAPRVGNRAFAEFLTVQTGGTLYRITHTNDIVPRLPPREFGYSHSSPEYWIKSGTLVPVRRRDIVKIEGIDATGGNNQPNIPDITAHLWYFGLIGTC

SEQ ID NO: 14174 - protein, 268 aa, Thermomyces lanuginosus
EVSQDLFNQFNLFAQYSAAAYCGKNNDAPAGTNITCTGNACPEVEKADATFLYSFRDSGVGDVTGFLALDNTNKLIVLSFRGSRSIENWIGNLNFDLIEINDICSGCRGHDGFTSSWFSVADTLRQKVEDAVREHPDYRVVFTGHSLGGALATVAGADLRGNGYDIDVFSYGAPRVGNRAFAEFLTVQTGGTLYRITHTNDIVPRLPPREFGYSHSSPEYWIKSGTLVPVRRRDIVKIEGIDAEGGNNQPNIPDITAHLWYFGLIGTC

SEQ ID NO: 14175 - protein, 268 aa, Thermomyces lanuginosus
EVSQDLFNQFRLFAQYSAAAYCGKNNDAPAGTQITCTGNACPEVEKADATFLYSFEDSGVGDVTGFLALDNTNKLIVLSFRGSRSIENWITNLNFDLKEINDICSGCRGHDGFTSSWRSVADTLRQKVEDAVREHPDYRVVFTGHSLGGALATVAGADLRGNLYDIDVFSYGAPRTGNRAFAEFLTVQTGGTLYRITHTNDIVPRLPPREFGYSHSSPEYWIKSGTLVPVRRRDIVKIEGIDATGGNNQPNIPSIPAHLWYFGLIGTC

SEQ ID NO: 14176 - protein, 268 aa, Thermomyces lanuginosus
EVSQDLFNQFNLFAQYSAAAYCGANNDAPAGTNITCTGNACPEVEKADATFLYSFEDSGVGDVTGFLALDNTNKLIVLSFRGSRSIENWIGNLRFDLKEINDICSGCRGHDGFTSSWRSVADTLRQKVEAAVREHPDYRVVFTGHSLGGALATIAWADLRGNGYDIDVFSYGAPRVGNRAFAEFLTTQQGGTLYRITHTNDIVPRLPPREFGYSHSSPEYWIKSGTLVPVTRNDIVKIEGIDATGGNNQPNIPDIPAHLWYFGRIGTC

SEQ ID NO: 14177 - protein, 268 aa, Thermomyces lanuginosus
EVSQDLFNQFKLFAQYSAAAYCQKNNSAPAGTNITCTGNACPEVEKADATFLYSFEDSGVGDVTGFLALDNTNKLIVLSFRGSRSIENWIGNLRFDLKEINDICSGCRGHDGFTSSWRSVADTLRQKVEDAVREHPDYRVVFTGHSLGGALATIAWADLRGNGYDIDVFSYGAPRVGNRAFAEFLTVQQGGTLYRITHTNDIVPRLPPREFGYSHSSPEYWIKSGTLVPVTRNDIVKIEGIDATGGNNQPNIPDIPAHLWYFGRIGTC

SEQ ID NO: 14178 - protein, 268 aa, Thermomyces lanuginosus
EVSQDLFNQFNLFAQYSAAAYCGKNNRAPAGTQITCTGNACPEVEKADATFLYSFEDSGVGDVTGFLALDNTNKLIVLSFRGSRSIENWINNLRFDLKEINDICSGCRGHAGFTSSWRSVADTLRQKVEDAVREHPDYRVVFTGHSLGGALATVAGADLRGNGYDIDVFSYGAPRVGNRAFAEFLTVQTGGTLYRITHTNDIVPRLPPREFGYSHSSPEYWIKSGTLVPVRRRDIVKIEGIDATGGNNQPNIPDITAHLWYFGLIGTC

SEQ ID NO: 14179 - protein, 268 aa, Thermomyces lanuginosus
EVSQDLFNQFNLFAQYSAAAYCGKNNRAPAGTNITCTGNACPEVEKADATFLYSFEDSGVGDVTGFLALDNTNKLIVLSFRGSRSIENWISNLNVDLKEINDICSGCRGHAGFTSSWRSVADTLRQKVEDAVREHVDYRVVFTGHSLGGALATVAGADLRGNGYDIDVFSYGAPRVGNRAFAEFLTVQTGGTLYRITHTNDIVPRLPPREFGYSHPSPEYWIKSGTGVPVTRNDIVKIEGIDATGGNNQPNIPDITAHLWYFGLIGTC

SEQ ID NO: 14180 - protein, 268 aa, Thermomyces lanuginosus
EVSQDLFNQFNLFAQYSAAAYCKKNNDAPAGTNITCTGNACPEVEKADATFLYSFEDSGVGDVTGFLALDNTNKQIVLSFRGSRSIENWIGNLNFDLKEINDICSGCRGHAGFTSSWRSVADTLRQKVEDAVREHPDYRVVFTGHSLGGALATIAWADLRGNGYDIDVFSYGAPRVGNRAFAEFLTNQQGGTLYRITHTNDIVPRLPPREFGYSHSSPEYWIKSGTLVPVTRNDIVKIEGIDATGGNNQPNIPDIPAHLWYFGRIGTC

SEQ ID NO: 14181 - protein, 268 aa, Thermomyces lanuginosus
EVSQDLFNQFNLFAQYSAAAYCSKNNDAPAGTNITCTGNACPEVEKADATFLYSFRDSGVGDVTGFLALDNTNKLIVLSFRGSRSIENWIGNLNFDLKEINDICSGCRGHDGFTSSWFSVADTLRQKVEDAVREHPDYRVVFTGHSLGGALATVAGADLRGNGYDIDVFSYGAPRVGNRAFAEFLTVQTGGTLYRITHTNDIVPRLPPREFGYSHSSPEFWIKSGTLVPVRRRDIVKIEGIDATGGNNQPNIPDITAHLWYFGLIGTC

SEQ ID NO: 14182 - protein, 268 aa, Thermomyces lanuginosus
EVSQDLFNQFNLFAQYSAAAYCGKNNRAPAGTQITCTGNACPEVEKADATFLYSFEDSGVGDVTGFLALDNTNKLIVLSFRGSRSIENWIANLNFEQKEINDICSGCRGHAGFTSSWRSVADTLRQKVEDAVREHPDYRVVFTGHSLGGALATVAGADLRGNGYDIDVFSYGAPRVGNRAFAEFLTVQTGGTLYRITHTNDIVPRLPPREFGYSHSSPEYWIKSGTLVPVRRRDIVKIEGIDATGGNNQPNIPGITAHLWYFGLIGTC

SEQ ID NO: 14183 - protein, 268 aa, Thermomyces lanuginosus
EVSQDLFNQFNLFAQYSAAAYCGKNNEAPAGTNITCTGNACPEVEKADATFLYSFEDMGVGDVTGFLALDNTNKLIVLSFRGSRSIENWIGNLNFDLKEINDICSGCRGHDGFTSSWRSVADTLRQKVEAAVREHPQYRVVFTGHSLGGALATVAGADLRGNPYDIDVFSYGAPRVGNRAFAEFLTVQTGGTLYRITHTNDIVPRLPPREFGYSHSSPEYWIKSGTMVPVTRQDIVKIEGIDATGGNNQPNIPDIPAHLWYFGRIGTC

SEQ ID NO: 14184 - protein, 268 aa, Thermomyces lanuginosus
EVSQDLFNQFRLFAQYSAAAYCGKNNDAPAGTQITCTGNACPEVEKADATFLYSFEDSGVGDVTGFLALDNTNKLIVLSFRGSRSIENWITNLNFDLKEINDICSGCRGHDGFTSSWRSVADTLRQKVEDAVREHPDYRVVFTGHSLGGALATVAGADLRGNKYDIDVFSYGAPRWGNRAFAEFLTVQTGGTLYRITHTNDIVPRLPPREFGYSHSSPEYWIKSGTLVPVRRRDIVKIEGIDATGGNNQPNIPSIPAHLWYFGLIGTC

SEQ ID NO: 14185 - protein, 268 aa, Thermomyces lanuginosus
EVSQDLFNQFNLFAQYSAAAYCGKNNRAPAGTNITCTGNACPEVEKADATFLYSFEDSGVGDVTGFLALDNTNKLIVLSFRGSRSIENWISNFRFGLKEINDICSGCRGHAGFTSSWRSVADTLRQKVEDAVREHPDYRVVFTGHSLGGALATVAGADLRGNGYDIDVFSYGAPRVGNRAFAEFLTVQTGGTLYRITHTNDIVPRLPPREFGYSHPSPEYWIKSGTGVPVTRNDIVKIEGIDATGGNNQPNIPDITAHLWYFGLIGTC

SEQ ID NO: 14186 - protein, 268 aa, Thermomyces lanuginosus
EVSQDLFNQFRLFAQYSAAAYCGKNNDAPAGTQITCTGNACPEVEKADATFLYSFEDSGVGDVTGFLALDNTNKLIVLSFRGSRSIENWITNLNFDLKEINDICSGCRGHDGFTSSWRSVADTLRQKVEDAVREHPDYRVVFTGHSLGGALATVAGADLRGNKYDIDVFSYGAPRVGNRAFAEFLTVQTGGTLYRITHTNDIVPRLPPRDFGYSHSSPEYWIKSGTLVPVRRRDIVKIEGIDATGGNNQPNIPSIPAHLWYFGLIGTC

SEQ ID NO: 14187 - protein, 268 aa, Thermomyces lanuginosus
EVSQDLFNQFNLFAQYSAAAYCQKNNSAPAGTNITCTGNACPEVEKADATTLYSFEDMGVGDVTGFLALDNTNKLIVLSFRGSRSIENWIQNLNFDLKEINDICSGCRGHDGFTSSWRSVADTLRQKVEAAVREHPDYRVVFTGHSLGGALATVAGADLRGNGYDIDVFSYGAPRVGNRAFAEFLTNQTGGTLYRITHTNDIVPRLPPREFGYSHSSPEYWIKSGTLVPVTRNDIVKIEGIDATGGNNQPNQPDIPAHLWYFGLIGTC

SEQ ID NO: 14188 - protein, 268 aa, Thermomyces lanuginosus
EVSRDLFNQFNLFAQYSAAAYCGKNNDAPAGTNITCTGNACPEVEKADATILYSFEDSGVGDVTGFLALDNTNKLIVLSFRGSRSIENWIGNLNFDLKEINDICSGCRGHDGFTSSWRSVADTLRQKVEDAVREHPDYRVVFAGHSLGGALATVAGADLRGDGYDIDVFSYGAPRVGNRAFAEFLTVQTGGTLYRITHTNDIVPRLPPREFGYSHSSPEYWIKSGTLPPVRRRDIVKIEGIDATGGNNQPNIPDIPAHLWYFGLIGTC

SEQ ID NO: 14189 - protein, 268 aa, Thermomyces lanuginosus
EVSQDLFNQFRLFAQYSAAAYCGKNNDAPAGTQITCTGNACPEVEKADATFLYSFEDSGVGDVTGFLALDNTNKLIVLSFRGSRSIENWITNLNFDLKEINDICSGCRGHDGFTSSWRSVADTLRQKVEDAVREHPDYRVVFTGHSLGGALATVAGADLRGNKYDIDVFSYGAPRVGNRAFAEFLTVQTGGTLYRITHTNDIVPRLPPREFGYSHSSPEYWIKSGTLVPVRRRDIVKIEGIDATGGNNQPNIPAIFAHLWYFGLIGTC

SEQ ID NO: 14190 - protein, 268 aa, Thermomyces lanuginosus
EVSRDLFNQFNLFAQYSAAAYCGKNNDAPAGTNITCTGNACPEVEKADATILYSFEDSGVGDVTGFLALDNTNKLIVLSFRGSRSIENWIGNLNFDLKEINDICSGCRGHDGFTSSWRSVADTLRQKVEDAVREHPDYRVVFAGHSLGGALATVAGADLRGNGYDIDVFSYGAPRVGNRAFAEFLTVQTGGTLYRITNTNDIVPRLPPREFGYSHSSPEYWIKSGTLRPVRRRDIVKIEGIDATGGNNQPNIPDIPAHLWYFGLIGTC

SEQ ID NO: 14191 - protein, 268 aa, Thermomyces lanuginosus
EVSQDLFNQFRLFAQYSAAAYCGKNNDAPAGTQITCTGNACPEVEKADATFLYSFEDSGVGDVTGFLALDNTNKLIVLSFRGSRSIENWITNLNFDLKEINDICSGCRGHDGFTSSIRSVADTLRQKVEDAVREHPDYRVVFTGHSLGGALATVAGADLRGNKYDIDVFSYGAPRVGNRAFAEFLTVQTGGTLYRITHTNDIVPRLPPREFGYSHSSPEYWIKSGTLVPVRRRDIVKIEGIDATGGNNQPNIPSIPAHLWYFGLIGTC

SEQ ID NO: 14192 - protein, 268 aa, Thermomyces lanuginosus
EVSQDLFNQFNLFAQYSKAAYCKANNDAPAGTNITCTGNACPEVEKADATFLYSFEDSGVGDVTGFLALDNTNKQIILSFRGSRSIENWIGNLRFDLKEINDICSGCRGHDGFTSSWRSVADTLRQKVEDAVREHPDYRVVFTGHSLGGALATVAWADLRGNGYDIDVFSYGAPRVGNRAFAEFLTVQTGGTLYRITHTNDIVPRLPPREFGYSHSSPEYWIKSGTLVPVTRNDIVKIEGIDATGGNNQPNIPDIPAHLWYFGLIGTC

SEQ ID NO: 14193 - protein, 268 aa, Thermomyces lanuginosus
EVSQDLFNQFNLFAQYSKAAYCKKNNDAPAGTNITCTGNACPEVFKADATFLYSFEDSGVGDVTGFLALDNTNKQIILSFRGSRSIENWIGNLNFDLKEINDICSGCRGHDGFTSSWRSVADTLRQKVEDAVREHPDYRVVFTGHSLGGALATVAWADLRGNGYDIDVFSYGAPRVGNRAFAEFLTTQTGGTLYRITHTNDIVPRLPPREFGYSHSSPEYWIKSGTLVPVTRNDIVKIEGIDATGGNNQPNIPDIPAHLWYFGLIGTC

SEQ ID NO: 14194 - protein, 268 aa, Thermomyces lanuginosus
EVSQDLFNQFNLFAQYSKAAYCKKNNDAPAGTNITCTGNACPEVEKADATFLYSFEDSGVGDVTGFLALDNTNKQIILSFRGSRSIENWIGNLRFDLKEINDICSGCRGHDGFTSSWRSVADTLRQKVEDAVREHPDYRVVFTGHSLGGALATIAWADLRGNGYDIDVFSYGAPRVGNRAFAEFLTVQTGGTLYRITHTNDIVPRLPPREFGYSHSSPEYWIKSGTLVPVTRNDIVKIEGIDATGGNNQPNIPDIPAHLWYFGLIGTC

SEQ ID NO: 14195 - protein, 268 aa, Thermomyces lanuginosus
EVSQDLFNQFNLFAQYSAAAYCGKNNDAPAGTNITCTGNACPEVEKADATFLYSFKDSGVGDVTGFLALDNTNKQIVLSFRGSRSIENWIGNLNFDLKEINDICSGCRGHAGFTSSWRSVADTLRQKVEAAVREHPDYRVVFTGHSLGGALATVAWADLRGNGYDIDVFSYGAPRVGNRAFAEFLTNQQGGTLYRITHTNDIVPRLPPREFGYSHSSPEYWIKSGTLVPVTRNDIVKIEGIDATGGNNQPNIPDIPAHLWYFGLIGTC

SEQ ID NO: 14196 - protein, 268 aa, Thermomyces lanuginosus
EVSQDLFNQFNLFAQYSAAAYCGKNNDAPAGTNITCTGNACPEVEKADATILYSFRDSGVGDVTGFLALDNTNKLIVLSFRGSRSIENWIGNLNFDLKEINDICSGCRGHDGFTSSWFSVADTLRQKVEDAVREHPDYRVVFTGHSLGGALATVAGADLRGNGYDIDVFSYGAPRVGNRAFAEFLTVQTGGTLYRITHTNDIVPRLPPREFGYSHSSPEFWIKSGTLVPVRRRDIVKIEGIDAEGGNNQPNIPDIPAHLWYFGLIGTC

SEQ ID NO: 14197 - protein, 268 aa, Thermomyces lanuginosus
EVSQDLFNQFNLFAQYSAAAYCGKNNRAPAGTQITCTGNACPEVEKADATFLYSFEDSGVGDVTGFLALDNTNKLIVLSFRGSRSIENWIANLNFEQKEINDICSGCRGHAGFTSSWRSVADTLRQKVEDAVREHPDYRVVFTGHSLGGALATVAGADLRGNGYDIDVFSYGAPRVGNRAFAEFLTVQTGGTLYRITHTNDIVPRLPPREFGYSHPSPEYWIKSGTLVPVRRRDIVKIEGIDATGGNNQPNIPDITAHLWYFGLIGTC

SEQ ID NO: 14198 - protein, 268 aa, Thermomyces lanuginosus
EVSQDLFNQFNLFAQYSAAAYCKANNDAPAGTNITCTGNACPEVEKADATFLYSFEDSGVGDVTGFLALDNTNKQIVLSFRGSRSIENWIGNLRFDLKEINDICSGCRGHDGFTSSWRSVADTLRQKVEDAVREHPDYRVVFTGHSLGGALATIAWADLRGNGYDIDVFSYGAPRVGNRAFAEFLTNQTGGTLYRITHTNDIVPRLPPREFGYSHSSPEYWIKSGTLVPVTRNDIVKIEGIDATGGNNQPNIPDIPAHLWYFGLIGTC

SEQ ID NO: 14199 - protein, 268 aa, Thermomyces lanuginosus
EVSQDLFNQFNLFAQYSAAAYCGKNNRAPAGTKITCTANACPEVEKADATVLYSFKDSGVGDVTGFLARDNTNKLIVLSFRGSRSIENWIGNLNFELEEINDICSGCRGHDGFTSSWRSVADTLRQKVEDAVREHPDYRVVFTGHSLGGALATVAGADLRGNGYDIDVFSYGAPRVGNRAFAEFLTVQTGGTLYRITHTNDIVPRLPPREFGYSHSSPEYWIKSGTLVPVTRNDIVKIEGIDATGGNNQPNIPDIPAHLWYFGLIGTC

SEQ ID NO: 14200 - protein, 268 aa, Thermomyces lanuginosus
EVSVDLFNQFNLFAQYSAAAYCGKNNDAPAGTNITCTGNACPEVEKADATFLYSFEDNGSGDVTGFLALDNTNKLIVLSFRGSRSVENWIGNLNFDLKEINDICSGCRGHDGFTSSWRSVADTLRQKVEDAVREHPDYRVVFTGHSLGGALATVAGADLRGNGYDIDVFSYGAPRVGNRAFAEFLTVQTGGTLYRITHTNDIVPRLPPREFGYSHSSPEYWIKSGTLVPVRRRDIVKIEGIDATGGNNLPNIPDIPAHLWYFGLIGTC

SEQ ID NO: 14201 - protein, 268 aa, Thermomyces lanuginosus
EVSQDLFNQFNLFAQYSAAAYCKKNNSAPAGTNITCTGNACPEVEKADATTLYSFKDMGVGDVTGFLALDNTNKQIVLSFRGSRSIENWIQNLNFDLKEINDICSGCRGHDGFTSSWRSVADTLRQKVEDAVREHPDYRVVFTGHSLGGALATVAGADLRGNGYDIDVFSYGAPRVGNRAFAEFLTNQTGGTLYRITHTNDIVPRLPPREFGYSHSSPEYWIKSGTLVPVTRNDIVKIEGIDATGGNNQPNIPDIPAHLWYFGRIGTC

SEQ ID NO: 14202 - protein, 268 aa, Thermomyces lanuginosus
EVSDDLFNQFKLFAQYSAAAYCGKNNNAPAGTNITCTGNACPEVEKADATFLYSFEDMGVGDVTGFLALDNTNKLIVLSFRGSRSIENWPGNLNFDLKEINDICSGCRGHDGFTSSWRSVADTLRQKVEDAVREHPDYRVVFTGHSLGGALATVAGADLRGNGYDIDVFSYGAPRVGNRAFAEFLTVQTGGTLYRITHTNDIVPRLPPREFGYSHSSPEYWIKSGTLVPVTRQDIVKIEGIDATGGNNQPNIPDITAHLWYFGLIGTC

SEQ ID NO: 14203 - protein, 268 aa, Thermomyces lanuginosus
EVSQDLFNQFNLFAQYSAAAYCGKNNRAPAGTNITCTGNACPEVEKADATFLYSFEDSGVGDVTGFLALDNTNKLIVLSFRGSRSIENWIGNLNFELKEINDICSGCRGHAGFTSSWRSVADTLRQKVEDAVREHPDYRVVFTGHSLGGALATVAGADLRGNDYDIDVFSYGAPRVGNRAFAEFLTVQTGGTLYRITHTNDIVPRLPPREFGYSHSSPEYWIKSGTLVPVRRRDIVKIEGIDATGGNNQPNIPSITAHLWYFGLIGTC

SEQ ID NO: 14204 - protein, 268 aa, Thermomyces lanuginosus
EVSRDLFNQFNLFAQYSAAAYCGKNNDAPAGTNITCTGNACPEVEKADATILYSFEDSGVGDVTGFLALDNTNKLIVLSFRGSRSIENWIGNLNFDLKEINDICSGCRGHDGFTSSWRSVADTLRQKVEDAVREHPDYRVVFAGHSLGGALATVAGADLRGDGYDIDVFSYGAPRVGNRAFAEFLTVQTGGTLYRITHTNDIVPRLPPREFGYSHSSPEYWIKSGTLRPVRRRDIVKIEGIDATGGNNQPNIPDIPAHLWYFGLIGTC

SEQ ID NO: 14205 - protein, 268 aa, Thermomyces lanuginosus
EVSQDLFNQFRLFAQYSAAAYCGKNNDAPAGTQITCTGNACPEVEKADATFLYSFQDSGVGDVTGFLALDNTNKLIVLSFRGSRSIENWIGNLNFDLKEINDICSGCRGHDGFTSSWRSVADTLRQKVEDAVREHPDYRVVFTGHSLGGALATVAGADLRGNKYDIDVFSYGAPRVGNRAFAEFLTVQTGGTLYRITHTNDIVPRLPPREFGYSHSSPEYWIKSGTLVPVRRRDIVKIEGIDATGGNNQPNIPSIPAHLWYFGLIGTC

SEQ ID NO: 14206 - protein, 268 aa, Thermomyces lanuginosus
EVSQDLFNQFRLFAQYSAAAYCGKNNDAPAGTQITCTGNACPEVEKADATFLYSFEDSGVGDVTGFLALDNTNKLIVLSFRGSRSIENWITNLNFDLKEINDICSGCRGHDGFTSSWRSVADTLRQKVEDAVREHPDYRVVFTGHSLGGALATVAGADLRGNAYDIDVFSYGAPRIGNRAFAEFLTVQTGGTLYRITHTNDIVPRLPPREFGYSHSSPEYWIKSGTLVPVRRRDIVKIEGIDATGGNNQPNIPSIPAHLWYFGLIGTC

SEQ ID NO: 14207 - protein, 268 aa, Thermomyces lanuginosus
EVSQDLFNQFNLFAQYSAAAYCGKNNDAPAGTQITCTGNACPEVEKADATFLYSFEDSGVGDVTGFLALDNTNKLIVLSFRGSRSIENWITNLNFELTEINDICSGCRGHDGFISSWRSVADTLRQKVEDAVREHPDYRVVFTGHSLGGALATVAGADLRGNKYDIDVFSYGAPRVGNRAFAEFLTVQTGGTLYRITHTNDIVPRLPPRDFGYSHSSPEYWIKSGTLVPVRRRDIVKIEGIDATGGNNQPNIPDIPAHLWYFGLIGTC

SEQ ID NO: 14208 - protein, 268 aa, Thermomyces lanuginosus
EVSQDLFNQFNLFAQYSAAAYCGKNNDAPAGTNITCTGNICPEVEKADATFLYSFRNSGVGDVTGFLALDNTNKLIVLSFRGSRSIENWIGNLNFDLKEINDICSGCRGHDGFTSSWFSVADTLRQKVEDAVREHPDYRVVFTGHSLGGALATVAGADLRGNGYDIDVFSYGAPRVGNRAFAEFLTVQTGGTLYRITHTNDIVPRLPPREFGYSHSSPEYWIKSGTLVPVRRRDIVKIEGIDATGGNNQPNIPDITAHLWYFGLIGTC

SEQ ID NO: 14209 - protein, 268 aa, Thermomyces lanuginosus
EVSQDLFNQFNLFAQYSKAAYCKANNDAPAGTNITCTGNACPEVEKADATFLYSFEDSGVGDVTGFLALDNTNKRIVLSFRGSRSIENWIGNLNFDLKEINDICSGCRGHDGFTSSWRSVADTLRQKVEDAVREHPDYRVVFTGHSLGGALATIAWADLRGNGYDIDVFSYGAPRVGNRAFAEFLTQQTGGTLYRITHTNDIVPRLPPREFGYSHSSPEYWIKSGTLVPVTRNDIVKIEGIDATGGNNQPNIPDIPAHLWYFGLIGTC

SEQ ID NO: 14210 - protein, 268 aa, Thermomyces lanuginosus
EVSQDLFNQFNLFAQYSAAAYCGKNNDAPAGTNITCTGNACPEVEKAWATFLYSFEDMGVGDVTGFLALDNTNKLIVLSFRGSRSIENWIGNLNFDLKEINDICSGCRGHDGFTSSWRSVADTLRQKVEAAVREHPQYRVVFTGHSLGGALATVAGADLRGNPYDIDVFSYGAPRVGNRAFAEFLTVQTGGTLYRITHTNDIVPRLPPREFGYSHSSPEYWIKSGTMVPVTRQDIVKIEGIDATGGNNQPNIPDIPAHLWYFGRIGTC

SEQ ID NO: 14211 - protein, 268 aa, Thermomyces lanuginosus
EVSQDLFNQFNLFAQYSAAAYCSKNNDAPAGTNITCTGNACPEVEKADATFLYSFRDSGVGDVTGFLALDNTNKLIVLSFRGSRSIENWIGNLNFDLIEINDICSGCRGHDGFTSSWFSVADTLRQKVEDAVREHPDYRVVFTGHSLGGALATVAGADLRGNGYDIDVFSYGAPRVGNRAFAEFLTVQTGGTLYRITHTNDIVPRLPPREFGYSHSSPEYWIKSGTLVPVRRRDIVKIEGIDAEGGNNQPNIPDIPAHLWYFGLIGTC

SEQ ID NO: 14212 - protein, 268 aa, Thermomyces lanuginosus
EVSRDLFNQFNLFAQYSAAAYCGKNNDAPAGTNITCTGNACPEVEKADATILYSFEDSGVGDVTGFLALDNTNKLIVLSFRGSRSIENWIGNLNFDLKEINDICSGCRGHDGFTSSWRSVADTLRQKVEDAVREHPDYRVVFAGHSLGGALATVAGADLRGNGYDIDVFSYGAPRVGNRAFAEFLTVQTGGTLYRITSTNDIVPRLPPREFGYSHSSPEYWIKSGTLPPVRRRDIVKIEGIDATGGNNQPNIPDIPAHLWYFGLIGTC

SEQ ID NO: 14213 - protein, 268 aa, Thermomyces lanuginosus
EVSQDLFNQFNLFAQYSAAAYCSKNNDAPAGTNITCTGNICPEVEKADATFLYSFRDSGVGDVTGFLALDNTNKLIVLSFRGSRSIENWIGNLNFDLKEINDICSGCRGHDGFTSSWFSVADTLRQKVEDAVREHPDYRVVFTGHSLGGALATVAGADLRGNGYDIDVFSYGAPRVGNRAFAEFLTVQTGGTLYRITHTNDIVPRLPPREFGYSHSSPEYWIKSGTLVPVRRRDIVKIEGIDATGGNNQPNIPDITAHLWYFGLIGTC

SEQ ID NO: 14214 - protein, 268 aa, Thermomyces lanuginosus
EVSQDLFNQFRLFAQYSAAAYCGKNNDAPAGTQITCTGNACPEVEKADATFLYSFEDSGVGDVTGFLALDNTNKLIVLSFRGSRSIENWITNLNFDLKEINDICSGCRGHDGFTSSWRSVADTLRQKVEDAVREHPDYRVVFTGHSLGGALATVAGADLRGNAYDIDVFSYGAPRTGNRAFAEFLTVQTGGTLYRITHTNDIVPRLPPREFGYSHSSPEYWIKSGTLVPVRRRDIVKIEGIDATGGNNQPNIPSIPAHLWYFGLIGTC

SEQ ID NO: 14215 - protein, 268 aa, Thermomyces lanuginosus
EVSQDLFNQFNLFAQYSAAAYCGKNNDAPAGTQITCTGNACPEVEKADATFLYSFEDSGVGDVTGFLALDNTNKLIVLSFRGSRSIENWITNLNFDLIEINDICSGCRGHDGFTSSWRSVADTLRQKVEDAVREHPDYRVVFTGHSLGGALATVAGADLRGNKYDIDVFSYGAPRVGNRAFAEFLTVQTGGTLYRITHTNDIVPRLPPREFGYSHSSPEYWIKSGTLVPVRRRDIVKIEGIDATGGNNQPNIPSILAHLWYFGLIGTC

SEQ ID NO: 14216 - protein, 268 aa, Thermomyces lanuginosus
EVSQDLFNQFKLFAQYSAAAYCKKNNDAPAGTNITCTGNACPEVEKADATFLYSFKDSGVGDVTGFLALDNTNKQIVLSFRGSRSIENWIGNLNFDLKEINDICSGCRGHDGFTSSWRSVADTLRQKVEAAVREHPDYRVVFTGHSLGGALATIAGADLRGNGYDIDVFSYGAPRVGNRAFAEFLTVQQGGTLYRITHTNDIVPRLPPREFGYSHSSPEYWIKSGTLVPVTRNDIVKIEGIDATGGNNQPNIPDIPAHLWYFGRIGTC

SEQ ID NO: 14217 - protein, 268 aa, Thermomyces lanuginosus
EVSQDLFNQFNLFAQYSAAAYCGKNNRAPAGTNITCTGNACPEVEKADATFLYSFEDSGVGDVTGFLALDNTNKLIVLSFRGSRSIENWIGNFNFDLKEINDICSGCRGHAGFTSSWRSVADTLRQKVEDAVREHPNYRVVFTGHSLGGALATVAGADLRGNGYDIDVFSYGAPRVGNRAFAEFLTVQTGGTLYRITHTNDIVPRLPPREFGYSHPSPEYWIKSGTGVPVTRNDIVKIEGIDATGGNNQPNIPDITAHLWYFGLIGTC

SEQ ID NO: 14218 - protein, 268 aa, Thermomyces lanuginosus
EVSQDLFNQFNLFAQYSAAAYCKKNNDAPAGTNITCTGNACPEVEKADATTLYSFKDSGVGDVTGFLALDNTNKRIVLSFRGSRSIENWIGNLNFDLKEINDICSGCRGHDGFTSSWRSVADTLRQKVEAAVREHPDYRVVFTGHSLGGALATVAGADLRGNGYDIDVFSYGAPRVGNRAFAEFLTTQTGGTLYRITHTNDIVPRLPPREFGYSHSSPEYWIKSGTLVPVTRNDIVKIEGIDATGGNNQPNQPDIPAHLWYFGLIGTC

SEQ ID NO: 14219 - protein, 268 aa, Thermomyces lanuginosus
EVSQDLFNQFKLFAQYSAAAYCQKNNDAPAGTNITCTGNACPEVEKADATFLYSFEDSGVGDVTGFLALDNTNKQIVLSFRGSRSIENWIGNLRFDLKEINDICSGCRGHDGFTSSWRSVADTLRQKVEDAVREHPDYRVVFTGHSLGGALATIAWADLRGNGYDIDVFSYGAPRVGNRAFAEFLTVQQGGTLYRITHTNDIVPRLPPREFGYSHSSPEYWIKSGTLVPVTRNDIVKIEGIDATGGNNQPNIPDIPAHLWYFGRIGTC

SEQ ID NO: 14220 - protein, 268 aa, Thermomyces lanuginosus
EVSQDLFNQFNLFAQYSAAAYCGKNNEAPAGTNITCTGNACPEVEKAQATFLYSFEDMGVGDVTGFLALDNTNKLIVLSFRGSRSIENWIGNLNFDLKEINDICSGCRGHDGFTSSWRSVADTLRQKVEDAVREHPQYRVVFTGHSLGGALATVAGADLRGNPYDIDVFSYGAPRVGNRAFAEFLTVQTGGTLYRITHTNDIVPRLPPREFGYSHSSPEYWIKSGTMVPVTRQDIVKIEGIDATGGNNQPNIPDIPAHLWYFGRIGTC

SEQ ID NO: 14221 - protein, 268 aa, Thermomyces lanuginosus
EVSQDLFNQFNLFAQYSAAAYCGKNNNAPAGTNITCTGNACPEVEKADATILYSFRDSGVGDVTGFLALDNTNKLIVLSFRGSRSIENWIGNLNFDLIEINDICSGCRGHDGFTSSWFSVADTLRQKVEDAVREHPDYRVVFTGHSLGGALATVAGADLRGNGYDIDVFSYGAPRVGNRAFAEFLTVQTGGTLYRITHTNDIVPRLPPREFGYSHSSPEYWIKSGTLVPVRRRDIVKIEGIDATGGNNQPNIPDIPAHLWYFGLIGTC

SEQ ID NO: 14222 - protein, 268 aa, Thermomyces lanuginosus
EVSQDLFNQFNLFAQYSAAAYCKKNNSAPAGTNITCTGNACPEVEKADATTLYSFEDMGVGDVTGFLALDNTNKLIVLSFRGSRSIENWIQNLNFDLKEINDICSGCRGHDGFTSSWRSVADTLRQKVEAAVREHPDYRVVFTGHSLGGALATVAGADLRGNGYDIDVFSYGAPRVGNRAFAEFLTNQTGGTLYRITHTNDIVPRLPPREFGYSHSSPEYWIKSGTLVPVTRNDIVKIEGIDATGGNNQPNQPDIPAHLWYFGLIGTC

SEQ ID NO: 14223 - protein, 268 aa, Thermomyces lanuginosus
EVSQDLFNQFRLFAQYSAAAYCEKNNDAPAGTQITCTGNACPEVEKADATFLYSFEDSGVGDVTGFLALDNTNKLIVLSFRGSRSIENWITNLNFDLKEINDICSGCRGHDGFTSSWRSVADTLRQKVEDAVREHPDYRVVFTGHSLGGALATVAGADLRGNKYDIDVFSYGAPRVGNRAFAEFLTVQTGGTLYRITHTNDIVPRLPPREFGYSHSSPEYWIKSGTLVPVRRRDIVKIEGIDATGGNNQPNIPSIPAHLWYFGLIGTC

SEQ ID NO: 14224 - protein, 268 aa, Thermomyces lanuginosus
EVSQDLFNQFNLFAQYSAAAYCGKNNDAPAGTNITCTGNACPEVEKAQATFLYSFEDMGVGDVTGFLALDNTNKLIVLSFRGSRSIENWIGNLNFDLKEINDICSGCRGHDGFTSSWRSVADTLRQKVEAAVREHPQYRVVFTGHSLGGALATVAGADLRGNPYDIDVFSYGAPRVGNRAFAEFLTVQTGGTLYRITHTNDIVPRLPPREFGYSHSSPEYWIKSGTMVPVTRQDIVKIEGIDATGGNNQPNIPDIPAHLWYFGRIGTC

SEQ ID NO: 14225 - protein, 268 aa, Thermomyces lanuginosus
EVSQDLFNQFKLFAQYSAAAYCQKNNDAPAGTNITCTGNACPEVEKADATFLYSFEDSGVGDVTGFLALDNTNKQIVLSFRGSRSIENWIGNLNFDLKEINDICSGCRGHAGFTSSWRSVADTLRQKVEAAVREHPDYRVVFTGHSLGGALATIAGADLRGNGYDIDVFSYGAPRVGNRAFAEFLTNQTGGTLYRITHTNDIVPRLPPREFGYSHSSPEYWIKSGTLVPVTRNDIVKIEGIDATGGNNQPNIPDIPAHLWYFGRIGTC

SEQ ID NO: 14226 - protein, 268 aa, Thermomyces lanuginosus
EVSQDLFNQFNLFAQYSAAAYCKANNDAPAGTNITCTGNACPEVEKADATFLYSFEDSGVGDVTGFLALDNTNKLIVLSFRGSRSIENWIGNLRFDLKEINDICSGCRGHDGFTSSWRSVADTLRQKVEDAVREHPDYRVVFTGHSLGGALATIAWADLRGNGYDIDVFSYGAPRVGNRAFAEFLTNQQGGTLYRITHTNDIVPRLPPREFGYSHSSPEYWIKSGTLVPVTRNDIVKIEGIDATGGNNQPNIPDIPAHLWYFGLIGTC

SEQ ID NO: 14227 - protein, 268 aa, Thermomyces lanuginosus
EVSQDLFNQFNLFAQYSAAAYCGKNNDAPAGTNITCTGNACPEVEKADATILYSFRDSGVGDVTGFLALDNTNKLIVLSFRGSRSIENWIGNLNFDLKEINDICSGCRGHDGFTSSWFSVADTLRQKVEDAVREHPDYRVVFTGHSLGGALATVAGADLRGNGYDIDVFSYGAPRVGNRAFAEFLTVQTGGTLYRITHTNDIVPRLPPREFGYSHSSPEFWIKSGTLVPVRRRDIVKIEGIDATGGNNQPNIPDITAHLWYFGLIGTC

SEQ ID NO: 14228 - protein, 268 aa, Thermomyces lanuginosus
EVSQDLFNQFNLFAQYSAAAYCQKNNSAPAGTNITCTGNACPEVEKADATFLYSFEDSGVGDVTGFLALDNTNKQIVLSFRGSRSIENWIGNLNFDLKEINDICSGCRGHDGFTSSWRSVADTLRQKVEAAVREHPDYRVVFTGHSLGGALATIAWADLRGNGYDIDVFSYGAPRVGNRAFAEFLTVQQGGTLYRITHTNDIVPRLPPREFGYSHSSPEYWIKSGTLVPVTRNDIVKIEGIDATGGNNQPNIPDIPAHLWYFGRIGTC

SEQ ID NO: 14229 - protein, 268 aa, Thermomyces lanuginosus
EVSQDLFNQFNLFAQYSKAAYCGANNDAPAGTNITCTGNACPEVEKADATFLYSFEDSGVGDVTGFLALDNTNKQIVLSFRGSRSIENWIGNLNFDLKEINDICSGCRGHDGFTSSWRSVADTLRQKVEAAVREHPDYRVVFTGHSLGGALATVAWADLRGNGYDIDVFSYGAPRVGNRAFAEFLTTQQGGTLYRITHTNDIVPRLPPREFGYSHSSPEYWIKSGTLVPVTRNDIVKIEGIDATGGNNQPNIPDIPAHLWYFGLIGTC

SEQ ID NO: 14230 - protein, 268 aa, Thermomyces lanuginosus
EVSQDLFNQFNLFAQYSAAAYCGKNNDAPAGTQITCTGNACPEVEKADATFLYSFEDSGVGDVTGFLALDNTNKLIVLSFRGSRSIENWITNLRFDLKEINDICSGCRGHAGFTSSLRSVADTLRQKVEDAVREHPDYRVVFTGHSLGGALATVAGADLRGNGYDIDVFSYGAPRWGNRAFAEFLTVQTGGTLYRITHTNDIVPRLPPREFGYSHSSPEYWIKSGTLVPVRRRDIVKIEGIDATGGNNQPNIPDIPAHLWYFGLIGTC

SEQ ID NO: 14231 - protein, 268 aa, Thermomyces lanuginosus
EVSDDLFNQFKLFAQYSAAAYCGKNNQAPAGTNITCTGNACPEVEKADATFLYSFKDMGVGDVTGFLALDNTNKLIVLSFRGSRSIENWIGNLNFDLKEINDICSGCRGHDGFTSSWRSVADTLRQKVEDAVREHPDYRVVFTGHSLGGALATVAGADLRGNGYDIDVFSYGAPRVGNRAFAEFLTVQTGGTLYRITHTNDIVPRLPPREFGYSHSSPEYWIKSGTLVPVTRQDIVKIEGIDATGGNNQPNIPDITAHLWYFGLIGTC

SEQ ID NO: 14232 - protein, 268 aa, Thermomyces lanuginosus
EVSDDLFNQFNLFAQYSAAAYCGKNNNAPAGTNITCTGNACPEVEKADATFLYSFKDMGVGDVTGFLALDNTNKLIVLSFRGSRSIENWFGNLNFDLKEINDICSGCRGHDGFTSSWRSVADTLRQKVEDAVREHPDYRVVFTGHSLGGALATVAGADLRGNGYDIDVFSYGAPRVGNRAFAEFLTVQTGGTLYRITHTNDIVPRLPPREFGYSHSSPEYWIKSGTLVPVTRQDIVKIEGIDATGGNNQPNIPDITAHLWYFGLIGTC

SEQ ID NO: 14233 - protein, 268 aa, Thermomyces lanuginosus
EVSQDLFNQFNLFAQYSAAAYCGKNNDAPAGTNITCTGNICPEVEKADATFLYSFRDSGVGDVTGFLALDNTNKLIVLSFRGSRSIENWIGNLNFDLIEINDICSGCRGHDGFTSSWFSVADTLRQKVEDAVREHPDYRVVFTGHSLGGALATVAGADLRGNGYDIDVFSYGAPRVGNRAFAEFLTVQTGGTLYRITHTNDIVPRLPPREFGYSHSSPEYWIKSGTLVPVRRRDIVKIEGIDATGGNNQPNIPDITAHLWYFGLIGTC

SEQ ID NO: 14234 - protein, 268 aa, Thermomyces lanuginosus
EVSQELFNQFNLFAQYSAAAYCGKNNDAPAGTQITCTGNACPEVEKADATFLYSFEDSGVGDVTGFLALDNTNKLIVLSFRGSRSIENWIGNLNFDLKEINDICSGCRGHDGFTSSLRSVADTLRQKVEDAVREHPDYRVVFTGHSLGGALATVAGADLRGNGYDIDVFSYGAPRVGNRAFAEFLTVQTGGTLYRITHTNDIVPRLPPREFGYSHSSPEYWIKSGTGVPVRRRDIVKIEGIDATGGNNRPNIPDIPAHLWYFGLIGTC

SEQ ID NO: 14235 - protein, 268 aa, Thermomyces lanuginosus
EVSQDLFNQFNLFAQYSAAAYCKKNNDAPAGTNITCTGNACPEVEKADATFLYSFKDSGVGDVTGFLALDNTNKQIVLSFRGSRSIENWIGNLNFDLKEINDICSGCRGHDGFTSSWRSVADTLRQKVEAAVREHPDYRVVFTGHSLGGALATIAGADLRGNGYDIDVFSYGAPRVGNRAFAEFLTNQQGGTLYRITHTNDIVPRLPPREFGYSHSSPEYWIKSGTLVPVTRNDIVKIEGIDATGGNNQPNIPDIPAHLWYFGRIGTC

SEQ ID NO: 14236 - protein, 268 aa, Thermomyces lanuginosus
EVSQDLFNQFNLFAQYSAAAYCGKNNDAPAGTNITCTGNACPEVEKADATFLYSFEDSGVGDVTGFLALDNTNKLIVLSFRGSRSIENWIGNLNFDLKEINDICSGCRGHDGFTSSWRSVADTLRQKVEDAVREHPDYRVVFTGHSLGGALATVAGADLRGNGYDIDVFSYGAPRVGNRAFAEFLTVQTGGTLYRITHTNDPVPRLPPREFGYSHSSPEYWIKSGTLVPVTRNDIVKIEGIDATGGNGGTLGLDIPAHLWYFGLIGTC

SEQ ID NO: 14237 - protein, 268 aa, Thermomyces lanuginosus
EVSQDLFNQFNLFAQYSAAAYCGRNNDAPAGTNITCTGNACPEVERADATFLYSFEDSGVGDVTGFLALDNTNRLIVLSFRGSRSIENWIGNLNFDLREINDICSGCRGHDGFTSSWRSVADTLRQRVEDAVREHPDYRVVFTGHSLGGALATVAGADLRGNGYDIDVFSYGAPRVGNRAFAEFLTVQTGGTLYRITHTNDIVPRLPPREFGYSHSSPEYWIRSGTLVPVTRNDIVRIEGIDATGGNNQPNIPDIPAHLWYFGLIGKC

SEQ ID NO: 14238 - protein, 268 aa, Thermomyces lanuginosus
EVSQDLFNQFNLFAQYSKAAYCQANNDAPAGTNITCTGNACPEVEKADATFLYSFEDSGVGDVTGFLALDNTNKQIILSFRGSRSIENWIGNLRFDLKEINDICSGCRGHDGFTSSWRSVADTLRQKVEDAVREHPDYRVVFTGHSLGGALATIAGADLRGNGYDIDVFSYGAPRVGNRAFAEFLTVQTGGTLYRITHTNDIVPRLPPREFGYSHSSPEYWIKSGTLVPVTRNDIVKIEGIDATGGNNQPNIPDIPAHLWYFGLIGTC

SEQ ID NO: 14239 - protein, 268 aa, Thermomyces lanuginosus
EVSQDLFNQFNLFAQYSKAAYCGKNNDAPAGTNITCTGNACPEVFKADATFLYSFEDSGVGDVTGFLALDNTNKQIILSFRGSRSIENWIGNLNFDLKEINDICSGCRGHDGFTSSWRSVADTLRQKVEDAVREHPDYRVVFTGHSLGGALATVAWADLRGNGYDIDVFSYGAPRVGNRAFAEFLTTQDGGTLYRITHTNDIVPRLPPREFGYSHSSPEYWIKSGTLVPVTRNDIVKIEGIDATGGNNQPNIPDIPAHLWYFGLIGTC

SEQ ID NO: 14240 - protein, 268 aa, Thermomyces lanuginosus
EVSQDLFNQFNLFAQYSAAAYCQKNNDAPAGTNITCTGNACPEVEKADATFLYSFEDSGVGDVTGFLALDNTNKQIVLSFRGSRSIENWIGNLRFDLKEINDICSGCRGHDGFTSSWRSVADTLRQKVEAAVREHPDYRVVFTGHSLGGALATIAWADLRGNGYDIDVFSYGAPRVGNRAFAEFLTVQQGGTLYRITHTNDIVPRLPPREFGYSHSSPEYWIKSGTLVPVTRNDIVKIEGIDATGGNNQPNIPDIPAHLWYFGRIGTC

SEQ ID NO: 14241 - protein, 268 aa, Thermomyces lanuginosus
EVSQDLFNQFNLFAQYSAAAYCGKNNDAPAGTNITCTGNACPEVEKADATILYSFEDSGVGDVTGFLALDNTNKLIVLSFRGSRSIENWIGNLNFDLKEINDICSGCRGHDGFTSSWRSVADTLRQKVEDAVREHPDYRVVFAGHSLGGALATVAGADLRGDGYDIDVFSYGAPRVGNRAFAEFLTVQTGGTLYRITSTNDIVPRLPPREFGYSHSSPEYWIKSGTLPPVRRRDIVKIEGIDATGGNNQPNIPDIPAHLWYFGLIGTC

SEQ ID NO: 14242 - protein, 268 aa, Thermomyces lanuginosus
EVSQDLFNQFNLFAQYSAAAYCQKNNDAPAGTNITCTGNACPEVEKADATFLYSFKDSGVGDVTGFLALDNTNKQIVLSFRGSRSIENWIGNLRFDLKEINDICSGCRGHAGFTSSWRSVADTLRQKVEDAVREHPDYRVVFTGHSLGGALATVAWADLRGNGYDIDVFSYGAPRVGNRAFAEFLTVQQGGTLYRITHTNDIVPRLPPREFGYSHSSPEYWIKSGTLVPVTRNDIVKIEGIDATGGNNQPNIPDIPAHLWYFGRIGTC

SEQ ID NO: 14243 - protein, 268 aa, Thermomyces lanuginosus
EVSQDLFNQFKLFAQYSAAAYCKKNNDAPAGTNITCTGNACPEVEKADATFLYSFEDSGVGDVTGFLALDNTNKQIVLSFRGSRSIENWIGNLNFDLKEINDICSGCRGHAGFTSSWRSVADTLRQKVEDAVREHPDYRVVFTGHSLGGALATVAWADLRGNGYDIDVFSYGAPRVGNRAFAEFLTNQQGGTLYRITHTNDIVPRLPPREFGYSHSSPEYWIKSGTLVPVTRNDIVKIEGIDATGGNNQPNIPDIPAHLWYFGRIGTC

SEQ ID NO: 14244 - protein, 268 aa, Thermomyces lanuginosus
EVSQDLFNQFNLFAQYSAAAYCGKNNEAPAGTNITCTGNACPEVEKADATFLYSFEDSGVGDVTGFLALDNTNKLIVLSFRGSRMIENWIGNLNFDLKEINDICSGCRGHDGFTSSWRSVADTLRQKVEAAVREHPQYRVVFTGHSLGGALATVAGADLRGNPYDIDVFSYGAPRVGNRAFAEFLTVQTGGTLYRITHTNDIVPRLPPREFGYSHSSPEYWIKSGTMVPVTRQDIVKIEGIDATGGNNQPNIPDIPAHLWYFGRIGTC

SEQ ID NO: 14245 - protein, 268 aa, Thermomyces lanuginosus
EVSQDLFNQFNLFAQYSKAAYCKANNDAPAGTNITCTGNACPEVEKADATFLYSFEDSGVGDVTGFLALDNTNKRIVLSFRGSRSIENWIGNLNFDLKEINDICSGCRGHAGFTSSWRSVADTLRQKVEDAVREHPDYRVVFTGHSLGGALATIAGADLRGNGYDIDVFSYGAPRVGNRAFAEFLTTQTGGTLYRITHTNDIVPRLPPREFGYSHSSPEYWIKSGTLVPVTRNDIVKIEGIDATGGNNQPNIPDIPAHLWYFGRIGTC

SEQ ID NO: 14246 - protein, 268 aa, Thermomyces lanuginosus
EVSQDLFNQFKLFAQYSKAAYCGANNDAPAGTNITCTGNACPEVEKADATFLYSFEDSGVGDVTGFLALDNTNKLIILSFRGSRSIENWIGNLNFDLKEINDICSGCRGHDGFTSSWRSVADTLRQKVEDAVREHPDYRVVFTGHSLGGALATIAWADLRGNGYDIDVFSYGAPRVGNRAFAEFLTVQQGGTLYRITHTNDIVPRLPPREFGYSHSSPEYWIKSGTLVPVTRNDIVKIEGIDATGGNNQPNIPDIPAHLWYFGLIGTC

SEQ ID NO: 14247 - protein, 268 aa, Thermomyces lanuginosus
EVSQDLFNQFNLFAQYSAAAYCGKNNNAPAGTNITCTGNACPEVEKADATFLYSFRDSGVGDVTGFLALDNTNKLIVLSFRGSRSIENWIGNLNFDLKEINDICSGCRGHDGFTSSWFSVADTLRQKVEDAVREHPDYRVVFTGHSLGGALATVAGADLRGNGYDIDVFSYGAPRVGNRAFAEFLTVQTGGTLYRITHTNDIVPRLPPREFGYSHSSPEFWIKSGTLVPVRRRDIVKIEGIDAEGGNNQPNIPDIPAHLWYFGLIGTC

SEQ ID NO: 14248 - protein, 268 aa, Thermomyces lanuginosus
EVSQDLFNQFNLFAQYSAAAYCQANNDAPAGTNITCTGNACPEVEKADATFLYSFEDSGVGDVTGFLALDNTNKQIILSFRGSRSIENWIGNLNFDLKEINDICSGCRGHDGFTSSWRSVADTLRQKVEAAVREHPDYRVVFTGHSLGGALATIAWADLRGNGYDIDVFSYGAPRVGNRAFAEFLTVQTGGTLYRITHTNDIVPRLPPREFGYSHSSPEYWIKSGTLVPVTRNDIVKIEGIDATGGNNQPNIPDIPAHLWYFGLIGTC

SEQ ID NO: 14249 - protein, 268 aa, Thermomyces lanuginosus
EVSVDLFNQFNLFAQYSAAAYCGKNNDAPAGTNITCTGNACPEVEKADATFLYSFEDNGSGDVTGFLALDNTNKLIVLSFRGSRSIENWIGNLNFDLKEINDICSGCRGHDGFTSSWRSVADTLRQKVEDAVREHPDYRVVFTGHSLGGALATVAGADLRGNGYDIDVFSYGAPRVGNRAFAEFLTVQTGGTLYRITHTNDIVPRLPPRKFGYSHSSPEYWIKSGTLVPVRRRDIVKIEGIDATGGNNQPNIPDFPAHLWYFGLIGTC

SEQ ID NO: 14250 - protein, 268 aa, Thermomyces lanuginosus
EVSQDLFNQFNLFAQYSKAAYCKQNNDAPAGTNITCTGNACPEVEKADATFLYSFEDSGVGDVTGFLALDNTNKQIVLSFRGSRSIENWIGNLRFDLKEINDICSGCRGHDGFTSSWRSVADTLRQKVEDAVREHPDYRVVFTGHSLGGALATIAGADLRGNGYDIDVFSYGAPRVGNRAFAEFLTQQTGGTLYRITHTNDIVPRLPPREFGYSHSSPEYWIKSGTLVPVTRNDIVKIEGIDATGGNNQPNIPDIPAHLWYFGLIGTC

SEQ ID NO: 14251 - protein, 268 aa, Thermomyces lanuginosus
EVSQDLFNQFNLFAQYSAAAYCGKNNNAPAGTNITCTGNACPEVEKADATFLYSFRDSGVGDVTGFLALDNTNKLIVLSFRGSRSIENWIGNLNFDLIEINDICSGCRGHDGFTSSWFSVADTLRQKVEDAVREHPDYRVVFTGHSLGGALATVAGADLRGNGYDIDVFSYGAPRVGNRAFAEFLTVQTGGTLYRITHTNDIVPRLPPREFGYSHSSPEFWIKSGTLVPVRRRDIVKIEGIDATGGNNQPNIPDIPAHLWYFGLIGTC

SEQ ID NO: 14252 - protein, 268 aa, Thermomyces lanuginosus
EVSQDLFNQFRLFAQYSAAAYCGKNNDAPAGTQITCTGNACPEVEKADATFLYSFEDSGVGDVTGFLALDNTNKLIVLSFRGSRSIENWITNLNFDLKEINDICSGCRGHDGFTSSWRSVADTLRQKVEDAVREHPDYRVVFTGHSLGGALATVAGADLRGNPYDIDVFSYGAPRIGNRAFAEFLTVQTGGTLYRITHTNDIVPRLPPREFGYSHSSPEYWIKSGTLVPVRRRDIVKIEGIDATGGNNQPNIPSIPAHLWYFGLIGTC

SEQ ID NO: 14253 - protein, 268 aa, Thermomyces lanuginosus
EVSQDLFNQFNLFAQYSAAAYCGKNNRAPAGTNITCTGNACPEVEKADATFLYSFEDSGVGDVTGFLALDNTNKLIVLSFRGSRSIENWITNLSFDLKEINDICSGCRGHAGFTSSWRSVADTLRQKVEDAVREHVDYRVVFTGHSLGGALATVAGADLRGNGYDIDVFSYGAPRVGNRAFAEFLTVQTGGTLYRITHTNDIVPRLPPREFGYSHPSPEYWIKSGTGVPVTRNDIVKIEGIDATGGNNQPNIPDITAHLWYFGLIGTC

SEQ ID NO: 14254 - protein, 268 aa, Thermomyces lanuginosus
EVSQDLFNQFNLFAQYSAAAYCGKNNDAPAGTNITCTGNACPEVEKADATILYSFEDSGVGDVTGFLALDNTNKLIVLSFRGSRSIENWIGNLNFDLKEINDICSGCRGHDGFTSSWRSVADTLRQKVEDAVREHPDYRVVFAGHSLGGALATVAGADLRGDGYDIDVFSYGAPRVGNRAFAEFLTVQTGGTLYRITSTNDIVPRLPPREFGYSHSSPEYWIKSGTLRPVRRRDIVKIEGIDATGGNNQPNIPDIPAHLWYFGLIGTC

SEQ ID NO: 14255 - protein, 268 aa, Thermomyces lanuginosus
EVSQDLFNQFRLFAQYSAAAYCGKNNDAPAGTQITCTANACPEVEKADATFLYSFEDSGVGDVTGFLALDNTNKLIVLSFRGSRSIENWIANLNFDLKEINDICSGCRGHDGFTSSWRSVADTLRQKVEDAVREHPDYRVVFTGHSLGGALATVAGADLRGNKYDIDVFSYGAPRDGNRAFAEFLTVQTGGTLYRITHTNDIVPRLPPREFGYSHSSPEYWIKSGTLVPVRRRDIVKIEGIDATGGNNQPNIPSIPAHLWYFGLIGTC

SEQ ID NO: 14256 - protein, 268 aa, Thermomyces lanuginosus
EVSQDLFNQFRLFAQYSAAAYCGKNNDAPAGTQITCTGNACPEVEKADATFLYSFEDSGVGDVTGFLALDNTNKLIVLSFRGSRSIENWITNLNFDLKEINDICSGCRGHDGFTSSWRSVADTLRQKVEDAVREHPDYRVEFTGHSLGGALATVAGADLRGNEYDIDVFSYGAPRVGNRAFAEFLTVQTGGTLYRITHTNDIVPRLPPREFGYSHSSPEYWIKSGTLVPVRRRDIVKIEGIDATGGNNQPNIPSIPAHLWYFGLIGTC

SEQ ID NO: 14257 - protein, 268 aa, Thermomyces lanuginosus
EVSQDLFNQFNLFAQYSAAAYCGKNNDAPAGTQITCTGNACPEVEKADATFLYSFEDSGVGDVTGFLALDNTNKLIVLSFRGSRSIENWITNLNFDLIEINDICSGCRGHDGFISSWRSVADTLRQKVEDAVREHPDYRVVFTGHSLGGALATVAGADLRGNKYDIDVFSYGAPRVGNRAFAEFLTVQTGGTLYRITHTNDIVPRLPPREFGYSHSSPEYWIKSGTLVPVRRRDIVKIEGIDATGGNNQPNIPSIPAHLWYFGLIGTC

SEQ ID NO: 14258 - protein, 268 aa, Thermomyces lanuginosus
EVSQDLFNQFKLFAQYSAAAYCKKNNDAPAGTNITCTGNACPEVEKADATFLYSFEDSGVGDVTGFLALDNTNKQIVLSFRGSRSIENWIGNLNFDLKEINDICSGCRGHAGFTSSWRSVADTLRQKVEAAVREHPDYRVVFTGHSLGGALATIAGADLRGNGYDIDVFSYGAPRVGNRAFAEFLTNQTGGTLYRITHTNDIVPRLPPREFGYSHSSPEYWIKSGTLVPVTRNDIVKIEGIDATGGNNQPNIPDIPAHLWYFGLIGTC

SEQ ID NO: 14259 - protein, 268 aa, Thermomyces lanuginosus
EVSRDLFNQFNLFAQYSAAAYCGKNNDAPAGTNITCTGNACPEVEKADATFLYSFEDSGVGDVTGFLALDNTNKLIVLSFRGSRSIENWIGNLNFDLKEINDICSGCRGHDGFTSSWRSVADTLRQKVEDAVREHPDYRVVFAGHSLGGALATVAGADLRGDGYDIDVFSYGAPRVGNRAFAEFLTVQTGGTLYRITSTNDIVPRLPPREFGYSHSSPEYWIKSGTLRPVRRRDIVKIEGIDATGGNNQPNIPDIPAHLWYFGLIGTC

SEQ ID NO: 14260 - protein, 268 aa, Thermomyces lanuginosus
EVSRDLFNQFNLFAQYSAAAYCGKNNDAPAGTNITCTGNACPEVEKADATILYSFEDSGVGDVTGFLALDNTNKLIVLSFRGSRSIENWIGNLNFDLKEINDICSGCRGHDGFTSSWRSVADTLRQKVEDAVREHPDYRVVFTGHSLGGALATVAGADLRGDGYDIDVFSYGAPRVGNRAFAEFLTVQTGGTLYRITSTNDIVPRLPPREFGYSHSSPEYWIKSGTLPPVRRRDIVKIEGIDATGGNNQPNIPDIPAHLWYFGLIGTC

SEQ ID NO: 14261 - protein, 268 aa, Thermomyces lanuginosus
EVSQDLFNQFNLFAQYSKAAYCQANNDAPAGTNITCTGNACPEVEKADATFLYSFEDSGVGDVTGFLALDNTNKRIVLSFRGSRSIENWIGNLRFDLKEINDICSGCRGHDGFTSSWRSVADTLRQKVEDAVREHPDYRVVFTGHSLGGALATVAWADLRGNGYDIDVFSYGAPRVGNRAFAEFLTNQTGGTLYRITHTNDIVPRLPPREFGYSHSSPEYWIKSGTLVPVTRNDIVKIEGIDATGGNNQPNIPDIPAHLWYFGLIGTC

SEQ ID NO: 14262 - protein, 268 aa, Thermomyces lanuginosus
EVSQDLFNQFNLFAQYSAAAYCGKNNDAPAGTKITCTGNACPEVEKADATVLYTFKDSGVGDVTGFLALDNTNKLIVLSFRGSRSIENWIGNLNFDLIEINDICSGCRGHDGFTSSWRSVADTLRQKVEDAVREHPDYRVVFTGHSLGGALATVAGADLRGNGYDIDVFSYGAPRVGNRAFAEFLTVQTGGTLYRITHTNDIVPRLPPREFGYSHSSPEYWIKSGTLVPVRRRDIVKIEGIDATGGNNQPNIPDIPAHLWYFGLIGTC

SEQ ID NO: 14263 - protein, 268 aa, Thermomyces lanuginosus
EVSQDLFNQFNLFAQYSAAAYCKKNNSAPAGTNITCTGNACPEVEKADATFLYSFKDSGVGDVTGFLALDNTNKRIVLSFRGSRSIENWIGNLNFDLKEINDICSGCRGHAGFTSSWRSVADTLRQKVEDAVREHPDYRVVFTGHSLGGALATIAWADLRGNGYDIDVFSYGAPRVGNRAFAEFLTVQTGGTLYRITHTNDIVPRLPPREFGYSHSSPEYWIKSGTLVPVTRNDIVKIEGIDATGGNNQPNIPDIPAHLWYFGRIGTC

SEQ ID NO: 14264 - protein, 268 aa, Thermomyces lanuginosus
EVSQDLFNQFNLFAQYSAAAYCGKNNDAPAGTNITCTGNICPEVEKADATFLYSFRNSGVGDVTGFLALDNTNKLIVLSFRGSRSIENWIGNLNFDLKEINDICSGCRGHDGFTSSWFSVADTLRQKVEDAVREHPDYRVVFTGHSLGGALATVAGADLRGNSYDIDVFSYGAPRVGNRAFAEFLTVQTGGTLYRITHTNDIVPRLPPREFGYSHSSPEYWIKSGTLVPVRRRDIVKIEGIDATGGNNQPNIPDIPAHLWYFGLIGTC

SEQ ID NO: 14265 - protein, 268 aa, Thermomyces lanuginosus
EVSQDLFNQFRLFAQYSAAAYCGKNNDAPAGTQITCTGNACPEVEKADATFLYSFEDSGVGDVTGFLALDNTNKLIVLSFRGSRSIENWITNLNFDLKEINDICSGCRGHDGFTSSWRSVADTLRQKVEDAVREHPDYRVVFTGHSLGGALATVAGADLRGNLYDIDVFSYGAPRVGNRAFAEFLTVQTGGTLYRITHTNDIVPRLPPREFGYSHSSPEYWIKSGTLVPVRRRDIVKIEGIDATGGNNQPNIPSINAHLWYFGLIGTC

SEQ ID NO: 14266 - protein, 268 aa, Thermomyces lanuginosus
EVSQDLFNQFNLFAQYSAAAYCGKNNEAPAGTNITCTGNACPEVEKAQATFLYSFEDSGVGDVTGFLALDNTNKLIVLSFRGSRSIENWIGNLNFDLKEINDICSGCRGHDGFTSSWRSVADTLRQKVEAAVREHPQYRVVFTGHSLGGALATVAGADLRGNPYDIDVFSYGAPRVGNRAFAEFLTVQTGGTLYRITHTNDIVPRLPPREFGYSHSSPEYWIKSGTMVPVTRQDIVKIEGIDATGGNNQPNIPDIPAHLWYFGRIGTC

SEQ ID NO: 14267 - protein, 268 aa, Thermomyces lanuginosus
EVSQDLFNQFRLFAQYSAAAYCGKNNDAPAGTQITCTGNACPEVEKADATFLYSFEDSGVGDVTGFLALDNTNKLIVLSFRGSRSIENWITNLNFDLKEINDICSGCRGHDGFTSSWRSVADTLRQKVEDAVREHPDYRVLFTGHSLGGALATVAGADLRGNKYDIDVFSYGAPRVGNRAFAEFLTVQTGGTLYRITHTNDIVPRLPPREFGYSHSSPEYWIKSGTLVPVRRRDIVKIEGIDATGGNNQPNIPSIPAHLWYFGLIGTC

SEQ ID NO: 14268 - protein, 268 aa, Thermomyces lanuginosus
EVSQDLFNQFNLFAQYSAAAYCGKNNSAEAGTDITCTGNACPEVFKADATFLYSFEDSGVGDVTGFLALDNTRKDIVLSFRGSRSIENWIGNLNFDLKEINDICSGCRGHDGFTSSWRSVADTLRQKVEDAVREHPDYRVVFTGHSLGGALATVAGADLRGNGYDIDVFSYGAPRVGNRAFAEFLTVQDGGTLYRITHTNDIVPRLPPREFGYSHSSPEYWIKSGTLVPVTRNDIVKIEGIDATGGNNQPNIPDIPAHLWYFGLIGTC

SEQ ID NO: 14269 - protein, 268 aa, Thermomyces lanuginosus
EVSQDLFNQFNLFAQYSKAAYCQKNNDAPAGTNITCTGNACPEVFKADVTFLYSFEDSGVGDVTGFLALDNTNKQIVLSFRGSRSIENWIGNLNFDLKEINDICSGCRGHDGFTSSWRSVADTLRQKVEDAVREHPDYRVVFTGHSLGGALATVAWADLRGNGYDIDVFSYGAPRVGNRAFAEFLTTQTGGTLYRITHTNDIVPRLPPREFGYSHSSPEYWIKSGTLVPVTRNDIVKIEGIDATGGNNQPNIPDIPAHLWYFGLIGTC

SEQ ID NO: 14270 - protein, 268 aa, Thermomyces lanuginosus
EVSQDLFNQFNLFAQYSAAAYCGKNNDAPAGTNITCTGNACPEVEKADATFLYSFRNSGVGDVTGFLALDNTNKLIVLSFRGSRSIENWIGNLNFDLIEINDICSGCRGHDGFTSSWFSVADTLRQKVEDAVREHPDYRVVFTGHSLGGALATVAGADLRGNGYDIDVFSYGAPRVGNRAFAEFLTVQTGGTLYRITHTNDIVPRLPPREFGYSHSSPEYWIKSGTLVPVRRRDIVKIEGIDATGGNNQPNIPDITAHLWYFGLIGTC

SEQ ID NO: 14271 - protein, 268 aa, Thermomyces lanuginosus
EVSQDLFNQFNLFAQYSAAAYCGKNNDAPAGTQITCTGNACPEVEKADATFLYSFEDSGVGDVTGFLALDNTNKLIVLSFRGSRSIENWITNLNFDLKEINDICSGCRGHDGFISSWRSVADTLRQKVEDAVREHPDYRVVFTGHSLGGALATVAGADLRGNGYDIDVFSYGAPRVGNRAFAEFLTVQTGGTLYRITHTNDIVPRLPPRVFGYSHSSPEYWIKSGTLVPVRRRDIVKIEGIDATGGNNQPNIPKIAAHLWYFGLIGTC

SEQ ID NO: 14272 - protein, 268 aa, Thermomyces lanuginosus
EVSQDLFNQFNLFAQYSAAAYCGKNNRAPAGTNITCTGNACPEVEKADATFLYSFEDSGVGDVTGFLALDNTNKLIVLSFRGSRSIENWIGNLNFDLKEINDICSGCRGHAGFTSSWMSVADTLRQKVEDVVREHPDYRVVFTGHSLGGALATVAGADLRGNGYDIDVFSYGAPRVGNRAFAEFLTVQTGGTLYRITHTNDIVPRLPPREFGYSHPSPEYWIKSGTGVPVTRNDIVKIEGIDATGGNNQPNIPDITAHLWYFGLIGTC

SEQ ID NO: 14273 - protein, 268 aa, Thermomyces lanuginosus
EVSQDLFNQFNLFAQYSKAAYCGANNDAPAGTNITCTGNACPEVEKADATFLYSFEDSGVGDVTGFLALDNTNKQIVLSFRGSRSIENWIGNLNFDLKEINDICSGCRGHDGFTSSWRSVADTLRQKVEAAVREHPDYRVVFTGHSLGGALATIAWADLRGNGYDIDVFSYGAPRVGNRAFAEFLTTQTGGTLYRITHTNDIVPRLPPREFGYSHSSPEYWIKSGTLVPVTRNDIVKIEGIDATGGNNQPNIPDIPAHLWYFGLIGTC

SEQ ID NO: 14274 - protein, 268 aa, Thermomyces lanuginosus
EVSQDLFNQFNLFAQYSKAAYCQKNNDAPAGTNITCTGNACPEVFKADATFLYSFEDSGVGDVTGFLALDNTNKQIILSFRGSRSIENWIGNLNFDLKEINDICSGCRGHDGFTSSWRSVADTLRQKVEDAVREHPDYRVVFTGHSLGGALATVAWADLRGNGYDIDVFSYGAPRVGNRAFAEFLTTQTGGTLYRITHTNDIVPRLPPREFGYSHSSPEYWIKSGTLVPVTRNDIVKIEGIDATGGNNQPNIPDIPAHLWYFGLIGTC

SEQ ID NO: 14275 - protein, 268 aa, Thermomyces lanuginosus
EVSQDLFNQFNLFAQYSAAAYCKKNNSAPAGTNITCTGNACPEVEKADATTLYSFEDNGVGDVTGFLALDNTNKQIVLSFRGSRSIENWIGNLNFDLKEINDICSGCRGHDGFTSSWRSVADTLRQKVEAAVREHPDYRVVFTGHSLGGALATVAGADLRGNGYDIDVFSYGAPRVGNRAFAEFLTNQTGGTLYRITHTNDIVPRLPPREFGYSHSSPEYWIKSGTLVPVTRNDIVKIEGIDATGGNNQPNIPDIPAHLWYFGLIGTC

SEQ ID NO: 14276 - protein, 268 aa, Thermomyces lanuginosus
EVSQDLFNQFNLFAQYSAAAYCKANNDAPAGTNITCTGNACPEVEKADATFLYSFEDSGVGDVTGFLALDNTNKQIVLSFRGSRSIENWIGNLNFDLKEINDICSGCRGHAGFTSSWRSVADTLRQKVEDAVREHPDYRVVFTGHSLGGALATIAWADLRGNGYDIDVFSYGAPRVGNRAFAEFLTNQTGGTLYRITHTNDIVPRLPPREFGYSHSSPEYWIKSGTLVPVTRNDIVKIEGIDATGGNNQPNIPDIPAHLWYFGLIGTC

SEQ ID NO: 14277 - protein, 268 aa, Thermomyces lanuginosus
EVSQDLFNQFNLFAQYSAAAYCGKNNDAPAGTNITCTGNACPEVEKADATFLYSFRDSGVGDVTGFLALDNTNKLIVLSFRGSRSIENWIADLNFILIEINDICSGCRGHDGFTSSWFSVADTLRQKVEDAVREHPDYRVVFTGHSLGGALATVAGADLRGNGYDIDVFSYGAPRVGNRAFAEFLTVQTGGTLYRITHTNDIVPRLPPREFGYSHSSPEFWIKSGTLVPVRRRDIVKIEGIDAEGGNNQPNIPSIPAHLWYFGAIGTC

SEQ ID NO: 14278 - protein, 268 aa, Thermomyces lanuginosus; identical to SEQ ID NO: 8978

SEQ ID NO: 14279 - protein, 268 aa, Thermomyces lanuginosus
EVSQDLFNQFNLFAQYSAAAYCGKNNDAPAGTNITCTGNACPEVEKADATFLYSFEDNGSGDVTGFLALDNTNKLIVLSFRGSRSSENWIGNLNFDLKEINDICSGCRGHDGFTSSWRSVADTLRQKVEDAVREHPDYRVVFTGHSLGGALATVAGADLRGNGYDIDVFSYGAPRVGNRAFAEFLTVQTGGTLYRITHTNDIVPRLPPREFGYSHSSPEYWIKSGTGVPVKRRDIVKIEGIDATGGNNQPNIPDISAHLWYFGLIGTC

SEQ ID NO: 14280 - protein, 268 aa, Thermomyces lanuginosus
EVSQDLFNQFNLFAQYSAAAYCGKNNDAPAGTNITCTGNACPEVELADATFLYSFEDNGSGDVTGFLALDNTNKLIVLSFRGSRSIENWIGNLNFDLKEINDICSGCRGHDGFTSSWRSVADTLRQKVEDAVREHPDYRVVFTGHSLGGALATVAGADLRGNGYDIDVFSYGAPRVGNRAFAEFLTVQTGGTLYRITHTNDIVPRLPPREFGYSHSSPEYWIKSGTLVPVRRRDIVKIEGIDATGGNNLPNIPIIPAHLWYFGLIGTC

SEQ ID NO: 14281 - protein, 268 aa, Thermomyces lanuginosus
EVSQDLFNQFNLFAQYSAAAYCGKNNDAPAGTNITCTGNACPEVEKADATFLYSFRDSGVGDVTGFLALDNTNKLIVLSFRGSRSIENWIADLNFILIEINDICSGCRGHDGFTSSWFSVADTLRQKVEDAVREHPDYRVVFTGHSLGGALATVAGADLRGNGYDIDVFSYGAPRVGNRAFAEFLTVQTGGTLYRITHTNDIVPRLPPREFGYSHSSPEYWIKSGTLVPVRRRDIVKIEGIDATGGNNQPNIPSMSAHLWYFGAIGTC

SEQ ID NO: 14282 - protein, 268 aa, Thermomyces lanuginosus
EVSQDLFNQFNLFAQYSAAAYCGKNNDAPAGTNITCTGNACPEVEKADATFLYSFRDSGVGDVTGFLALDNTNKLIVLSFRGSRSIENWIADLNFILIEINDICSGCRGHDGFTSSWFSVADTLRQKVEDAVREHPDYRVVFTGHSLGGALATVAGADLRGNGYDIDVFSYGAPRVGNRAFAEFLTVQTGGTLYRITHTNDIVPRLPPREFGYSHSSPEYWIKSGTLVPVRRRDIVKIEGIDATGGNNQPNIPSGSAHLWYFGAIGTC

SEQ ID NO: 14283 - protein, 268 aa, Synthetic construct
EVSQDLFNQFNLFAQYSAAAYCGKNNDAPAGTNITCTGNACPEVEKADATFLYSFEDSGVGDVTGFLALDNTDKLIVLSFRGSPSIENWIGNLNFDLKEIKDICSGCRGHDGFTSSWRSVADRLRQKVEDAVRDHPDYRVVFTGHSLGGALATVAGADLRGNGYDIDVFSYGAPRVGNRAFAEFLTVQTGGTLYRITHTNDIVPRLPPREFGYSHSSPEYWIKSGTLVPVTRNDIVKIEGIDAPGGNNQPNIPDVPAHLWYFGLIGTC

SEQ ID NO: 14284 - protein, 268 aa, Thermomyces lanuginosus
EVSQDLFNQFNLFAQYSAAAYCGKNNDAPAGTNITCTGNACPEVEKADATFLYSFRDSGVGDVTGFLALDNTNKLIVLSFRGSRSIENWIADLNFILIEINDICSGCRGHDGFTSSWFSVADTLRQKVEDAVREHPDYRVVFTGHSLGGALATVAGADLRGNGYDIDVFSYGAPRVGNRAFAEFLTVQTGGTLYRITHTNDIVPRLPPREFGYSHSSPEYWIKSGTLVPVRRRDIVKIEGIDATGGNNQPNIPSGAAHLWYFGAIGTC

SEQ ID NO: 14285 - protein, 268 aa, Thermomyces lanuginosus
EVSQDLFNQFNLFAQYSAAAYCGKNNDAPAGTNITCTGNACPEVEKADATFLYSFRDSGVGDVTGFLALDNTNKLIVLSFRGTRSLENWIADLNFILQEINDICSGCRGHDGFTSSWFSVADTLRQKVEDAVREHPDYRVVFTGHSLGGALATVAGADLRGNGYDIDVFSYGAPRVGNRAFAEFLTVQTGGTLYRITHTNDIVPRLPPREFGYSHSSPEYWIKSGTLVPVRRRDIVKIEGIDATGGNNQPNIPSIPAHLWYFGAIGTC

SEQ ID NO: 14286 - protein, 268 aa, Thermomyces lanuginosus
EVSQDLFNQFNLFAQYSAAAYCGKNNDAPAGTNITCTGNACPEVEKADATFLYSFEDNGSGDVTGFLALDNTNKLIVLSFRGSRSTENWIGNLNFDLKEINDICSGCRGHDGFTSSWRSVADTLRQKVEDAVREHPDYRVVFTGHSLGGALATVAGADLRGNGYDIDVFSYGAPRVGNRAFAEFLTVQTGGTLYRITHTNDIVPRLPPREFGYSHSSPEYWIKSGTGVPVKRRDIVKIEGIDATGGNNQPNIPDISAHLWYFGLIGTC

SEQ ID NO: 14287 - protein, 268 aa, Thermomyces lanuginosus
EVSQDLFNQFNLFAQYSAAAYCGKNNDAPAGTNITCTGNACPEVEKADATFLYSFEDSGVGCVTGFLALDNTNKLIVLSFRGSRSPCNWIANLDFIFDEINDICSGCRGHDGFTSSWRSVADTLRQKVEDAVREHPDYRVVFTGHSLGGALATVAGADLRGNGYDIDVFSYGAPRVGNRAFAEFLTVQTGGTLYRITHTNDIVPRLPPREFGYSHSSPEYWIKSGTLVPVRRRDIVKIEGIDATGGNNQPNIPDIPAHLWYFGLIGTC

SEQ ID NO: 14288 - protein, 268 aa, Thermomyces lanuginosus
EVSQDLYNQFKLFAHYSAAAYCGKNNDAPAGTNITCTGNACPEVEKADATFIYSFEDSGVGDVTGFLALDNTNKLIVLSFRGSRSIENWIANLNFDLKEINDICSGCRGHDGFWNSWRSVADTLRQKVEDAVREYPDYRVVFTGHSLGGALATVAGADLRGNGYDIDVFSYGAPRVGNRAFAEFLTVQTGGTLYRITHTNDIVPRLPPREFGYSHSSPEYWIKSGTLVPVTRNDIVVIEGIDATGGNNQPNIPDIPAHLWYFGLIGTC

SEQ ID NO: 14289 - protein, 268 aa, Thermomyces lanuginosus
EVSQDLYNQFKLFAHYSAAAYCGKNNDAPAGTNITCTGNACPEVEKADATFIYSFEDSGVGDVTGFLALDNTNKLIVLSFRGSRSIENWIANLNFDLKEINDICSGCRGHDGFWESWRSVADTLRQKVEDAVREYPDYRVVFTGHSLGGALATVAGADLRGNGYDIDVFSYGAPRVGNRAFAEFLTVQTGGTLYRITHTNDIVPRLPPREFGYSHSSPEYWIKSGTLVPVTRNDIVVIEGIDATGGNNQPNIPDIPAHLWYFGLIGTC

SEQ ID NO: 14290 - protein, 268 aa, Thermomyces lanuginosus
EVSQDLFNQFNLFAQYSAAAYCGKNNDAPAGTNITCTGNACPEVEKADATFLYSFEDSGVGCVTGFLALDNTNKLIVLSFRTSRSICNWILDLNYTPQEINDICSGCRGHDGFTSSWRSVADTLRQKVEDAVREHPDYRVVFTGHSLGGALATVAGADLRGNGYDIDVFSYGAPRVGNRAFAEFLTVQTGGTLYRITHTNDIVPRLPPREFGYSHSSPEYWIKSGTLVPVTRNDIVKIEGIDATGGNNQPNIPDIPAHLWYFGLIGTC

SEQ ID NO: 14291 - protein, 268 aa, Thermomyces lanuginosus
EVSQDLFNQFNLFAQYSAAAYCGKNNRAPAGTNITCTGNACPEVEKADATLLYSFQDSGVGDVTGFLALDNTNKLIVLSFRGSRSIENWIADLNFDLQEINDICSGCRGHDGFTSSWRSVADTLRQKVEDAVREHPDYRVVFTGHSLGGALATVAGADLRGNGYDIDVFSYGAPRVGNRAFAEFLTVQTGGTLYRITHTNDIVPRLPPREFGYSHSSPEYWIKSGTLVPVRRRDIVKIEGIDATGGNNQPNIPSIPAHLWYFGLIGTC

SEQ ID NO: 14292 - protein, 268 aa, Thermomyces lanuginosus
EVSQDLFNQFNLFAQYSAAAYCGKNNDAPAGTNITCTGNACPEVEKADATFLYSFRDSGVGDVTGFLALDNTNKLIVLSFRGSRSIENWIADLNFILIEINDICSGCRGHDGFTSSWFSVADTLRQKVEDAVREHPDYRVVFTGHSLGGALATVAGADLRGNGYDIDVFSYGAPRVGNRAFAEFLTVQTGGTLYRITHTNDIVPRLPPREFGYSHSSPEYWIKSGTLVPVRRRDIVKIEGIDATGGNNQPNIPSSVAHLWYFGAIGTC

SEQ ID NO: 14293 - protein, 267 aa, Thermomyces lanuginosus
VSQDLFNQFRLFAQYSAAAYCGKNNDAPAGTQITCTANACPEVEKADATFLYSFEDSGVGDVTGFLALDNTNKLIVLSFRGSRSIENWITNLNFDLKEINDICSGCRGHDGFTSSWRSVADTLRQKVEDAVREHPDYRVVFTGHSLGGALATVAGADLRGNPYDIDVFSYGAPRFGNRAFAEFLTVQTGGTLYRITHTNDIVPRLPPREFGYSHSSPEYWIKSGTLVPVRRRDIVKIEGIDATGGNNQPNIPDIPAHLWYFGLIGTC

SEQ ID NO: 14294 - protein, 267 aa, Thermomyces lanuginosus
VSQDLFNQFNLFAQYSAAAYCGKNNDAPAGTNITCTGNACPEVEKADATFLYSFEDSGKGDVTGFLALDNTNKLIVLSFRGSRSVENWIGNLNFDLKEINDICSGCRGHDGFTSSWRSVADTLRQKVEDAVREHPDYRVVFTGHSLGGGLATVAGADLRGNGYDIDVFSYGAPRVGNRAFAEFLTVQTGGTLYRITHTNDIVPRLPPREFGYSHSSPEYWIKSGTGVPVRRRDIVKIEGIDATGGNNQPNIPDIKAHLWYFGLIGTC

SEQ ID NO: 14295 - protein, 267 aa, Thermomyces lanuginosus
VSQDLFNQFNLFAQYSAAAYCGKNNDAPAGTQITCTANACPEVEKADATFLYSFEDSGVGDVTGFLALDNTNKLIVLSFRGSRSIENWITNLNFDLKEINDICSGCRGHDGFTSSWRSVADTLRQKVEDAVREHPDYRVVFTGHSLGGALATVAGADLRGNPYDIDVFSYGAPRFGNRAFAEFLTVQTGGTLYRITHTNDIVPRLPPREFGYSHSSPEYWIKSGTLVPVRRRDIVKIEGIDATGGNNQPNIPSIPAHLWYFGLIGTC

SEQ ID NO: 14296 - protein, 267 aa, Thermomyces lanuginosus
VSQDLFNQFNLFAQYSAAAYCGKNNRAPAGTNITCTGNACPEVEKADATILYSFRDSGVGDVTGFLALDNTNKLIVLSFRGSRSIENWIGNLNFDLEEINDICSGCRGHDGFTSSWRSVADTLRQKVEDAVREHPDYRVVFTGHSLGGALATVAGADLRGNGYDIDVFSYGAPRVGNRAFAEFLTVQTGGTLYRITHTNDIVPRLPPREFGYSHSSPEYWIKSGTLVPVRRCDIVKIEGIDATGGNNQPNIPSIPAHLWYFGLIGTC

SEQ ID NO: 14297 - protein, 267 aa, Thermomyces lanuginosus
VSQDLFNQFNLFAQYSAAAYCGKNNDAPAGTQITCTANACPEVEKADATFLYSFEDSGVGDVTGFLALDNTNKLIVLSFRGSRSIENWITNLNFDLKEINDICSGCRGHDGFTSSWRSVADTLRQKVEDAVREHPDYRVVFTGHSLGGALATVAGADLRGNPYDIDVFSYGAPRFGNRAFAEFLTVQTGGTLYRITHTNDIVPRLPPREFGYSHSSPEYWIKSGTFVPVRRRDIVKIEGIDATGGNNQPNIPDIPAHLWYFGLIGTC

SEQ ID NO: 14298 - protein, 267 aa, Thermomyces lanuginosus
VSQDLFNQFNLFAQYSAAAYCGKNNDAPAGTQITCTANACPEVEKADATFLYSFEDSGVGDVTGFLALDNTNKLIVLSFRGSRSIENWITNLNFDLKEINDICSGCRGHAGFTSSWRSVADTLRQKVEDAVREHPDYRVVFTGHSLGGALATVAGADLRGNPYDIDVFSYGAPRFGNRAFAEFLTVQTGGTLYRITHTNDIVPRLPPREFGYSHSSPEYWIKSGTLVPVRRRDIVKIEGIDATGGNNQPNIPDIPAHLWYFGLIGTC

SEQ ID NO: 14299 - protein, 267 aa, Thermomyces lanuginosus
VSQDLFNQFRLFAQYSAAAYCGKNNDAPAGTQITCTGNACPEVEKADATFLYSFEDSGVGDVTGFLALDNTNKLIVLSFRGSRSIENWITNLNFDLKEINDICSGCRGHDGFTSSWRSVADTLRQKVEDAVREHPDYRVVFTGHSLGGALATVAGADLRGNAYDIDVFSYGAPRVGNRAFAEFLTVQTGGTLYRITHTNDIVPRLPPREFGYSHSSPEYWIKSGTLVPVRRRDIVKIEGIDATGANNQPNIPSIPAHLWYFGLIGTC

SEQ ID NO: 14300 - protein, 267 aa, Synthetic construct
EVSQDLFNQFNLFAQYSAAAYCGKNNDAPAGTNITCTGNACPEVEKADATFLYSFEDSGVGDVTGFLALDNTDKLIVLSFRGSPSIENWIGNLNFDLKEIKDICSGCRGHDGFTSSWRSVADRLRQKVEDAVRDHPDYRVVFTGHSLGGALATVAGADLRGNGYDIDVFSYGAPRVGNRAFAEFLTVQTGGTLYRITHTNDIVPRLPPREFGYSHSSPEYWIKSPTLVPVTRNDIVKIEGIDPGGNNQPNIPDIPAHLWYFGLIGTC

SEQ ID NO: 14301 - protein, 272 aa, Struthio camelus
EVSQDLFNQFNLFAQYSAAAYCGKNNDAPAGTQITCTGNACPEVEKADATFLYSFEDSGVGDVTGFLALDNTNKLIVLSFRGSRSIENWIQNLNFDLKEINDICSGCRGHDGFTSSWRSVADTLRQKVEDAVREHPDYRVVFTGHSLGGALATVAGADLRGNGYDIDVFSYGAPRVGNRAFAEFLTVQTGGTLYRITHTNDIVPRLPPRQFGYSHSSPEYWIKSGTLVPVRRRDIVKIEGIDATGGNNQPNIPDAPAHLWYFGLIGTCLGSG

SEQ ID NO: 14302 - protein, 268 aa, Thermomyces lanuginosus
EVSQDLFNQFNLFAQYSAAAYCSKNNNAPAGTNITCTGNACPEVEKADATILYSFRDSGVGDVTGFLALDNTNKLIVLSFRGSRSIENWIGNLNFDLKEINDICSGCRGHDGFTSSWFSVADTLRQKVEDAVREHPDYRVVFTGHSLGGALATVAGADLRGNGYDIDVFSYGAPRVGNRAFAEFLTVQTGGTLYRITHTNDIVPRLPPREFGYSHSSPEYWIKSGTLVPVRRRDIVKIEGIDAEGGNNQPNIPDIPAHLWYFGLIGTC

SEQ ID NO: 14303 - protein, 268 aa, Thermomyces lanuginosus
EVSQDLFNQFNLFAQYSAAAYCSKNNNAPAGTNITCTGNACPEVEKADATILYSFRDSGVGDVTGFLALDNTNKLIVLSFRGSRSIENWIGNLNFDLKEINDICSGCRGHDGFTSSWFSVADTLRQKVEDAVREHPDYRVVFTGHSLGGALATVAGADLRGNGYDIDVFSYGAPRVGNRAFAEFLTVQTGGTLYRITHTNDIVPRLPPREFGYSHSSPEYWIKSGTLVPVRRRDIVKIEGIDATGGNNQPNIPDITAHLWYFGLIGTC

SEQ ID NO: 14304 - protein, 268 aa, Thermomyces lanuginosus
EVSQDLFNQFRLFAQYSAAAYCGKNNDAPAGTQITCTANACPEVEKADATFLYSFEDSGVGDVTGFLALDNTNKLIVLSFRGSRSIENWITNLNFDLKEINDICSGCRGHDGFTSSWRSVADTLRQKVEDAVREHPDYRVVFTGHSLGGALATVAGADLRGNPYDIDVFSYGAPRGGNRAFAEFLTVQTGGTLYRITHTNDIVPRLPPREFGYSHSSPEYWIKSGTLVPVRRRDIVKIEGIDATGGNNQPNIPSIPAHLWYFGLIGTC

SEQ ID NO: 14305 - protein, 268 aa, unidentified
EVSQDLFNQFNLFAQYSAAAYCGKNNRAPAGTNITCTANACPEVEKADATFLYSFEDSGVGDVTGFLALDNTNKLIVLSFRGSRSIENWIGNLNFELKEINDICSGCRGHAGFTSSWRSVADTLRQKVEDAVREHPDYRVVFTGHSLGGALATVAGADLRGNKYDIDVFSYGAPRVGNRAFAEFLTVQTGGTLYRITHTNDIVPRLPPREFGYSHSSPEYWIKSGTLVPVRRRDIVKIEGIDATGGNNQPNIPSITAHLWYFGLIGTC

SEQ ID NO: 14306 - protein, 268 aa, Thermomyces lanuginosus
EVSQDLFNQFNLFAQYSAAAYCGKNNDAPAGTKITCTGNACPEVEKADATLLYSFKDSGVGDVTGFLARDNTNKLIVLSFRGSRSIENWIGNLNFDLEEINDICSGCRGHDGFTSSWRSVADTLRQKVEDAVREHPDYRVVFTGHSLGGALATVAGADLRGNGYDIDVFSYGAPRVGNRAFAEFLTVQTGGTLYRITLTNDIVPRLPPREFGYSHSSPEYWIKSGTLVPVRRRDIVKIEGIDATGGNNQPNIPDIPAHLWYFGLIGTC

SEQ ID NO: 14307 - protein, 268 aa, Thermomyces lanuginosus
EVSQDLFNQFNLFAQYSAAAYCGKNNDAPAGTKITCTGNACPEVEKADATILYSFKDSGVGDVTGFLARDNTNKLIVLSFRGSRSIENWIGNLNFDLEEINDICSGCRGHDGFTSSWRSVADTLRQKVEDAVREHPDYRVVFTGHSLGGALATVAGADLRGNGYDIDVFSYGAPRVGNRAFAEFLTVQTGGTLYRITHTNDIVPRLPPREFGYSHSSPEYWIKSGTLVPVRRRDIVKIEGIDATGGNNQPNIPDIPIHLWYFGLIGTC

SEQ ID NO: 14308 - protein, 268 aa, Thermomyces lanuginosus
EVSQDLFNQFNLFAQYSAAAYCGKNNRAPAGTQITCTANACPEVEKADATFLYSFEDSGVGDVTGFLALDNTNKLIVLSFRGSRSIENWITNLNFELKEINDICSGCRGHAGFTSSWRSVADTLRQKVEDAVREHPDYRVVFTGHSLGGALATVAGADLRGNKYDIDVFSYGAPRVGNRAFAEFLTVQTGGTLYRITHTNDIVPRLPPREFGYSHSSPEYWIKSGTLVPVRRRDIVKIEGIDATGGNNQPNIPDITAHLWYFGLIGTC

SEQ ID NO: 14309 - protein, 268 aa, Thermomyces lanuginosus
EVSQDLFNQFNLFAQYSAAAYCGKNNDAPAGTKITCTGNACPEVEKADATILYSFKDSGVGDVTGFLARDNTNKLIVLSFRGSRSIENWIGNLNFDLEEINDICSGCRGHDGFTSSWRSVADTLRQKVEDAVREHPDYRVVFTGHSLGGALATVAGADLRGNGYDIDVFSYGAPRVGNRAFAEFLTVQTGGTLYRITSTNDIVPRLPPREFGYSHSSPEYWIKSGTLVPVRRRDIVKIEGIDATGGNNQPNIPDIPAHLWYFGLIGTC

SEQ ID NO: 14310 - protein, 268 aa, Thermomyces lanuginosus
EVSQDLFNQFNLFAQYSAAAYCGKNNDAPAGTNITCTGNACPEVEKADATILYSFRDSGVGDVTGFLALDNTNKLIVLSFRGSRSIENWIGNLNFDLIEINDICSGCRGHDGFTSSWFSVADTLRQKVEDAVREHPDYRVVFTGHSLGGALATVAGADLRGNGYDIDVFSYGAPRVGNRAFAEFLTVQTGGTLYRITHTNDIVPRLPPREFGYSHSSPEYWIKSGTLVPVRRRDIVKIEGIDAEGGNNQPNIPDITAHLWYFGLIGTC

SEQ ID NO: 14311 - protein, 268 aa, Thermomyces lanuginosus
EVSQDLFNQFNLFAQYSAAAYCGKNNRAPAGTNITCTANACPEVEKADATFLYSFEDSGVGDVTGFLALDNTNKLIVLSFRGSRSIENWILNLNFELKEINDICSGCRGHAGFTSSWRSVADTLRQKVEDAVREHPDYRVVFTGHSLGGALATVAGADLRGNKYDIDVFSYGAPRVGNRAFAEFLTVQTGGTLYRITHTNDIVPRLPPREFGYSHSSPEYWIKSGTLVPVRRRDIVKIEGIDATGGNNQPNIPSITAHLWYFGLIGTC

SEQ ID NO: 14312 - protein, 268 aa, Thermomyces lanuginosus
EVSQDLFNQFNLFAQYSAAAYCGKNNDAPAGTKITCTGNACPEVEKADATLLYTFKDSGVGDVTGFLALDNTNKLIVLSFRGSRSIENWIGNLNFDLIEINDICSGCRGHDGFTSSWRSVADTLRQKVEDAVREHPDYRVVFTGHSLGGALATVAGADLRGNGYDIDVFSYGAPRVGNRAFAEFLTVQTGGTLYRITHTNDIVPRLPPREFGYSHSSPEYWIKSGTLVPVRRRDIVKIEGIDATGGNNQPNIPDGPAHLWYFGLIGTC

SEQ ID NO: 14313 - protein, 268 aa, Thermomyces lanuginosus
EVSQDLFNQFNLFAQYSKAAYCKANNDAPAGTNITCTGNACPEVEKADATFLYSFEDSGVGDVTGFLALDNTNKQIILSFRGSRSIENWIGNLRFDLKEINDICSGCRGHDGFTSSWRSVADTLRQKVEAAVREHPDYRVVFTGHSLGGALATVAWADLRGNGYDIDVFSYGAPRVGNRAFAEFLTVQTGGTLYRITHTNDIVPRLPPREFGYSHSSPEYWIKSGTLVPVTRNDIVKIEGIDATGGNNQPNIPDIPAHLWYFGLIGTC

SEQ ID NO: 14314 - protein, 268 aa, Thermomyces lanuginosus
EVSQDLFNQFNLFAQYSAAAYCGKNNDAPAGTKITCTGNACPEVEKADATLLYTFKDSGVGDVTGFLALDNTNKLIVLSFRGSRSIENWIGNLNFDLIEINDICSGCRGHDGFTSSWRSVADTLRQKVEDAVREHPDYRVVFTGHSLGGALATVAGADLRGNGYDIDVFSYGAPRVGNRAFAEFLTVQTGGTLYRITHTNDIVPRLPPREFGYSHSSPEYWIKSGTLVPVRRRDIVKIEGIDATGGNNQPNIPDIPIHLWYFGLIGTC

SEQ ID NO: 14315 - protein, 268 aa, Thermomyces lanuginosus
EVSQDLFNQFNLFAQYSAAAYCGKNNDAPAGTNITCTGNACPEVEKADATILYSFEDSGVGDVTGFLALDNTNKLIVLSFRGSRSIENWIGNLNFDLKEINDICSGCRGHDGFTSSWRSVADTLRQKVEDAVREHPDYRVVFTGHSLGGALATVAGADLRGNGYDIDVFSYGAPRVGNRAFAEFLTVQTGGTLYRITNTNDCVPRLPPRQFGYSHSSPEYWIKSGTLPPVRRRDIVKIEGIDATGGNNQPNICDIPAHLWYFGLIGTC

SEQ ID NO: 14316 - protein, 268 aa, Thermomyces lanuginosus
EVSQDLFNQFNLFAQYSAAAYCGKNNDAPAGTNITCTGNACPEVEKADATLLYSFRDSGVGDVTGFLALDNTNKLIVLSFRGSRSIENWIGNLNFDLIEINDICSGCRGHDGFTSSWFSVADTLRQKVEDAVREHPDYRVVFTGHSLGGALATVAGADLRGNSYDIDVFSYGAPRVGNRAFAEFLTVQTGGTLYRITHTNDIVPRLPPREFGYSHSSPEYWIKSGTLVPVRRRDIVKIEGIDATGGNNQPNIPDITAHLWYFGLIGTC

SEQ ID NO: 14317 - protein, 268 aa, Thermomyces lanuginosus
EVSQDLFNQFNLFAQYSAAAYCQKNNSAPAGTNITCTGNACPEVEKADATFLYSFEDSGVGDVTGFLALDNTNKQIVLSFRGSRSIENWIGNLRFDLKEINDICSGCRGHDGFTSSWRSVADTLRQKVEAAVREHPDYRVVFTGHSLGGALATIAWADLRGNGYDIDVFSYGAPRVGNRAFAEFLTNQTGGTLYRITHTNDIVPRLPPREFGYSHSSPEYWIKSGTLVPVTRNDIVKIEGIDATGGNNQPNIPDIPAHLWYFGRIGTC

SEQ ID NO: 14318 - protein, 268 aa, Thermomyces lanuginosus
EVSQDLFNQFNLFAQYSAAAYCGKNNDAPAGTNITCTGNICPEVEKADATFLYSFRDSGVGDVTGFLALDNTNKLIVLSFRGSRSIENWIGNLNFDLIEINDICSGCRGHDGFTSSWFSVADTLRQKVEDAVREHPDYRVVFTGHSLGGALATVAGADLRGNSYDIDVFSYGAPRVGNRAFAEFLTVQTGGTLYRITHTNDIVPRLPPREFGYSHSSPEYWIKSGTLVPVRRRDIVKIEGIDATGGNNQPNIPDITAHLWYFGLIGTC

SEQ ID NO: 14319 - protein, 268 aa, Thermomyces lanuginosus
EVSRDLFNQFNLFAQYSAAAYCGKNNDAPAGTNITCTGNACPEVEKADATILYSFEDSGVGDVTGFLALDNTNKLIVLSFRGSRSIENWIGNLNFDLKEINDICSGCRGHDGFTSSWRSVADTLRQKVEDAVREHPDYRVVFTGHSLGGALATVAGADLRGNGYDIDVFSYGAPRVGNRAFAEFLTVQTGGTLYRITNTNDIVPRLPPREFGYSHSSPEYWIKSGTLVPVRRRDIVKCEGIDATCGNNQPNIPDISAHLWYFGLIGTC

SEQ ID NO: 14320 - protein, 268 aa, Thermomyces lanuginosus
EVSQDLFNQFNLFAQYSAAAYCGKNNNAPAGTNITCTGNACPEVEKADATILYSFRDSGVGDVTGFLALDNTNKLIVLSFRGSRSIENWIGNLNFDLKEINDICSGCRGHDGFTSSWFSVADTLRQKVEDAVREHPDYRVVFTGHSLGGALATVAGADLRGNGYDIDVFSYGAPRVGNRAFAEFLTVQTGGTLYRITHTNDIVPRLPPREFGYSHSSPEYWIKSGTLVPVRRRDIVKIEGIDAEGGNNQPNIPDITAHLWYFGLIGTC

SEQ ID NO: 14321 - protein, 268 aa, Thermomyces lanuginosus
EVSQDLFNQFNLFAQYSAAAYCKANNDAPAGTNITCTGNACPEVEKADATFLYSFEDSGVGDVTGFLALDNTNKQIVLSFRGSRSIENWIGNLRFDLKEINDICSGCRGHDGFTSSWRSVADTLRQKVEDAVREHPDYRVVFTGHSLGGALATIAWADLRGNGYDIDVFSYGAPRVGNRAFAEFLTNQQGGTLYRITHTNDIVPRLPPREFGYSHSSPEYWIKSGTLVPVTRNDIVKIEGIDATGGNNQPNIPDIPAHLWYFGRIGTC

SEQ ID NO: 14322 - protein, 268 aa, Thermomyces lanuginosus
EVSQDLFNQFNLFAQYSKAAYCKKNNDAPAGTNITCTGNACPEVEKADATFLYSFEDSGVGDVTGFLALDNTNKQIVLSFRGSRSIENWIGNLRFDLKEINDICSGCRGHAGFTSSWRSVADTLRQKVEDAVREHPDYRVVFTGHSLGGALATIAWADLRGNGYDIDVFSYGAPRVGNRAFAEFLTVQQGGTLYRITHTNDIVPRLPPREFGYSHSSPEYWIKSGTLVPVTRNDIVKIEGIDATGGNNQPNIPDIPAHLWYFGRIGTC

SEQ ID NO: 14323 - protein, 268 aa, Thermomyces lanuginosus
EVSQDLFNQFNLFAQYSAAAYCGKNNDAPAGTNITCTGNACPEVEKADATFLYSFRNSGVGDVTGFLALDNTNKLIVLSFRGSRSIENWIGNLNFDLIEINDICSGCRGHDGFTSSWFSVADTLRQKVEDAVREHPDYRVVFTGHSLGGALATVAGADLRGNSYDIDVFSYGAPRVGNRAFAEFLTVQTGGTLYRITHTNDIVPRLPPREFGYSHSSPEYWIKSGTLVPVRRRDIVKIEGIDATGGNNQPNIPDITAHLWYFGLIGTC

SEQ ID NO: 14324 - protein, 268 aa, Thermomyces lanuginosus
EVSQDLFNQFNLFAQYSAAAYCGKNNDAPAGTKITCTGNACPEVEKADATILYTFKDSGVGDVTGFLALDNTNKLIVLSFRGSRSIENWIGNLNFDLIEINDICSGCRGHDGFTSSWRSVADTLRQKVEDAVREHPDYRVVFTGHSLGGALATVAGADLRGNGYDIDVFSYGAPRVGNRAFAEFLTVQTGGTLYRITHTNDIVPRLPPREFGYSHSSPEYWIKSGTDVPVRRRDIVKIEGIDATGGNNQPNIPDIPAHLWYFGLIGTC

SEQ ID NO: 14325 - protein, 268 aa, Synthetic construct
EGTPELFNQFNLFAQYSAAAYCGKNNDAPAGTNITCTGNACPEVEKADATFLYSFEGSGVGDVTGFLALDNTNKLIVLSFRGSRSIENWIGNLKFLMKEINDICSGCRGHDGFTSSWRSVADTLRQKVEDAVREHPDYRVVFTGHSLGGALATVAGADLRGNGYDIDVFSYGAPRVGNRAFAEFLTVQTGGTLYRITHTNDIVPRLPPREFGYSHSSPEYWIKSGTLVPVTRNDIVKIEGIDATGGNNRPNIPDIPAHLWYFGLIGTC

SEQ ID NO: 14326 - protein, 268 aa, Thermomyces lanuginosus
EVSQDLFNQFNLFAQYSAAAYCGKNNDAPAGTNITCTGNACPEVEKADATILYSFRDSGEGDVTGFLALDNTNKLIVLSFRGSRSIENWIGNLNFDLKEINDICSGCRGHDGFTSSWFSVADTLRQKVEDAVREHPDYRVVFTGHSLGGALATVAGADLRGNGYDIDVFSYGAPRVGNRAFAEFLTVQTGGTLYRITHTNDIVPRLPPREFGYSHSSPEYWIKSGTLVPVRRRDIVKIEGIDAEGGNNQPNIPDITAHLWYFGLIGTC

SEQ ID NO: 14327 - protein, 268 aa, Thermomyces lanuginosus
EVSQDLFNQFNLFAQYSAAAYCGKNNRAPAGTNITCTANACPEVEKADATFLYSFEDSGVGDVTGFLALDNTNKLIVLSFRGSRSIENWIGNLNFELKEINDICSGCRGHAGFTSSWRSVADTLRQKVEDAVREHPDYRVVFTGHSLGGALATVAGADLRGNKYDIDVFSYGAPRVGNRAFAEFLTVQTGGTLYRITHTNDIVPRLPPREFGYSHSSPEYWIKSGTLVPVRRRDIVKIEGIDATGGNNQPNIPSINAHLWYFGLIGTC

SEQ ID NO: 14328 - protein, 268 aa, Thermomyces lanuginosus
EVSQDLFNQFNLFAQYSAAAYCGKNNDAPAGTKITCTGNACPEVEKADATLLYSFKDSGVGDVTGFLARDNTNKLIVLSFRGSRSIENWIGNLNFDLEEINDICSGCRGHDGFTSSWRSVADTLRQKVEDAVREHPDYRVVFTGHSLGGALATVAGADLRGNGYDIDVFSYGAPRVGNRAFAEFLTVQTGGTLYRITHTNDIVPRLPPREFGYSHSSPEYWIKFGTLVPVRRRDIVKIEGIDATGGNNQPNIPDIPAHLWYFGLIGTC

SEQ ID NO: 14329 - protein, 268 aa, Thermomyces lanuginosus
EVSQDLFNQFKLFAQYSAAAYCQKNNDAPAGTNITCTGNACPEVEKADATFLYSFEDSGVGDVTGFLALDNTNKQIVLSFRGSRSIENWIGNLNFDLKEINDICSGCRGHAGFTSSWRSVADTLRQKVEDAVREHPDYRVVFTGHSLGGALATIAWADLRGNGYDIDVFSYGAPRVGNRAFAEFLTNQQGGTLYRITHTNDIVPRLPPREFGYSHSSPEYWIKSGTLVPVTRNDIVKIEGIDATGGNNQPNIPDIPAHLWYFGRIGTC

SEQ ID NO: 14330 - protein, 268 aa, Thermomyces lanuginosus
EVSQDLFNQFNLFAQYSAAAYCGKNNRAPAGTQITCTANACPEVEKADATFLYSFEDSGVGDVTGFLALDNTNKLIVLSFRGSRSIENWITNLNFELKEINDICSGCRGHAGFTSSWRSVADTLRQKVEDAVREHPDYRVVFTGHSLGGALATVAGADLRGNGYDIDVFSYGAPRVGNRAFAEFLTVQTGGTLYRITHTNDIVPRLPPREFGYSHSSPEYWIKSGTLVPVRRRDIVKIEGIDATGGNNQPNIPSITAHLWYFGLIGTC

SEQ ID NO: 14331 - protein, 268 aa, Thermomyces lanuginosus
EVSQDLFNQFNLFAQYSAAAYCGKNNDAPAGTKITCTGNACPEVEKADATILYTFKDSGVGDVTGFLALDNTNKLIVLSFRGSRSIENWIGNLNFDLIEINDICSGCRGHDGFTSSWRSVADTLRQKVEDAVREHPDYRVVFAGHSLGGALATVAGADLRGNGYDIDVFSYGAPRVGNRAFAEFLTVQTGGTLYRITHTNDIVPRLPPREFGYSHSSPEYWIKSGTLVPVRRRDIVKIEGIDATGGNNQPNIPDIPAHLWYFGLIGTC

SEQ ID NO: 14332 - protein, 268 aa, Thermomyces lanuginosus
EVSQDLFNQFNLFAQYSAAAYCGKNNNAPAGTNITCTGNACPEVEKADATILYSFRDSGVGDVTGFLALDNTNKLIVLSFRGSRSIENWIGNLNFDLKEINDICSGCRGHDGFTSSWFSVADTLRQKVEDAVREHPDYRVVFTGHSLGGALATVAGADLRGNGYDIDVFSYGAPRVGNRAFAEFLTVQTGGTLYRITHTNDIVPRLPPREFGYSHSSPEFWIKSGTLVPVRRRDIVKIEGIDAEGGNNQPNIPDIPAHLWYFGLIGTC

SEQ ID NO: 14333 - protein, 268 aa, Thermomyces lanuginosus
EVSQDLFNQFNLFAQYSAAAYCKKNNDAPAGTNITCTGNACPEVEKADATFLYSFKDSGVGDVTGFLALDNTNKQIVLSFRGSRSIENWIGNLNFDLKEINDICSGCRGHAGFTSSWRSVADTLRQKVEAAVREHPDYRVVFTGHSLGGALATIAWADLRGNGYDIDVFSYGAPRVGNRAFAEFLTVQQGGTLYRITHTNDIVPRLPPREFGYSHSSPEYWIKSGTLVPVTRNDIVKIEGIDATGGNNQPNIPDIPAHLWYFGRIGTC

SEQ ID NO: 14334 - protein, 268 aa, Thermomyces lanuginosus
EVSQDLFNQFNLFAQYSAAAYCQKNNSAPAGTNITCTGNACPEVEKADATFLYSFEDSGVGDVTGFLALDNTNKRIVLSFRGSRSIENWIGNLRFDLKEINDICSGCRGHDGFTSSWRSVADTLRQKVEDAVREHPDYRVVFTGHSLGGALATIAWADLRGNGYDIDVFSYGAPRVGNRAFAEFLTNQQGGTLYRITHTNDIVPRLPPREFGYSHSSPEYWIKSGTLVPVTRNDIVKIEGIDATGGNNQPNIPDIPAHLWYFGLIGTC

SEQ ID NO: 14335 - protein, 268 aa, Thermomyces lanuginosus
EVSQDLFNQFNLFAQYSAAAYCGKNNRAPAGTQITCTGNACPEVEKADATFLYSFEDSGVGDVTGFLALDNTNKLIVLSFRGSRSIENWINNLRFDLKEINDICSGCRGHAGFTSSWRSVADTLRQKVEDAVREHPDYRVVFTGHSLGGALATVAGADLRGNGYDIDVFSYGAPRVGNRAFAEFLTVQTGGTLYRITHTNDIVPRLPPREFGYSHPSPEYWIKSGTGVPVRRRDIVKIEGIDATGGNNQPNIPDIPAHLWYFGLIGTC

SEQ ID NO: 14336 - protein, 268 aa, Thermomyces lanuginosus
EVSQDLFNQFNLFAQYSAAAYCGKNNDAPAGTKITCTGNACPEVEKADATLLYTFKDSGVGDVTGFLALDNTNKLIVLSFRGSRSIENWIGNLNFDLIEINDICSGCRGHDGFTSSWRSVADTLRQKVEDAVREHPDYRVVFTGHSLGGALATVAGADLRGNGYDIDVFSYGAPRVGNRAFAEFLTVQTGGTLYRITSTNDIVPRLPPREFGYSHSSPEYWIKSGTLVPVRRRDIVKIEGIDATGGNNQPNIPDIPAHLWYFGLIGTC

SEQ ID NO: 14337 - protein, 268 aa, Thermomyces lanuginosus
EVSQDLFNQFNLFAQYSAAAYCGKNNDAPAGTKITCTGNACPEVEKADATILYTFKDSGVGDVTGFLALDNTNKLIVLSFRGSRSIENWIGNLNFDLIEINDICSGCRGHDGFTSSWRSVADTLRQKVEDAVREHPDYRVVFTGHSLGGALATVAGADLRGNGYDIDVFSYGAPRVGNRAFAEFLTVQTGGTLYRITLTNDIVPRLPPREFGYSHSSPEYWIKSGTLVPVRRRDIVKIEGIDATGGNNQPNIPDIPAHLWYFGLIGTC

SEQ ID NO: 14338 - protein, 268 aa, Thermomyces lanuginosus
EVSQDLFNQFNLFAQYSAAAYCGKNNDAPAGTKITCTGNACPEVEKADATLLYSFKDSGVGDVTGFLARDNTNKLIVLSFRGSRSIENWIGNLNFDLEEINDICSGCRGHDGFTSSWRSVADTLRQKVEDAVREHPDYRVVFTGHSLGGALATVAGADLRGNGYDIDVFSYGAPRVGNRAFAEFLTVQTGGTLYRITNTNDIVPRLPPREFGYSHSSPEYWIKSGTLVPVRRRDIVKIEGIDATGGNNQPNIPDIPAHLWYFGLIGTC

SEQ ID NO: 14339 - protein, 268 aa, Thermomyces lanuginosus
EVSQDLFNQFNLFAQYSAAAYCGKNNDAPAGTKITCTGNACPEVEKADATLLYTFKDSGVGDVTGFLALDNTNKLIVLSFRGSRSIENWIGNLNFDLIEINDICSGCRGHDGFTSSWRSVADTLRQKVEDAVREHPDYRVVFTGHSLGGALATVAGADLRGNGYDIDVFSYGAPRVGNRAFAEFLTVQTGGTLYRITHTNDIVPRLPPREFGYSHSSPEYWIKSGTLVPRRRRDIVKIEGIDATGGNNQPNIPDIPAHLWYFGLIGTC

SEQ ID NO: 14340 - protein, 268 aa, Thermomyces lanuginosus
EVSQDLFNQFNLFAQYSAAAYCGKNNDAPAGTKITCTGNACPEVEKADATILYTFKDSGVGDVTGFLALDNTNKLIVLSFRGSRSIENWIGNLNFDLIEINDICSGCRGHDGFTSSWRSVADTLRQKVEDAVREHPDYRVVFTGHSLGGALATVAGADLRGNGYDIDVFSYGAPRVGNRAFAEFLTVQTGGTLYRITNTNDIVPRLPPREFGYSHSSPEYWIKSGTLVPVRRRDIVKIEGIDATGGNNQPNIPDIPAHLWYFGLIGTC

SEQ ID NO: 14341 - protein, 268 aa, Thermomyces lanuginosus
EVSQDLFNQFNLFAQYSAAAYCGKNNRAPAGTNITCTANACPEVEKADATFLYSFEDSGVGDVTGFLALDNTNKLIVLSFRGSRSIENWIGNLNFELKEINDICSGCRGHAGFTSSWRSVADTLRQKVEDAVREHPDYRVVFTGHSLGGALATVAGADLRGNKYDIDVFSYGAPRVGNRAFAEFLTVQTGGTLYRITHTNDIVPRLPPREFGYSHSSPEYWIKSGTLVPVRRRDIVKIEGIDATGGNNQPNIPSIQAHLWYFGLIGTC

SEQ ID NO: 14342 - protein, 268 aa, Thermomyces lanuginosus
EVSQDLFNQFNLFAQYSAAAYCGKNNRAPAGTNITCTANACPEVEKADATFLYSFEDSGVGDVTGFLALDNTNKLIVLSFRGSRSIENWIGNLNFELKEINDICSGCRGHAGFTSSWRSVADTLRQKVEDAVREHPDYRVVFTGHSLGGALATVAGADLRGNKYDIDVFSYGAPRVGNRAFAEFLTVQTGGTLYRITHTNDIVPRLPPREFGYSHSSPEYWIKSGTLVPVRRRDIVKIEGIDATGGNNQPNIPSIRAHLWYFGLIGTC

SEQ ID NO: 14343 - protein, 268 aa, Thermomyces lanuginosus
EVSQDLFNQFNLFAQYSAAAYCGKNNDAPAGTNITCTGNICPEVEKADATLLYSFRDSGVGDVTGFLALDNTNKLIVLSFRGSRSIENWIGNLNFDLKEINDICSGCRGHDGFTSSWFSVADTLRQKVEDAVREHPDYRVVFTGHSLGGALATVAGADLRGNSYDIDVFSYGAPRVGNRAFAEFLTVQTGGTLYRITHTNDIVPRLPPREFGYSHSSPEYWIKSGTLVPVRRRDIVKIEGIDATGGNNQPNIPDITAHLWYFGLIGTC

SEQ ID NO: 14344 - protein, 268 aa, Thermomyces lanuginosus
EVSQDLFNQFNLFAQYSAAAYCGKNNRAPAGTNITCTANACPEVEKADATFLYSFEDSGVGDVTGFLALDNTNKLIVLSFRGSRSIENWITNLNFELKEINDICSGCRGHAGFTSSWRSVADTLRQKVEDAVREHPDYRVVFTGHSLGGALATVAGADLRGNKYDIDVFSYGAPRVGNRAFAEFLTVQTGGTLYRITHTNDIVPRLPPREFGYSHSSPEYWIKSGTLVPVRRRDIVKIEGIDATGGNNQPNIPSITAHLWYFGLIGTC

SEQ ID NO: 14345 - protein, 268 aa, Thermomyces lanuginosus
DVSQDLFNQFNLFAQYSAAAYCGKNNDAPAGTQITCTGNACPEVEKADATFLYSFEDSGVGDVTGFLALDNTNKLIVLSFRGSRSIENWITNLRFDLKEINDICSGCRGHAGFTSSLRSVADTLRQKVEDAVREHPDYRVVFTGHSLGGALATVAGADLRGNGYDIDVFSYGAPRVGNRAFAEFLTVQTGGTLYRITHTNDIVPRLPPREFGYSHSSPEYWIKSGTLVPVRRRDIVKIEGIDATGGNNQPNIPSIPAHLWYFGLIGTC

SEQ ID NO: 14346 - protein, 268 aa, Thermomyces lanuginosus
EVSQDLFNQFNLFAQYSAAAYCGKNNRAPAGTQITCTANACPEVEKADATFLYSFEDSGVGDVTGFLALDNTNKLIVLSFRGSRSIENWITNLNFELKEINDICSGCRGHDGFTSSWRSVADTLRQKVEDAVREHPDYRVVFTGHSLGGALATVAGADLRGNKYDIDVFSYGAPRVGNRAFAEFLTVQTGGTLYRITHTNDIVPRLPPREFGYSHSSPEYWIKSGTLVPVRRRDIVKIEGIDATGGNNQPNIPSITAHLWYFGLIGTC

SEQ ID NO: 14347 - protein, 268 aa, Thermomyces lanuginosus
EVSQDLFNQFNLFAQYSAAAYCSKNNNAPAGTNITCTGNICPEVEKADATFLYSFRDSGKGDVTGFLALDNTNKLIVLSFRGSRSIENWIGNLNFDLKEINDICSGCRGHDGFTSSWFSVADTLRQKVEDAVREHPDYRVVFTGHSLGGALATVAGADLRGNGYDIDVFSYGAPRVGNRAFAEFLTVQTGGTLYRITHTNDIVPRLPPREFGYSHSSPEYWIKSGTLVPVRRRDIVKIEGIDATGGNNQPNIPDIPAHLWYFGLIGTC

SEQ ID NO: 14348 - protein, 268 aa, Thermomyces lanuginosus
EVSQDLFNQFNLFAQYSAAAYCGKNNRAPAGTQITCTANACPEVEKADATFLYSFEDSGVGDVTGFLALDNTNKLIVLSFRGSRSIENWITNLNFELKEINDICSGCRGHAGFTSSWRSVADTLRQKVEDAVREHPDYRVVFTGHSLGGALATVAGADLRGNKYDIDVFSYGAPRVGNRAFAEFLTVQTGGTLYRITHTNDIVPRLPPREFGYSHSSPEYWIKSGTLVPVRRRDIVKIEGIDATGGNNQPNIPSIPAHLWYFGLIGTC

SEQ ID NO: 14349 - protein, 268 aa, Thermomyces lanuginosus
EVSQDLFNQFNLFAQYSAAAYCGKNNDAPAGTNITCTGNACPEVEKADATFLYSFEDNGSGDVTGFLALDNTNKLIVLSFRGSRSVENWIGNLNFDLKEINDICSGCRGHDGFTSSWRSVADTLRQKVEDAVREHPDYRVVFTGHSLGGGLATVAGADLRGNGYDIDVFSYGAPRVGNRAFAEFLTVQTGGTLYRITHTNDIVPRLPPREFGYSHSSPEYWIKSGTGVPVRRRDIVKIEGIDATGGNNQPNIPDIKAHLWYFGLIGTC

SEQ ID NO: 14350 - protein, 268 aa, Thermomyces lanuginosus
EVSQDLFNQFNLFAQYSAAAYCGKNNDAPAGTKITCTGNACPEVEKADATILYTFKDSGVGDVTGFLALDNTNKLIVLSFRGSRSIENWIGNLNFDLIEINDICSGCRGHDGFTSSWRSVADTLRQKVEDAVREHPDYRVVFTGHSLGGALATVAGADLRGNGYDIDVFSYGAPRVGNRAFAEFLTVQTGGTLYRITYTNDIVPRLPPREFGYSHSSPEYWIKSGTLVPVRRRDIVKIEGIDATGGNNQPNIPDIPAHLWYFGLIGTC

SEQ ID NO: 14351 - protein, 268 aa, Thermomyces lanuginosus
EVSQDLFNQFNLFAQYSAAAYCGKNNDAPAGTKITCTGNACPEVEKADATVLYTFKDSGVGDVTGFLALDNTNKLIVLSFRGSRSIENWIGNLNFDLIEINDICSGCRGHDGFTSSWRSVADTLRQKVEDAVREHPDYRVVFTGHSLGGALATVAGADLRGNGYDIDVFSYGAPRVGNRAFAEFLTVQTGGTLYRITHTNDIVPRLPPREFGYSHSSPEYWIKPGTLVPVRRRDIVKIEGIDATGGNNQPNIPDIPAHLWYFGLIGTC

SEQ ID NO: 14352 - protein, 268 aa, Thermomyces lanuginosus
EVSQDLFNQFNLFAQYSAAAYCGKNNRAPAGTQITCTGNACPEVEKADATFLYSFEDSGVGDVTGFLALDNTNKLIVLSFRGSRSIENWIGNLNFDLKEINDICSGCRGHDGFTSSWRSVADTLRQKVEDAVREHPDYRVVFTGHSLGGALATVAGADLRGNGYDIDVFSYGAPRQGNRAFAEFLTVQTGGTLYRITHTNDIVPRLPPREFGYSHSSPEYWIKSGTGVPVRRRDIVKIEGIDATGGNNRPNIPSIPAHLWYFGLIGTC

SEQ ID NO: 14353 - protein, 268 aa, Thermomyces lanuginosus
EVSQDLFNQFNLFAQYSAAAYCGKNNNAPAGTNITCTGNACPEVEKADATILYSFRDSGVGDVTGFLALDNTNKLIVLSFRGSRSIENWIGNLNFDLIEINDICSGCRGHDGFTSSWFSVADTLRQKVEDAVREHPDYRVVFTGHSLGGALATVAGADLRGNGYDIDVFSYGAPRVGNRAFAEFLTVQTGGTLYRITHTNDIVPRLPPREFGYSHSSPEYWIKSGTLVPVRRRDIVKIEGIDATGGNNQPNIPDITAHLWYFGLIGTC

SEQ ID NO: 14354 - protein, 268 aa, Thermomyces lanuginosus
EVSQDLFNQFNLFAQYSAAAYCSKNNDAPAGTNITCTGNACPEVEKADATILYSFRDSGVGDVTGFLALDNTNKLIVLSFRGSRSIENWIGNLNFDLKEINDICSGCRGHDGFTSSWFSVADTLRQKVEDAVREHPDYRVVFTGHSLGGALATVAGADLRGNGYDIDVFSYGAPRVGNRAFAEFLTVQTGGTLYRITHTNDIVPRLPPREFGYSHSSPEFWIKSGTLVPVRRRDIVKIEGIDAEGGNNQPNIPDIPAHLWYFGLIGTC

SEQ ID NO: 14355 - protein, 268 aa, Thermomyces lanuginosus
EVSQDLFNQFNLFAQYSAAAYCGKNNDAPAGTKITCTGNACPEVEKADATLLYTFKDSGVGDVTGFLALDNTNKLIVLSFRGSRSIENWIGNLNFDLIEINDICSGCRGHDGFTSSWRSVADTLRQKVEDAVREHPDYRVVFTGHSLGGALATVAGADLRGNGYDIDVFSYGAPRVGNRAFAEFLTVQTGGTLYRITLTNDIVPRLPPREFGYSHSSPEYWIKSGTLVPVRRRDIVKIEGIDATGGNNQPNIPDIPAHLWYFGLIGTC

SEQ ID NO: 14356 - protein, 268 aa, Thermomyces lanuginosus
EVSQDLFNQFNLFAQYSAAAYCGKNNRAPAGTQITCTGNACPEVEKADATFLYSFEDSGVGDVTGFLALDNTNKLIVLSFRGSRSIENWIANXXXXLKEINDICSGCRGHAGFTSSWRSVADTLRQKVEDAVREHPDYRVVFTGHSLGGALATVAGADLRGNGYDIDVFSYGAPRVGNRAFAEFLTVQTGGTLYRITHTNDIVPRLPPREFGYSHSSPEYWIKSGTLVPVRRRDIVKIEGIDATGGNNQPNIPDITAHLWYFGLIGTC

SEQ ID NO: 14357 - protein, 268 aa, Thermomyces lanuginosus
EVSQDLFNQFNLFAQYSAAAYCGKNNDAPAGTNITCTGNACPEVEKADATILYSFRDSGVGDVTGFLALDNTNKLIVLSFRGSRSIENWIGNLNFDLIEINDICSGCRGHDGFTSSWFSVADTLRQKVEDAVREHPDYRVVFTGHSLGGALATVAGADLRGNGYDIDVFSYGAPRVGNRAFAEFLTVQTGGTLYRITHTNDIVPRLPPREFGYSHSSPEFWIKSGTLVPVRRRDIVKIEGIDATGGNNQPNIPDITAHLWYFGLIGTC

SEQ ID NO: 14358 - protein, 268 aa, Thermomyces lanuginosus
EVSQDLFNQFRLFAQYSAAAYCGKNNDAPAGTQITCTANACPEVEKADATFLYSFEDSGVGDVTGFLALDNTNKLIVLSFRGSRSIENWITNLNFDLKEINDICSGCRGHDGFTSSWRSVADTLRQKVEDAVREHPDYRVVFTGHSLGGALATVAGADLRGNQYDIDVFSYGAPRGGNRAFAEFLTVQTGGTLYRITHTNDIVPRLPPREFGYSHSSPEYWIKSGTLVPVRRRDIVKIEGIDATGGNNQPNIPSIPAHLWYFGLIGTC

SEQ ID NO: 14359 - protein, 268 aa, Thermomyces lanuginosus
EVSQDLFNQFNLFAQYSAAAYCGKNNRAPAGTQITCTANACPEVEKADATFLYSFEDSGVGDVTGFLALDNTNKLIVLSFRGSRSIENWIGNLNFELKEINDICSGCRGHAGFTSSWRSVADTLRQKVEDAVREHPDYRVVFTGHSLGGALATVAGADLRGNGYDIDVFSYGAPRVGNRAFAEFLTVQTGGTLYRITHTNDIVPRLPPREFGYSHSSPEYWIKSGTLVPVRRRDIVKIEGIDATGGNNQPNIPSITAHLWYFGLIGTC

SEQ ID NO: 14360 - protein, 268 aa, Thermomyces lanuginosus
EVSQDLFNQFNLFAQYSAAAYCGKNNDAPAGTKITCTGNACPEVEKADATLLYTFKDSGVGDVTGFLALDNTNKLIVLSFRGSRSIENWIGNLNFDLIEINDICSGCRGHDGFTSSWRSVADTLRQKVEDAVREHPDYRVVFTGHSLGGALATVAGADLRGNGYDIDVFSYGAPRVGNRAFAEFLTVQTGGTLYRITHTNDIVPRLPPREFGYSHSSPEYWIKSGTLVPVRRRDIVKIEGIDATGGNNQPNIPDIPVHLWYFGLIGTC

SEQ ID NO: 14361 - protein, 268 aa, Thermomyces lanuginosus
EVSQDLFNQFNLFAWYSAAAYCQKNNSAPAGTNITCTGNACPEVEKADATFLYSFEDSGVGDVTGFLALDNTNKRIVLSFRGSRSIENWIGNLRFDLKEINDICSGCRGHDGFTSSWRSVADTLRQKVEDAVREHPDYRVVFTGHSLGGALATIAGADLRGNGYDIDVFSYGAPRVGNRAFAEFLTNQQGGTLYRITHTNDIVPRLPPREFGYSHSSPEYWIKSGTLVPVTRNDIVKIEGIDATGGNNQPNIPDIPAHLWYFGLIGTC

SEQ ID NO: 14362 - protein, 268 aa, Thermomyces lanuginosus
EVSQDLFNQFNLFAQYSAAAYCGKNNDAPAGTNITCTGNACPTVEIADATFLYSFEDNGSGDVTGFLALDNTNKLIVLSFRGSRSIENWIGNLNFDLKEINDICSGCRGHDGFTSSWRSVADTLRQKVEDAVREHPDYRVVFTGHSLGGALATVAGADLRGNGYDIDVFSYGAPRVGNRAFAEFLTVQTGGTLYRITHTNDIVPRLPPREFGYSHSSPEYWIKSGTLVPVRRRDIVKIEGIDATGGNNLPNIPIIPAHLWYFGLIGTC

SEQ ID NO: 14363 - protein, 268 aa, Thermomyces lanuginosus
EVSQDLFNQFNLFAQYSAAAYCGKNNDAPAGTNITCTGNICPEVEKADATLLYSFRDSGVGDVTGFLALDNTNKLIVLSFRGSRSIENWIGNLNFDLIEINDICSGCRGHDGFTSSWFSVADTLRQKVEDAVREHPDYRVVFTGHSLGGALATVAGADLRGNGYDIDVFSYGAPRVGNRAFAEFLTVQTGGTLYRITHTNDIVPRLPPREFGYSHSSPEYWIKSGTLVPVRRRDIVKIEGIDATGGNNQPNIPDITAHLWYFGLIGTC

SEQ ID NO: 14364 - protein, 268 aa, Thermomyces lanuginosus
EVSQDLFNQFNLFAQYSAAAYCGKNNRAPAGTNITCTANACPEVEKADATFLYSFEDSGVGDVTGFLALDNTNKLIVLSFRGSRSIENWIGNLNFELKEINDICSGCRGHAGFTSSWRSVADTLRQKVEDAVREHPDYRVVFTGHSLGGALATVAGADLRGNKYDIDVFSYGAPRVGNRAFAEFLTVQTGGTLYRITHTNDIVPRLPPREFGYSHSSPEYWIKSGTLVPVRRRDIVKIEGIDATGGNNQPNIPSISAHLWYFGLIGTC

SEQ ID NO: 14365 - protein, 268 aa, Thermomyces lanuginosus
EVSQDLFNQFNLFAQYSAAAYCGKNNRAPAGTQITCTGNACPEVEKADATFLYSFEDSGVGDVTGFLALDNTNKLIVLSFRGSRSIENWITNLNFELKEINDICSGCRGHAGFTSSWRSVADTLRQKVEDAVREHPDYRVVFTGHSLGGALATVAGADLRGNKYDIDVFSYGAPRVGNRAFAEFLTVQTGGTLYRITHTNDIVPRLPPREFGYSHSSPEYWIKSGTLVPVRRRDIVKIEGIDATGGNNQPNIPSITAHLWYFGLIGTC

SEQ ID NO: 14366 - protein, 268 aa, Thermomyces lanuginosus
EVSQDLFNQFNLFAQYSAAAYCGKNNNAPAGTNITCTGNICPEVEKADATILYSFRDSGVGDVTGFLALDNTNKLIVLSFRGSRSIENWIGNLNFDLKEINDICSGCRGHDGFTSSWFSVADTLRQKVEDAVREHPDYRVVFTGHSLGGALATVAGADLRGNGYDIDVFSYGAPRVGNRAFAEFLTVQTGGTLYRITHTNDIVPRLPPREFGYSHSSPEYWIKSGTLVPVRRRDIVKIEGIDATGGNNQPNIPDITAHLWYFGLIGTC

SEQ ID NO: 14367 - protein, 268 aa, Thermomyces lanuginosus
EVSQDLFNQFNLFAQYSAAAYCGKNNDAPAGTQITCTANACPEVEKADATFLYSFEDSGVGDVTGFLALDNTNKLIVLSFRGSRSIENWITNLNFELKEINDICSGCRGHAGFTSSWRSVADTLRQKVEDAVREHPDYRVVFTGHSLGGALATVAGADLRGNKYDIDVFSYGAPRVGNRAFAEFLTVQTGGTLYRITHTNDIVPRLPPREFGYSHSSPEYWIKSGTLVPVRRRDIVKIEGIDATGGNNQPNIPSITAHLWYFGLIGTC

SEQ ID NO: 14368 - protein, 268 aa, Thermomyces lanuginosus
EVSQDLFNQFNLFAQYSAAAYCGKNNNAPAGTNITCTGNACPEVEKADATILYSFRDSGVGDVTGFLALDNTNKLIVLSFRGSRSIENWIGNLNFDLIEINDICSGCRGHDGFTSSWFSVADTLRQKVEDAVREHPDYRVVFTGHSLGGALATVAGADLRGNGYDIDVFSYGAPRVGNRAFAEFLTVQTGGTLYRITHTNDIVPRLPPREFGYSHSSPEFWIKSGTLVPVRRRDIVKIEGIDATGGNNQPNIPDIPAHLWYFGLIGTC

SEQ ID NO: 14369 - protein, 268 aa, Thermomyces lanuginosus
EVSQDLFNQFKLFAQYSAAAYCKKNNDAPAGTNITCTGNACPEVEKADATFLYSFEDSGVGDVTGFLALDNTNKRIVLSFRGSRSIENWIGNLNFDLKEINDICSGCRGHAGFTSSWRSVADTLRQKVEAAVREHPDYRVVFTGHSLGGALATIAGADLRGNGYDIDVFSYGAPRVGNRAFAEFLTNQQGGTLYRITHTNDIVPRLPPREFGYSHSSPEYWIKSGTLVPVTRNDIVKIEGIDATGGNNQPNIPDIPAHLWYFGRIGTC

SEQ ID NO: 14370 - protein, 268 aa, Thermomyces lanuginosus
EVSQDLFNQFNLFAQYSAAAYCGKNNDAPAGTKITCTGNACPEVEKADATLLYTFKDSGVGDVTGFLALDNTNKLIVLSFRGSRSIENWIGNLNFDLIEINDICSGCRGHDGFTSSWRSVADTLRQKVEDAVREHPDYRVVFTGHSLGGALATVAGADLRGNGYDIDVFSYGAPRVGNRAFAEFLTVQTGGTLYRITHTNDIVPRLPPREFGYSHSSPEYWIKIGTLVPVRRRDIVKIEGIDATGGNNQPNIPDIPAHLWYFGLIGTC

SEQ ID NO: 14371 - protein, 268 aa, Thermomyces lanuginosus
EVSQDLFNQFNLFAQYSKAAYCQANNDAPAGTNITCTGNACPEVEKADATFLYSFEDSGVGDVTGFLALDNTNKRIILSFRGSRSIENWIGNLRFDLKEINDICSGCRGHDGFTSSWRSVADTLRQKVEAAVREHPDYRVVFTGHSLGGALATVAWADLRGNGYDIDVFSYGAPRVGNRAFAEFLTVQTGGTLYRITHTNDIVPRLPPREFGYSHSSPEYWIKSGTLVPVTRNDIVKIEGIDATGGNNQPNIPDIPAHLWYFGLIGTC

SEQ ID NO: 14372 - protein, 268 aa, Thermomyces lanuginosus
EVSQDLFNQFNLFAQYSAAAYCGKNNDAPAGTKITCTGNACPEVEKADATVLYSFKDSGVGDVTGFLARDNTNKLIVLSFRGSRSIENWIGNLNFDLEEINDICSGCRGHDGFTSSWRSVADTLRQKVEDAVREHPDYRVVFTGHSLGGALATVAGADLRGNGYDIDVFSYGAPRVGNRAFAEFLTVQTGGTLYRITHTNDIVPRLPPREFGYSHSSPEYWIKPGTLVPVRRRDIVKIEGIDATGGNNQPNIPDIPAHLWYFGLIGTC

SEQ ID NO: 14373 - protein, 268 aa, Thermomyces lanuginosus
EVSQDLFNQFNLFAQYSAAAYCGKNNRAPAGTNITCTANACPEVEKADATFLYSFEDSGVGDVTGFLALDNTNKLIVLSFRGSRSIENWIGNLNFELKEINDICSGCRGHAGFTSSWRSVADTLRQKVEDAVREHPDYRVVFTGHSLGGALATVAGADLRGNKYDIDVFSYGAPRVGNRAFAEFLTVQTGGTLYRITHTNDIVPRLPPREFGYSHSSPEYWIKSGTLVPVRRRDIVKIEGIDATGGNNQPNIPSIAAHLWYFGLIGTC

SEQ ID NO: 14374 - protein, 268 aa, Thermomyces lanuginosus
EVSQDLFNQFNLFAQYSAAAYCGKNNNAPAGTNITCTGNACPEVEKADATILYSFRDSGVGDVTGFLALDNTNKLIVLSFRGSRSIENWIGNLNFDLIEINDICSGCRGHDGFTSSWFSVADTLRQKVEDAVREHPDYRVVFTGHSLGGALATVAGADLRGNGYDIDVFSYGAPRVGNRAFAEFLTVQTGGTLYRITHTNDIVPRLPPREFGYSHSSPEYWIKSGTLVPVRRRDIVKIEGIDAEGGNNQPNIPDIPAHLWYFGLIGTC

SEQ ID NO: 14375 - protein, 268 aa, Thermomyces lanuginosus
EVSQDLFNQFNLFAQYSAAAYCGKNNDAPAGTKITCTGNACPEVEKADATLLYSFKDSGVGDVTGFLARDNTNKLIVLSFRGSRSIENWIGNLNFDLEEINDICSGCRGHDGFTSSWRSVADTLRQKVEDAVREHPDYRVVFAGHSLGGALATVAGADLRGNGYDIDVFSYGAPRVGNRAFAEFLTVQTGGTLYRITHTNDIVPRLPPREFGYSHSSPEYWIKSGTLVPVRRRDIVKIEGIDATGGNNQPNIPDIPAHLWYFGLIGTC

SEQ ID NO: 14376 - protein, 268 aa, Thermomyces lanuginosus
EVSQDLFNQFNLFAQYSAAAYCSKNNDAPAGTNITCTGNACPEVEKADATILYSFRDSGVGDVTGFLALDNTNKLIVLSFRGSRSIENWIGNLNFDLKEINDICSGCRGHDGFTSSWFSVADTLRQKVEDAVREHPDYRVVFTGHSLGGALATVAGADLRGNGYDIDVFSYGAPRVGNRAFAEFLTVQTGGTLYRITHTNDIVPRLPPREFGYSHSSPEYWIKSGTLVPVRRRDIVKIEGIDAEGGNNQPNIPDITAHLWYFGLIGTC

SEQ ID NO: 14377 - protein, 268 aa, Thermomyces lanuginosus
EVSQDLFNQFNLFAQYSAAAYCGKNNDAPAGTKITCTGNACPEVEKADATILYTFKDSGVGDVTGFLALDNTNKLIVLSFRGSRSIENWIGNLNFDLIEINDICSGCRGHDGFTSSWRSVADTLRQKVEDAVREHPDYRVVFTGHSLGGALATVAGADLRGNGYDIDVFSYGAPRVGNRAFAEFLTVQTGGTLYRITHTNDIVPRLPPREFGYSHSSPEYWIKSGTLVPVRRRDIVKIEGIDATGGNNQPNIPDIPVHLWYFGLIGTC

SEQ ID NO: 14378 - protein, 268 aa, Thermomyces lanuginosus
EVSQDLFNQFNLFAQYSAAAYCGKNNDAPAGTKITCTGNACPEVEKADATVLYSFKDSGVGDVTGFLARDNTNKLIVLSFRGSRSIENWIGNLNFDLEEINDICSGCRGHDGFTSSWRSVADTLRQKVEDAVREHPDYRVVFTGHSLGGALATVAGADLRGNGYDIDVFSYGAPRVGNRAFAEFLTVQTGGTLYRITHTNDIVPRLPPREFGYSHSSPEYWIKSGTLVPVRRRDIVKIEGIDATGGNNQPNIPDIPVHLWYFGLIGTC

SEQ ID NO: 14379 - protein, 268 aa, Thermomyces lanuginosus
EVSQDLFNQFNLFAQYSAAAYCGKNNDAPAGTKITCTGNACPEVEKADATVLYSFKDSGVGDVTGFLARDNTNKLIVLSFRGSRSIENWIGNLNFDLEEINDICSGCRGHDGFTSSWRSVADTLRQKVEDAVREHPDYRVVFTGHSLGGALATVAGADLRGNGYDIDVFSYGAPRVGNRAFAEFLTVQTGGTLYRITHTNDIVPRLPPREFGYSHSSPEYWIKSGTLVPVRRRDIVKIEGIDATGGNNQPNIPDIPIHLWYFGLIGTC

SEQ ID NO: 14380 - protein, 268 aa, Thermomyces lanuginosus
EVSQDLFNQFNLFAQYSAAAYCGKNNVAPAGTQITCTGNACPEVEKADATFLYSFEDSGVGDVTGFLALDNTNKLIVLSFRGSRSIENWIANLRFDLKEINDICSGCRGHAGFTSSWRSVADTLRQKVEDAVREHPDYRVVFTGHSLGGALATVAGADLRGNKYDIDVFSYGAPRVGNRAFAEFLTVQTGGTLYRITHTNDIVPRLPPREFGYSHSSPEYWIKSGTFVPVRRRDIVKIEGIDATGGNNRPNIPDIPAHLWYFGLIGTC

SEQ ID NO: 14381 - protein, 268 aa, Thermomyces lanuginosus
EVSQDLFNQFNLFAQYSAAAYCGKNNDAPAGTNITCTGNACPEVEKADATILYSFEDSGVGDVTGFLALDNTNKLIVLSFRGSRSIENWIGNLNFDLKEINDICSGCRGHDGFTSSWRSVADTLRQKVEDAVREHPDYRVVFTGHSLGGALATVAGADLRGNGYDIDVFSYGAPRVGNRAFAEFLTVQTGGTLYRITNTNDIVPRLPPRQFGYSHSSPEYWIKSGTLPPVRRRDIVKCEGIDATCGNNQPNIPDIPAHLWYFGLIGTC

SEQ ID NO: 14382 - protein, 268 aa, Thermomyces lanuginosus
EVSQDLFNQFNLFAQYSKAAYCQANNDAPAGTNITCTGNACPEVEKADATFLYSFEDSGVGDVTGFLALDNTNKRIVLSFRGSRSIENWIGNLNFDLKEINDICSGCRGHDGFTSSWRSVADTLRQKVEAAVREHPDYRVVFTGHSLGGALATIAWADLRGNGYDIDVFSYGAPRVGNRAFAEFLTNQTGGTLYRITHTNDIVPRLPPREFGYSHSSPEYWIKSGTLVPVTRNDIVKIEGIDATGGNNQPNIPDIPAHLWYFGLIGTC

SEQ ID NO: 14383 - protein, 268 aa, Thermomyces lanuginosus
EVSQDLFNQFNLFAQYSAAAYCKKNNSAPAGTNITCTGNACPEVEKADATFLYSFEDSGVGDVTGFLALDNTNKRIVLSFRGSRSIENWIGNLRFDLKEINDICSGCRGHDGFTSSWRSVADTLRQKVEDAVREHPDYRVVFTGHSLGGALATIAWADLRGNGYDIDVFSYGAPRVGNRAFAEFLTNQQGGTLYRITHTNDIVPRLPPREFGYSHSSPEYWIKSGTLVPVTRNDIVKIEGIDATGGNNQPNIPDIPAHLWYFGLIGTC

SEQ ID NO: 14384 - protein, 268 aa, Thermomyces lanuginosus
EVSQDLFNQFNLFAQYSAAAYCSKNNNAPAGTNITCTGNICPEVEKADATFLYSFRDSGVGDVTGFLALDNTNKLIVLSFRGSRSIENWIGNLNFDLKEINDICSGCRGHDGFTSSWFSVADTLRQKVEDAVREHPDYRVVFTGHSLGGALATVAGADLRGNGYDIDVFSYGAPRVGNRAFAEFLTVQTGGTLYRITHTNDIVPRLPPREFGYSHSSPEYWIKSGTLVPVRRRDIVKIEGIDATGGNNQPNIPDITAHLWYFGLIGTC

SEQ ID NO: 14385 - protein, 268 aa, Thermomyces lanuginosus
EVSQDLFNQFNLFAQYSAAAYCQANNDAPAGTNITCTGNACPEVEKADATFLYSFEDSGVGDVTGFLALDNTNKQIILSFRGSRSIENWIGNLRFDLKEINDICSGCRGHDGFTSSWRSVADTLRQKVEAAVREHPDYRVVFTGHSLGGALATIAGADLRGNGYDIDVFSYGAPRVGNRAFAEFLTNQTGGTLYRITHTNDIVPRLPPREFGYSHSSPEYWIKSGTLVPVTRNDIVKIEGIDATGGNNQPNIPDIPAHLWYFGLIGTC

SEQ ID NO: 14386 - protein, 268 aa, Thermomyces lanuginosus
EVSQDLFNQFNLFAQYSAAAYCGKNNDAPAGTKITCTGNACPEVEKADATLLYSFKDSGVGDVTGFLARDNTNKLIVLSFRGSRSIENWIGNLNFDLEEINDICSGCRGHDGFTSSWRSVADTLRQKVEDAVREHPDYRVVFTGHSLGGALATVAGADLRGNGYDIDVFSYGAPRVGNRAFAEFLTVQTGGTLYRITHTNDIVPRLPPREFGYSHSSPEYWIKIGTLVPVRRRDIVKIEGIDATGGNNQPNIPDIPAHLWYFGLIGTC

SEQ ID NO: 14387 - protein, 268 aa, Thermomyces lanuginosus
EVSQDLFNQFNLFAQYSAAAYCGKNNDAPAGTQITCTGNACPEVEKADATFLYSFEDSGVGDVTGFLALDNTNKLIVLSFRGSRSIENWIANLKFDLKEINDICSGCRGHAGFTSSWRSVADTLRQKVEDAVREHPDYRVVFTGHSLGGALATVAGADLRGNKYDIDVFSYGAPRVGNRAFAEFLTVQTGGTLYRITHTNDIVPRLPPREFGYSHSSPEYWIKSGTFVPVRRRDIVKIEGIDATGGNNRPNIPSIPAHLWYFGLIGTC

SEQ ID NO: 14388 - protein, 268 aa, Thermomyces lanuginosus
EVSQDLFNQFNLFAQYSKAAYCQKNNDAPAGTNITCTGNACPEVEKADATFLYSFEDSGVGDVTGFLALDNTNKQIILSFRGSRSIENWIGNLNFDLKEINDICSGCRGHDGFTSSWRSVADTLRQKVEAAVREHPDYRVVFTGHSLGGALATIAWADLRGNGYDIDVFSYGAPRVGNRAFAEFLTNQTGGTLYRITHTNDIVPRLPPREFGYSHSSPEYWIKSGTLVPVTRNDIVKIEGIDATGGNNQPNIPDIPAHLWYFGLIGTC

SEQ ID NO: 14389 - protein, 268 aa, Thermomyces lanuginosus
EVSQDLFNQFNLFAQYSAAAYCGKNNDAPAGTKITCTGNACPEVEKADATLLYSFKDSGVGDVTGFLARDNTNKLIVLSFRGSRSIENWIGNLNFDLEEINDICSGCRGHDGFTSSWRSVADTLRQKVEDAVREHPDYRVVFTGHSLGGALATVAGADLRGNGYDIDVFSYGAPRVGNRAFAEFLTVQTGGTLYRITSTNDIVPRLPPREFGYSHSSPEYWIKSGTLVPVRRRDIVKIEGIDATGGNNQPNIPDIPAHLWYFGLIGTC

SEQ ID NO: 14390 - protein, 268 aa, Thermomyces lanuginosus
EVSQDLFNQFNLFAQYSAAAYCGKNNDAPAGTKITCTGNACPEVEKADATLLYTFKDSGVGDVTGFLALDNTNKLIVLSFRGSRSIENWIGNLNFDLIEINDICSGCRGHDGFTSSWRSVADTLRQKVEDAVREHPDYRVVFTGHSLGGALATVAGADLRGNGYDIDVFSYGAPRVGNRAFAEFLTVQTGGTLYRITHTNDIVPRLPPREFGYSHSSPEYWIKPGTLVPVRRRDIVKIEGIDATGGNNQPNIPDIPAHLWYFGLIGTC

SEQ ID NO: 14391 - protein, 268 aa, Thermomyces lanuginosus
EVSQDLFNQFNLFAQYSAAAYCGKNNDAPAGTQITCTGNACPEVEKADATFLYSFEDSGVGDVTGFLALDNTNKLIVLSFRGSRSIENWITNLSFDLKEINDICSGCRGHAGFTLSWRSVADTLRQKVEDAVREHPDYRVVFTGHSLGGALATVAGADLRGNTYDIDVFSYGAPRIGNRAFAEFLTVQTGGTLYRITHTNDIVPRLPPREFGYSHSSPEYWIKSGTLVPVRRRDIVKIEGIDATGGNNQPNIPDIPAHLWYFGLIGTC

SEQ ID NO: 14392 - protein, 268 aa, Thermomyces lanuginosus
EVSQDLFNQFNLFAQYSAAAYCGKNNDAPAGTKITCTGNACPEVEKADATVLYSFKDSGVGDVTGFLARDNTNKLIVLSFRGSRSIENWIGNLNFDLEEINDICSGCRGHDGFTSSWRSVADTLRQKVEDAVREHPDYRVVFTGHSLGGALATVAGADLRGNGYDIDVFSYGAPRVGNRAFAEFLTVQTGGTLYRITHTNDIVPRLPPREFGYSHSSPEYWIKSGTDVPVRRRDIVKIEGIDATGGNNQPNIPDIPAHLWYFGLIGTC

SEQ ID NO: 14393 - protein, 268 aa, Thermomyces lanuginosus
EVSQDLFNQFNLFAQYSAAAYCSKNNDAPAGTNITCTGNACPEVEKADATILYSFRDSGVGDVTGFLALDNTNKLIVLSFRGSRSIENWIGNLNFDLIEINDICSGCRGHDGFTSSWFSVADTLRQKVEDAVREHPDYRVVFTGHSLGGALATVAGADLRGNGYDIDVFSYGAPRVGNRAFAEFLTVQTGGTLYRITHTNDIVPRLPPREFGYSHSSPEFWIKSGTLVPVRRRDIVKIEGIDATGGNNQPNIPDIPAHLWYFGLIGTC

SEQ ID NO: 14394 - protein, 268 aa, Thermomyces lanuginosus
EVSQDLFNQFNLFAQYSAAAYCGKNNDAPAGTKITCTGNACPEVEKADATVLYSFKDSGVGDVTGFLARDNTNKLIVLSFRGSRSIENWIGNLNFDLEEINDICSGCRGHDGFTSSWRSVADTLRQKVEDAVREHPDYRVVFTGHSLGGALATVAGADLRGNGYDIDVFSYGAPRVGNRAFAEFLTVQTGGTLYRITYTNDIVPRLPPREFGYSHSSPEYWIKSGTLVPVRRRDIVKIEGIDATGGNNQPNIPDIPAHLWYFGLIGTC

SEQ ID NO: 14395 - protein, 268 aa, Thermomyces lanuginosus
EVSQDLFNQFNLFAQYSAAAYCGKNNDAPAGTKITCTGNACPEVEKADATLLYTFKDSGVGDVTGFLALDNTNKLIVLSFRGSRSIENWIGNLNFDLIEINDICSGCRGHDGFTSSWRSVADTLRQKVEDAVREHPDYRVVFTGHSLGGGLATVAGADLRGNGYDIDVFSYGAPRVGNRAFAEFLTVQTGGTLYRITHTNDIVPRLPPREFGYSHSSPEYWIKSGTLVPVRRRDIVKIEGIDATGGNNQPNIPDIPAHLWYFGLIGTC

SEQ ID NO: 14396 - protein, 268 aa, Thermomyces lanuginosus
EVSQDLFNQFNLFAQYSAAAYCGKNNDAPAGTKITCTGNACPEVEKADATVLYSFKDSGVGDVTGFLARDNTNKLIVLSFRGSRSIENWIGNLNFDLEEINDICSGCRGHDGFTSSWRSVADTLRQKVEDAVREHPDYRVVFTGHSLGGALATVAGADLRGNGYDIDVFSYGAPRVGNRAFAEFLTVQTGGTLYRITHTNDIVPRLPPREFGYSHSSPEYWIKSGTLVPRRRRDIVKIEGIDATGGNNQPNIPDIPAHLWYFGLIGTC

SEQ ID NO: 14397 - protein, 268 aa, Thermomyces lanuginosus
EVSQDLFNQFNLFAQYSAAAYCGKNNDAPAGTKITCTGNACPEVEKADATLLYTFKDSGVGDVTGFLALDNTNKLIVLSFRGSRSIENWIGNLNFDLIEINDICSGCRGHDGFTSSWRSVADTLRQKVEDAVREHPDYRVVFTGHSLGGALATVAGADLRGNGYDIDVFSYGAPRVGNRAFAEFLTVQTGGTLYRITITNDIVPRLPPREFGYSHSSPEYWIKSGTLVPVRRRDIVKIEGIDATGGNNQPNIPDIPAHLWYFGLIGTC

SEQ ID NO: 14398 - protein, 268 aa, Thermomyces lanuginosus
EVSRDLFNQFNLFAQYSAAAYCGKNNDAPAGTNITCTGNACPEVEKADATILYSFEDSGVGDVTGFLALDNTNKLIVLSFRGSRSIENWIGNLNFDLKEINDICSGCRGHDGFTSSWRSVADTLRQKVEDAVREHPDYRVVFAGHSLGGALATVAGADLRGDGYDIDVFSYGAPRVGNRAFAEFLTVQTGGTLYRITNTNDIVPRLPPREFGYSHSSPEYWIKSGTLRPVRRRDIVKIEGIDATGGNNQPNIPDIPAHLWYFGLIGTC

SEQ ID NO: 14399 - protein, 268 aa, Thermomyces lanuginosus
EVSQDLFNQFNLFAQYSAAAYCGKNNDAPAGTKITCTGNACPEVEKADATLLYSFKDSGVGDVTGFLARDNTNKLIVLSFRGSRSIENWIGNLNFDLEEINDICSGCRGHDGFTSSWRSVADTLRQKVEDAVREHPDYRVVFTGHSLGGALATVAGADLRGNGYDIDVFSYGAPRVGNRAFAEFLTVQTGGTLYRITHTNDIVPRLPPREFGYSHSSPEYWIKSGTLVPVRRRDIVKIEGIDATGGNNQPNIPDGPAHLWYFGLIGTC

SEQ ID NO: 14400 - protein, 268 aa, Thermomyces lanuginosus
EVSQDLFNQFNLFAQYSAAAYCGKNNDAPAGTKITCTGNACPEVEKADATILYTFKDSGVGDVTGFLALDNTNKLIVLSFRGSRSIENWIGNLNFDLIEINDICSGCRGHDGFTSSWRSVADTLRQKVEDAVREHPDYRVVFTGHSLGGALATVAGADLRGNGYDIDVFSYGAPRVGNRAFAEFLTVQTGGTLYRITHTNDIVPRLPPREFGYSHSSPEYWIKSGTLVPVRRRDIVKIEGIDATGGNNQPNIPDIPIHLWYFGLIGTC

SEQ ID NO: 14401 - protein, 268 aa, Thermomyces lanuginosus
EVSQDLFNQFNLFAQYSAAAYCSKNNDAPAGTNITCTGNACPEVEKADATILYSFRDSGVGDVTGFLALDNTNKLIVLSFRGSRSIENWIGNLNFDLKEINDICSGCRGHDGFTSSWFSVADTLRQKVEDAVREHPDYRVVFTGHSLGGALATVAGADLRGNGYDIDVFSYGAPRVGNRAFAEFLTVQTGGTLYRITHTNDIVPRLPPREFGYSHSSPEFWIKSGTLVPVRRRDIVKIEGIDATGGNNQPNIPDITAHLWYFGLIGTC

SEQ ID NO: 14402 - protein, 268 aa, Thermomyces lanuginosus
EVSQDLFNQFNLFAQYSAAAYCGKNNDAPAGTNITCTGNACPEVEIADATFLYSFEDNGSGDVTGFLALDNTNKLIVLSFRGSRSIENWIGNLNFDLKEINDICSGCRGHDGFTSSWRSVADTLRQKVEDAVREHPDYRVVFTGHSLGGALATVAGADLRGNGYDIDVFSYGAPRVGNRAFAEFLTVQTGGTLYRITHTNDIVPRLPPREFGYSHSSPEYWIISGTLVPVRRRDIVKIEGIDATGGNNLPNIPLIPAHLWYFGLIGTC

SEQ ID NO: 14403 - protein, 268 aa, Thermomyces lanuginosus
EVSQDLFNQFNLFAQYSAAAYCGKNNDAPAGTKITCTGNACPEVEKADATILYSFKDSGVGDVTGFLARDNTNKLIVLSFRGSRSIENWIGNLNFDLEEINDICSGCRGHDGFTSSWRSVADTLRQKVEDAVREHPDYRVVFTGHSLGGALATVAGADLRGNGYDIDVFSYGAPRVGNRAFAEFLTVQTGGTLYRITHTNDIVPRLPPREFGYSHSSPEYWIKSGTLVPVRRRDIVKIEGIDATGGNNQPNIPDGPAHLWYFGLIGTC

SEQ ID NO: 14404 - protein, 268 aa, Thermomyces lanuginosus
EVSQDLFNQFNLFAQYSAAAYCGKNNDAPAGTKITCTGNACPEVEKADATILYSFKDSGVGDVTGFLARDNTNKLIVLSFRGSRSIENWIGNLNFDLEEINDICSGCRGHDGFTSSWRSVADTLRQKVEDAVREHPDYRVVFTGHSLGGALATVAGADLRGNGYDIDVFSYGAPRVGNRAFAEFLTVQTGGTLYRITLTNDIVPRLPPREFGYSHSSPEYWIKSGTLVPVRRRDIVKIEGIDATGGNNQPNIPDIPAHLWYFGLIGTC

SEQ ID NO: 14405 - protein, 268 aa, Thermomyces lanuginosus
EVSQDLFNQFNLFAQYSAAAYCGKNNDAPAGTKITCTGNACPEVEKADATVLYTFKDSGVGDVTGFLALDNTNKLIVLSFRGSRSIENWIGNLNFDLIEINDICSGCRGHDGFTSSWRSVADTLRQKVEDAVREHPDYRVVFTGHSLGGALATVAGADLRGNGYDIDVFSYGAPRVGNRAFAEFLTVQTGGTLYRITHTNDIVPRLPPREFGYSHSSPEYWIKSGTLVPVRRRDIVKIEGIDATGGNNQPNIPDGPAHLWYFGLIGTC

SEQ ID NO: 14406 - protein, 268 aa, Thermomyces lanuginosus
EVSQDLFNQFNLFAQYSAAAYCGKNNDAPAGTNITCTGNICPEVEKADATFLYSFRNSGVGDVTGFLALDNTNKLIVLSFRGSRSIENWIGNLNFDLKEINDICSGCRGHDGFTSSWFSVADTLRQKVEDAVREHPDYRVVFTGHSLGGALATVAGADLRGNSYDIDVFSYGAPRVGNRAFAEFLTVQTGGTLYRITHTNDIVPRLPPREFGYSHSSPEYWIKSGTLVPVRRRDIVKIEGIDATGGNNQPNIPDITAHLWYFGLIGTC

SEQ ID NO: 14407 - protein, 268 aa, Thermomyces lanuginosus
EVSQDLFNQFNLFAQYSAAAYCGKNNDAPAGTKITCTGNACPEVEKADATILYSFKDSGVGDVTGFLARDNTNKLIVLSFRGSRSIENWIGNLNFDLEEINDICSGCRGHDGFTSSWRSVADTLRQKVEDAVREHPDYRVVFTGHSLGGALATVAGADLRGNGYDIDVFSYGAPRVGNRAFAEFLTVQTGGTLYRITHTNDIVPRLPPREFGYSHSSPEYWIKSGTDVPVRRRDIVKIEGIDATGGNNQPNIPDIPAHLWYFGLIGTC

SEQ ID NO: 14408 - protein, 268 aa, Thermomyces lanuginosus
EVSQDLFNQFNLFAQYSAAAYCSKNNDAPAGTNITCTGNACPEVEKADATILYSFRDSGVGDVTGFLALDNTNKLIVLSFRGSRSIENWIGNLNFDLIEINDICSGCRGHDGFTSSWFSVADTLRQKVEDAVREHPDYRVVFTGHSLGGALATVAGADLRGNGYDIDVFSYGAPRVGNRAFAEFLTVQTGGTLYRITHTNDIVPRLPPREFGYSHSSPEYWIKSGTLVPVRRRDIVKIEGIDAEGGNNQPNIPDIPAHLWYFGLIGTC

SEQ ID NO: 14409 - protein, 268 aa, Thermomyces lanuginosus
EVSQDLFNQFNLFAQYSAAAYCGKNNDAPAGTKITCTGNACPEVEKADATILYTFKDSGVGDVTGFLALDNTNKLIVLSFRGSRSIENWIGNLNFDLIEINDICSGCRGHDGFTSSWRSVADTLRQKVEDAVREHPDYRVVFTGHSLGGALATVAGADLRGNGYDIDVFSYGAPRVGNRAFAEFLTVQTGGTLYRITHTNDIVPRLPPREFGYSHSSPEYWIKFGTLVPVRRRDIVKIEGIDATGGNNQPNIPDIPAHLWYFGLIGTC

SEQ ID NO: 14410 - protein, 268 aa, Thermomyces lanuginosus
EVSQDLFNQFNLFAQYSAAAYCGKNNDAPAGTKITCTGNACPEVEKADATLLYTFKDSGVGDVTGFLALDNTNKLIVLSFRGSRSIENWIGNLNFDLIEINDICSGCRGHDGFTSSWRSVADTLRQKVEDAVREHPDYRVVFTGHSLGGALATVAGADLRGNGYDIDVFSYGAPRVGNRAFAEFLTVQTGGTLYRITHTNDIVPRLPPREFGYSHSSPEYWIKSGTDVPVRRRDIVKIEGIDATGGNNQPNIPDIPAHLWYFGLIGTC

SEQ ID NO: 14411 - protein, 268 aa, Thermomyces lanuginosus
EVSQDLFNQFNLFAQYSAAAYCGKNNRAPAGTQITCTGNACPEVEKADATFLYSFEDSGVGDVTGFLALDNTNKLIVLSFRGSRSIENWITNLNFELKEINDICSGCRGHAGFTSSWRSVADTLRQKVEDAVREHPDYRVVFTGHSLGGALATVAGADLRGNAYDIDVFSYGAPRVGNRAFAEFLTVQTGGTLYRITHTNDIVPRLPPREFGYSHSSPEYWIKSGTLVPVRRRDIVKIEGIDATGGNNQPNIPSITAHLWYFGLIGTC

SEQ ID NO: 14412 - protein, 268 aa, Thermomyces lanuginosus
EVSQDLFNQFNLFAQYSAAAYCKKNNSAPAGTNITCTGNACPEVEKADATTLYSFKDMGVGDVTGFLALDNTNKGIVLSFRGSRSIENWIQNLNFDLKEINDICSGCRGHDGFTSSWRSVADTLRQKVEAAVREHPDYRVVFTGHSLGGALATVAGADLRGNGYDIDVFSYGAPRVGNRAFAEFLTVQTGGTLYRITHTNDIVPRLPPREFGYSHSSPEYWIKSGTLVPVTRNDIVKIEGIDATGGNNQPNQPDIPAHLWYFGRIGTC

SEQ ID NO: 14413 - protein, 268 aa, Thermomyces lanuginosus
EVSQDLFNQFNLFAQYSAAAYCGKNNDAPAGTKITCTGNACPEVEKADATVLYTFKDSGVGDVTGFLALDNTNKLIVLSFRGSRSIENWIGNLNFDLIEINDICSGCRGHDGFTSSWRSVADTLRQKVEDAVREHPDYRVVFTGHSLGGALATVAGADLRGNGYDIDVFSYGAPRVGNRAFAEFLTVQTGGTLYRITHTNDIVPRLPPREFGYSHSSPEYWIKSGTLVPRRRRDIVKIEGIDATGGNNQPNIPDIPAHLWYFGLIGTC

SEQ ID NO: 14414 - protein, 268 aa, Thermomyces lanuginosus
EVSQDLFNQFNLFAQYSAAAYCGKNNDAPAGTKITCTGNACPEVEKADATILYSFKDSGVGDVTGFLARDNTNKLIVLSFRGSRSIENWIGNLNFDLEEINDICSGCRGHDGFTSSWRSVADTLRQKVEDAVREHPDYRVVFTGHSLGGALATVAGADLRGNGYDIDVFSYGAPRVGNRAFAEFLTVQTGGTLYRITITNDIVPRLPPREFGYSHSSPEYWIKSGTLVPVRRRDIVKIEGIDATGGNNQPNIPDIPAHLWYFGLIGTC

SEQ ID NO: 14415 - protein, 268 aa, Thermomyces lanuginosus
EVSQDLFNQFNLFAQYSAAAYCGKNNDAPAGTKITCTGNACPEVEKADATILYTFKDSGVGDVTGFLALDNTNKLIVLSFRGSRSIENWIGNLNFDLIEINDICSGCRGHDGFTSSWRSVADTLRQKVEDAVREHPDYRVVFTGHSLGGALATVAGADLRGNGYDIDVFSYGAPRVGNRAFAEFLTVQTGGTLYRITSTNDIVPRLPPREFGYSHSSPEYWIKSGTLVPVRRRDIVKIEGIDATGGNNQPNIPDIPAHLWYFGLIGTC

SEQ ID NO: 14416 - protein, 268 aa, Thermomyces lanuginosus
EVSQDLFNQFNLFAQYSAAAYCGKNNDAPAGTKITCTGNACPEVEKADATLLYSFKDSGVGDVTGFLARDNTNKLIVLSFRGSRSIENWIGNLNFDLEEINDICSGCRGHDGFTSSWRSVADTLRQKVEDAVREHPDYRVVFTGHSLGGALATVAGADLRGNGYDIDVFSYGAPRVGNRAFAEFLTVQTGGTLYRITHTNDIVPRLPPREFGYSHSSPEYWIKSGTLVPVRRRDIVKIEGIDATGGNNQPNIPDIPIHLWYFGLIGTC

SEQ ID NO: 14417 - protein, 268 aa, Thermomyces lanuginosus
EVSQDLFNQFNLFAQYSAAAYCGKNNDAPAGTKITCTGNACPEVEKADATVLYSFKDSGVGDVTGFLARDNTNKLIVLSFRGSRSIENWIGNLNFDLEEINDICSGCRGHDGFTSSWRSVADTLRQKVEDAVREHPDYRVVFTGHSLGGALATVAGADLRGNGYDIDVFSYGAPRVGNRAFAEFLTVQTGGTLYRITITNDIVPRLPPREFGYSHSSPEYWIKSGTLVPVRRRDIVKIEGIDATGGNNQPNIPDIPAHLWYFGLIGTC

SEQ ID NO: 14418 - protein, 268 aa, Thermomyces lanuginosus
EVSQDLFNQFNLFAQYSAAAYCGKNNDAPAGTKITCTGNACPEVEKADATLLYTFKDSGVGDVTGFLALDNTNKLIVLSFRGSRSIENWIGNLNFDLIEINDICSGCRGHDGFTSSWRSVADTLRQKVEDAVREHPDYRVVFTGHSLGGALATVAGADLRGNGYDIDVFSYGAPRVGNRAFAEFLTVQTGGTLYRITYTNDIVPRLPPREFGYSHSSPEYWIKSGTLVPVRRRDIVKIEGIDATGGNNQPNIPDIPAHLWYFGLIGTC

SEQ ID NO: 14419 - protein, 268 aa, Thermomyces lanuginosus
EVSRDLFNQFNLFAQYSAAAYCGKNNDAPAGTNITCTGNACPEVEKADATFLYSFEDSGVGDVTGFLALDNTNKLIVLSFRGSRSIENWIGNLNFDLKEINDICSGCRGHDGFTSSWRSVADTLRQKVEDAVREHPDYRVVFAGHSLGGALATVAGADLRGDGYDIDVFSYGAPRVGNRAFAEFLTVQTGGTLYRITHTNDIVPRLPPREFGYSHSSPEYWIKSGTLPPVRRRDIVKCEGIDATCGNNQPNIPDIPAHLWYFGLIGTC

SEQ ID NO: 14420 - protein, 268 aa, Thermomyces lanuginosus
EVSQDLFNQFNLFAQYSAAAYCSKNNDAPAGTNITCTGNACPEVEKADATFLYSFRDSGKGDVTGFLALDNTNKLIVLSFRGSRSIENWIGNLNFDLKEINDICSGCRGHDGFTSSWFSVADTLRQKVEDAVREHPDYRVVFTGHSLGGALATVAGADLRGNGYDIDVFSYGAPRVGNRAFAEFLTVQTGGTLYRITHTNDIVPRLPPREFGYSHSSPEYWIKSGTLVPVRRRDIVKIEGIDAEGGNNQPNIPDITAHLWYFGLIGTC

SEQ ID NO: 14421 - protein, 268 aa, Thermomyces lanuginosus
EVSQDLFNQFNLFAQYSAAAYCGKNNDAPAGTNITCTGNICPEVEKADATILYSFRDSGVGDVTGFLALDNTNKLIVLSFRGSRSIENWIGNLNFDLKEINDICSGCRGHDGFTSSWFSVADTLRQKVEDAVREHPDYRVVFTGHSLGGALATVAGADLRGNGYDIDVFSYGAPRVGNRAFAEFLTVQTGGTLYRITHTNDIVPRLPPREFGYSHSSPEYWIKSGTLVPVRRRDIVKIEGIDAEGGNNQPNIPDITAHLWYFGLIGTC

SEQ ID NO: 14422 - protein, 268 aa, Thermomyces lanuginosus
EVSQDLFNQFNLFAQYSAAAYCGKNNDAPAGTKITCTGNACPEVEKADATLLYTFKDSGVGDVTGFLALDNTNKLIVLSFRGSRSIENWIGNLNFDLIEINDICSGCRGHDGFTSSWRSVADTLRQKVEDAVREHPDYRVVFAGHSLGGALATVAGADLRGNGYDIDVFSYGAPRVGNRAFAEFLTVQTGGTLYRITHTNDIVPRLPPREFGYSHSSPEYWIKSGTLVPVRRRDIVKIEGIDATGGNNQPNIPDIPAHLWYFGLIGTC

SEQ ID NO: 14423 - protein, 268 aa, Synthetic construct
EVSQDLFNQFNLFAQYSAAAYCGKNNDAPAGTNITCTGNACPEVEKADATFLYSFRGFGVGCVRGFLALDNTNKLIVLSFRGSRSIGNWIANLNLPLIEINDICSGCRGHDGFTSSWRSVADTLRQKVEDAVREHPDYRVVFTGHSLGGALATVAGADLRGNGYDIDVFSYGAPRVGNRAFAEFLTVQTGGTLYRITHTNDIVPRLPPREFGYSHSSPEYWIKSGTLVPVTRNDIVMIEGIDATGGNNQPNIPDIPAHLWYFGLIGTC

SEQ ID NO: 14424 - protein, 268 aa, Thermomyces lanuginosus
EVSQDLFNQFKLFAQYSAAAYCKKNNSAPAGTNITCTGNACPEVEKADATFLYSFEDSGVGDVTGFLALDNTNKRIVLSFRGSRSIENWIGNLNFDLKEINDICSGCRGHDGFTSSWRSVADTLRQKVEDAVREHPDYRVVFTGHSLGGALATIAWADLRGNGYDIDVFSYGAPRVGNRAFAEFLTNQQGGTLYRITHTNDIVPRLPPREFGYSHSSPEYWIKSGTLVPVTRNDIVKIEGIDATGGNNQPNIPDIPAHLWYFGLIGTC

SEQ ID NO: 14425 - protein, 268 aa, Thermomyces lanuginosus
EVSQDLFNQFNLFAQYSAAAYCGKNNRAPAGTNITCTANACPEVEKADATFLYSFEDSGVGDVTGFLALDNTNKLIVLSFRGSRSIENWIGNLNFELKEINDICSGCRGHAGFTSSWRSVADTLRQKVEDAVREHPDYRVVFTGHSLGGALATVAGADLRGNKYDIDVFSYGAPRVGNRAFAEFLTVQTGGTLYRITHTNDIVPRLPPREFGYSHSSPEYWIKSGTLVPVRRRDIVKIEGIDATGGNNQPNIPSIKAHLWYFGLIGTC

SEQ ID NO: 14426 - protein, 268 aa, Thermomyces lanuginosus
EVSQDLFNQFNLFAQYSAAAYCGKNNNAPAGTNITCTGNICPEVEKADATILYSFRDSGVGDVTGFLALDNTNKLIVLSFRGSRSIENWIGNLNFDLKEINDICSGCRGHDGFTSSWFSVADTLRQKVEDAVREHPDYRVVFTGHSLGGALATVAGADLRGNGYDIDVFSYGAPRVGNRAFAEFLTVQTGGTLYRITHTNDIVPRLPPREFGYSHSSPEYWIKSGTLVPVRRRDIVKIEGIDAEGGNNQPNIPDIPAHLWYFGLIGTC

SEQ ID NO: 14427 - protein, 268 aa, Thermomyces lanuginosus
EVSQDLFNQFNLFAQYSAAAYCGKNNDAPAGTNITCTGNACPEVEKADATILYSFRDSGVGDVTGFLALDNTNKLIVLSFRGSRSIENWIGNLNFDLIEINDICSGCRGHDGFTSSWFSVADTLRQKVEDAVREHPDYRVVFTGHSLGGALATVAGADLRGNGYDIDVFSYGAPRVGNRAFAEFLTVQTGGTLYRITHTNDIVPRLPPREFGYSHSSPEFWIKSGTLVPVRRRDIVKIEGIDAEGGNNQPNIPDIPAHLWYFGLIGTC

SEQ ID NO: 14428 - protein, 268 aa, Thermomyces lanuginosus
EVSQDLFNQFNLFAQYSAAAYCGKNNDAPAGTKITCTGNACPEVEKADATILYTFKDSGVGDVTGFLALDNTNKLIVLSFRGSRSIENWIGNLNFDLIEINDICSGCRGHDGFTSSWRSVADTLRQKVEDAVREHPDYRVVFTGHSLGGALATVAGADLRGNGYDIDVFSYGAPRVGNRAFAEFLTVQTGGTLYRITHTNDIVPRLPPREFGYSHSSPEYWIKPGTLVPVRRRDIVKIEGIDATGGNNQPNIPDIPAHLWYFGLIGTC

SEQ ID NO: 14429 - protein, 268 aa, Thermomyces lanuginosus
EVSQDLFNQFNLFAQYSAAAYCGKNNDAPAGTKITCTGNACPEVEKADATVLYTFKDSGVGDVTGFLALDNTNKLIVLSFRGSRSIENWIGNLNFDLIEINDICSGCRGHDGFTSSWRSVADTLRQKVEDAVREHPDYRVVFTGHSLGGALATVAGADLRGNGYDIDVFSYGAPRVGNRAFAEFLTVQTGGTLYRITHTNDIVPRLPPREFGYSHSSPEYWIKSGTDVPVRRRDIVKIEGIDATGGNNQPNIPDIPAHLWYFGLIGTC

SEQ ID NO: 14430 - protein, 268 aa, Thermomyces lanuginosus
EVSQDLFNQFNLFAQYSAAAYCGKNNDAPAGTNITCTGNICPEVEKADATLLYSFRDSGVGDVTGFLALDNTNKLIVLSFRGSRSIENWIGNLNFDLIEINDICSGCRGHDGFTSSWFSVADTLRQKVEDAVREHPDYRVVFTGHSLGGALATVAGADLRGNSYDIDVFSYGAPRVGNRAFAEFLTVQTGGTLYRITHTNDIVPRLPPREFGYSHSSPEYWIKSGTLVPVRRRDIVKIEGIDATGGNNQPNIPDIPAHLWYFGLIGTC

SEQ ID NO: 14431 - protein, 268 aa, Thermomyces lanuginosus
EVSQDLFNQFNLFAQYSAAAYCSKNNNAPAGTNITCTGNACPEVEKADATILYSFRDSGVGDVTGFLALDNTNKLIVLSFRGSRSIENWIGNLNFDLKEINDICSGCRGHDGFTSSWFSVADTLRQKVEDAVREHPDYRVVFTGHSLGGALATVAGADLRGNGYDIDVFSYGAPRVGNRAFAEFLTVQTGGTLYRITHTNDIVPRLPPREFGYSHSSPEFWIKSGTLVPVRRRDIVKIEGIDATGGNNQPNIPDIPAHLWYFGLIGTC

SEQ ID NO: 14432 - protein, 268 aa, Thermomyces lanuginosus
EVSQDLFNQFNLFAQYSKAAYCKANNDAPAGTNITCTGNACPEVEKADATFLYSFEDSGVGDVTGFLALDNTNKQIVLSFRGSRSIENWIGNLRFDLKEINDICSGCRGHDGFTSSWRSVADTLRQKVEAAVREHPDYRVVFTGHSLGGALATVAGADLRGNGYDIDVFSYGAPRVGNRAFAEFLTTQQGGTLYRITHTNDIVPRLPPREFGYSHSSPEYWIKSGTLVPVTRNDIVKIEGIDATGGNNQPNIPDIPAHLWYFGKIGTC

SEQ ID NO: 14433 - protein, 268 aa, Thermomyces lanuginosus
EVSQDLFNQFNLFAQYSAAAYCGKNNDAPAGTKITCTGNACPEVEKADATILYTFKDSGVGDVTGFLALDNTNKLIVLSFRGSRSIENWIGNLNFDLIEINDICSGCRGHDGFTSSWRSVADTLRQKVEDAVREHPDYRVVFTGHSLGGALATVAGADLRGNGYDIDVFSYGAPRVGNRAFAEFLTVQTGGTLYRITITNDIVPRLPPREFGYSHSSPEYWIKSGTLVPVRRRDIVKIEGIDATGGNNQPNIPDIPAHLWYFGLIGTC

SEQ ID NO: 14434 - protein, 268 aa, Thermomyces lanuginosus
EVSQDLFNQFNLFAQYSAAAYCGKNNRAPAGTQITCTGNACPEVEKADATFLYSFEDSGVGDVTGFLALDNTNKLIVLSFRGSRSIENWITNLRFDLKEINDICSGCRGHAGFTSSWRSVADTLRQKVEDAVREHPDYRVVFTGHSLGGALATVAGADLRGNGYDIDVFSYGAPRVGNRAFAEFLTVQTGGTLYRITHTNDIVPRLPPREFGYSHPSPEYWIKSGTGVPVRRRDIVKIEGIDATGGNNQPNIPDIPAHLWYFGLIGTC

SEQ ID NO: 14435 - protein, 268 aa, Thermomyces lanuginosus
EVSQDLFNQFNLFAQYSKAAYCQKNNDAPAGTNITCTGNACPEVFKADATFLYSFEDSGVGDVTGFLALDNTNKQIILSFRGSRSIENWIGNLNFDLKEINDICSGCRGHDGFTSSWRSVADTLRQKVEDAVREHPDYRVVFTGHSLGGALATVAWADLRGNGYDIDVFSYGAPRVGNRAFAEFLTTQDGGTLYRITHTNDIVPRLPPREFGYSHSSPEYWIKSGTLVPVTRNDIVKIEGIDATGGNNQPNIPDIPAHLWYFGLIGTC

SEQ ID NO: 14436 - protein, 268 aa, Thermomyces lanuginosus
EVSQDLFNQFNLFAQYSKAAYCGANNDAPAGTNITCTGNACPEVEKADATFLYSFEDSGVGDVTGFLALDNTNKQIILSFRGSRSIENWIGNLRFDLKEINDICSGCRGHDGFTSSWRSVADTLRQKVEAAVREHPDYRVVFTGHSLGGALATIAWADLRGNGYDIDVFSYGAPRVGNRAFAEFLTVQTGGTLYRITHTNDIVPRLPPREFGYSHSSPEYWIKSGTLVPVTRNDIVKIEGIDATGGNNQPNIPDIPAHLWYFGLIGTC

SEQ ID NO: 14437 - protein, 268 aa, Thermomyces lanuginosus
EVSQDLFNQFNLFAQYSAAAYCGKNNRASAGTNITCTGNACPEVEKADATFLYSFEDSGVGDVTGFLALDNTNKLIVLSFRGSCSIENWIGNLNFDLKEINDICSGCRGHAGFTSSWRSVADTLRQKVEDAVREYPDYRVVFTGHSLGGALATVAGADLRGNGYDIDVFSYGAPRVGNRAFAEFLTVQTGGTLYRITHTNDIVPRLPPREFGYSHPSPEYWIKSGTGVPVTRNDIVKIEGIDATGGNNQPNIPDITAHLWYFGLIGTC

SEQ ID NO: 14438 - protein, 268 aa, Thermomyces lanuginosus
EVSQDLFNQFNLFAQYSAAAYCGKNNRAPAGTNITCTANACPEVEKADATFLYSFEDSGVGDVTGFLALDNTNKLIVLSFRGSRSIENWIGNLNFDLKEINDICSGCRGHAGFTSSWRSVADTLRQKVEDAVREHPDYRVVFTGHSLGGALATVAGADLRGNKYDIDVFSYGAPRVGNRAFAEFLTVQTGGTLYRITHTNDIVPRLPPREFGYSHSSPEYWIKSGTLVPVRRRDIVKIEGIDATGGNNQPNIPSITAHLWYFGLIGTC

SEQ ID NO: 14439 - protein, 268 aa, Thermomyces lanuginosus
EVSQDLFNQFKLFAQYSAAAYCQKNNSAPAGTNITCTGNACPEVEKADATFLYSFEDSGVGDVTGFLALDNTNKQIVLSFRGSRSIENWIGNLRFDLKEINDICSGCRGHDGFTSSWRSVADTLRQKVEDAVREHPDYRVVFTGHSLGGALATIAWADLRGNGYDIDVFSYGAPRVGNRAFAEFLTVQQGGTLYRITHTNDIVPRLPPREFGYSHSSPEYWIKSGTLVPVTRNDIVKIEGIDATGGNNQPNIPDIPAHLWYFGLIGTC

SEQ ID NO: 14440 - protein, 268 aa, Thermomyces lanuginosus
EVSQDLFNQFNLFAQYSAAAYCGKNNNAPAGTNITCTGNACPEVEKADATFLYSFRDSGVGDVTGFLALDNTNKLIVLSFRGSRSIENWIGNLNFDLIEINDICSGCRGHDGFTSSWFSVADTLRQKVEDAVREHPDYRVVFTGHSLGGALATVAGADLRGNGYDIDVFSYGAPRVGNRAFAEFLTVQTGGTLYRITHTNDIVPRLPPREFGYSHSSPEYWIKSGTLVPVRRRDIVKIEGIDAEGGNNQPNIPDITAHLWYFGLIGTC

SEQ ID NO: 14441 - protein, 268 aa, Thermomyces lanuginosus
EVSQDLFNQFNLFAQYSAAAYCGKNNDAPAGTKITCTGNACPEVEKADATILYSFKDSGVGDVTGFLARDNTNKLIVLSFRGSRSIENWIGNLNFDLEEINDICSGCRGHDGFTSSWRSVADTLRQKVEDAVREHPDYRVVFTGHSLGGALATVAGADLRGNGYDIDVFSYGAPRVGNRAFAEFLTVQTGGTLYRITNTNDIVPRLPPREFGYSHSSPEYWIKSGTLVPVRRRDIVKIEGIDATGGNNQPNIPDIPAHLWYFGLIGTC

SEQ ID NO: 14442 - protein, 268 aa, Thermomyces lanuginosus
EVSQDLFNQFNLFAQYSAAAYCSKNNNAPAGTNITCTGNICPEVEKADATILYSFRDSGVGDVTGFLALDNTNKLIVLSFRGSRSIENWIGNLNFDLKEINDICSGCRGHDGFTSSWFSVADTLRQKVEDAVREHPDYRVVFTGHSLGGALATVAGADLRGNGYDIDVFSYGAPRVGNRAFAEFLTVQTGGTLYRITHTNDIVPRLPPREFGYSHSSPEYWIKSGTLVPVRRRDIVKIEGIDATGGNNQPNIPDIPAHLWYFGLIGTC

SEQ ID NO: 14443 - protein, 268 aa, Thermomyces lanuginosus
EVSQDLFNQFNLFAQYSAAAYCKANNDAPAGTNITCTGNACPEVEKADATFLYSFEDSGVGDVTGFLALDNTNKLIVLSFRGSRSIENWIGNLRFDLKEINDICSGCRGHDGFTSSWRSVADTLRQKVEAAVREHPDYRVVFTGHSLGGALATIAWADLRGNGYDIDVFSYGAPRVGNRAFAEFLTTQQGGTLYRITHTNDIVPRLPPREFGYSHSSPEYWIKSGTLVPVTRNDIVKIEGIDATGGNNQPNIPDIPAHLWYFGRIGTC

SEQ ID NO: 14444 - protein, 268 aa, Thermomyces lanuginosus
EVSQDLFNQFNLFAQYSAAAYCGKNNRAPAGTQITCTGNACPEVEKADATFLYSFEDSGVGDVTGFLALDNTNKLIVLSFRGSRSIENWIGNLNFDLKEINDICSGCRGHDGFTSSWRSVADTLRQKVEDAVREHHDYRVVFTGHSLGGALATVAGADLRGNGYDIDVFSYGAPRVGNRAFAEFLTVQTGGTLYRITHTNDIVPRLPPREFGYSHSSPEYWIKSGTGVPVRRRDIVKIEGIDATGGNNRPNIPSIPAHLWYFGLIGTC

SEQ ID NO: 14445 - protein, 268 aa, Thermomyces lanuginosus
EVSQDLFNQFRLFAQYSAAAYCGKNNDAPAGTQITCTGNACPEVEKADATFLYSFEDSGVGDVTGFLALDNTNKLIVLSFRGSRSIENWITNLNFDLKEINDICSGCRGHDGFTSSWRSVADTLRQKVEDAVREHPDYRVVFTGHSLGGALATVAGADLRGNKYDIDVFSYGAPRVGNRAFAEFLTVQTGGTLYRITHTNDIVPRLPPREFGYSHSSPEYWIKSGTGVRVRRRDIVKIEGIDATGGNNQPNIPSIPAHLWYFGLIGTC

SEQ ID NO: 14446 - protein, 268 aa, Thermomyces lanuginosus
EVSQDLFNQFNLFAQYSAAAYCSKNNDAPAGTNITCTGNACPEVEKADATFLYSFRDSGVGDVTGFLALDNTNKLIVLSFRGSRSIENWIGNLNFDLIEINDICSGCRGHDGFTSSWFSVADTLRQKVEDAVREHPDYRVVFTGHSLGGALATVAGADLRGNGYDIDVFSYGAPRVGNRAFAEFLTVQTGGTLYRITHTNDIVPRLPPREFGYSHSSPEFWIKSGTLVPVRRRDIVKIEGIDAEGGNNQPNIPDIPAHLWYFGLIGTC

SEQ ID NO: 14447 - protein, 268 aa, Thermomyces lanuginosus
EVSQDLFNQFNLFAQYSAAAYCGKNNRAPAGTQITCTGNACPEVEKADATFLYSFEDSGVGDVTGFLALDNTNKLIVLSFRGSRSIENWITNLNFEQKEINDICSGCRGHAGFTSSWRSVADTLRQKVEDAVREHPDYRVVFTGHSLGGALATVAGADLRGNGYDIDVFSYGAPRVGNRAFAEFLTVQTGGTLYRITHTNDIVPRLPPREFGYSHSSPEYWIKSGTLVPVRRRDIVKIEGIDATGGNNQPNIPSITAHLWYFGLIGTC

SEQ ID NO: 14448 - protein, 268 aa, Thermomyces lanuginosus
EVSQDLFNQFNLFAQYSAAAYCGKNNDAPAGTNITCTGNACPEVEKADATLLYSFRNSGVGDVTGFLALDNTNKLIVLSFRGSRSIENWIGNLNFDLIEINDICSGCRGHDGFTSSWFSVADTLRQKVEDAVREHPDYRVVFTGHSLGGALATVAGADLRGNSYDIDVFSYGAPRVGNRAFAEFLTVQTGGTLYRITHTNDIVPRLPPREFGYSHSSPEYWIKSGTLVPVRRRDIVKIEGIDATGGNNQPNIPDIPAHLWYFGLIGTC

SEQ ID NO: 14449 - protein, 268 aa, Thermomyces lanuginosus
EVSQDLFNQFNLFAQYSAAAYCSKNNDAPAGTNITCTGNICPEVEKADATILYSFRDSGVGDVTGFLALDNTNKLIVLSFRGSRSIENWIGNLNFDLKEINDICSGCRGHDGFTSSWFSVADTLRQKVEDAVREHPDYRVVFTGHSLGGALATVAGADLRGNGYDIDVFSYGAPRVGNRAFAEFLTVQTGGTLYRITHTNDIVPRLPPREFGYSHSSPEYWIKSGTLVPVRRRDIVKIEGIDATGGNNQPNIPDITAHLWYFGLIGTC

SEQ ID NO: 14450 - protein, 268 aa, Thermomyces lanuginosus
EVSRDLFNQFNLFAQYSAAAYCGKNNDAPAGTNITCTGNACPEVEKADATILYSFEDSGVGDVTGFLALDNTNKLIVLSFRGSRSIENWIGNLNFDLKEINDICSGCRGHDGFTSSWRSVADTLRQKVEDAVREHPDYRVVFAGHSLGGALATVAGADLRGDGYDIDVFSYGAPRVGNRAFAEFLTVQTGGTLYRITSTNDIVPRLPPREFGYSHSSPEYWIKSGTLRPVRRRDIVKIEGIDATGGNNQPNIPDIPAHLWYFGLIGTC

SEQ ID NO: 14451 - protein, 268 aa, Thermomyces lanuginosus
EVSQDLFNQFNLFAQYSAAAYCGKNNDAPAGTKITCTGNACPEVEKADATLLYSFKDSGVGDVTGFLARDNTNKLIVLSFRGSRSIENWIGNLNFDLEEINDICSGCRGHDGFTSSWRSVADTLRQKVEDAVREHPDYRVVFTGHSLGGALATVAGADLRGNGYDIDVFSYGAPRVGNRAFAEFLTVQTGGTLYRITHTNDIVPRLPPREFGYSHSSPEYWIKSGTLPPVRRRDIVKIEGIDATGGNNQPNIPDIPAHLWYFGLIGTC

SEQ ID NO: 14452 - protein, 268 aa, Thermomyces lanuginosus
EVSQDLFNQFNLFAQYSKAAYCKANNDAPAGTNITCTGNACPEVEKADATFLYSFEDSGVGDVTGFLALDNTNKQIVLSFRGSRSIENWIGNLNFDLKEINDICSGCRGHDGFTSSWRSVADTLRQKVEYAVREHPDYRVVFTGHSLGGALATIAGADLRGNGYDIDVFSYGAPRVGNRAFAEFLTNQQGGTLYRITHTNDIVPRLPPREFGYSHSSPEYWIKSGTLVPVTRNDIVKIEGIDATGGNNQPNIPDIPAHLWYFGLIGTC

SEQ ID NO: 14453 - protein, 268 aa, Thermomyces lanuginosus
EVSQDLFNQFNLFAQYSAAAYCSKNNDAPAGTNITCTGNACPEVEKADATFLYSFRDSGEGDVTGFLALDNTNKLIVLSFRGSRSIENWIGNLNFDLKEINDICSGCRGHDGFTSSWFSVADTLRQKVEDAVREHPDYRVVFTGHSLGGALATVAGADLRGNGYDIDVFSYGAPRVGNRAFAEFLTVQTGGTLYRITHTNDIVPRLPPREFGYSHSSPEYWIKSGTLVPVRRRDIVKIEGIDAEGGNNQPNIPDITAHLWYFGLIGTC

SEQ ID NO: 14454 - protein, 268 aa, Thermomyces lanuginosus
EVSQDLFNQFNLFAQYSAAAYCGKNNNAPAGTNITCTGNACPEVEKADATILYSFRDSGVGDVTGFLALDNTNKLIVLSFRGSRSIENWIGNLNFDLKEINDICSGCRGHDGFTSSWFSVADTLRQKVEDAVREHPDYRVVFTGHSLGGALATVAGADLRGNGYDIDVFSYGAPRVGNRAFAEFLTVQTGGTLYRITHTNDIVPRLPPREFGYSHSSPEFWIKSGTLVPVRRRDIVKIEGIDATGGNNQPNIPDITAHLWYFGLIGTC

SEQ ID NO: 14455 - protein, 268 aa, Thermomyces lanuginosus
EVSQDLFNQFNLFAQYSAAAYCGKNNDAPAGTNITCTGNICPEVEKADATLLYSFRNSGVGDVTGFLALDNTNKLIVLSFRGSRSIENWIGNLNFDLKEINDICSGCRGHDGFTSSWFSVADTLRQKVEDAVREHPDYRVVFTGHSLGGALATVAGADLRGNGYDIDVFSYGAPRVGNRAFAEFLTVQTGGTLYRITHTNDIVPRLPPREFGYSHSSPEYWIKSGTLVPVRRRDIVKIEGIDATGGNNQPNIPDITAHLWYFGLIGTC

SEQ ID NO: 14456 - protein, 268 aa, Thermomyces lanuginosus
EVSQDLFNQFNLFAQYSAAAYCSKNNNAPAGTNITCTGNACPEVEKADATFLYSFRDSGVGDVTGFLALDNTNKLIVLSFRGSRSIENWIGNLNFDLIEINDICSGCRGHDGFTSSWFSVADTLRQKVEDAVREHPDYRVVFTGHSLGGALATVAGADLRGNGYDIDVFSYGAPRVGNRAFAEFLTVQTGGTLYRITHTNDIVPRLPPREFGYSHSSPEYWIKSGTLVPVRRRDIVKIEGIDATGGNNQPNIPDITAHLWYFGLIGTC

SEQ ID NO: 14457 - protein, 268 aa, Thermomyces lanuginosus
EVSQDLFNQFNLFAQYSAAAYCGKNNDAPAGTQITCTGNACPEVEKADATFLYSFEDSGVGDVTGFLALDNTNKLIVLSFRGSRSIENWITNLSFDLKEINDICSGCRGHAGFTSSWRSVADTLRQKVEDAVREHPDYRVVFTGHSLGGALATVARADLRGNTYDIDVFSYGAPRIGNRAFAEFLTVQTGGTLYRITHTNDIVPRLPPREFGYSHSSPEYWIKSGTLVPVRRRDIVKIEGIDATGGNNQPNIPDIPAHLWYFGLIGTC

SEQ ID NO: 14458 - protein, 268 aa, Thermomyces lanuginosus
EVSQDLFNQFNLFAQYSAAAYCGKNNDAPAGTKITCTGNACPEVEKADATVLYSFKDSGVGDVTGFLARDNTNKLIVLSFRGSRSIENWIGNLNFDLEEINDICSGCRGHDGFTSSWRSVADTLRQKVEDAVREHPDYRVVFTGHSLGGALATVAGADLRGNGYDIDVFSYGAPRVGNRAFAEFLTVQTGGTLYRITSTNDIVPRLPPREFGYSHSSPEYWIKSGTLVPVRRRDIVKIEGIDATGGNNQPNIPDIPAHLWYFGLIGTC

SEQ ID NO: 14459 - protein, 268 aa, Thermomyces lanuginosus
EVSQDLFNQFRLFAQYSAAAYCGKNNDAPAGTQITCTANACPEVEKADATFLYSFEDSGVGDVTGFLALDNTNKLIVLSFRGSRSIENWITNLNFDLKEINDICSGCRGHDGFTSSWRSVADTLRQKVEDAVREHPDYRVVFTGHSLGGALATVAGADLRGNTYDIDVFSYGAPRGGNRAFAEFLTVQTGGTLYRITHTNDIVPRLPPREFGYSHSSPEYWIKSGTLVPVRRRDIVKIEGIDATGGNNQPNIPSIPAHLWYFGLIGTC

SEQ ID NO: 14460 - protein, 268 aa, Thermomyces lanuginosus
EVSQDLFNQFNLFAQYSAAAYCGKNNDAPAGTNITCTGNICPEVEKADATLLYSFRNSGVGDVTGFLALDNTNKLIVLSFRGSRSIENWIGNLNFDLIEINDICSGCRGHDGFTSSWFSVADTLRQKVEDAVREHPDYRVVFTGHSLGGALATVAGADLRGNGYDIDVFSYGAPRVGNRAFAEFLTVQTGGTLYRITHTNDIVPRLPPREFGYSHSSPEYWIKSGTLVPVRRRDIVKIEGIDATGGNNQPNIPDIPAHLWYFGLIGTC

SEQ ID NO: 14461 - protein, 268 aa, Thermomyces lanuginosus
EVSQDLFNQFNLFAQYSKAAYCQANNDAPAGTNITCTGNACPEVEKADATFLYSFEDSGVGDVTGFLALDNTNKRIVLSFRGSRSIENWIGNLRFDLKEINDICSGCRGHDGFTSSWRSVADTLRQKVEAAVREHPDYRVVFTGHSLGGALATIAWADLRGNGYDIDVFSYGAPRVGNRAFAEFLTVQTGGTLYRITHTNDIVPRLPPREFGYSHSSPEYWIKSGTLVPVTRNDIVKIEGIDATGGNNQPNIPDIPAHLWYFGLIGTC

SEQ ID NO: 14462 - protein, 268 aa, Thermomyces lanuginosus
EVSQDLFNQFNLFAQYSAAAYCGKNNDAPAGTNITCTGNACPEVEKADATILYSFRDSGKGDVTGFLALDNTNKLIVLSFRGSRSIENWIGNLNFDLKEINDICSGCRGHDGFTSSWFSVADTLRQKVEDAVREHPDYRVVFTGHSLGGALATVAGADLRGNGYDIDVFSYGAPRVGNRAFAEFLTVQTGGTLYRITHTNDIVPRLPPREFGYSHSSPEYWIKSGTLVPVRRRDIVKIEGIDAEGGNNQPNIPDITAHLWYFGLIGTC

SEQ ID NO: 14463 - protein, 268 aa, Thermomyces lanuginosus
EVSQDLFNQFNLFAQYSAAAYCGKNNDAPAGTQITCTGNACPEVEKADATFLYSFEDSGVGDVTGFLALDNTNKLIVLSFRGSRSIENWITNLNFDLKEINDICSGCRGHDGFISSWRSVADTLRQKVEDAVREHPDYRVVFTGHSLGGALATVAGADLRGNKYDIDVFSYGAPRVGNRAFAEFLTVQTGGTLYRITHTNDIVPRLPPRDFGYSHSSPEYWIKSGTLVPVRRRDIVKIEGIDATGGNNQPNIPGIAAHLWYFGLIGTC

SEQ ID NO: 14464 - protein, 268 aa, Thermomyces lanuginosus
EVSQDLFNQFNLFAQYSAAAYCGKNNDAPAGTNITCTGNACPEVEKADATFLYSFEDAGSGDVTGFLALDNTNKLIVLSFRGSRSVENWIGNLNFDLKEINDICSGCRGHDGFTSSWRSVADTLRQKVEDAVREHPDYRVVFTGHSLGGGLATVAGADLRGNGYDIDVFSYGAPRVGNRAFAEFLTVQTGGTLYRITHTNDIVPRLPPREFGYSHSSPEYWIKSGTGVPVRRRDIVKIEGIDATGGNNQPNIPDIKAHLWYFGLIGTC

SEQ ID NO: 14465 - protein, 268 aa, Thermomyces lanuginosus
EVSQDLFNQFNLFAQYSAAAYCGKNNDAPAGTQITCTGNACPEVEKADATFLYSFEDSGVRDRTGFLALDNTNKLIVLSFRGSRSIENWIGNLNFDLKEINDICSGCRGHDGFTSSWRSVADTLRQKVEDAVREHPDYRVVFTGHSLGGALATVARADLRGNGYDIDVFSYGAPRWGNRAFAEFLTVQTGGTLYRITHTNDIVPRLPPREFGYSHSSPEYWIKSGTLVPVRRRDIVKIEGIDATGGNNQPNIPDIIAHLWYFGLIGTC

SEQ ID NO: 14466 - protein, 268 aa, Thermomyces lanuginosus
EVSQDLFNQFNLFAQYSKAAYCQANNDAPAGTNITCTGNACPEVEKADATFLYSFEDSGVGDVTGFLALDNTNKQIILSFRGSRSIENWIGNLNFDLKEINDICSGCRGHDGFTSSWRSVADTLRQKVEAAVREHPDYRVVFTGHSLGGALATVAWADLRGNGYDIDVFSYGAPRVGNRAFAEFLTQQTGGTLYRITHTNDIVPRLPPREFGYSHSSPEYWIKSGTLVPVTRNDIVKIEGIDATGGNNQPNIPDIPAHLWYFGLIGTC

SEQ ID NO: 14467 - protein, 268 aa, Thermomyces lanuginosus
EVSQDLFNQFNLFAQYSAAAYCGKNNRAPAGTNITCTANACPEVEKADATFLYSFEDSGVGDVTGFLALDNTNKLIVLSFRGSRSIENWIGNLNFELKEINDICSGCRGHAGFTSSWRSVADTLRQKVEDAVREHPDYRVVFTGHSLGGALATVAGADLRGNKYDIDVFSYGAPRVGNRAFAEFLTVQTGGTLYRITHTNDIVPRLPPREFGYSHSSPEYWIKSGTLVPVRRRDIVKIEGIDATGGNNQPNIPSIWAHLWYFGLIGTC

SEQ ID NO: 14468 - protein, 268 aa, Thermomyces lanuginosus
EVSQDLFNQFNLFAQYSAAAYCGKNNDAPAGTNITCTGNACPEVEKADATLLYSFRNSGVGDVTGFLALDNTNKLIVLSFRGSRSIENWIGNLNFDLIEINDICSGCRGHDGFTSSWFSVADTLRQKVEDAVREHPDYRVVFTGHSLGGALATVAGADLRGNGYDIDVFSYGAPRVGNRAFAEFLTVQTGGTLYRITHTNDIVPRLPPREFGYSHSSPEYWIKSGTLVPVRRRDIVKIEGIDATGGNNQPNIPDITAHLWYFGLIGTC

SEQ ID NO: 14469 - protein, 268 aa, Thermomyces lanuginosus
EVSQDLFNQFNLFAQYSAAAYCGRNNDAPAGTNITCTGNACPEVERADATFLYSFEDSGVGDVTGFLALDNTNRLIVLSFRGSRSIENWIGNLNFDLREINDICSGCRGHDGFTSSWRSVADTLRQRVEDAVREHPKYRVVFTGHSLGGALATVAGADLRGNGYDIDVFSYGAPRVGNRAFAEFLTVQTGGTLYRITHTNDIVPRLPPREFGYSHSSPEYWIRSGTLVPVTRNDIVRIEGIDATGGNNQPNIPDIPAHLWYFGLIGTC

SEQ ID NO: 14470 - protein, 268 aa, Thermomyces lanuginosus
EVSQDLFNQFNLFAQYSAAAYCQANNDAPAGTNITCTGNACPEVEKADATFLYSFEDSGVGDVTGFLALDNTNKQIILSFRGSRSIENWIGNLNFDLKEINDICSGCRGHDGFTSSWRSVADTLRQKVEAAVREHPDYRVVFTGHSLGGALATIAWADLRGNGYDIDVFSYGAPRVGNRAFAEFLTNQTGGTLYRITHTNDIVPRLPPREFGYSHSSPEYWIKSGTLVPVTRNDIVKIEGIDATGGNNQPNIPDIPAHLWYFGLIGTC

SEQ ID NO: 14471 - protein, 268 aa, Thermomyces lanuginosus
EVSQDLFNQFNLFAQYSAAAYCGKNNDAPAGTKITCTGNACPEVEKADATILYTFKDSGVGDVTGFLALDNTNKLIVLSFRGSRSIENWIGNLNFDLIEINDICSGCRGHDGFTSSWRSVADTLRQKVEDAVREHPDYRVVFTGHSLGGALATVAGADLRGNGYDIDVFSYGAPRVGNRAFAEFLTVQTGGTLYRITHTNDIVPRLPPREFGYSHSSPEYWIKSGTLVPRRRRDIVKIEGIDATGGNNQPNIPDIPAHLWYFGLIGTC

SEQ ID NO: 14472 - protein, 268 aa, Thermomyces lanuginosus
EVSQDLFNQFNLFAQYSAAAYCKKNNDAPAGTNITCTGNACPEVEKADATFLYSFEDSGVGDVTGFLALDNTNKQIVLSFRGSRSIENWIGNLNFDLKEINDICSGCRGHAGFTSSWRSVADTLRQKVEAAVREHPDYRVVFTGHSLGGALATIAWADLRGNGYDIDVFSYGAPRVGNRAFAEFLTTQQGGTLYRITHTNDIVPRLPPREFGYSHSSPEYWIKSGTLVPVTRNDIVKIEGIDATGGNNQPNIPDIPAHLWYFGRIGTC

SEQ ID NO: 14473 - protein, 268 aa, Thermomyces lanuginosus
EVSQDLFNQFNLFAQYSAAAYCSKNNNAPAGTNITCTGNACPEVEKADATILYSFRDSGVGDVTGFLALDNTNKLIVLSFRGSRSIENWIGNLNFDLIEINDICSGCRGHDGFTSSWFSVADTLRQKVEDAVREHPDYRVVFTGHSLGGALATVAGADLRGNGYDIDVFSYGAPRVGNRAFAEFLTVQTGGTLYRITHTNDIVPRLPPREFGYSHSSPEYWIKSGTLVPVRRRDIVKIEGIDATGGNNQPNIPDIPAHLWYFGLIGTC

SEQ ID NO: 14474 - protein, 268 aa, Thermomyces lanuginosus
EVSQDLFNQFNLFAQYSAAAYCGKNNDAPAGTKITCTGNACPEVEKADATVLYTFKDSGVGDVTGFLALDNTNKLIVLSFRGSRSIENWIGNLNFDLIEINDICSGCRGHDGFTSSWRSVADTLRQKVEDAVREHPDYRVVFTGHSLGGALATVAGADLRGNGYDIDVFSYGAPRVGNRAFAEFLTVQTGGTLYRITYTNDIVPRLPPREFGYSHSSPEYWIKSGTLVPVRRRDIVKIEGIDATGGNNQPNIPDIPAHLWYFGLIGTC

SEQ ID NO: 14475 - protein, 268 aa, Thermomyces lanuginosus
EVSQDLFNQFNLFAQYSAAAYCGKNNDAPAGTKITCTGNACPEVEKADATLLYTFKDSGVGDVTGFLALDNTNKLIVLSFRGSRSIENWIGNLNFDLIEINDICSGCRGHDGFTSSWRSVADTLRQKVEDAVREHPDYRVVFTGHSLGGALATVAGADLRGNGYDIDVFSYGAPRVGNRAFAEFLTVQTGGTLYRITNTNDIVPRLPPREFGYSHSSPEYWIKSGTLVPVRRRDIVKIEGIDATGGNNQPNIPDIPAHLWYFGLIGTC

SEQ ID NO: 14476 - protein, 268 aa, Thermomyces lanuginosus
EVSQDLFNQFNLFAQYSAAAYCSKNNDAPAGTNITCTGNACPEVEKADATILYSFRDSGVGDVTGFLALDNTNKLIVLSFRGSRSIENWIGNLNFDLIEINDICSGCRGHDGFTSSWFSVADTLRQKVEDAVREHPDYRVVFTGHSLGGALATVAGADLRGNGYDIDVFSYGAPRVGNRAFAEFLTVQTGGTLYRITHTNDIVPRLPPREFGYSHSSPEYWIKSGTLVPVRRRDIVKIEGIDATGGNNQPNIPDITAHLWYFGLIGTC

SEQ ID NO: 14477 - protein, 268 aa, Thermomyces lanuginosus
EVSQDLFNQFNLFAQYSAAAYCGKNNDAPAGTNITCTGNACPEVEKADATLLYSFRNSGVGDVTGFLALDNTNKLIVLSFRGSRSIENWIGNLNFDLKEINDICSGCRGHDGFTSSWFSVADTLRQKVEDAVREHPDYRVVFTGHSLGGALATVAGADLRGNSYDIDVFSYGAPRVGNRAFAEFLTVQTGGTLYRITHTNDIVPRLPPREFGYSHSSPEYWIKSGTLVPVRRRDIVKIEGIDATGGNNQPNIPDITAHLWYFGLIGTC

SEQ ID NO: 14478 - protein, 268 aa, Thermomyces lanuginosus
EVSQDLFNQFNLFAQYSAAAYCGKNNDAPAGTKITCTGNACPEVEKADATLLYSFKDSGVGDVTGFLARDNTNKLIVLSFRGSRSIENWIGNLNFDLEEINDICSGCRGHDGFTSSWRSVADTLRQKVEDAVREHPDYRVVFTGHSLGGALATVAGADLRGNGYDIDVFSYGAPRVGNRAFAEFLTVQTGGTLYRITYTNDIVPRLPPREFGYSHSSPEYWIKSGTLVPVRRRDIVKIEGIDATGGNNQPNIPDIPAHLWYFGLIGTC

SEQ ID NO: 14479 - protein, 268 aa, Thermomyces lanuginosus
EVSQDLFNQFNLFAQYSAAAYCGKNNRAPAGTNITCTANACPEVEKADATFLYSFEDSGVGDVTGFLALDNTNKLIVLSFRGSRSIENWIGNLNFTLKEINDICSGCRGHAGFTSSWRSVADTLRQKVEDAVREHPDYRVVFTGHSLGGALATVAGADLRGNKYDIDVFSYGAPRVGNRAFAEFLTVQTGGTLYRITHTNDIVPRLPPREFGYSHSSPEYWIKSGTLVPVRRRDIVKIEGIDATGGNNQPNIPSITAHLWYFGLIGTC

SEQ ID NO: 14480 - protein, 268 aa, Thermomyces lanuginosus
EVSQDLFNQFNLFAQYSAAAYCSKNNNAPAGTNITCTGNICPEVEKADATFLYSFRDSGEGDVTGFLALDNTNKLIVLSFRGSRSIENWIGNLNFDLKEINDICSGCRGHDGFTSSWFSVADTLRQKVEDAVREHPDYRVVFTGHSLGGALATVAGADLRGNGYDIDVFSYGAPRVGNRAFAEFLTVQTGGTLYRITHTNDIVPRLPPREFGYSHSSPEYWIKSGTLVPVRRRDIVKIEGIDATGGNNQPNIPDIPAHLWYFGLIGTC

SEQ ID NO: 14481 - protein, 268 aa, Thermomyces lanuginosus
EVSQDLFNQFNLFAQYSAAAYCGKNNDAPAGTNITCTGNACPEVEKADATILYSFRDSGVGDVTGFLALDNTNKLIVLSFRGSRSIENWIGNLNFDLKEINDICSGCRGHDGFTSSWFSVADTLRQKVEDAVREHPDYRVVFTGHSLGGALATVAGADLRGNGYDIDVFSYGAPRVGNRAFAEFLTVQTGGTLYRITHTNDIVPRLPPREFGYSHSSPEFWIKSGTLVPVRRRDIVKIEGIDAEGGNNQPNIPDITAHLWYFGLIGTC

SEQ ID NO: 14482 - protein, 268 aa, Thermomyces lanuginosus
EVSQDLFNQFNLFAQYSAAAYCGKNNDAPAGTNITCTGNACPEVEKADATFLYSFRDSGVGDVTGFLALDNTNKLIVLSFRGSRSIENWIGNLNFDLIEINDICSGCRGHDGFTSSWFSVADTLRQKVEDAVREHPDYRVVFTGHSLGGALATVAGADLRGNGYDIDVFSYGAPRVGNRAFAEFLTVQTGGTLYRITHTNDIVPRLPPREFGYSHSSPEFWIKSGTLVPVRRRDIVKIEGIDAEGGNNQPNIPDITAHLWYFGLIGTC

SEQ ID NO: 14483 - protein, 268 aa, Thermomyces lanuginosus
EVSQDLFNQFNLFAQYSKAAYCKANNDAPAGTNITCTGNACPEVEKADATFLYSFEDSGVGDVTGFLALDNTNKQIILSFRGSRSIENWIGNLRFDLKEINDICSGCRGHDGFTSSWRSVADTLRQKVENAVREHPDYRVVFTGHSLGGALATVAWADLRGNGYDIDVFSYGAPRVGNRAFAEFLTVQTGGTLYRITHTNDIVPRLPPREFGYSHSSPEYWIKSGTLVPVTRNDIVKIEGIDATGGNNQPNIPDIPAHLWYFGLIGTC

SEQ ID NO: 14484 - protein, 268 aa, Thermomyces lanuginosus
EVSQDLFNQFNLFAQYSAAAYCGKNNDAPAGTKITCTGNACPEVEKADATVLYTFKDSGVGDVTGFLALDNTNKLIVLSFRGSRSIENWIGNLNFDLIEINDICSGCRGHDGFTSSWRSVADTLRQKVEDAVREHPDYRVVFTGHSLGGALATVAGADLRGNGYDIDVFSYGAPRVGNRAFAEFLTVQTGGTLYRITHTNDIVPRLPPREFGYSHSSPEYWIKSGTLVPVRRRDIVKIEGIDATGGNNQPNIPDIPVHLWYFGLIGTC

SEQ ID NO: 14485 - protein, 268 aa, Thermomyces lanuginosus
EVSQDLFNQFNLFAQYSAAAYCKANNDAPAGTNITCTGNACPEVEKADATFLYSFEDSGVGDVTGFLALDNTNKRIVLSFRGSRSIENWIGNLRFDLKEINDICSGCRGHDGFTSSWRSVADTLRQKVEDAVREHPDYRVVFTGHSLGGALATIAWADLRGNGYDIDVFSYGAPRVGNRAFAEFLTTQQGGTLYRITHTNDIVPRLPPREFGYSHSSPEYWIKSGTLVPVTRNDIVKIEGIDATGGNNQPNIPDIPAHLWYFGLIGTC

SEQ ID NO: 14486 - protein, 268 aa, Thermomyces lanuginosus
EVSQDLFNQFNLFAQYSAAAYCGKNNDAPAGTKITCTGNACPEVEKADATLLYSFKDSGVGDVTGFLARDNTNKLIVLSFRGSRSIENWIGNLNFDLEEINDICSGCRGHDGFTSSWRSVADTLRQKVEDAVREHPDYRVVFTGHSLGGALATVAGADLRGNGYDIDVFSYGAPRVGNRAFAEFLTVQTGGTLYRITHTNDIVPRLPPREFGYSHSSPEYWIKSGTLVPVRRRDIVKIEGIDATGGNNQPNIPDIPVHLWYFGLIGTC

SEQ ID NO: 14487 - protein, 268 aa, Thermomyces lanuginosus
EVSQDLFNQFNLFAQYSAAAYCSKNNNAPAGTNITCTGNACPEVEKADATFLYSFRDSGVGDVTGFLALDNTNKLIVLSFRGSRSIENWIGNLNFDLKEINDICSGCRGHDGFTSSWFSVADTLRQKVEDAVREHPDYRVVFTGHSLGGALATVAGADLRGNGYDIDVFSYGAPRVGNRAFAEFLTVQTGGTLYRITHTNDIVPRLPPREFGYSHSSPEFWIKSGTLVPVRRRDIVKIEGIDATGGNNQPNIPDITAHLWYFGLIGTC

SEQ ID NO: 14488 - protein, 268 aa, Thermomyces lanuginosus
EVSQDLFNQFNLFAQYSAAAYCSKNNDAPAGTNITCTGNICPEVEKADATILYSFRDSGVGDVTGFLALDNTNKLIVLSFRGSRSIENWIGNLNFDLKEINDICSGCRGHDGFTSSWFSVADTLRQKVEDAVREHPDYRVVFTGHSLGGALATVAGADLRGNGYDIDVFSYGAPRVGNRAFAEFLTVQTGGTLYRITHTNDIVPRLPPREFGYSHSSPEYWIKSGTLVPVRRRDIVKIEGIDAEGGNNQPNIPDIPAHLWYFGLIGTC

SEQ ID NO: 14489 - protein, 268 aa, Thermomyces lanuginosus
EVSQDLFNQFNLFAQYSAAAYCQKNNDAPAGTNITCTGNACPEVEKADATFLYSFKDSGVGDVTGFLALDNTNKQIVLSFRGSRSIENWIGNLNFDLKEINDICSGCRGHAGFTSSWRSVADTLRQKVEAAVREHPDYRVVFTGHSLGGALATIAWADLRGNGYDIDVFSYGAPRVGNRAFAEFLTVQQGGTLYRITHTNDIVPRLPPREFGYSHSSPEYWIKSGTLVPVTRNDIVKIEGIDATGGNNQPNIPDIPAHLWYFGRIGTC

SEQ ID NO: 14490 - protein, 268 aa, Thermomyces lanuginosus
EVSQDLFNQFNLFAQYSAAAYCSKNNNAPAGTNITCTGNACPEVEKADATFLYSFRDSGVGDVTGFLALDNTNKLIVLSFRGSRSIENWIGNLNFDLKEINDICSGCRGHDGFTSSWFSVADTLRQKVEDAVREHPDYRVVFTGHSLGGALATVAGADLRGNGYDIDVFSYGAPRVGNRAFAEFLTVQTGGTLYRITHTNDIVPRLPPREFGYSHSSPEYWIKSGTLVPVRRRDIVKIEGIDAEGGNNQPNIPDITAHLWYFGLIGTC

SEQ ID NO: 14491 - protein, 268 aa, Thermomyces lanuginosus
EVSQDLFNQFNLFAQYSAAAYCGKNNNAPAGTNITCTGNACPEVEKADATFLYSFRDSGVGDVTGFLALDNTNKLIVLSFRGSRSIENWIGNLNFDLIEINDICSGCRGHDGFTSSWFSVADTLRQKVEDAVREHPDYRVVFTGHSLGGALATVAGADLRGNGYDIDVFSYGAPRVGNRAFAEFLTVQTGGTLYRITHTNDIVPRLPPREFGYSHSSPEFWIKSGTLVPVRRRDIVKIEGIDATGGNNQPNIPDITAHLWYFGLIGTC

SEQ ID NO: 14492 - protein, 268 aa, Thermomyces lanuginosus
EVSQDLFNQFNLFAQYSAAAYCGKNNSAPAGTNITCTGNACPEVEKADATFLYSFKDSGVGDVTGFLALDNTNKQIVLSFRGSRSIENWIGNLRFDLKEINDICSGCRGHAGFTSSWRSVADTLRQKVEAAVREHPDYRVVFTGHSLGGALATIAWADLRGNGYDIDVFSYGAPRVGNRAFAEFLTVQTGGTLYRITHTNDIVPRLPPREFGYSHSSPEYWIKSGTLVPVTRNDIVKIEGIDATGGNNQPNIPDIPAHLWYFGRIGTC

SEQ ID NO: 14493 - protein, 268 aa, Thermomyces lanuginosus
EVSRDLFNQFNLFAQYSAAAYCGKNNDAPAGTNITCTGNACPEVEKADATILYSFEDSGVGDVTGFLALDNTNKLIVLSFRGSRSIENWIGNLNFDLKEINDICSGCRGHDGFTSSWRSVADTLRQKVEDAVREHPDYRVVFTGHSLGGALATVAGADLRGNGYDIDVFSYGAPRVGNRAFAEFLTVQTGGTLYRITNTNDIVPRLPPRQFGYSHSSPEYWIKSGTLPPVRRNDIVKCEGIDATCGNNQPNIPDIPAHLWYFGLIGTC

SEQ ID NO: 14494 - protein, 268 aa, Thermomyces lanuginosus
EVSQDLFNQFNLFAQYSAAAYCGKNNDAPAGTKITCTGNACPEVEKADATVLYSFKDSGVGDVTGFLARDNTNKLIVLSFRGSRSIENWIGNLNFDLEEINDICSGCRGHDGFTSSWRSVADTLRQKVEDAVREHPDYRVVFTGHSLGGALATVAGADLRGNGYDIDVFSYGAPRVGNRAFAEFLTVQTGGTLYRITHTNDIVPRLPPREFGYSHSSPEYWIKIGTLVPVRRRDIVKIEGIDATGGNNQPNIPDIPAHLWYFGLIGTC

SEQ ID NO: 14495 - protein, 268 aa, Thermomyces lanuginosus
EVSQDLFNQFNLFAQYSAAAYCGKNNDAPAGTKITCTGNACPEVEKADATVLYSFKDSGVGDVTGFLARDNTNKLIVLSFRGSRSIENWIGNLNFDLEEINDICSGCRGHDGFTSSWRSVADTLRQKVEDAVREHPDYRVVFTGHSLGGALATVAGADLRGNGYDIDVFSYGAPRVGNRAFAEFLTVQTGGTLYRITLTNDIVPRLPPREFGYSHSSPEYWIKSGTLVPVRRRDIVKIEGIDATGGNNQPNIPDIPAHLWYFGLIGTC

SEQ ID NO: 14496 - protein, 268 aa, Thermomyces lanuginosus
EVSQDLFNQFNLFAQYSAAAYCGKNNDAPAGTNITCTGNICPEVEKADATFLYSFRNSGVGDVTGFLALDNTNKLIVLSFRGSRSIENWIGNLNFDLIEINDICSGCRGHDGFTSSWFSVADTLRQKVEDAVREHPDYRVVFTGHSLGGALATVAGADLRGNSYDIDVFSYGAPRVGNRAFAEFLTVQTGGTLYRITHTNDIVPRLPPREFGYSHSSPEYWIKSGTLVPVRRRDIVKIEGIDATGGNNQPNIPDIPAHLWYFGLIGTC

SEQ ID NO: 14497 - protein, 268 aa, Thermomyces lanuginosus
EVSQDLFNQFNLFAQYSAAAYCGKNNDAPAGTKITCTGNACPEVEKADATVLYSFKDSGVGDVTGFLARDNTNKLIVLSFRGSRSIENWIGNLNFDLEEINDICSGCRGHDGFTSSWRSVADTLRQKVEDAVREHPDYRVVFTGHSLGGALATVAGADLRGNGYDIDVFSYGAPRVGNRAFAEFLTVQTGGTLYRITHTNDIVPRLPPREFGYSHSSPEYWIKSGTLVPVRRRDIVKIEGIDATGGNNQPNIPDGPAHLWYFGLIGTC

SEQ ID NO: 14498 - protein, 268 aa, Thermomyces lanuginosus
EVSQDLFNQFNLFAQYSAAAYCGKNNRAPAGTNITCTGNACPEVEKADATFLYSFEDSGVGDVTGFLALDNTNKLIVLSFRGSRSIENWVTNFKFDLKEINDICSGCRGHAGFTSSWRSVADTLRQKVEDAVREHPDYRVVFTGHSLGGALATVAGADLRGNGYDIDVFSYGAPRVGNRAFAEFLTVQTGGTLYRITHTNDIVPRLPPREFGYSHPSPEYWIKSGTGVPVTRNDIVKIEGIDATGGNNQPNIPDITAHLWYFGLIGTC

SEQ ID NO: 14499 - protein, 268 aa, Thermomyces lanuginosus
EVSQDLFNQFNLFAQYSAAAYCGKNNRAPAGTNITCTANACPEVEKADATFLYSFEDSGVGDVTGFLALDNTNKLIVLSFRGSRSIENWIGNLNFILKEINDICSGCRGHAGFTSSWRSVADTLRQKVEDAVREHPDYRVVFTGHSLGGALATVAGADLRGNKYDIDVFSYGAPRVGNRAFAEFLTVQTGGTLYRITHTNDIVPRLPPREFGYSHSSPEYWIKSGTLVPVRRRDIVKIEGIDATGGNNQPNIPSITAHLWYFGLIGTC

SEQ ID NO: 14500 - protein, 268 aa, Thermomyces lanuginosus
EVSQDLFNQFNLFAQYSAAAYCKKNNSAPAGTNITCTGNACPEVEKADATFLYSFEDSGVGDVTGFLALDNTNKQIVLSFRGSRSIENWIGNLNFDLKEINDICSGCRGHAGFTSSWRSVADTLRQKVEAAVREHPDYRVVFTGHSLGGALATIAWADLRGNGYDIDVFSYGAPRVGNRAFAEFLTVQQGGTLYRITHTNDIVPRLPPREFGYSHSSPEYWIKSGTLVPVTRNDIVKIEGIDATGGNNQPNIPDIPAHLWYFGRIGTC

SEQ ID NO: 14501 - protein, 268 aa, Thermomyces lanuginosus
EVSQDLFNQFNLFAQYSAAAYCGKNNDAPAGTKITCTGNACPEVEKADATLLYSFKDSGVGDVTGFLARDNTNKLIVLSFRGSRSIENWIGNLNFDLEEINDICSGCRGHDGFTSSWRSVADTLRQKVEDAVREHPDYRVVFTGHSLGGALATVAGADLRGNGYDIDVFSYGAPRVGNRAFAEFLTVQTGGTLYRITHTNDIVPRLPPREFGYSHSSPEYWIKSGTLVPRRRRDIVKIEGIDATGGNNQPNIPDIPAHLWYFGLIGTC

SEQ ID NO: 14502 - protein, 268 aa, Thermomyces lanuginosus
EVSQDLFNQFNLFAQYSAAAYCSKNNNAPAGTNITCTGNACPEVEKADATFLYSFRDSGVGDVTGFLALDNTNKLIVLSFRGSRSIENWIGNLNFDLIEINDICSGCRGHDGFTSSWFSVADTLRQKVEDAVREHPDYRVVFTGHSLGGALATVAGADLRGNGYDIDVFSYGAPRVGNRAFAEFLTVQTGGTLYRITHTNDIVPRLPPREFGYSHSSPEYWIKSGTLVPVRRRDIVKIEGIDAEGGNNQPNIPDIPAHLWYFGLIGTC

SEQ ID NO: 14503 - protein, 268 aa, Thermomyces lanuginosus
EVSQDLFNQFNLFAQYSAAAYCQKNNSAPAGTNITCTGNACPEVEKADATFLYSFEDSGVGDVTGFLALDNTNKQIVLSFRGSRSIENWIGNLRFDLKEINDICSGCRGHAGFTSSWRSVADTLRQKVEAAVREHPDYRVVFTGHSLGGALATIAWADLRGNGYDIDVFSYGAPRVGNRAFAEFLTVQTGGTLYRITHTNDIVPRLPPREFGYSHSSPEYWIKSGTLVPVTRNDIVKIEGIDATGGNNQPNIPDIPAHLWYFGRIGTC

SEQ ID NO: 14504 - protein, 268 aa, Thermomyces lanuginosus
EVSQDLFNQFNLFAQYSAAAYCGKNNDAPAGTKITCTGNACPEVEKADATILYSFKDSGVGDVTGFLARDNTNKLIVLSFRGSRSIENWIGNLNFDLEEINDICSGCRGHDGFTSSWRSVADTLRQKVEDAVREHPDYRVVFTGHSLGGALATVAGADLRGNGYDIDVFSYGAPRVGNRAFAEFLTVQTGGTLYRITHTNDIVPRLPPREFGYSHSSPEYWIKPGTLVPVRRRDIVKIEGIDATGGNNQPNIPDIPAHLWYFGLIGTC

SEQ ID NO: 14505 - protein, 268 aa, Thermomyces lanuginosus
EVSQDLFNQFNLFAQYSAAAYCQKNNSAPAGTNITCTGNACPEVEKADATTLYSFKDSGVGDVTGFLALDNTNKRIVLSFRGSRSIENWIQNLNFDLKEINDICSGCRGHDGFTSSWRSVADTLRQKVEAAVREHPDYRVVFTGHSLGGALATVAGADLRGNGYDIDVFSYGAPRVGNRAFAEFLTHQTGGTLYRITHTNDIVPRLPPREFGYSHSSPEYWIKSGTLVPVTRNDIVKIEGIDATGGNNQPNQPDIPAHLWYFGRIGTC

SEQ ID NO: 14506 - protein, 268 aa, Thermomyces lanuginosus
EVSQDLFNQFNLFAQYSAAAYCGKNNDAPAGTKITCTGNACPEVEKADATILYSFKDSGVGDVTGFLARDNTNKLIVLSFRGSRSIENWIGNLNFDLEEINDICSGCRGHDGFTSSWRSVADTLRQKVEDAVREHPDYRVVFTGHSLGGALATVAGADLRGNGYDIDVFSYGAPRVGNRAFAEFLTVQTGGTLYRITHTNDIVPRLPPREFGYSHSSPEYWIKIGTLVPVRRRDIVKIEGIDATGGNNQPNIPDIPAHLWYFGLIGTC

SEQ ID NO: 14507 - protein, 268 aa, Thermomyces lanuginosus
EVSQDLFNQFNLFAQYSAAAYCGKNNDAPAGTNITCTGNACPEVEKADATFLYSFEDAGSGDVTGFLALDNTNKLIVLSFRGTRSIENWIGNLNFDLKEINDICSGCRGHDGFTSSWRSVADTLRQKVEDAVREHPDYRVVFTGHSLGGALATVAGADLRGNGYDIDVFSYGAPRVGNRAFAEFLTVQTGGTLYRITHTNDIVPRLPPREFGYSHSSPEYWIKSGTGVPVRRRDIVKIEGIDATGGNNQPNIPDAKAHLWYFGLIGTC

SEQ ID NO: 14508 - protein, 268 aa, Thermomyces lanuginosus
EVSQDLFNQFNLFAQYSAAAYCGKNNRAPAGTNITCTANACPEVEKADATFLYSFEDSGVGDVTGFLALDNTNKLIVLSFRGSRSIENWIGNLNFLLKEINDICSGCRGHAGFTSSWRSVADTLRQKVEDAVREHPDYRVVFTGHSLGGALATVAGADLRGNKYDIDVFSYGAPRVGNRAFAEFLTVQTGGTLYRITHTNDIVPRLPPREFGYSHSSPEYWIKSGTLVPVRRRDIVKIEGIDATGGNNQPNIPSITAHLWYFGLIGTC

SEQ ID NO: 14509 - protein, 268 aa, Thermomyces lanuginosus
EVSQDLFNQFNLFAQYSAAAYCGKNNDAPAGTKITCTGNACPEVEKADATVLYSFKDSGVGDVTGFLARDNTNKLIVLSFRGSRSIENWIGNLNFDLEEINDICSGCRGHDGFTSSWRSVADTLRQKVEDAVREHPDYRVVFAGHSLGGALATVAGADLRGNGYDIDVFSYGAPRVGNRAFAEFLTVQTGGTLYRITHTNDIVPRLPPREFGYSHSSPEYWIKSGTLVPVRRRDIVKIEGIDATGGNNQPNIPDIPAHLWYFGLIGTC

SEQ ID NO: 14510 - protein, 268 aa, Thermomyces lanuginosus
EVSQDLFNQFNLFAQYSAAAYCGKNNNAPAGTNITCTGNACPEVEKADATFLYSFRDSGVGDVTGFLALDNTNKLIVLSFRGSRSIENWIGNLNFDLKEINDICSGCRGHDGFTSSWFSVADTLRQKVEDAVREHPDYRVVFTGHSLGGALATVAGADLRGNGYDIDVFSYGAPRVGNRAFAEFLTVQTGGTLYRITHTNDIVPRLPPREFGYSHSSPEFWIKSGTLVPVRRRDIVKIEGIDAEGGNNQPNIPDITAHLWYFGLIGTC

SEQ ID NO: 14511 - protein, 268 aa, Thermomyces lanuginosus
EVSQDLFNQFNLFAQYSAAAYCGKNNDAPAGTKITCTGNACPEVEKADATVLYTFKDSGVGDVTGFLALDNTNKLIVLSFRGSRSIENWIGNLNFDLIEINDICSGCRGHDGFTSSWRSVADTLRQKVEDAVREHPDYRVVFAGHSLGGALATVAGADLRGNGYDIDVFSYGAPRVGNRAFAEFLTVQTGGTLYRITHTNDIVPRLPPREFGYSHSSPEYWIKSGTLVPVRRRDIVKIEGIDATGGNNQPNIPDIPAHLWYFGLIGTC

SEQ ID NO: 14512 - protein, 268 aa, Thermomyces lanuginosus
EVSQDLFNQFNLFAQYSAAAYCSKNNDAPAGTNITCTGNICPEVEKADATFLYSFRDSGVGDVTGFLALDNTNKLIVLSFRGSRSIENWIGNLNFDLKEINDICSGCRGHDGFTSSWFSVADTLRQKVEDAVREHPDYRVVFTGHSLGGALATVAGADLRGNGYDIDVFSYGAPRVGNRAFAEFLTVQTGGTLYRITHTNDIVPRLPPREFGYSHSSPEYWIKSGTLVPVRRRDIVKIEGIDAEGGNNQPNIPDITAHLWYFGLIGTC

SEQ ID NO: 14513 - protein, 268 aa, Thermomyces lanuginosus
EVSQDLFNQFRLFAQYSAAAYCGKNNDAPAGTQITCTANACPEVEKADATFLYSFEDSGVGDVTGFLALDNTNKLIVLSFRGSRSIENWITNLNFDLKEINDICSGCRGHDAFTSSWRSVADTLRQKVEDAVREHPDYRVVFTGHSLGGALATVAGADLRGNAYDIDVFSYGAPRVGNRAFAEFLTVQTGGTLYRITHTNDIVPRLPPREFGYSHSSPEYWIKSGTLVPVRRRDIVKIEGIDATGGNNQPNIPSIPAHLWYFGLIGTC

SEQ ID NO: 14514 - protein, 268 aa, Thermomyces lanuginosus
EVSQDLFNQFNLFAQYSAAAYCGKNNDAPAGTQITCTGNACPEVEKADATFLYSFEDSGVGDVTGFLALDNTNKLIVLSFRGSRSIENWITNLSFDLKEINDICSGCRGHAGFTSSWRSVADTLRQKVEDAVREHPDYRVVFTGHSLGGALATVARADLRGNTYDIDVFSYGAPRWGNRAFAEFLTVQTGGTLYRITHTNDIVPRLPPREFGYSHSSPEYWIKSGTLVPVRRRDIVKIEGIDATGGNNQPNIPDIPAHLWYFGLIGTC

SEQ ID NO: 14515 - protein, 268 aa, Thermomyces lanuginosus
EVSQDLFNQFNLFAQYSAAAYCGKNNNAPAGTQITCTGNACPEVEKADATFLYSFEDSGVGDVTGFLALDNTNKLIVLSFRGSRSIENWITNLNFDLKEINDICSGCRGHDGFISSWRSVADTLRQKVEDAVREHPDYRVVFTGHSLGGALATVAGADLRGNSYDIDVFSYGAPRVGNRAFAEFLTVQTGGTLYRITHTNDIVPRLPPRDFGYSHSSPEYWIKSGTLVPVRRRDIVKIEGIDATGGNNQPNIPDITAHLWYFGLIGTC

SEQ ID NO: 14516 - protein, 268 aa, Thermomyces lanuginosus
EVSQDLFNQFKLFAQYSAAAYCKKNNSAPAGTNITCTGNACPEVEKADATFLYSFEDSGVGDVTGFLALDNTNKQIVLSFRGSRSIENWIGNLNFDLKEINDICSGCRGHAGFTSSWRSVADTLRQKVEAAVREHPDYRVVFTGHSLGGALATIAGADLRGNGYDIDVFSYGAPRVGNRAFAEFLTVQQGGTLYRITHTNDIVPRLPPREFGYSHSSPEYWIKSGTLVPVTRNDIVKIEGIDATGGNNQPNIPDIPAHLWYFGLIGTC

SEQ ID NO: 14517 - protein, 268 aa, Thermomyces lanuginosus
EVSQDLFNQFNLFAQYSAAAYCGKNNDAPAGTKITCTGNACPEVEKADATVLYSFKDSGVGDVTGFLARDNTNKLIVLSFRGSRSIENWIGNLNFDLEEINDICSGCRGHDGFTSSWRSVADTLRQKVEDAVREHPDYRVVFTGHSLGGALATVAGADLRGNGYDIDVFSYGAPRVGNRAFAEFLTVQTGGTLYRITNTNDIVPRLPPREFGYSHSSPEYWIKSGTLVPVRRRDIVKIEGIDATGGNNQPNIPDIPAHLWYFGLIGTC

SEQ ID NO: 14518 - protein, 268 aa, Thermomyces lanuginosus
EVSQDLFNQFNLFAQYSAAAYCKKNNSAPAGTNITCTGNACPEVEKADATTLYSFKDMGVGDVTGFLALDNTNKRIVLSFRGSRSIENWIQNLNFDLKEINDICSGCRGHDGFTSSWRSVADTLRQKVEDAVREHPDYRVVFTGHSLGGALATVAGADLRGNGYDIDVFSYGAPRVGNRAFAEFLTHQTGGTLYRITHTNDIVPRLPPREFGYSHSSPEYWIKSGTLVPVTRNDIVKIEGIDATGGNNQPNQPDIPAHLWYFGLIGTC

SEQ ID NO: 14519 - protein, 268 aa, Thermomyces lanuginosus
EVSQDLFNQFNLFAQYSAAAYCSKNNDAPAGTNITCTGNACPEVEKADATFLYSFRDSGVGDVTGFLALDNTNKLIVLSFRGSRSIENWIGNLNFDLKEINDICSGCRGHDGFTSSWFSVADTLRQKVEDAVREHPDYRVVFTGHSLGGALATVAGADLRGNGYDIDVFSYGAPRVGNRAFAEFLTVQTGGTLYRITHTNDIVPRLPPREFGYSHSSPEFWIKSGTLVPVRRRDIVKIEGIDAEGGNNQPNIPDITAHLWYFGLIGTC

SEQ ID NO: 14520 - protein, 268 aa, Thermomyces lanuginosus
EVSQDLFNQFRLFAQYSAAAYCGKNNDAPAGTQITCTGNACPEVEKADATFLYSFEDSGVGDVTGFLALDNTNKLIVLSFRGSRSIENWLTNLSFELKEINDICSGCRGHDGFTSSWRSVADTLRQKVEDAVREHPDYRVVFTGHSLGGALATVAGADLRGNKYDIDVFSYGAPRVGNRAFAEFLTVQTGGTLYRITHTNDIVPRLPPREFGYSHSSPEYWIKSGTLVPVRRRDIVKIEGIDATGGNNQPNIPSIPAHLWYFGLIGTC

SEQ ID NO: 14521 - protein, 268 aa, Thermomyces lanuginosus
EVSQDLFNQFNLFAQYSAAAYCGKNNDAPAGTKITCTGNACPEVEKADATLLYTFKDSGVGDVTGFLALDNTNKLIVLSFRGSRSIENWIGNLNFDLIEINDICSGCRGHDGFTSSWRSVADTLRQKVEDAVREHPDYRVVFTGHSLGGALATVAGADLRGNGYDIDVFSYGAPRVGNRAFAEFLTVQTGGTLYRITHTNDIVPRLPPREFGYSHSSPEYWIKSGTLPPVRRRDIVKIEGIDATGGNNQPNIPDIPAHLWYFGLIGTC

SEQ ID NO: 14522 - protein, 268 aa, Thermomyces lanuginosus
EVSQDLFNQFNLFAQYSAAAYCGKNNSAPAGTNITCTGNACPEVEKADATFLYSFKDSGVGDVTGFLALDNTNKQIVLSFRGSRSIENWIGNLRFDLKEINDICSGCRGHAGFTSSWRSVADTLRQKVEAAVREHPDYRVVFTGHSLGGALATVAGADLRGNGYDIDVFSYGAPRVGNRAFAEFLTNQQGGTLYRITHTNDIVPRLPPREFGYSHSSPEYWIKSGTLVPVTRNDIVKIEGIDATGGNNQPNIPDIPAHLWYFGRIGTC

SEQ ID NO: 14523 - protein, 268 aa, Thermomyces lanuginosus
EVSQDLFNQFNLFAQYSAAAYCGKNNDAPAGTKITCTGNACPEVEKADATILYSFKDSGVGDVTGFLARDNTNKLIVLSFRGSRSIENWIGNLNFDLEEINDICSGCRGHDGFTSSWRSVADTLRQKVEDAVREHPDYRVVFTGHSLGGGLATVAGADLRGNGYDIDVFSYGAPRVGNRAFAEFLTVQTGGTLYRITHTNDIVPRLPPREFGYSHSSPEYWIKSGTLVPVRRRDIVKIEGIDATGGNNQPNIPDIPAHLWYFGLIGTC

SEQ ID NO: 14524 - protein, 268 aa, Thermomyces lanuginosus
EVSQDLFNQFNLFAQYSAAAYCGKNNDAPAGTKITCTGNACPEVEKADATILYSFKDSGVGDVTGFLARDNTNKLIVLSFRGSRSIENWIGNLNFDLEEINDICSGCRGHDGFTSSWRSVADTLRQKVEDAVREHPDYRVVFAGHSLGGALATVAGADLRGNGYDIDVFSYGAPRVGNRAFAEFLTVQTGGTLYRITHTNDIVPRLPPREFGYSHSSPEYWIKSGTLVPVRRRDIVKIEGIDATGGNNQPNIPDIPAHLWYFGLIGTC

SEQ ID NO: 14525 - protein, 268 aa, Thermomyces lanuginosus
EVSQDLFNQFNLFAQYSAAAYCSKNNNAPAGTNITCTGNICPEVEKADATFLYSFRDSGVGDVTGFLALDNTNKLIVLSFRGSRSIENWIGNLNFDLKEINDICSGCRGHDGFTSSWFSVADTLRQKVEDAVREHPDYRVVFTGHSLGGALATVAGADLRGNGYDIDVFSYGAPRVGNRAFAEFLTVQTGGTLYRITHTNDIVPRLPPREFGYSHSSPEYWIKSGTLVPVRRRDIVKIEGIDAEGGNNQPNIPDIPAHLWYFGLIGTC

SEQ ID NO: 14526 - protein, 268 aa, Thermomyces lanuginosus
EVSQDLFNQFNLFAQYSAAAYCGKNNDAPAGTKITCTGNACPEVEKADATVLYTFKDSGVGDVTGFLALDNTNKLIVLSFRGSRSIENWIGNLNFDLIEINDICSGCRGHDGFTSSWRSVADTLRQKVEDAVREHPDYRVVFTGHSLGGALATVAGADLRGNGYDIDVFSYGAPRVGNRAFAEFLTVQTGGTLYRITHTNDIVPRLPPREFGYSHSSPEYWIKSGTLVPVRRRDIVKIEGIDATGGNNQPNIPDIPIHLWYFGLIGTC

SEQ ID NO: 14527 - protein, 268 aa, Thermomyces lanuginosus
EVSQDLFNQFNLFAQYSAAAYCGKNNNAPAGTNITCTGNACPEVEKADATFLYSFRDSGVGDVTGFLALDNTNKLIVLSFRGSRSIENWIGNLNFDLIEINDICSGCRGHDGFTSSWFSVADTLRQKVEDAVREHPDYRVVFTGHSLGGALATVAGADLRGNGYDIDVFSYGAPRVGNRAFAEFLTVQTGGTLYRITHTNDIVPRLPPREFGYSHSSPEFWIKSGTLVPVRRRDIVKIEGIDAEGGNNQPNIPDIPAHLWYFGLIGTC

SEQ ID NO: 14528 - protein, 268 aa, Thermomyces lanuginosus
EVSQDLFNQFNLFAQYSAAAYCGKNNDAPAGTNITCTGNICPEVEKADATLLYSFRNSGVGDVTGFLALDNTNKLIVLSFRGSRSIENWIGNLNFDLKEINDICSGCRGHDGFTSSWFSVADTLRQKVEDAVREHPDYRVVFTGHSLGGALATVAGADLRGNSYDIDVFSYGAPRVGNRAFAEFLTVQTGGTLYRITHTNDIVPRLPPREFGYSHSSPEYWIKSGTLVPVRRRDIVKIEGIDATGGNNQPNIPDIPAHLWYFGLIGTC

SEQ ID NO: 14529 - protein, 268 aa, Thermomyces lanuginosus
EVSQDLFNQFRLFAQYSAAAYCGKNNDAPAGTQITCTGNACPEVEKADATFLYSFQDSGVGDVTGFLALDNTNKLIVLSFRGSRSIENWITNLNFDLKEINDICSGCRGHDGFTSSWRSVADTLRQKVEDAVREHPDYRVVFTGHSLGGALATVAGADLRGNKYDIDVFSYGAPRQGNRAFAEFLTVQTGGTLYRITHTNDIVPRLPPREFGYSHSSPEYWIKSGTLVPVRRRDIVKIEGIDATGGNNQPNIPSIPAHLWYFGLIGTC

SEQ ID NO: 14530 - protein, 268 aa, Thermomyces lanuginosus
EVSQDLFNQFNLFAQYSAAAYCGKNNNAPAGTNITCTGNICPEVEKADATFLYSFRDSGVGDVTGFLALDNTNKLIVLSFRGSRSIENWIGNLNFDLKEINDICSGCRGHDGFTSSWFSVADTLRQKVEDAVREHPDYRVVFTGHSLGGALATVAGADLRGNGYDIDVFSYGAPRVGNRAFAEFLTVQTGGTLYRITHTNDIVPRLPPREFGYSHSSPEYWIKSGTLVPVRRRDIVKIEGIDAEGGNNQPNIPDITAHLWYFGLIGTC

SEQ ID NO: 14531 - protein, 268 aa, Thermomyces lanuginosus
EVSQDLFNQFNLFAQYSAAAYCGKNNDAPAGTKITCTGNACPEVEKADATILYTFKDSGVGDVTGFLALDNTNKLIVLSFRGSRSIENWIGNLNFDLIEINDICSGCRGHDGFTSSWRSVADTLRQKVEDAVREHPDYRVVFTGHSLGGALATVAGADLRGNGYDIDVFSYGAPRVGNRAFAEFLTVQTGGTLYRITHTNDIVPRLPPREFGYSHSSPEYWIKSGTLVPVRRRDIVKIEGIDATGGNNQPNIPDGPAHLWYFGLIGTC

SEQ ID NO: 14532 - protein, 268 aa, Thermomyces lanuginosus
EVSQDLFNQFNLFAQYSAAAYCGKNNDAPAGTKITCTGNACPEVEKADATVLYTFKDSGVGDVTGFLALDNTNKLIVLSFRGSRSIENWIGNLNFDLIEINDICSGCRGHDGFTSSWRSVADTLRQKVEDAVREHPDYRVVFTGHSLGGALATVAGADLRGNGYDIDVFSYGAPRVGNRAFAEFLTVQTGGTLYRITHTNDIVPRLPPREFGYSHSSPEYWIKSGTLPPVRRRDIVKIEGIDATGGNNQPNIPDIPAHLWYFGLIGTC

SEQ ID NO: 14533 - protein, 268 aa, Thermomyces lanuginosus
EVSQDLFNQFNLFAQYSAAAYCSKNNNAPAGTNITCTGNACPEVEKADATFLYSFRDSGVGDVTGFLALDNTNKLIVLSFRGSRSIENWIGNLNFDLKEINDICSGCRGHDGFTSSWFSVADTLRQKVEDAVREHPDYRVVFTGHSLGGALATVAGADLRGNGYDIDVFSYGAPRVGNRAFAEFLTVQTGGTLYRITHTNDIVPRLPPREFGYSHSSPEFWIKSGTLVPVRRRDIVKIEGIDAEGGNNQPNIPDIPAHLWYFGLIGTC

SEQ ID NO: 14534 - protein, 268 aa, Thermomyces lanuginosus
EVSQDLFNQFNLFAQYSAAAYCGKNNRAPAGTNITCTANACPEVEKADATFLYSFEDSGVGDVTGFLALDNTNKLIVLSFRGSRSIENWIGNLNFELKEINDICSGCRGHAGFTSSWRSVADTLRQKVEDAVREHPDYRVVFTGHSLGGALATVAGADLRGNPYDIDVFSYGAPRVGNRAFAEFLTVQTGGTLYRITHTNDIVPRLPPREFGYSHSSPEYWIKSGTLVPVRRRDIVKIEGIDATGGNNQPNIPSITAHLWYFGLIGTC

SEQ ID NO: 14535 - protein, 268 aa, Thermomyces lanuginosus
EVSQDLFNQFNLFAQYSKAAYCKANNDAPAGTNITCTGNACPEVEKADATFLYSFEDSGVGDVTGFLALDNTNKQIILSFRGSRSIENWIGNLNFDLKEINDICSGCRGHDGFTSSWRSVADTLRQKVEAAVREHPDYRVVFTGHSLGGALATIAWADLRGNGYDIDVFSYGAPRVGNRAFAEFLTVQTGGTLYRITHTNDIVPRLPPREFGYSHSSPEYWIKSGTLVPVTRNDIVKIEGIDATGGNNQPNIPDIPAHLWYFGLIGTC

SEQ ID NO: 14536 - protein, 268 aa, Thermomyces lanuginosus
EVSQDLFNQFKLFAQYSAAAYCKKNNSAPAGTNITCTGNACPEVEKADATFLYSFKDSGVGDVTGFLALDNTNKRIVLSFRGSRSIENWIGNLNFDLKEINDICSGCRGHAGFTSSWRSVADTLRQKVEDAVREHPDYRVVFTGHSLGGALATVAWADLRGNGYDIDVFSYGAPRVGNRAFAEFLTNQTGGTLYRITHTNDIVPRLPPREFGYSHSSPEYWIKSGTLVPVTRNDIVKIEGIDATGGNNQPNIPDIPAHLWYFGRIGTC

SEQ ID NO: 14537 - protein, 268 aa, Thermomyces lanuginosus
EVSQDLFNQFNLFAQYSKAAYCKKNNDAPAGTNITCTGNACPEVEKADATFLYSFEDSGVGDVTGFLALDNTNKRIILSFRGSRSIENWIGNLRFDLKEINDICSGCRGHDGFTSSWRSVADTLRQKVEAAVREHPDYRVVFTGHSLGGALATVAWADLRGNGYDIDVFSYGAPRVGNRAFAEFLTQQTGGTLYRITHTNDIVPRLPPREFGYSHSSPEYWIKSGTLVPVTRNDIVKIEGIDATGGNNQPNIPDIPAHLWYFGLIGTC

SEQ ID NO: 14538 - protein, 268 aa, Thermomyces lanuginosus
EVSQDLFNQFNLFAQYSAAAYCGKNNDAPAGTKITCTGNACPEVEKADATILYSFKDSGVGDVTGFLARDNTNKLIVLSFRGSRSIENWIGNLNFDLEEINDICSGCRGHDGFTSSWRSVADTLRQKVEDAVREHPDYRVVFTGHSLGGALATVAGADLRGNGYDIDVFSYGAPRVGNRAFAEFLTVQTGGTLYRITHTNDIVPRLPPREFGYSHSSPEYWIKFGTLVPVRRRDIVKIEGIDATGGNNQPNIPDIPAHLWYFGLIGTC

SEQ ID NO: 14539 - protein, 268 aa, Thermomyces lanuginosus
EVSQDLFNQFNLFAQYSAAAYCSKNNDAPAGTNITCTGNACPEVEKADATFLYSFRDSGVGDVTGFLALDNTNKLIVLSFRGSRSIENWIGNLNFDLIEINDICSGCRGHDGFTSSWFSVADTLRQKVEDAVREHPDYRVVFTGHSLGGALATVAGADLRGNGYDIDVFSYGAPRVGNRAFAEFLTVQTGGTLYRITHTNDIVPRLPPREFGYSHSSPEFWIKSGTLVPVRRRDIVKIEGIDATGGNNQPNIPDITAHLWYFGLIGTC

SEQ ID NO: 14540 - protein, 268 aa, Thermomyces lanuginosus
EVSQDLFNQFNLFAQYSAAAYCGKNNDAPAGTKITCTGNACPEVEKADATVLYSFKDSGVGDVTGFLARDNTNKLIVLSFRGSRSIENWIGNLNFDLEEINDICSGCRGHDGFTSSWRSVADTLRQKVEDAVREHPDYRVVFTGHSLGGGLATVAGADLRGNGYDIDVFSYGAPRVGNRAFAEFLTVQTGGTLYRITHTNDIVPRLPPREFGYSHSSPEYWIKSGTLVPVRRRDIVKIEGIDATGGNNQPNIPDIPAHLWYFGLIGTC

SEQ ID NO: 14541 - protein, 268 aa, Thermomyces lanuginosus
EVSQDLFNQFNLFAQYSKAAYCKKNNDAPAGTNITCTGNACPEVEKADATFLYSFEDSGVGDVTGFLALDNTNKQIILSFRGSRSIENWIGNLNFDLKEINDICSGCRGHDGFTSSWRSVADTLRQKVEAAVREHPDYRVVFTGHSLGGALATIAWADLRGNGYDIDVFSYGAPRVGNRAFAEFLTNQTGGTLYRITHTNDIVPRLPPREFGYSHSSPEYWIKSGTLVPVTRNDIVKIEGIDATGGNNQPNIPDIPAHLWYFGLIGTC

SEQ ID NO: 14542 - protein, 268 aa, Thermomyces lanuginosus
EVSQDLFNQFNLFAQYSAAAYCGKNNDAPAGTKITCTGNACPEVEKADATVLYTFKDSGVGDVTGFLALDNTNKLIVLSFRGSRSIENWIGNLNFDLIEINDICSGCRGHDGFTSSWRSVADTLRQKVEDAVREHPDYRVVFTGHSLGGALATVAGADLRGNGYDIDVFSYGAPRVGNRAFAEFLTVQTGGTLYRITSTNDIVPRLPPREFGYSHSSPEYWIKSGTLVPVRRRDIVKIEGIDATGGNNQPNIPDIPAHLWYFGLIGTC

SEQ ID NO: 14543 - protein, 268 aa, Thermomyces lanuginosus
EVSQDLFNQFNLFAQYSKAAYCQKNNDAPAGTNITCTGNACPEVFKADVTFLYSFEDSGVGDVTGFLALDNTNKQIVLSFRGSRSIENWIGNLNFDLKEINDICSGCKGHDGFTSSWRSVADTLRQKVEDAVREHPDYRVVFTGHSLGGALATVAGADLRGNGYDIDVFSYGAPRVGNRAFAEFLTTQDGGTLYRITHTNDIVPRLPPREFGYSHSSPEYWIKSGTLVPVTRNDIVKIEGIDATGGNNQPNIPDIPAHLWYFGLIGTC

SEQ ID NO: 14544 - protein, 268 aa, Thermomyces lanuginosus
EVSQDLFNQFNLFAQYSAAAYCGKNNDAPAGTKITCTGNACPEVEKADATILYSFKDSGVGDVTGFLARDNTNKLIVLSFRGSRSIENWIGNLNFDLEEINDICSGCRGHDGFTSSWRSVADTLRQKVEDAVREHPDYRVVFTGHSLGGALATVAGADLRGNGYDIDVFSYGAPRVGNRAFAEFLTVQTGGTLYRITHTNDIVPRLPPREFGYSHSSPEYWIKSGTLVPRRRRDIVKIEGIDATGGNNQPNIPDIPAHLWYFGLIGTC

SEQ ID NO: 14545 - protein, 268 aa, Thermomyces lanuginosus
EVSQDLFNQFNLFAQYSAAAYCGKNNDAPAGTKITCTGNACPEVEKADATVLYSFKDSGVGDVTGFLARDNTNKLIVLSFRGSRSIENWIGNLNFDLEEINDICSGCRGHDGFTSSWRSVADTLRQKVEDAVREHPDYRVVFTGHSLGGALATVAGADLRGNGYDIDVFSYGAPRVGNRAFAEFLTVQTGGTLYRITHTNDIVPRLPPREFGYSHSSPEYWIKSGTLPPVRRRDIVKIEGIDATGGNNQPNIPDIPAHLWYFGLIGTC

SEQ ID NO: 14546 - protein, 268 aa, Thermomyces lanuginosus
EVSQDLFNQFNLFAQYSAAAYCGKNNDAPAGTKITCTGNACPEVEKADATLLYTFKDSGVGDVTGFLALDNTNKLIVLSFRGSRSIENWIGNLNFDLIEINDICSGCRGHDGFTSSWRSVADTLRQKVEDAVREHPDYRVVFTGHSLGGALATVAGADLRGNGYDIDVFSYGAPRVGNRAFAEFLTVQTGGTLYRITHTNDIVPRLPPREFGYSHSSPEYWIKFGTLVPVRRRDIVKIEGIDATGGNNQPNIPDIPAHLWYFGLIGTC

SEQ ID NO: 14547 - protein, 268 aa, Thermomyces lanuginosus
EVSQDLFNQFNLFAQYSKAAYCGANNDAPAGTNITCTGNACPEVEKADATFLYSFEDSGVGDVTGFLALDNTNKQIVLSFRGSRSIENWIGNLRFDLKEINDICSGCRGHDGFTSSWRSVADTLRQKVEDAVREHPDYRVVFTGHSLGGALATIAWADLRGNGYDIDVFSYGAPRVGNRAFAEFLTNQQGGTLYRITHTNDIVPRLPPREFGYSHSSPEYWIKSGTLVPVTRNDIVKIEGIDATGGNNQPNIPDIPAHLWYFGRIGTC

SEQ ID NO: 14548 - protein, 268 aa, Thermomyces lanuginosus
EVSRDLFNQFNLFAQYSAAAYCGKNNDAPAGTNITCTGNACPEVEKADATILYSFEDSGVGDVTGFLALDNTNKLIVLSFRGSRSIENWIGNLNFDLKEINDICSGCRGHDGFTSSWRSVADTLRQKVEDAVREHPDYRVVFAGHSLGGALATVAGADLRGDGYDIDVFSYGAPRVGNRAFAEFLTVQTGGTLYRITNTNDIVPRLPPREFGYSHSSPEYWIKSGTLPPVRRRDIVKIEGIDATGGNNQPNIPDIPAHLWYFGLIGTC

SEQ ID NO: 14549 - protein, 268 aa, Thermomyces lanuginosus
EVSQDLFNQFNLFAQYSAAAYCGKNNDAPAGTKITCTGNACPEVEKADATILYSFKDSGVGDVTGFLARDNTNKLIVLSFRGSRSIENWIGNLNFDLEEINDICSGCRGHDGFTSSWRSVADTLRQKVEDAVREHPDYRVVFTGHSLGGALATVAGADLRGNGYDIDVFSYGAPRVGNRAFAEFLTVQTGGTLYRITHTNDIVPRLPPREFGYSHSSPEYWIKSGTLPPVRRRDIVKIEGIDATGGNNQPNIPDIPAHLWYFGLIGTC

SEQ ID NO: 14550 - protein, 268 aa, Thermomyces lanuginosus
EVSQDLFNQFRLFAQYSAAAYCGKNNDAPAGTQITCMGNACPEVEKADATFLYSFEDSGVGDVTGFLALDNTNKLIVLSFRGSRSIENWITNLNFDLKEINDICSGCRGHDGFTSSWRSVADTLRQKVEDAVREHPDYRVVFTGHSLGGALATVAGADLRGNPYDIDVFSYGAPRTGNRAFAEFLTVQTGGTLYRITHTNDIVPRLPPREFGYSHSSPEYWIKSGTLVPVRRRDIVKIEGIDATGGNNQPNIPSIPAHLWYFGLIGTC

SEQ ID NO: 14551 - protein, 268 aa, Thermomyces lanuginosus
EVSQDLFNQFNLFAQYSAAAYCSKNNDAPAGTNITCTGNACPEVEKADATFLYSFRDSGVGDVTGFLALDNTNKLIVLSFRGSRSIENWIGNLNFDLIEINDICSGCRGHDGFTSSWFSVADTLRQKVEDAVREHPDYRVVFTGHSLGGALATVAGADLRGNGYDIDVFSYGAPRVGNRAFAEFLTVQTGGTLYRITHTNDIVPRLPPREFGYSHSSPEYWIKSGTLVPVRRRDIVKIEGIDAEGGNNQPNIPDITAHLWYFGLIGTC

SEQ ID NO: 14552 - protein, 268 aa, Thermomyces lanuginosus
EVSQDLFNQFNLFAQYSAAAYCGKNNDAPAGTKITCTGNACPEVEKADATLLYSFKDSGVGDVTGFLARDNTNKLIVLSFRGSRSIENWIGNLNFDLEEINDICSGCRGHDGFTSSWRSVADTLRQKVEDAVREHPDYRVVFTGHSLGGALATVAGADLRGNGYDIDVFSYGAPRVGNRAFAEFLTVQTGGTLYRITITNDIVPRLPPREFGYSHSSPEYWIKSGTLVPVRRRDIVKIEGIDATGGNNQPNIPDIPAHLWYFGLIGTC

SEQ ID NO: 14553 - protein, 268 aa, Thermomyces lanuginosus
EVSQDLFNQFNLFAQYSAAAYCGKNNDAPAGTKITCTGNACPEVEKADATLLYSFKDSGVGDVTGFLARDNTNKLIVLSFRGSRSIENWIGNLNFDLEEINDICSGCRGHDGFTSSWRSVADTLRQKVEDAVREHPDYRVVFTGHSLGGALATVAGADLRGNGYDIDVFSYGAPRVGNRAFAEFLTVQTGGTLYRITHTNDIVPRLPPREFGYSHSSPEYWIKSGTDVPVRRRDIVKIEGIDATGGNNQPNIPDIPAHLWYFGLIGTC

SEQ ID NO: 14554 - protein, 268 aa, Thermomyces lanuginosus
EVSQDLFNQFNLFAQYSAAAYCGKNNDAPAGTKITCTGNACPEVEKADATILYSFKDSGVGDVTGFLARDNTNKLIVLSFRGSRSIENWIGNLNFDLEEINDICSGCRGHDGFTSSWRSVADTLRQKVEDAVREHPDYRVVFTGHSLGGALATVAGADLRGNGYDIDVFSYGAPRVGNRAFAEFLTVQTGGTLYRITYTNDIVPRLPPREFGYSHSSPEYWIKSGTLVPVRRRDIVKIEGIDATGGNNQPNIPDIPAHLWYFGLIGTC

SEQ ID NO: 14555 - protein, 268 aa, Thermomyces lanuginosus
EVSQDLFNQFNLFAQYSAAAYCGKNDRAPAGTNITCTGNACPEVEKADATFLYSFQDSGVGDVTGFLALDNTNKLIVLSFRGSRSIENWIGNLNFDLKEINDICSGCRGHAGFTSSWRSVADTLRQKVEDAVREHVDYRVVFTGHSLGGALATVAGADLRGNGYDIDVFSYGAPRVGNRAFAEFLTVQTGGTLYRITHTNDIVPRLPPREFGYSHPSPEYWIKSGTGVPVTRNDIVKIEGIDATGGNNQPNIPDITAHLWYFGLIGTC

SEQ ID NO: 14556 - protein, 268 aa, Thermomyces lanuginosus
EVSQDLFNQFNLFAQYSAAAYCGKNNRAPAGTQITCTGNACPEVEKADATFLYSFEDSGVGDVTGFLALDNTNKLIVLSFRGSRSIENWIANLNFEQKEINDICSGCRGHAGFTSSWRSVADTLRQKVEDAVREHPDYRVVFTGHSLGGALATVAGADLRGNGYDIDVFSYGAPRVGNRAFAEFLTVQTGGTLYRITHTNDIVPRLPPREFGYSHPSPEYWIKSGTGVPVRRRDIVKIEGIDATGGNNQPNIPDITAHLWYFGLIGTC

SEQ ID NO: 14557 - protein, 268 aa, Thermomyces lanuginosus
EVSQDLFNQFNLFAQYSAAAYCGKNNDAPAGTKITCTGNACPEVEKADATILYTFKDSGVGDVTGFLALDNTNKLIVLSFRGSRSIENWIGNLNFDLIEINDICSGCRGHDGFTSSWRSVADTLRQKVEDAVREHPDYRVVFTGHSLGGALATVAGADLRGNGYDIDVFSYGAPRVGNRAFAEFLTVQTGGTLYRITHTNDIVPRLPPREFGYSHSSPEYWIKSGTLPPVRRRDIVKIEGIDATGGNNQPNIPDIPAHLWYFGLIGTC

SEQ ID NO: 14558 - protein, 268 aa, Thermomyces lanuginosus
EVSQDLFNQFNLFAQYSAAAYCGKNNDAPAGTKITCTGNACPEVEKADATVLYTFKDSGVGDVTGFLALDNTNKLIVLSFRGSRSIENWIGNLNFDLIEINDICSGCRGHDGFTSSWRSVADTLRQKVEDAVREHPDYRVVFTGHSLGGALATVAGADLRGNGYDIDVFSYGAPRVGNRAFAEFLTVQTGGTLYRITHTNDIVPRLPPREFGYSHSSPEYWIKIGTLVPVRRRDIVKIEGIDATGGNNQPNIPDIPAHLWYFGLIGTC

SEQ ID NO: 14559 - protein, 268 aa, Thermomyces lanuginosus
EVSQDLFNQFNLFAQYSAAAYCGKNNDAPAGTKITCTGNACPEVEKADATVLYTFKDSGVGDVTGFLALDNTNKLIVLSFRGSRSIENWIGNLNFDLIEINDICSGCRGHDGFTSSWRSVADTLRQKVEDAVREHPDYRVVFTGHSLGGGLATVAGADLRGNGYDIDVFSYGAPRVGNRAFAEFLTVQTGGTLYRITHTNDIVPRLPPREFGYSHSSPEYWIKSGTLVPVRRRDIVKIEGIDATGGNNQPNIPDIPAHLWYFGLIGTC

SEQ ID NO: 14560 - protein, 268 aa, Thermomyces lanuginosus
EVSRDLFNQFNLFAQYSAAAYCGKNNDAPAGTNITCTGNACPEVEKADATILYSFEDSGVGDVTGFLALDNTNKLIVLSFRGSRSIENWIGNLNFDLKEINDICSGCRGHDGFTSSWRSVADTLRQKVEDAVREHPDYRVVFAGHSLGGALATVAGADLRGDGYDIDVFSYGAPRVGNRAFAEFLTVQTGGTLYRITSTNDIVPRLPPREFGYSHSSPEYWIKSGTLPPVRRRDIVKIEGIDATGGNNQPNIPDIPAHLWYFGLIGTC

SEQ ID NO: 14561 - protein, 268 aa, Thermomyces lanuginosus
EVSQDLFNQFNLFAQYSAAAYCGKNNDAPAGTKITCTGNACPEVEKADATVLYTFKDSGVGDVTGFLALDNTNKLIVLSFRGSRSIENWIGNLNFDLIEINDICSGCRGHDGFTSSWRSVADTLRQKVEDAVREHPDYRVVFTGHSLGGALATVAGADLRGNGYDIDVFSYGAPRVGNRAFAEFLTVQTGGTLYRITLTNDIVPRLPPREFGYSHSSPEYWIKSGTLVPVRRRDIVKIEGIDATGGNNQPNIPDIPAHLWYFGLIGTC

SEQ ID NO: 14562 - protein, 268 aa, Thermomyces lanuginosus
EVSQDLFNQFNLFAQYSAAAYCGKNNDAPAGTKITCTGNACPEVEKADATVLYTFKDSGVGDVTGFLALDNTNKLIVLSFRGSRSIENWIGNLNFDLIEINDICSGCRGHDGFTSSWRSVADTLRQKVEDAVREHPDYRVVFTGHSLGGALATVAGADLRGNGYDIDVFSYGAPRVGNRAFAEFLTVQTGGTLYRITHTNDIVPRLPPREFGYSHSSPEYWIKFGTLVPVRRRDIVKIEGIDATGGNNQPNIPDIPAHLWYFGLIGTC

SEQ ID NO: 14563 - protein, 268 aa, Thermomyces lanuginosus
EVSQDLFNQFNLFAQYSAAAYCQKNNDAPAGTNITCTGNACPEVEKADATFLYSFEDSGVGDVTGFLALDNTNKQIILSFRGSRSIENWIGNLRFDLKEINDICSGCRGHDGFTSSWRSVADTLRQKVEAAVREHPDYRVVFTGHSLGGALATIAWADLRGNGYDIDVFSYGAPRVGNRAFAEFLTQQTGGTLYRITHTNDIVPRLPPREFGYSHSSPEYWIKSGTLVPVTRNDIVKIEGIDATGGNNQPNIPDIPAHLWYFGLIGTC

SEQ ID NO: 14564 - protein, 268 aa, Thermomyces lanuginosus
EVSQDLFNQFNLFAQYSAAAYCSKNNNAPAGTNITCTGNACPEVEKADATFLYSFRDSGVGDVTGFLALDNTNKLIVLSFRGSRSIENWIGNLNFDLIEINDICSGCRGHDGFTSSWFSVADTLRQKVEDAVREHPDYRVVFTGHSLGGALATVAGADLRGNGYDIDVFSYGAPRVGNRAFAEFLTVQTGGTLYRITHTNDIVPRLPPREFGYSHSSPEFWIKSGTLVPVRRRDIVKIEGIDATGGNNQPNIPDIPAHLWYFGLIGTC

SEQ ID NO: 14565 - protein, 268 aa, Thermomyces lanuginosus
EVSQDLFNQFNLFAQYSAAAYCGKNNDAPAGTKITCTGNACPEVEKADATLLYSFKDSGVGDVTGFLARDNTNKLIVLSFRGSRSIENWIGNLNFDLEEINDICSGCRGHDGFTSSWRSVADTLRQKVEDAVREHPDYRVVFTGHSLGGALATVAGADLRGNGYDIDVFSYGAPRVGNRAFAEFLTVQTGGTLYRITHTNDIVPRLPPREFGYSHSSPEYWIKPGTLVPVRRRDIVKIEGIDATGGNNQPNIPDIPAHLWYFGLIGTC

SEQ ID NO: 14566 - protein, 268 aa, Thermomyces lanuginosus
EVSQDLFNQFNLFAQYSAAAYCGKNNDAPAGTKITCTGNACPEVEKADATVLYTFKDSGVGDVTGFLALDNTNKLIVLSFRGSRSIENWIGNLNFDLIEINDICSGCRGHDGFTSSWRSVADTLRQKVEDAVREHPDYRVVFTGHSLGGALATVAGADLRGNGYDIDVFSYGAPRVGNRAFAEFLTVQTGGTLYRITNTNDIVPRLPPREFGYSHSSPEYWIKSGTLVPVRRRDIVKIEGIDATGGNNQPNIPDIPAHLWYFGLIGTC

SEQ ID NO: 14567 - protein, 268 aa, Thermomyces lanuginosus
EVSQDLFNQFNLFAQYSAAAYCGKNNDAPAGTKITCTGNACPEVEKADATILYSFKDSGVGDVTGFLARDNTNKLIVLSFRGSRSIENWIGNLNFDLEEINDICSGCRGHDGFTSSWRSVADTLRQKVEDAVREHPDYRVVFTGHSLGGALATVAGADLRGNGYDIDVFSYGAPRVGNRAFAEFLTVQTGGTLYRITHTNDIVPRLPPREFGYSHSSPEYWIKSGTLVPVRRRDIVKIEGIDATGGNNQPNIPDIPVHLWYFGLIGTC

SEQ ID NO: 14568 - protein, 268 aa, Thermomyces lanuginosus
EVSQDLFNQFNLFAQYSAAAYCGKNNDAPAGTKITCTGNACPEVEKADATILYTFKDSGVGDVTGFLALDNTNKLIVLSFRGSRSIENWIGNLNFDLIEINDICSGCRGHDGFTSSWRSVADTLRQKVEDAVREHPDYRVVFTGHSLGGGLATVAGADLRGNGYDIDVFSYGAPRVGNRAFAEFLTVQTGGTLYRITHTNDIVPRLPPREFGYSHSSPEYWIKSGTLVPVRRRDIVKIEGIDATGGNNQPNIPDIPAHLWYFGLIGTC

SEQ ID NO: 14569 - protein, 268 aa, Thermomyces lanuginosus
EVSQDLFNQFNLFAQYSKAAYCKANNDAPAGTNITCTGNACPEVEKADATFLYSFEDSGVGDVTGFLALDNTNKQIVLSFRGSRSIENWIGNLRFDLKEINDICSGCRGHDGFTSSWRSVADTLRQKVEAAVREHPDYRVVFTGHSLGGALATVAWADLRGNGYDIDVFSYGAPRVGNRAFAEFLTQQTGGTLYRITHTNDIVPRLPPREFGYSHSSPEYWIKSGTLVPVTRNDIVKIEGIDATGGNNQPNIPDIPAHLWYFGLIGTC

SEQ ID NO: 14570 - protein, 268 aa, Thermomyces lanuginosus
EVSQDLFNQFNLFAQYSAAAYCGKNNDAPAGTKITCTGNACPEVEKADATILYTFKDSGVGDVTGFLALDNTNKLIVLSFRGSRSIENWIGNLNFDLIEINDICSGCRGHDGFTSSWRSVADTLRQKVEDAVREHPDYRVVFTGHSLGGALATVAGADLRGNGYDIDVFSYGAPRVGNRAFAEFLTVQTGGTLYRITHTNDIVPRLPPREFGYSHSSPEYWIKIGTLVPVRRRDIVKIEGIDATGGNNQPNIPDIPAHLWYFGLIGTC

SEQ ID NO: 14571 - protein, 268 aa, Thermomyces lanuginosus
EVSQDLFNQFNLFAQYSAAAYCGKNNDAPAGTKITCTGNACPEVEKADATVLYSFKDSGVGDVTGFLARDNTNKLIVLSFRGSRSIENWIGNLNFDLEEINDICSGCRGHDGFTSSWRSVADTLRQKVEDAVREHPDYRVVFTGHSLGGALATVAGADLRGNGYDIDVFSYGAPRVGNRAFAEFLTVQTGGTLYRITHTNDIVPRLPPREFGYSHSSPEYWIKFGTLVPVRRRDIVKIEGIDATGGNNQPNIPDIPAHLWYFGLIGTC

SEQ ID NO: 14572 - protein, 268 aa, Thermomyces lanuginosus
EVSQDLFNQFNLFAQYSAAAYCGKNNDAPAGTQITCTWNACPEVEKADATFLYSFEDSGVGDVTGFLALDNTNKLIVLSFRGSRSIENWITNLNFDLKEINDICSGCRGHDGFISSWRSVADTLRQKVEDAVREHPDYRVVFTGHSLGGALATVAGADLRGNKYDIDVFSYGAPRVGNRAFAEFLTVQTGGTLYRITHTNDIVPRLPPRDFGYSHSSPEYWIKSGTLVPVRRRDIVKIEGIDATGGNNQPNIPDITAHLWYFGLIGTC

SEQ ID NO: 14573 - protein, 268 aa, Thermomyces lanuginosus
EVSQDLFNQFNLFAQYSAAAYCGKNNDAPAGTNITCTGNICPEVEKADATFLYSFRNSGVGDVTGFLALDNTNKLIVLSFRGSRSIENWIGNLNFDLIEINDICSGCRGHDGFTSSWFSVADTLRQKVEDAVREHPDYRVVFTGHSLGGALATVAGADLRGNGYDIDVFSYGAPRVGNRAFAEFLTVQTGGTLYRITHTNDIVPRLPPREFGYSHSSPEYWIKSGTLVPVRRRDIVKIEGIDATGGNNQPNIPDITAHLWYFGLIGTC

SEQ ID NO: 14574 - protein, 268 aa, Thermomyces lanuginosus
EVSQDLFNQFNLFAQYSAAAYCGKNNDAPAGTKITCTGNACPEVEKADATLLYSFKDSGVGDVTGFLARDNTNKLIVLSFRGSRSIENWIGNLNFDLEEINDICSGCRGHDGFTSSWRSVADTLRQKVEDAVREHPDYRVVFTGHSLGGGLATVAGADLRGNGYDIDVFSYGAPRVGNRAFAEFLTVQTGGTLYRITHTNDIVPRLPPREFGYSHSSPEYWIKSGTLVPVRRRDIVKIEGIDATGGNNQPNIPDIPAHLWYFGLIGTC

SEQ ID NO: 14575 - protein, 268 aa, Thermomyces lanuginosus
EVSQDLFNQFNLFAQYSKAAYCQANNDAPAGTNITCTGNACPEVEKADATFLYSFEDSGVGDVTGFLALDNTNKQIILSFRGSRSIENWIGNLNFDLKEINDICSGCRGHDGFTSSWRSVADTLRQKVEAAVREHPDYRVVFTGHSLGGALATIAWADLRGNGYDIDVFSYGAPRVGNRAFAEFLTVQTGGTLYRITHTNDIVPRLPPREFGYSHSSPEYWIKSGTLVPVTRNDIVKIEGIDATGGNNQPNIPDIPAHLWYFGLIGTC

SEQ ID NO: 14576 - protein, 268 aa, Thermomyces lanuginosus
EVSQDLFNQFNLFAQYSAAAYCGKNNDAPAGTNITCTANACPEVEKADATFLYSFEDSGVGDVTGFLALDNTNKLIVLSFRGSRSIENWIADLNFLLQEINDICSGCRGHAGFTSSWRSVADTLRQKVEDAVREHPDYRVVFTGHSLGGALATVAGADLRGNKYDIDVFSYGAPRVGNRAFAEFLTVQTGGTLYRITHTNDIVPRLPPREFGYSHSSPEYWIKSGTLVPVRRRDIVKIEGIDATGGNNQPNIPSITAHLWYFGLIGTC

SEQ ID NO: 14577 - protein, 268 aa, Thermomyces lanuginosus
EVSQDLFNQFNLFAQYSAAAYCGKNNDAPAGTNITCTGNACPEVEKADATFLYSFEDXGVGDVTGFLALDNTNKLIVLSFRGSRSXENWIGNLNFDLKEINDICSGCRGRDGFTSSWRSVADTLRQKVEDAVREHPDYRVVFTGXSLGGALATVAGADLRGNGYDIDVFSYGAPRVGNRAFAEFLTVQTGGTLYRITRTNDIVPRLPPREFGYSHSSPEYWIKSGTLVPVTRNDIVKXCGIDATGGNNQPNIPDIPAHLHYFGLIGTC

SEQ ID NO: 14578 - protein, 268 aa, Thermomyces lanuginosus
EVSQDLFNQFNLFAQYSAAAYCGKNNDAPAGTNITCTGNACPEVEKADATLLYSFRDSGVGDVTGFLALDNTNKLIVLSFRGSRSIENWIADLNFILIEINDICSGCRGHDGFTSSWFSVADTLRQKVEDAVREHPDYRVVFTGHSLGGALATVAGADLRGNGYDIDVFSYGAPRVGNRAFAEFLTVQTGGTLYRITHTNDIVPRLPPREFGYSHSSPEFWIKSGTLVPVRRRDIVKIEGIDAEGGNNQPNIPSIPAHLWYFGAIGTC

SEQ ID NO: 14579 - protein, 268 aa, Thermomyces lanuginosus; identical to SEQ ID NO: 9034

SEQ ID NO: 14580 - protein, 268 aa, Thermomyces lanuginosus
EVSQDLFNQFNLFAQYSAAAYCGKNNDAPAGTNITCTGNACPEVEKADATFLYSFEDSGVGDVTGFLALDNTNKLIVLSFRGTRSITNWILDLNYTPQEINDICSGCRGHDGFTSSWRSVADTLRQKVEDAVREHPDYRVVFTGHSLGGALATVAGADLRGNGYDIDVFSYGAPRVGNRAFAEFLTVQTGGTLYRITHTNDIVPRLPPREFGYSHSSPEYWIKSGTLVPVRRRDIVKIEGIDATGGNNQPNIPDIPAHLWYFGLIGTC

SEQ ID NO: 14581 - protein, 268 aa, Thermomyces lanuginosus
EVSQDLFNQFNLFAQYSAAAYCGKNNDAPAGTNITCTANACPEVEKADATFLYSFEDSGVGDVTGFLALDNTNKLIVLSFRGSRSIENWIADLNFILQEINDICSGCRGHAGFTSSWRSVADTLRQKVEDAVREHPDYRVVFTGHSLGGALATVAGADLRGNKYDIDVFSYGAPRVGNRAFAEFLTVQTGGTLYRITHTNDIVPRLPPREFGYSHSSPEYWIKSGTLVPVRRRDIVKIEGIDATGGNNQPNIPSITAHLWYFGLIGTC

SEQ ID NO: 14582 - protein, 268 aa, Thermomyces lanuginosus
EVSQDLFNQFNLFAQYSAAAYCGKNNRAPAGTNITCTGNACPEVEKADATFLYSFEDSGKGDVTGFLALDNTNKLIVLSFRGSRSVENWIGNLNFDLKEINDICSGCRGHDGFTSSWRSVADTLRQKVEDAVREHPDYRVVFTGHSLGGGLATVAGADLRGNGYDIDVFSYGAPRVGNRAFAEFLTVQTGGTLYRITHTNDIVPRLPPREFGYSHSSPEYWIKSGTGVPVRRRDIVKIEGIDATGGNNQPNIPDIKAHLWYFGLIGTC

SEQ ID NO: 14583 - protein, 268 aa, Thermomyces lanuginosus
EVSVDLFNQFNLFAQYSAAAYCGKNNDAPAGTNITCTGNACPEVEKADATFLYSFEDNGSGDVTGFLALDNTNKLIVLSFRGSRSVENWIGNLNFDLKEINDICSGCRGHDGFTSSWRSVADTLRQKVEDAVREHPDYRVVFTGHSLGGGLATVAGADLRGNGYDIDVFSYGAPRVGNRAFAEFLTVQTGGTLYRITHTNDIVPRLPPREFGYSHSSPEYWIKSGTLVPVRRRDIVKIEGIDATGGNNQPNIPDVPAHLWYFGLIGTC

SEQ ID NO: 14584 - protein, 268 aa, Thermomyces lanuginosus
EVSVDLFNQFNLFAQYSAAAYCGKNNDAPAGTNITCTGNACPEVEKADATFLYSFEDNGSGDVTGFLALDNTNKLIVLSFRGSRSIENWAGNLNFDLKEINDICSGCRGHDGFTSSWRSVADTLRQKVEDAVREHPDYRVVFTGHSLGGGLATVAGADLRGNGYDIDVFSYGAPRVGNRAFAEFLTVQTGGTLYRITHTNDIVPRLPPREFGYSHSSPEYWIKSGTLVPVRRRDIVKIEGIDATGGNNQPNIPDVPAHLWYFGLIGTC

SEQ ID NO: 14585 - protein, 268 aa, Thermomyces lanuginosus
EVSQDLFNQFNLFAQYSAAAYCGKNNDAPAGTNITCTANACPEVEKADATFLYSFEDSGVGDVTGFLALDNTNKLIVLSFRGTRSLENWIADLNFILQEINDICSGCRGHAGFTSSWRSVADTLRQKVEDAVREHPDYRVVFTGHSLGGALATVAGADLRGNGYDIDVFSYGAPRVGNRAFAEFLTVQTGGTLYRITHTNDIVPRLPPREFGYSHSSPEYWIKSGTLVPVRRRDIVVIEGIDATGGNNQPNIPDIPAHLWYFGLIGTC

SEQ ID NO: 14586 - protein, 268 aa, Thermomyces lanuginosus
EVSQDLFNQFNLFAQYSAAAYCGKNNDAPAGTNITCTGNACPEVEKADATFLYSFEDSGKGDVTGFLALDNTNKLIVLSFRGSRSVENWIGNLNFDLKEINDICSGCRGHDGFTSSWRSVADTLRQKVEDAVREHPDYRVVFTGHSLGGGLATVAGADLRGNGYDIDVFSYGAPRVGNRAFAEFLTVQTGGTLYRITHTNDIVPRLPPREFGYSHSSPEYWINSSTLVPVRRRDIVKIEGIDATGGNNQPNIPDIKAHLWYFGLIGTC

SEQ ID NO: 14587 - protein, 268 aa, Thermomyces lanuginosus
EVSQDLFNQFNLFAQYSAAAYCGKNNRAPAGTNITCTANACPEVEKADATFLYSFEDSGVGDVTGFLALDNTNKLIVLSFRGSRSIENWIADLNFILQEINDICSGCRGHDGFTSSWRSVADTLRQKVEDAVREHPDYRVVFTGHSLGGALATVAGADLRGNKYDIDVFSYGAPRVGNRAFAEFLTVQTGGTLYRITHTNDIVPRLPPREFGYSHSSPEYWIKSGTLVPVRRRDIVKIEGIDATGGNNQPNIPSITAHLWYFGLIGTC

SEQ ID NO: 14588 - protein, 268 aa, Thermomyces lanuginosus
EVSQDLYNQFKLFAHYAAAAYCGKNNDAPAGTNITCTGNACPEVEKADATFIYSFEDSGVGDVTGFLALDNTNKLIVLSFRGSRSIENWIANLNFDLKEINDICSGCRGHDGFYNSWRSVADTLRQKVEDAVREYPDYRVVFTGHSLGGALATVAGADLRGNGYDIDVFSYGAPRVGNRAFAEFLTVQTGGTLYRITHTNDIVPRLPPREFGYSHSSPEYWIKSGTLVPVTRNDIVVIEGIDATGGNNQPNIPDIPAHLWYFGLIGTC

SEQ ID NO: 14589 - protein, 268 aa, Thermomyces lanuginosus
EVSQDLFNQFNLFAQYSAAAYCGKNNDAPAGTNITCTANACPEVEKADATFLYSFEDSGVGDVTGFLALDNTNKLIVLSFRGSRTIENWIADLNFLLKEINDICSGCRGHAGFTSSWRSVADTLRQKVEDAVREHPDYRVVFTGHSLGGALATVAGADLRGNKYDIDVFSYGAPRVGNRAFAEFLTVQTGGTLYRITHTNDIVPRLPPREFGYSHSSPEYWIKSGTLVPVRRRDIVKIEGIDATGGNNQPNIPSITAHLWYFGLIGTC

SEQ ID NO: 14590 - protein, 268 aa, Synthetic construct
EVSQDLFNQFNLFAQYSAAAYCGKNNDAPAGTNITCTGNACPEVEKADATFLYSFEDSGVGDVTGFLALDNTNKLIVLSFRGSRSIENWIGNLNFDLKEINDICSGCRGHDGFTSSWRSVAHTLSQKVQDAEREHPDYRVLFTGHSLVGALATVAGADLRGNGYDIDVFSYGAPRVGNRAFAEFLTVQTGGTLYRITHTNDIVPRLPPREFGYSHSSPEYWIKSGTLVPVTRNANVKIEGIDATGGNNQPNIPDIPAHLWYFGLIGTC

SEQ ID NO: 14591 - protein, 267 aa, Thermomyces lanuginosus
EVSQDLFNQFNLFAQYSAAAYCGKNNRAPAGTNITCTANACPEVEKADATFLYSFEDSGVGDVTGFLALDNTNKLIVLSFRGSRSIENWIGNLNFELKEINDICSGCRGHAGFTSSWRSVADTLRQKVEDAVREHPDYRVVFTGHSLGGALATVAGADLRGNKYDIDVFSYGAPRVGNRAFAEFLTVQTGGTLYRITHTNDIVPRLPPREFGYSHSSPEYWISGTLVPVRRRDIVKIEGIDATGGNNQPNIPSITAHLWYFGLIGTC

SEQ ID NO: 14592 - protein, 267 aa, Thermomyces lanuginosus
EVSQDLFNQFNLFAQYSAAAYCGKNNDAPAGTNITCTGNACPEVEKADATILYSFEDSGVGDVTGFLALDNTNKLIVLSFRGSRSIENWIGNLNFDLKEINDICSGCRGHDGFTSSWRSVADTLRQKVEDAVREHPDYRVVFTGHSLGGALATVAGADLRGNGYDIDVFSYGAPRVGNRAFAEFLTVQTGGTLYRITNTNDCVPRLPPRQFGYSHSSPEYWIKSGTLPPVRRRDIVKIEGIDATGGNNQPNIDISAHLWYFGLIGTC

SEQ ID NO: 14593 - protein, 267 aa, Thermomyces lanuginosus
VSQDLFNQFRLFAQYSAAAYCGKNNDAPAGTQITCTANACPEVEKADATFLYSFEDSGVGDVTGFLALDNTNKLIVLSFRGSRSIENWITNLNFDLKEINDICSGCRGHAGFTSSWRSVADTLRQKVEDAVREHPDYRVVFTGHSLGGALATVAGADLRGNPYDIDVFSYGAPRFGNRAFAEFLTVQTGGTLYRITHTNDIVPRLPPREFGYSHSSPEYWIKSGTLVPVRRRDIVKIEGIDATGGNNQPNIPDIPAHLWYFGLIGTC

SEQ ID NO: 14594 - protein, 267 aa, Thermomyces lanuginosus
VSQDLFNQFNLFAQYSAAAYCGKNNDAPAGTQITCTANACPEVEKADATFLYSFEDSGVGDVTGFLALDNTNKLIVLSFRGSRSIENWITNLNFDLKEINDICSGCRGHDGFTSSWRSVADTLRQKVEDAVREHPDYRVVFTGHSLGGALATVAGADLRGNPYDIDVFSYGAPRFGNRAFAEFLTVQTGGTLYRITHTNDIVPRLPPREFGYSHSSPEYWIKSGTFVPVRRRDIVKIEGIDATGGNNQPNIPSIPAHLWYFGLIGTC

SEQ ID NO: 14595 - protein, 267 aa, Thermomyces lanuginosus
VSQDLFNQLRLFAQYSAAAYCGKNNDAPAGTQITCTANACPEVEKADATFLYSFEDSGVGDVTGFLALDNTNKLIVLSFRGSRSIENWITNLNFDLKEINDICSGCRGHDGFTSSWRSVADTLRQKVEDAVREHPDYRVVFTGHSLGGALATVAGADLRGNPYDIDVFSYGAPRFGNRAFAEFLTVQTGGTLYRITHTNDIVPRLPPREFGYSHSSPEYWIKSGTLVPVRRRDIVKIEGIDATGGNNQPNIPDIPAHLWYFGLIGTC

SEQ ID NO: 14596 - protein, 267 aa, Thermomyces lanuginosus
VSQDLFNQFNLFAQYSAAAYCGKNNKAPAGTNITCTGNACPEVEKADATFLYSFEDSGKGDVTGFLALDNTNKLIVLSFRGSRSVENWIGNLNFDLKEINDICSGCRGHDGFTSSWRSVADTLRQKVEDAVREHPDYRVVFTGHSLGGGLATVAGADLRGNGYDIDVFSYGAPRVGNRAFAEFLTVQTGGTLYRITHTNDIVPRLPPREFGYSHSSPEYWIKSGTGVPVRRRDIVKIEGIDATGGNNQPNIPDIKAHLWYFGLIGTC

SEQ ID NO: 14597 - protein, 268 aa, Thermomyces lanuginosus
DVSQDLFNQFNLFAQYSAAAYCGKNNDAPAGTQITCTANACPEVEKADATFLYSFEDSGVGDVTGFLALDNTNKLIVLSFRGSRSIENWITNLRFDLKEINDICSGCRGHAGFTSSLRSVADTLRQKVEDAVREHPDYRVVFTGHSLGGALATVAGADLRGNGYDIDVFSYGAPRWGNRAFAEFLTVQTGGTLYRITHTNDIVPRLPPREFGYSHSSPEYWIKSGTLVPVRRRDIVKIEGIDATGGNNQPNIPDIPAHLWYFGLIGTC

SEQ ID NO: 14598 - protein, 268 aa, Thermomyces lanuginosus
EVSQDLFNQFNLFAQYSAAAYCGKNNRAPAGTNITCTANACPEVEKADATFLYSFEDSGVGDVTGFLALDNTNKLIVLSFRGSRSIENWIGNLNFELKEINDICSGCRGHAGFTSSWRSVADTLRQKVEDAVREHPDYRVVFTGHSLGGALATVAGADLRGNKYDIDVFSYGAPRVGNRAFAEFLTVQTGGTLYRITHTNDIVPRLPPREFGYSHSSPEYWIKYGTLVPVRRRDIVKIEGIDATGGNNQPNIPSITAHLWYFGLIGTC

SEQ ID NO: 14599 - protein, 268 aa, Thermomyces lanuginosus
EVSQDLFNQFNLFAQYSAAAYCGKNNRAPAGTNITCTANACPEVEKADATFLYSFEDSGVGDVTGFLALDNTNKLIVLSFRGSRSIENWIGNLNYELKEINDICSGCRGHAGFTSSWRSVADTLRQKVEDAVREHPDYRVVFTGHSLGGALATVAGADLRGNKYDIDVFSYGAPRVGNRAFAEFLTVQTGGTLYRITHTNDIVPRLPPREFGYSHSSPEYWIKSGTLVPVRRRDIVKIEGIDATGGNNQPNIPSITAHLWYFGLIGTC

SEQ ID NO: 14600 - protein, 268 aa, Thermomyces lanuginosus
EVSQDLFNQFNLFAQYSAAAYCGKNNRAPAGTNITCTANACPEVEKADATFLYSFEDSGVGDVTGFLALDNTNKLIVLSFRGSRSIENWIGNLNFELIEINDICSGCRGHAGFTSSWRSVADTLRQKVEDAVREHPDYRVVFTGHSLGGALATVAGADLRGNKYDIDVFSYGAPRVGNRAFAEFLTVQTGGTLYRITHTNDIVPRLPPREFGYSHSSPEYWIKSGTLVPVRRRDIVKIEGIDATGGNNQPNIPSITAHLWYFGLIGTC

SEQ ID NO: 14601 - protein, 268 aa, Thermomyces lanuginosus
EVSQDLFNQFNLFAQYSAAAYCSKNNDAPAGTNITCTGNACPEVEKADATILYSFRDSGVGDVTGFLALDNTNKLIVLSFRGSRSIENWIGNLNFDLIEINDICSGCRGHDGFTSSWFSVADTLRQKVEDAVREHPDYRVVFTGHSLGGALATVAGADLRGNGYDIDVFSYGAPRVGNRAFAEFLTVQTGGTLYRITHTNDIVPRLPPREFGYSHSSPEFWIKSGTLVPVRRRDIVKIEGIDAEGGNNQPNIPDIPAHLWYFGLIGTC

SEQ ID NO: 14602 - protein, 268 aa, Thermomyces lanuginosus
EVSQDLFNQFNLFAQYSAAAYCGKNNRAPAGTQITCTGNACPEVEKADATFLYSFEDSGVGDVTGFLALDNTNKLIVLSFRGSRSIENWIGNLNFDLKEINDICSGCRGHDGFTSSIRSVADTLRQKVEDAVREHPDYRVVFTGHSLGGALATVAGADLRGNGYDIDVFSYGAPRQGNRAFAEFLTVQTGGTLYRITHTNDIVPRLPPREFGYSHSSPEYWIKSGTGVPVRRRDIVKIEGIDATGGNNRPNIPSIPAHLWYFGLIGTC

SEQ ID NO: 14603 - protein, 268 aa, Thermomyces lanuginosus
EVSQDLHNQFNLFAQYSAAAYCGKNNRAPAGTNITCTANACPEVEKADATFLYSFEDSGVGDVTGFLALDNTNKLIVLSFRGSRSIENWIGNLNFELKEINDICSGCRGHAGFTSSWRSVADTLRQKVEDAVREHPDYRVVFTGHSLGGALATVAGADLRGNKYDIDVFSYGAPRVGNRAFAEFLTVQTGGTLYRITHTNDIVPRLPPREFGYSHSSPEYWIKSGTLVPVRRRDIVKIEGIDATGGNNQPNIPSITAHLWYFGLIGTC

SEQ ID NO: 14604 - protein, 268 aa, Thermomyces lanuginosus
EVSQDLFNQFNLFAQYSAAAYCGKNNRAPAGTNITCTANACPEVEKADATLLYSFEDSGVGDVTGFLALDNTNKLIVLSFRGSRSIENWIGNLNFELKEINDICSGCRGHAGFTSSWRSVADTLRQKVEDAVREHPDYRVVFTGHSLGGALATVAGADLRGNKYDIDVFSYGAPRVGNRAFAEFLTVQTGGTLYRITHTNDIVPRLPPREFGYSHSSPEYWIKSGTLVPVRRRDIVKIEGIDATGGNNQPNIPSITAHLWYFGLIGTC

SEQ ID NO: 14605 - protein, 268 aa, Thermomyces lanuginosus
EVSQDLFNQFNLFAQYSAAAYCGKNNRAPAGTNITCTANACPEVEKADATFLYSFEDSGVGDVTGFLALDNTNKLIVLSFRGSRSIENWIGNLNFELDEINDICSGCRGHAGFTSSWRSVADTLRQKVEDAVREHPDYRVVFTGHSLGGALATVAGADLRGNKYDIDVFSYGAPRVGNRAFAEFLTVQTGGTLYRITHTNDIVPRLPPREFGYSHSSPEYWIKSGTLVPVRRRDIVKIEGIDATGGNNQPNIPSITAHLWYFGLIGTC

SEQ ID NO: 14606 - protein, 268 aa, Thermomyces lanuginosus
EVSQDLFNQFNLFAQYSAAAYCGKNNRAPAGTNITCTANACPEVEKADATVLYSFEDSGVGDVTGFLALDNTNKLIVLSFRGSRSIENWIGNLNFELKEINDICSGCRGHAGFTSSWRSVADTLRQKVEDAVREHPDYRVVFTGHSLGGALATVAGADLRGNKYDIDVFSYGAPRVGNRAFAEFLTVQTGGTLYRITHTNDIVPRLPPREFGYSHSSPEYWIKSGTLVPVRRRDIVKIEGIDATGGNNQPNIPSITAHLWYFGLIGTC

SEQ ID NO: 14607 - protein, 268 aa, Thermomyces lanuginosus
EVSQDLFNQFNLFAQYSAAAYCSKNNNAPAGTNITCTGNACPEVEKADATFLYSFRDSGVGDVTGFLALDNTNKLIVLSFRGSRSIENWIGNLNFDLIEINDICSGCRGHDGFTSSWFSVADTLRQKVEDAVREHPDYRVVFTGHSLGGALATVAGADLRGNGYDIDVFSYGAPRVGNRAFAEFLTVQTGGTLYRITHTNDIVPRLPPREFGYSHSSPEFWIKSGTLVPVRRRDIVKIEGIDAEGGNNQPNIPDIPAHLWYFGLIGTC

SEQ ID NO: 14608 - protein, 268 aa, Thermomyces lanuginosus
EVSQDLFNQFNLFAQYSAAAYCGKNNDAPAGTKITCTGNACPEVEKADATLLYSFEDSGVGDVTGFLALDNTNKLIVLSFRGSRSIENWIGNLNFDLEEIDDICSGCRGHDGFTSSWRSVADTLRQKVEDAVREHPDYRVVFTGHSLGGALATVAGADLRGNGYDIDVFSYGAPRVGNRAFAEFLTVQTGGTLYRITSTNDIVPRLPPRKFGYSHSSPEYWIKPGTLVPVRRRDIVKIEGIDATGGNNQPNIPDIPAHLWYFGLIGTC

SEQ ID NO: 14609 - protein, 268 aa, Thermomyces lanuginosus
EVSQDLFNQFNLFAQYSAAAYCGKNNRAPAGTNITCTANACPEVEKADATFLYSFEDSGVGDVTGFLALDNTNKLIVLSFRGSRSIENWIGNLNFELKEINDICSGCRGHAGFTSSWRSVADTLRQKVEDAVREHPDYRVVFTGHSLGGALATVAGADLRGNKYDIDVFSYGAPRVGNRAFAEFLTVQTGGTLYRITHTNDIVPRLPPREFGYSHSSPEYWIKSGTLVPVRRRDIVKIEGIDATGGNNQPNIPSITHHLWYFGLIGTC

SEQ ID NO: 14610 - protein, 268 aa, Thermomyces lanuginosus
EVSQDLFNQFNLFAQYSAAAYCGKNNRAPAGTNITCTANACPEVEKADATFLYSFEDSGVGDVSGFLALDNTNKLIVLSFRGSRSIENWIGNLNFELKEINDICSGCRGHAGFTSSWRSVADTLRQKVEDAVREHPDYRVVFTGHSLGGALATVAGADLRGNKYDIDVFSYGAPRVGNRAFAEFLTVQTGGTLYRITHTNDIVPRLPPREFGYSHSSPEYWIKSGTLVPVRRRDIVKIEGIDATGGNNQPNIPSITAHLWYFGLIGTC

SEQ ID NO: 14611 - protein, 268 aa, Thermomyces lanuginosus
EVSQDLFNQFKLFAQYSAAAYCQKNNDAPAGTNITCTGNACPEVEKADATFLYSFKDSGVGDVTGFLALDNTNKRIVLSFRGSRSIENWIGNLNFDLKEINDICSGCRGHAGFTSSWRSVADTLRQKVEAAVREHPDYRVVFTGHSLGGALATIAWADLRGNGYDIDVFSYGAPRVGNRAFAEFLTNQTGGTLYRITHTNDIVPRLPPREFGYSHSSPEYWIKSGTLVPVTRNDIVKIEGIDATGGNNQPNIPDIPAHLWYFGRIGTC

SEQ ID NO: 14612 - protein, 268 aa, Thermomyces lanuginosus
EVSQDLFNQFNLFAQYSKAAYCQANNDAPAGTNITCTGNACPEVEKADATFLYSFEDSGVGDVTGFLALDNTNKRIVLSFRGSRSIENWIGNLRFDLKEINDICSGCRGHDGFTSSWRSVADTLRQKVEAAVREHPDYRVVFTGHSLGGALATIAWADLRGNGYDIDVFSYGAPRVGNRAFAEFLTNQTGGTLYRITHTNDIVPRLPPREFGYSHSSPEYWIKSGTLVPVTRNDIVKIEGIDATGGNNQPNIPDIPAHLWYFGLIGTC

SEQ ID NO: 14613 - protein, 268 aa, Thermomyces lanuginosus
EVSQDLFNQFNLFAQYSAAAYCGKNNRAPAGTNITCTANACPEVEKADATFLYSFEDSGVGDVTGFLALDNTNKLIVLSFRGSRSIENWIGNLNFELKEINDICSGCRGHAGFTSSWRSVADTLRQKVEDAVREHPDYRVVFTGHSLGGALATVAGADLRGNKYDIDVFSYGAPRVGNRAFAEFLTVQTGGTLYRITHTNDIVPRLPPRQFGYSHSSPEYWIKSGTLVPVRRRDIVKIEGIDATGGNNQPNIPSITAHLWYFGLIGTC

SEQ ID NO: 14614 - protein, 268 aa, Thermomyces lanuginosus
EVSQDLFNQFNLFAQYSAAAYCGKNNRAPAGTNITCTANACPEVEKADATFLYSFEDSGVGDVTGFLALDNTNKLIVLSFRGSRSIENWIGKLNFTLKEINDICSGCRGHAGFTSSWRSVADTLRQKVEDAVREHPDYRVVFTGHSLGGALATVAGADLRGNKYDIDVFSYGAPRVGNRAFAEFLTVQTGGTLYRITHTNDIVPRLPPREFGYSHSSPEYWIKSGTLVPVRRRDIVKIEGIDATGGNNQPNIPSITAHLWYFGLIGTC

SEQ ID NO: 14615 - protein, 268 aa, Thermomyces lanuginosus
EVSQDLFNQFNLFAQYSAAAYCGKNNRAPAGTNITCTANACPEVEKADATFLYSFEDSGVGDVTGFLALDNTNKLIVLSFRGSRSIKNWIGNLNFELKEINDICSGCRGHAGFTSSWRSVADTLRQKVEDAVREHPDYRVVFTGHSLGGALATVAGADLRGNKYDIDVFSYGAPRVGNRAFAEFLTVQTGGTLYRITHTNDIVPRLPPREFGYSHSSPEYWIKSGTLVPVRRRDIVKIEGIDATGGNNQPNIPSITAHLWYFGLIGTC

SEQ ID NO: 14616 - protein, 268 aa, Thermomyces lanuginosus
EVSQDLFNQFNLFAQYSAAAYCGKNNRAPAGTNITCTANACPEVEKADATFLYSFEDSGVGDVTGFLALDNTNKLIVLSFRGSRSIENWIGNLNFELKEINDICSGCRGHAGFTSSWRSVADTLRQKVEDAVREHPDYRVVFTGHSLGGALATVAGADLRGNKYDIDVFSYGAPRVGNRAFAEFLTVQTGGTLYRITHTNDGVPRLPPREFGYSHSSPEYWIKSGTLVPVRRRDIVKIEGIDATGGNNQPNIPSITAHLWYFGLIGTC

SEQ ID NO: 14617 - protein, 268 aa, Thermomyces lanuginosus
EVSQDLFNQFNLFAQYSAAAYCGKNNRAPAGTQITCTANACPEVEKADATFLYSFEDSGVGDVTGFLALDNTNKLIVLSFRGSRSIENWIGNLNFELKEINDICSGCRGHAGFTSSWRSVADTLRQKVEDAVREHPDYRVVFTGHSLGGALATVAGADLRGNKYDIDVFSYGAPRVGNRAFAEFLTVQTGGTLYRITHTNDIVPRLPPREFGYSHSSPEYWIKSGTLVPVRRRDIVKIEGIDATGGNNQPNIPSITAHLWYFGLIGTC

SEQ ID NO: 14618 - protein, 268 aa, Thermomyces lanuginosus
EVSQDLFNQFKLFAQYSAAAYCQKNNSAPAGTNITCTGNACPEVEKADATFLYSFKDSGVGDVTGFLALDNTNKRIVLSFRGSRSIENWIGNLNFDLKEINDICSGCRGHDGFTSSWRSVADTLRQKVEAAVREHPDYRVVFTGHSLGGALATIAWADLRGNGYDIDVFSYGAPRVGNRAFAEFLTVQQGGTLYRITHTNDIVPRLPPREFGYSHSSPEYWIKSGTLVPVTRNDIVKIEGIDATGGNNQPNIPDIPAHLWYFGRIGTC

SEQ ID NO: 14619 - protein, 268 aa, Thermomyces lanuginosus
EVSQDLFNQFNLFAQYSAAAYCGKNNRAPAGTNITCTANACPEVEKADATFLYSFEDSGVGDVTGFLALDNTNKLIVLSFRGSRSIENWIGNLNFELKEINDICSGCRGHAGFTSSWRSVADTLRQKVEDAVREHPDYRVVFTGHSLGGALATVAGADLRGNKYDIDVFSYGAPRVGNRAFAEFLTVQTGGTLYRITHTNDIVPRLPPREFGYSHSSPEYWIKSGTLVPVRRRDIVKIEGIDATGGNNQPNIPSITAHLLYFGLIGTC

SEQ ID NO: 14620 - protein, 268 aa, Thermomyces lanuginosus
EVSQDLFNQFRLFAQYSAAAYCGKNNDAPAGTQITCTANACPEVEKADATFLYSFEDSGVGDVTGFLALDNTNKLIVLSFRGSRSIENWITNLNFDLKEINDICSGCRGHDGFTLSWRSVADTLRQKVEDAVREHPDYRVVFTGHSLGGALATVAGADLRGNKYDIDVFSYGAPRVGNRAFAEFLTVQTGGTLYRITHTNDIVPRLPPREFGYSHSSPEYWIKSGTLVPVRRRDIVKIEGIDATGGNNQPNIPSITAHLWYFGLIGTC

SEQ ID NO: 14621 - protein, 268 aa, Thermomyces lanuginosus
EVSQDLFNQFNLFAQYSAAAYCGKNNDAPAGTNITCTGNACPEVEKADATLLYSFRNSGVGDVTGFLALDNTNKLIVLSFRGSRSIENWIGNLNFDLIEINDICSGCRGHDGFTSSWFSVADTLRQKVEDAVREHPDYRVVFTGHSLGGALATVAGADLRGNSYDIDVFSYGAPRVGNRAFAEFLTVQTGGTLYRITHTNDIVPRLPPREFGYSHSSPEYWIKSGTLVPVRRRDIVKIEGIDATGGNNQPNIPDITAHLWYFGLIGTC

SEQ ID NO: 14622 - protein, 268 aa, Thermomyces lanuginosus
EVSQDLFNQFNLFAQYSAAAYCSKNNNAPAGTNITCTGNACPEVEKADATFLYSFRDSGVGDVTGFLALDNTNKLIVLSFRGSRSIENWIGNLNFDLIEINDICSGCRGHDGFTSSWFSVADTLRQKVEDAVREHPDYRVVFTGHSLGGALATVAGADLRGNGYDIDVFSYGAPRVGNRAFAEFLTVQTGGTLYRITHTNDIVPRLPPREFGYSHSSPEFWIKSGTLVPVRRRDIVKIEGIDATGGNNQPNIPDITAHLWYFGLIGTC

SEQ ID NO: 14623 - protein, 268 aa, Thermomyces lanuginosus
EVSQDLFNQFRLFAQYSAAAYCGKNNDAPAGTQITCTANACPEVEKADATFLYSFEDSGVGDVTGFLALDNTNKLIVLSFRGSRSIENWITNLNFDLKEINDICSGCRGHDGFTSSWRSVADTLRQKVEDAVREHPDYRVVFTGHSLGGALATVARADLRGNKYDIDVFSYGAPRTGNRAFAEFLTVQTGGTLYRITHTNDIVPRLPPREFGYSHSSPEYWIKSGTLVPVRRRDIVKIEGIDATGGNNQPNIPSIPAHLWYFGLIGTC

SEQ ID NO: 14624 - protein, 268 aa, Thermomyces lanuginosus
EVSQDLFNQFNLFAQYSAAAYCSKNNNAPAGTNITCTGNICPEVEKADATILYSFRDSGEGDVTGFLALDNTNKLIVLSFRGSRSIENWIGNLNFDLKEINDICSGCRGHDGFTSSWFSVADTLRQKVEDAVREHPDYRVVFTGHSLGGALATVAGADLRGNGYDIDVFSYGAPRVGNRAFAEFLTVQTGGTLYRITHTNDIVPRLPPREFGYSHSSPEYWIKSGTLVPVRRRDIVKIEGIDATGGNNQPNIPDIPAHLWYFGLIGTC

SEQ ID NO: 14625 - protein, 268 aa, Thermomyces lanuginosus
EVSQDLFNQFNLFAQYSAAAYCGKNNRAPAGTNITCTANACPEVEKADATFLYSFEDSGVGDVTGFLALDNTNKLIVLSFRGSRSIENWIGNLNFELKEINDICSGCRGHAGFTSSWRSVADTLRQKVEDAVREHPDYRVVFTGHSLGGALATVAGADLRGNKYDIDVFSYGAPRVGNRAFAEFLTVQTGGTLYRITHTNDIVPRLPPREFGYSHSSPEYWIKSGTLVPVRRRDIVKIEGIDATGGNNQPNTPSITAHLWYFGLIGTC

SEQ ID NO: 14626 - protein, 268 aa, Thermomyces lanuginosus
EVSQDLFNQFNLFAQYSAAAYCGKNNRAPAGTNITCTANACPEVEKADATFLYSFEDSGVGDVTGFLALDNTNKLIVLSFRGSRSIENWIGNLNFELKEINDICSGCRGHAGFTSSWRSVADTLRQKVEDAVREHPDYRVVFTGHSLGGALATVAGADLRGNKYDIDVFSYGAPRVGNRAFAEFLTVQTGGTLYRITHTNDIVPRLPPREFGYSHSSPEYWIKSGTLVPVRRRDIVKIEGIDATGGNNQPNIPSITAHYWYFGLIGTC

SEQ ID NO: 14627 - protein, 268 aa, Thermomyces lanuginosus
EVSQDLFNQFNLFAQYSAAAYCGKNNDAPAGTNITCTGNICPEVEKADATLLYSFRNSGVGDVTGFLALDNTNKLIVLSFRGSRSIENWIGNLNFDLIEINDICSGCRGHDGFTSSWFSVADTLRQKVEDAVREHPDYRVVFTGHSLGGALATVAGADLRGNSYDIDVFSYGAPRVGNRAFAEFLTVQTGGTLYRITHTNDIVPRLPPREFGYSHSSPEYWIKSGTLVPVRRRDIVKIEGIDATGGNNQPNIPDIPAHLWYFGLIGTC

SEQ ID NO: 14628 - protein, 268 aa, Thermomyces lanuginosus
EVSQDLFNQFNLFAQYSAAAYCGKNNNAPAGTNITCTGNACPEVEKADATILYSFRDSGVGDVTGFLALDNTNKLIVLSFRGSRSIENWIGNLNFDLIEINDICSGCRGHDGFTSSWFSVADTLRQKVEDAVREHPDYRVVFTGHSLGGALATVAGADLRGNGYDIDVFSYGAPRVGNRAFAEFLTVQTGGTLYRITHTNDIVPRLPPREFGYSHSSPEYWIKSGTLVPVRRRDIVKIEGIDAEGGNNQPNIPDITAHLWYFGLIGTC

SEQ ID NO: 14629 - protein, 268 aa, Thermomyces lanuginosus
EVSQDLFNQFNLFAQYSAAAYCGKNNRAPAGTNITCTANACPEVEKADATFLYSFEDSGVGDVTGFLALDNTNKLIVLSFRGSRSIENWIGNLNFELKEINDICSGCRGHAGFTSSWRSVADTLRQKVEDAVREHPDYRVVFTGHSLGGALATVAGADLRGNKYDIDVFSYGAPRVGNRAFAEFLTVQTGGTLYRITGTNDIVPRLPPREFGYSHSSPEYWIKSGTLVPVRRRDIVKIEGIDATGGNNQPNIPSITAHLWYFGLIGTC

SEQ ID NO: 14630 - protein, 268 aa, Thermomyces lanuginosus
EVSQDLFNQFNLFAQYSAAAYCGKNNRAPAGTQITCTANACPEVEKADATFLYSFEDSGVGDVTGFLALDNTNKLIVLSFRGSRSIENWITNLNFDLKEINDICSGCRGHAGFTSSWRSVADTLRQKVEDAVREHPDYRVVFTGHSLGGALATVAGADLRGNKYDIDVFSYGAPRVGNRAFAEFLTVQTGGTLYRITHTNDIVPRLPPREFGYSHSSPEYWIKSGTLVPVRRRDIVKIEGIDATGGNNQPNIPSITAHLWYFGLIGTC

SEQ ID NO: 14631 - protein, 268 aa, Thermomyces lanuginosus
EVSQDLFNQFNLFAQYSAAAYCGKNNRAPAGTNITCTANACPEVEKADATFLYSFEDSGVGDVTGFLALDNTNKLIVLSFRGSRSIENWIGNLNFELKEINDICSGCRGHAGFTSSWRSVADTLRQKVEDAVREHPDYRVVFTGHSLGGALATVAGADLRGNKYDIDVFSYGAPRVGNRAFAEFLTVQTGGTLYRITITNDIVPRLPPREFGYSHSSPEYWIKSGTLVPVRRRDIVKIEGIDATGGNNQPNIPSITAHLWYFGLIGTC

SEQ ID NO: 14632 - protein, 268 aa, Thermomyces lanuginosus
EVSQDLFNQFNLFAQYSAAAYCGKNNDAPAGTNITCTGNACPEVEKADATFLYSFEDTGKGDVTGFLALDNTNKLIVLSFRGSRSVENWIGNLNFDLKEINAICSGCRGHDGFTSSWRSVADTLRQKVEDAVREHPDYRVVFTGHSLGGGLATVAGADLRGNGYDIDVFSYGAPRVGNRAFAEFLTVQTGGTLYRITHTNDIVPRLPPREFGYSHSSPEYWIKSGTGVPVRRRDIVKIEGIDATGGNNQPNIPDIKAHLWYFGLIGTC

SEQ ID NO: 14633 - protein, 268 aa, Thermomyces lanuginosus
EVSQDLFNQFNLFAQYSAAAYCQKNNDAPAGTNITCTGNACPEVEKADATFLYSFEDSGVGDVTGFLALDNTNKRIVLSFRGSRSIENWIGNLRFDLKEINDICSGCRGHAGFTSSWRSVADTLRQKVEAAVREHPDYRVVFTGHSLGGALATIAWADLRGNGYDIDVFSYGAPRVGNRAFAEFLTNQQGGTLYRITHTNDIVPRLPPREFGYSHSSPEYWIKSGTLVPVTRNDIVKIEGIDATGGNNQPNIPDIPAHLWYFGRIGTC

SEQ ID NO: 14634 - protein, 268 aa, Thermomyces lanuginosus
EVSQDLFNQFNLFAQYSAAAYCGKNNRAPAGTNITCTANACPEVEKADATFLYSFEDSGVGDVTGFLALDNTNKLIVLSFRGSRSIENWIGNLNFELKEINDICSGCRGHAGFTSSWRSVADTLRQKVEDAVREHPDYRVVFTGHSLGGALATVAGADLRGNKYDIDVFSYGAPRVGNRAFAEFLTVQTGGTLYRITHTKDIVPRLPPREFGYSHSSPEYWIKSGTLVPVRRRDIVKIEGIDATGGNNQPNIPSITAHLWYFGLIGTC

SEQ ID NO: 14635 - protein, 268 aa, Thermomyces lanuginosus
EVSQDLFNQFNLFAQYSAAAYCGKNNRAPAGTNITCTANACPEVEKADATFLYSFEDSGVGDVTGFLALDNTNKLIVLSFRGSRSIENWIGNLNFELKEINDICSGCRGHAGFTSSWRSVADTLRQKVEDAVREHPDYRVVFTGHSLGGALATVAGADLRGNKYDIDVFSYGAPRVGNRAFAEFLTVQTGGTLYRITHTNDIVPRLPPREFGYSHSSPEYWIKSGTLPPVRRRDIVKIEGIDATGGNNQPNIPSITAHLWYFGLIGTC

SEQ ID NO: 14636 - protein, 268 aa, Thermomyces lanuginosus
EVSQDLFNQFNLFAQYSKAAYCQKNNSAEAGTNITCTGNACPEVEKADATFLYSFEDSGVGDVTGFLALDNTNKQIILSFRGSRSIENWIGNLNFDLKEINDICSGCRGHDGFTSSWRSVADTLRQKVEDAVREFPDYRVVFTGHSLGGALATVAWADLRGNGYDIDVFSYGAPRVGNRAFAEFLTTQTGGTLYRITHTNDIVPRLPPREFGYSHSSPEYWIKSGTLVPVTRNDIVKIEGIDATGGNNQPNIPDIPAHLWYFGLIGTC

SEQ ID NO: 14637 - protein, 268 aa, Thermomyces lanuginosus
EVSVDLFNQFNLFAQYSAAAYCGKNNDAPAGTNITCTGNACPEVEKADATFLYSFEDNGSGDVTGFLALDNTNKLIVLSFRGSRSVENWAGNLNFDLKEINDICSGCRGHDGFTSSWRSVADTLRQKVEDAVREHPDYRVVFTGHSLGGGLATVAGADLRGNGYDIDVFSYGAPRVGNRAFAEFLTVQTGGTLYRITHTNDIVPRLPPREFGYSHSSPEYWIKSGTLVPVRRRDIVKIEGIDATGGNNLPNIPDIPAHLWYFGLIGTC

SEQ ID NO: 14638 - protein, 268 aa, Thermomyces lanuginosus
EVSQDLFNQFNLFAQYSAAAYCGKNNVAPAGTQITCTGNACPEVEKADATFLYSFEDSGVGDVTGFLALDNTNKLIVLSFRGSRSIENWIANLRFDLKEINDICSGCRGHAGFTSSWRSVADTLRQKVEDAVREHPDYRVVFTGHSLGGALATVAGADLRGNKYDIDVFSYGAPRVGNRAFAEFLTVQTGGTLYRITHTNDIVPRLPPREFGYSHSSPEYWIKSGTFVPVRRRDIVKIEGIDATGGNNRPNIPSIPAHLWYFGLIGTC

SEQ ID NO: 14639 - protein, 268 aa, Thermomyces lanuginosus
EVSQDLFNQFNLFAQYSAAAYCGKNNRAPAGTNITCTANACPEVEKADATFLYSFEGSGVGDVTGFLALDNTNKLIVLSFRGSRSIENWIGNLNFELKEINDICSGCRGHAGFTSSWRSVADTLRQKVEDAVREHPDYRVVFTGHSLGGALATVAGADLRGNKYDIDVFSYGAPRVGNRAFAEFLTVQTGGTLYRITHTNDIVPRLPPREFGYSHSSPEYWIKSGTLVPVRRRDIVKIEGIDATGGNNQPNIPSITAHLWYFGLIGTC

SEQ ID NO: 14640 - protein, 268 aa, Thermomyces lanuginosus
EVSQDLFNQFNLFAQYSAAAYCGKNNRAPAGTNITCTANACPEVEKADATFLYSFEDSGVGDVTGFLALDNTNKLIVLSFRGSRSIENWIGNLNFELKEINDICSGCRGHAGFTSSWRSVADTLRQKVEDAVREHPDYRVVFTGHSLGGALATVAGADLRGNKYDIDVFSYGAPRVGNRAFAEFLTVQTGGTLYRITHTNDIVPRLPPREFGYSHSSPEYWIKSGTLVKVRRRDIVKIEGIDATGGNNQPNIPSITAHLWYFGLIGTC

SEQ ID NO: 14641 - protein, 268 aa, Thermomyces lanuginosus
EVSQDLFNQFNLFAQYSAAAYCSKNNNAPAGTNITCTGNACPEVEKADATILYSFRDSGEGDVTGFLALDNTNKLIVLSFRGSRSIENWIGNLNFDLKEINDICSGCRGHDGFTSSWFSVADTLRQKVEDAVREHPDYRVVFTGHSLGGALATVAGADLRGNGYDIDVFSYGAPRVGNRAFAEFLTVQTGGTLYRITHTNDIVPRLPPREFGYSHSSPEYWIKSGTLVPVRRRDIVKIEGIDATGGNNQPNIPDITAHLWYFGLIGTC

SEQ ID NO: 14642 - protein, 268 aa, Thermomyces lanuginosus
EVSQDLFNQFNLFAQYSAAAYCGKNNRAPAGTNITCTANACPEVEKADATFLYSFEDSGVGDVTGFLALDNTNKLIVLSFRGSRSIENWIGNLNFELKEINDICSGCRGHAGFTSSWRSVADTLRQKVEDAVREHPDYRVVFTGHSLGGALATVAGADLRGNKYDIDVFSYGAPRVGNRAFAEFLTVQTGGTLYRITHTNDIVPRLPPREFGYSHSSPEYWIKSGTLVPVRRRDIVKIEGIDATGGNNQPNIPSITAHLDYFGLIGTC

SEQ ID NO: 14643 - protein, 268 aa, Thermomyces lanuginosus
EVSQDLFNQFNLFAQYSAAAYCSKNNNAPAGTNITCTGNACPEVEKADATILYSFRDSGVGDVTGFLALDNTNKLIVLSFRGSRSIENWIGNLNFDLIEINDICSGCRGHDGFTSSWFSVADTLRQKVEDAVREHPDYRVVFTGHSLGGALATVAGADLRGNGYDIDVFSYGAPRVGNRAFAEFLTVQTGGTLYRITHTNDIVPRLPPREFGYSHSSPEYWIKSGTLVPVRRRDIVKIEGIDAEGGNNQPNIPDIPAHLWYFGLIGTC

SEQ ID NO: 14644 - protein, 268 aa, Thermomyces lanuginosus
EVSQDLFNQFNLFAQYSAAAYCSKNNNAPAGTNITCTGNICPEVEKADATILYSFRDSGVGDVTGFLALDNTNKLIVLSFRGSRSIENWIGNLNFDLKEINDICSGCRGHDGFTSSWFSVADTLRQKVEDAVREHPDYRVVFTGHSLGGALATVAGADLRGNGYDIDVFSYGAPRVGNRAFAEFLTVQTGGTLYRITHTNDIVPRLPPREFGYSHSSPEYWIKSGTLVPVRRRDIVKIEGIDAEGGNNQPNIPDIPAHLWYFGLIGTC

SEQ ID NO: 14645 - protein, 268 aa, Thermomyces lanuginosus
EVSQDLFNQFNLFAQYSAAAYCGKNNRAPAGTNITCTANACPEVEKADATFLYSFEDSGVGDVTGFLALDNTNKLIVLSFRGSRSIANWIGNLNFELKEINDICSGCRGHAGFTSSWRSVADTLRQKVEDAVREHPDYRVVFTGHSLGGALATVAGADLRGNKYDIDVFSYGAPRVGNRAFAEFLTVQTGGTLYRITHTNDIVPRLPPREFGYSHSSPEYWIKSGTLVPVRRRDIVKIEGIDATGGNNQPNIPSITAHLWYFGLIGTC

SEQ ID NO: 14646 - protein, 268 aa, Thermomyces lanuginosus
EVSQDLFNQFNLFAQYSAAAYCGKNNRAPAGTNITCTANACPEVEKADATFLYSFEDSGVGDVTGFLALDNTNKLIVLSFRGSRSIENWIGNLNFELKEINDICSGCRGHAGFTSSWRSVADTLRQKVEDAVREHPDYRVVFTGHSLGGALATVAGADLRGNKYDIDVFSYGAPRVGNRAFAEFLTVQTGGTLYRITHTNDIVPRLPPREFGYSHSSPEYWIKSGTLVPVRRRDIVKIEGIDATGGNNQPNIPSITIHLWYFGLIGTC

SEQ ID NO: 14647 - protein, 268 aa, Thermomyces lanuginosus
EVSQDLFNQFNLFAQYSAAAYCGKNNNAPAGTNITCTGNACPEVEKADATILYSFRDSGVGDVTGFLALDNTNKLIVLSFRGSRSIENWIGNLNFDLIEINDICSGCRGHDGFTSSWFSVADTLRQKVEDAVREHPDYRVVFTGHSLGGALATVAGADLRGNGYDIDVFSYGAPRVGNRAFAEFLTVQTGGTLYRITHTNDIVPRLPPREFGYSHSSPEFWIKSGTLVPVRRRDIVKIEGIDATGGNNQPNIPDITAHLWYFGLIGTC

SEQ ID NO: 14648 - protein, 268 aa, Thermomyces lanuginosus
EVSQDLFNQFNLFAQYSAAAYCGKNNRAPAGTNITCTANACPEVEKADATFLYSFEDSGVGDVTGFLALDNTNKLIVLSFRGSRSIENWIGNLNFELTEINDICSGCRGHAGFTSSWRSVADTLRQKVEDAVREHPDYRVVFTGHSLGGALATVAGADLRGNKYDIDVFSYGAPRVGNRAFAEFLTVQTGGTLYRITHTNDIVPRLPPREFGYSHSSPEYWIKSGTLVPVRRRDIVKIEGIDATGGNNQPNIPSITAHLWYFGLIGTC

SEQ ID NO: 14649 - protein, 268 aa, Thermomyces lanuginosus
EVSQDLFNQFNLFAQYSAAAYCGKNNNAPAGTNITCTGNICPEVEKADATILYSFRDSGVGDVTGFLALDNTNKLIVLSFRGSRSIENWIGNLNFDLKEINDICSGCRGHDGFTSSWFSVADTLRQKVEDAVREHPDYRVVFTGHSLGGALATVAGADLRGNGYDIDVFSYGAPRVGNRAFAEFLTVQTGGTLYRITHTNDIVPRLPPREFGYSHSSPEYWIKSGTLVPVRRRDIVKIEGIDAEGGNNQPNIPDITAHLWYFGLIGTC

SEQ ID NO: 14650 - protein, 268 aa, Thermomyces lanuginosus
EVSQDLFNQFNLFAQYSAAAYCGKNNRAPAGTQITCTGNACPEVEKADATFLYSFEDSGVGDVTGFLALDNTNKLIVLSFRGSRSIENWITNLRFDLKEINDICSGCRGHAGFTSSWRSVADTLRQKVEDAVREHPDYRVVFTGHSLGGALATVAGADLRGNGYDIDVFSYGAPRVGNRAFAEFLTVQTGGTLYRITHTNDIVPRLPPREFGYSHPSPEYWIKSGTGVPVRRRDIVKIEGIDATGGNNQPNIPDITAHLWYFGLIGTC

SEQ ID NO: 14651 - protein, 268 aa, Thermomyces lanuginosus
EVSQDLFNQFNLFAQYSAAAYCGKNNRAPAGTNITCTANACPEVEKADATFLYSFEDSGVGDVTGFLALDNTNKLIVLSFRGSRSIENWIGDLNFLLKEINDICSGCRGHAGFTSSWRSVADTLRQKVEDAVREHPDYRVVFTGHSLGGALATVAGADLRGNKYDIDVFSYGAPRVGNRAFAEFLTVQTGGTLYRITHTNDIVPRLPPREFGYSHSSPEYWIKSGTLVPVRRRDIVKIEGIDATGGNNQPNIPSITAHLWYFGLIGTC

SEQ ID NO: 14652 - protein, 268 aa, Thermomyces lanuginosus
EVSQDLFNQFNLFAQYSAAAYCGKNNRAPAGTNITCTANACPEVEKADATFLYSFEDSGVGDVTGFLALDNTNKLIVLSFRGSRSIENWIGNLNFELKEINDICSGCRGHAGFTSSWRSVADTLRQKVEDAVREHPDYRVVFTGHSLGGALATVAGADLRGNKYDIDVFSYGAPRVGNRAFAEFLTVQTGGTLYRITHTNDIVPRLPPREFGYSHSSPEYWIKSGTLVPVRRRDIVKIEGIDATGGNNQPNIPSSTAHLWYFGLIGTC

SEQ ID NO: 14653 - protein, 268 aa, Thermomyces lanuginosus
EVSQDLFNQFNLFAQYSAAAYCGKNNRAPAGTNITCTANACPEVEKADATFLYSFEDSGVGDVTGFLALDNTNKLIVLSFRGSRSIENWIGNLNFELKEINDICSGCRGHAGFTSSWRSVADTLRQKVEDAVREHPDYRVVFTGHSLGGALATVAGADLRGNKYDIDVFSYGAPRVGNRAFAEFLTVQTGGTLYRITHTNDIVPRLPPREFGYSHSSPEYWIKSGTLVPRRRRDIVKIEGIDATGGNNQPNIPSITAHLWYFGLIGTC

SEQ ID NO: 14654 - protein, 268 aa, Thermomyces lanuginosus
EVSQDLFNQFNLFAQYSAAAYCGKNNRAPAGTNITCTANACPEVEKADATFLYSFEDSGVGDVTGFLALDNTNKLIVLSFRGSRSIENWIGNLNFELKEINDICSGCRGHAGFTSSWRSVADTLRQKVEDAVREHPDYRVVFTGHSLGGALATVAGADLRGNKYDIDVFSYGAPRVGNRAFAEFLTVQTGGTLYRITHTNDIVPRLPPREFGYSHSSPEYWIKSGTLVPHRRRDIVKIEGIDATGGNNQPNIPSITAHLWYFGLIGTC

SEQ ID NO: 14655 - protein, 268 aa, Thermomyces lanuginosus
EVSQDLFNQFNLFAQYSAAAYCGKNNDAPAGTNITCTGNICPEVEKADATLLYSFRNSGVGDVTGFLALDNTNKLIVLSFRGSRSIENWIGNLNFDLKEINDICSGCRGHDGFTSSWFSVADTLRQKVEDAVREHPDYRVVFTGHSLGGALATVAGADLRGNSYDIDVFSYGAPRVGNRAFAEFLTVQTGGTLYRITHTNDIVPRLPPREFGYSHSSPEYWIKSGTLVPVRRRDIVKIEGIDATGGNNQPNIPDITAHLWYFGLIGTC

SEQ ID NO: 14656 - protein, 268 aa, Thermomyces lanuginosus
EVSQDLFNQFNLFAQYSAAAYCGKNNRAPAGTNITCTANACPEVEKADATFLYSFEDSGVGDVTGFLALDNTNKLIVLSFRGSRSIENWIGKLNFELKEINDICSGCRGHAGFTSSWRSVADTLRQKVEDAVREHPDYRVVFTGHSLGGALATVAGADLRGNKYDIDVFSYGAPRVGNRAFAEFLTVQTGGTLYRITHTNDIVPRLPPREFGYSHSSPEYWIKSGTLVPVRRRDIVKIEGIDATGGNNQPNIPSITAHLWYFGLIGTC

SEQ ID NO: 14657 - protein, 268 aa, Thermomyces lanuginosus
EVSQDLFNQFNLFAQYSAAAYCGKNNRAPAGTNITCTANACPEVEKADATYLYSFEDSGVGDVTGFLALDNTNKLIVLSFRGSRSIENWIGNLNFELKEINDICSGCRGHAGFTSSWRSVADTLRQKVEDAVREHPDYRVVFTGHSLGGALATVAGADLRGNKYDIDVFSYGAPRVGNRAFAEFLTVQTGGTLYRITHTNDIVPRLPPREFGYSHSSPEYWIKSGTLVPVRRRDIVKIEGIDATGGNNQPNIPSITAHLWYFGLIGTC

SEQ ID NO: 14658 - protein, 268 aa, Thermomyces lanuginosus
EVSQDLFNQFNLFAQYSKAAYCQKNNSAPAGTNITCTGNACPEVEKADATFLYSFEDSGVGDVTGFLALDNTNKQIILSFRGSRSIENWIGNLNFDLKEINDICSGCKGHDGFTSSWRSVADTLRQKVEDAVREFPDYRVVFTGHSLGGALATVAWADLRGNGYDIDVFSYGAPRVGNRAFAEFLTTQTGGTLYRITHTNDIVPRLPPREFGYSHSSPEYWIKSGTLVPVTRNDIVKIEGIDATGGNNQPNIPDIPAHLWYFGLIGTC

SEQ ID NO: 14659 - protein, 268 aa, Thermomyces lanuginosus
EVSQDLFNQFNLFAQYSKAAYCKANNDAPAGTNITCTGNACPEVEKADATFLYSFEDSGVGDVTGFLALDNTNKQIVLSFRGSRSIENWIGNLRFDLKEINDICSGCRGHDGFTSSWRSVADTLRQKVEAAVREHPDYRVVFTGHSLGGALATIAWADLRGNGYDIDVFSYGAPRVGNRAFAEFLTNQTGGTLYRITHTNDIVPRLPPREFGYSHSSPEYWIKSGTLVPVTRNDIVKIEGIDATGGNNQPNIPDIPAHLWYFGLIGTC

SEQ ID NO: 14660 - protein, 268 aa, Thermomyces lanuginosus
EVSRDLFNQFNLFAQYSAAAYCGKNNDAPAGTNITCTGNACPEVEKADATILYSFEDSGVGDVTGFLALDNTNKLIVLSFRGSRSIENWIGNLNFDLKEINDICSGCRGHDGFTSSWRSVADTLRQKVEDAVREHPDYRVVFTGHSLGGALATVAGADLRGNGYDIDVFSYGAPRVGNRAFAEFLTVQTGGTLYRITNTNDIVPRLPPRQFGYSHSSPEYWIKSGTLPPVRRRDIVKCEGIDATCGNNQPNIPDIPAHLWYFGLIGTC

SEQ ID NO: 14661 - protein, 268 aa, Thermomyces lanuginosus
EVSQDLFNQFNLFAQYSAAAYCGKNNRAPAGTNITCTANACPEVEKADATFLYSFEDSGVGDVTGFLALDNTNKLIVLSFRGSRSIENWIGNLNFELKEINDICSGCRGHAGFTSSWRSVADTLRQKVEDAVREHPDYRVVFTGHSLGGALATVAGADLRGNKYDIDVFSYGAPRVGNRAFAEFLTVQTGGTLYRITHTNDIVPRLPPREFGYSHSSPEYWIKSGTLVPVRRRDIVKIEGIDATGGNNQPNIPSATAHLWYFGLIGTC

SEQ ID NO: 14662 - protein, 268 aa, Thermomyces lanuginosus
EVSQDLFNQFNLFAQYSAAAYCGKNNRAPAGTNITCTANACPEVEKADATFLYSFEDSGVGDVTGFLALDNTNKLIVLSFRGSRSIENWIGNLNAELKEINDICSGCRGHAGFTSSWRSVADTLRQKVEDAVREHPDYRVVFTGHSLGGALATVAGADLRGNKYDIDVFSYGAPRVGNRAFAEFLTVQTGGTLYRITHTNDIVPRLPPREFGYSHSSPEYWIKSGTLVPVRRRDIVKIEGIDATGGNNQPNIPSITAHLWYFGLIGTC

SEQ ID NO: 14663 - protein, 268 aa, Thermomyces lanuginosus
EVSQDLFNQFNLFAQYSAAAYCGKNNRAPAGTNITCTANACPEVEKADATFLYSFEDSGVGDVTGFLALDNTNKLIVLSFRGSRSIENWIGNLNLELKEINDICSGCRGHAGFTSSWRSVADTLRQKVEDAVREHPDYRVVFTGHSLGGALATVAGADLRGNKYDIDVFSYGAPRVGNRAFAEFLTVQTGGTLYRITHTNDIVPRLPPREFGYSHSSPEYWIKSGTLVPVRRRDIVKIEGIDATGGNNQPNIPSITAHLWYFGLIGTC

SEQ ID NO: 14664 - protein, 268 aa, Thermomyces lanuginosus
EVSQDLFNQFNLFAQYSAAAYCGKNNRAPAGTQITCTANACPEVEKADATFLYSFEDSGVGDVTGFLALDNTNKLIVLSFRGSRSIENWITNLNFELKEINDICSGCRGHAGFTSSWRSVADTLRQKVEDAVREHPDYRVVFTGHSLGGALATVAGADLRGNKYDIDVFSYGAPRVGNRAFAEFLTVQTGGTLYRITHTNDIVPRLPPREFGYSHSSPEYWIKSGTLVPVRRRDIVKIEGIDATGGNNQPNIPSITAHLWYFGLIGTC

SEQ ID NO: 14665 - protein, 268 aa, Thermomyces lanuginosus
EVSQDLFNQFNLFAQYSAAAYCGKNNRAPAGTNITCTANACPEVEKADATFLYSFEDSGVGDVTGFLALDNTNKLIVLSFRGSRSIENWIGNLNFELKEINDICSGCRGHAGFTSSWRSVADTLRQKVEDAVREHPDYRVVFTGHSLGGALATVAGADLRGNKYDIDVFSYGAPRVGNRAFAEFLTVQTGGTLYRITHTNDIVPRLPPREFGYSHSSPEYWIKSGTLVPVRRRDIVKIEGIDSTGGNNQPNIPSITAHLWYFGLIGTC

SEQ ID NO: 14666 - protein, 268 aa, Thermomyces lanuginosus
EVSQDLFNQFNLFAQYSAAAYCGKNNDAPAGTNITCTGNICPEVEKADATLLYSFRNSGVGDVTGFLALDNTNKLIVLSFRGSRSIENWIGNLNFDLIEINDICSGCRGHDGFTSSWFSVADTLRQKVEDAVREHPDYRVVFTGHSLGGALATVAGADLRGNGYDIDVFSYGAPRVGNRAFAEFLTVQTGGTLYRITHTNDIVPRLPPREFGYSHSSPEYWIKSGTLVPVRRRDIVKIEGIDATGGNNQPNIPDITAHLWYFGLIGTC

SEQ ID NO: 14667 - protein, 268 aa, Thermomyces lanuginosus
EVSQDLFNQFNLFAQYSAAAYCSKNNDAPAGTNITCTGNACPEVEKADATILYSFRDSGVGDVTGFLALDNTNKLIVLSFRGSRSIENWIGNLNFDLIEINDICSGCRGHDGFTSSWFSVADTLRQKVEDAVREHPDYRVVFTGHSLGGALATVAGADLRGNGYDIDVFSYGAPRVGNRAFAEFLTVQTGGTLYRITHTNDIVPRLPPREFGYSHSSPEFWIKSGTLVPVRRRDIVKIEGIDATGGNNQPNIPDITAHLWYFGLIGTC

SEQ ID NO: 14668 - protein, 268 aa, Thermomyces lanuginosus
EVSQDLFNQFNLFAQYSAAAYCSKNNDAPAGTNITCTGNACPEVEKADATFLYSFRDSGVGDVTGFLALDNTNKLIVLSFRGSRSIENWIGNLNFDLIEINDICSGCRGHDGFTSSWFSVADTLRQKVEDAVREHPDYRVVFTGHSLGGALATVAGADLRGNGYDIDVFSYGAPRVGNRAFAEFLTVQTGGTLYRITHTNDIVPRLPPREFGYSHSSPEFWIKSGTLVPVRRRDIVKIEGIDAEGGNNQPNIPDITAHLWYFGLIGTC

SEQ ID NO: 14669 - protein, 268 aa, Thermomyces lanuginosus
EVSQDLFNQFNLFAQYSKAAYCQKNNDAPAGTNITCTGNACPEVFKADVTFLYSFEDSGVGDVTGFLALDNTSKQIVLSFRGSRSIENWIGNLNFDLKEINDICSGCKGHDGFTSSWRSVADTLRQKVEDAVREHPDYRVVFTGHSLGGALATVAGADLRGNGYDIDVFSYGAPRVGNRAFAEFLTTQDGGTLYRITHTNDIVPRLPPREFGYSHSSPEYWIKSGTLVPVTRNDIVKIEGIDATGGNNQPNIPDIPAHLWYFGLIGTC

SEQ ID NO: 14670 - protein, 268 aa, Thermomyces lanuginosus
EVSQDLFNQFNLFAQYSAAAYCGKNNRAPAGTNITCTANACPEVEKADATILYSFEDSGVGDVTGFLALDNTNKLIVLSFRGSRSIENWIGNLNFELKEINDICSGCRGHAGFTSSWRSVADTLRQKVEDAVREHPDYRVVFTGHSLGGALATVAGADLRGNKYDIDVFSYGAPRVGNRAFAEFLTVQTGGTLYRITHTNDIVPRLPPREFGYSHSSPEYWIKSGTLVPVRRRDIVKIEGIDATGGNNQPNIPSITAHLWYFGLIGTC

SEQ ID NO: 14671 - protein, 268 aa, Thermomyces lanuginosus
EVSQDLFNQFNLFAQYSAAAYCGKNNRAPAGTNITCTANACPEVEKADATFLYSFEDSGVGDVTGFLALDNTNKLIVLSFRGSRSIENWIGKLNFLLKEINDICSGCRGHAGFTSSWRSVADTLRQKVEDAVREHPDYRVVFTGHSLGGALATVAGADLRGNKYDIDVFSYGAPRVGNRAFAEFLTVQTGGTLYRITHTNDIVPRLPPREFGYSHSSPEYWIKSGTLVPVRRRDIVKIEGIDATGGNNQPNIPSITAHLWYFGLIGTC

SEQ ID NO: 14672 - protein, 268 aa, Thermomyces lanuginosus
EVSQDLFNQFNLFAQYSKAAYCKANNDAPAGTNITCTGNACPEVEKADATFLYSFEDSGVGDVTGFLALDNTNKRIILSFRGSRSIENWIGNLNFDLKEINDICSGCRGHDGFTSSWRSVADTLRQKVEAAVREHPDYRVVFTGHSLGGALATIAWADLRGNGYDIDVFSYGAPRVGNRAFAEFLTNQTGGTLYRITHTNDIVPRLPPREFGYSHSSPEYWIKSGTLVPVTRNDIVKIEGIDATGGNNQPNIPDIPAHLWYFGLIGTC

SEQ ID NO: 14673 - protein, 268 aa, Thermomyces lanuginosus
EVSQDLFNQFRLFAQYSAAAYCGKNNRAPAGTQITCTGNACPEVEKADATFLYSFEDSGVGDVTGFLALDNTNKLIVLSFRGSRSIENWITNLNFELKEINDICSGCRGHAGFTSSWRSVADTLRQKVEDAVREHPDYRVVFTGHSLGGALATVAGADLRGNKYDIDVFSYGAPRVGNRAFAEFLTVQTGGTLYRITHTNDIVPRLPPREFGYSHSSPEYWIKSGTLVPVRRRDIVKIEGIDATGGNNQPNIPSITAHLWYFGLIGTC

SEQ ID NO: 14674 - protein, 268 aa, Thermomyces lanuginosus
EVSQDLFNQFNLFAQYSAAAYCGKNNRAPAGTNITCTANACPEVEKADATFLYSFEDSGVGDVTGFLALDNTNKLIVLSFRGSRSIENWIGNLNFELKEINDICSGCRGHAGFTSSWRSVADTLRQKVEDAVREHPDYRVVFGGHSLGGALATVAGADLRGNKYDIDVFSYGAPRVGNRAFAEFLTVQTGGTLYRITHTNDIVPRLPPREFGYSHSSPEYWIKSGTLVPVRRRDIVKIEGIDATGGNNQPNIPSITAHLWYFGLIGTC

SEQ ID NO: 14675 - protein, 268 aa, Thermomyces lanuginosus
EKSQDLFNQFNLFAQYSAAAYCGKNNRAPAGTNITCTANACPEVEKADATFLYSFEDSGVGDVTGFLALDNTNKLIVLSFRGSRSIENWIGNLNFELKEINDICSGCRGHAGFTSSWRSVADTLRQKVEDAVREHPDYRVVFTGHSLGGALATVAGADLRGNKYDIDVFSYGAPRVGNRAFAEFLTVQTGGTLYRITHTNDIVPRLPPREFGYSHSSPEYWIKSGTLVPVRRRDIVKIEGIDATGGNNQPNIPSITAHLWYFGLIGTC

SEQ ID NO: 14676 - protein, 268 aa, Thermomyces lanuginosus
EVSQDLFNQFNLFAQYSKAAYCKKNNDAPAGTNITCTGNACPEVFKADVTFLYSFEDSGVGDVTGFLALDNTSKQIVLSFRGSRSIENWIGNLNFDLKEINDICSGCKGHDGFTSSWRSVADTLRQKVEDAVREHPDYRVVFTGHSLGGALATVAGADLRGNGYDIDVFSYGAPRVGNRAFAEFLTTQDGGTLYRITHTNDIVPRLPPREFGYSHSSPEYWIKSGTLVPVTRNDIVKIEGIDATGGNNQPNIPDIPAHLWYFGLIGTC

SEQ ID NO: 14677 - protein, 268 aa, Thermomyces lanuginosus
EVSQDLFNQFNLFAQYSAAAYCGKNNDAPAGTNITCTGNACPEVEKADATILYSFRDSGVGDVTGFLALDNTNKLIVLSFRGSRSIENWIGNLNFDLIEINDICSGCRGHDGFTSSWFSVADTLRQKVEDAVREHPDYRVVFTGHSLGGALATVAGADLRGNGYDIDVFSYGAPRVGNRAFAEFLTVQTGGTLYRITHTNDIVPRLPPREFGYSHSSPEFWIKSGTLVPVRRRDIVKIEGIDAEGGNNQPNIPDITAHLWYFGLIGTC

SEQ ID NO: 14678 - protein, 268 aa, Thermomyces lanuginosus
EVSQDLFNQFNLFAQYSAAAYCGKNNDAPAGTNITCTGNICPEVEKADATLLYSFRDSGVGDVTGFLALDNTNKLIVLSFRGSRSIENWIGNLNFDLIEINDICSGCRGHDGFTSSWFSVADTLRQKVEDAVREHPDYRVVFTGHSLGGALATVAGADLRGNSYDIDVFSYGAPRVGNRAFAEFLTVQTGGTLYRITHTNDIVPRLPPREFGYSHSSPEYWIKSGTLVPVRRRDIVKIEGIDATGGNNQPNIPDITAHLWYFGLIGTC

SEQ ID NO: 14679 - protein, 268 aa, Thermomyces lanuginosus
EVSQDLFNQFNLFAQYSAAAYCGKNNRAPAGTNITCTANACPEVEKADATFLYSFEDSGVGDVTGFLALDNTNKLIVLSFRGSRSIENWIGNLNFELKEINDICSGCRGHAGFTSSWRSVADTLRQKVEDAVREHPDYRVVFTGHSLGGALATVAGADLRGNKYDIDVFSYGAPRVGNRAFAEFLTVQTGGTLYRITHTNDIVPRLPPRKFGYSHSSPEYWIKSGTLVPVRRRDIVKIEGIDATGGNNQPNIPSITAHLWYFGLIGTC

SEQ ID NO: 14680 - protein, 268 aa, Thermomyces lanuginosus
EVSQDLFNQFNLFAQYSAAAYCGKNNRAPAGTNITCTANACPEVEKADATFLYSFEDSGVGDVTGFLALDNTNKLIVLSFRGSRSIENWIGNLNFELKEINDICSGCRGHAGFTSSWRSVADTLRQKVEDAVREHPDYRVVFTGHSLGGALATVAGADLRGNKYDIDVFSYGAPRVGNRAFAEFLTVQTGGTLYRITHTNDIVPRLPPREFGYSHSSPEYWIKSGTLVPVRRRDIVKIEGIDATGGNNQPNIPSITAHLIYFGLIGTC

SEQ ID NO: 14681 - protein, 268 aa, Thermomyces lanuginosus
EVSQDLFNQFNLFAQYSAAAYCGKNNRAPAGTNITCTANACPEVEKADATFLYSFEDSGVGDVTGFLALDNTNKLIVLSFRGSRSIENWIGNLNFELKEINDICSGCRGHAGFTSSWRSVADTLRQKVEDAVREHPDYRVVFTGHSLGGALATVAGADLRGNKYDIDVFSYGAPRVGNRAFAEFLTVQTGGTLYRITHTNDIVPRLPPREFGYSHSSPEYWIKSGTLVPVRRRDIVKIEGIDATGGNNQPNIPSITAHFWYFGLIGTC

SEQ ID NO: 14682 - protein, 268 aa, Thermomyces lanuginosus
EVSQDLFNQFRLFAQYSAAAYCGKNNDAPAGTQITCTANACPEVEKADATFLYSFEDSGVGDVTGFLALDNTNKLIVLSFRGSRSIENWITNLRFDLKEINDICSGCRGHDGFTSSWRSVADTLRQKVEDAVREHPDYRVVFTGHSLGGALATVAGADLRGNPYDIDGFSYGAPRVGNRAFAEFLTVQTGGTLYRITHTNDIVPRLPPREFGYSHSSPEYWIKSGTLVPVRRRDIVKIEGIDATGGNNQPNIPSIPAHLWYFGLIGTC

SEQ ID NO: 14683 - protein, 268 aa, Thermomyces lanuginosus
EVSQDLKNQFNLFAQYSAAAYCGKNNRAPAGTNITCTANACPEVEKADATFLYSFEDSGVGDVTGFLALDNTNKLIVLSFRGSRSIENWIGNLNFELKEINDICSGCRGHAGFTSSWRSVADTLRQKVEDAVREHPDYRVVFTGHSLGGALATVAGADLRGNKYDIDVFSYGAPRVGNRAFAEFLTVQTGGTLYRITHTNDIVPRLPPREFGYSHSSPEYWIKSGTLVPVRRRDIVKIEGIDATGGNNQPNIPSITAHLWYFGLIGTC

SEQ ID NO: 14684 - protein, 268 aa, Thermomyces lanuginosus
EVSQDLFNQFNLFAQYSAAAYCGKNNRAPAGTNITCTANACPEVEKADATFLYSFEDSGVGDVTGFLALDNTNKLIVLSFRGSRSIENWIGDLNFELKEINDICSGCRGHAGFTSSWRSVADTLRQKVEDAVREHPDYRVVFTGHSLGGALATVAGADLRGNKYDIDVFSYGAPRVGNRAFAEFLTVQTGGTLYRITHTNDIVPRLPPREFGYSHSSPEYWIKSGTLVPVRRRDIVKIEGIDATGGNNQPNIPSITAHLWYFGLIGTC

SEQ ID NO: 14685 - protein, 268 aa, Thermomyces lanuginosus
EVSQDLFNQFNLFAQYSAAAYCGKNNRAPAGTNITCTANACPEVEKADATFLYSFEDSGVGDVTGFLALDNTNKLIVLSFRGSRTIENWIGNLNFELKEINDICSGCRGHAGFTSSWRSVADTLRQKVEDAVREHPDYRVVFTGHSLGGALATVAGADLRGNKYDIDVFSYGAPRVGNRAFAEFLTVQTGGTLYRITHTNDIVPRLPPREFGYSHSSPEYWIKSGTLVPVRRRDIVKIEGIDATGGNNQPNIPSITAHLWYFGLIGTC

SEQ ID NO: 14686 - protein, 268 aa, Thermomyces lanuginosus
EVSQDLFNQFNLFAQYSAAAYCGKNNIAPAGTQITCTGNACPEVEKADATFLYSFEDSGVGDVTGFLALDNTNKLIVLSFRGSRSIENWITNLNFELTEINDICSGCRGHDGFISSWRSVADTLRQKVEDAVREHPDYRVVFTGHSLGGALATVAGADLRGNKYDIDVFSYGAPRVGNRAFAEFLTVQTGGTLYRITHTNDIVPRLPPRDFGYSHSSPEYWIKSGTLVPVRRRDIVKIEGIDATGGNNQPNIPDITAHLWYFGLIGTC

SEQ ID NO: 14687 - protein, 268 aa, Thermomyces lanuginosus
EVSQDLFNQFNLFAQYSAAAYCGKNNDAPAGTNITCTGNACPEVEKADATFLYSFEDAGSGDVTGFLALDNTNKLIVLSFRGTRSIENWIGNLNFDLKEINDICSGCRGHDGFTSSWRSVADTLRQKVEDAVREHPDYRVVFTGHSLGGGLATVAGADLRGNGYDIDVFSYGAPRVGNRAFAEFLTVQTGGTLYRITHTNDIVPRLPPREFGYSHSSPEYWIKSGTGVPVRRRDIVKIEGIDATGGNNQPNIPDAKAHLWYFGLIGTC

SEQ ID NO: 14688 - protein, 268 aa, Thermomyces lanuginosus
EVSQDLFNQFNLFAQYSAAAYCSKNNNAPAGTNITCTGNACPEVEKADATILYSFRDSGVGDVTGFLALDNTNKLIVLSFRGSRSIENWIGNLNFDLKEINDICSGCRGHDGFTSSWFSVADTLRQKVEDAVREHPDYRVVFTGHSLGGALATVAGADLRGNGYDIDVFSYGAPRVGNRAFAEFLTVQTGGTLYRITHTNDIVPRLPPREFGYSHSSPEYWIKSGTLVPVRRRDIVKIEGIDAEGGNNQPNIPDITAHLWYFGLIGTC

SEQ ID NO: 14689 - protein, 268 aa, Thermomyces lanuginosus
EVSQDLFNQFNLFAQYSAAAYCSKNNDAPAGTNITCTGNACPEVEKADATILYSFRDSGVGDVTGFLALDNTNKLIVLSFRGSRSIENWIGNLNFDLIEINDICSGCRGHDGFTSSWFSVADTLRQKVEDAVREHPDYRVVFTGHSLGGALATVAGADLRGNGYDIDVFSYGAPRVGNRAFAEFLTVQTGGTLYRITHTNDIVPRLPPREFGYSHSSPEYWIKSGTLVPVRRRDIVKIEGIDAEGGNNQPNIPDITAHLWYFGLIGTC

SEQ ID NO: 14690 - protein, 268 aa, Thermomyces lanuginosus
EVSQDLFNQFNLFAQYSAAAYCGKNNRAPAGTNITCTANACPEVEKADATFLYSFEDSGVGDVTGFLALDNTNKLIVLSFRGSRSIENWIGNLNFELKEINDICSGCRGHAGFTSSWRSVADTLRQKVEDAVREHPDYRVVFTGHSLGGALATVAGADLRGNKYDIDVFSYGAPRVGNRAFAEFLTVQTGGTLYRITHTNDIVPRLPPREFGYSHSSPEYWIKSGTLVPVRRRDIVKIEGIDATGGNNQPNIPSITLHLWYFGLIGTC

SEQ ID NO: 14691 - protein, 268 aa, Thermomyces lanuginosus
EVSQDLFNQFNLFAQYSAAAYCGKNNRAPAGTNITCTANACPEVEKADATFLYSFEDSGVGDVTGFLALDNTNKLIVLSFRGSRSIENWIGNLNFELKEINDICSGCRGHAGFTSSWRSVADTLRQKVEDAVREHPDYRVVFTGHSLGGALATVAGADLRGNKYDIDVFSYGAPRLGNRAFAEFLTVQTGGTLYRITHTNDIVPRLPPREFGYSHSSPEYWIKSGTLVPVRRRDIVKIEGIDATGGNNQPNIPSITAHLWYFGLIGTC

SEQ ID NO: 14692 - protein, 268 aa, Thermomyces lanuginosus
EVSQDLFNQFNLFAQYSAAAYCSKNNNAPAGTNITCTGNICPEVEKADATILYSFRDSGKGDVTGFLALDNTNKLIVLSFRGSRSIENWIGNLNFDLKEINDICSGCRGHDGFTSSWFSVADTLRQKVEDAVREHPDYRVVFTGHSLGGALATVAGADLRGNGYDIDVFSYGAPRVGNRAFAEFLTVQTGGTLYRITHTNDIVPRLPPREFGYSHSSPEYWIKSGTLVPVRRRDIVKIEGIDATGGNNQPNIPDIPAHLWYFGLIGTC

SEQ ID NO: 14693 - protein, 268 aa, Thermomyces lanuginosus
EVSQDLFNQFNLFAQYSKAAYCKANNDAPAGTNITCTGNACPEVEKADATFLYSFEDSGVGDVTGFLALDNTNKLIILSFRGSRSIENWIGNLNFDLKEINDICSGCRGHDGFTSSWRSVADTLRQKVEAAVREHPDYRVVFTGHSLGGALATIAWADLRGNGYDIDVFSYGAPRVGNRAFAEFLTTQQGGTLYRITHTNDIVPRLPPREFGYSHSSPEYWIKSGTLVPVTRNDIVKIEGIDATGGNNQPNIPDIPAHLWYFGLIGTC

SEQ ID NO: 14694 - protein, 268 aa, Thermomyces lanuginosus
EVSQDLFNQFKLFAQYSAAAYCKKNNDAPAGTNITCTGNACPEVEKADATFLYSFEDSGVGDVTGFLALDNTNKRIILSFRGSRSIENWIGNLNFDLKEINDICSGCRGHDGFTSSWRSVADTLRQKVEAAVREHPDYRVVFTGHSLGGALATIAWADLRGNGYDIDVFSYGAPRVGNRAFAEFLTTQQGGTLYRITHTNDIVPRLPPREFGYSHSSPEYWIKSGTLVPVTRNDIVKIEGIDATGGNNQPNIPDIPAHLWYFGLIGTC

SEQ ID NO: 14695 - protein, 268 aa, Thermomyces lanuginosus
EVSQDLFNQFNLFAQYSKAAYCQKNNSAEAGTNITCTGNACPEVEKADATFLYSFEDMGVGDVTGFLALDNTNKLIILSFRGSRSIENWIGNLNFDLKEINDICSGCKGHDGFTSSWRSVADTLRQKVEDAFREHPDYRVVFTGHSLGGALATVAWADLRGNGYDIDVFSYGAPRVGNRAFAEFLTVQTGGTLYRITHTNDIVPRLPPREFGYSHSSPEYWIKSGTLVPVTRNDIVKIEGIDATGGNNQPNIPDIPAHLWYFGLIGTC

SEQ ID NO: 14696 - protein, 268 aa, Thermomyces lanuginosus
EVSQDLFNQFNLFAQYSAAAYCGKNNNAPAGTNITCTGNACPEVEKADATILYSFRDSGVGDVTGFLALDNTNKLIVLSFRGSRSIENWIGNLNFDLIEINDICSGCRGHDGFTSSWFSVADTLRQKVEDAVREHPDYRVVFTGHSLGGALATVAGADLRGNGYDIDVFSYGAPRVGNRAFAEFLTVQTGGTLYRITHTNDIVPRLPPREFGYSHSSPEFWIKSGTLVPVRRRDIVKIEGIDAEGGNNQPNIPDIPAHLWYFGLIGTC

SEQ ID NO: 14697 - protein, 268 aa, Thermomyces lanuginosus
EVSQDLFNQFNLFAQYSAAAYCGKNNRAPAGTNITCTANACPEVEKADATFLYSFEDSGVGDVTGFLALDNTNKLIVLSFRGSHSIENWIGNLNFELKEINDICSGCRGHAGFTSSWRSVADTLRQKVEDAVREHPDYRVVFTGHSLGGALATVAGADLRGNKYDIDVFSYGAPRVGNRAFAEFLTVQTGGTLYRITHTNDIVPRLPPREFGYSHSSPEYWIKSGTLVPVRRRDIVKIEGIDATGGNNQPNIPSITAHLWYFGLIGTC

SEQ ID NO: 14698 - protein, 268 aa, Thermomyces lanuginosus
EVSQDLFNQFNLFAQYSAAAYCGKNNRAPAGTNITCTANACPEVEKADATFLYSFEDSGVGDVTGFLALDNTNKLIVLSFRGSRSIENWIGNLNFELKEINDICSGCRGHAGFTSSWRSVADTLRQKVEDAVREHPDYRVVFTGHSLGGALATVAGADLRGNKYDIDVFSYGAPRVGNRAFAEFLTVQTGGTLYRITHTHDIVPRLPPREFGYSHSSPEYWIKSGTLVPVRRRDIVKIEGIDATGGNNQPNIPSITAHLWYFGLIGTC

SEQ ID NO: 14699 - protein, 268 aa, Thermomyces lanuginosus
EVSQDLFNQFNLFAQYSAAAYCGKNNDAPAGTNITCTGNACPEVEKADATFLYSFEDAGSGDVTGFLALDNTNKLIVLSFRGSRSVENWIGNLNFDLKEINDICSGCRGHDGFTSSWRSVADTLRQKVEDAVREHPDYRVVFSGHSLGGGLATVAGADLRGNGYDIDVFSYGAPRVGNRAFAEFLTVQTGGTLYRITHTNDIVPRLPPREFGYSHSSPEYWIKSGTGVPVRRRDIVKIEGIDATGGNNQPNIPDIKAHLWYFGLIGTC

SEQ ID NO: 14700 - protein, 268 aa, Thermomyces lanuginosus
EVSQDLFNQFNLFAQYSAAAYCGKNNRAPAGTNITCTANACPEVEKADATFLYSFEDSGVGDVTGFLALDNTNKLIVLSFRGSRSIENWIGNFNFELKEINDICSGCRGHAGFTSSWRSVADTLRQKVEDAVREHPDYRVVFTGHSLGGALATVAGADLRGNKYDIDVFSYGAPRVGNRAFAEFLTVQTGGTLYRITHTNDIVPRLPPREFGYSHSSPEYWIKSGTLVPVRRRDIVKIEGIDATGGNNQPNIPSITAHLWYFGLIGTC

SEQ ID NO: 14701 - protein, 268 aa, Thermomyces lanuginosus
EVSQDLFNQFNLFAQYSKAAYCQKNNSAEAGTNITCTGNACPEVEKADATFLYSFEDSGVGDVTGFLALDNTNKQIILSFRGSRSIENWIGNLNFDLKEINDICSGCKGHDGFTSSWRSVADTLRQKVEDAVREHPDYRVVFTGHSLGGALATVAWADLRGNGYDIDVFSYGAPRVGNRAFAEFLTHQTGGTLYRITHTNDIVPRLPPREFGYSHSSPEYWIKSGTLVPVTRNDIVKIEGIDATGGNNQPNIPDIPAHLWYFGLIGTC

SEQ ID NO: 14702 - protein, 268 aa, Thermomyces lanuginosus
EVSQDLFNQFNLFAQYSAAAYCGKNNRAPAGTNITCTANACPEVEKADATFLYSFEDSGVGDVTGFLALDNTNKLIVLSFRGSRSIENWIGNLNFELKEINDICSGCRGHAGFTSSWRSVADTLRQKVEDAVREHPDYRVVFTGHSLGGALATVAGADLRGNKYDIDVFSYGAPRVGNRAFAEFLTVQTGGTLYRITHTNDIVPRLPPREFGYSHSSPEYWIKSGTLVPVRRRDIVKIEGIDATGGNNQPNIPSITYHLWYFGLIGTC

SEQ ID NO: 14703 - protein, 268 aa, Thermomyces lanuginosus
EVSQDLFNQFNLFAQYSAAAYCGKNNRAPAGTNITCTANACPEVEKADATFLYSFEDSGVGDVTGFLALDNTNKLIVLSFRGSRSLENWIGNLNFELKEINDICSGCRGHAGFTSSWRSVADTLRQKVEDAVREHPDYRVVFTGHSLGGALATVAGADLRGNKYDIDVFSYGAPRVGNRAFAEFLTVQTGGTLYRITHTNDIVPRLPPREFGYSHSSPEYWIKSGTLVPVRRRDIVKIEGIDATGGNNQPNIPSITAHLWYFGLIGTC

SEQ ID NO: 14704 - protein, 268 aa, Thermomyces lanuginosus
EVSQDLFNQFNLFAQYSAAAYCGKNNNAPAGTNITCTGNACPEVEKADATILYSFRDSGVGDVTGFLALDNTNKLIVLSFRGSRSIENWIGNLNFDLKEINDICSGCRGHDGFTSSWFSVADTLRQKVEDAVREHPDYRVVFTGHSLGGALATVAGADLRGNGYDIDVFSYGAPRVGNRAFAEFLTVQTGGTLYRITHTNDIVPRLPPREFGYSHSSPEFWIKSGTLVPVRRRDIVKIEGIDAEGGNNQPNIPDITAHLWYFGLIGTC

SEQ ID NO: 14705 - protein, 268 aa, Thermomyces lanuginosus
EVSQDLFNQFNLFAQYSAAAYCGKNNRAPAGTNITCTANACPEVEKADATFLYSFEDSGVGDVTGFLALDNTNKLIVLSFRGSRSITNWIGNLNFELKEINDICSGCRGHAGFTSSWRSVADTLRQKVEDAVREHPDYRVVFTGHSLGGALATVAGADLRGNKYDIDVFSYGAPRVGNRAFAEFLTVQTGGTLYRITHTNDIVPRLPPREFGYSHSSPEYWIKSGTLVPVRRRDIVKIEGIDATGGNNQPNIPSITAHLWYFGLIGTC

SEQ ID NO: 14706 - protein, 268 aa, Thermomyces lanuginosus
EVSQDLFNQFNLFAQYSAAAYCGKNNRAPAGTNITCTANACPEVEKADATFLYSFEDSGVGDVTGFLALDNTNKLIVLSFRGSRSIEQWIGNLNFELKEINDICSGCRGHAGFTSSWRSVADTLRQKVEDAVREHPDYRVVFTGHSLGGALATVAGADLRGNKYDIDVFSYGAPRVGNRAFAEFLTVQTGGTLYRITHTNDIVPRLPPREFGYSHSSPEYWIKSGTLVPVRRRDIVKIEGIDATGGNNQPNIPSITAHLWYFGLIGTC

SEQ ID NO: 14707 - protein, 268 aa, Thermomyces lanuginosus
EVSQDLFNQFNLFAQYSAAAYCSKNNNAPAGTNITCTGNACPEVEKADATFLYSFRDSGVGDVTGFLALDNTNKLIVLSFRGSRSIENWIGNLNFDLKEINDICSGCRGHDGFTSSWFSVADTLRQKVEDAVREHPDYRVVFTGHSLGGALATVAGADLRGNGYDIDVFSYGAPRVGNRAFAEFLTVQTGGTLYRITHTNDIVPRLPPREFGYSHSSPEFWIKSGTLVPVRRRDIVKIEGIDAEGGNNQPNIPDITAHLWYFGLIGTC

SEQ ID NO: 14708 - protein, 268 aa, Thermomyces lanuginosus
EVSQDLFNQFNLFAQYSAAAYCGKNNRAPAGTNITCTANACPEVEKADATFLYSFEDSGVGDVTGFLALDNTNKLIVLSFRGSRSIENWIGNLNFELKEINDICSGCRGHAGFTSSWRSVADTLRQKVEDAVREHPDYRVVFTGHSLGGGLATVAGADLRGNKYDIDVFSYGAPRVGNRAFAEFLTVQTGGTLYRITHTNDIVPRLPPREFGYSHSSPEYWIKSGTLVPVRRRDIVKIEGIDATGGNNQPNIPSITAHLWYFGLIGTC

SEQ ID NO: 14709 - protein, 268 aa, Thermomyces lanuginosus
EVSQDLFNQFKLFAQYSKAAYCKANNDAPAGTNITCTGNACPEVEKADATFLYSFEDSGVGDVTGFLALDNTNKLIILSFRGSRSIENWIGNLNFDLKEINDICSGCRGHDGFTSSWRSVADTLRQKVEAAVREHPDYRVVFTGHSLGGALATIAGADLRGNGYDIDVFSYGAPRVGNRAFAEFLTTQQGGTLYRITHTNDIVPRLPPREFGYSHSSPEYWIKSGTLVPVTRNDIVKIEGIDATGGNNQPNIPDIPAHLWYFGLIGTC

SEQ ID NO: 14710 - protein, 268 aa, Thermomyces lanuginosus
EVSQDLFNQFNLFAQYSKAAYCQKNNSAEAGTNITCTGNACPEVEKADATFLYSFEDSGVGDVTGFLALDNTNKQIILSFRGSRSIENWIGNLNFDLKEINDICSGCRGHDGFTSSWRSVADTLRQKVEDAFREHPDYRVVFTGHSLGGALATVAWADLRGNGYDIDVFSYGAPRVGNRAFAEFLTTQTGGTLYRITHTNDIVPRLPPREFGYSHSSPEYWIKSGTLVPVTRNDIVKIEGIDATGGNNQPNIPDIPAHLWYFGLIGTC

SEQ ID NO: 14711 - protein, 268 aa, Thermomyces lanuginosus
EVSQDLFNQFNLFAQYSAAAYCGKNNRAPAGTNITCTANACPEVEKADATFLYSFEDSGVGDVTGFLALDNTNKLIVLSFRGSRSIENWIGKLNFILKEINDICSGCRGHAGFTSSWRSVADTLRQKVEDAVREHPDYRVVFTGHSLGGALATVAGADLRGNKYDIDVFSYGAPRVGNRAFAEFLTVQTGGTLYRITHTNDIVPRLPPREFGYSHSSPEYWIKSGTLVPVRRRDIVKIEGIDATGGNNQPNIPSITAHLWYFGLIGTC

SEQ ID NO: 14712 - protein, 268 aa, Thermomyces lanuginosus
EVSQDLFNQFNLFAQYSAAAYCGKNNRAPAGTNITCTANACPEVEKADATFLYSFEDSGVGDVTGFLALDNTNKLIVLSFRGSRSIENWIGNLNFELKEINDICSGCRGHAGFTSSWRSVADTLRQKVEDAVREHPDYRVVFTGHSLGGALATVAGADLRGNKYDIDVFSYGAPRVGNRAFAEFLTVQTGGTLYRITHTNDIVPRLPPREFGYSHSSPEYWIKSGTLVPLRRRDIVKIEGIDATGGNNQPNIPSITAHLWYFGLIGTC

SEQ ID NO: 14713 - protein, 268 aa, Thermomyces lanuginosus
EVSQDLFNQFNLFAQYSAAAYCGKNNRAPAGTNITCTGNACPEVEKADATLLYSFEDSGVGDVTGFLALDNTNKLVVLSFRGSRSIENWIGNLNFDLKEIDDICSGCRGHAGFTSSWRSVADTLRQKVEDAVREHPDYRVVFTGHSLGGALATVAGADLRGRGYDIDVFSYGAPRVGNRAFAEFLTVQTGGTLYRITHTNDIVPRLPPREFGYSHPSPEYWIKSGTGVPVTRNDIVKIEGIDATGGNNQPNIPDITAHLWYFGLIGTC

SEQ ID NO: 14714 - protein, 268 aa, Thermomyces lanuginosus
EVSQDLFNQFNLFAQYSAAAYCGKNNRAPAGTNITCTANACPEVEKADATFLYSFEDSGVGDVTGFLALDNTNKLIVLSFRGSRSIENWIGNLNFELQEINDICSGCRGHAGFTSSWRSVADTLRQKVEDAVREHPDYRVVFTGHSLGGALATVAGADLRGNKYDIDVFSYGAPRVGNRAFAEFLTVQTGGTLYRITHTNDIVPRLPPREFGYSHSSPEYWIKSGTLVPVRRRDIVKIEGIDATGGNNQPNIPSITAHLWYFGLIGTC

SEQ ID NO: 14715 - protein, 268 aa, Thermomyces lanuginosus
EVSQDLFNQFNLFAQYSAAAYCGKNNRAPAGTPITCTANACPEVEKADATFLYSFEDSGVGDVTGFLALDNTNKLIVLSFRGSRSIENWIGNLNFELKEINDICSGCRGHAGFTSSWRSVADTLRQKVEDAVREHPDYRVVFTGHSLGGALATVAGADLRGNKYDIDVFSYGAPRVGNRAFAEFLTVQTGGTLYRITHTNDIVPRLPPREFGYSHSSPEYWIKSGTLVPVRRRDIVKIEGIDATGGNNQPNIPSITAHLWYFGLIGTC

SEQ ID NO: 14716 - protein, 268 aa, Thermomyces lanuginosus
EVSQDLFNQFNLFAQYSAAAYCGKNNRAPAGTNITCTANACPEVEKADATFLYSFEDSGVGDVTGFLALDNTNKLIVLSFRGSRSIENWIGNLNFELKEINDICSGCRGHAGFTSSWRSVADTLRQKVEDAVREHPDYRVVFTGHSLGGALATVAGADLRGNKYDIDVFSYGAPRVGNRAFAEFLTVQTGGTLYRITHTNDIVPRLPPREFGYSHSSPEYWIKSGTLVPVRRRDIVKIEGIDATGGNNQPNIPSITAHLQYFGLIGTC

SEQ ID NO: 14717 - protein, 268 aa, Thermomyces lanuginosus
EVSQDLFNQFNLFAQYSKAAYCQKNNSAEAGTNITCTGNACPEVEKADATFLYSFEDSGVGDVTGFLALDNTNKQIILSFRGSRSIENWIGNLNFDLKEINDICSGCKGHDGFTSSWRSVADTLRQKVEDAFREHPDYRVVFTGHSLGGALATVAGADLRGNGYDIDVFSYGAPRVGNRAFAEFLTHQTGGTLYRITHTNDIVPRLPPREFGYSHSSPEYWIKSGTLVPVTRNDIVKIEGIDATGGNNQPNIPDIPAHLWYFGLIGTC

SEQ ID NO: 14718 - protein, 268 aa, Thermomyces lanuginosus
EVSQDLFNQFNLFAQYSAAAYCGKNNRAPAGTNITCTANACPEVEKADATFLYSFEDSGVGDVTGFLALDNTNKLIVLSFRGSRSIENWIGNLNFELKEINDICSGCRGHAGFTSSWRSVADTLRQKVEDAVREHPDYRVVFTGHSLGGALATVAGADLRGNKYDIDVFSYGAPRVGNRAFAEFLTVQTGGTLYRITYTNDIVPRLPPREFGYSHSSPEYWIKSGTLVPVRRRDIVKIEGIDATGGNNQPNIPSITAHLWYFGLIGTC

SEQ ID NO: 14719 - protein, 268 aa, Thermomyces lanuginosus
EVSQDLFNQFNLFAQYSAAAYCSKNNNAPAGTNITCTGNACPEVEKADATILYSFRDSGVGDVTGFLALDNTNKLIVLSFRGSRSIENWIGNLNFDLIEINDICSGCRGHDGFTSSWFSVADTLRQKVEDAVREHPDYRVVFTGHSLGGALATVAGADLRGNGYDIDVFSYGAPRVGNRAFAEFLTVQTGGTLYRITHTNDIVPRLPPREFGYSHSSPEFWIKSGTLVPVRRRDIVKIEGIDATGGNNQPNIPDIPAHLWYFGLIGTC

SEQ ID NO: 14720 - protein, 268 aa, Thermomyces lanuginosus
EVSQDLFNQFNLFAQYSAAAYCGKNNRAPAGTNITCTANACPEVEKADATFLYSFEDSGVGDVTGFLALDNTNKLIVLSFRGSRSIENWIGNLNFELKEINDICSGCRGHAGFTSSWRSVADTLRQKVEDAVREHPDYRVVFTGHSLGGALATVAGADLRGNKYDIDVFSYGAPRVGNRAFAEFLTVQTGGTLYRITHTNDIVPRLPPREFGYSHSSPEYWIKSGTLVPVRRRDIVKIEGIDATGGNNQPNIPSITAHLYYFGLIGTC

SEQ ID NO: 14721 - protein, 268 aa, Thermomyces lanuginosus
EVSQDLFNQFNLFAQYSAAAYCGKNNRAPAGTNITCTANACPEVEKADATFLYSFEDSGVGDVTGFLALDNTNKLIVLSFRGSRSIENWIGNLNFELKEINDICSGCRGHAGFTSSWRSVADTLRQKVEDAVREHPDYRVVFTGHSLGGALATVAGADLRGNKYDIDVFSYGAPRVGNRAFAEFLTVQTGGTLYRITLTNDIVPRLPPREFGYSHSSPEYWIKSGTLVPVRRRDIVKIEGIDATGGNNQPNIPSITAHLWYFGLIGTC

SEQ ID NO: 14722 - protein, 268 aa, Thermomyces lanuginosus
EVSQDLFNQFNLFAQYSAAAYCSKNNNAPAGTNITCTGNICPEVEKADATILYSFRDSGVGDVTGFLALDNTNKLIVLSFRGSRSIENWIGNLNFDLKEINDICSGCRGHDGFTSSWFSVADTLRQKVEDAVREHPDYRVVFTGHSLGGALATVAGADLRGNGYDIDVFSYGAPRVGNRAFAEFLTVQTGGTLYRITHTNDIVPRLPPREFGYSHSSPEYWIKSGTLVPVRRRDIVKIEGIDATGGNNQPNIPDITAHLWYFGLIGTC

SEQ ID NO: 14723 - protein, 268 aa, Thermomyces lanuginosus
EVSQDLFNQFNLFAQYSAAAYCGKNNRAPAGTNITCTANACPEVEKADATFLYSFEDSGVGDVTGFLALDNTNKLIVLSFRGSRSIENWIGDLNFTLKEINDICSGCRGHAGFTSSWRSVADTLRQKVEDAVREHPDYRVVFTGHSLGGALATVAGADLRGNKYDIDVFSYGAPRVGNRAFAEFLTVQTGGTLYRITHTNDIVPRLPPREFGYSHSSPEYWIKSGTLVPVRRRDIVKIEGIDATGGNNQPNIPSITAHLWYFGLIGTC

SEQ ID NO: 14724 - protein, 268 aa, Thermomyces lanuginosus
EVSQDLFNQFNLFAQYSAAAYCGKNNRAPAGTNITCTANACPEVEKADATFLYSFEDSGVGDVTGFLALDNTNKLIVLSFRGSRSIENWIGNLNFELKEINDICSGCRGHAGFTSSWRSVADTLRQKVEDAVREHPDYRVVFTGHSLGGALATVAGADLRGNKYDIDVFSYGAPRVGNRAFAEFLTVQTGGTLYRITHTNDIVPRLPPREFGYSHSSPEYWIKSGTLVPVRRRDIVKIEGIDATGGNNQPNIPSITFHLWYFGLIGTC

SEQ ID NO: 14725 - protein, 268 aa, Thermomyces lanuginosus
EVSQDLFNQFNLFAQYSAAAYCGKNNRAPAGTNITCTANACPEVEKADATFLYSFEDSGVGDVTGFLARDNTNKLIVLSFRGSRSIENWIGNLNFELKEINDICSGCRGHAGFTSSWRSVADTLRQKVEDAVREHPDYRVVFTGHSLGGALATVAGADLRGNKYDIDVFSYGAPRVGNRAFAEFLTVQTGGTLYRITHTNDIVPRLPPREFGYSHSSPEYWIKSGTLVPVRRRDIVKIEGIDATGGNNQPNIPSITAHLWYFGLIGTC

SEQ ID NO: 14726 - protein, 268 aa, Thermomyces lanuginosus
EVSQDLFNQFNLFAQYSAAAYCGKNNRAPAGTNITCTANACPEVEKADATFLYTFEDSGVGDVTGFLALDNTNKLIVLSFRGSRSIENWIGNLNFELKEINDICSGCRGHAGFTSSWRSVADTLRQKVEDAVREHPDYRVVFTGHSLGGALATVAGADLRGNKYDIDVFSYGAPRVGNRAFAEFLTVQTGGTLYRITHTNDIVPRLPPREFGYSHSSPEYWIKSGTLVPVRRRDIVKIEGIDATGGNNQPNIPSITAHLWYFGLIGTC

SEQ ID NO: 14727 - protein, 268 aa, Thermomyces lanuginosus
EVSQDLFNQFNLFAQYSAAAYCGKNNRAPAGTNITCTANACPEVEKADATFLYSFEDSGVGDVTGFLALDNTNKLIVLSFRGSRSIENWIGNLNFELKEINDICSGCRGHAGFTSSWRSVADTLRQKVEDAVREHPDYRVVFTGHSLGGALATVAGADLRGNKYDIDVFSYGAPRVGNRAFAEFLTVQTGGTLYRITHTNDIVPRLPPREFGYSHSSPEYWIKSGTLVPVRRRDIVKIEGIDATGGNNQPNIPSITVHLWYFGLIGTC

SEQ ID NO: 14728 - protein, 268 aa, Thermomyces lanuginosus
EVSQDLFNQFNLFAQYSAAAYCSKNNNAPAGTNITCTGNACPEVEKADATILYSFRDSGVGDVTGFLALDNTNKLIVLSFRGSRSIENWIGNLNFDLIEINDICSGCRGHDGFTSSWFSVADTLRQKVEDAVREHPDYRVVFTGHSLGGALATVAGADLRGNGYDIDVFSYGAPRVGNRAFAEFLTVQTGGTLYRITHTNDIVPRLPPREFGYSHSSPEYWIKSGTLVPVRRRDIVKIEGIDATGGNNQPNIPDITAHLWYFGLIGTC

SEQ ID NO: 14729 - protein, 268 aa, Thermomyces lanuginosus
EVSQDLFNQFNLFAQYSAAAYCGKNNDAPAGTNITCTGNICPEVEKADATILYSFRDSGKGDVTGFLALDNTNKLIVLSFRGSRSIENWIGNLNFDLKEINDICSGCRGHDGFTSSWFSVADTLRQKVEDAVREHPDYRVVFTGHSLGGALATVAGADLRGNGYDIDVFSYGAPRVGNRAFAEFLTVQTGGTLYRITHTNDIVPRLPPREFGYSHSSPEYWIKSGTLVPVRRRDIVKIEGIDAEGGNNQPNIPDITAHLWYFGLIGTC

SEQ ID NO: 14730 - protein, 268 aa, Thermomyces lanuginosus
EVSQDLFNQFNLFAQYSAAAYCGKNNRAPAGTNITCTANACPEVEKADATFLYSFEDSGVGDVTGFLALDNTNKLIVLSFRGSRSIENWLGNLNFELKEINDICSGCRGHAGFTSSWRSVADTLRQKVEDAVREHPDYRVVFTGHSLGGALATVAGADLRGNKYDIDVFSYGAPRVGNRAFAEFLTVQTGGTLYRITHTNDIVPRLPPREFGYSHSSPEYWIKSGTLVPVRRRDIVKIEGIDATGGNNQPNIPSITAHLWYFGLIGTC

SEQ ID NO: 14731 - protein, 268 aa, Thermomyces lanuginosus
EVSQDLFNQFNLFAQYSAAAYCGKNNRAPAGTNITCTANACPEVEKADATFLYSFEDSGVGDVTGFLALDNTNKLIVLSFRGSRSIENWIGNLNFELKEINDICSGCRGHAGFTSSWRSVADTLRQKVEDAVREHPDYRVVFTGHSLGGALATVAGADLRGNKYDIDVFSYGAPRVGNRAFAEFLTVQTGGTLYRITVTNDIVPRLPPREFGYSHSSPEYWIKSGTLVPVRRRDIVKIEGIDATGGNNQPNIPSITAHLWYFGLIGTC

SEQ ID NO: 14732 - protein, 268 aa, Thermomyces lanuginosus
EVSQDLFNQFNLFAQYSAAAYCGKNNRAPAGTNITCTANACPEVEKADATFLYSFEDSGVGDVTGFLALDNTNKLIVLSFRGSRSIENWIGNLNFELKEINDICSGCRGHAGFTSSWRSVADTLRQKVEDAVREHPDYRVVFVGHSLGGALATVAGADLRGNKYDIDVFSYGAPRVGNRAFAEFLTVQTGGTLYRITHTNDIVPRLPPREFGYSHSSPEYWIKSGTLVPVRRRDIVKIEGIDATGGNNQPNIPSITAHLWYFGLIGTC

SEQ ID NO: 14733 - protein, 268 aa, Thermomyces lanuginosus
EVSQDLFNQFNLFAQYSAAAYCSKNNNAPAGTNITCTGNACPEVEKADATILYSFRDSGVGDVTGFLALDNTNKLIVLSFRGSRSIENWIGNLNFDLKEINDICSGCRGHDGFTSSWFSVADTLRQKVEDAVREHPDYRVVFTGHSLGGALATVAGADLRGNGYDIDVFSYGAPRVGNRAFAEFLTVQTGGTLYRITHTNDIVPRLPPREFGYSHSSPEFWIKSGTLVPVRRRDIVKIEGIDAEGGNNQPNIPDIPAHLWYFGLIGTC

SEQ ID NO: 14734 - protein, 268 aa, Thermomyces lanuginosus
EVSQDLRNQFNLFAQYSAAAYCGKNNRAPAGTNITCTANACPEVEKADATFLYSFEDSGVGDVTGFLALDNTNKLIVLSFRGSRSIENWIGNLNFELKEINDICSGCRGHAGFTSSWRSVADTLRQKVEDAVREHPDYRVVFTGHSLGGALATVAGADLRGNKYDIDVFSYGAPRVGNRAFAEFLTVQTGGTLYRITHTNDIVPRLPPREFGYSHSSPEYWIKSGTLVPVRRRDIVKIEGIDATGGNNQPNIPSITAHLWYFGLIGTC

SEQ ID NO: 14735 - protein, 268 aa, Thermomyces lanuginosus
EVSQDLFNQFNLFAQYSAAAYCGKNNRAPAGTNITCTANACPEVEKADATFLYSFEDSGVGDVTGFLALDNTNKLIVLSFRGSRSIENWIGNLNFELKEINDICSGCRGHAGFTSSWRSVADTLRQKVEDAVREHPDYRVVFTGHSLGGALATVAGADLRGNKYDIDVFSYGAPRVGNRAFAEFLTVQTGGTLYRITHTNDIVPRLPPREFGYSHSSPEYWIKSGTRVPVRRRDIVKIEGIDATGGNNQPNIPSITAHLWYFGLIGTC

SEQ ID NO: 14736 - protein, 268 aa, Thermomyces lanuginosus
EYSQDLFNQFNLFAQYSAAAYCGKNNRAPAGTNITCTANACPEVEKADATFLYSFEDSGVGDVTGFLALDNTNKLIVLSFRGSRSIENWIGNLNFELKEINDICSGCRGHAGFTSSWRSVADTLRQKVEDAVREHPDYRVVFTGHSLGGALATVAGADLRGNKYDIDVFSYGAPRVGNRAFAEFLTVQTGGTLYRITHTNDIVPRLPPREFGYSHSSPEYWIKSGTLVPVRRRDIVKIEGIDATGGNNQPNIPSITAHLWYFGLIGTC

SEQ ID NO: 14737 - protein, 268 aa, Thermomyces lanuginosus
EVSQDLFNQFNLFAQYSAAAYCGKNNRAPAGTNITCTANACPEVEKADATFLYSFEDSGVGDVTGFLALDNTNKLIVLSFRGSRSIENWIGNLNFELKEINDICSGCRGHAGFTSSWRSVADTLRQKVEDAVREHHDYRVVFTGHSLGGALATVAGADLRGNKYDIDVFSYGAPRVGNRAFAEFLTVQTGGTLYRITHTNDIVPRLPPREFGYSHSSPEYWIKSGTLVPVRRRDIVKIEGIDATGGNNQPNIPSITAHLWYFGLIGTC

SEQ ID NO: 14738 - protein, 268 aa, Thermomyces lanuginosus
EVSQDLFNQFNLFAQYSAAAYCGKNNRAPAGTNITCTANACPEVEKADATFLYSFEDSGVGDVTGFLALDNTNKLIVLSFRGSRSIENWIGNLNFELKEINDICSGCRGHAGFTSSWRSVADTLRQKVEDAVREHPDYRVVFTGHSLGGALATVAGADLRGNKYDIDVFSYGAPRVGNRAFAEFLTVQTGGTLYRITHTNDIVPRLPPREFGYSHSSPEYWIKFGTLVPVRRRDIVKIEGIDATGGNNQPNIPSITAHLWYFGLIGTC

SEQ ID NO: 14739 - protein, 268 aa, Thermomyces lanuginosus
EVSQDLFNQFNLFAQYSAAAYCGKNNRAPAGTNITCTANACPEVEKADATFLYSFEDSGVGDVTGFLALDNTNKLIVLSFRGSRSIENWIGNLNFELKEINDICSGCRGHAGFTSSWRSVADTLRQKVEDAVREHPDYRVVFTGHSLGGALATVAGADLRGNKYDIDVFSYGAPRVGNRAFAEFLTVQTGGTLYRITHTNDIVPRLPPREFGYSHSSPEYWIKSGTLVPVRRRDIVKIEGIDATGGNNQPNIPSITAHLHYFGLIGTC

SEQ ID NO: 14740 - protein, 268 aa, Thermomyces lanuginosus
EVSQDLFNQFNLFAQYSAAAYCGKNNRAPAGTNITCTANACPEVEKADATFLYSFEDSGVGDVTGFLALDNTNKLIVLSFRGSRSIENWIGNLNFELKEINDICSGCRGHAGFTSSWRSVADTLRQKVEDAVREHPDYRVVFTGHSLGGALATVAGADLRGNKYDIDVFSYGAPRVGNRAFAEFLTVQTGGTLYRITHTNDIVPRLPPREFGYSHSSPEYWIKSGTLVHVRRRDIVKIEGIDATGGNNQPNIPSITAHLWYFGLIGTC

SEQ ID NO: 14741 - protein, 268 aa, Thermomyces lanuginosus
EVSQDLFNQFNLFAQYSAAAYCGKNNDAPAGTNITCTGNACPEVEKADATILYSFEDSGVGDVTGFLALDNTNKLIVLSFRGSRSIENWIGNLNFDLKEINDICSGCRGHDGFTSSWRSVADTLRQKVEDAVREHPDYRVVFAGHSLGGALATVAGADLRGNGYDIDVFSYGAPRVGNRAFAEFLTVQTGGTLYRITNTNDCVPRLPPRQFGYSHSSPEYWIKSGTLPPVRRRDIVKIEGIDATGGNNQPNICDIPAHLWYFGLIGTC

SEQ ID NO: 14742 - protein, 268 aa, Thermomyces lanuginosus
EVSQDLFNQFNLFAQYSAAAYCGKNNRAPAGTNITCTANACPEVEKADATFLYSFEDSGVGDVTGFLALDNTNKLIVLSFRGSRSIENWIGNLNFELKEINDICSGCRGHAGFTSSWRSVADTLRQKVEDAVREHPDYRVVFTGHSLGGALATVAGADLRGNKYDIDVFSYGAPRVGNRAFAEFLTVQTGGTLYRITHTNDIVPRLPPREFGYSHSSPEYWIKSGTLVPVRRRDIVKIEGIDATGGNNQPNIPSYTAHLWYFGLIGTC

SEQ ID NO: 14743 - protein, 268 aa, Thermomyces lanuginosus
EVSQDLFNQFNLFAQYSAAAYCGKNNRAPAGTNITCTANACPEVEKADATFLYSFEDSGVGDVTGFLALDNTNKLIVLSFRGSRSIENWIGNLKFELKEINDICSGCRGHAGFTSSWRSVADTLRQKVEDAVREHPDYRVVFTGHSLGGALATVAGADLRGNKYDIDVFSYGAPRVGNRAFAEFLTVQTGGTLYRITHTNDIVPRLPPREFGYSHSSPEYWIKSGTLVPVRRRDIVKIEGIDATGGNNQPNIPSITAHLWYFGLIGTC

SEQ ID NO: 14744 - protein, 268 aa, Thermomyces lanuginosus
EVSQDLFNQFNLFAQYSAAAYCGKNNRAPAGTNITCTANACPEVEKADATFLYSFEDSGVGDVTGFLALDNTNKLIVLSFRGSRSPENWIGNLNFELKEINDICSGCRGHAGFTSSWRSVADTLRQKVEDAVREHPDYRVVFTGHSLGGALATVAGADLRGNKYDIDVFSYGAPRVGNRAFAEFLTVQTGGTLYRITHTNDIVPRLPPREFGYSHSSPEYWIKSGTLVPVRRRDIVKIEGIDATGGNNQPNIPSITAHLWYFGLIGTC

SEQ ID NO: 14745 - protein, 268 aa, Thermomyces lanuginosus
EVSQDLFNQFNLFAQYSAAAYCGKNNRAPAGTNITCTANACPEVEKADATFLYSFEDSGVGDVTGFLALDNTNKLIVLSFRGSRSIENWIGNLNFELKEINDICSGCRGHAGFTSSWRSVADTLRQKVEDAVREHPDYRVVFTGHSLGGALATVAGADLRGNKYDIDVFSYGAPRVGNRAFAEFLTVQTGGTLYRITHTNDIVPRLPPREFGYSHSSPEYWIKSGTLVRVRRRDIVKIEGIDATGGNNQPNIPSITAHLWYFGLIGTC

SEQ ID NO: 14746 - protein, 268 aa, Thermomyces lanuginosus
EVSQDLFNQFNLFAQYSAAAYCGKNNRAPAGTNITCTANACPEVEKADATFLYSFEDSGVGDVTGFLALDNTNKLIVLSFRGSRSIENWIGNLNFELKEINDICSGCRGHAGFTSSWRSVADTLRQKVEDAVREHPDYRVVFSGHSLGGALATVAGADLRGNKYDIDVFSYGAPRVGNRAFAEFLTVQTGGTLYRITHTNDIVPRLPPREFGYSHSSPEYWIKSGTLVPVRRRDIVKIEGIDATGGNNQPNIPSITAHLWYFGLIGTC

SEQ ID NO: 14747 - protein, 268 aa, Thermomyces lanuginosus
EVSQDLFNQFNLFAQYSAAAYCSKNNDAPAGTNITCTGNACPEVEKADATILYSFRDSGVGDVTGFLALDNTNKLIVLSFRGSRSIENWIGNLNFDLKEINDICSGCRGHDGFTSSWFSVADTLRQKVEDAVREHPDYRVVFTGHSLGGALATVAGADLRGNGYDIDVFSYGAPRVGNRAFAEFLTVQTGGTLYRITHTNDIVPRLPPREFGYSHSSPEFWIKSGTLVPVRRRDIVKIEGIDAEGGNNQPNIPDITAHLWYFGLIGTC

SEQ ID NO: 14748 - protein, 268 aa, Thermomyces lanuginosus
EVSQDLFNQFNLFAQYSAAAYCQKNNSAPAGTNITCTGNACPEVEKADATTLYSFKDMGVGDVTGFLALDNTNKRIVLSFRGSRSIENWIQNLNFDLKEINDICSGCRGHDGFTSSWRSVADTLRQKVEAAVREHPDYRVVFTGHSLGGALATVAGADLRGNGYDIDVFSYGAPRVGNRAFAEFLTHQTGGTLYRITHTNDIVPRLPPREFGYSHSSPEYWIKSGTLVPVTRNDIVKIEGIDATGGNNQPNQPDIPAHLWYFGLIGTC

SEQ ID NO: 14749 - protein, 268 aa, Thermomyces lanuginosus
EVSQDLFNQFNLFAQYSAAAYCGKNNRAPAGTNITCTANACPEVEKADATFLYSFEDSGVGDVTGFLALDNTNKLIVLSFRGSRSIENWIGNLNFELKEINDICSGCRGHAGFTSSWRSVADTLRQKVEDAVREHPDYRVVFTGHSLGGALATVAGADLRGNKYDIDVFSYGAPRVGNRAFAEFLTVQTGGTLYRITHTNDIVPRLPPREFGYSHSSPEYWIKSGTLVPVRRRDIVKIEGIDATGGNNQPNIPSITAHLNYFGLIGTC

SEQ ID NO: 14750 - protein, 268 aa, Thermomyces lanuginosus
EVSQDLFNQFNLFAQYSAAAYCGKNNRAPAGTNITCTANACPEVEKADATFLYSFEDSGVGDVTGFLALDNTNKLIVLSFRGSRSIENWIGNLNFELEEINDICSGCRGHAGFTSSWRSVADTLRQKVEDAVREHPDYRVVFTGHSLGGALATVAGADLRGNKYDIDVFSYGAPRVGNRAFAEFLTVQTGGTLYRITHTNDIVPRLPPREFGYSHSSPEYWIKSGTLVPVRRRDIVKIEGIDATGGNNQPNIPSITAHLWYFGLIGTC

SEQ ID NO: 14751 - protein, 268 aa, Thermomyces lanuginosus
EVSQDLFNQFNLFAQYSAAAYCGKNNRAPAGTNITCTANACPEVEKADATALYSFEDSGVGDVTGFLALDNTNKLIVLSFRGSRSIENWIGNLNFELKEINDICSGCRGHAGFTSSWRSVADTLRQKVEDAVREHPDYRVVFTGHSLGGALATVAGADLRGNKYDIDVFSYGAPRVGNRAFAEFLTVQTGGTLYRITHTNDIVPRLPPREFGYSHSSPEYWIKSGTLVPVRRRDIVKIEGIDATGGNNQPNIPSITAHLWYFGLIGTC

SEQ ID NO: 14752 - protein, 268 aa, Thermomyces lanuginosus
EVSQDLFNQFNLFAQYSAAAYCGKNNDAPAGTNITCTGNACPEVEKADATFLYSFEDAGSGDVTGFLALDNTNKLIVLSFRGSRSVENWIGNLNFDLKEINDICSGCRGHDGFTSSWRSVADTLRQKVEDAVREHPDYRVVFTGHSLGGGLATVAGADLRGNGYDIDVFSYGAPRVGNRAFAEFLTVQTGGTLYRITHTNDIVPRLPPREFGYSHSSPEYWIKSGTGVPVRRRDIVKIEGIDATGGNNQPNIPDAKAHLWYFGLIGTC

SEQ ID NO: 14753 - protein, 268 aa, Thermomyces lanuginosus
EVSQDLFNQFNLFAQYSKAAYCQKNNSAEAGTNITCTGNACPEVEKADATFLYSFEDMGVGDVTGFLALDNTNKLIILSFRGSRSIENWIGNLNFDLKEINDICSGCKGHDGFTSSWRSVADTLRQKVEDAVREFPDYRVVFTGHSLGGALATVAWADLRGNGYDIDVFSYGAPRVGNRAFAEFLTVQTGGTLYRITHTNDIVPRLPPREFGYSHSSPEYWIKSGTLVPVTRNDIVKIEGIDATGGNNQPNIPDIPAHLWYFGLIGTC

SEQ ID NO: 14754 - protein, 268 aa, Thermomyces lanuginosus
EVSQDLFNQFNLFAQYSAAAYCGKNNDAPAGTNITCTGNICPEVEKADATILYSFRDSGEGDVTGFLALDNTNKLIVLSFRGSRSIENWIGNLNFDLKEINDICSGCRGHDGFTSSWFSVADTLRQKVEDAVREHPDYRVVFTGHSLGGALATVAGADLRGNGYDIDVFSYGAPRVGNRAFAEFLTVQTGGTLYRITHTNDIVPRLPPREFGYSHSSPEYWIKSGTLVPVRRRDIVKIEGIDAEGGNNQPNIPDITAHLWYFGLIGTC

SEQ ID NO: 14755 - protein, 268 aa, Thermomyces lanuginosus
EVSQDLFNQFNLFAQYSAAAYCGKNNRAPAGTNITCTANACPEVEKADATFLYSFEDSGVGDVTGFLALDNTNKLIVLSFRGSRSIENWIGNLNFELKEINDICSGCRGHAGFTSSWRSVADTLRQKVEDAVREHPDYRVVFTGHSLGGALATVAGADLRGNKYDIDVFSYGAPRVGNRAFAEFLTVQTGGTLYRITHTNDIVPRLPPREFGYSHSSPEYWIKSGTLVPKRRRDIVKIEGIDATGGNNQPNIPSITAHLWYFGLIGTC

SEQ ID NO: 14756 - protein, 268 aa, Thermomyces lanuginosus
EVSQDLFNQFNLFAQYSAAAYCGKNNRAPAGTNITCTANACPEVEKADATFLYSFEDSGVGDVTGFLALDNTNKLIVLSFRGSRSIENWIGNLNFELKEINDICSGCRGHAGFTSSWRSVADTLRQKVEDAVREHPDYRVVFTGHSLGGALATVAGADLRGNKYDIDVFSYGAPRVGNRAFAEFLTVQTGGTLYRITHTNDVVPRLPPREFGYSHSSPEYWIKSGTLVPVRRRDIVKIEGIDATGGNNQPNIPSITAHLWYFGLIGTC

SEQ ID NO: 14757 - protein, 268 aa, Thermomyces lanuginosus
EVSQDLFNQFNLFAQYSAAAYCGKNNRAPAGTNITCTANACPEVEKADATFLYSFEDSGVGDVTGFLALDNTNKLIVLSFRGSRSIENWIGNLDFELKEINDICSGCRGHAGFTSSWRSVADTLRQKVEDAVREHPDYRVVFTGHSLGGALATVAGADLRGNKYDIDVFSYGAPRVGNRAFAEFLTVQTGGTLYRITHTNDIVPRLPPREFGYSHSSPEYWIKSGTLVPVRRRDIVKIEGIDATGGNNQPNIPSITAHLWYFGLIGTC

SEQ ID NO: 14758 - protein, 268 aa, Thermomyces lanuginosus
EVSQDLFNQFNLFAQYSAAAYCSKNNNAPAGTNITCTGNACPEVEKADATILYSFRDSGVGDVTGFLALDNTNKLIVLSFRGSRSIENWIGNLNFDLKEINDICSGCRGHDGFTSSWFSVADTLRQKVEDAVREHPDYRVVFTGHSLGGALATVAGADLRGNGYDIDVFSYGAPRVGNRAFAEFLTVQTGGTLYRITHTNDIVPRLPPREFGYSHSSPEFWIKSGTLVPVRRRDIVKIEGIDATGGNNQPNIPDITAHLWYFGLIGTC

SEQ ID NO: 14759 - protein, 268 aa, Thermomyces lanuginosus
EVSQDLFNQFNLFAQYSAAAYCGKNNRAPAGTKITCTANACPEVEKADATFLYSFEDSGVGDVTGFLALDNTNKLIVLSFRGSRSIENWIGNLNFELKEINDICSGCRGHAGFTSSWRSVADTLRQKVEDAVREHPDYRVVFTGHSLGGALATVAGADLRGNKYDIDVFSYGAPRVGNRAFAEFLTVQTGGTLYRITHTNDIVPRLPPREFGYSHSSPEYWIKSGTLVPVRRRDIVKIEGIDATGGNNQPNIPSITAHLWYFGLIGTC

SEQ ID NO: 14760 - protein, 268 aa, Thermomyces lanuginosus
EVSQDLFNQFNLFAQYSAAAYCSKNNNAPAGTNITCTGNACPEVEKADATILYSFRDSGKGDVTGFLALDNTNKLIVLSFRGSRSIENWIGNLNFDLKEINDICSGCRGHDGFTSSWFSVADTLRQKVEDAVREHPDYRVVFTGHSLGGALATVAGADLRGNGYDIDVFSYGAPRVGNRAFAEFLTVQTGGTLYRITHTNDIVPRLPPREFGYSHSSPEYWIKSGTLVPVRRRDIVKIEGIDATGGNNQPNIPDITAHLWYFGLIGTC

SEQ ID NO: 14761 - protein, 268 aa, Thermomyces lanuginosus
EVSQDLFNQFNLFAQYSAAAYCGKNNRAPAGTQITCTGNACPEVEKADATFLYSFEDSGVGDVTGFLALDNTNKLIVLSFRGSRSIENWITNLSFDLKEINDICSGCRGHAGFTSSWRSVADTLRQKVEDAVREHPDYRVVFTGHSLGGALATVAGADLRGNGYDIDVFSYGAPRVGNRAFAEFLTVQTGGTLYRITHTNDIVPRLPPREFGYSHPSPEYWIKSGTGVPVRRRDIVKIEGIDATGGNNQPNIPDITAHLWYFGLIGTC

SEQ ID NO: 14762 - protein, 268 aa, Thermomyces lanuginosus
EVSQDLFNQFNLFAQYSAAAYCGKNNRAPAGTQITCTGNACPEVEKADATFLYSFEDSGVGDVTGFLALDNTNKLIVLSFRGSRSIENWINNLRFDLKEINDICSGCRGHAGFTSSWRSVADTLRQKVEDAVREHPDYRVVFTGHSLGGALATVAGADLRGNGYDIDVFSYGAPRVGNRAFAEFLTVQTGGTLYRITHTNDIVPRLPPREFGYSHPSPEYWIKSGTGVPVRRRDIVKIEGIDATGGNNQPNIPDITAHLWYFGLIGTC

SEQ ID NO: 14763 - protein, 268 aa, Thermomyces lanuginosus
EVSQDLFNQFNLFAQYSAAAYCGKNNRAPAGTNITCTANACPEVEKADATFLYSFEDSGVGDVTGFLALDNTNKLIVLSFRGSRSIENWIGNLNFELKEINDICSGCRGHAGFTSSWRSVADTLRQKVEDAVREHPDYRVVFAGHSLGGALATVAGADLRGNKYDIDVFSYGAPRVGNRAFAEFLTVQTGGTLYRITHTNDIVPRLPPREFGYSHSSPEYWIKSGTLVPVRRRDIVKIEGIDATGGNNQPNIPSITAHLWYFGLIGTC

SEQ ID NO: 14764 - protein, 268 aa, Thermomyces lanuginosus
EVSQDLFNQFNLFAQYSAAAYCSKNNNAPAGTNITCTGNICPEVEKADATFLYSFRDSGKGDVTGFLALDNTNKLIVLSFRGSRSIENWIGNLNFDLKEINDICSGCRGHDGFTSSWFSVADTLRQKVEDAVREHPDYRVVFTGHSLGGALATVAGADLRGNGYDIDVFSYGAPRVGNRAFAEFLTVQTGGTLYRITHTNDIVPRLPPREFGYSHSSPEYWIKSGTLVPVRRRDIVKIEGIDAEGGNNQPNIPDIPAHLWYFGLIGTC

SEQ ID NO: 14765 - protein, 268 aa, Thermomyces lanuginosus
EVSQDLFNQFNLFAQYSAAAYCGKNNRAPAGTNITCTANACPEVEKADATFLYSFEDSGVGDVTGFLALDNTNKLIVLSFRGSRSIENWIGNLNFELKEINDICSGCRGHAGFTSSWRSVADTLRQKVEDAVREHPDYRVVFTGHSLGGALATVAGADLRGNKYDIDVFSYGAPRVGNRAFAEFLTVQTGGTLYRITHTNDIVPRLPPREFGYSHSSPEYWIKSGTLVPVRRRDIVKIEGIDATGGNNQPNIPSPTAHLWYFGLIGTC

SEQ ID NO: 14766 - protein, 268 aa, Thermomyces lanuginosus
EVSQDLFNQFNLFAQWSKAAYCQKNNSAPAGTNITCTGNACPEVEKADATFLYSFEDSGVGDVTGFLALDNTNKQIILSFRGSRSIENWIGNLNFDLKEINDICSGCKGHDGFTSSWRSVADTLRQKVEDAVREFPDYRVVFTGHSLGGALATVAGADLRGNGYDIDVFSYGAPRVGNRAFAEFLTTQTGGTLYRITHTNDIVPRLPPREFGYSHSSPEYWIKSGTLVPVTRNDIVKIEGIDATGGNNQPNIPDIPAHLWYFGLIGTC

SEQ ID NO: 14767 - protein, 268 aa, Thermomyces lanuginosus
EVSQDLFNQFNLFAQYSAAAYCGKNNRAPAGTNITCTANACPEVEKADATFLYSFEDSGVGDVTGFLALDNTNKLIVLSFRGSRSIENWIGDLNFILKEINDICSGCRGHAGFTSSWRSVADTLRQKVEDAVREHPDYRVVFTGHSLGGALATVAGADLRGNKYDIDVFSYGAPRVGNRAFAEFLTVQTGGTLYRITHTNDIVPRLPPREFGYSHSSPEYWIKSGTLVPVRRRDIVKIEGIDATGGNNQPNIPSITAHLWYFGLIGTC

SEQ ID NO: 14768 - protein, 268 aa, Thermomyces lanuginosus
EVSQDLFNQFNLFAQYSAAAYCGKNNRAPAGTNITCTANACPEVEKADATVLYSFEDSGVGDVTGFLALDNTNKLIVLSFRGSRSIENWIGNLNFDLKEINDICSGCRGHAGFTSSWRSVADTLRQKVEDAVREHPDYRVVFTGHSLGGALATVAGADLRGNKYDIDVFSYGAPRVGNRAFAEFLTVQTGGTLYRITHTNDIVPRLPPREFGYSHSSPEYWIKSGTLVPVRRRDIVKIEGIDATGGNNQPNIPSITAHLWYFGLIGTC

SEQ ID NO: 14769 - protein, 268 aa, Thermomyces lanuginosus
EVSQDLFNQFNLFAQYSAAAYCGKNNRAPAGTNITCTANACPEVEKADATFLYSFEDSGVGDVTGFLALDNTNKLIVLSFRGSRSIENWIGNLNFELKEINDICSGCRGHAGFTSSWRSVADTLRQKVEDAVREHPDYRVVFTGHSLGGALATVAGADLRGNKYDIDVFSYGAPRVGNRAFAEFLTVQTGGTLYRITHTNDIVPRLPPREFGYSHSSPEYWIKLGTLVPVRRRDIVKIEGIDATGGNNQPNIPSITAHLWYFGLIGTC

SEQ ID NO: 14770 - protein, 268 aa, Thermomyces lanuginosus
EVSQDLFNQFNLFAQYSAAAYCGKNNRAPAGTNITCTANACPEVEKADATFLYSFEDSGVGDVTGFLALDNTNKLIVLSFRGSRSIENWIGNLNFELKEINDICSGCRGHAGFTSSWRSVADTLRQKVEDAVREHPDYRVVFTGHSLGGALATVAGADLRGNKYDIDVFSYGAPRVGNRAFAEFLTVQTGGTLYRITNTNDIVPRLPPREFGYSHSSPEYWIKSGTLVPVRRRDIVKIEGIDATGGNNQPNIPSITAHLWYFGLIGTC

SEQ ID NO: 14771 - protein, 268 aa, Thermomyces lanuginosus
EVSQDLFNQFNLFAQYSAAAYCGKNNRAPAGTNITCTANACPEVEKADATFLYSFEDSGVGDVTGFLALDNTNKLIVLSFRGSRSIENWIGNLNFELKEINDICSGCRGHAGFTSSWRSVADTLRQKVEDAVREHPDYRVVFTGHSLGGALATVAGADLRGNKYDIDVFSYGAPRVGNRAFAEFLTVQTGGTLYRITHTNDIVPRLPPREFGYSHSSPEYWIKCGTLVPVRRRDIVKIEGIDATGGNNQPNIPSITAHLWYFGLIGTC

SEQ ID NO: 14772 - protein, 268 aa, Thermomyces lanuginosus
EVSQDLFNQFNLFAQYSAAAYCGKNNRAPAGTNITCTANACPEVEKADATFLYSFEDSGVGDVTGFLALDNTNKLIVLSFRGSRSIENWIGNLNFELKEINDICSGCRGHAGFTSSWRSVADTLRQKVEDAVREHPDYRVVFTGHSLGGALATVAGADLRGNKYDIDVFSYGAPRVGNRAFAEFLTVQTGGTLYRITHTQDIVPRLPPREFGYSHSSPEYWIKSGTLVPVRRRDIVKIEGIDATGGNNQPNIPSITAHLWYFGLIGTC

SEQ ID NO: 14773 - protein, 268 aa, Thermomyces lanuginosus
EVSQDLFNQFNLFAQYSAAAYCGKNNRAPAGTNITCTANACPEVEKADATFLYSFEDSGVGDVTGFLALDNTNKLIVLSFRGSRSIENWIGNLNFELKEINDICSGCRGHAGFTSSWRSVADTLRQKVEDAVREHPDYRVVFTGHSLGGALATVAGADLRGNKYDIDVFSYGAPRVGNRAFAEFLTVQTGGTLYRITHTNDIVPRLPPREFGYSHSSPEYWIKSGTKVPVRRRDIVKIEGIDATGGNNQPNIPSITAHLWYFGLIGTC

SEQ ID NO: 14774 - protein, 268 aa, Thermomyces lanuginosus
EVSQDLFNQFNLFAQYSAAAYCGKNNRAPAGTNITCTANACPEVEKADATFLYSFEDSGVGDVTGFLALDNTNKLIVLSFRGSRSIENWIGNLNFELKEINDICSGCRGHAGFTSSWRSVADTLRQKVEDAVREHPDYRVVFTGHSLGGALATVAGADLRGNKYDIDVFSYGAPRVGNRAFAEFLTVQTGGTLYRITHTNDIVPRLPPREFGYSHSSPEYWIKSGTLVPVRRRDIVKIEGIDATGGNNQPNIPSGTAHLWYFGLIGTC

SEQ ID NO: 14775 - protein, 268 aa, Thermomyces lanuginosus
EVSQDLFNQFNLFAQYSAAAYCGRNNDAPAGTQITCTGNACPEVERADATFLYSFEDSGVGDVTGFLALDNTNRLIVLSFRGSRSIENWIGNLNFDLREINDICSGCRGHDGFTSSWRSVADTLRQRVEDAVREHPDYRVVFTGHSLGGALATVAGADLRGNGYDIDVFSYGAPRVGNRAFAEFLTVQTGGTLYRITHTNDIVPKLPPREFGYSHSSPEYWIRSGTLVPVTRNDIVRIEGIDATGGNNQPNIPDIPAHLWYFGLIGTC

SEQ ID NO: 14776 - protein, 268 aa, Thermomyces lanuginosus
EVSQDLFNQFNLFAQYSAAAYCGKNNRAPAGTNITCTANACPEVEKADATFLYSFEDSGVGDVTGFLALDNTNKLIVLSFRGSRSIENWIGNLNFELKEINDICSGCRGHAGFTSSWRSVADTLRQKVEDAVREHPDYRVVFTGHSLGGALATVAGADLRGNKYDIDVFSYGAPRVGNRAFAEFLTVQTGGTLYRITDTNDIVPRLPPREFGYSHSSPEYWIKSGTLVPVRRRDIVKIEGIDATGGNNQPNIPSITAHLWYFGLIGTC

SEQ ID NO: 14777 - protein, 268 aa, Thermomyces lanuginosus
EVSQDLFNQFNLFAQYSAAAYCGKNNRAPAGTNITCTANACPEVEKADATFLYSFEDSGVGDVTGFLALDNTNKLIVLSFRGSRSIENWIGNLNFEFKEINDICSGCRGHAGFTSSWRSVADTLRQKVEDAVREHPDYRVVFTGHSLGGALATVAGADLRGNKYDIDVFSYGAPRVGNRAFAEFLTVQTGGTLYRITHTNDIVPRLPPREFGYSHSSPEYWIKSGTLVPVRRRDIVKIEGIDATGGNNQPNIPSITAHLWYFGLIGTC

SEQ ID NO: 14778 - protein, 268 aa, Thermomyces lanuginosus
EVSQDLFNQFNLFAQYSAAAYCGKNNRAPAGTNITCTANACPEVEKADATFLYSFEDSGVGDVTGFLALDNTNKLIVLSFRGSRSIENWIGNLNFELKEINDICSGCRGHAGFTSSWRSVADTLRQKVEDAVREHPDYRVVFTGHSLGGALATVAGADLRGNKYDIDVFSYGAPRVGNRAFAEFLTVQTGGTLYRITSTNDIVPRLPPREFGYSHSSPEYWIKSGTLVPVRRRDIVKIEGIDATGGNNQPNIPSITAHLWYFGLIGTC

SEQ ID NO: 14779 - protein, 268 aa, Thermomyces lanuginosus
EVSQDLFNQFNLFAQYSAAAYCGKNNRAPAGTNITCTANACPEVEKADATFLYSFEDSGVGDVTGFLALDNTNKLIVLSFRGSRSIENWIGNLNFELKEINDICSGCRGHAGFTSSWRSVADTLRQKVEDAVREHPDYRVVFTGHSLGGALATVAGADLRGNKYDIDVFSYGAPRVGNRAFAEFLTVQTGGTLYRITATNDIVPRLPPREFGYSHSSPEYWIKSGTLVPVRRRDIVKIEGIDATGGNNQPNIPSITAHLWYFGLIGTC

SEQ ID NO: 14780 - protein, 268 aa, Thermomyces lanuginosus
EVSQDLFNQFNLFAQYSAAAYCGKNNRAPAGTNITCTANACPEVEKADATFLYSFEDSGVGDVTGFLALDNTNKLIVLSFRGSRSIENWIGNLNFELKEINDICSGCRGHAGFTSSWRSVADTLRQKVEDAVREHPDYRVVFTGHSLGGALATVAGADLRGNKYDIDVFSYGAPRVGNRAFAEFLTVQTGGTLYRITHTNDIVPRLPPREFGYSHSSPEYWIKSGTLVPVRRRDIVKIEGIDATGGNNQPNIPSITAHLFYFGLIGTC

SEQ ID NO: 14781 - protein, 268 aa, Thermomyces lanuginosus
EVSQDLFNQFNLFAQYSKAAYCKKNNSAEAGTNITCTGNACPEVEKADATFLYSFEDSGVGDVTGFLALDNTNKQIILSFRGSRSIENWIGNLNFDLKEINDICSGCKGHDGFTSSWRSVADTLRQKVEDAVREFPDYRVVFTGHSLGGALATVAGADLRGNGYDIDVFSYGAPRVGNRAFAEFLTHQTGGTLYRITHTNDIVPRLPPREFGYSHSSPEYWIKSGTLVPVTRNDIVKIEGIDATGGNNQPNIPDIPAHLWYFGLIGTC

SEQ ID NO: 14782 - protein, 268 aa, Thermomyces lanuginosus
EVSQDLFNQFNLFAQYSAAAYCGKNNDAPAGTNITCTGNACPEVEKADATILYSFEDSGVGDVTGFLALDNTNKLIVLSFRGSRSIENWIGNLNFDLKEINDICSGCRGHDGFTSSWRSVADTLRQKVEDAVREHPDYRVVFTGHSLGGALATVAGADLRGNGYDIDVFSYGAPRVGNRAFAEFLTVQTGGTLYRITNTNDCVPRLPPRQFGYSHSSPEYWIKSGTLPPVRRRDIVKIEGIDATGGNNQPNICDITAHLWYFGLIGTC

SEQ ID NO: 14783 - protein, 268 aa, Thermomyces lanuginosus
EVSQDLFNQFNLFAQYSAAAYCSKNNNAPAGTNITCTGNICPEVEKADATFLYSFRDSGEGDVTGFLALDNTNKLIVLSFRGSRSIENWIGNLNFDLKEINDICSGCRGHDGFTSSWFSVADTLRQKVEDAVREHPDYRVVFTGHSLGGALATVAGADLRGNGYDIDVFSYGAPRVGNRAFAEFLTVQTGGTLYRITHTNDIVPRLPPREFGYSHSSPEYWIKSGTLVPVRRRDIVKIEGIDAEGGNNQPNIPDIPAHLWYFGLIGTC

SEQ ID NO: 14784 - protein, 268 aa, Thermomyces lanuginosus
EVSQDLFNQFNLFAQYSAAAYCGKNNRAPAGTQITCTGNACPEVEKADATFLYSFEDSGVGDVTGFLALDNTNKLIVLSFRGSRSIENWITNLNFEQKEINDICSGCRGHAGFTSSWRSVADTLRQKVEDAVREHPDYRVVFTGHSLGGALATVAGADLRGNKYDIDVFSYGAPRVGNRAFAEFLTVQTGGTLYRITHTNDIVPRLPPREFGYSHSSPEYWIKSGTLVPVRRRDIVKIEGIDATGGNNQPNIPSITAHLWYFGLIGTC

SEQ ID NO: 14785 - protein, 268 aa, Thermomyces lanuginosus
EVSQDLFNQFNLFAQYSAAAYCGKNNRAPAGTNITCTANACPEVEKADATMLYSFEDSGVGDVTGFLALDNTNKLIVLSFRGSRSIENWIGNLNFELKEINDICSGCRGHAGFTSSWRSVADTLRQKVEDAVREHPDYRVVFTGHSLGGALATVAGADLRGNKYDIDVFSYGAPRVGNRAFAEFLTVQTGGTLYRITHTNDIVPRLPPREFGYSHSSPEYWIKSGTLVPVRRRDIVKIEGIDATGGNNQPNIPSITAHLWYFGLIGTC

SEQ ID NO: 14786 - protein, 268 aa, Thermomyces lanuginosus
EVSQDLFNQFNLFAQYSAAAYCGKNNRAPAGTNITCTANACPEVEKADATFLYSFEDSGVGDVTGFLALDNTNKLIVLSFRGSRSIENWIGNLNFELKEINDICSGCRGHAGFTSSWRSVADTLRQKVEDAVREHPDYRVVFTGHSLGGALATVAGADLRGNKYDIDVFSYGAPRVGNRAFAEFLTVQTGGTLYRITTTNDIVPRLPPREFGYSHSSPEYWIKSGTLVPVRRRDIVKIEGIDATGGNNQPNIPSITAHLWYFGLIGTC

SEQ ID NO: 14787 - protein, 268 aa, Thermomyces lanuginosus
EVSQDLFNQFNLFAQYSAAAYCGKNNRAPAGTNITCTANACPEVEKADATFLYSFEDSGVGDVTGFLALDNTNKLIVLSFRGSRSIENWIGNLNFELKEINDICSGCRGHAGFTSSWRSVADTLRQKVEDAVREHPDYRVVFTGHSLGGVLATVAGADLRGNKYDIDVFSYGAPRVGNRAFAEFLTVQTGGTLYRITHTNDIVPRLPPREFGYSHSSPEYWIKSGTLVPVRRRDIVKIEGIDATGGNNQPNIPSITAHLWYFGLIGTC

SEQ ID NO: 14788 - protein, 268 aa, Thermomyces lanuginosus
EVSQDLFNQFNLFAQYSAAAYCGKNNRAPAGTNITCTANACPEVEKADATFLYSFEDSGVGDVTGFLALDNTNKLIVLSFRGSRSIENWIGNLNFELKEINDICSGCRGHAGFTSSWRSVADTLRQKVEDAVREHPDYRVVFTGHSLGGALATVAGADLRGNKYDIDVFSYGAPRVGNRAFAEFLTVQTGGTLYRITHTNDIVPRLPPREFGYSHSSPEYWIKSGTLVPVRRRDIVKIEGIDATGGNNQPNIPSTTAHLWYFGLIGTC

SEQ ID NO: 14789 - protein, 268 aa, Thermomyces lanuginosus
EVSQDLFNQFNLFAQYSAAAYCGKNNDAPAGTKITCTGNACPEVEKADATVLYSFEDSGVGDVTGFLALDNTNKLIVLSFRGSRSIENWIGNLNFDLEEIDDICSGCRGHDGFTSSWRSVADTLRQKVEDAVREHPDYRVVFTGHSLGGALATVAGADLRGNGYDIDVFSYGAPRVGNRAFAEFLTVQTGGTLYRITSTNDIVPRLPPRKFGYSHSSPEYWIKPGTLVPVRRRDIVKIEGIDATGGNNQPNIPDIPAHLWYFGLIGTC

SEQ ID NO: 14790 - protein, 268 aa, Thermomyces lanuginosus
EVSQDLFNQFNLFAQYSAAAYCGKNNRAPAGTNITCTANACPEVEKADATFLYSFEDSGVGDVTGFLALDNTNKLIVLSFQGSRSIENWIGNLNFELKEINDICSGCRGHAGFTSSWRSVADTLRQKVEDAVREHPDYRVVFTGHSLGGALATVAGADLRGNKYDIDVFSYGAPRVGNRAFAEFLTVQTGGTLYRITHTNDIVPRLPPREFGYSHSSPEYWIKSGTLVPVRRRDIVKIEGIDATGGNNQPNIPSITAHLWYFGLIGTC

SEQ ID NO: 14791 - protein, 268 aa, Thermomyces lanuginosus
EVSQDLFNQFNLFAQYSAAAYCGKNNRAPAGTNITCTANACPEVEKADATFLYSFKDSGVGDVTGFLALDNTNKLIVLSFRGSRSIENWIGNLNFELKEINDICSGCRGHAGFTSSWRSVADTLRQKVEDAVREHPDYRVVFTGHSLGGALATVAGADLRGNKYDIDVFSYGAPRVGNRAFAEFLTVQTGGTLYRITHTNDIVPRLPPREFGYSHSSPEYWIKSGTLVPVRRRDIVKIEGIDATGGNNQPNIPSITAHLWYFGLIGTC

SEQ ID NO: 14792 - protein, 268 aa, Thermomyces lanuginosus
EVSQDLFNQFNLFAQYSAAAYCGKNNRAPAGTNITCTANACPEVEKADATFLYSFEDSGVGDVTGFLALDNTNKLIVLSFRGSRSIENWIGNLNFELKEINDICSGCRGHAGFTSSWRSVADTLRQKVEDAVREHPDYRVVFTGHSLGGALATVAGADLRGNKYDIDVFSYGAPRVGNRAFAEFLTVQTGGTLYRITHTNDIVPRLPPREFGYSHSSPEYWIKPGTLVPVRRRDIVKIEGIDATGGNNQPNIPSITAHLWYFGLIGTC

SEQ ID NO: 14793 - protein, 268 aa, Thermomyces lanuginosus
EVSQDLFNQFNLFAQYSAAAYCGKNNRAPAGTNITCTANACPEVEKADATFLYSFEDSGVGDVTGFLALDNTNKLIVLSFRGSRSIENWIGNLNFELKEINDICSGCRGHAGFTSSWRSVADTLRQKVEDAVREHPDYRVVFTGHSLGGALATVAGADLRGNKYDIDVFSYGAPRVGNRAFAEFLTVQTGGTLYRITHTNDIVPRLPPREFGYSHSSPEYWIKSGTLVPVRRRDIVKIEGIDATGGNNQPNIPSVTAHLWYFGLIGTC

SEQ ID NO: 14794 - protein, 268 aa, Thermomyces lanuginosus
EVSQDLFNQFNLFAQYSAAAYCGKNNRAPAGTNITCTANACPEVEKADATFLYSFEDSGVGDVTGFLALDNTNKLIVLSFRGSRSIENWIGNLNFELKEINDICSGCRGHAGFTSSWRSVADTLRQKVEDAVREHPDYRVVFTGHSLGGALATVAGADLRGNKYDIDVFSYGAPRVGNRAFAEFLTVQTGGTLYRITHTRDIVPRLPPREFGYSHSSPEYWIKSGTLVPVRRRDIVKIEGIDATGGNNQPNIPSITAHLWYFGLIGTC

SEQ ID NO: 14795 - protein, 268 aa, Thermomyces lanuginosus
EVSQDLFNQFKLFAQYSAAAYCQKNNDAPAGTNITCTGNACPEVEKADATFLYSFEDSGVGDVTGFLALDNTNKQIVLSFRGSRSIENWIGNLRFDLKEINDICSGCRGHAGFTSSWRSVADTLRQKVEAAVREHPDYRVVFTGHSLGGALATIAWADLRGNGYDIDVFSYGAPRVGNRAFAEFLTNQTGGTLYRITHTNDIVPRLPPREFGYSHSSPEYWIKSGTLVPVTRNDIVKIEGIDATGGNNQPNIPDIPAHLWYFGRIGTC

SEQ ID NO: 14796 - protein, 268 aa, Thermomyces lanuginosus
EVSQDLFNQFNLFAQYSAAAYCGKNNRAPAGTNITCTANACPEVEKADATFLYSFEDSGVGDVTGFLALDNTNKLIVLSFRGSRSIENWIGNLNFELKEINDICSGCRGHAGFTSSWRSVADTLRQKVEDAVREHPDYRVVFTGHSLGGALATVAGADLRGNKYDIDVFSYGAPRVGNRAFAEFLTVQTGGTLYRITQTNDIVPRLPPREFGYSHSSPEYWIKSGTLVPVRRRDIVKIEGIDATGGNNQPNIPSITAHLWYFGLIGTC

SEQ ID NO: 14797 - protein, 268 aa, Thermomyces lanuginosus; identical to SEQ ID NO: 7756

SEQ ID NO: 14798 - protein, 268 aa, Thermomyces lanuginosus
EVSQDLFNQFNLFAQYSAAAYCGKNNRAPAGTNITCTANACPEVEKADATFLYSFEDSGVGDVTGFLALDNTNKLIVLSFRGSRSIENWIGNLNFELKEINDICSGCRGHAGFTSSWRSVADTLRQKVEDAVREHPDYRVVFTGHSLGGALATVAGADLRGNKYDIDVFSYGAPRVGNRAFAEFLTVQTGGTLYRITHTNDIVPRLPPREFGYSHSSPEYWIKSGTLVPVRRRDIVKIEGIDATGGNNQPNIPSITAHLEYFGLIGTC

SEQ ID NO: 14799 - protein, 268 aa, Thermomyces lanuginosus
EVSQDLFNQFNLFAQYSAAAYCGKNNRAPAGTNITCTANACPEVEKADATFLYSFEDSGVGDVTGFLALDNTNKLIVLSFRGSRSIENWIGNLNFELKEINDICSGCRGHAGFTSSWRSVADTLRQKVEDAVREHPDYRVVFTGHSLGGALATVAGADLRGNKYDIDVFSYGAPRVGNRAFAEFLTVQTGGTLYRITHTNDIVPRLPPREFGYSHSSPEYWIKSGTDVPVRRRDIVKIEGIDATGGNNQPNIPSITAHLWYFGLIGTC

SEQ ID NO: 14800 - protein, 268 aa, Thermomyces lanuginosus
EVSQDLFNQFNLFAQYSAAAYCGKNNRAPAGTNITCTANACPEVEKADATFLYSFEDSGVGDVTGFLALDNTNKLIVLSFRGSRSIENWIGNLNFELKEINDICSGCRGHAGFTSSWRSVADTLRQKVEDAVREHPDYRVVFTGHSLGGALATVAGADLRGNKYDIDVFSYGAPRVGNRAFAEFLTVQTGGTLYRITHTNDIVPRLPPRRFGYSHSSPEYWIKSGTLVPVRRRDIVKIEGIDATGGNNQPNIPSITAHLWYFGLIGTC

SEQ ID NO: 14801 - protein, 268 aa, Thermomyces lanuginosus
EVSQDLFNQFNLFAQYSAAAYCGKNNRAPAGTNITCTANACPEVEKADATFLYSFEDSGVGDVTGFLALDNTNKLIVLSFRGSRSIENWIGNLNFELKEINDICSGCRGHAGFTSSWRSVADTLRQKVEDAVREHPDYRVVFTGHSLGGALATVAGADLRGNKYDIDVFSYGAPRVGNRAFAEFLTVQTGGTLYRITETNDIVPRLPPREFGYSHSSPEYWIKSGTLVPVRRRDIVKIEGIDATGGNNQPNIPSITAHLWYFGLIGTC

SEQ ID NO: 14802 - protein, 268 aa, Thermomyces lanuginosus
EVSQDLFNQFNLFAQYSKAAYCKANNDAPAGTNITCTGNACPEVEKADATFLYSFEDSGVGDVTGFLALDNTNKQIVLSFRGSRSIENWIGNLRFDLKEINDICSGCRGHAGFTSSWRSVADTLRQKVEAAVREHPDYRVVFTGHSLGGALATIAGADLRGNGYDIDVFSYGAPRVGNRAFAEFLTVQQGGTLYRITHTNDIVPRLPPREFGYSHSSPEYWIKSGTLVPVTRNDIVKIEGIDATGGNNQPNIPDIPAHLWYFGLIGTC

SEQ ID NO: 14803 - protein, 268 aa, Thermomyces lanuginosus
EVSQDLFNQFNLFAQYSAAAYCGKNNRAPAGTNITCTGNACPEVEKADATFLYSFENSGSGDVTGFLALDNTNKLIVLSFRGSRSVENWIGNLNFDLKEINDICSGCRGHDGFTSSWRSVADTLRQKVEDAVREHPDYRVVFTGHSLGGGLATVAGADLRGNGYDIDVFSYGAPRVGNRAFAEFLTVQTGGTLYRITHTNDIVPRLPPREFGYSHSSPEYWIKSGTGVPVRRRDIVKIEGIDATGGNNQPNIPDIKAHLWYFGLIGTC

SEQ ID NO: 14804 - protein, 268 aa, Thermomyces lanuginosus
EVSQDLFNQFNLFAQYSAAAYCGKNNRAPAGTNITCTANACPEVEKADATFLYSFEDSGVGDVTGFLALDNTNKLIVLSFRGSRSIENWIGNLNFELKEINDICSGCRGHAGFTSSWRSVADTLRQKVEDAVREHPDYRVVFTGHSLGGALATVAGADLRGNKYDIDVFSYGAPRVGNRAFAEFLTVQTGGTLYRITHTNDIVPRLPPREFGYSHSSPEYWIKHGTLVPVRRRDIVKIEGIDATGGNNQPNIPSITAHLWYFGLIGTC

SEQ ID NO: 14805 - protein, 268 aa, Thermomyces lanuginosus
EVSQDLFNQFNLFAQYSAAAYCGKNNRAPAGTQITCTANACPEVEKADATFLYSFEDSGVGDVTGFLALDNTNKLIVLSFRGSRSIENWITNLNFELKEINDICSGCRGHAGFTSSWRSVADTLRQKVEDAVREHPDYRVVFTGHSLGGALATVAGADLRGNAYDIDVFSYGAPRVGNRAFAEFLTVQTGGTLYRITHTNDIVPRLPPREFGYSHSSPEYWIKSGTLVPVRRRDIVKIEGIDATGGNNQPNIPSITAHLWYFGLIGTC

SEQ ID NO: 14806 - protein, 268 aa, Thermomyces lanuginosus
EVSQDLFNQFNLFAQYSAAAYCGKNNRAPAGTNITCTANACPEVEKADATFLYSFEDSGVGDVTGFLALDNTNKLIVLSFRGSRSIENWIGNLNFELKEINDICSGCRGHAGFTSSWRSVADTLRQKVEDAVREHPDYRVVFTGHSLGGALATVAGADLRGNKYDIDVFSYGAPRVGNRAFAEFLTVQTGGTLYRITHTNDIVPRLPPREFGYSHSSPEYWIKSGTLVPVRRRDIVKIEGIDATGGNNQPNIPSITAHLSYFGLIGTC

SEQ ID NO: 14807 - protein, 268 aa, Thermomyces lanuginosus
EVSQDLFNQFNLFAQYSAAAYCGKNNRAPAGTNITCTANACPEVEKADATFLYSFEDSGVGDVTGFLALDNTNKLIVLSFRGSRSIENWIGNLNFELKEINDICSGCRGHAGFTSSWRSVADTLRQKVEDAVREHPDYRVVFTGHSLGGALATVAGADLRGNKYDIDVFSYGAPRVGNRAFAEFLTVQTGGTLYRITFTNDIVPRLPPREFGYSHSSPEYWIKSGTLVPVRRRDIVKIEGIDATGGNNQPNIPSITAHLWYFGLIGTC

SEQ ID NO: 14808 - protein, 268 aa, Thermomyces lanuginosus
EVSQDLFNQFNLFAQYSAAAYCGKNNRAPAGTNITCTANACPEVEKADATFLYSFEDSGVGDVTGFLALDNTNKLIVLSFRGTRSIENWIGNLNFELKEINDICSGCRGHAGFTSSWRSVADTLRQKVEDAVREHPDYRVVFTGHSLGGALATVAGADLRGNKYDIDVFSYGAPRVGNRAFAEFLTVQTGGTLYRITHTNDIVPRLPPREFGYSHSSPEYWIKSGTLVPVRRRDIVKIEGIDATGGNNQPNIPSITAHLWYFGLIGTC

SEQ ID NO: 14809 - protein, 268 aa, Thermomyces lanuginosus
EVSQDLFNQFNLFAQYSAAAYCGKNNDAPAGTQITCTGNACPEVEKADATFLYSFEDSGVGDVTGFLALDNTNKLIVLSFRGSRSIENWITNLNFELTEINDICSGCRGHDGFISSWRSVADTLRQKVEDAVREHPDYRVVFTGHSLGGALATVAGADLRGNSYDIDVFSYGAPRVGNRAFAEFLTVQTGGTLYRITHTNDIVPRLPPRVFGYSHSSPEYWIKSGTLVPVRRRDIVKIEGIDATGGNNQPNIPKIAAHLWYFGLIGTC

SEQ ID NO: 14810 - protein, 268 aa, Thermomyces lanuginosus
EVSQDLFNQFNLFAQYSAAAYCGKNNDAPAGTKITCTGNACPEVEKADATILYSFEDSGVGDVTGFLALDNTNKLIVLSFRGSRSIENWIGNLNFDLEEIDDICSGCRGHDGFTSSWRSVADTLRQKVEDAVREHPDYRVVFTGHSLGGALATVAGADLRGNGYDIDVFSYGAPRVGNRAFAEFLTVQTGGTLYRITSTNDIVPRLPPRKFGYSHSSPEYWIKPGTLVPVRRRDIVKIEGIDATGGNNQPNIPDIPAHLWYFGLIGTC

SEQ ID NO: 14811 - protein, 268 aa, Thermomyces lanuginosus
EVSQDLFNQFNLFAQYSAAAYCGKNNRAPAGTNITCTANACPEVEKADATFLYSFEDSGVGDVTGFLALDNTNKLIVLSFRGSRSIENWIGNLNFELKEINDICSGCRGHAGFTSSWRSVADTLRQKVEDAVREHPDYRVVFTGHSLGGALATVAGADLRGNKYDIDVFSYGAPRVGNRAFAEFLTVQTGGTLYRITHTNDIVPRLPPREFGYSHSSPEYWIKIGTLVPVRRRDIVKIEGIDATGGNNQPNIPSITAHLWYFGLIGTC

SEQ ID NO: 14812 - protein, 268 aa, Thermomyces lanuginosus
EVSQDLFNQFNLFAQYSAAAYCGKNNRAPAGTNITCTANACPEVEKADATFLYSFEDSGVGDVTGFLALDNTNKLIVLSFRGSRSIENWIGNLNFELKEINDICSGCRGHAGFTSSWRSVADTLRQKVEDAVREHPDYRVVFTGHSLGGALATVAGADLRGNKYDIDVFSYGAPRVGNRAFAEFLTVQTGGTLYRITHTNDLVPRLPPREFGYSHSSPEYWIKSGTLVPVRRRDIVKIEGIDATGGNNQPNIPSITAHLWYFGLIGTC

SEQ ID NO: 14813 - protein, 268 aa, Thermomyces lanuginosus
EVSQDLFNQFNLFAQYSAAAYCGKNNRAPAGTNITCTANACPEVEKADATFLYSFEDSGVGDVTGFLALDNTNKLIVLSFRGSRSIENWIGNLNFEPKEINDICSGCRGHAGFTSSWRSVADTLRQKVEDAVREHPDYRVVFTGHSLGGALATVAGADLRGNKYDIDVFSYGAPRVGNRAFAEFLTVQTGGTLYRITHTNDIVPRLPPREFGYSHSSPEYWIKSGTLVPVRRRDIVKIEGIDATGGNNQPNIPSITAHLWYFGLIGTC

SEQ ID NO: 14814 - protein, 268 aa, Thermomyces lanuginosus
EVSQDLFNQFNLFAQYSAAAYCSKNNNAPAGTNITCTGNICPEVEKADATFLYSFRDSGVGDVTGFLALDNTNKLIVLSFRGSRSIENWIGNLNFDLKEINDICSGCRGHDGFTSSWFSVADTLRQKVEDAVREHPDYRVVFTGHSLGGALATVAGADLRGNGYDIDVFSYGAPRVGNRAFAEFLTVQTGGTLYRITHTNDIVPRLPPREFGYSHSSPEYWIKSGTLVPVRRRDIVKIEGIDAEGGNNQPNIPDITAHLWYFGLIGTC

SEQ ID NO: 14815 - protein, 268 aa, Thermomyces lanuginosus
EVSQDLFNQFNLFAQYSAAAYCGKNNRAPAGTNITCTANACPEVEKADATFLYSFEDSGVGDVTGFLALDNTNKLIVLSFRGSRSIENWIGNLNFELKEINDICSGCRGHAGFTSSWRSVADTLRQKVEDAVREHPDYRVVFTGHSLGGALATVAGADLRGNKYDIDVFSYGAPRVGNRAFAEFLTVQTGGTLYRITHTNDIVPRLPPRELGYSHSSPEYWIKSGTLVPVRRRDIVKIEGIDATGGNNQPNIPSITAHLWYFGLIGTC

SEQ ID NO: 14816 - protein, 268 aa, Thermomyces lanuginosus
EVSQDLFNQFKLFAQYSAAAYCKKNNDAPAGTNITCTGNACPEVEKADATFLYSFEDSGVGDVTGFLALDNTNKRIVLSFRGSRSIENWIGNLRFDLKEINDICSGCRGHAGFTSSWRSVADTLRQKVEDAVREHPDYRVVFTGHSLGGALATIAWADLRGNGYDIDVFSYGAPRVGNRAFAEFLTNQQGGTLYRITHTNDIVPRLPPREFGYSHSSPEYWIKSGTLVPVTRNDIVKIEGIDATGGNNQPNIPDIPAHLWYFGRIGTC

SEQ ID NO: 14817 - protein, 268 aa, Thermomyces lanuginosus
EVSQDLFNQFNLFAQYSAAAYCGKNNRAPAGTNITCTANACPEVEKADATFLYSFEDSGVGDVTGFLALDNTNKLIVLSFRGSRSIENWIGNLNFELKEINDICSGCRGHAGFTSSWRSVADTLRQKVEDAVREHPDYRVVFTGHSLGGALATVAGADLRGNKYDIDVFSYGAPRVGNRAFAEFLTVQTGGTLYRITHTNDIVPRLPPREFGYSHSSPEYWIKSGTEVPVRRRDIVKIEGIDATGGNNQPNIPSITAHLWYFGLIGTC

SEQ ID NO: 14818 - protein, 268 aa, Thermomyces lanuginosus
EVSQDLFNQFNLFAQYSAAAYCGKNNRAPAGTNITCTANACPEVEKADATFLYSFEDSGVGDVTGFLALDNTNKLIVLSFRGSRSIENWIGNLNFELKEINDICSGCRGHAGFTSSWRSVADTLRQKVEDAVREHPDYRVVFTGHSLGGALATVAGADLRGNKYDIDVFSYGAPRVGNRAFAEFLTVQTGGTLYRITHTNDIVPRLPPREFGYSHSSPEYWIKSGTLVPVRRRDIVKIEGIDATGGNNQPNIPSNTAHLWYFGLIGTC

SEQ ID NO: 14819 - protein, 268 aa, Thermomyces lanuginosus
EVSQDLFNQFNLFAQYSAAAYCSKNNDAPAGTNITCTGNICPEVEKADATILYSFRDSGVGDVTGFLALDNTNKLIVLSFRGSRSIENWIGNLNFDLKEINDICSGCRGHDGFTSSWFSVADTLRQKVEDAVREHPDYRVVFTGHSLGGALATVAGADLRGNGYDIDVFSYGAPRVGNRAFAEFLTVQTGGTLYRITHTNDIVPRLPPREFGYSHSSPEYWIKSGTLVPVRRRDIVKIEGIDAEGGNNQPNIPDITAHLWYFGLIGTC

SEQ ID NO: 14820 - protein, 268 aa, Thermomyces lanuginosus
EVSQDLFNQFNLFAQYSAAAYCGKNNRAPAGTNITCTANACPEVEKADATFLYSFEDSGVGDVTGFLALDNTNKLIVLSFRGTRSIENWIADLNFTLKEINDICSGCRGHAGFTSSWRSVADTLRQKVEDAVREHPDYRVVFTGHSLGGALATVAGADLRGNKYDIDVFSYGAPRVGNRAFAEFLTVQTGGTLYRITHTNDIVPRLPPREFGYSHSSPEYWIKSGTLVPVRRRDIVKIEGIDATGGNNQPNIPSITAHLWYFGLIGTC

SEQ ID NO: 14821 - protein, 268 aa, Thermomyces lanuginosus
EVSQDLFNQFNLFAQYSKAAYCQKNNSAEAGTNITCTGNACPEVEKADATFLYSFEDSGVGDVTGFLALDNTNKQIILSFRGSRSIENWIGNLNFDLKEINDICSGCKGHDGFTSSWRSVADTLRQKVEDAVREFPDYRVVFTGHSLGGALATVAGADLRGNGYDIDVFSYGAPRVGNRAFAEFLTHQTGGTLYRITHTNDIVPRLPPREFGYSHSSPEYWIKSGTLVPVTRNDIVKIEGIDATGGNNQPNIPDIPAHLWYFGLIGTC

SEQ ID NO: 14822 - protein, 268 aa, Thermomyces lanuginosus
EVSQDLFNQFNLFAQYSAAAYCGKNNRAPAGTNITCTANACPEVEKADATFLYSFEDSGVGDVTGFLALDNTNKLIVLSFRGSRSIENWMGNLNFELKEINDICSGCRGHAGFTSSWRSVADTLRQKVEDAVREHPDYRVVFTGHSLGGALATVAGADLRGNKYDIDVFSYGAPRVGNRAFAEFLTVQTGGTLYRITHTNDIVPRLPPREFGYSHSSPEYWIKSGTLVPVRRRDIVKIEGIDATGGNNQPNIPSITAHLWYFGLIGTC

SEQ ID NO: 14823 - protein, 268 aa, Thermomyces lanuginosus
EVSQDLFNQFNLFAQYSAAAYCGRNNDAPAGTQITCTGNACPEVERADATFLYSFEDSGVGDVTGFLALDNTNRLIVLSFRGSRSIENWIGNLNFDLREINDICSGCRGHDGFTSSWRSVADTLRQRVEDAVREHPDYRVVFTGHSLGGALATVAGADLRGNGYDIDVFSYGAPKVGNRAFAEFLTVQTGGTLYRITHTNDIVPRLPPREFGYSHSSPEYWIRSGTLVPVTRNDIVRIEGIDATGGNNQPNIPDIPAHLWYFGLIGTC

SEQ ID NO: 14824 - protein, 268 aa, Thermomyces lanuginosus
EVSQDLFNQFNLFAQYSAAAYCGKNNDAPAGTNITCTGNICPEVEKADATFLYSFRNSGVGDVTGFLALDNTNKLIVLSFRGSRSIENWIGNLNFDLIEINDICSGCRGHDGFTSSWFSVADTLRQKVEDAVREHPDYRVVFTGHSLGGALATVAGADLRGNSYDIDVFSYGAPRVGNRAFAEFLTVQTGGTLYRITHTNDIVPRLPPREFGYSHSSPEYWIKSGTLVPVRRRDIVKIEGIDATGGNNQPNIPDITAHLWYFGLIGTC

SEQ ID NO: 14825 - protein, 268 aa, Thermomyces lanuginosus
EVSQDLFNQFNLFAQYSAAAYCSKNNNAPAGTNITCTGNACPEVEKADATFLYSFRDSGVGDVTGFLALDNTNKLIVLSFRGSRSIENWIGNLNFDLIEINDICSGCRGHDGFTSSWFSVADTLRQKVEDAVREHPDYRVVFTGHSLGGALATVAGADLRGNGYDIDVFSYGAPRVGNRAFAEFLTVQTGGTLYRITHTNDIVPRLPPREFGYSHSSPEYWIKSGTLVPVRRRDIVKIEGIDAEGGNNQPNIPDITAHLWYFGLIGTC

SEQ ID NO: 14826 - protein, 268 aa, Thermomyces lanuginosus
EVSQDLFNQFNLFAQYSAAAYCGKNNNAPAGTNITCTGNACPEVEKADATFLYSFRDSGVGDVTGFLALDNTNKLIVLSFRGSRSIENWIGNLNFDLIEINDICSGCRGHDGFTSSWFSVADTLRQKVEDAVREHPDYRVVFTGHSLGGALATVAGADLRGNGYDIDVFSYGAPRVGNRAFAEFLTVQTGGTLYRITHTNDIVPRLPPREFGYSHSSPEFWIKSGTLVPVRRRDIVKIEGIDAEGGNNQPNIPDITAHLWYFGLIGTC

SEQ ID NO: 14827 - protein, 268 aa, Thermomyces lanuginosus
EVSQDLFNQFNLFAQYSAAAYCGKNNDAPAGTKITCTGNACPEVEKADATFLYSFEDSGVGDVTGFLALDNTNKLIVLSFRGSRSIENWIGNLNFDLKEINDICSGCRGHDGFTSSWRSVADTLRQKVEDAVREHPDYRVVFAGHSLGGALATVAGADLRGNNYSIDVFSYGAPRVGNRAFAEFLTVQTGGTLYRITNTNDIVPRLPPREFGYSHSSPEYWIKSGTLPPVRRRDIVKIEGIDATGGNNQPNIPDISAHLWYFGLIGTC

SEQ ID NO: 14828 - protein, 268 aa, Thermomyces lanuginosus
EVSQDLFNQFNLFAQYSAAAYCGKNNRAPAGTNITCTANACPEVEKADATFLYSFEDSGVGDVTGFLALDNTNKLIVLSFRGSRSWENWIGNLNFELKEINDICSGCRGHAGFTSSWRSVADTLRQKVEDAVREHPDYRVVFTGHSLGGALATVAGADLRGNKYDIDVFSYGAPRVGNRAFAEFLTVQTGGTLYRITHTNDIVPRLPPREFGYSHSSPEYWIKSGTLVPVRRRDIVKIEGIDATGGNNQPNIPSITAHLWYFGLIGTC

SEQ ID NO: 14829 - protein, 268 aa, Thermomyces lanuginosus
EVSQDLFNQFNLFAQYSAAAYCGKNNRAPAGTNITCTANACPEVEKADATFLYSFEDSGVGDVTGFLALDNTNKLIVLSFRGSRSIENWIGNLNFELKEINDICSGCRGHAGFTSSWRSVADTLRQKVEDAVREHPDYRVVFTGHSLGGALATVAGADLRGNKYDIDVFSYGAPRVGNRAFAEFLTVQTGGTLYRITHTNDIVPRLPPREFGYSHSSPEYWIKSGTLVPVRRRDIVKIEGIDATGGNNQPNIPSITAHLTYFGLIGTC

SEQ ID NO: 14830 - protein, 268 aa, Thermomyces lanuginosus
EVSQDLFNQFNLFAQYSAAAYCGKNNRAPAGTNITCTANACPEVEKADATFLYSFEDSGVGDVTGFLALDNTNKLIVLSFRGSRSIENWIADLNFLLQEINDICSGCRGHAGFTSSWRSVADTLRQKVEDAVREHPDYRVVFTGHSLGGALATVAGADLRGNKYDIDVFSYGAPRVGNRAFAEFLTVQTGGTLYRITHTNDIVPRLPPREFGYSHSSPEYWIKSGTLVPVRRRDIVKIEGIDATGGNNQPNIPSITAHLWYFGLIGTC

SEQ ID NO: 14831 - protein, 268 aa, Thermomyces lanuginosus
EVSVDLFNQFNLFAQYSAAAYCGKNNRAPAGTNITCTANACPEVEKADATFLYSFEDSGVGDVTGFLALDNTNKLIVLSFRGSRSIENWITNLNFELKEINDICSGCRGHAGFTSSWRSVADTLRQKVEDAVREHPDYRVVFTGHSLGGALATVAGADLRGNKYDIDVFSYGAPRVGNRAFAEFLTVQTGGTLYRITHTNDIVPRLPPREFGYSHSSPEYWIKSGTLVPVRRRDIVKIEGIDATGGNNQPNIPSITAHLWYFGLIGTC

SEQ ID NO: 14832 - protein, 268 aa, Thermomyces lanuginosus
EVSQDLFNQFNLFAQYSAAAYCGKNNDAPAGTNITCTGNACPEVEKADATFLYSFEDSGVGCVTGFLALDNTNKLIVLSFRGTRSICNWILDLNYTPQEINDICSGCRGHDGFTSSWRSVADTLRQKVEDAVREHPDYRVVFTGHSLGGALATVAGADLRGNGYDIDVFSYGAPRVGNRAFAEFLTVQTGGTLYRITHTNDIVPRLPPREFGYSHSSPEYWIKSGTLVPVRRRDIVKIEGIDATGGNNQPNIPDIPAHLWYFGLIGTC

SEQ ID NO: 14833 - protein, 268 aa, Thermomyces lanuginosus
EVSLDLFNQFNLFAQYSAAAYCGKNNDAPAGTNITCTGNACPTVEIADATFLYSFEDNGSGDVTGFLALDNTNKLIVLSFRGSRSIENWIGNLNFDLKEINDICSGCRGHDGFTSSWRSVADTLRQKVEDAVREHPDYRVVFTGHSLGGALATVAGADLRGNGYDIDVFSYGAPRVGNRAFAEFLTVQTGGTLYRITHTNDIVPRLPPREFGYSHSSPEYWIKSGTLVPVRRRDIVKIEGIDATGGNNLPNIPIIPAHLWYFGLIGTC

SEQ ID NO: 14834 - protein, 268 aa, Thermomyces lanuginosus
EVSQDLFNQFNLFAQYSAAAYCGKNNRAPAGTNITCTGNACPEVEKADATFLYSFEDNGSGDVTGFLALDNTNKLIVLSFRGSRSVENWIGNLNFDLKEINDICSGCRGHDGFTSSWRSVADTLRQKVEDAVREHPDYRVVFTGHSLGGGLATVAGADLRGNGYDIDVFSYGAPRVGNRAFAEFLTVQTGGTLYRITHTNDIVPRLPPREFGYSHSSPEYWIKSGTGVPVRRRDIVKIEGIDATGGNNQPNIPDIKAHLWYFGLIGTC

SEQ ID NO: 14835 - protein, 268 aa, Thermomyces lanuginosus
EVSQDLFNQFNLFAQYSAAAYCGKNNRAPAGTNITCTANACPEVEKADATFLYSFEDSGVGDVTGFLALDNTNKLIVLSFRGTRSIENWIADLNFILQEINDICSGCRGHDGFTSSWRSVADTLRQKVEDAVREHPDYRVVFTGHSLGGALATVAGADLRGNKYDIDVFSYGAPRVGNRAFAEFLTVQTGGTLYRITHTNDIVPRLPPREFGYSHSSPEYWIKSGTLVPVRRRDIVKIEGIDATGGNNQPNIPSITAHLWYFGLIGTC

SEQ ID NO: 14836 - protein, 268 aa, Thermomyces lanuginosus
EVSVDLFNQFNLFAQYSAAAYCGKNNDAPAGTNITCTGNACPEVEKADATFLYSFEDSGKGDVTGFLALDNTNKLIVLSFRGTRSVENWIGNLNFDLKEINDICSGCRGHDGFTSSWRSVADTLRQKVEDAVREHPDYRVVFTGHSLGGGLATVAGADLRGNGYDIDVFSYGAPRVGNRAFAEFLTVQTGGTLYRITHTNDIVPRLPPREFGYSHSSPEYWIKSGTGVPVRRRDIVKIEGIDATGGNNQPNIPDIKAHLWYFGLIGTC

SEQ ID NO: 14837 - protein, 268 aa, Thermomyces lanuginosus
EVSRDLFNQFNLFAQYSAAAYCGKNNDAPAGTNITCTGNACPEVEKADATLLYSFRDSGVGDVTGFLALDNTNKLIVLSFRGSRSIENWIADLNFILIEINDICSGCRGHDGFTSSWFSVADTLRQKVEDAVREHPDYRVVFTGHSLGGALATVAGADLRGNGYDIDVFSYGAPRVGNRAFAEFLTVQTGGTLYRITHTNDIVPRLPPREFGYSHSSPEFWIKSGTLVPVRRRDIVKIEGIDAEGGNNQPNIPSIPAHLWYFGAIGTC

SEQ ID NO: 14838 - protein, 268 aa, Thermomyces lanuginosus
EVSQDLFNQFNLFAQYSAAAYCGKNNRAPAGTNITCTANACPEVEKADATFLYSFEDSGVGDVTGFLALDNTNKLIVLSFRGTRSIENWIADLNFLLQEYNDICSGCRGHAGFTSSWRSVADTLRQKVEDAVREHPDYRVVFTGHSLGGALATVAGADLRGNKYDIDVFSYGAPRVGNRAFAEFLTVQTGGTLYRITHTNDIVPRLPPREFGYSHSSPEYWIKSGTLVPVRRRDIVKIEGIDATGGNNQPNIPDIPAHLWYFGLIGTC

SEQ ID NO: 14839 - protein, 267 aa, Thermomyces lanuginosus
VSQDLFNQFNLFAQYSAAAYCGKNNDAPAGTNITCTGNACPEVEKADATFLYSFEDAGSGDVTGFLALDNTNKLIVLSFRGTRSIENWIGNLNFDLKEINDICSGCRGHDGFTSSWRSVADTLRQKVEDAVREHPDYRVVFTGHSLGGGLATVAGADLRGNGYDIDVFSYGAPRVGNRAFAEFLTVQTGGTLYRITHTNDIVPRLPPREFGYSHSSPEYWIKSGTGVPVRRRDIVKIEGIDATGGNNQPNIPDAKAHLWYFGLIGTC

SEQ ID NO: 14840 - protein, 267 aa, Thermomyces lanuginosus
VSQDLFNQFRLFAQYSAAAYCGKNNDAPAGTQITCTANACPEVEKADATFLYSFEDSGVGDVTGFLALDNTNKLIVLSFRGSRSIENWINNLRFDLKEINDICSGCRGHDGFTSSWRSVADTLRQKVEDAVREHPDYRVVFTGHSLGGALATVAGADLRGNPYDIDVFSYGAPRGGNRAFAEFLTVQTGGTLYRITHTNDIVPRLPPREFGYSHSSPEYWIKSGTLVPVRRRDIVKIEGIDATGGNNQPNIPSIPAHLWYFGLIGTC

SEQ ID NO: 14841 - protein, 267 aa, Thermomyces lanuginosus
VSQDLFNQFRLFAQYSAAAYCGKNNDAPAGTQITCTANACPEVEKADATFLYSFEDSGVGDVTGFLALDNTNKLIVLSFRGSRSIENWITNLNFDLKEINDICSGCRGHAGFTSSWRSVADTLRQKVEDAVREHPDYRVVFTGHSLGGALATVAGADLRGNPYDIDVFSYGAPRFGNRAFAEFLTVQTGGTLYRITHTNDIVPRLPPREFGYSHSSPEYWIKSGTLVPVRRRDIVKIEGIDATGGNNQPNIPSIPAHLWYFGLIGTC

SEQ ID NO: 14842 - protein, 267 aa, Thermomyces lanuginosus
VSQDLFNQFNLFAQYSAAAYCGKNNDAPAGTNITCTGNACPEVEKADATVLYSFEDSGVGDVTGFLALDNTNKLIVLSFRGSRSIENWIGNLNFELIEINDICSGCRGHAGFTSSWRSVADTLRQKVEDAVREHPDYRVVFTGHSLGGALATVAGADLRGNKYDIDVFSYGAPRVGNRAFAEFLTVQTGGTLYRITSTNDIVPRLPPREFGYSHSSPEFWIKSGTLVPVRRCDIVKIEGIDATGGNNQPNIPDITAHLWYFGLIGTC

SEQ ID NO: 14843 - protein, 267 aa, Thermomyces lanuginosus
VSQDLFNQFNLFAQYSKAAYCGKNNDAPAGTNITCTGNACPEVEKADATFLYSFEDSGKGDVTGFLALDNTNKLIVLSFRGSRSVENWIGNLNFDLKEINDICSGCRGHDGFTSSWRSVADTLRQKVEDAVREHPDYRVVFTGHSLGGGLATVAGADLRGNGYDIDVFSYGAPRVGNRAFAEFLTVQTGGTLYRITHTNDIVPRLPPRAFGYSHSSPEYWIKSGTGVPVRRRDIVKIEGIDATGGNNQPNIPDIKAHLWYFGLIGTC

SEQ ID NO: 14844 - protein, 267 aa, Thermomyces lanuginosus
VSQDLFNQFNLFAQYSAAAYCGKNNDAPAGTNITCTGNACPEVEKADATVLYSFEDSGVGDVTGFLALDNTNKLIVLSFRGSRSIENWIGNLNFELIEINDICSGCRGHAGFTSSWRSVADTLRQKVEDAVREHPDYRVVFTGHSLGGALATVAGADLRGNSYDIDVFSYGAPRVGNRAFAEFLTVQTGGTLYRITSTNDIVPRLPPREFGYSHSSPEFWIKSGTLVPVRRCDIVKIEGIDATGGNNQPNIPDITAHLWYFGLIGTC

SEQ ID NO: 14845 - protein, 267 aa, Thermomyces lanuginosus
VSQDLFNQFNLFAQYSAAAYCGKNNDAPAGTQITCTANACPEVEKADATFLYSFEDSGVGDVTGFLALDNTNKLIVLSFRGSRSIENWITNLNFDLKEINDICSGCRGHDGFTSSWRSVADTLRQKVEDAVREHPDYRVVFTGHSLGGALATVAGADLRGNPYDIDVFSYGAPRFGNRAFAEFLTVQTGGTLYRITHTNDIVPRLPPREFGYSHSSPEYWIKSGTLVPVRRRDIVKIEGIDATGGNNQPNIPSAQAHLWYFGLIGTC

SEQ ID NO: 14846 - protein, 267 aa, Thermomyces lanuginosus
EVSQDLFNQFNLFAQYSAAAYCGKNNDAPAGTNITCTGNACPEVEKADATFLYSFEDTGKGDVTGFLALDNTNKLIVLSFRGSRVENWIGNLNFDLKEINAICSGCRGHDGFTSSWRSVADTLRQKVEDAVREHPDYRVVFTGHSLGGGLATVAGADLRGNGYDIDVFSYGAPRVGNRAFAEFLTVQTGGTLYRITHTNDIVPRLPPREFGYSHSSPEYWIKSGTGVPVRRRDIVKIEGIDATGGNNQPNIPDIKAHLWYFGLIGTC

SEQ ID NO: 14847 - protein, 262 aa, Thermomyces lanuginosus
EVSQDLFNQFNLFAQYSAAAYCGKNNRAPAGTKITCTANACPEVEKADATVLYSFEDSGVGDVTGFLALDNTNKLIVLSFRGSRSIENWIADFDYLLEEINDICSGCRGHAGFTSSWRSVADTLRQKVEDAVREHPDYRVVFTGHSLGGALATVAGADLRGNKYDIDVFSYGAPRVGNRAFAEFLTVQTGGTLYRITHTNDIVPRLPPREFGYSHSSPEYWIKSGTLVPVRRRDIVKIEGIDATGGNNQPNIPSITAHLWYF

SEQ ID NO: 14848 - protein, 268 aa, Thermomyces lanuginosus
EVSQDLFNQFNLFAQYSAAAYCGKNNDAPAGTNITCTGNACPEVEKADATFLYSFEDTGKGDVTGFLALDNTNKLIVLSFRGSRSVENWIGNLNFDLKEINAICSGCRGHDGFTSSWRSVADTLRQKVEDAVREHPDYRVVFTGHSLGGGLATVAGADLRGNGYDIDVFSYGAPRVGNRAFAEFLTVQTGGTLYRITHTNDIVPRLPPRVFGYSHSSPEYWIKSGTGVPVRRRDIVKIEGIDATGGNNQPNIPDIKAHLWYFGLIGTC

SEQ ID NO: 14849 - protein, 268 aa, Thermomyces lanuginosus
EVSQDLFNQFNLFAQYSAAAYCGKNNRAPAGTNITCTANACPEVEKADATFLYSFEDSGVGDVTGFLALDNTNKLIVLSFRGSRSIENWIGNLNFELKEINDICSGCRGHAGFTSSWRSVADTLRQKVEDAVREHPDYRVVFTGHSLGGALATVAGADLRGNKYDIDVFSYGAPRVGNRAFAEFLTVQTGGTLYRITHTNDIVPRLPPREFGYSHSSPEYWIKSGTLVPVRRRDIVKIEGIDATGGNNQPNIPSTTVHLWYFGLIGTC

SEQ ID NO: 14850 - protein, 268 aa, Thermomyces lanuginosus
EVSQDLFNQFNLFAQYSAAAYCGKNNNAPAGTNITCTGNICPEVEKADATILYSFRDSGEGDVTGFLALDNTNKLIVLSFRGSRSIENWIGNLNFDLKEINDICSGCRGHDGFTSSWFSVADTLRQKVEDAVREHPDYRVVFTGHSLGGALATVAGADLRGNGYDIDVFSYGAPRVGNRAFAEFLTVQTGGTLYRITHTNDIVPRLPPREFGYSHSSPEYWIKSGTLVPVRRRDIVKIEGIDAEGGNNQPNIPDITAHLWYFGLIGTC

SEQ ID NO: 14851 - protein, 268 aa, Thermomyces lanuginosus
EVSQDLFNQFNLFAQYSKAAYCLKNNDAPAGTNITCTGNACPEVEKADATFLYSFEDSGVGDVTGFLALDNTNKRIVLSFRGSRSIENWIGNLRFDLKEINDICSGCRGHAGFTSSWRSVADTLRQKVEAAVREHPDYRVVFTGHSLGGALATIAWADLRGNGYDIDVFSYGAPRVGNRAFAEFLTNQQGGTLYRITHTNDIVPRLPPREFGYSHSSPEYWIKSGTLVPVTRNDIVKIEGIDATGGNNQPNIPDIPAHLWYFGRIGTC

SEQ ID NO: 14852 - protein, 268 aa, Thermomyces lanuginosus
EVSQDLFNQFNLFAQYSAAAYCGKNNRAPAGTNITCTANACPEVEKADATVLYSFEDSGVGDVTGFLALDNTNKLIVLSFRGSRSIENWIGNLNFELKEINDICSGCRGHAGFTSSWRSVADTLRQKVEDAVREHPDYRVVFTGHSLGGALATVAGADLRGNKYDIDVFSYGAPRVGNRAFAEFLTVQTGGTLYRITHTNDIVPRLPPREFGYSHSSPEYWIKSGTLVPVRRRDIVKIEGIDSTGGNNQPNIPSITAHLWYFGLIGTC

SEQ ID NO: 14853 - protein, 268 aa, Thermomyces lanuginosus
EVSQDLFNQFNLFAQYSKAAYCQKNNSAEAGTNITCTGNACPEVEKADATFLYSFEDMGVGDVTGFLALDNTNKQIILSFRGSRSIENWIGNLNFDLKEINDICSGCRGHDGFTSSWRSVADTLRQKVEDAVREFPDYRVVFTGHSLGGALATVAWADLRGNGYDIDVFSYGAPRVGNRAFAEFLTTQTGGTLYRITHTNDIVPRLPPREFGYSHSSPEYWIKSGTLVPVTRNDIVKIEGIDATGGNNQPNIPDIPAHLWYFGLIGTC

SEQ ID NO: 14854 - protein, 268 aa, Thermomyces lanuginosus
EVSQDLFNQFNLFAQYSAAAYCGKNNRAPAGTKITCTANACPEVEKADATFLYSFEDSGVGDVTGFLALDNTNKLIVLSFRGSRSIENWIGNLNFELEEINDICSGCRGHAGFTSSWRSVADTLRQKVEDAVREHPDYRVVFTGHSLGGALATVAGADLRGNKYDIDVFSYGAPRVGNRAFAEFLTVQTGGTLYRITHTNDIVPRLPPREFGYSHSSPEYWIKSGTLVPVRRRDIVKIEGIDATGGNNQPNIPSITAHLWYFGLIGTC

SEQ ID NO: 14855 - protein, 268 aa, Thermomyces lanuginosus
EVSQDLFNQFNLFAQYSAAAYCGKNNDAPAGTNITCTGNICPEVEKADATLLYSFRNSGVGDVTGFLALDNTNKLIVLSFRGSRSIENWIGNLNFDLIEINDICSGCRGHDGFTSSWFSVADTLRQKVEDAVREHPDYRVVFTGHSLGGALATVAGADLRGNSYDIDVFSYGAPRVGNRAFAEFLTVQTGGTLYRITHTNDIVPRLPPREFGYSHSSPEYWIKSGTLVPVRRRDIVKIEGIDATGGNNQPNIPDITAHLWYFGLIGTC

SEQ ID NO: 14856 - protein, 268 aa, Thermomyces lanuginosus
EVSQDLFNQFNLFAQYSAAAYCGKNNRAPAGTKITCTANACPEVEKADATLLYSFEDSGVGDVTGFLALDNTNKLIVLSFRGSRSIENWIGNLNFELKEINDICSGCRGHAGFTSSWRSVADTLRQKVEDAVREHPDYRVVFTGHSLGGALATVAGADLRGNKYDIDVFSYGAPRVGNRAFAEFLTVQTGGTLYRITHTNDIVPRLPPREFGYSHSSPEYWIKSGTLVPVRRRDIVKIEGIDATGGNNQPNIPSITAHLWYFGLIGTC

SEQ ID NO: 14857 - protein, 268 aa, Thermomyces lanuginosus
EVSQDLFNQFNLFAQYSAAAYCGKNNNAPAGTNITCTGNACPEVEKADATILYSFRDSGVGDVTGFLALDNTNKLIVLSFRGSRSIENWIGNLNFDLIEINDICSGCRGHDGFTSSWFSVADTLRQKVEDAVREHPDYRVVFTGHSLGGALATVAGADLRGNGYDIDVFSYGAPRVGNRAFAEFLTVQTGGTLYRITHTNDIVPRLPPREFGYSHSSPEFWIKSGTLVPVRRRDIVKIEGIDAEGGNNQPNIPDITAHLWYFGLIGTC

SEQ ID NO: 14858 - protein, 268 aa, Thermomyces lanuginosus
EKSQDLFNQFNLFAQYSAAAYCGKNNRAPAGTNITCTANACPEVEKADATVLYSFEDSGVGDVTGFLALDNTNKLIVLSFRGSRSIENWIGNLNFELKEINDICSGCRGHAGFTSSWRSVADTLRQKVEDAVREHPDYRVVFTGHSLGGALATVAGADLRGNKYDIDVFSYGAPRVGNRAFAEFLTVQTGGTLYRITHTNDIVPRLPPREFGYSHSSPEYWIKSGTLVPVRRRDIVKIEGIDATGGNNQPNIPSITAHLWYFGLIGTC

SEQ ID NO: 14859 - protein, 268 aa, Thermomyces lanuginosus
EYSQDLFNQFNLFAQYSAAAYCGKNNDAPAGTKITCTGNACPEVEKADATLLYSFEDSGVGDVTGFLARDNTNKLIVLSFRGSRSIENWIGNLNFDLEEINDICSGCRGHDGFTSSWRSVADTLRQKVEDAVREHPDYRVVFTGHSLGGALATVAGADLRGNGYDIDVFSYGAPRLGNRAFAEFLTVQTGGTLYRITHTNDIVPRLPPRKFGYSHSSPEYWIKSGTDVPVRRRDIVKIEGIDATGGNNQPNIPDIPAHLWYFGLIGTC

SEQ ID NO: 14860 - protein, 268 aa, Thermomyces lanuginosus
EVSQDLFNQFNLFAQYSAAAYCSKNNNAPAGTNITCTGNACPEVEKADATFLYSFRDSGVGDVTGFLALDNTNKLIVLSFRGSRSIENWIGNLNFDLIEINDICSGCRGHDGFTSSWFSVADTLRQKVEDAVREHPDYRVVFTGHSLGGALATVAGADLRGNGYDIDVFSYGAPRVGNRAFAEFLTVQTGGTLYRITHTNDIVPRLPPREFGYSHSSPEFWIKSGTLVPVRRRDIVKIEGIDAEGGNNQPNIPDITAHLWYFGLIGTC

SEQ ID NO: 14861 - protein, 268 aa, Thermomyces lanuginosus
EVSQDLFNQFNLFAQYSAAAYCGKNNDAPAGTKITCTGNACPEVEKADATILYSFEDSGVGDVTGFLALDNTNKLIVLSFRGSRSIENWIGNLNFDLEEIDDICSGCRGHDGFTSSWRSVADTLRQKVEDAVREHPDYRVVFTGHSLGGALATVAGADLRGNGYDIDVFSYGAPRVGNRAFAEFLTVQTGGTLYRITSTNDIVPRLPPRRFGYSHSSPEFWIKSGTLVPVRRRDIVKIEGIDATGGNNQPNIPDIPVHLWYFGLIGTC

SEQ ID NO: 14862 - protein, 268 aa, Thermomyces lanuginosus
EVSQDLFNQFKLFAQYSKAAYCKANNDAPAGTNITCTGNACPEVEKADATFLYSFEDSGVGDVTGFLALDNTNKRIILSFRGSRSIENWIGNLNFDLKEINDICSGCRGHDGFTSSWRSVADTLRQKVEAAVREHPDYRVVFTGHSLGGALATIAGADLRGNGYDIDVFSYGAPRVGNRAFAEFLTTQQGGTLYRITHTNDIVPRLPPREFGYSHSSPEYWIKSGTLVPVTRNDIVKIEGIDATGGNNQPNIPDIPAHLWYFGLIGTC

SEQ ID NO: 14863 - protein, 268 aa, Thermomyces lanuginosus
EKSQDLFNQFNLFAQYSAAAYCGKNNRAPAGTKITCTANACPEVEKADATFLYSFEDSGVGDVTGFLALDNTNKLIVLSFRGSRSIENWIGNLNFELKEINDICSGCRGHAGFTSSWRSVADTLRQKVEDAVREHPDYRVVFTGHSLGGALATVAGADLRGNKYDIDVFSYGAPRVGNRAFAEFLTVQTGGTLYRITHTNDIVPRLPPREFGYSHSSPEYWIKSGTLVPVRRRDIVKIEGIDATGGNNQPNIPSITAHLWYFGLIGTC

SEQ ID NO: 14864 - protein, 268 aa, Thermomyces lanuginosus
EVSQDLFNQFNLFAQYSAAAYCGKNNDAPAGTNITCTGNACPEVEKADATFLYSFEDTGKGDVTGFLALDNTNKLIVLSFRGTRSVENWIGNLNFDLKEINDICSGCRGHDGFTSSWRSVADTLRQKVEDAVREHPDYRVVFTGHSLGGGLATVAGADLRGNGYDIDVFSYGAPRVGNRAFAEFLTVQTGGTLYRITHTNDIVPRLPPRVFGYSHSSPEYWIKSGTGVPVRRRDIVKIEGIDATGGNNQPNIPDIKAHLWYFGLIGTC

SEQ ID NO: 14865 - protein, 268 aa, Thermomyces lanuginosus
EVSQDLFNQFNLFAQYSKAAYCQANNDAPAGTNITCTGNACPEVEKADATFLYSFEDSGVGDVTGFLALDNTNKQIILSFRGSRSIENWIGNLRFDLKEINDICSGCRGHDGFTSSWRSVADTLRQKVEAAVREHPDYRVVFTGHSLGGALATIAWADLRGNGYDIDVFSYGAPRVGNRAFAEFLTQQTGGTLYRITHTNDIVPRLPPREFGYSHSSPEYWIKSGTLVPVTRNDIVKIEGIDATGGNNQPNIPDIPAHLWYFGLIGTC

SEQ ID NO: 14866 - protein, 268 aa, Thermomyces lanuginosus
EVSQDLFNQFNLFAQYSAAAYCGKNNRAPAGTPITCTANACPEVEKADATVLYSFEDSGVGDVTGFLALDNTNKLIVLSFRGSRSIENWIGNLNFELKEINDICSGCRGHAGFTSSWRSVADTLRQKVEDAVREHPDYRVVFTGHSLGGALATVAGADLRGNKYDIDVFSYGAPRVGNRAFAEFLTVQTGGTLYRITHTNDIVPRLPPREFGYSHSSPEYWIKSGTLVPVRRRDIVKIEGIDATGGNNQPNIPSITAHLWYFGLIGTC

SEQ ID NO: 14867 - protein, 268 aa, Thermomyces lanuginosus
EVSQDLFNQFNLFAQYSAAAYCSKNNNAPAGTNITCTGNACPEVEKADATILYSFRDSGVGDVTGFLALDNTNKLIVLSFRGSRSIENWIGNLNFDLIEINDICSGCRGHDGFTSSWFSVADTLRQKVEDAVREHPDYRVVFTGHSLGGALATVAGADLRGNGYDIDVFSYGAPRVGNRAFAEFLTVQTGGTLYRITHTNDIVPRLPPREFGYSHSSPEYWIKSGTLVPVRRRDIVKIEGIDAEGGNNQPNIPDITAHLWYFGLIGTC

SEQ ID NO: 14868 - protein, 268 aa, Thermomyces lanuginosus
EVSQDLFNQFNLFAQYSAAAYCSKNNDAPAGTNITCTGNACPEVEKADATILYSFRDSGVGDVTGFLALDNTNKLIVLSFRGSRSIENWIGNLNFDLIEINDICSGCRGHDGFTSSWFSVADTLRQKVEDAVREHPDYRVVFTGHSLGGALATVAGADLRGNGYDIDVFSYGAPRVGNRAFAEFLTVQTGGTLYRITHTNDIVPRLPPREFGYSHSSPEFWIKSGTLVPVRRRDIVKIEGIDAEGGNNQPNIPDITAHLWYFGLIGTC

SEQ ID NO: 14869 - protein, 268 aa, Thermomyces lanuginosus
EVSQDLFNQFNLFAQYSAAAYCGKNNRAPAGTNITCTANACPEVEKADATVLYSFEDSGVGDVTGFLALDNTNKLIVLSFRGSRSIENWIGNLNFELEEINDICSGCRGHAGFTSSWRSVADTLRQKVEDAVREHPDYRVVFTGHSLGGALATVAGADLRGNKYDIDVFSYGAPRVGNRAFAEFLTVQTGGTLYRITHTNDIVPRLPPREFGYSHSSPEYWIKSGTLVPVRRRDIVKIEGIDATGGNNQPNIPSITAHLWYFGLIGTC

SEQ ID NO: 14870 - protein, 268 aa, Thermomyces lanuginosus
EVSQDLFNQFNLFAQYSAAAYCGKNNDAPAGTNITCTGNACPEVEKADATFLYSFEDAGSGDVTGFLALDNTNKLIVLSFRGSRSVENWIGNLNFDLKEINDICSGCRGHDGFTSSWRSVADTLRQKVEDAVREHPDYRVVFSGHSLGGGLATVAGADLRGNGYDIDVFSYGAPRVGNRAFAEFLTVQTGGTLYRITHTNDIVPRLPPREFGYSHSSPEYWIKSGTGVPVRRRDIVKIEGIDATGGNNQPNIPDAKAHLWYFGLIGTC

SEQ ID NO: 14871 - protein, 268 aa, Thermomyces lanuginosus
EVSQDLFNQFNLFAQYSAAAYCGKNNRAPAGTKITCTANACPEVEKADATVLYSFEDSGVGDVTGFLALDNTNKLIVLSFRGSRSIENWIGNLNFELKEINDICSGCRGHAGFTSSWRSVADTLRQKVEDAVREHPDYRVVFTGHSLGGALATVAGADLRGNKYDIDVFSYGAPRVGNRAFAEFLTVQTGGTLYRITHTNDIVPRLPPREFGYSHSSPEYWIKSGTLVPVRRRDIVKIEGIDATGGNNQPNIPSITAHLWYFGLIGTC

SEQ ID NO: 14872 - protein, 268 aa, Thermomyces lanuginosus
EVSQDLFNQFNLFAQYSAAAYCGKNNDAPAGTKITCTGNACPEVEKADATLLYSFEDSGVGDVTGFLALDNTNKLIVLSFRGSRSIENWIGNLNFDLEEIDDICSGCRGHDGFTSSWRSVADTLRQKVEDAVREHPDYRVVFTGHSLGGALATVAGADLRGNGYDIDVFSYGAPRVGNRAFAEFLTVQTGGTLYRITSTNDIVPRLPPRKFGYSHSSPEFWIKSGTLPPVRRRDIVKIEGIDATGGNNQPNIPDIPAHLWYFGLIGTC

SEQ ID NO: 14873 - protein, 268 aa, Thermomyces lanuginosus
EVSQDLFNQFNLFAQYSAAAYCGKNNDAPAGTKITCTGNACPEVEKADATVLYSFEDSGVGDVTGFLALDNTNKLIVLSFRGSRSIENWIGNLNFDLEEIDDICSGCRGHDGFTSSWRSVADTLRQKVEDAVREHPDYRVVFTGHSLGGALATVAGADLRGNGYDIDVFSYGAPRVGNRAFAEFLTVQTGGTLYRITSTNDIVPRLPPRKFGYSHSSPEFWIKSGTLVPVRRRDIVKIEGIDATGGNNQPNIPDIPFHLWYFGLIGTC

SEQ ID NO: 14874 - protein, 268 aa, Thermomyces lanuginosus
EVSRDLFNQFNLFAQYSAAAYCGKNNQAPAGTQITCTGNACPEVEKADATFLYSFEDSGVGDVTGFLALDNTNKLIVLSFRGSRSIENWITNLSFDLKEINDICSGCRGHAGFTSSWRSVADTLRQKVEDAVREHPDYRVVFTGHSLGGALATVAGADLRGNGYDIDVFSYGAPRVGNRAFAEFLTVQTGGTLYRITHTNDIVPRLPPREFGYSHPSPEYWIKSGTGVPVRRRDIVKIEGIDATGGNNQPNIPDITAHLWYFGLIGTC

SEQ ID NO: 14875 - protein, 268 aa, Thermomyces lanuginosus
EVSQDLFNQFNLFAQYSAAAYCSKNNNAPAGTNITCTGNACPEVEKADATILYSFRDSGVGDVTGFLALDNTNKLIVLSFRGSRSIENWIGNLNFDLKEINDICSGCRGHDGFTSSWFSVADTLRQKVEDAVREHPDYRVVFTGHSLGGALATVAGADLRGNGYDIDVFSYGAPRVGNRAFAEFLTVQTGGTLYRITHTNDIVPRLPPREFGYSHSSPEFWIKSGTLVPVRRRDIVKIEGIDAEGGNNQPNIPDITAHLWYFGLIGTC

SEQ ID NO: 14876 - protein, 268 aa, Thermomyces lanuginosus
EVSQDLFNQFNLFAQYSAAAYCGKNNDAPAGTKITCTGNACPEVEKADATVLYSFEDSGVGDVTGFLALDNTNKLIVLSFRGSRSIENWIGNLNFDLEEIDDICSGCRGHDGFTSSWRSVADTLRQKVEDAVREHPDYRVVFTGHSLGGALATVAGADLRGNGYDIDVFSYGAPRVGNRAFAEFLTVQTGGTLYRITSTNDIVPRLPPRKFGYSHSSPEFWIKSGTLVPVRRRDIVKIEGIDATGGNNQPNIPDIPHHLWYFGLIGTC

SEQ ID NO: 14877 - protein, 268 aa, Thermomyces lanuginosus
EVSQDLFNQFNLFAQYSAAAYCGKNNRAPAGTQITCTGNACPEVEKADATFLYSFKDSGVGDVTGFLALDNTNKLIVLSFRGSRSIENWINNLRFDLKEINDICSGCRGHAGFTSSWRSVADTLRQKVEDAVREHPDYRVVFTGHSLGGALATVAGADLRGNGYDIDVFSYGAPRVGNRAFAEFLTVQTGGTLYRITHTNDIVPRLPPREFGYSHPSPEYWIKSGTGVPVRRRDIVKIEGIDATGGNNQPNIPDITAHLWYFGLIGTC

SEQ ID NO: 14878 - protein, 268 aa, Thermomyces lanuginosus
EVSQDLFNQFNLFAQYSAAAYCGKNNRAPAGTNITCTANACPEVEKADATFLYSFEDSGVGDVTGFLALDNTNKLIVLSFRGSRSIENWIGNLNFELKEINDICSGCRGHAGFTSSWRSVADTLRQKVEDAVREHPDYRVVFTGHSLGGALATVAGADLRGNKYDIDVFSYGAPRVGNRAFAEFLTVQTGGTLYRITHTNDIVPRLPPRKFGYSHSSPEYWIKSGTLVPVRRRDIVKIEGIDSTGGNNQPNIPSITAHLWYFGLIGTC

SEQ ID NO: 14879 - protein, 268 aa, Thermomyces lanuginosus
EKSQDLFNQFNLFAQYSAAAYCGKNNDAPAGTKITCTGNACPEVEKADATILYSFEDSGVGDVTGFLARDNTNKLIVLSFRGSRSIENWIGNLNFDLEEINDICSGCRGHDGFTSSWRSVADTLRQKVEDAVREHPDYRVVFTGHSLGGALATVAGADLRGNGYDIDVFSYGAPRLGNRAFAEFLTVQTGGTLYRITHTNDIVPRLPPRKFGYSHSSPEYWIKSGTDVPVRRRDIVKIEGIDATGGNNQPNIPDIPAHLWYFGLIGTC

SEQ ID NO: 14880 - protein, 268 aa, Thermomyces lanuginosus
EVSQDLFNQFNLFAQYSAAAYCSKNNNAPAGTNITCTGNICPEVEKADATILYSFRDSGVGDVTGFLALDNTNKLIVLSFRGSRSIENWIGNLNFDLKEINDICSGCRGHDGFTSSWFSVADTLRQKVEDAVREHPDYRVVFTGHSLGGALATVAGADLRGNGYDIDVFSYGAPRVGNRAFAEFLTVQTGGTLYRITHTNDIVPRLPPREFGYSHSSPEYWIKSGTLVPVRRRDIVKIEGIDAEGGNNQPNIPDITAHLWYFGLIGTC

SEQ ID NO: 14881 - protein, 268 aa, Thermomyces lanuginosus
EVSQDLFNQFNLFAQYSAAAYCGKNNDAPAGTNITCTGNACPEVEKADATFLYSFEDNGSGDVTGFLALDNTNKLIVLSFRGSRSVENWIGNLNFDLKEINDICSGCRGHDGFTSSWRSVADTLRQKVEDAVREHPDYRVVFTGHSLGGGLATVAGADLRGNGYDIDVFSYGAPRVGNRAFAEFLTVQTGGTLYRITHTNDIVPRLPPRKFGYSHSSPEYWIKSGTGVPVRRRDIVKIEGIDATGGNNRPNIPDIKAHLWYFGLIGTC

SEQ ID NO: 14882 - protein, 268 aa, Thermomyces lanuginosus
EVSQDLFNQFNLFAQYSAAAYCGKNNDAPAGTQITCTGNACPEVEKADATFLYSFEDSGVGDVTGFLALDNTNKLIVLSFRGSRSFENWIGNFNFDLKEINYICSGCRGHDGFTSSWRSVADTLRQKVEDAVREHPDYRVVFTGHSLGGALATVAGADLRGNGYDIDVFSYGAPRVGNRAFAEFLTVQTGGTLYRITHTNDIVPRLPPRYFGYSHSSPEYWIKSGTFVPVRRRDIVKIEGIDATGGNNQPNIPYFPAHLWYFGLIGTC

SEQ ID NO: 14883 - protein, 268 aa, Thermomyces lanuginosus
EVSQDLFNQFKLFAQYSAAAYCQKNNSAPAGTNITCTGNACPEVEKADATFLYSFEDSGVGDVTGFLALDNTNKRIVLSFRGSRSIENWIGNLRFDLKEINDICSGCRGHAGFTSSWRSVADTLRQKVEDAVREHPDYRVVFTGHSLGGALATIAWADLRGNGYDIDVFSYGAPRVGNRAFAEFLTNQQGGTLYRITHTNDIVPRLPPREFGYSHSSPEYWIKSGTLVPVTRNDIVKIEGIDATGGNNQPNIPDIPAHLWYFGRIGTC

SEQ ID NO: 14884 - protein, 268 aa, Thermomyces lanuginosus
EVSQDLFNQFNLFAQYSAAAYCGKNNRAPAGTNITCTANACPEVEKADATLLYSFKDSGVGDVTGFLALDNTNKLIVLSFRGSRSIENWIGNLNFELKEINDICSGCRGHAGFTSSWRSVADTLRQKVEDAVREHPDYRVVFTGHSLGGALATVAGADLRGNKYDIDVFSYGAPRVGNRAFAEFLTVQTGGTLYRITHTNDIVPRLPPREFGYSHSSPEYWIKSGTLVPVRRRDIVKIEGIDATGGNNQPNIPSITAHLWYFGLIGTC

SEQ ID NO: 14885 - protein, 268 aa, Thermomyces lanuginosus
EVSQDLFNQFNLFAQYSAAAYCGKNNRAPAGTKITCTANACPEVEKADATFLYTFEDSGVGDVTGFLALDNTNKLIVLSFRGSRSIENWIGNLNFELKEINDICSGCRGHAGFTSSWRSVADTLRQKVEDAVREHPDYRVVFTGHSLGGALATVAGADLRGNKYDIDVFSYGAPRVGNRAFAEFLTVQTGGTLYRITHTNDIVPRLPPREFGYSHSSPEYWIKSGTLVPVRRRDIVKIEGIDATGGNNQPNIPSITAHLWYFGLIGTC

SEQ ID NO: 14886 - protein, 268 aa, Thermomyces lanuginosus
EVSQDLFNQFNLFAQYSKAAYCKKNNDAPAGTNITCTGNACPEVEKADATFLYSFEDSGVGDVTGFLALDNTNKRIVLSFRGSRSIENWIGNLRFDLKEINDICSGCRGHAGFTSSWRSVADTLRQKVEAAVREHPDYRVVFTGHSLGGALATIAWADLRGNGYDIDVFSYGAPRVGNRAFAEFLTNQQGGTLYRITHTNDIVPRLPPREFGYSHSSPEYWIKSGTLVPVTRNDIVKIEGIDATGGNNQPNIPDIPAHLWYFGRIGTC

SEQ ID NO: 14887 - protein, 268 aa, Thermomyces lanuginosus
EVSQDLFNQFNLFAQYSAAAYCGKNNRAPAGTQITCTGNACPEVEKADATFLYSFEDSGVGDVTGFLALDNTNKLIVLSFRGSRSIENWINNLRFDLKEINDICSGCRGHAGFTSSWRSVADTLRQKVEDAVREHPDYRVVFTGHSLGGALATVAGADLRGNKYDIDVFSYGAPRVGNRAFAEFLTVQTGGTLYRITHTNDIVPRLPPREFGYSHPSPEYWIKSGTGVPVRRRDIVKIEGIDATGGNNQPNIPDITAHLWYFGLIGTC

SEQ ID NO: 14888 - protein, 268 aa, Thermomyces lanuginosus
EVSQDLFNQFNLFAQYSAAAYCSKNNNAPAGTNITCTGNICPEVEKADATILYSFRDSGKGDVTGFLALDNTNKLIVLSFRGSRSIENWIGNLNFDLKEINDICSGCRGHDGFTSSWFSVADTLRQKVEDAVREHPDYRVVFTGHSLGGALATVAGADLRGNGYDIDVFSYGAPRVGNRAFAEFLTVQTGGTLYRITHTNDIVPRLPPREFGYSHSSPEYWIKSGTLVPVRRRDIVKIEGIDATGGNNQPNIPDITAHLWYFGLIGTC

SEQ ID NO: 14889 - protein, 268 aa, Thermomyces lanuginosus
EVSQDLFNQFNLFAQYSAAAYCGKNNDAPAGTKITCTGNACPEVEKADATILYSFEDSGVGDVTGFLALDNTNKLIVLSFRGSRSIENWIGNLNFDLEEIDDICSGCRGHDGFTSSWRSVADTLRQKVEDAVREHPDYRVVFTGHSLGGALATVAGADLRGNGYDIDVFSYGAPRVGNRAFAEFLTVQTGGTLYRITSTNDIVPRLPPRKFGYSHSSPEFWIKSGTLVPVRRRDIVKIEGIDATGGNNQPNIPDIPVHLWYFGLIGTC

SEQ ID NO: 14890 - protein, 268 aa, Thermomyces lanuginosus
EVSQDLFNQFNLFAQYSAAAYCGKNNRAPAGTNITCTANACPEVEKADATVLYSFEGSGVGDVTGFLALDNTNKLIVLSFRGSRSIENWIGNLNFDLKEINDICSGCRGHAGFTSSWRSVADTLRQKVEDAVREHPDYRVVFTGHSLGGALATVAGADLRGNKYDIDVFSYGAPRVGNRAFAEFLTVQTGGTLYRITHTNDIVPRLPPREFGYSHSSPEYWIKSGTLVPVRRRDIVKIEGIDATGGNNQPNIPSITAHLWYFGLIGTC

SEQ ID NO: 14891 - protein, 268 aa, Thermomyces lanuginosus
EVSQDLFNQFNLFAQYSAAAYCGKNNRAPAGTQITCTGNACPEVEKADATFLYSFEDSGVGDVTGFLALDNTNKLIVLSFRGSRSIENWINNLRFDLKEINDICSGCRGHAGFTSSWRSVADTLRQKVEDAVREHPDYRVVFTGHSLGGALATVAGADLRGNGYDIDVFSYGAPRVGNRAFAEFLTVQTGGTLYRITHTNDIVPRLPPREFGYSHPSPEYWIKSGTGVPVRRRDIVKIEGIDATGGNNQPNIPSITAHLWYFGLIGTC

SEQ ID NO: 14892 - protein, 268 aa, Thermomyces lanuginosus
EYSQDLFNQFNLFAQYSAAAYCGKNNDAPAGTKITCTGNACPEVEKADATILYSFEDSGVGDVTGFLARDNTNKLIVLSFRGSRSIENWIGNLNFDLEEINDICSGCRGHDGFTSSWRSVADTLRQKVEDAVREHPDYRVVFTGHSLGGALATVAGADLRGNGYDIDVFSYGAPRLGNRAFAEFLTVQTGGTLYRITHTNDIVPRLPPRKFGYSHSSPEYWIKSGTDVPVRRRDIVKIEGIDATGGNNQPNIPDIPAHLWYFGLIGTC

SEQ ID NO: 14893 - protein, 268 aa, Thermomyces lanuginosus
EYSQDLFNQFNLFAQYSAAAYCGKNNDAPAGTKITCTGNACPEVEKADATVLYSFEDSGVGDVTGFLARDNTNKLIVLSFRGSRSIENWIGNLNFDLEEINDICSGCRGHDGFTSSWRSVADTLRQKVEDAVREHPDYRVVFTGHSLGGALATVAGADLRGNGYDIDVFSYGAPRLGNRAFAEFLTVQTGGTLYRITHTNDIVPRLPPRKFGYSHSSPEYWIKSGTDVPVRRRDIVKIEGIDATGGNNQPNIPDIPAHLWYFGLIGTC

SEQ ID NO: 14894 - protein, 268 aa, Thermomyces lanuginosus
EVSQDLFNQFNLFAQYSKAAYCQKNNSAPAGTNITCTGNACPEVFKADVTFLYSFEDSGVGDVTGFLALDNTSKQIVLSFRGSRSIENWIGNLNFDLKEINDICSGCKGHDGFTSSWRSVADTLRQKVEDAVREHPDYRVVFTGHSLGGALATVAGADLRGNGYDIDVFSYGAPRVGNRAFAEFLTTQDGGTLYRITHTNDIVPRLPPREFGYSHSSPEYWIKSGTLVPVTRNDIVKIEGIDATGGNNQPNIPDIPAHLWYFGLIGTC

SEQ ID NO: 14895 - protein, 268 aa, Thermomyces lanuginosus
EVSQDLFNQFKLFAQYSAAAYCQKNNSAPAGTNITCTGNACPEVEKADATFLYSFEDSGVGDVTGFLALDNTNKQIVLSFRGSRSIENWIGNLRFDLKEINDICSGCRGHAGFTSSWRSVADTLRQKVEDAVREHPDYRVVFTGHSLGGALATIAWADLRGNGYDIDVFSYGAPRVGNRAFAEFLTNQQGGTLYRITHTNDIVPRLPPREFGYSHSSPEYWIKSGTLVPVTRNDIVKIEGIDATGGNNQPNIPDIPAHLWYFGRIGTC

SEQ ID NO: 14896 - protein, 268 aa, Thermomyces lanuginosus
EVSQDLFNQFNLFAQYSAAAYCGKNNRAPAGTNITCTANACPEVEKADATFLYTFEDSGVGDVTGFLALDNTNKLIVLSFRGSRSIENWIGNLNFELKEINDICSGCRGHAGFTSSWRSVADTLRQKVEDAVREHPDYRVVFTGHSLGGALATVAGADLRGNPYDIDVFSYGAPRLGNRAFAEFLTVQTGGTLYRITHTNDIVPRLPPREFGYSHSSPEYWIKSGTLVPVRRRDIVKIEGIDATGGNNQPNIPSITAHLWYFGLIGTC

SEQ ID NO: 14897 - protein, 268 aa, Thermomyces lanuginosus
EVSNDSFNQFNLFAQYSAAAYCGKNNDAPAGTNITCTGNACPEVEKADATFLYSFEDNGSGDVTGFLALDNTNKLIVLSFRGSRSVENWIGNLNFDLKEINDICSGCRGHDGFTSSWRSVADTLRQKVEDAVREHPDYRVVFTGHSLGGGLATVAGADLRGNGYDIDVFSYGAPRVGNRAFAEFLTVQTGGTLYRITHTNDIVPRLPPREFGYSHSSPEYWIKSGTGVPVRRRDIVKIEGIDATGGNNQPNIPDIKAHLWYFGLIGTC

SEQ ID NO: 14898 - protein, 268 aa, Thermomyces lanuginosus
EVSQDLFNQFNLFAQYSAAAYCSKNNNAPAGTNITCTGNICPEVEKADATILYSFRDSGKGDVTGFLALDNTNKLIVLSFRGSRSIENWIGNLNFDLKEINDICSGCRGHDGFTSSWFSVADTLRQKVEDAVREHPDYRVVFTGHSLGGALATVAGADLRGNGYDIDVFSYGAPRVGNRAFAEFLTVQTGGTLYRITHTNDIVPRLPPREFGYSHSSPEYWIKSGTLVPVRRRDIVKIEGIDAEGGNNQPNIPDIPAHLWYFGLIGTC

SEQ ID NO: 14899 - protein, 268 aa, Thermomyces lanuginosus
EVSQDLFNQFNLFAQYSAAAYCGKNNRAPAGTNITCTANACPEVEKADATFLYSFEDSGVGDVTGFLALDNTNKLIVLSFRGSRSIKNWIGNLNFELKEINDICSGCRGHAGFTSSWRSVADTLRQKVEDAVREHPDYRVVFTGHSLGGALATVAGADLRGNKYDIDVFSYGAPRVGNRAFAEFLTVQTGGTLYRITHTNDIVPRLPPREFGYSHSSPEYWIKSGTLVPVRRRDIVKIEGIDSTGGNNQPNIPSITAHLWYFGLIGTC

SEQ ID NO: 14900 - protein, 268 aa, Thermomyces lanuginosus
EVSQDLFNQFNLFAQYSAAAYCGKNNRAPAGTNITCTANACPEVEKADATFLYSFEDSGVGDVTGFLALDNTNKLIVLSFRGSRSIENWIGNLNFELKEINDICSGCRGHAGFTSSWRSVADTLRQKVEDAVREHPDYRVVFTGHSLGGALATVAGADLRGNKYDIDVFSYGAPRVGNRAFAEFLTVQTGGTLYRITHTNDIVPRLPPREFGYSHSSPEYWIKSGTLVPVRRRDIVKIEGIDATGGNNQPNIPSITAHFHYFGLIGTC

SEQ ID NO: 14901 - protein, 268 aa, Thermomyces lanuginosus
EVSQDLFNQFNLFAQYSAAAYCGKNNDAPAGTKITCTGNACPEVEKADATLLYSFEDSGVGDVTGFLALDNTNKLIVLSFRGSRSIENWIGNLNFDLEEIDDICSGCRGHDGFTSSWRSVADTLRQKVEDAVREHPDYRVVFTGHSLGGALATVAGADLRGNGYDIDVFSYGAPRVGNRAFAEFLTVQTGGTLYRITSTNDIVPRLPPRKFGYSHSSPEFWIKSGTLVPVRRRDIVKIEGIDATGGNNQPNIPDIPHHLWYFGLIGTC

SEQ ID NO: 14902 - protein, 268 aa, Thermomyces lanuginosus
EVSQDLFNQFNLFAQYSAAAYCSKNNNAPAGTNITCTGNACPEVEKADATILYSFRDSGVGDVTGFLALDNTNKLIVLSFRGSRSIENWIGNLNFDLIEINDICSGCRGHDGFTSSWFSVADTLRQKVEDAVREHPDYRVVFTGHSLGGALATVAGADLRGNGYDIDVFSYGAPRVGNRAFAEFLTVQTGGTLYRITHTNDIVPRLPPREFGYSHSSPEFWIKSGTLVPVRRRDIVKIEGIDATGGNNQPNIPDITAHLWYFGLIGTC

SEQ ID NO: 14903 - protein, 268 aa, Thermomyces lanuginosus
EVSQDLFNQFNLFAQYSAAAYCGKNNRAPAGTNITCTGNACPEVEKADATVLYSFEDSGVGDVTGFLALDNTNKLIVLSFRGSRSIKNWIGNLNFELEEINDICSGCRGHAGFTSSWRSVADTLRQKVEDAVREHPDYRVVFTGHSLGGALATVAGADLRGNKYDIDVFSYGAPRVGNRAFAEFLTVQTGGTLYRITHTNDIVPRLPPREFGYSHSSPEYWIKSGTLVPVRRRDIVKIEGIDATGGNNQPNIPSITAHLWYFGLIGTC

SEQ ID NO: 14904 - protein, 268 aa, Thermomyces lanuginosus
EKSQDLFNQFNLFAQYSAAAYCGKNNDAPAGTKITCTGNACPEVEKADATVLYSFEDSGVGDVTGFLARDNTNKLIVLSFRGSRSIENWIGNLNFDLEEINDICSGCRGHDGFTSSWRSVADTLRQKVEDAVREHPDYRVVFTGHSLGGALATVAGADLRGNGYDIDVFSYGAPRLGNRAFAEFLTVQTGGTLYRITHTNDIVPRLPPRKFGYSHSSPEYWIKSGTDVPVRRRDIVKIEGIDATGGNNQPNIPDIPAHLWYFGLIGTC

SEQ ID NO: 14905 - protein, 268 aa, Thermomyces lanuginosus
EVSQDLFNQFNLFAQYSAAAYCGKNNRAPAGTNITCTANACPEVEKADATVLYSFEDSGVGDVTGFLALDNTNKLIVLSFRGSRSIKNWIGNLNFELKEINDICSGCRGHAGFTSSWRSVADTLRQKVEDAVREHPDYRVVFTGHSLGGALATVAGADLRGNKYDIDVFSYGAPRVGNRAFAEFLTVQTGGTLYRITHTNDIVPRLPPREFGYSHSSPEYWIKSGTLVPVRRRDIVKIEGIDATGGNNQPNIPSITAHLWYFGLIGTC

SEQ ID NO: 14906 - protein, 268 aa, Thermomyces lanuginosus
EVSQDLFNQFNLFAQYSAAAYCGKNNDAPAGTKITCTGNACPEVEKADATVLYSFEDSGVGDVTGFLALDNTNKLIVLSFRGSRSIENWIGNLNFDLEEIDDICSGCRGHDGFTSSWRSVADTLRQKVEDAVREHPDYRVVFTGHSLGGALATVAGADLRGNGYDIDVFSYGAPRVGNRAFAEFLTVQTGGTLYRITSTNDIVPRLPPRRFGYSHSSPEFWIKSGTLVPVRRRDIVKIEGIDATGGNNQPNIPDIPVHLWYFGLIGTC

SEQ ID NO: 14907 - protein, 268 aa, Thermomyces lanuginosus
EVSQDLFNQFNLFAQYSAAAYCGKNNDAPAGTKITCTGNACPEVEKADATILYSFEDSGVGDVTGFLALDNTNKLIVLSFRGSRSIENWIGNLNFDLEEIDDICSGCRGHDGFTSSWRSVADTLRQKVEDAVREHPDYRVVFTGHSLGGALATVAGADLRGNGYDIDVFSYGAPRVGNRAFAEFLTVQTGGTLYRITDTNDIVPRLPPRKFGYSHSSPEFWIKSGTLVPVRRRDIVKIEGIDATGGNNQPNIPDIPVHLWYFGLIGTC

SEQ ID NO: 14908 - protein, 268 aa, Thermomyces lanuginosus
EVSQDLFNQFNLFAQYSKAAYCQKNNSAPAGTNITCTGNACPEVFKADVTFLYSFEDMGVGDVTGFLALDNTSKQIVLSFRGSRSIENWIGNLNFDLKEINDICSGCRGHDGFTSSWRSVADTLRQKVEDAVREHPDYRVVFTGHSLGGALATVAGADLRGNGYDIDVFSYGAPRVGNRAFAEFLTTQDGGTLYRITHTNDIVPRLPPREFGYSHSSPEYWIKSGTLVPVTRNDIVKIEGIDATGGNNQPNIPDIPAHLWYFGLIGTC

SEQ ID NO: 14909 - protein, 268 aa, Thermomyces lanuginosus
EVSQDLFNQFNLFAQYSAAAYCGKNNRAPAGTQITCTGNACPEVEKADATFLYSFEDSGVGDVTGFLALDNTNKLIVLSFRGSRSIENWINNLRFDLKEINDICSGCRGHSGFTSSWRSVADTLRQKVEDAVREHPDYRVVFTGHSLGGALATVAGADLRGNGYDIDVFSYGAPRVGNRAFAEFLTVQTGGTLYRITHTNDIVPRLPPREFGYSHPSPEYWIKSGTGVPVRRRDIVKIEGIDATGGNNQPNIPSITAHLWYFGLIGTC

SEQ ID NO: 14910 - protein, 268 aa, Thermomyces lanuginosus
EVSQDLFNQFNLFAQYSAAAYCGKNNDAPAGTNITCTGNACPEVEKADATFLYSFEDAGSGDVTGFLALDNTNKLIVLSFRGSRSVENWIGNLNFDLIKINDICSGCRGHDGFTSSWRSVADTLRQKVEDAVREHPDYRVVFSGHSLGGGLATVAGADLRGNGYDIDVFSYGAPRVGNRAFAEFLTVQTGGTLYRITHTNDIVPRLPPREFGYSHSSPEYWIKSGTGVPVRRRDIVKIEGIDATGGNNQPNIPDAKAHLWYFGLIGTC

SEQ ID NO: 14911 - protein, 268 aa, Thermomyces lanuginosus
EVSQDLFNQFNLFAQYSAAAYCSKNNNAPAGTNITCTGNACPEVEKADATILYSFRDSGVGDVTGFLALDNTNKLIVLSFRGSRSIENWIGNLNFDLIEINDICSGCRGHDGFTSSWFSVADTLRQKVEDAVREHPDYRVVFTGHSLGGALATVAGADLRGNGYDIDVFSYGAPRVGNRAFAEFLTVQTGGTLYRITHTNDIVPRLPPREFGYSHSSPEFWIKSGTLVPVRRRDIVKIEGIDAEGGNNQPNIPDIPAHLWYFGLIGTC

SEQ ID NO: 14912 - protein, 268 aa, Thermomyces lanuginosus
EVSQDLFNQFNLFAQYSAAAYCGKNNDAPAGTKITCTGNACPEVEKADATILYSFEDSGVGDVTGFLALDNTNKLIVLSFRGSRSIENWIGNLNFDLEEIDDICSGCRGHDGFTSSWRSVADTLRQKVEDAVREHPDYRVVFTGHSLGGALATVAGADLRGNGYDIDVFSYGAPRVGNRAFAEFLTVQTGGTLYRITSTNDIVPRLPPRKFGYSHSSPEFWIKSGTLVPVRRRDIVKIEGIDATGGNNQPNIPDIPHHLWYFGLIGTC

SEQ ID NO: 14913 - protein, 268 aa, Thermomyces lanuginosus
EVSQDLFNQFNLFAQYSAAAYCGKNNDAPAGTNITCTGNACPEVEKADATILYSFEDSGVGDVTGFLALDNTNKLIVLSFRGSRSIENWIGNLNFDLKEINDICSGCRGHDGFTSSWRSVADTLRQKVEDAVREHPDYRVVFTGHSLGGALATVAGADLRGDGYDIDVFSYGAPRVGNRAFAEFLTVQTGGTLYRITNTNDCVPRLPPRQFGYSHSSPEYWIKSGTLPPVRRRDIVKIEGIDATGGNNQPNICDITAHLWYFGLIGTC

SEQ ID NO: 14914 - protein, 268 aa, Thermomyces lanuginosus
EVSQDLFNQFNLFAQYSAAAYCSKNNNAPAGTNITCTGNICPEVEKADATILYSFRDSGEGDVTGFLALDNTNKLIVLSFRGSRSIENWIGNLNFDLKEINDICSGCRGHDGFTSSWFSVADTLRQKVEDAVREHPDYRVVFTGHSLGGALATVAGADLRGNGYDIDVFSYGAPRVGNRAFAEFLTVQTGGTLYRITHTNDIVPRLPPREFGYSHSSPEYWIKSGTLVPVRRRDIVKIEGIDATGGNNQPNIPDITAHLWYFGLIGTC

SEQ ID NO: 14915 - protein, 268 aa, Thermomyces lanuginosus
EVSQDLFNQFNLFAQYSAAAYCGKNNDAPAGTKITCTGNACPEVEKADATLLYSFEDSGVGDVTGFLALDNTNKLIVLSFRGSRSIENWIGNLNFDLEEIDDICSGCRGHDGFTSSWRSVADTLRQKVEDAVREHPDYRVVFTGHSLGGALATVAGADLRGNGYDIDVFSYGAPRVGNRAFAEFLTVQTGGTLYRITDTNDIVPRLPPRKFGYSHSSPEFWIKSGTLVPVRRRDIVKIEGIDATGGNNQPNIPDIPVHLWYFGLIGTC

SEQ ID NO: 14916 - protein, 268 aa, Thermomyces lanuginosus
EVSQDLFNQFNLFAQYSAAAYCGKNNRAPAGTNITCTANACPEVEKADATVLYSFEDSGVGDVTGFLALDNTNKLIVLSFRGSRSIENWIGNLNFELKEINDICSGCRGHAGFTSSWRSVADTLRQKVEDAVREHPDYRVVFTGHSLGGALATVAGADLRGNKYDIDVFSYGAPRLGNRAFAEFLTVQTGGTLYRITHTNDIVPRLPPREFGYSHSSPEYWIKSGTLVPVRRRDIVKIEGIDATGGNNQPNIPSITAHLWYFGLIGTC

SEQ ID NO: 14917 - protein, 268 aa, Thermomyces lanuginosus
EVSQDLFNQFNLFAQYSAAAYCGKNNRAPAGTQITCTGSACPEVEKADATFLYSFEDSGVGDVTGFLALDNTNKLIVLSFRGSRSIENWINNLRFDLKEINDICSGCRGHAGFTSSWRSVADTLRQKVEDAVREHPDYRVVFTGHSLGGALATVAGADLRGNGYDIDVFSYGAPRVGNRAFAEFLTVQTGGTLYRITHTNDIVPRLPPREFGYSHPSPEYWIKSGTGVPVRRRDIVKIEGIDATGGNNQPNIPDITAHLWYFGLIGTC

SEQ ID NO: 14918 - protein, 268 aa, Thermomyces lanuginosus
EVSQDLFNQFNLFAQYSAAAYCGKNNDAPAGTKITCTGNACPEVEKADATVLYSFEDSGVGDVTGFLALDNTNKLIVLSFRGSRSIENWIGNLNFDLEEIDDICSGCRGHDGFTSSWRSVADTLRQKVEDAVREHPDYRVVFTGHSLGGALATVAGADLRGNGYDIDVFSYGAPRVGNRAFAEFLTVQTGGTLYRITDTNDIVPRLPPRKFGYSHSSPEFWIKSGTLVPVRRRDIVKIEGIDATGGNNQPNIPDIPVHLWYFGLIGTC

SEQ ID NO: 14919 - protein, 268 aa, Thermomyces lanuginosus
EVSQDLFNQFNLFAQYSAAAYCGKNNRAPAGTPITCTANACPEVEKADATLLYSFEDSGVGDVTGFLALDNTNKLIVLSFRGSRSIENWIGNLNFELKEINDICSGCRGHAGFTSSWRSVADTLRQKVEDAVREHPDYRVVFTGHSLGGALATVAGADLRGNKYDIDVFSYGAPRVGNRAFAEFLTVQTGGTLYRITHTNDIVPRLPPREFGYSHSSPEYWIKSGTLVPVRRRDIVKIEGIDATGGNNQPNIPSITAHLWYFGLIGTC

SEQ ID NO: 14920 - protein, 268 aa, Thermomyces lanuginosus
EVSQDLFNQFNLFAQYSAAAYCGKNNNAPAGTNITCTGNICPEVEKADATILYSFRDSGKGDVTGFLALDNTNKLIVLSFRGSRSIENWIGNLNFDLKEINDICSGCRGHDGFTSSWFSVADTLRQKVEDAVREHPDYRVVFTGHSLGGALATVAGADLRGNGYDIDVFSYGAPRVGNRAFAEFLTVQTGGTLYRITHTNDIVPRLPPREFGYSHSSPEYWIKSGTLVPVRRRDIVKIEGIDAEGGNNQPNIPDITAHLWYFGLIGTC

SEQ ID NO: 14921 - protein, 268 aa, Thermomyces lanuginosus
EVSQDLFNQFNLFAQYSAAAYCGKNNDAPAGTKITCTGNACPEVEKADATILYSFEDSGVGDVTGFLALDNTNKLIVLSFRGSRSIENWIGNLNFDLEEIDDICSGCRGHDGFTSSWRSVADTLRQKVEDAVREHPDYRVVFTGHSLGGALATVAGADLRGNGYDIDVFSYGAPRVGNRAFAEFLTVQTGGTLYRITSTNDIVPRLPPRKFGYSHSSPEFWIKSGTLPPVRRRDIVKIEGIDATGGNNQPNIPDIPAHLWYFGLIGTC

SEQ ID NO: 14922 - protein, 268 aa, Thermomyces lanuginosus
EVSQDLFNQFRLFAQYSAAAYCGKNNDAPAGTQITCTANACPEVEKADATFLYSFEDSGVGDVTGFLALDNTNKLIVLSFRGSRSIENWITNLNFDLKEINGICSGCRGHDGFTLSWRSVADTLRQKVEDAVREHPDYRVVFTGHSLGGALATVAGADLRGNKYDIDVFSYGAPRVGNRAFAEFLTVQTGGTLYRITHTNDIVPRLPPREFGYSHSSPEYWIKSGTLVPVRRRDIVKIEGIDATGGNNQPNIPSITAHLWYFGLIGTC

SEQ ID NO: 14923 - protein, 268 aa, Thermomyces lanuginosus
EVSQDLFNQFRLFAQYSAAAYCGKNNRAPAGTQITCTGNACPEVEKADATFLYSFEGSGVGDVTGFLALDNTNKLIVLSFRGSRSIENWITNLNFELKEINDICSGCRGHAGFTSSWRSVADTLRQKVEDAVREHPDYRVVFTGHSLGGALATVAGADLRGNKYDIDVFSYGAPRVGNRAFAEFLTVQTGGTLYRITHTNDIVPRLPPREFGYSHSSPEYWIKSGTLVPVRRRDIVKIEGIDATGGNNQPNIPSITAHLWYFGLIGTC

SEQ ID NO: 14924 - protein, 268 aa, Thermomyces lanuginosus
EVSQDLFNQFNLFAQYSAAAYCGKNNRAPAGTQITCTGNACPEVEKADATFLYSFSDSGVGDVTGFLALDNTNKLIVLSFRGSRSIENWINNLRFDLKEINDICSGCRGHAGFTSSWRSVADTLRQKVEDAVREHPDYRVVFTGHSLGGALATVAGADLRGNGYDIDVFSYGAPRVGNRAFAEFLTVQTGGTLYRITHTNDIVPRLPPREFGYSHPSPEYWIKSGTGVPVRRRDIVKIEGIDATGGNNQPNIPDITAHLWYFGLIGTC

SEQ ID NO: 14925 - protein, 268 aa, Thermomyces lanuginosus
EVSQDLFNQFNLFAQYSAAAYCGKNNRAPAGTQITCTGNACPEVEKADATFLYSFEDSGVGDVTGFLALDNTNKLIVLSFRGSRSIENWINNLRFDLKEINDICSGCRGHAGFTSSWRSVADTLRQKVEDAVREHPDYRVVFTGHSLGGALATIAGADLRGNGYDIDVFSYGAPRVGNRAFAEFLTVQTGGTLYRITHTNDIVPRLPPREFGYSHPSPEYWIKSGTGVPVRRRDIVKIEGIDATGGNNQPNIPDITAHLWYFGLIGTC

SEQ ID NO: 14926 - protein, 268 aa, Thermomyces lanuginosus
EVSQDLFNQFNLFAQYSAAAYCGKNNDAPAGTKITCTGNACPEVEKADATLLYSFEDSGVGDVTGFLALDNTNKLIVLSFRGSRSIENWIGNLNFDLEEIDDICSGCRGHDGFTSSWRSVADTLRQKVEDAVREHPDYRVVFTGHSLGGALATVAGADLRGNGYDIDVFSYGAPRVGNRAFAEFLTVQTGGTLYRITSTNDIVPRLPPRKFGYSHSSPEFWIKSGTLVPVRRRDIVKIEGIDATGGNNQPNIPDIPVHLWYFGLIGTC

SEQ ID NO: 14927 - protein, 268 aa, Thermomyces lanuginosus
EVSQDLFNQFNLFAQYSAAAYCGKNNRAPAGTNITCTGNACPEVEKADATVLYSFEDSGVGDVTGFLALDNTNKLIVLSFRGSRSIENWIGNLNFELEEIDDICSGCRGHAGFTSSWRSVADTLRQKVEDAVREHPDYRVVFTGHSLGGALATVAGADLRGNKYDIDVFSYGAPRVGNRAFAEFLTVQTGGTLYRITHTNDIVPRLPPREFGYSHSSPEYWIKSGTLVPVRRRDIVKIEGIDATGGNNQPNIPSITAHLWYFGLIGTC

SEQ ID NO: 14928 - protein, 268 aa, Thermomyces lanuginosus
EVSQDLFNQFNLFAQYSKAAYCQKNNSAPAGTNITCTGNACPEVFKADVTFLYSFEDMGVGDVTGFLALDNTNKQIVLSFRGSRSIENWIGNLNFDLKEINDICSGCKGHDGFTSSWRSVADTLRQKVEDAVREHPDYRVVFTGHSLGGALATVAGADLRGNGYDIDVFSYGAPRVGNRAFAEFLTTQDGGTLYRITHTNDIVPRLPPREFGYSHSSPEYWIKSGTLVPVTRNDIVKIEGIDATGGNNQPNIPDIPAHLWYFGLIGTC

SEQ ID NO: 14929 - protein, 268 aa, Thermomyces lanuginosus
EVSRDLFNQFNLFAQYSAAAYCGKNNDAPAGTNITCTGNACPEVEKADATILYSFEDSGVGDVTGFLALDNTNKLIVLSFRGSRSIENWIGNLNFDLKEINDICSGCRGHDGFTSSWRSVADTLRQKVEDAVREHPDYRVVFTGHSLGGALATVAGADLRGNGYDIDVFSYGAPRVGNRAFAEFLTVQTGGTLYRITNTNDCVPRLPPRQFGYSHSSPEYWIKSGTLPPVRRRDIVKIEGIDATGGNNQPNICDISAHLWYFGLIGTC

SEQ ID NO: 14930 - protein, 268 aa, Thermomyces lanuginosus
EVSQDLFNQFNLFAQYSKAAYCQKNNSAEAGTNITCTGNACPEVEKADATFLYSFEDMGVGDVTGFLALDNTNKQIILSFRGSRSIENWIGNLNFDLKEINDICSGCKGHDGFTSSWRSVADTLRQKVEDAVREFPDYRVVFTGHSLGGALATVAGADLRGNGYDIDVFSYGAPRVGNRAFAEFLTHQTGGTLYRITHTNDIVPRLPPREFGYSHSSPEYWIKSGTLVPVTRNDIVKIEGIDATGGNNQPNIPDIPAHLWYFGLIGTC

SEQ ID NO: 14931 - protein, 268 aa, Thermomyces lanuginosus
EVSQDLFNQFNLFAQYSAAAYCGKNNRAPAGTNITCTANACPEVERADATFLYTFEDSGVGDVTGFLALDNTNKLIVLSFRGSRSIENWIGNLNFELKEINDICSGCRGHAGFTSSWRSVADTLRQKVEDAVREHPDYRVVFTGHSLGGALATVAGADLRGNKYDIDVFSYGAPRVGNRAFAEFLTVQTGGTLYRITHTNDIVPRLPPREFGYSHSSPEYWIKSGTLVPVRRRDIVKIEGIDATGGNNQPNIPSITAHLWYFGLIGTC

SEQ ID NO: 14932 - protein, 268 aa, Thermomyces lanuginosus
EVSQDLFNQFNLFAQYSAAAYCGKNNRAPAGTNITCTANACPEVEKADATFLYSFEDSGVGDVTGFLALDNTNKLIVLSFRGTRSIENWIGNLNYLLKEINDICSGCRGHAGFTSSWRSVADTLRQKVEDAVREHPDYRVVFTGHSLGGALATVAGADLRGNKYDIDVFSYGAPRVGNRAFAEFLTVQTGGTLYRITHTNDIVPRLPPREFGYSHSSPEYWIKSGTLVPVRRRDIVKIEGIDATGGNNQPNIPSITAHLWYFGLIGTC

SEQ ID NO: 14933 - protein, 268 aa, Thermomyces lanuginosus
EVSQDLFNQFNLFAQYSAAAYCGKNNDAPAGTKITCTGNACPEVEKADATLLYSFEDSGVGDVTGFLALDNTNKLIVLSFRGSRSIENWIGNLNFDLEEIDDICSGCRGHDGFTSSWRSVADTLRQKVEDAVREHPDYRVVFTGHSLGGALATVAGADLRGNGYDIDVFSYGAPRVGNRAFAEFLTVQTGGTLYRITSTNDIVPRLPPRRFGYSHSSPEFWIKSGTLVPVRRRDIVKIEGIDATGGNNQPNIPDIPVHLWYFGLIGTC

SEQ ID NO: 14934 - protein, 268 aa, Thermomyces lanuginosus
EVSQDLFNQFNLFAQYSAAAYCGKNNRAPAGTNITCTANACPEVEKADATVLYSFEDSGVGDVTGFLALDNTNKLIVLSFRGSRSIENWIGNLNFELKEINDICSGCRGHAGFTSSWRSVADTLRQKVEDAVREHPDYRVVFTGHSLGGALATVAGADLRGNKYDIDVFSYGAPRVGNRAFAEFLTVQTGGTLYRITHTNDIVPRLPPRKFGYSHSSPEYWIKSGTLVPVRRRDIVKIEGIDATGGNNQPNIPSITAHLWYFGLIGTC

SEQ ID NO: 14935 - protein, 268 aa, Thermomyces lanuginosus
EVSQDLFNQFNLFAQYSKAAYCQKNNSAPAGTNITCTGNACPEVEKADATFLYSFEDMGVGDVTGFLALDNTNKQIILSFRGSRSIENWIGNLNFDLKEINDICSGCKGHDGFTSSWRSVADTLRQKVEDAVREFPDYRVVFTGHSLGGALATVAWADLRGNGYDIDVFSYGAPRVGNRAFAEFLTHQTGGTLYRITHTNDIVPRLPPREFGYSHSSPEYWIKSGTLVPVTRNDIVKIEGIDATGGNNQPNIPDIPAHLWYFGLIGTC

SEQ ID NO: 14936 - protein, 268 aa, Thermomyces lanuginosus
EVSQDLFNQFNLFAQYSAAAYCGKNNRAPAGTNITCTANACPEVEKADATLLYTFEDSGVGDVTGFLALDNTNKLIVLSFRGSRSIENWIGNLNFELKEINDICSGCRGHAGFTSSWRSVADTLRQKVEDAVREHPDYRVVFTGHSLGGALATVAGADLRGNKYDIDVFSYGAPRVGNRAFAEFLTVQTGGTLYRITHTNDIVPRLPPREFGYSHSSPEYWIKSGTLVPVRRRDIVKIEGIDATGGNNQPNIPSITAHLWYFGLIGTC

SEQ ID NO: 14937 - protein, 268 aa, Thermomyces lanuginosus
EVSQDLFNQFNLFAQYSAAAYCGKNNRAPAGTKITCTANACPEVEKADATFLYSFEDSGVGDVTGFLALDNTNKLIVLSFRGSRSIENWIGNLNFELTEINDICSGCRGHAGFTSSWRSVADTLRQKVEDAVREHPDYRVVFTGHSLGGALATVAGADLRGNPYDIDVFSYGAPRVGNRAFAEFLTVQTGGTLYRITHTNDIVPRLPPREFGYSHSSPEYWIKSGTLVPVRRRDIVKIEGIDATGGNNQPNIPSITAHLWYFGLIGTC

SEQ ID NO: 14938 - protein, 268 aa, Thermomyces lanuginosus
EVSQDLFNQFNLFAQYSAAAYCGKNNDAPAGTKITCTGNACPEVEKADATVLYSFEDSGVGDVTGFLALDNTNKLIVLSFRGSRSIENWIGNLNFDLEEIDDICSGCRGHDGFTSSWRSVADTLRQKVEDAVREHPDYRVVFTGHSLGGALATVAGADLRGNGYDIDVFSYGAPRVGNRAFAEFLTVQTGGTLYRITSTNDIVPRLPPRKFGYSHSSPEFWIKSGTLVPVRRRDIVKIEGIDATGGNNQPNIPDIPVHLWYFGLIGTC

SEQ ID NO: 14939 - protein, 268 aa, Thermomyces lanuginosus
EYSQDLFNQFNLFAQYSAAAYCGKNNDAPAGTKITCTGNACPEVEKADATFLYSFEDSGVGDVTGFLARDNTNKLIVLSFRGSRSIENWIGNLNFDLEEINDICSGCRGHDGFTSSWRSVADTLRQKVEDAVREHPDYRVVFTGHSLGGALATVAGADLRGNGYDIDVFSYGAPRLGNRAFAEFLTVQTGGTLYRITHTNDIVPRLPPRKFGYSHSSPEYWIKSGTGVPVRRRDIVKIEGIDATGGNNQPNIPDGPAHLWYFGLIGTC

SEQ ID NO: 14940 - protein, 268 aa, Thermomyces lanuginosus
EYSQDLFNQFNLFAQYSAAAYCGKNNRAPAGTNITCTANACPEVEKADATFLYTFEDSGVGDVTGFLALDNTNKLIVLSFRGSRSIENWIGNLNFELKEINDICSGCRGHAGFTSSWRSVADTLRQKVEDAVREHPDYRVVFTGHSLGGALATVAGADLRGNPYDIDVFSYGAPRVGNRAFAEFLTVQTGGTLYRITHTNDIVPRLPPREFGYSHSSPEYWIKSGTLVPVRRRDIVKIEGIDATGGNNQPNIPSITAHLWYFGLIGTC

SEQ ID NO: 14941 - protein, 268 aa, Thermomyces lanuginosus
EVSQDLFNQFNLFAQYSAAAYCGKNNDAPAGTKITCTGNACPEVEKADATLLYSFEDSGVGDVTGFLALDNTNKLIVLSFRGSRSIENWIGNLNFDLEEIDDICSGCRGHDGFTSSWRSVADTLRQKVEDAVREHPDYRVVFTGHSLGGALATVAGADLRGNGYDIDVFSYGAPRVGNRAFAEFLTVQTGGTLYRITSTNDIVPRLPPRKFGYSHSSPEFWIKSGTLVPVRRRDIVKIEGIDATGGNNQPNIPDIPFHLWYFGLIGTC

SEQ ID NO: 14942 - protein, 268 aa, Thermomyces lanuginosus
EVSQDLFNQFNLFAQYSAAAYCGKNNDAPAGTKITCTGNACPEVEKADATVLYSFEDSGVGDVTGFLALDNTNKLIVLSFRGSRSIENWIGNLNFDLEEIDDICSGCRGHDGFTSSWRSVADTLRQKVEDAVREHPDYRVVFTGHSLGGALATVAGADLRGNGYDIDVFSYGAPRVGNRAFAEFLTVQTGGTLYRITSTNDIVPRLPPRKFGYSHSSPEFWIKSGTLPPVRRRDIVKIEGIDATGGNNQPNIPDIPAHLWYFGLIGTC

SEQ ID NO: 14943 - protein, 268 aa, Thermomyces lanuginosus
EVSRDLFNQFNLFAQYSAAAYCGKNNRAPAGTQITCTGNACPEVEKADATFLYSFEDSGVGDVTGFLALDNTNKLIVLSFRGSRSIENWITNLSFDLKEINDICSGCRGHAGFTSSWRSVADTLRQKVEDAVREHPDYRVVFTGHSLGGALATVAGADLRGNGYDIDVFSYGAPRVGNRAFAEFLTVQTGGTLYRITHTNDIVPRLPPREFGYSHPSPEYWIKSGTGVPVRRRDIVKIEGIDATGGNNQPNIPDITAHLWYFGLIGTC

SEQ ID NO: 14944 - protein, 268 aa, Thermomyces lanuginosus
EVSQDLFNQFNLFAQYSAAAYCGKNNRAPAGTNITCTANACPEVEKADATVLYSFEDSGVGDVTGFLARDNTNKLIVLSFRGSRSIENWIGNLNFELKEINDICSGCRGHAGFTSSWRSVADTLRQKVEDAVREHPDYRVVFTGHSLGGALATVAGADLRGNKYDIDVFSYGAPRVGNRAFAEFLTVQTGGTLYRITHTNDIVPRLPPREFGYSHSSPEYWIKSGTLVPVRRRDIVKIEGIDATGGNNQPNIPSITAHLWYFGLIGTC

SEQ ID NO: 14945 - protein, 268 aa, Thermomyces lanuginosus
EVSQDLFNQFNLFAQYSAAAYCGKNNDAPAGTKITCTGNACPEVEKADATILYSFEDSGVGDVTGFLALDNTNKLIVLSFRGSRSIENWIGNLNFDLEEIDDICSGCRGHDGFTSSWRSVADTLRQKVEDAVREHPDYRVVFTGHSLGGALATVAGADLRGNGYDIDVFSYGAPRVGNRAFAEFLTVQTGGTLYRITSTNDIVPRLPPRKFGYSHSSPEFWIKSGTLVPVRRRDIVKIEGIDATGGNNQPNIPDIPFHLWYFGLIGTC

SEQ ID NO: 14946 - protein, 268 aa, Thermomyces lanuginosus
EVSQDLFNQFNLFAQYSAAAYCGKNNRAPAGTQITCTGNACPEVEKADATFLYSFEDSGVGDVTGFLALDNTNKLIVLSFRGSRSIENWINNLRFDLIEINDICSGCRGHAGFTSSWRSVADTLRQKVEDAVREHPDYRVVFTGHSLGGALATVAGADLRGNGYDIDVFSYGAPRVGNRAFAEFLTVQTGGTLYRITHTNDIVPRLPPREFGYSHPSPEYWIKSGTGVPVRRRDIVKIEGIDATGGNNQPNIPDITAHLWYFGLIGTC

SEQ ID NO: 14947 - protein, 268 aa, Thermomyces lanuginosus
EVSQDLFNQFNLFAQYSAAAYCGKNNDAPAGTNITCTGNACPEVEKADATFLYSFEDTGKGDVTGFLALDNTNKLIVLSFRGSRSVENWIGNLKFDLKEINDICSGCRGHDGFTSSWRSVADTLRQKVEDAVREHPDYRVVFTGHSLGGGLATVAGADLRGNGYDIDVFSYGAPRVGNRAFAEFLTVQTGGTLYRITHTNDIVPRLPPRVFGYSHSSPEYWIKSGTGVPVRRRDIVKIEGIDATGGNNQPNIPDIKAHLWYFGLIGTC

SEQ ID NO: 14948 - protein, 268 aa, Thermomyces lanuginosus
EVSRDLFNQFNLFAQYSAAAYCGKNNDAPAGTNITCTGNACPEVEKADATLLYSFRDSGVGDVTGFLALDNTNKLIVLSFRGTRSIENWIADLNFILIEINDICSGCRGHDGFTSSWFSVADTLRQKVEDAVREHPDYRVVFTGHSLGGALATVAGADLRGNGYDIDVFSYGAPRVGNRAFAEFLTVQTGGTLYRITHTNDIVPRLPPREFGYSHSSPEFWIKSGTLVPVRRRDIVKIEGIDAEGGNNQPNIPSIPAHLWYFGAIGTC

SEQ ID NO: 14949 - protein, 268 aa, Thermomyces lanuginosus
EVSQDLFNQFNLFAQYSAAAYCGKNNDAPAGTNITCTGNACPEVEKADATFLYSFEDNGSGDVTGFLALDNTNKLIVLSFRGSRSVENWIGNLNFDLKEINDICSGCRGHDGFTSSWRSVADTLRQKVEDAVREHPDYRVVFTGHSLGGGLATVAGADLRGNGYDIDVFSYGAPRVGNRAFAEFLTVQTGGTLYRITHTNDIVPRLPPRKFGYSHSSPEYWIKSGTGVPVRRRDIVKIEGIDATGGNNQPNIPDAKAHLWYFGLIGTC

SEQ ID NO: 14950 - protein, 268 aa, Thermomyces lanuginosus
EVSQDLFNQFNLFAQYSAAAYCGKNNDAPAGTNITCTGNACPEVEKADATLLYSFRDSGVGDVTGFLALDNRNKLIVLSFRGTRSIENWIADLNFILIEINDICSGCRGHDGFTSSWFSVADTLRQKVEDAVREHPDYRVVFTGHSLGGALATVAGADLRGNGYDIDVFSYGAPRVGNRAFAEFLTVQTGGTLYRITHTNDIVPRLPPREFGYSHSSPEFWIKSGTLVPVRRRDIVKIEGIDAEGGNNQPNIPSIPAHLWYFGAIGTC

SEQ ID NO: 14951 - protein, 268 aa, Thermomyces lanuginosus
EVSQDLFNQFNLFAQYSAAAYCGKNNRAPAGTNITCTANACPEVEKADATFLYTFEDSGVGDVTGFLALDNTNKLIVLSFRGSRSIENWIADLNFLLQEINDICSGCRGHAGFTSSWRSVADTLRQKVEDAVREHPDYRVVFTGHSLGGALATVAGADLRGNKYDIDVFSYGAPRVGNRAFAEFLTVQTGGTLYRITHTNDIVPRLPPREFGYSHSSPEYWIKSGTLVPVRRRDIVKIEGIDATGGNNQPNIPSITAHLWYFGLIGTC

SEQ ID NO: 14952 - protein, 268 aa, Thermomyces lanuginosus
EVSQDLFNQFNLFAQYSAAAYCGKNNDAPAGTNITCTGNACPEVEKADATFLYSFEDSGVGDVTGFLALDNTNKLIVLSFRGTGSDTNLQLDTNYTLTEINDICSGCRGHDGFTSSWRSVADTLRQKVEDAVREHPDYRVVFTGHSLGGALATVAGADLRGNGYDIDVFSYGAPRVGNRAFAEFLTVQTGGTLYRITHTNDIVPRLPPREFGYSHSSPEYWIKSGTLVPVTRNDIVKIEGIDATGGNNQPNIPDIPAHLWYFGLIGTC

SEQ ID NO: 14953 - protein, 268 aa, Thermomyces lanuginosus
EVSEDLFNQFNLFAQYSAAAYCGKNNDAPAGTNITCTGNACPEVEKADATLLYSFRDSGVGDVTGFLALDNTNKLIVLSFRGTRSIENWIADLNFILIEINDICSGCRGHDGFTSSWFSVADTLRQKVEDAVREHPDYRVVFTGHSLGGALATVAGADLRGNGYDIDVFSYGAPRVGNRAFAEFLTVQTGGTLYRITHTNDIVPRLPPREFGYSHSSPEFWIKSGTLVPVRRRDIVKIEGIDAEGGNNQPNIPSIPAHLWYFGAIGTC

SEQ ID NO: 14954 - protein, 268 aa, Thermomyces lanuginosus
EVSVDLFNQFNLFAQYSAAAYCGKNNDAPAGTNITCTGNACPEVEKADATFLYSFEDTGKGDVTGFLALDNTNKLIVLSFRGSRSIENWIGNLNFDLKEINDICSGCRGHDGFTSSWRSVADTLRQKVEDAVREHPDYRVVFTGHSLGGALATVAGADLRGNGYDIDVFSYGAPRVGNRAFAEFLTVQTGGTLYRITHLADIVPRLPPRKFGYSHSSPEYWIKSGTLVPVRRRDIVKIEGIDATGGNNQPNIPDAKAHLWYFGLIGTC

SEQ ID NO: 14955 - protein, 268 aa, Thermomyces lanuginosus
EVSQDLFNQFNLFAQYSAAAYCGKNNDAPAGTNITCTGNACPEVEQADATLLYSFRDSGVGDVTGFLALDNTNKLIVLSFRGTRSIENWIADLNFILIEINDICSGCRGHDGFTSSWFSVADTLRQKVEDAVREHPDYRVVFTGHSLGGALATVAGADLRGNGYDIDVFSYGAPRVGNRAFAEFLTVQTGGTLYRITHTNDIVPRLPPREFGYSHSSPEFWIKSGTLVPVRRRDIVKIEGIDAEGGNNQPNIPSIPAHLWYFGAIGTC

SEQ ID NO: 14956 - protein, 268 aa, Thermomyces lanuginosus
EVSQDLFNQFNLFAQYSAAAYCGKNNDAPAGTNITCTGNACPEVEKADATLLYSFRDSGVGDVTGFLALDNTNELIVLSFRGTRSIENWIADLNFILIEINDICSGCRGHDGFTSSWFSVADTLRQKVEDAVREHPDYRVVFTGHSLGGALATVAGADLRGNGYDIDVFSYGAPRVGNRAFAEFLTVQTGGTLYRITHTNDIVPRLPPREFGYSHSSPEFWIKSGTLVPVRRRDIVKIEGIDAEGGNNQPNIPSIPAHLWYFGAIGTC

SEQ ID NO: 14957 - protein, 268 aa, Thermomyces lanuginosus
EVSQDLFNQFNLFAQYSAAAYCGKNNDAPAGTNITCTGNACPEVEKADATLLYSFRDSGVGDVTGFLALDNTNKLIVLSFRGTRSIENWIADLNFILIEINDICSGCRGHDGFTSSWFSFADTLRQKVEDAVREHPDYRVVFTGHSLGGALATVAGADLRGNGYDIDVFSYGAPRVGNRAFAEFLTVQTGGTLYRITHTNDIVPRLPPREFGYSHSSPEFWIKSGTLVPVRRRDIVKIEGIDAEGGNNQPNIPSIPAHLWYFGAIGTC

SEQ ID NO: 14958 - protein, 268 aa, Thermomyces lanuginosus
EVSQDLFNQFNLFAQYSAAAYCGKNNDAPAGTNITCTGNACPEVEKADATLLYSFRDSGVGDVTGFLALDRTNKLIVLSFRGTRSIENWIADLNFILIEINDICSGCRGHDGFTSSWFSVADTLRQKVEDAVREHPDYRVVFTGHSLGGALATVAGADLRGNGYDIDVFSYGAPRVGNRAFAEFLTVQTGGTLYRITHTNDIVPRLPPREFGYSHSSPEFWIKSGTLVPVRRRDIVKIEGIDAEGGNNQPNIPSIPAHLWYFGAIGTC

SEQ ID NO: 14959 - protein, 267 aa, Thermomyces lanuginosus
VSQDLFNQFNLFAQYSAAAYCGKNNDAPAGTNITCTGNACPEVEKADATFLYSFEDAGSGDVTGFLALDNTNKLIVLSFRGSRSVENWIGNLNFDLKEINDICSGCRGHDGFTSSWRSVADTLRQKVEDAVREHPDYRVVFSGHSLGGGLATVAGADLRGNGYDIDVFSYGAPRVGNRAFAEFLTVQTGGTLYRITHTNDIVPRLPPREFGYSHSSPEYWIKSGTGVPVRRRDIVKIEGIDATGGNNQPNIPDAKAHLWYFGLIGTC

SEQ ID NO: 14960 - protein, 267 aa, Thermomyces lanuginosus
EKSQDLFNQFNLFAQYSAAAYCGKNNDAPAGTKITCTGNACPEVEKADATILYSFEDSGVGDVTGFLARDNTNKLIVLSFRGSRSIENWIGNLNFDLEEINDICSGCRGHDGFTSSWRSVADTLRQKVEDAVREHPDYRVVFTGHSLGGALATVAGADLRGNGYDIDVFSYGAPRLGNRAFAEFLTVQTGGTLYRITTNDIVPRLPPRKFGYSHSSPEYWIKSGTGVPVRRRDIVKIEGIDATGGNNQPNIPDIPAHLWYFGLIGTC

SEQ ID NO: 14961 - protein, 267 aa, Thermomyces lanuginosus
VSQDLFNQFNLFAQYSAAAYCGKNNDAPAGTNITCTGNACPEVEKADATFLYSFEDAGSGDVTGFLALDNTNKLIVLSFRGSRSVENWIGNLNFDLIKINDICSGCRGHDGFTSSWRSVADTLRQKVEDAVREHPDYRVVFSGHSLGGGLATVAGADLRGNGYDIDVFSYGAPRVGNRAFAEFLTVQTGGTLYRITHTNDIVPRLPPREFGYSHSSPEYWIKSGTGVPVRRRDIVKIEGIDATGGNNQPNIPDAKAHLWYFGLIGTC

SEQ ID NO: 14962 - protein, 267 aa, Thermomyces lanuginosus
VSQDLFNQFNLFAQYSAAAYCGKNNDAPAGTNITCTANACPEVEKADATVLYSFEDSGVGDVTGFLALDNTNKLIVLSFRGSRSIENWIGNLNFELIEINDICSGCRGHAGFTSSWRSVADTLRQKVEDAVREHPDYRVVFTGHSLGGALATVAGADLRGNKYDIDVFSYGAPRVGNRAFAEFLTVQTGGTLYRITSTNDIVPRLPPREFGYSHSSPEFWIKSGTLVPVRRCDIVKIEGIDATGGNNQPNIPDITAHLWYFGLIGTC

SEQ ID NO: 14963 - protein, 267 aa, Thermomyces lanuginosus
VSQDLFNQFNLFAQYSAAAYCGKNNRAPAGTNITCTGNACPEVEKADATVLYSFEDSGVGDVTGFLALDNTNKLIVLSFRGSRSIENWIGNLNFELIEINDICSGCRGHAGFTSSWRSVADTLRQKVEDAVREHPDYRVVFTGHSLGGALATVAGADLRGNKYDIDVFSYGAPRVGNRAFAEFLTVQTGGTLYRITSTNDIVPRLPPREFGYSHSSPEFWIKSGTLVPVRRCDIVKIEGIDATGGNNQPNIPDITAHLWYFGLIGTC

SEQ ID NO: 14964 - protein, 267 aa, Thermomyces lanuginosus
VSQDLFNQFNLFAQYSAAAYCGKNNRAPAGTNITCTGNACPEVEKADATLLYSFEDSGVGDVTGFLALDNTNKLIVLSFRGSRSIENWIGNLNFELIEINDICSGCRGHAGFTSSWRSVADTLRQKVEDAVREHPDYRVVFTGHSLGGALATVAGADLRGNSYDIDVFSYGAPRVGNRAFAEFLTVQTGGTLYRITSTNDIVPRLPPREFGYSHSSPEFWIKSGTLVPVRRCDIVKIEGIDATGGNNQPNIPDITAHLWYFGLIGTC

SEQ ID NO: 14965 - protein, 267 aa, Thermomyces lanuginosus
VSQDLFNQFNLFAQYSAAAYCGKNNRAPAGTNITCTGNACPEVEKADATLLYSFEDSGVGDVTGFLALDNTNKLIVLSFRGSRSIENWIGNLNFELIEINDICSGCRGHAGFTSSWRSVADTLRQKVEDAVREHPDYRVVFTGHSLGGALATVAGADLRGNKYDIDVFSYGAPRVGNRAFAEFLTVQTGGTLYRITSTNDIVPRLPPREFGYSHSSPEFWIKSGTLVPVRRCDIVKIEGIDATGGNNQPNIPDITAHLWYFGLIGTC

SEQ ID NO: 14966 - protein, 267 aa, Thermomyces lanuginosus
VSQDLFNQFNLFAQYSAAAYCGKNNDAPAGTNITCTGNACPEVEKADATVLYSFEDSGVGDVTGFLALDNTNKLIVLSFRGSRSIENWIGNLNFDLIEINDICSGCRGHAGFTSSWRSVADTLRQKVEDAVREHPDYRVVFTGHSLGGALATVAGADLRGNKYDIDVFSYGAPRVGNRAFAEFLTVQTGGTLYRITSTNDIVPRLPPREFGYSHSSPEFWIKSGTLVPVRRCDIVKIEGIDATGGNNQPNIPSITAHLWYFGLIGTC

SEQ ID NO: 14967 - protein, 267 aa, Thermomyces lanuginosus
VSQDLFNQFNLFAQYSAAAYCGKNNDAPAGTNITCTGNACPEVEKADATLLYSFEDSGVGDVTGFLALDNTNKLIVLSFRGSRSIENWIGNLNFELIEINDICSGCRGHAGFTSSWRSVADTLRQKVEDAVREHPDYRVVFTGHSLGGALATVAGADLRGNKYDIDVFSYGAPRVGNRAFAEFLTVQTGGTLYRITSTNDIVPRLPPREFGYSHSSPEFWIKSGTLVPVRRCDIVKIEGIDATGGNNQPNIPSITAHLWYFGLIGTC

SEQ ID NO: 14968 - protein, 267 aa, Thermomyces lanuginosus
VSQDLFNQFNLFAQYSAAAYCGKNNRAPAGTNITCTGNACPEVEKADATLLYSFEDSGVGDVTGFLALDNTNKLIVLSFRGSRSIENWIGNLNFILIEINDICSGCRGHAGFTSSWRSVADTLRQKVEDAVREHPDYRVVFTGHSLGGALATVAGADLRGNKYDIDVFSYGAPRVGNRAFAEFLTVQTGGTLYRITSTNDIVPRLPPREFGYSHSSPEFWIKSGTLVPVRRCDIVKIEGIDATGGNNQPNIPDITAHLWYFGLIGTC

SEQ ID NO: 14969 - protein, 267 aa, Thermomyces lanuginosus
VSQDLFNQFNLFAQYSAAAYCGKNNDAPAGTNITCTGNACPEVEKADATVLYSFEDSGVGDVTGFLALDNTNKLIVLSFRGSRSIENWIGNLNFILIEINDICSGCRGHAGFTSSWRSVADTLRQKVEDAVREHPDYRVVFTGHSLGGALATVAGADLRGNKYDIDVFSYGAPRVGNRAFAEFLTVQTGGTLYRITSTNDIVPRLPPREFGYSHSSPEFWIKSGTLVPVRRCDIVKIEGIDATGGNNQPNIPSITAHLWYFGLIGTC

SEQ ID NO: 14970 - protein, 267 aa, Thermomyces lanuginosus
VSQDLFNQFNLFAQYSAAAYCGKNNDAPAGTNITCTGNACPEVEKADATILYSFEDSGVGDVTGFLALDNTNKLIVLSFRGSRSIENWIGNLNFELIEINDICSGCRGHAGFTSSWRSVADTLRQKVEDAVREHPDYRVVFTGHSLGGALATVAGADLRGNKYDIDVFSYGAPRVGNRAFAEFLTVQTGGTLYRITSTNDIVPRLPPREFGYSHSSPEFWIKSGTLVPVRRCDIVKIEGIDATGGNNQPNIPSITAHLWYFGLIGTC

SEQ ID NO: 14971 - protein, 267 aa, Thermomyces lanuginosus
VSQDLFNQFNLFAQYSAAAYCGKNNDAPAGTNITCTGNACPEVEKADATVLYSFEDSGVGDVTGFLALDNTNKLIVLSFRGSRSIENWIGNLNFELIEINDICSGCRGHAGFTSSWRSVADTLRQKVEDAVREHPDYRVVFTGHSLGGALATVAGADLRGNKYDIDVFSYGAPRVGNRAFAEFLTVQTGGTLYRITSTNDIVPRLPPREFGYSHSSPEFWIKSGTLVPVRRCDIVKIEGIDATGGNNQPNIPSITAHLWYFGLIGTC

SEQ ID NO: 14972 - protein, 268 aa, Thermomyces lanuginosus
EKSQDLFNQFNLFAQYSAAAYCGKNNDAPAGTKITCTGNACPEVEKADATVLYSFEDSGVGDVTGFLARDNTNKLIVLSFRGSRSIENWIGNLNFDLEEINDICSGCRGHDGFTSSWRSVADTLRQKVEDAVREHPDYRVVFTGHSLGGALATVAGADLRGNGYDIDVFSYGAPRLGNRAFAEFLTVQTGGTLYRITYTNDIVPRLPPRKFGYSHSSPEYWIKSGTGVPVRRRDIVKIEGIDATGGNNQPNIPDIPAHLWYFGLIGTC

SEQ ID NO: 14973 - protein, 268 aa, Thermomyces lanuginosus
EVSRDLFNQFNLFAQYSAAAYCGKNNQAPAGTQITCTGNACPEVEKADATFLYSFEDSGVGDVTGFLALDNTNKLIVLSFRGSRSIENWITNLSFDLKDINDICSGCRGHAGFTSSWRSVADTLRQKVEDAVREHPDYRVVFTGHSLGGALATVAGADLRGNGYDIDVFSYGAPRVGNRAFAEFLTVQTGGTLYRITHTNDIVPRLPPRDFGYSHPSPEYWIKSGTGVPVRRRDIVKIEGIDATGGNNQPNIPDILAHLWYFGLIGTC

SEQ ID NO: 14974 - protein, 268 aa, Thermomyces lanuginosus
EYSQDLFNQFNLFAQYSAAAYCGKNNDAPAGTKITCTGNACPEVEKADATLLYSFEDSGVGDVTGFLARDNTNKLIVLSFRGSRSIENWIGNLNFDLEEINDICSGCRGHDGFTSSWRSVADTLRQKVEDAVREHPDYRVVFTGHSLGGALATVAGADLRGNGYDIDVFSYGAPRLGNRAFAEFLTVQTGGTLYRITSTNDIVPRLPPRKFGYSHSSPEYWIKSGTGVPVRRRDIVKIEGIDATGGNNQPNIPDIPAHLWYFGLIGTC

SEQ ID NO: 14975 - protein, 268 aa, Thermomyces lanuginosus
EYSQDLFNQFNLFAQYSAAAYCGKNNDAPAGTKITCTGNACPEVEKADATLLYSFEDSGVGDVTGFLARDNTNKLIVLSFRGSRSIENWIGNLNFDLEEINDICSGCRGHDGFTSSWRSVADTLRQKVEDAVREHPDYRVVFTGHSLGGALATVAGADLRGNGYDIDVFSYGAPRLGNRAFAEFLTVQTGGTLYRITHTNDIVPRLPPRKFGYSHSSPEYWIKPGTGVPVRRRDIVKIEGIDATGGNNQPNIPDIPAHLWYFGLIGTC

SEQ ID NO: 14976 - protein, 268 aa, Thermomyces lanuginosus
EVSQDLFNQFNLFAQYSAAAYCGKNNDAPAGTNITCTGNACPEVEKADATFLYSFEDNGSGDVTGFLALDNTNKLIVLSFRGSRSVENWIGNLNFDLKEINDICSGCRGHDGFTSSWRSVADTLRQKVEDAVREHPDYRVVFTGHSLGGGLATVARADLRGNGYDIDVFSYGAPRVGNRAFAEFLTVQTGGTLYRITHTNDIVPRLPPRKFGYSHSSPEYWIKSGTGVPVRRRDIVKIEGIDATGGNNQPNIPDAKAHLWYFGLIGTC

SEQ ID NO: 14977 - protein, 268 aa, Thermomyces lanuginosus
EKSQDLFNQFNLFAQYSAAAYCGKNNDAPAGTKITCTGNACPEVEKADATVLYSFEDSGVGDVTGFLARDNTNKLIVLSFRGSRSIENWIGNLNFDLEEINDICSGCRGHDGFTSSWRSVADTLRQKVEDAVREHPDYRVVFTGHSLGGALATVAGADLRGNGYDIDVFSYGAPRLGNRAFAEFLTVQTGGTLYRITITNDIVPRLPPRKFGYSHSSPEYWIKSGTGVPVRRRDIVKIEGIDATGGNNQPNIPDIPAHLWYFGLIGTC

SEQ ID NO: 14978 - protein, 268 aa, Thermomyces lanuginosus
EVSQDLFNQFNLFAQYSAAAYCGKNNRAPAGTKITCTANACPEVEKADATVLYSFEDSGVGDVTGFLALDNTNKLIVLSFRGSRSIENWIGNLNFELEEINDICSGCRGHAGFTSSWRSVADTLRQKVEDAVREHPDYRVVFTGHSLGGALATVAGADLRGNKYDIDVFSYGAPRVGNRAFAEFLTVQTGGTLYRITHTNDIVPRLPPREFGYSHSSPEYWIKSGTLVPVRRRDIVKIEGIDATGGNNQPNIPSITAHLWYFGLIGTC

SEQ ID NO: 14979 - protein, 268 aa, Thermomyces lanuginosus
EYSQDLFNQFNLFAQYSAAAYCGKNNDAPAGTKITCTGNACPEVEKADATLLYSFEDSGVGDVTGFLARDNTNKLIVLSFRGSRSIENWIGNLNFDLEEINDICSGCRGHDGFTSSWRSVADTLRQKVEDAVREHPDYRVVFTGHSLGGALATVAGADLRGNGYDIDVFSYGAPRLGNRAFAEFLTVQTGGTLYRITYTNDIVPRLPPRKFGYSHSSPEYWIKSGTGVPVRRRDIVKIEGIDATGGNNQPNIPDIPAHLWYFGLIGTC

SEQ ID NO: 14980 - protein, 268 aa, Thermomyces lanuginosus
EVSQDLFNQFNLFAQYSAAAYCGKNNRAPAGTQITCTGNACPEVEKADATFLYSFEDSGVGDVTGFLALDNTNKLIVLSFRGSRSIENWINNLRFDLKEINDICSGCRGHAGFISSWRSVADTLRQKVEDAVREHPDYRVVFTGHSLGGALATVAGADLRGNGYDIDVFSYGAPRVGNTAFAEFLTVQTGGTLYRITHTNDIVPRLPPREFGYSHPSPEYWIKSGTGVPVRRRDIVKIEGIDATGGNNQPNIPDITAHLWYFGLIGTC

SEQ ID NO: 14981 - protein, 268 aa, Thermomyces lanuginosus
EVSQDLFNQFNLFAQYSAAAYCGKNNRAPAGTKITCTANACPEVEKADATVLYSFEDSGVGDVTGFLALDNTNKLIVLSFRGSRSIENWIGNLNFELIEINDICSGCRGHAGFTSSWRSVADTLRQKVEDAVREHPDYRVVFTGHSLGGALATVAGADLRGNKYDIDVFSYGAPRVGNRAFAEFLTVQTGGTLYRITHTNDIVPRLPPREFGYSHSSPEYWIKSGTLVPVRRRDIVKIEGIDATGGNNQPNIPSITAHLWYFGLIGTC

SEQ ID NO: 14982 - protein, 268 aa, Thermomyces lanuginosus
EVSQDLFNQFNLFAQYSAAAYCGKNNRAPAGTKITCTANACPEVEKADATVLYSFEDSGVGDVTGFLALDNTNKLIVLSFRGSRSIENWIGNLNFELEEIDDICSGCRGHAGFTSSWRSVADTLRQKVEDAVREHPDYRVVFTGHSLGGALATVAGADLRGNGYDIDVFSYGAPRVGNRAFAEFLTVQTGGTLYRITHTNDIVPRLPPREFGYSHSSPEYWIKSGTLVPVRRRDIVKIEGIDATGGNNQPNIPSITAHLWYFGLIGTC

SEQ ID NO: 14983 - protein, 268 aa, Thermomyces lanuginosus
EKSQDLFNQFNLFAQYSAAAYCGKNNRAPAGTKITCTANACPEVEKADATVLYSFEDSGVGDVTGFLALDNTNKLIVLSFRGSRSIENWIGNLNFELKEINDICSGCRGHAGFTSSWRSVADTLRQKVEDAVREHPDYRVVFTGHSLGGALATVAGADLRGNKYDIDVFSYGAPRVGNRAFAEFLTVQTGGTLYRITHTNDIVPRLPPREFGYSHSSPEYWIKSGTLVPVRRRDIVKIEGIDATGGNNQPNIPSITAHLWYFGLIGTC

SEQ ID NO: 14984 - protein, 268 aa, Thermomyces lanuginosus
EVSQDLFNQFNLFAQYSAAAYCGKNNRAPAGTQITCTGNACPEVEKADATFLYSFEDSGVGDVTGFLALDSTNKLIVLSFRGSRSIENWINNLRFDLKEINDICSGCRGHAGFTSSWRSVADTLRQKVEDAVREDPDYRVVFTGHSLGGALATVAGADLRGNGYDIDVFSYGAPRVGNRAFAEFLTVQTGGTLYRITHTNDIVPRLPPREFGYSHPSPEYWIKSGTGVPVRRRDIVKIEGIDATGGNNQPNIPDITAHLWYFGLIGTC

SEQ ID NO: 14985 - protein, 268 aa, Thermomyces lanuginosus
EYSQDLFNQFNLFAQYSAAAYCGKNNDAPAGTKITCTGNACPEVEKADATLLYSFEDSGVGDVTGFLARDNTNKLIVLSFRGSRSIENWIGNLNFDLEEINDICSGCRGHDGFTSSWRSVADTLRQKVEDAVREHPDYRVVFTGHSLGGGLATVAGADLRGNGYDIDVFSYGAPRLGNRAFAEFLTVQTGGTLYRITHTNDIVPRLPPRKFGYSHSSPEYWIKSGTGVPVRRRDIVKIEGIDATGGNNQPNIPDIPAHLWYFGLIGTC

SEQ ID NO: 14986 - protein, 268 aa, Thermomyces lanuginosus
EKSQDLFNQFNLFAQYSAAAYCGKNNDAPAGTKITCTGNACPEVEKADATILYSFEDSGVGDVTGFLARDNTNKLIVLSFRGSRSIENWIGNLNFDLEEINDICSGCRGHDGFTSSWRSVADTLRQKVEDAVREHPDYRVVFTGHSLGGALATVAGADLRGNGYDIDVFSYGAPRLGNRAFAEFLTVQTGGTLYRITHTNDIVPRLPPRKFGYSHSSPEYWIKSGTGPPVRRRDIVKIEGIDATGGNNQPNIPDIPAHLWYFGLIGTC

SEQ ID NO: 14987 - protein, 268 aa, Thermomyces lanuginosus
EVSQDLFNQFNLFAQYSAAAYCGKNNRAPAGTQITCTGNACPEVEKADATFLYSFEDSGVGDVTGFLALDNTNKLIVLSFRGSRSIENWINNLRFDLKEINDICSGCRGHSGFTSSWRSVADTLRQKVEDAVREHPDYRVVFTGHSLGGALATVVGADLRGNGYDIDVFSYGAPRVGNRAFAEFLTVQTGGTLYRITHTNDIVPRLPPREFGYSHPSPEYWIKSGTGVPVRRRDIVKIEGIDATGGNNQPNIPSITAHLWYFGLIGTC

SEQ ID NO: 14988 - protein, 268 aa, Thermomyces lanuginosus
EYSQDLFNQFNLFAQYSAAAYCGKNNDAPAGTKITCTGNACPEVEKADATVLYSFEDSGVGDVTGFLARDNTNKLIVLSFRGSRSIENWIGNLNFDLEEINDICSGCRGHDGFTSSWRSVADTLRQKVEDAVREHPDYRVVFTGHSLGGALATVAGADLRGNGYDIDVFSYGAPRLGNRAFAEFLTVQTGGTLYRITLTNDIVPRLPPRKFGYSHSSPEYWIKSGTGVPVRRRDIVKIEGIDATGGNNQPNIPDIPAHLWYFGLIGTC

SEQ ID NO: 14989 - protein, 268 aa, Thermomyces lanuginosus
EYSQDLFNQFNLFAQYSAAAYCGKNNDAPAGTKITCTGNACPEVEKADATLLYSFEDSGVGDVTGFLARDNTNKLIVLSFRGSRSIENWIGNLNFDLEEINDICSGCRGHDGFTSSWRSVADTLRQKVEDAVREHPDYRVVFTGHSLGGALATVAGADLRGNGYDIDVFSYGAPRLGNRAFAEFLTVQTGGTLYRITHTNDIVPRLPPRKFGYSHSSPEYWIKIGTGVPVRRRDIVKIEGIDATGGNNQPNIPDIPAHLWYFGLIGTC

SEQ ID NO: 14990 - protein, 268 aa, Thermomyces lanuginosus
EVSPDLFNQFNLFAQYSAAAYCGKNNRAPAGTQITCTGNACPEVEKADATFLYSFEDSGVGDVTGFLALDNTNKLIVLSFRGSRSIENWINNLRFDLKEINDICSGCRGHAGFTSSWRSVADTLRQKVEDAVREHPDYRVVFTGHSLGGALATVAGADLRGNGYDIDVFSYGAPRVGNRAFAEFLTVQTGGTLYRITHTNDIVPRFPPREFGYSHPSPEYWIKSGTGVPVRRRDIVKIEGIDATGGNNQPNIPDITAHLWYFGLIGTC

SEQ ID NO: 14991 - protein, 268 aa, Thermomyces lanuginosus
EKSQDLFNQFNLFAQYSAAAYCGKNNDAPAGTKITCTGNACPEVEKADATVLYSFEDSGVGDVTGFLARDNTNKLIVLSFRGSRSIENWIGNLNFDLEEINDICSGCRGHDGFTSSWRSVADTLRQKVEDAVREHPDYRVVFTGHSLGGALATVAGADLRGNGYDIDVFSYGAPRLGNRAFAEFLTVQTGGTLYRITHTNDIVPRLPPRKFGYSHSSPEYWIKSGTGVPVRRRDIVKIEGIDATGGNNQPNIPDIPVHLWYFGLIGTC

SEQ ID NO: 14992 - protein, 268 aa, Thermomyces lanuginosus
EVSQDLFNQFNLFAQYSAAAYCGKNNRAPAGTNITCTANACPEVEKADATFLYSFEDSGVGDVTGFLALDNTNKLIVLSFRGTRSPENWIADLNYLLKEINDICSGCRGHAGFTSSWRSVADTLRQKVEDAVREHPDYRVVFTGHSLGGALATVAGADLRGNKYDIDVFSYGAPRVGNRAFAEFLTVQTGGTLYRITHTNDIVPRLPPREFGYSHSSPEYWIKSGTLVPVRRRDIVKIEGIDATGGNNQPNIPSITAHLWYFGLIGTC

SEQ ID NO: 14993 - protein, 268 aa, Thermomyces lanuginosus
EVSQDLFNQFNLFAQYSAAAYCGKNNRAPAGTNITCTANACPEVEKADATFLYSFEDSGVGDVTGFLALDNTNKLIVLSFRGSRSIENWIGNLNFELKEINDICSGCRGHAGFTSSWRSVADTLRQKVEDAVREHPDYRVVFTGHSLGGALATVAGADLRGNKYDIDVFSYGAPRVGNRAFAEFLTVQTGGTLYRITHTNDIVPRLPPREFGYSHSSPEYWIKSGTLVPLRRRDIVKIEGIDATGGNNQPNIPSITAHFHYFGLIGTC

SEQ ID NO: 14994 - protein, 268 aa, Thermomyces lanuginosus
EYSQDLFNQFNLFAQYSAAAYCGKNNDAPAGTKITCTGNACPEVEKADATILYSFEDSGVGDVTGFLARDNTNKLIVLSFRGSRSIENWIGNLNFDLEEINDICSGCRGHDGFTSSWRSVADTLRQKVEDAVREHPDYRVVFTGHSLGGALATVAGADLRGNGYDIDVFSYGAPRLGNRAFAEFLTVQTGGTLYRITHTNDIVPRLPPRKFGYSHSSPEYWIKSGTGVPRRRRDIVKIEGIDATGGNNQPNIPDIPAHLWYFGLIGTC

SEQ ID NO: 14995 - protein, 268 aa, Thermomyces lanuginosus
EYSQDLFNQFNLFAQYSAAAYCGKNNDAPAGTKITCTGNACPEVEKADATILYSFEDSGVGDVTGFLARDNTNKLIVLSFRGSRSIENWIGNLNFDLEEINDICSGCRGHDGFTSSWRSVADTLRQKVEDAVREHPDYRVVFTGHSLGGGLATVAGADLRGNGYDIDVFSYGAPRLGNRAFAEFLTVQTGGTLYRITHTNDIVPRLPPRKFGYSHSSPEYWIKSGTGVPVRRRDIVKIEGIDATGGNNQPNIPDIPAHLWYFGLIGTC

SEQ ID NO: 14996 - protein, 268 aa, Thermomyces lanuginosus
EYSQDLFNQFNLFAQYSAAAYCGKNNDAPAGTKITCTGNACPEVEKADATLLYSFEDSGVGDVTGFLARDNTNKLIVLSFRGSRSIENWIGNLNFDLEEINDICSGCRGHDGFTSSWRSVADTLRQKVEDAVREHPDYRVVFTGHSLGGALATVAGADLRGNGYDIDVFSYGAPRLGNRAFAEFLTVQTGGTLYRITITNDIVPRLPPRKFGYSHSSPEYWIKSGTGVPVRRRDIVKIEGIDATGGNNQPNIPDIPAHLWYFGLIGTC

SEQ ID NO: 14997 - protein, 268 aa, Thermomyces lanuginosus
EYSQDLFNQFNLFAQYSAAAYCGKNNDAPAGTKITCTGNACPEVEKADATVLYSFEDSGVGDVTGFLARDNTNKLIVLSFRGSRSIENWIGNLNFDLEEINDICSGCRGHDGFTSSWRSVADTLRQKVEDAVREHPDYRVVFTGHSLGGALATVAGADLRGNGYDIDVFSYGAPRLGNRAFAEFLTVQTGGTLYRITHTNDIVPRLPPRKFGYSHSSPEYWIKIGTGVPVRRRDIVKIEGIDATGGNNQPNIPDIPAHLWYFGLIGTC

SEQ ID NO: 14998 - protein, 268 aa, Thermomyces lanuginosus
EYSQDLFNQFNLFAQYSAAAYCGKNNDAPAGTKITCTGNACPEVEKADATILYSFEDSGVGDVTGFLARDNTNKLIVLSFRGSRSIENWIGNLNFDLEEINDICSGCRGHDGFTSSWRSVADTLRQKVEDAVREHPDYRVVFTGHSLGGALATVAGADLRGNGYDIDVFSYGAPRLGNRAFAEFLTVQTGGTLYRITYTNDIVPRLPPRKFGYSHSSPEYWIKSGTGVPVRRRDIVKIEGIDATGGNNQPNIPDIPAHLWYFGLIGTC

SEQ ID NO: 14999 - protein, 268 aa, Thermomyces lanuginosus
EVSQDLFNQFNLFAQYSAAAYCSKNNNAPAGTNITCTGNICPEVEKADATILYSFRDSGEGDVTGFLALDNTNKLIVLSFRGSRSIENWIGNLNFDLKEINDICSGCRGHDGFTSSWFSVADTLRQKVEDAVREHPDYRVVFTGHSLGGALATVAGADLRGNGYDIDVFSYGAPRVGNRAFAEFLTVQTGGTLYRITHTNDIVPRLPPREFGYSHSSPEYWIKSGTLVPVRRRDIVKIEGIDAEGGNNQPNIPDITAHLWYFGLIGTC

SEQ ID NO: 15000 - protein, 268 aa, Thermomyces lanuginosus
EYSQDLFNQFNLFAQYSAAAYCGKNNDAPAGTKITCTGNACPEVEKADATILYSFEDSGVGDVTGFLARDNTNKLIVLSFRGSRSIENWIGNLNFDLEEINDICSGCRGHDGFTSSWRSVADTLRQKVEDAVREHPDYRVVFTGHSLGGALATVAGADLRGNGYDIDVFSYGAPRLGNRAFAEFLTVQTGGTLYRITHTNDIVPRLPPRKFGYSHSSPEYWIKFGTGVPVRRRDIVKIEGIDATGGNNQPNIPDIPAHLWYFGLIGTC

SEQ ID NO: 15001 - protein, 268 aa, Thermomyces lanuginosus
EYSQDLFNQFNLFAQYSAAAYCGKNNDAPAGTKITCTGNACPEVEKADATLLYSFEDSGVGDVTGFLARDNTNKLIVLSFRGSRSIENWIGNLNFDLEEINDICSGCRGHDGFTSSWRSVADTLRQKVEDAVREHPDYRVVFTGHSLGGALATVAGADLRGNGYDIDVFSYGAPRLGNRAFAEFLTVQTGGTLYRITNTNDIVPRLPPRKFGYSHSSPEYWIKSGTGVPVRRRDIVKIEGIDATGGNNQPNIPDIPAHLWYFGLIGTC

SEQ ID NO: 15002 - protein, 268 aa, Thermomyces lanuginosus
EVSQDLFNQFNLFAQYSAAAYCGKNNRAPAGTPITCTANACPEVEKADATVLYSFEDSGVGDVTGFLALDNTNKLIVLSFRGSRSIENWIGNLNFELEEINDICSGCRGHAGFTSSWRSVADTLRQKVEDAVREHPDYRVVFTGHSLGGALATVAGADLRGNKYDIDVFSYGAPRVGNRAFAEFLTVQTGGTLYRITHTNDIVPRLPPREFGYSHSSPEYWIKSGTLVPVRRRDIVKIEGIDATGGNNQPNIPSITAHLWYFGLIGTC

SEQ ID NO: 15003 - protein, 268 aa, Thermomyces lanuginosus
EKSQDLFNQFNLFAQYSAAAYCGKNNDAPAGTKITCTGNACPEVEKADATILYSFEDSGVGDVTGFLARDNTNKLIVLSFRGSRSIENWIGNLNFDLEEINDICSGCRGHDGFTSSWRSVADTLRQKVEDAVREHPDYRVVFTGHSLGGALATVAGADLRGNGYDIDVFSYGAPRLGNRAFAEFLTVQTGGTLYRITHTNDIVPRLPPRKFGYSHSSPEYWIKPGTGVPVRRRDIVKIEGIDATGGNNQPNIPDIPAHLWYFGLIGTC

SEQ ID NO: 15004 - protein, 268 aa, Thermomyces lanuginosus
EVSQDLFNQFNLFAQYSAAAYCGRNNDAPAGTNITCTGNACPEVERADATFLYSFEDSGVGDVTGFLALDNTNRLIVLSFRGSRSVENWIGNLNFDLREINDICSGCRGHDGFTSSWRSVADTLRQRVEDAVREHPKYRVVFTGHSLGGGLATVAGADLRGNGYDIDVFSYGAPRVGNRAFAEFLTVQTGGTLYRITHTNDIVPRLPPREFGYSHSSPEYWIRSGTLVPVRRRDIVKIEGIDATGGNNQPNIPDIPAHLWYFGLIGTC

SEQ ID NO: 15005 - protein, 268 aa, Thermomyces lanuginosus
EKSQDLFNQFNLFAQYSAAAYCGKNNDAPAGTKITCTGNACPEVEKADATILYSFEDSGVGDVTGFLARDNTNKLIVLSFRGSRSIENWIGNLNFDLEEINDICSGCRGHDGFTSSWRSVADTLRQKVEDAVREHPDYRVVFTGHSLGGALATVAGADLRGNGYDIDVFSYGAPRLGNRAFAEFLTVQTGGTLYRITHTNDIVPRLPPRKFGYSHSSPEYWIKSGTGVPRRRRDIVKIEGIDATGGNNQPNIPDIPAHLWYFGLIGTC

SEQ ID NO: 15006 - protein, 268 aa, Thermomyces lanuginosus
EVSQDLFNQFNLFAQYSAAAYCSKNNNAPAGTNITCTGNICPEVEKADATILYSFRDSGKGDVTGFLALDNTNKLIVLSFRGSRSIENWIGNLNFDLKEINDICSGCRGHDGFTSSWFSVADTLRQKVEDAVREHPDYRVVFTGHSLGGALATVAGADLRGNGYDIDVFSYGAPRVGNRAFAEFLTVQTGGTLYRITHTNDIVPRLPPREFGYSHSSPEYWIKSGTLVPVRRRDIVKIEGIDAEGGNNQPNIPDITAHLWYFGLIGTC

SEQ ID NO: 15007 - protein, 268 aa, Thermomyces lanuginosus
EVSQDLFNQFNLFAQYSAAAYCGKNNRAPAGTNITCTANACPEVEKADATFLYSFEDSGVGDVTGFLALDNTNKLIVLSFRGSRSITNWIADLDFLLQEINDICSGCRGHAGFTSSWRSVADTLRQKVEDAVREHPDYRVVFTGHSLGGALATVAGADLRGNKYDIDVFSYGAPRVGNRAFAEFLTVQTGGTLYRITHTNDIVPRLPPREFGYSHSSPEYWIKSGTLVPVRRRDIVKIEGIDATGGNNQPNIPSITAHLWYFGLIGTC

SEQ ID NO: 15008 - protein, 268 aa, Thermomyces lanuginosus
EKSQDLFNQFNLFAQYSAAAYCGKNNDAPAGTKITCTGNACPEVEKADATILYSFEDSGVGDVTGFLARDNTNKLIVLSFRGSRSIENWIGNLNFDLEEINDICSGCRGHDGFTSSWRSVADTLRQKVEDAVREHPDYRVVFTGHSLGGALATVAGADLRGNGYDIDVFSYGAPRLGNRAFAEFLTVQTGGTLYRITHTNDIVPRLPPRKFGYSHSSPEYWIKFGTGVPVRRRDIVKIEGIDATGGNNQPNIPDIPAHLWYFGLIGTC

SEQ ID NO: 15009 - protein, 268 aa, Thermomyces lanuginosus
EYSQDLFNQFNLFAQYSAAAYCGKNNDAPAGTKITCTGNACPEVEKADATLLYSFEDSGVGDVTGFLARDNTNKLIVLSFRGSRSIENWIGNLNFDLEEINDICSGCRGHDGFTSSWRSVADTLRQKVEDAVREHPDYRVVFTGHSLGGALATVAGADLRGNGYDIDVFSYGAPRLGNRAFAEFLTVQTGGTLYRITHTNDIVPRLPPRKFGYSHSSPEYWIKSGTGVPVRRRDIVKIEGIDATGGNNQPNIPDIPIHLWYFGLIGTC

SEQ ID NO: 15010 - protein, 268 aa, Thermomyces lanuginosus
EKSQDLFNQFNLFAQYSAAAYCGKNNDAPAGTKITCTGNACPEVEKADATVLYSFEDSGVGDVTGFLARDNTNKLIVLSFRGSRSIENWIGNLNFDLEEINDICSGCRGHDGFTSSWRSVADTLRQKVEDAVREHPDYRVVFAGHSLGGALATVAGADLRGNGYDIDVFSYGAPRLGNRAFAEFLTVQTGGTLYRITHTNDIVPRLPPRKFGYSHSSPEYWIKSGTGVPVRRRDIVKIEGIDATGGNNQPNIPDIPAHLWYFGLIGTC

SEQ ID NO: 15011 - protein, 268 aa, Thermomyces lanuginosus
EYSQDLFNQFNLFAQYSAAAYCGKNNDAPAGTKITCTGNACPEVEKADATILYSFEDSGVGDVTGFLARDNTNKLIVLSFRGSRSIENWIGNLNFDLEEINDICSGCRGHDGFTSSWRSVADTLRQKVEDAVREHPDYRVVFTGHSLGGALATVAGADLRGNGYDIDVFSYGAPRLGNRAFAEFLTVQTGGTLYRITLTNDIVPRLPPRKFGYSHSSPEYWIKSGTGVPVRRRDIVKIEGIDATGGNNQPNIPDIPAHLWYFGLIGTC

SEQ ID NO: 15012 - protein, 268 aa, Thermomyces lanuginosus
EYSQDLFNQFNLFAQYSAAAYCGKNNDAPAGTKITCTGNACPEVEKADATLLYSFEDSGVGDVTGFLARDNTNKLIVLSFRGSRSIENWIGNLNFDLEEINDICSGCRGHDGFTSSWRSVADTLRQKVEDAVREHPDYRVVFTGHSLGGALATVAGADLRGNGYDIDVFSYGAPRLGNRAFAEFLTVQTGGTLYRITHTNDIVPRLPPRKFGYSHSSPEYWIKSGTGVPRRRRDIVKIEGIDATGGNNQPNIPDIPAHLWYFGLIGTC

SEQ ID NO: 15013 - protein, 268 aa, Thermomyces lanuginosus
EKSQDLFNQFNLFAQYSAAAYCGKNNDAPAGTKITCTGNACPEVEKADATILYSFEDSGVGDVTGFLARDNTNKLIVLSFRGSRSIENWIGNLNFDLEEINDICSGCRGHDGFTSSWRSVADTLRQKVEDAVREHPDYRVVFAGHSLGGALATVAGADLRGNGYDIDVFSYGAPRLGNRAFAEFLTVQTGGTLYRITHTNDIVPRLPPRKFGYSHSSPEYWIKSGTGVPVRRRDIVKIEGIDATGGNNQPNIPDIPAHLWYFGLIGTC

SEQ ID NO: 15014 - protein, 268 aa, Thermomyces lanuginosus
EYSQDLFNQFNLFAQYSAAAYCGKNNDAPAGTKITCTGNACPEVEKADATVLYSFEDSGVGDVTGFLARDNTNKLIVLSFRGSRSIENWIGNLNFDLEEINDICSGCRGHDGFTSSWRSVADTLRQKVEDAVREHPDYRVVFTGHSLGGALATVAGADLRGNGYDIDVFSYGAPRLGNRAFAEFLTVQTGGTLYRITHTNDIVPRLPPRKFGYSHSSPEYWIKSGTGVPVRRRDIVKIEGIDATGGNNQPNIPDIPVHLWYFGLIGTC

SEQ ID NO: 15015 - protein, 268 aa, Thermomyces lanuginosus
EVSQDLFNQFNLFAQYSAAAYCGKNNDAPAGTNITCTGNACPEVEKADATFLYSFEDAGSGDVTGFLALDNTNKLIVLSFRGSRSVENWIGNLNFDLIKINAICSGCRGHDGFTSSWRSVADTLRQKVEDAVREHPDYRVVFSGHSLGGGLATVAGADLRGNGYDIDVFSYGAPRVGNRAFAEFLTVQTGGTLYRITHTNDIVPRLPPREFGYSHSSPEYWIKSGTGVPVRRRDIVKIEGIDATGGNNQPNIPDAKAHLWYFGLIGTC

SEQ ID NO: 15016 - protein, 268 aa, Thermomyces lanuginosus
EVSQDLFNQFNLFAQYSAAAYCGKNNRAPAGTNITCTANACPEVEKADATFLYSFEDSGVGDVTGFLARDNTNKLIVLSFRGSRSIENWIGNLNFELEEINDICSGCRGHAGFTSSWRSVADTLRQKVEDAVREHPDYRVVFTGHSLGGALATVAGADLRGNKYDIDVFSYGAPRVGNRAFAEFLTVQTGGTLYRITHTNDIVPRLPPRKFGYSHSSPEYWIKSGTLVPVRRRDIVKIEGIDATGGNNQPNIPSITAHLWYFGLIGTC

SEQ ID NO: 15017 - protein, 268 aa, Thermomyces lanuginosus
EYSQDLFNQFNLFAQYSAAAYCGKNNDAPAGTKITCTGNACPEVEKADATILYSFEDSGVGDVTGFLARDNTNKLIVLSFRGSRSIENWIGNLNFDLEEINDICSGCRGHDGFTSSWRSVADTLRQKVEDAVREHPDYRVVFAGHSLGGALATVAGADLRGNGYDIDVFSYGAPRLGNRAFAEFLTVQTGGTLYRITHTNDIVPRLPPRKFGYSHSSPEYWIKSGTGVPVRRRDIVKIEGIDATGGNNQPNIPDIPAHLWYFGLIGTC

SEQ ID NO: 15018 - protein, 268 aa, Thermomyces lanuginosus
EVSQDLFNQFNLFAQYSAAAYCSKNNNAPAGTNITCTGNACPEVEKADATILYSFRDSGVGDVTGFLALDNTNKLIVLSFRGSRSIENWIGNLNFDLIEINDICSGCRGHDGFTSSWFSVADTLRQKVEDAVREHPDYRVVFTGHSLGGALATVAGADLRGNGYDIDVFSYGAPRVGNRAFAEFLTVQTGGTLYRITHTNDIVPRLPPREFGYSHSSPEFWIKSGTLVPVRRRDIVKIEGIDAEGGNNQPNIPDITAHLWYFGLIGTC

SEQ ID NO: 15019 - protein, 268 aa, Thermomyces lanuginosus
EYSQDLFNQFNLFAQYSAAAYCGKNNDAPAGTKITCTGNACPEVEKADATILYSFEDSGVGDVTGFLARDNTNKLIVLSFRGSRSIENWIGNLNFDLEEINDICSGCRGHDGFTSSWRSVADTLRQKVEDAVREHPDYRVVFTGHSLGGALATVAGADLRGNGYDIDVFSYGAPRLGNRAFAEFLTVQTGGTLYRITSTNDIVPRLPPRKFGYSHSSPEYWIKSGTGVPVRRRDIVKIEGIDATGGNNQPNIPDIPAHLWYFGLIGTC

SEQ ID NO: 15020 - protein, 268 aa, Thermomyces lanuginosus
EYSQDLFNQFNLFAQYSAAAYCGKNNDAPAGTKITCTGNACPEVEKADATVLYSFEDSGVGDVTGFLARDNTNKLIVLSFRGSRSIENWIGNLNFDLEEINDICSGCRGHDGFTSSWRSVADTLRQKVEDAVREHPDYRVVFAGHSLGGALATVAGADLRGNGYDIDVFSYGAPRLGNRAFAEFLTVQTGGTLYRITHTNDIVPRLPPRKFGYSHSSPEYWIKSGTGVPVRRRDIVKIEGIDATGGNNQPNIPDIPAHLWYFGLIGTC

SEQ ID NO: 15021 - protein, 268 aa, Thermomyces lanuginosus
EKSQDLFNQFNLFAQYSAAAYCGKNNRAPAGTKITCTANACPEVEKADATILYSFEDSGVGDVTGFLALDNTNKLIVLSFRGSRSIENWIGNLNFELKEINDICSGCRGHAGFTSSWRSVADTLRQKVEDAVREHPDYRVVFTGHSLGGALATVAGADLRGNKYDIDVFSYGAPRVGNRAFAEFLTVQTGGTLYRITHTNDIVPRLPPREFGYSHSSPEYWIKSGTLVPVRRRDIVKIEGIDATGGNNQPNIPSITAHLWYFGLIGTC

SEQ ID NO: 15022 - protein, 268 aa, Thermomyces lanuginosus
EKSQDLFNQFNLFAQYSAAAYCGKNNDAPAGTKITCTGNACPEVEKADATILYSFEDSGVGDVTGFLARDNTNKLIVLSFRGSRSIENWIGNLNFDLEEINDICSGCRGHDGFTSSWRSVADTLRQKVEDAVREHPDYRVVFTGHSLGGALATVAGADLRGNGYDIDVFSYGAPRLGNRAFAEFLTVQTGGTLYRITHTNDIVPRLPPRKFGYSHSSPEYWIKSGTGVPVRRRDIVKIEGIDATGGNNQPNIPDIPIHLWYFGLIGTC

SEQ ID NO: 15023 - protein, 268 aa, Thermomyces lanuginosus
EYSQDLFNQFNLFAQYSAAAYCGKNNDAPAGTKITCTGNACPEVEKADATILYSFEDSGVGDVTGFLARDNTNKLIVLSFRGSRSIENWIGNLNFDLEEINDICSGCRGHDGFTSSWRSVADTLRQKVEDAVREHPDYRVVFTGHSLGGALATVAGADLRGNGYDIDVFSYGAPRLGNRAFAEFLTVQTGGTLYRITHTNDIVPRLPPRKFGYSHSSPEYWIKSGTGVPVRRRDIVKIEGIDATGGNNQPNIPDIPIHLWYFGLIGTC

SEQ ID NO: 15024 - protein, 268 aa, Thermomyces lanuginosus
EVSQDLFNQFNLFAQYSAAAYCGKNNRAPAGTNITCTANACPEVEKADATVLYSFEDSGVGDVTGFLALDNTNKLIVLSFRGSRSIKNWIGNLNFELEEINDICSGCRGHAGFTSSWRSVADTLRQKVEDAVREHPDYRVVFTGHSLGGALATVAGADLRGNKYDIDVFSYGAPRVGNRAFAEFLTVQTGGTLYRITHTNDIVPRLPPREFGYSHSSPEYWIKSGTLVPVRRRDIVKIEGIDATGGNNQPNIPSITAHLWYFGLIGTC

SEQ ID NO: 15025 - protein, 268 aa, Thermomyces lanuginosus
EYSQDLFNQFNLFAQYSAAAYCGKNNDAPAGTKITCTGNACPEVEKADATLLYSFEDSGVGDVTGFLARDNTNKLIVLSFRGSRSIENWIGNLNFDLEEINDICSGCRGHDGFTSSWRSVADTLRQKVEDAVREHPDYRVVFAGHSLGGALATVAGADLRGNGYDIDVFSYGAPRLGNRAFAEFLTVQTGGTLYRITHTNDIVPRLPPRKFGYSHSSPEYWIKSGTGVPVRRRDIVKIEGIDATGGNNQPNIPDIPAHLWYFGLIGTC

SEQ ID NO: 15026 - protein, 268 aa, Thermomyces lanuginosus
EYSQDLFNQFNLFAQYSAAAYCGKNNDAPAGTKITCTGNACPEVEKADATILYSFEDSGVGDVTGFLARDNTNKLIVLSFRGSRSIENWIGNLNFDLEEINDICSGCRGHDGFTSSWRSVADTLRQKVEDAVREHPDYRVVFTGHSLGGALATVAGADLRGNGYDIDVFSYGAPRLGNRAFAEFLTVQTGGTLYRITNTNDIVPRLPPRKFGYSHSSPEYWIKSGTGVPVRRRDIVKIEGIDATGGNNQPNIPDIPAHLWYFGLIGTC

SEQ ID NO: 15027 - protein, 268 aa, Thermomyces lanuginosus
EVSQDLFNQFNLFAQYSAAAYCGKNNRAPAGTNITCTANACPEVEKADATFLYSFEDSGVGDVTGFLALDNTNKLIVLSFRGTRSPTNWIADLNFTLKEINDICSGCRGHAGFTSSWRSVADTLRQKVEDAVREHPDYRVVFTGHSLGGALATVAGADLRGNKYDIDVFSYGAPRVGNRAFAEFLTVQTGGTLYRITHTNDIVPRLPPREFGYSHSSPEYWIKSGTLVPVRRRDIVKIEGIDATGGNNQPNIPSITAHLWYFGLIGTC

SEQ ID NO: 15028 - protein, 268 aa, Thermomyces lanuginosus
EYSQDLFNQFNLFAQYSAAAYCGKNNDAPAGTKITCTGNACPEVEKADATVLYSFEDSGVGDVTGFLARDNTNKLIVLSFRGSRSIENWIGNLNFDLEEINDICSGCRGHDGFTSSWRSVADTLRQKVEDAVREHPDYRVVFTGHSLGGALATVAGADLRGNGYDIDVFSYGAPRLGNRAFAEFLTVQTGGTLYRITHTNDIVPRLPPRKFGYSHSSPEYWIKPGTGVPVRRRDIVKIEGIDATGGNNQPNIPDIPAHLWYFGLIGTC

SEQ ID NO: 15029 - protein, 268 aa, Thermomyces lanuginosus
EVSQDLFNQFNLFAQYSAAAYCGKNNRAPAGTKITCTANACPEVEKADATFLYSFEDSGVGDVTGFLARDNTNKLIVLSFRGSRSIENWIGNLNFELEEINDICSGCRGHAGFTSSWRSVADTLRQKVEDAVREHPDYRVVFTGHSLGGALATVAGADLRGNPYDIDVFSYGAPRVGNRAFAEFLTVQTGGTLYRITHTNDIVPRLPPREFGYSHSSPEYWIKSGTLVPVRRRDIVKIEGIDATGGNNQPNIPSITAHLWYFGLIGTC

SEQ ID NO: 15030 - protein, 268 aa, Thermomyces lanuginosus
EVSHDLFNQFNLFAQYSAAAYCGKNNRAPAGTQITCTGNACPEVEKADATFLYSFEDSGVGDVTGFLALDNTNKLIVLSFRGSRSIENWINNLRFDLKEINDICSGCRGHAGFTSSWRSVADTLRQKVEDAVREHPDYRVVFTGHSLGGALATLAGADLRGNGYDIDVFSYGAPRVGNRAFAEFLTVQTGGTLYRITHTNDIVPRLPPREFGYSHPSPEYWIKSGTGVPVRRRDIVKIEGIDATGGNNQPNIPDITAHLWYFGLIGTC

SEQ ID NO: 15031 - protein, 268 aa, Thermomyces lanuginosus
EVSQDLFNQFNLFAQYSAAAYCGKNNRAPAGTNITCTANACPEVEKADATFLYSFEDSGVGDVTGFLALDNTNKLIVLSFRGSRSIKNWIADLDFLLQEINDICSGCRGHAGFTSSWRSVADTLRQKVEDAVREHPDYRVVFTGHSLGGALATVAGADLRGNKYDIDVFSYGAPRVGNRAFAEFLTVQTGGTLYRITHTNDIVPRLPPREFGYSHSSPEYWIKSGTLVPVRRRDIVKIEGIDATGGNNQPNIPSITAHLWYFGLIGTC

SEQ ID NO: 15032 - protein, 268 aa, Thermomyces lanuginosus
EYSQDLFNQFNLFAQYSAAAYCGKNNDAPAGTKITCTGNACPEVEKADATVLYSFEDSGVGDVTGFLARDNTNKLIVLSFRGSRSIENWIGNLNFDLEEINDICSGCRGHDGFTSSWRSVADTLRQKVEDAVREHPDYRVVFTGHSLGGGLATVAGADLRGNGYDIDVFSYGAPRLGNRAFAEFLTVQTGGTLYRITHTNDIVPRLPPRKFGYSHSSPEYWIKSGTGVPVRRRDIVKIEGIDATGGNNQPNIPDIPAHLWYFGLIGTC

SEQ ID NO: 15033 - protein, 268 aa, Thermomyces lanuginosus
EVSQDLFNQFNLFAQYSAAAYCGKNNRAPAGTNITCTANACPEVEKADATVLYSFKDSGVGDVTGFLALDNTNKLIVLSFRGSRSIENWIGNLNFELKEINDICSGCRGHAGFTSSWRSVADTLRQKVEDAVREHPDYRVVFTGHSLGGALATVAGADLRGNKYDIDVFSYGAPRVGNRAFAEFLTVQTGGTLYRITHTNDIVPRLPPRKFGYSHSSPEYWIKSGTLVPVRRRDIVKIEGIDATGGNNQPNIPSITAHLWYFGLIGTC

SEQ ID NO: 15034 - protein, 268 aa, Thermomyces lanuginosus
EVSQDLFNQFNLFAQYSAAAYCGKNNRAPAGTNITCTANACPEVEKADATFLYTFEDSGVGDVTGFLALDNTNKLIVLSFRGSRSIENWIGNLNFELKEINDICSGCRGHAGFTSSWRSVADTLRQKVEDAVREHPDYRVVFTGHSLGGALATVAGADLRGNPYDIDVFSYGAPRLGNRAFAEFLTVQTGGTLYRITHTNDIVPRLPPRRFGYSHSSPEYWIKSGTLVPVRRRDIVKIEGIDATGGNNQPNIPSITAHLWYFGLIGTC

SEQ ID NO: 15035 - protein, 268 aa, Thermomyces lanuginosus
EVSRDLFNQFNLFAQYSAAAYCGKNNDAPAGTKITCTGNACPEVEKADATILYSFEDSGVGDVTGFLALDNTNKLIVLSFRGSRSIENWIGNLNFDLKEINDICSGCRGHDGFTSSWRSVADTLRQKVEDAVREHPDYRVVFTGHSLGGALATVAGADLRGNNYSIDVFSYGAPRVGNRAFAEFLTVQTGGTLYRITNTNDCVPRLPPRQFGYSHSSPEYWIKSGTLPPVRRNDIVKIEGIDATGGNNQPNICDIPAHLWYFGLIGTC

SEQ ID NO: 15036 - protein, 268 aa, Thermomyces lanuginosus
EKSQDLFNQFNLFAQYSAAAYCGKNNDAPAGTKITCTGNACPEVEKADATVLYSFEDSGVGDVTGFLARDNTNKLIVLSFRGSRSIENWIGNLNFDLEEINDICSGCRGHDGFTSSWRSVADTLRQKVEDAVREHPDYRVVFTGHSLGGALATVAGADLRGNGYDIDVFSYGAPRLGNRAFAEFLTVQTGGTLYRITHTNDIVPRLPPRKFGYSHSSPEYWIKSGTGVPRRRRDIVKIEGIDATGGNNQPNIPDIPAHLWYFGLIGTC

SEQ ID NO: 15037 - protein, 268 aa, Thermomyces lanuginosus
EYSQDLFNQFNLFAQYSAAAYCGKNNDAPAGTKITCTGNACPEVEKADATVLYSFEDSGVGDVTGFLARDNTNKLIVLSFRGSRSIENWIGNLNFDLEEINDICSGCRGHDGFTSSWRSVADTLRQKVEDAVREHPDYRVVFTGHSLGGALATVAGADLRGNGYDIDVFSYGAPRLGNRAFAEFLTVQTGGTLYRITHTNDIVPRLPPRKFGYSHSSPEYWIKSGTGVPVRRRDIVKIEGIDATGGNNQPNIPDIPIHLWYFGLIGTC

SEQ ID NO: 15038 - protein, 268 aa, Thermomyces lanuginosus
EVSQDLFNQFNLFAQYSAAAYCGKNNRAPAGTNITCTANACPEVEKADATFLYSFEDSGVGDVTGFLALDNTNKLIVLSFRGTRSPENWIADLNFTLQEINDICSGCRGHAGFTSSWRSVADTLRQKVEDAVREHPDYRVVFTGHSLGGALATVAGADLRGNKYDIDVFSYGAPRVGNRAFAEFLTVQTGGTLYRITHTNDIVPRLPPREFGYSHSSPEYWIKSGTLVPVRRRDIVKIEGIDATGGNNQPNIPSITAHLWYFGLIGTC

SEQ ID NO: 15039 - protein, 268 aa, Thermomyces lanuginosus
EKSQDLFNQFNLFAQYSAAAYCGKNNDAPAGTKITCTGNACPEVEKADATILYSFEDSGVGDVTGFLARDNTNKLIVLSFRGSRSIENWIGNLNFDLEEINDICSGCRGHDGFTSSWRSVADTLRQKVEDAVREHPDYRVVFTGHSLGGALATVAGADLRGNGYDIDVFSYGAPRLGNRAFAEFLTVQTGGTLYRITHTNDIVPRLPPRKFGYSHSSPEYWIKSGTGVPVRRRDIVKIEGIDATGGNNQPNIPDGPAHLWYFGLIGTC

SEQ ID NO: 15040 - protein, 268 aa, Thermomyces lanuginosus
EKSQDLFNQFNLFAQYSAAAYCGKNNDAPAGTKITCTGNACPEVEKADATVLYSFEDSGVGDVTGFLARDNTNKLIVLSFRGSRSIENWIGNLNFDLEEINDICSGCRGHDGFTSSWRSVADTLRQKVEDAVREHPDYRVVFTGHSLGGGLATVAGADLRGNGYDIDVFSYGAPRLGNRAFAEFLTVQTGGTLYRITHTNDIVPRLPPRKFGYSHSSPEYWIKSGTGVPVRRRDIVKIEGIDATGGNNQPNIPDIPAHLWYFGLIGTC

SEQ ID NO: 15041 - protein, 268 aa, Thermomyces lanuginosus
EVSQDLFNQFNLFAQYSAAAYCGKNNDAPAGTKITCTGNACPEVEKADATLLYSFEDSGVGDVTGFLALDNTNKLIVLSFRGSRSIENWIGNLNFDLEEIDDICSGCRGHDGFTSSWRSVADTLRQKVEDAVREHPDYRVVFTGHSLGGALATVAGADLRNNGYDIDVFSYGAPRVGNRAFAEFLTVQTGGTLYRITSTNDIVPRLPPRKFGYSHSSPEFWIKSGTLVPVRRRDIVKIEGIDATGGNNQPNIPDIPVHLWYFGLIGTC

SEQ ID NO: 15042 - protein, 268 aa, Thermomyces lanuginosus
EYSQDLFNQFNLFAQYSAAAYCGKNNDAPAGTKITCTGNACPEVEKADATVLYSFEDSGVGDVTGFLARDNTNKLIVLSFRGSRSIENWIGNLNFDLEEINDICSGCRGHDGFTSSWRSVADTLRQKVEDAVREHPDYRVVFTGHSLGGALATVAGADLRGNGYDIDVFSYGAPRLGNRAFAEFLTVQTGGTLYRITHTNDIVPRLPPRKFGYSHSSPEYWIKSGTGPPVRRRDIVKIEGIDATGGNNQPNIPDIPAHLWYFGLIGTC

SEQ ID NO: 15043 - protein, 268 aa, Thermomyces lanuginosus
EVSRDLFNQFNLFAQYSAAAYCGKNNRAPAGTQITCTGNACPEVEKADATFLYSFEDSGVGDVTGFLALDNTNKLIVLSFRGSRSIENWITNLSFDLKEINDICSGCRGHAGFTSSWRSVADTLRQKVEDAVREHPDYRVVFTGHSLGGALATVAGADLRGNGYDIDVFSYGAPRVGNRAFAEFLTVQTGGTLYRITHTNDIVPRLPPRDFGYSHPSPEYWIKSGTGVPVRRRDIVKIEGIDATGGNNQPNIPDITAHLWYFGLIGTC

SEQ ID NO: 15044 - protein, 268 aa, Thermomyces lanuginosus
EKSQDLFNQFNLFAQYSAAAYCGKNNRAPAGTKITCTANACPEVEKADATLLYSFEDSGVGDVTGFLALDNTNKLIVLSFRGSRSIENWIGNLNFELKEINDICSGCRGHAGFTSSWRSVADTLRQKVEDAVREHPDYRVVFTGHSLGGALATVAGADLRGNKYDIDVFSYGAPRVGNRAFAEFLTVQTGGTLYRITHTNDIVPRLPPREFGYSHSSPEYWIKSGTLVPVRRRDIVKIEGIDATGGNNQPNIPSITAHLWYFGLIGTC

SEQ ID NO: 15045 - protein, 268 aa, Thermomyces lanuginosus
EYSQDLFNQFNLFAQYSAAAYCGKNNDAPAGTKITCTGNACPEVEKADATILYSFEDSGVGDVTGFLARDNTNKLIVLSFRGSRSIENWIGNLNFDLEEINDICSGCRGHDGFTSSWRSVADTLRQKVEDAVREHPDYRVVFTGHSLGGALATVAGADLRGNGYDIDVFSYGAPRLGNRAFAEFLTVQTGGTLYRITHTNDIVPRLPPRKFGYSHSSPEYWIKSGTGVPVRRRDIVKIEGIDATGGNNQPNIPDGPAHLWYFGLIGTC

SEQ ID NO: 15046 - protein, 268 aa, Thermomyces lanuginosus
EVSQDLFNQFNLFAQYSAAAYCGKNNRAPAGTQITCTGNACPEVEKADATFLYSFEDSGVGDVTGFLALDNTNKLTVLSFRGSRSIENWINNLRFDLKEINDICSGCMGHAGFTSSWRSVADTLRQKVEDAVREHPDYRVVFTGHSLGGALATVAGADLRGNGYDIDVFSYGAPRVGNRAFAEFLTVQTGGTLYRITHTNDIVPRLPPREFGYSHPSPEYWIKSGTGVPVRRRDIVKIEGIDATGGNNQPNIPDITAHLWYFGLIGTC

SEQ ID NO: 15047 - protein, 268 aa, Thermomyces lanuginosus
EKSQDLFNQFNLFAQYSAAAYCGKNNDAPAGTKITCTGNACPEVEKADATVLYSFEDSGVGDVTGFLARDNTNKLIVLSFRGSRSIENWIGNLNFDLEEINDICSGCRGHDGFTSSWRSVADTLRQKVEDAVREHPDYRVVFTGHSLGGALATVAGADLRGNGYDIDVFSYGAPRLGNRAFAEFLTVQTGGTLYRITLTNDIVPRLPPRKFGYSHSSPEYWIKSGTGVPVRRRDIVKIEGIDATGGNNQPNIPDIPAHLWYFGLIGTC

SEQ ID NO: 15048 - protein, 268 aa, Thermomyces lanuginosus
EVSQDLFNQFNLFAQYSAAAYCGKNNRAPAGTNITCTANACPEVEKADATFLYSFEDSGVGDVTGFLALDNTNKLIVLSFRGTRSPENWILDLNFLLKEINDICSGCRGHAGFTSSWRSVADTLRQKVEDAVREHPDYRVVFTGHSLGGALATVAGADLRGNKYDIDVFSYGAPRVGNRAFAEFLTVQTGGTLYRITHTNDIVPRLPPREFGYSHSSPEYWIKSGTLVPVRRRDIVKIEGIDATGGNNQPNIPSITAHLWYFGLIGTC

SEQ ID NO: 15049 - protein, 268 aa, Thermomyces lanuginosus
EYSQDLFNQFNLFAQYSAAAYCGKNNDAPAGTKITCTGNACPEVEKADATLLYSFEDSGVGDVTGFLARDNTNKLIVLSFRGSRSIENWIGNLNFDLEEINDICSGCRGHDGFTSSWRSVADTLRQKVEDAVREHPDYRVVFTGHSLGGALATVAGADLRGNGYDIDVFSYGAPRLGNRAFAEFLTVQTGGTLYRITHTNDIVPRLPPRKFGYSHSSPEYWIKSGTGVPVRRRDIVKIEGIDATGGNNQPNIPDGPAHLWYFGLIGTC

SEQ ID NO: 15050 - protein, 268 aa, Thermomyces lanuginosus
EKSQDLFNQFNLFAQYSAAAYCGKNNDAPAGTKITCTGNACPEVEKADATILYSFEDSGVGDVTGFLARDNTNKLIVLSFRGSRSIENWIGNLNFDLEEINDICSGCRGHDGFTSSWRSVADTLRQKVEDAVREHPDYRVVFTGHSLGGGLATVAGADLRGNGYDIDVFSYGAPRLGNRAFAEFLTVQTGGTLYRITHTNDIVPRLPPRKFGYSHSSPEYWIKSGTGVPVRRRDIVKIEGIDATGGNNQPNIPDIPAHLWYFGLIGTC

SEQ ID NO: 15051 - protein, 268 aa, Thermomyces lanuginosus
EVSQDLFNQFNLFAQYSAAAYCGKNNRAPAGTNITCTANACPEVEKADATFLYSFEDSGVGDVTGFLALDNTNKLIVLSFRGTRSIRNWIADLNYTLKEINDICSGCRGHAGFTSSWRSVADTLRQKVEDAVREHPDYRVVFTGHSLGGALATVAGADLRGNKYDIDVFSYGAPRVGNRAFAEFLTVQTGGTLYRITHTNDIVPRLPPREFGYSHSSPEYWIKSGTLVPVRRRDIVKIEGIDATGGNNQPNIPSITAHLWYFGLIGTC

SEQ ID NO: 15052 - protein, 268 aa, Thermomyces lanuginosus
EVSQDLFNQFNLFAQYSAAAYCGKNNRAPAGTNITCTANACPEVEKADATFLYSFEDSGVGDVTGFLALDNTNKLIVLSFRGTRSPENWIADLNFLLQEINDICSGCRGHAGFTSSWRSVADTLRQKVEDAVREHPDYRVVFTGHSLGGALATVAGADLRGNKYDIDVFSYGAPRVGNRAFAEFLTVQTGGTLYRITHTNDIVPRLPPREFGYSHSSPEYWIKSGTLVPVRRRDIVKIEGIDATGGNNQPNIPSITAHLWYFGLIGTC

SEQ ID NO: 15053 - protein, 268 aa, Thermomyces lanuginosus
EKSQDLFNQFNLFAQYSAAAYCGKNNDAPAGTKITCTGNACPEVEKADATVLYSFEDSGVGDVTGFLARDNTNKLIVLSFRGSRSIENWIGNLNFDLEEINDICSGCRGHDGFTSSWRSVADTLRQKVEDAVREHPDYRVVFTGHSLGGALATVAGADLRGNGYDIDVFSYGAPRLGNRAFAEFLTVQTGGTLYRITHTNDIVPRLPPRKFGYSHSSPEYWIKPGTGVPVRRRDIVKIEGIDATGGNNQPNIPDIPAHLWYFGLIGTC

SEQ ID NO: 15054 - protein, 268 aa, Thermomyces lanuginosus
EYSQDLFNQFNLFAQYSAAAYCGKNNDAPAGTKITCTGNACPEVEKADATILYSFEDSGVGDVTGFLARDNTNKLIVLSFRGSRSIENWIGNLNFDLEEINDICSGCRGHDGFTSSWRSVADTLRQKVEDAVREHPDYRVVFTGHSLGGALATVAGADLRGNGYDIDVFSYGAPRLGNRAFAEFLTVQTGGTLYRITHTNDIVPRLPPRKFGYSHSSPEYWIKSGTGVPVRRRDIVKIEGIDATGGNNQPNIPDIPVHLWYFGLIGTC

SEQ ID NO: 15055 - protein, 268 aa, Thermomyces lanuginosus
EVSQDLFNQFNLFAQYSAAAYCGKNNRAPAGTQITCTGNACPEVEKADATFLYSFEDSGVGDVTGFLALDNTNKLIVLSFRGSRSIENWINNLRFDLIEINDICSGCRGHAGFTSSWRSVADTLRQKVEDAVREHPDYRVVFTGHSLGGALATVAGADLRGSGYDIDVFSYGAPRVGNRAFAEFLTVQTGGTLYRITHTNDIVPRLPPREFGYSHPSPEYWIKSGTGVPVRRRDIVKIEGIDATGGNNQPNIPDITAHLWYFGLIGTC

SEQ ID NO: 15056 - protein, 268 aa, Thermomyces lanuginosus
EVSQDLFNQFNLFAQYSAAAYCGKNNDAPAGTKITCTGNACPEVEKADATILYSFEDSGVGDVTGFLALDNTNKLIVLSFRGSRSIENWIGNLNFDLEEIDDICSGCRGHDGFTSSWRSVADTLRQKVEDAVREHPDYRVVFTGHSLGGALATVAGADLRNNGYDIDVFSYGAPRVGNRAFAEFLTVQTGGTLYRITSTNDIVPRLPPRKFGYSHSSPEFWIKSGTLVPVRRRDIVKIEGIDATGGNNQPNIPDIPVHLWYFGLIGTC

SEQ ID NO: 15057 - protein, 268 aa, Thermomyces lanuginosus
EVSQDLFNQFNLFAQYSAAAYCGKNNRAPAGTQITCTGNACPEVEKADATFLYSFQNSGVGDVTGFLALDNTNKLIVLSFRGSRSIENWINNLRFDLKEINDICSGCRGHAGFTSSWRSVADTLRQKVEDAVREHPDYRVVFTGHSLGGALATVAGADLRGNGYDIDVFSYGAPRVGNRAFAEFLTVQTGGTLYRITHTNDIVPRLPPREFGYSHPSPEYWIKSGTGVPVRRRDIVKIEGIDATGGNNQPNIPDITAHLWYFGLIGTC

SEQ ID NO: 15058 - protein, 268 aa, Thermomyces lanuginosus
EYSQDLFNQFNLFAQYSAAAYCGKNNDAPAGTKITCTGNACPEVEKADATILYSFEDSGVGDVTGFLARDNTNKLIVLSFRGSRSIENWIGNLNFDLEEINDICSGCRGHDGFTSSWRSVADTLRQKVEDAVREHPDYRVVFTGHSLGGALATVAGADLRGNGYDIDVFSYGAPRLGNRAFAEFLTVQTGGTLYRITHTNDIVPRLPPRKFGYSHSSPEYWIKSGTGPPVRRRDIVKIEGIDATGGNNQPNIPDIPAHLWYFGLIGTC

SEQ ID NO: 15059 - protein, 268 aa, Thermomyces lanuginosus
EVSQDLFNQFNLFAQYSAAAYCGKNNDAPAGTNITCTGNACPEVEKADATFLYSFEDSGVGDVTGFLALDNTNKLIVLSFRGTGSDTLWQIDTNYDLKEINDICSGCRGHDGYTSSWRSVADTLRQKVEDAVREHPDYRVVFTGHSLGGALATVAGADLRGNGYDIDVFSYGAPRVGNRAFAEFLTVQTGGTLYRITHTNDIVPRLPPREEGYSHSSPEYWIKSGTLVPVTRNDIVKIEGIDATGGNNQPNIPDIPAHLWYFGLIGTC

SEQ ID NO: 15060 - protein, 268 aa, Thermomyces lanuginosus
EVSQDLFNQFNLFAQYSKAAYCQKNNSAPAGTNITCTGNACPEVFKADVTFLYSFEDMGVGDVTGFLALDNTSKQIVLSFRGSRSIENWIGNLNFDLKEINDICSGCKGHDGFTSSWRSVADTLRQKVEDAVREHPDYRVVFTGHSLGGALATVAGADLRGNGYDIDVFSYGAPRVGNRAFAEFLTTQDGGTLYRITHTNDIVPRLPPREFGYSHSSPEYWIKSGTLVPVTRNDIVKIEGIDATGGNNQPNIPDIPAHLWYFGLIGTC

SEQ ID NO: 15061 - protein, 268 aa, Thermomyces lanuginosus
EKSQDLFNQFNLFAQYSAAAYCGKNNDAPAGTKITCTGNACPEVEKADATVLYSFEDSGVGDVTGFLARDNTNKLIVLSFRGSRSIENWIGNLNFDLEEINDICSGCRGHDGFTSSWRSVADTLRQKVEDAVREHPDYRVVFTGHSLGGALATVAGADLRGNGYDIDVFSYGAPRLGNRAFAEFLTVQTGGTLYRITSTNDIVPRLPPRKFGYSHSSPEYWIKSGTGVPVRRRDIVKIEGIDATGGNNQPNIPDIPAHLWYFGLIGTC

SEQ ID NO: 15062 - protein, 268 aa, Thermomyces lanuginosus
EYSQDLFNQFNLFAQYSAAAYCGKNNDAPAGTKITCTGNACPEVEKADATILYSFEDSGVGDVTGFLARDNTNKLIVLSFRGSRSIENWIGNLNFDLEEINDICSGCRGHDGFTSSWRSVADTLRQKVEDAVREHPDYRVVFTGHSLGGALATVAGADLRGNGYDIDVFSYGAPRLGNRAFAEFLTVQTGGTLYRITITNDIVPRLPPRKFGYSHSSPEYWIKSGTGVPVRRRDIVKIEGIDATGGNNQPNIPDIPAHLWYFGLIGTC

SEQ ID NO: 15063 - protein, 268 aa, Thermomyces lanuginosus
EKSQDLFNQFNLFAQYSAAAYCGKNNRAPAGTKITCTANACPEVEKADATFLYSFEDSGVGDVTGFLALDNTNKLIVLSFRGSRSIENWIGNLNFELKEINDICSGCRGHAGFTSSWRSVADTLRQKVEDAVREHPDYRVVFTGHSLGGALATVAGADLRGNKYDIDVFSYGAPRVGNRAFAEFLTVQTGGTLYRITHTNDIVPRLPPRKFGYSHSSPEYWIKSGTLVPVRRRDIVKIEGIDATGGNNQPNIPSITAHLWYFGLIGTC

SEQ ID NO: 15064 - protein, 268 aa, Thermomyces lanuginosus
EYSQDLFNQFNLFAQYSAAAYCGKNNDAPAGTKITCTGNACPEVEKADATLLYSFEDSGVGDVTGFLARDNTNKLIVLSFRGSRSIENWIGNLNFDLEEINDICSGCRGHDGFTSSWRSVADTLRQKVEDAVREHPDYRVVFTGHSLGGALATVAGADLRGNGYDIDVFSYGAPRLGNRAFAEFLTVQTGGTLYRITHTNDIVPRLPPRKFGYSHSSPEYWIKSGTGVPVRRRDIVKIEGIDATGGNNQPNIPDIPVHLWYFGLIGTC

SEQ ID NO: 15065 - protein, 268 aa, Thermomyces lanuginosus
EYSQDLFNQFNLFAQYSAAAYCGKNNDAPAGTKITCTGNACPEVEKADATLLYSFEDSGVGDVTGFLARDNTNKLIVLSFRGSRSIENWIGNLNFDLEEINDICSGCRGHDGFTSSWRSVADTLRQKVEDAVREHPDYRVVFTGHSLGGALATVAGADLRGNGYDIDVFSYGAPRLGNRAFAEFLTVQTGGTLYRITHTNDIVPRLPPRKFGYSHSSPEYWIKSGTGPPVRRRDIVKIEGIDATGGNNQPNIPDIPAHLWYFGLIGTC

SEQ ID NO: 15066 - protein, 268 aa, Thermomyces lanuginosus
EYSQDLFNQFNLFAQYSAAAYCGKNNDAPAGTKITCTGNACPEVEKADATVLYSFEDSGVGDVTGFLARDNTNKLIVLSFRGSRSIENWIGNLNFDLEEINDICSGCRGHDGFTSSWRSVADTLRQKVEDAVREHPDYRVVFTGHSLGGALATVAGADLRGNGYDIDVFSYGAPRLGNRAFAEFLTVQTGGTLYRITHTNDIVPRLPPRKFGYSHSSPEYWIKSGTGVPVRRRDIVKIEGIDATGGNNQPNIPDGPAHLWYFGLIGTC

SEQ ID NO: 15067 - protein, 268 aa, Thermomyces lanuginosus
EVSQDLFNQFNLFAQYSAAAYCGKNNDAPAGTKITCTGNACPEVEKADATILYSFEDSGVGDVTGFLALDNTNKLIVLSFRGSRSIENWIGNLNFDLKEINDICSGCRGHDGFTSSWRSVADTLRQKVEDAVREHPDYRVVFTGHSLGGALATVAGADLRGNNYSIDVFSYGAPRVGNRAFAEFLTVQTGGTLYRITNTNDCVPRLPPRQFGYSHSSPEYWIKSGTLPPVRRRDIVKIEGIDATGGNNQPNICDIPAHLWYFGLIGTC

SEQ ID NO: 15068 - protein, 268 aa, Thermomyces lanuginosus
EKSQDLFNQFNLFAQYSAAAYCGKNNDAPAGTKITCTGNACPEVEKADATILYSFEDSGVGDVTGFLARDNTNKLIVLSFRGSRSIENWIGNLNFDLEEINDICSGCRGHDGFTSSWRSVADTLRQKVEDAVREHPDYRVVFTGHSLGGALATVAGADLRGNGYDIDVFSYGAPRLGNRAFAEFLTVQTGGTLYRITLTNDIVPRLPPRKFGYSHSSPEYWIKSGTGVPVRRRDIVKIEGIDATGGNNQPNIPDIPAHLWYFGLIGTC

SEQ ID NO: 15069 - protein, 268 aa, Thermomyces lanuginosus
EKSQDLFNQFNLFAQYSAAAYCGKNNDAPAGTKITCTGNACPEVEKADATVLYSFEDSGVGDVTGFLARDNTNKLIVLSFRGSRSIENWIGNLNFDLEEINDICSGCRGHDGFTSSWRSVADTLRQKVEDAVREHPDYRVVFTGHSLGGALATVAGADLRGNGYDIDVFSYGAPRLGNRAFAEFLTVQTGGTLYRITNTNDIVPRLPPRKFGYSHSSPEYWIKSGTGVPVRRRDIVKIEGIDATGGNNQPNIPDIPAHLWYFGLIGTC

SEQ ID NO: 15070 - protein, 268 aa, Thermomyces lanuginosus
EVSQDLFNQFNLFAQYSKAAYCQKNNSAEAGTNITCTGNACPEVEKADATFLYSFEDMGVGDVTGFLALDNTNKQIILSFRGSRSIENWIGNLNFDLKEINDICSGCKGHDGFTSSWRSVADTLRQKVEDAVREFPDYRVVFTGHSLGGALATVAWADLRGNGYDIDVFSYGAPRVGNRAFAEFLTTQTGGTLYRITHTNDIVPRLPPREFGYSHSSPEYWIKSGTLVPVTRNDIVKIEGIDATGGNNQPNIPDIPAHLWYFGLIGTC

SEQ ID NO: 15071 - protein, 268 aa, Thermomyces lanuginosus
EKSQDLFNQFNLFAQYSAAAYCGKNNDAPAGTKITCTGNACPEVEKADATILYSFEDSGVGDVTGFLARDNTNKLIVLSFRGSRSIENWIGNLNFDLEEINDICSGCRGHDGFTSSWRSVADTLRQKVEDAVREHPDYRVVFTGHSLGGALATVAGADLRGNGYDIDVFSYGAPRLGNRAFAEFLTVQTGGTLYRITHTNDIVPRLPPRKFGYSHSSPEYWIKSGTGVPVRRRDIVKIEGIDATGGNNQPNIPDIPVHLWYFGLIGTC

SEQ ID NO: 15072 - protein, 268 aa, Thermomyces lanuginosus
EKSQDLFNQFNLFAQYSAAAYCGKNNDAPAGTKITCTGNACPEVEKADATILYSFEDSGVGDVTGFLARDNTNKLIVLSFRGSRSIENWIGNLNFDLEEINDICSGCRGHDGFTSSWRSVADTLRQKVEDAVREHPDYRVVFTGHSLGGALATVAGADLRGNGYDIDVFSYGAPRLGNRAFAEFLTVQTGGTLYRITYTNDIVPRLPPRKFGYSHSSPEYWIKSGTGVPVRRRDIVKIEGIDATGGNNQPNIPDIPAHLWYFGLIGTC

SEQ ID NO: 15073 - protein, 268 aa, Thermomyces lanuginosus
EKSQDLFNQFNLFAQYSAAAYCGKNNDAPAGTKITCTGNACPEVEKADATILYSFEDSGVGDVTGFLARDNTNKLIVLSFRGSRSIENWIGNLNFDLEEINDICSGCRGHDGFTSSWRSVADTLRQKVEDAVREHPDYRVVFTGHSLGGALATVAGADLRGNGYDIDVFSYGAPRLGNRAFAEFLTVQTGGTLYRITSTNDIVPRLPPRKFGYSHSSPEYWIKSGTGVPVRRRDIVKIEGIDATGGNNQPNIPDIPAHLWYFGLIGTC

SEQ ID NO: 15074 - protein, 268 aa, Thermomyces lanuginosus
EYSQDLFNQFNLFAQYSAAAYCGKNNDAPAGTKITCTGNACPEVEKADATLLYSFEDSGVGDVTGFLARDNTNKLIVLSFRGSRSIENWIGNLNFDLEEINDICSGCRGHDGFTSSWRSVADTLRQKVEDAVREHPDYRVVFTGHSLGGALATVAGADLRGNGYDIDVFSYGAPRLGNRAFAEFLTVQTGGTLYRITLTNDIVPRLPPRKFGYSHSSPEYWIKSGTGVPVRRRDIVKIEGIDATGGNNQPNIPDIPAHLWYFGLIGTC

SEQ ID NO: 15075 - protein, 268 aa, Thermomyces lanuginosus
EVSQDLFNQFNLFAQYSAAAYCGKNNDAPAGTQITCTGNACPEVEKADATFLYSFEDAGSGDVTGFLALDNTNKLIVLSFRGSRSVENWIGNLNFDLKEINDICSGCRGHDGFTSSWRSVADTLRQKVEDAVREHPDYRVVFSGHSLGGGLATVAGADLRGNGYDIDVFSYGAPRVGNRAFAEFLTVQTGGTLYRITHTNDIVPRLPPREFGYSHSSPEYWIKSGTGVPVRRRDIVKIEGIDATGGNNQPNIPDAKAHLWYFGLIGTC

SEQ ID NO: 15076 - protein, 268 aa, Thermomyces lanuginosus
EKSQDLFNQFNLFAQYSAAAYCGKNNDAPAGTKITCTGNACPEVEKADATILYSFEDSGVGDVTGFLARDNTNKLIVLSFRGSRSIENWIGNLNFDLEEINDICSGCRGHDGFTSSWRSVADTLRQKVEDAVREHPDYRVVFTGHSLGGALATVAGADLRGNGYDIDVFSYGAPRLGNRAFAEFLTVQTGGTLYRITNTNDIVPRLPPRKFGYSHSSPEYWIKSGTGVPVRRRDIVKIEGIDATGGNNQPNIPDIPAHLWYFGLIGTC

SEQ ID NO: 15077 - protein, 268 aa, Thermomyces lanuginosus
EKSQDLFNQFNLFAQYSAAAYCGKNNDAPAGTKITCTGNACPEVEKADATVLYSFEDSGVGDVTGFLARDNTNKLIVLSFRGSRSIENWIGNLNFDLEEINDICSGCRGHDGFTSSWRSVADTLRQKVEDAVREHPDYRVVFTGHSLGGALATVAGADLRGNGYDIDVFSYGAPRLGNRAFAEFLTVQTGGTLYRITHTNDIVPRLPPRKFGYSHSSPEYWIKSGTGPPVRRRDIVKIEGIDATGGNNQPNIPDIPAHLWYFGLIGTC

SEQ ID NO: 15078 - protein, 268 aa, Thermomyces lanuginosus
EYSQDLFNQFNLFAQYSAAAYCGKNNDAPAGTKITCTGNACPEVEKADATLLYSFEDSGVGDVTGFLARDNTNKLIVLSFRGSRSIENWIGNLNFDLEEINDICSGCRGHDGFTSSWRSVADTLRQKVEDAVREHPDYRVVFTGHSLGGALATVAGADLRGNGYDIDVFSYGAPRLGNRAFAEFLTVQTGGTLYRITHTNDIVPRLPPRKFGYSHSSPEYWIKFGTGVPVRRRDIVKIEGIDATGGNNQPNIPDIPAHLWYFGLIGTC

SEQ ID NO: 15079 - protein, 268 aa, Thermomyces lanuginosus
EVSQDLFNQFNLFAQYSAAAYCGKNNRAPAGTNITCTANACPEVEKADATFLYSFEDSGVGDVTGFLALDNTNKLIVLSFRGSRSPENWILKLNFEPKEINDICSGCRGHAGFTSSWRSVADTLRQKVEDAVREHPDYRVVFTGHSLGGALATVAGADLRGNKYDIDVFSYGAPRVGNRAFAEFLTVQTGGTLYRITHTNDIVPRLPPREFGYSHSSPEYWIKSGTLVPVRRRDIVKIEGIDATGGNNQPNIPSITAHLWYFGLIGTC

SEQ ID NO: 15080 - protein, 268 aa, Thermomyces lanuginosus
EVSQDLFNQFNLFAQYSAAAYCGKNNDAPAGTKITCTGNACPEVEKADATVLYSFEDSGVGDVTGFLALDNTNKLIVLSFRGSRSIENWIGNLNFDLEEIDDICSGCRGHDGFTSSWRSVADTLRQKVEDAVREHPDYRVVFTGHSLGGALATVAGADLRNNGYDIDVFSYGAPRVGNRAFAEFLTVQTGGTLYRITSTNDIVPRLPPRKFGYSHSSPEFWIKSGTLVPVRRRDIVKIEGIDATGGNNQPNIPDIPVHLWYFGLIGTC

SEQ ID NO: 15081 - protein, 268 aa, Thermomyces lanuginosus
EYSQDLFNQFNLFAQYSAAAYCGKNNDAPAGTKITCTGNACPEVEKADATVLYSFEDSGVGDVTGFLARDNTNKLIVLSFRGSRSIENWIGNLNFDLEEINDICSGCRGHDGFTSSWRSVADTLRQKVEDAVREHPDYRVVFTGHSLGGALATVAGADLRGNGYDIDVFSYGAPRLGNRAFAEFLTVQTGGTLYRITITNDIVPRLPPRKFGYSHSSPEYWIKSGTGVPVRRRDIVKIEGIDATGGNNQPNIPDIPAHLWYFGLIGTC

SEQ ID NO: 15082 - protein, 268 aa, Thermomyces lanuginosus
EKSQDLFNQFNLFAQYSAAAYCGKNNDAPAGTKITCTGNACPEVEKADATVLYSFEDSGVGDVTGFLARDNTNKLIVLSFRGSRSIENWIGNLNFDLEEINDICSGCRGHDGFTSSWRSVADTLRQKVEDAVREHPDYRVVFTGHSLGGALATVAGADLRGNGYDIDVFSYGAPRLGNRAFAEFLTVQTGGTLYRITHTNDIVPRLPPRKFGYSHSSPEYWIKFGTGVPVRRRDIVKIEGIDATGGNNQPNIPDIPAHLWYFGLIGTC

SEQ ID NO: 15083 - protein, 268 aa, Thermomyces lanuginosus
EVSQDLFNQFNLFAQYSAAAYCGKNNRAPAGTNITCTANACPEVEKADATVLYSFEDSGVGDVTGFLALDNTNKLIVLSFRGSRSIENWIGNLNFDLEEINDICSGCRGHAGFTSSWRSVADTLRQKVEDAVREHPDYRVVFTGHSLGGALATVAGADLRGNKYDIDVFSYGAPRVGNRAFAEFLTVQTGGTLYRITHTNDIVPRLPPRKFGYSHSSPEYWIKSGTLVPVRRRDIVKIEGIDATGGNNQPNIPSITAHLWYFGLIGTC

SEQ ID NO: 15084 - protein, 268 aa, Thermomyces lanuginosus
EYSQDLFNQFNLFAQYSAAAYCGKNNDAPAGTKITCTGNACPEVEKADATVLYSFEDSGVGDVTGFLARDNTNKLIVLSFRGSRSIENWIGNLNFDLEEINDICSGCRGHDGFTSSWRSVADTLRQKVEDAVREHPDYRVVFTGHSLGGALATVAGADLRGNGYDIDVFSYGAPRLGNRAFAEFLTVQTGGTLYRITSTNDIVPRLPPRKFGYSHSSPEYWIKSGTGVPVRRRDIVKIEGIDATGGNNQPNIPDIPAHLWYFGLIGTC

SEQ ID NO: 15085 - protein, 268 aa, Thermomyces lanuginosus
EYSQDLFNQFNLFAQYSAAAYCGKNNDAPAGTKITCTGNACPEVEKADATVLYSFEDSGVGDVTGFLARDNTNKLIVLSFRGSRSIENWIGNLNFDLEEINDICSGCRGHDGFTSSWRSVADTLRQKVEDAVREHPDYRVVFTGHSLGGALATVAGADLRGNGYDIDVFSYGAPRLGNRAFAEFLTVQTGGTLYRITHTNDIVPRLPPRKFGYSHSSPEYWIKSGTGVPRRRRDIVKIEGIDATGGNNQPNIPDIPAHLWYFGLIGTC

SEQ ID NO: 15086 - protein, 268 aa, Thermomyces lanuginosus
EKSQDLFNQFNLFAQYSAAAYCGKNNDAPAGTKITCTGNACPEVEKADATVLYSFEDSGVGDVTGFLARDNTNKLIVLSFRGSRSIENWIGNLNFDLEEINDICSGCRGHDGFTSSWRSVADTLRQKVEDAVREHPDYRVVFTGHSLGGALATVAGADLRGNGYDIDVFSYGAPRLGNRAFAEFLTVQTGGTLYRITHTNDIVPRLPPRKFGYSHSSPEYWIKSGTGVPVRRRDIVKIEGIDATGGNNQPNIPDGPAHLWYFGLIGTC

SEQ ID NO: 15087 - protein, 268 aa, Thermomyces lanuginosus
EYSQDLFNQFNLFAQYSAAAYCGKNNDAPAGTKITCTGNACPEVEKADATVLYSFEDSGVGDVTGFLARDNTNKLIVLSFRGSRSIENWIGNLNFDLEEINDICSGCRGHDGFTSSWRSVADTLRQKVEDAVREHPDYRVVFTGHSLGGALATVAGADLRGNGYDIDVFSYGAPRLGNRAFAEFLTVQTGGTLYRITNTNDIVPRLPPRKFGYSHSSPEYWIKSGTGVPVRRRDIVKIEGIDATGGNNQPNIPDIPAHLWYFGLIGTC

SEQ ID NO: 15088 - protein, 268 aa, Thermomyces lanuginosus
EYSQDLFNQFNLFAQYSAAAYCGKNNDAPAGTKITCTGNACPEVEKADATILYSFEDSGVGDVTGFLARDNTNKLIVLSFRGSRSIENWIGNLNFDLEEINDICSGCRGHDGFTSSWRSVADTLRQKVEDAVREHPDYRVVFTGHSLGGALATVAGADLRGNGYDIDVFSYGAPRLGNRAFAEFLTVQTGGTLYRITHTNDIVPRLPPRKFGYSHSSPEYWIKPGTGVPVRRRDIVKIEGIDATGGNNQPNIPDIPAHLWYFGLIGTC

SEQ ID NO: 15089 - protein, 268 aa, Thermomyces lanuginosus
EYSQDLFNQFNLFAQYSAAAYCGKNNDAPAGTKITCTGNACPEVEKADATVLYSFEDSGVGDVTGFLARDNTNKLIVLSFRGSRSIENWIGNLNFDLEEINDICSGCRGHDGFTSSWRSVADTLRQKVEDAVREHPDYRVVFTGHSLGGALATVAGADLRGNGYDIDVFSYGAPRLGNRAFAEFLTVQTGGTLYRITYTNDIVPRLPPRKFGYSHSSPEYWIKSGTGVPVRRRDIVKIEGIDATGGNNQPNIPDIPAHLWYFGLIGTC

SEQ ID NO: 15090 - protein, 268 aa, Thermomyces lanuginosus
EYSQDLFNQFNLFAQYSAAAYCGKNNRAPAGTKITCTANACPEVEKADATVLYSFEDSGVGDVTGFLALDNTNKLIVLSFRGSRSIENWIGNLNFELKEINDICSGCRGHAGFTSSWRSVADTLRQKVEDAVREHPDYRVVFTGHSLGGALATVAGADLRGNKYDIDVFSYGAPRVGNRAFAEFLTVQTGGTLYRITHTNDIVPRLPPREFGYSHSSPEYWIKSGTLVPVRRRDIVKIEGIDATGGNNQPNIPSITAHLWYFGLIGTC

SEQ ID NO: 15091 - protein, 268 aa, Thermomyces lanuginosus
EYSQDLFNQFNLFAQYSAAAYCGKNNDAPAGTKITCTGNACPEVEKADATVLYSFEDSGVGDVTGFLARDNTNKLIVLSFRGSRSIENWIGNLNFDLEEINDICSGCRGHDGFTSSWRSVADTLRQKVEDAVREHPDYRVVFTGHSLGGALATVAGADLRGNGYDIDVFSYGAPRLGNRAFAEFLTVQTGGTLYRITHTNDIVPRLPPRKFGYSHSSPEYWIKFGTGVPVRRRDIVKIEGIDATGGNNQPNIPDIPAHLWYFGLIGTC

SEQ ID NO: 15092 - protein, 268 aa, Thermomyces lanuginosus
EKSQDLFNQFNLFAQYSAAAYCGKNNDAPAGTKITCTGNACPEVEKADATVLYSFEDSGVGDVTGFLARDNTNKLIVLSFRGSRSIENWIGNLNFDLEEINDICSGCRGHDGFTSSWRSVADTLRQKVEDAVREHPDYRVVFTGHSLGGALATVAGADLRGNGYDIDVFSYGAPRLGNRAFAEFLTVQTGGTLYRITHTNDIVPRLPPRKFGYSHSSPEYWIKIGTGVPVRRRDIVKIEGIDATGGNNQPNIPDIPAHLWYFGLIGTC

SEQ ID NO: 15093 - protein, 268 aa, Thermomyces lanuginosus
EKSQDLFNQFNLFAQYSAAAYCGKNNDAPAGTKITCTGNACPEVEKADATILYSFEDSGVGDVTGFLARDNTNKLIVLSFRGSRSIENWIGNLNFDLEEINDICSGCRGHDGFTSSWRSVADTLRQKVEDAVREHPDYRVVFTGHSLGGALATVAGADLRGNGYDIDVFSYGAPRLGNRAFAEFLTVQTGGTLYRITHTNDIVPRLPPRKFGYSHSSPEYWIKIGTGVPVRRRDIVKIEGIDATGGNNQPNIPDIPAHLWYFGLIGTC

SEQ ID NO: 15094 - protein, 268 aa, Thermomyces lanuginosus
EVSQDLFNQFNLFAQYSAAAYCGKNNRAPAGTNITCTANACPEVEKADATFLYSFEDSGVGDVTGFLALDNTNKLIVLSFRGTRSPENWIADLNYTLKEINDICSGCRGHAGFTSSWRSVADTLRQKVEDAVREHPDYRVVFTGHSLGGALATVAGADLRGNKYDIDVFSYGAPRVGNRAFAEFLTVQTGGTLYRITHTNDIVPRLPPREFGYSHSSPEYWIKSGTLVPVRRRDIVKIEGIDATGGNNQPNIPSITAHLWYFGLIGTC

SEQ ID NO: 15095 - protein, 268 aa, Thermomyces lanuginosus
EYSQDLFNQFNLFAQYSAAAYCGKNNDAPAGTKITCTGNACPEVEKADATILYSFEDSGVGDVTGFLARDNTNKLIVLSFRGSRSIENWIGNLNFDLEEINDICSGCRGHDGFTSSWRSVADTLRQKVEDAVREHPDYRVVFTGHSLGGALATVAGADLRGNGYDIDVFSYGAPRLGNRAFAEFLTVQTGGTLYRITHTNDIVPRLPPRKFGYSHSSPEYWIKIGTGVPVRRRDIVKIEGIDATGGNNQPNIPDIPAHLWYFGLIGTC

SEQ ID NO: 15096 - protein, 268 aa, Thermomyces lanuginosus
EKSQDLFNQFNLFAQYSAAAYCGKNNDAPAGTKITCTGNACPEVEKADATVLYSFEDSGVGDVTGFLARDNTNKLIVLSFRGSRSIENWIGNLNFDLEEINDICSGCRGHDGFTSSWRSVADTLRQKVEDAVREHPDYRVVFTGHSLGGALATVAGADLRGNGYDIDVFSYGAPRLGNRAFAEFLTVQTGGTLYRITHTNDIVPRLPPRKFGYSHSSPEYWIKSGTGVPVRRRDIVKIEGIDATGGNNQPNIPDIPIHLWYFGLIGTC

SEQ ID NO: 15097 - protein, 268 aa, Thermomyces lanuginosus
EVSQDLFNQFNLFAQYSAAAYCGKNNRAPAGTNITCTANACPEVEKADATVLYSFEDSGVGDVTGFLALDNTNKLIVLSFRGSRSIENWIGNLNFELKEIDDICSGCRGHAGFTSSWRSVADTLRQKVEDAVREHPDYRVVFTGHSLGGALATVAGADLRGNKYDIDVFSYGAPRVGNRAFAEFLTVQTGGTLYRITHTNDIVPRLPPRKFGYSHSSPEYWIKSGTLVPVRRRDIVKIEGIDATGGNNQPNIPSITAHLWYFGLIGTC

SEQ ID NO: 15098 - protein, 268 aa, Thermomyces lanuginosus
EVSQDLFNQFNLFAQYSAAAYCGKNNRAPAGTNITCTANACPEVEKADATVLYSFEDSGVGDVTGFLALDNTNKLIVLSFRGSRSIENWIGNLNFELEEINDICSGCRGHAGFTSSWRSVADTLRQKVEDAVREHPDYRVVFTGHSLGGALATVAGADLRGNKYDIDVFSYGAPRVGNRAFAEFLTVQTGGTLYRITHTNDIVPRLPPRKFGYSHSSPEYWIKSGTLVPVRRRDIVKIEGIDATGGNNQPNIPSITAHLWYFGLIGTC

SEQ ID NO: 15099 - protein, 268 aa, Thermomyces lanuginosus
EVSQDLFNQFNLFAQYSAAAYCGKNNDAPAGTNITCTGNACPEVEKADATFLYSFEDTGKGDVTGFLALDNTNKLIVLSFRGTRSVENWIGNLKFDLKEINDICSGCRGHDGFTSSWRSVADTLRQKVEDAVREHPDYRVVFTGHSLGGGLATVAGADLRGNGYDIDVFSYGAPRVGNRAFAEFLTVQTGGTLYRITHTNDIVPRLPPRVFGYSHSSPEYWIKSGTGVPVRRRDIVKIEGIDATGGNNQPNIPDIKAHLWYFGLIGTC

SEQ ID NO: 15100 - protein, 268 aa, Thermomyces lanuginosus
EVSQDLFNQFNLFAQYSAAAYCGKNNDAPAGTXXTCTGNACPEVEKADATFLYSFEDXGVGDVTGFLALDNTNKLIVLSXRGSRSXENWIGNLNFDLKEINDICSGCRGXDGFTSSWRSVADTLRQKVEDAVREHPDYRVVFTGXSLGGALATVAGADLRGNGYDIDVFSXGAPRVGNRAFAEFLTVQTGGTLYRITXTNDIVPRLPPREFGYXXSSPEYWIKSGTLVPVTRNDIVKIEGIDATGGNNQPNIPDIPAHLWYFGLIGTC

SEQ ID NO: 15101 - protein, 268 aa, Thermomyces lanuginosus
EVSEDLFNQFNLFAQYSAAAYCGKNNDAPAGTNITCTGNACPEVEKADATLLYSFRDSGVGDVTGFLALDNTNKLIVLSFRGTRSIENWIADLDFILIEINDICSGCRGHDGFTSSWFSVADTLRQKVEDAVREHPDYRVVFTGHSLGGALATVAGADLRGNGYDIDVFSYGAPRVGNRAFAEFLTVQTGGTLYRITHTNDIVPRLPPREFGYSHSSPEFWIKSGTLVPVRRRDIVKIEGIDAEGGNNQPNIPSIPAHLWYFGAIGTC

SEQ ID NO: 15102 - protein, 268 aa, Thermomyces lanuginosus
EVSVDLFNQFNLFAQYSAAAYCGKNNDAPAGTNITCTGNACPEVEKADATFLYSFEDAGSGDVTGFLALDNTNKLIVLSFRGTRSVENWIGNLNFDLKEINDICSGCRGHDGFTSSWRSVADTLRQKVEDAVREHPDYRVVFTGHSLGGGLATVAGADLRGNGYDIDVFSYGAPRVGNRAFAEFLTVQTGGTLYRITHTNDIVPRLPPRKFGYSHSSPEYWIKSGTGVPVRRRDIVKIEGIDATGGNNQPNIPDIKAHLWYFGLIGTC

SEQ ID NO: 15103 - protein, 268 aa, Thermomyces lanuginosus
EVSQDLFNQFNLFAQYSAAAYCGKNNRAPAGTNITCTANACPEVEKADATFLYSFEDSGVGDVTGFLALDNTNKLIVLSFRGTRSIENWIADLNFLLQEYNDICSGCRGHAGFTSSWRSVADTLRQKVEDAVREHPDYRVVFTGHSLGGALATVAGADLRGNKYDIDVFSYGAPRVGNRAFAEFLTVQTGGTLYRITHTNDIVPRLPPREFGYSHSSPEYWIKSGTLVPVRRRDIVKIEGIDATGGNNQPNIPSITAHLWYFGLIGTC

SEQ ID NO: 15104 - protein, 268 aa, Thermomyces lanuginosus
EVSQDLFNQFNLFAQYSAAAYCGKNNDAPAGTNITCTGNACPEVEKADATFLYSFEDSGVGDVTGFLALDNTNKLIVLSFRGTGSDQNLQLETSYTLTEINDICSGCRGHDGFTSSWRSVADTLRQKVEDAVREHPDYRVVFTGHSLGGALATVAGADLRGNGYDIDVFSYGAPRVGNRAFAEFLTVQTGGTLYRITHTNDIVPRLPPREFGYSHSSPEYWIKSGTLVPVTRNDIVKIEGIDATGGNNQPNIPDIPAHLWYFGLIGTC

SEQ ID NO: 15105 - protein, 268 aa, Thermomyces lanuginosus
EVSQDLYNQFKLFAHYAAAAYCGKNNDAPAGTKITCTGNACPEVEKADATFIYSFEDSGVGDVTGFLALDNTNKLIVLSFRGSRSIENWIANLNFDLKEISDICSGCRGHRGFYNSWRSVADTLRQKVEDAVREYPDYRVVFTGHSLGGALATVAGADLRGNGYDIDVFSYGAPRVGNRAFAEFLTVQTGGTLYRITHTNDIVPRLPPREFGYSHSSPEYWIKSGTLVPVTRNDIVVIEGIDATGGNNQPNIPDIPAHLWYFGLIGTC

SEQ ID NO: 15106 - protein, 268 aa, Thermomyces lanuginosus
EVSQDLFNQFNLFAQYSAAAYCGKNNRAPAGTNITCTANACPEVEKADATVLYSFEDSGVGDVTGFLALDNTNKLIVLSFRGSRSIENWIADLNFLLQEINDICSGCRGHAGFTSSWRSVADTLRQKVEDAVREHPDYRVVFTGHSLGGALATVAGADLRGNKYDIDVFSYGAPRVGNRAFAEFLTVQTGGTLYRITHTNDIVPRLPPREFGYSHSSPEYWIKSGTLVPVRRRDIVKIEGIDATGGNNQPNIPSTTAHLWYFGLIGTC

SEQ ID NO: 15107 - protein, 268 aa, Thermomyces lanuginosus
EVSQDLFNQFNLFAQYSAAAYCGKNNDAPAGTNITCTGNACPEVEKADATFLYSFEDSGVGCVTGFLALDNTNKLIVLSFRGTGSDCNLQLDTNYTLTEINDICSGCRGHDGFTSSWRSVADTLRQKVEDAVREHPDYRVVFTGHSLGGALATVAGADLRGNGYDIDVFSYGAPRVGNRAFAEFLTVQTGGTLYRITHTNDIVPRLPPREFGYSHSSPEYWIKSGTLVPVTRNDIVKIEGIDATGGNNQPNIPDIPAHLWYFGLIGTC

SEQ ID NO: 15108 - protein, 267 aa, Thermomyces lanuginosus
EVSQDLFNQFNLFAQYSAAAYCSKNNNAPAGTNITCTGNICPEVEKADATILYSFRDSGVGDVTGFLALDNTNKLIVLSFRGSRSIENWIGNLNFDLEIDDICSGCRGHDGFTSSWFSVADTLRQKVEDAVREHPDYRVVFTGHSLGGALATVAGADLRGNGYDIDVFSYGAPRVGNRAFAEFLTVQTGGTLYRITHTNDIVPRLPPREFGYSHSSPEYWIKSGTLVPVRRRDIVKIEGIDAEGGNNQPNIPDITAHLWYFGLIGTC

SEQ ID NO: 15109 - protein, 267 aa, Thermomyces lanuginosus
VSQDLFNQFNLFAQYSAAAYCGKNNDAPAGTNITCTGNACPEVEKADATFLYSFEDTGKGDVTGFLALDNTNKLIVLSFRGSRSVENWIGNLNFDLKEINAICSGCRGHDGFTSSWRSVADTLRQKVEDAVREHPDYRVVFSGHSLGGGLATVAGADLRGNGYDIDVFSYGAPRVGNRAFAEFLTVQTGGTLYRITHTNDIVPRLPPREFGYSHSSPEYWIKSGTGVPVRRRDIVKIEGIDATGGNNQPNIPDAKAHLWYFGLIGTC

SEQ ID NO: 15110 - protein, 267 aa, Thermomyces lanuginosus
VSQDLFNQFNLFAQYSAAAYCGKNNDAPAGTNITCTGNACPEVEKADATFLYSFEDAGVGDVTGFLALDNTNKLIVLSFRGSRSVENWIGNLNFDLIKINDICSGCRGHDGFTSSWRSVADTLRQKVEDAVREHPDYRVVFSGHSLGGGLATVAGADLRGNGYDIDVFSYGAPRVGNRAFAEFLTVQTGGTLYRITHTNDIVPRLPPRAFGYSHPSPEYWIKSGTGVPVRRRDIVKIEGIDATGGNNQPNIPDAKAHLWYFGLIGTC

SEQ ID NO: 15111 - protein, 267 aa, Thermomyces lanuginosus
VSQDLFNQFNLFAQYSAAAYCGKNNRAPAGTNITCTANACPEVEKADATLLYSFEDSGVGDVTGFLALDNTNKLIVLSFRGSRSIENWIGNLNFDLIEINDICSGCRGHAGFTSSWRSVADTLRQKVEDAVREHPDYRVVFTGHSLGGALATVAGADLRGNSYDIDVFSYGAPRVGNRAFAEFLTVQTGGTLYRITSTNDIVPRLPPREFGYSHSSPEFWIKSGTLVPVRRCDIVKIEGIDATGGNNQPNIPDITAHLWYFGLIGTC

SEQ ID NO: 15112 - protein, 267 aa, Thermomyces lanuginosus
VSQDLFNQFNLFAQYSAAAYCGKNNRAPAGTNITCTGNACPEVEKADATVLYSFEDSGVGDVTGFLALDNTNKLIVLSFRGSRSIENWIGNLNFELIEINDICSGCRGHAGFTSSWRSVADTLRQKVEDAVREHPDYRVVFTGHSLGGALATVAGADLRGNSYDIDVFSYGAPRVGNRAFAEFLTVQTGGTLYRITSTNDIVPRLPPREFGYSHSSPEFWIKSGTLVPVRRCDIVKIEGIDATGGNNQPNIPSITAHLWYFGLIGTC

SEQ ID NO: 15113 - protein, 267 aa, Thermomyces lanuginosus
VSQDLFNQFNLFAQYSAAAYCGKNNRAPAGTNITCTGNACPEVEKADATVLYSFEDSGVGDVTGFLALDNTNKLIVLSFRGSRSIENWIGNLNFELIEINDICSGCRGHAGFTSSWRSVADTLRQKVEDAVREHPDYRVVFTGHSLGGALATVAGADLRGNKYDIDVFSYGAPRVGNRAFAEFLTVQTGGTLYRITSTNDIVPRLPPREFGYSHSSPEFWIKSGTLVPVRRCDIVKIEGIDATGGNNQPNIPSITAHLWYFGLIGTC

SEQ ID NO: 15114 - protein, 267 aa, Thermomyces lanuginosus
VSQDLFNQFNLFAQYSAAAYCGKNNDAPAGTNITCTANACPEVEKADATVLYSFEDSGVGDVTGFLALDNTNKLIVLSFRGSRSIENWIGNLNFELIEINDICSGCRGHAGFTSSWRSVADTLRQKVEDAVREHPDYRVVFTGHSLGGALATVAGADLRGNKYDIDVFSYGAPRVGNRAFAEFLTVQTGGTLYRITSTNDIVPRLPPREFGYSHSSPEFWIKSGTLVPVRRCDIVKIEGIDATGGNNQPNIPSITAHLWYFGLIGTC

SEQ ID NO: 15115 - protein, 267 aa, Thermomyces lanuginosus
VSQDLFNQFNLFAQYSAAAYCGKNNRAPAGTKITCTANACPEVEKADATVLYSFEDSGVGDVTGFLALDNTNKLIVLSFRGSRSIENWIGNLNFELIEINDICSGCRGHAGFTSSWRSVADTLRQKVEDAVREHPDYRVVFTGHSLGGALATVAGADLRGNKYDIDVFSYGAPRVGNRAFAEFLTVQTGGTLYRITSTNDIVPRLPPREFGYSHSSPEFWIKSGTLVPVRRCDIVKIEGIDATGGNNQPNIPDIPAHLWYFGLIGTC

SEQ ID NO: 15116 - protein, 267 aa, Thermomyces lanuginosus
VSQDLFNQFNLFAQYSAAAYCGKNNDAPAGTNITCTGNACPEVEKADATFLYSFEDAGSGDVTGFLALDNTNKLIVLSFRGSRSVENWIGNLNFDLIKINDICSGCRGHDGFTSSWRSVADTLRQKVEDAVREHPDYRVVFSGHSLGGGLATVAGADLRGNGYDIDVFSYGAPRVGNRAFAEFLTVQTGGTLYRITHTNDIVPRLPPREFGYSHPSPEYWIKSGTGVPVRRRDIVKIEGIDATGGNNQPNIPDAKAHLWYFGLIGTC

SEQ ID NO: 15117 - protein, 267 aa, Thermomyces lanuginosus
VSQDLFNQFNLFAQYSAAAYCGKNNRAPAGTNITCTGNACPEVEKADATLLYSFEDSGVGDVTGFLALDNTNKLIVLSFRGSRSIENWIGNLNFELIEINDICSGCRGHAGFTSSWRSVADTLRQKVEDAVREHPDYRVVFTGHSLGGALATVAGADLRGNKYDIDVFSYGAPRVGNRAFAEFLTVQTGGTLYRITSTNDIVPRLPPREFGYSHSSPEFWIKSGTLVPVRRCDIVKIEGIDATGGNNQPNIPSITAHLWYFGLIGTC

SEQ ID NO: 15118 - protein, 267 aa, Thermomyces lanuginosus
VSQDLFNQFNLFAQYSAAAYCGKNNRAPAGTNITCTANACPEVEKADATVLYSFEDSGVGDVTGFLALDNTNKLIVLSFRGSRSIENWIGNLNFELIEINDICSGCRGHAGFTSSWRSVADTLRQKVEDAVREHPDYRVVFTGHSLGGALATVAGADLRGNKYDIDVFSYGAPRVGNRAFAEFLTVQTGGTLYRITSTNDIVPRLPPREFGYSHSSPEFWIKSGTLVPVRRCDIVKIEGIDATGGNNQPNIPDITAHLWYFGLIGTC

SEQ ID NO: 15119 - protein, 267 aa, Thermomyces lanuginosus
VSQDLFNQFNLFAQYSAAAYCGKNNDAPAGTNITCTGNACPEVEKADATFLYSFEDAGSGDVTGFLALDNTNKLIVLSFRGSRSVENWIGNLNFDLIKINDICSGCRGHDGFTSSWRSVADTLRQKVEDAVREHPDYRVVFSGHSLGGGLATVAGADLRGNGYDIDVFSYGAPRVGNRAFAEFLTVQTGGTLYRITHTNDIVPRLPPREFGYSHSSPEYWIKSGTGVPVRRRDIVKIEGIDATGGNNQPNIPDAKAHFWYFGLIGTC

SEQ ID NO: 15120 - protein, 267 aa, Thermomyces lanuginosus
VSQDLFNQFNLFAQYSAAAYCGKNNDAPAGTNITCTRNACPEVEKADATVLYSFEDSGVGDVTGFLALDNTNKLIVLSFRGSRSIENWIGNLNFELIEINDICSGCRGHAGFTSSWRSVADTLRQKVEDAVREHPDYRVVFTGHSLGGALATVAGADLRGNKYDIDVFSYGAPRVGNRAFAEFLTVQTGGTLYRITSTNDIVPRLPPREFGYSHSSPEFWIKSGTLVPVRRCDIVKIEGIDATGGNNQPNIPSITAHLWYFGLIGTC

SEQ ID NO: 15121 - protein, 267 aa, Thermomyces lanuginosus
VSQDLFNQFNLFAQYSAAAYCGKNNRAPAGTNITCTGNACPEVEKADATVLYSFEDSGVGDVTGFLALDNTNKLIVLSFRGSRSIENWIGNLNFDLIEINDICSGCRGHAGFTSSWRSVADTLRQKVEDAVREHPDYRVVFTGHSLGGALATVAGADLRGNKYDIDVFSYGAPRVGNRAFAEFLTVQTGGTLYRITSTNDIVPRLPPREFGYSHSSPEFWIKSGTLVPVRRCDIVKIEGIDATGGNNQPNIPSITAHLWYFGLIGTC

SEQ ID NO: 15122 - protein, 267 aa, Thermomyces lanuginosus
VSQDLFNQFNLFAQYSAAAYCGKNNRAPAGTNITCTGNACPEVEKADATVLYSFEDSGVGDVTGFLALDNTNKLIVLSFRGSRSIENWIGNLNFILIEINDICSGCRGHAGFTSSWRSVADTLRQKVEDAVREHPDYRVVFTGHSLGGALATVAGADLRGNKYDIDVFSYGAPRVGNRAFAEFLTVQTGGTLYRITSTNDIVPRLPPREFGYSHSSPEFWIKSGTLVPVRRCDIVKIEGIDATGGNNQPNIPSITAHLWYFGLIGTC

SEQ ID NO: 15123 - protein, 266 aa, Thermomyces lanuginosus
SQDLFNQFNLFAQYSAAAYCGKNNRAPAGTKITCTANACPEVEKADATILYSFEDSGVGDVTGFLALDNTNKLIVLSFRGSRSIENWIGNLNFELKEINDICSGCRGHAGFTSSWRSVADTLRQKVEDAVREHPDYRVVFTGHSLGGALATVAGADLRGNKYDIDVFSYGAPRVGNRAFAEFLTVQTGGTLYRITHTNDIVPRLPPREFGYSHSSPEYWIKSGTLVPVRRCDIVKIEGIDATGGNNQPNIPSITIHLWYFGLIGTC

SEQ ID NO: 15124 - protein, 266 aa, Thermomyces lanuginosus
SQDLFNQFNLFAQYSAAAYCGKNNRAPAGTKITCTANACPEVEKADATVLYSFEDSGVGDVTGFLALDNTNKLIVLSFRGSRSIENWIGNLNFELKEINDICSGCRGHAGFTSSWRSVADTLRQKVEDAVREHPDYRVVFTGHSLGGALATVAGADLRGNKYDIDVFSYGAPRVGNRAFAEFLTVQTGGTLYRITHTNDIVPRLPPREFGYSHSSPEYWIKSGTLVPVRRCDIVKIEGIDATGGNNQPNIPSITVHLWYFGLIGTC

SEQ ID NO: 15125 - protein, 266 aa, Thermomyces lanuginosus
SQDLFNQFNLFAQYSAAAYCGKNNRAPAGTKITCTANACPEVEKADATVLYSFEDSGVGDVTGFLALDNTNKLIVLSFRGSRSIENWIGNLNFELKEINDICSGCRGHAGFTSSWRSVADTLRQKVEDAVREHPDYRVVFTGHSLGGGLATVAGADLRGNKYDIDVFSYGAPRVGNRAFAEFLTVQTGGTLYRITHTNDIVPRLPPREFGYSHSSPEYWIKSGTLVPVRRCDIVKIEGIDATGGNNQPNIPSITAHLWYFGLIGTC

SEQ ID NO: 15126 - protein, 266 aa, Thermomyces lanuginosus
SQDLFNQFNLFAQYSAAAYCGKNNRAPAGTKITCTANACPEVEKADATILYSFEDSGVGDVTGFLALDNTNKLIVLSFRGSRSIENWIGNLNFELKEINDICSGCRGHAGFTSSWRSVADTLRQKVEDAVREHPDYRVVFTGHSLGGALATVAGADLRGNKYDIDVFSYGAPRVGNRAFAEFLTVQTGGTLYRITHTNDIVPRLPPREFGYSHSSPEYWIKIGTLVPVRRCDIVKIEGIDATGGNNQPNIPSITAHLWYFGLIGTC

SEQ ID NO: 15127 - protein, 266 aa, Thermomyces lanuginosus
SQDLFNQFNLFAQYSAAAYCGKNNRAPAGTKITCTANACPEVEKADATVLYSFEDSGVGDVTGFLALDNTNKLIVLSFRGSRSIENWIGNLNFELKEINDICSGCRGHAGFTSSWRSVADTLRQKVEDAVREHPDYRVVFTGHSLGGALATVAGADLRGNKYDIDVFSYGAPRVGNRAFAEFLTVQTGGTLYRITHTNDIVPRLPPREFGYSHSSPEYWIKIGTLVPVRRCDIVKIEGIDATGGNNQPNIPSITAHLWYFGLIGTC

SEQ ID NO: 15128 - protein, 266 aa, Thermomyces lanuginosus
SQDLFNQFNLFAQYSAAAYCGKNNRAPAGTKITCTANACPEVEKADATLLYSFEDSGVGDVTGFLALDNTNKLIVLSFRGSRSIENWIGNLNFELKEINDICSGCRGHAGFTSSWRSVADTLRQKVEDAVREHPDYRVVFTGHSLGGALATVAGADLRGNKYDIDVFSYGAPRVGNRAFAEFLTVQTGGTLYRITHTNDIVPRLPPREFGYSHSSPEYWIKSGTDVPVRRCDIVKIEGIDATGGNNQPNIPSITAHLWYFGLIGTC

SEQ ID NO: 15129 - protein, 266 aa, Thermomyces lanuginosus
SQDLFNQFNLFAQYSAAAYCGKNNRAPAGTKITCTANACPEVEKADATLLYSFEDSGVGDVTGFLALDNTNKLIVLSFRGSRSIENWIGNLNFELKEINDICSGCRGHAGFTSSWRSVADTLRQKVEDAVREHPDYRVVFTGHSLGGGLATVAGADLRGNKYDIDVFSYGAPRVGNRAFAEFLTVQTGGTLYRITHTNDIVPRLPPREFGYSHSSPEYWIKSGTLVPVRRCDIVKIEGIDATGGNNQPNIPSITAHLWYFGLIGTC

SEQ ID NO: 15130 - protein, 266 aa, Thermomyces lanuginosus
SQDLFNQFNLFAQYSAAAYCGKNNRAPAGTKITCTANACPEVEKADATLLYSFEDSGVGDVTGFLALDNTNKLIVLSFRGSRSIENWIGNLNFELKEINDICSGCRGHAGFTSSWRSVADTLRQKVEDAVREHPDYRVVFTGHSLGGALATVAGADLRGNKYDIDVFSYGAPRVGNRAFAEFLTVQTGGTLYRITHTNDIVPRLPPREFGYSHSSPEYWIKIGTLVPVRRCDIVKIEGIDATGGNNQPNIPSITAHLWYFGLIGTC

SEQ ID NO: 15131 - protein, 266 aa, Thermomyces lanuginosus
SQDLFNQFNLFAQYSAAAYCGKNNRAPAGTKITCTANACPEVEKADATVLYSFEDSGVGDVTGFLALDNTNKLIVLSFRGSRSIENWIGNLNFELKEINDICSGCRGHAGFTSSWRSVADTLRQKVEDAVREHPDYRVVFAGHSLGGALATVAGADLRGNKYDIDVFSYGAPRVGNRAFAEFLTVQTGGTLYRITHTNDIVPRLPPREFGYSHSSPEYWIKSGTLVPVRRCDIVKIEGIDATGGNNQPNIPSITAHLWYFGLIGTC

SEQ ID NO: 15132 - protein, 266 aa, Thermomyces lanuginosus
SQDLFNQFNLFAQYSAAAYCGKNNRAPAGTKITCTANACPEVEKADATVLYSFEDSGVGDVTGFLALDNTNKLIVLSFRGSRSIENWIGNLNFELKEINDICSGCRGHAGFTSSWRSVADTLRQKVEDAVREHPDYRVVFTGHSLGGALATVAGADLRGNKYDIDVFSYGAPRVGNRAFAEFLTVQTGGTLYRITSTNDIVPRLPPREFGYSHSSPEYWIKSGTLVPVRRCDIVKIEGIDATGGNNQPNIPSITAHLWYFGLIGTC

SEQ ID NO: 15133 - protein, 266 aa, Thermomyces lanuginosus
SQDLFNQFNLFAQYSAAAYCGKNNRAPAGTKITCTANACPEVEKADATLLYSFEDSGVGDVTGFLALDNTNKLIVLSFRGSRSIENWIGNLNFELKEINDICSGCRGHAGFTSSWRSVADTLRQKVEDAVREHPDYRVVFTGHSLGGALATVAGADLRGNKYDIDVFSYGAPRVGNRAFAEFLTVQTGGTLYRITHTNDIVPRLPPREFGYSHSSPEYWIKSGTLPPVRRCDIVKIEGIDATGGNNQPNIPSITAHLWYFGLIGTC

SEQ ID NO: 15134 - protein, 266 aa, Thermomyces lanuginosus
SQDLFNQFNLFAQYSAAAYCGKNNRAPAGTKITCTANACPEVEKADATILYSFEDSGVGDVTGFLALDNTNKLIVLSFRGSRSIENWIGNLNFELKEINDICSGCRGHAGFTSSWRSVADTLRQKVEDAVREHPDYRVVFTGHSLGGALATVAGADLRGNKYDIDVFSYGAPRVGNRAFAEFLTVQTGGTLYRITLTNDIVPRLPPREFGYSHSSPEYWIKSGTLVPVRRCDIVKIEGIDATGGNNQPNIPSITAHLWYFGLIGTC

SEQ ID NO: 15135 - protein, 266 aa, Thermomyces lanuginosus
SQDLFNQFNLFAQYSAAAYCGKNNRAPAGTKITCTANACPEVEKADATILYSFEDSGVGDVTGFLALDNTNKLIVLSFRGSRSIENWIGNLNFELKEINDICSGCRGHAGFTSSWRSVADTLRQKVEDAVREHPDYRVVFTGHSLGGALATVAGADLRGNKYDIDVFSYGAPRVGNRAFAEFLTVQTGGTLYRITHTNDIVPRLPPREFGYSHSSPEYWIKSGTLVPRRRCDIVKIEGIDATGGNNQPNIPSITAHLWYFGLIGTC

SEQ ID NO: 15136 - protein, 266 aa, Thermomyces lanuginosus
SQDLFNQFNLFAQYSAAAYCGKNNRAPAGTKITCTANACPEVEKADATLLYSFEDSGVGDVTGFLALDNTNKLIVLSFRGSRSIENWIGNLNFELKEINDICSGCRGHAGFTSSWRSVADTLRQKVEDAVREHPDYRVVFTGHSLGGALATVAGADLRGNKYDIDVFSYGAPRVGNRAFAEFLTVQTGGTLYRITHTNDIVPRLPPREFGYSHSSPEYWIKSGTLVPVRRCDIVKIEGIDATGGNNQPNIPSITVHLWYFGLIGTC

SEQ ID NO: 15137 - protein, 266 aa, Thermomyces lanuginosus
SQDLFNQFNLFAQYSAAAYCGKNNRAPAGTKITCTANACPEVEKADATLLYSFEDSGVGDVTGFLALDNTNKLIVLSFRGSRSIENWIGNLNFELKEINDICSGCRGHAGFTSSWRSVADTLRQKVEDAVREHPDYRVVFTGHSLGGALATVAGADLRGNKYDIDVFSYGAPRVGNRAFAEFLTVQTGGTLYRITHTNDIVPRLPPREFGYSHSSPEYWIKSGTLVPVRRCDIVKIEGIDATGGNNQPNIPSITIHLWYFGLIGTC

SEQ ID NO: 15138 - protein, 266 aa, Thermomyces lanuginosus
SQDLFNQFNLFAQYSAAAYCGKNNRAPAGTKITCTANACPEVEKADATILYSFEDSGVGDVTGFLALDNTNKLIVLSFRGSRSIENWIGNLNFELKEINDICSGCRGHAGFTSSWRSVADTLRQKVEDAVREHPDYRVVFAGHSLGGALATVAGADLRGNKYDIDVFSYGAPRVGNRAFAEFLTVQTGGTLYRITHTNDIVPRLPPREFGYSHSSPEYWIKSGTLVPVRRCDIVKIEGIDATGGNNQPNIPSITAHLWYFGLIGTC

SEQ ID NO: 15139 - protein, 266 aa, Thermomyces lanuginosus
SQDLFNQFNLFAQYSAAAYCGKNNRAPAGTKITCTANACPEVEKADATLLYSFEDSGVGDVTGFLALDNTNKLIVLSFRGSRSIENWIGNLNFELKEINDICSGCRGHAGFTSSWRSVADTLRQKVEDAVREHPDYRVVFTGHSLGGALATVAGADLRGNKYDIDVFSYGAPRVGNRAFAEFLTVQTGGTLYRITNTNDIVPRLPPREFGYSHSSPEYWIKSGTLVPVRRCDIVKIEGIDATGGNNQPNIPSITAHLWYFGLIGTC

SEQ ID NO: 15140 - protein, 266 aa, Thermomyces lanuginosus
SQDLFNQFNLFAQYSAAAYCGKNNRAPAGTKITCTANACPEVEKADATVLYSFEDSGVGDVTGFLALDNTNKLIVLSFRGSRSIENWIGNLNFELKEINDICSGCRGHAGFTSSWRSVADTLRQKVEDAVREHPDYRVVFTGHSLGGALATVAGADLRGNKYDIDVFSYGAPRVGNRAFAEFLTVQTGGTLYRITNTNDIVPRLPPREFGYSHSSPEYWIKSGTLVPVRRCDIVKIEGIDATGGNNQPNIPSITAHLWYFGLIGTC

SEQ ID NO: 15141 - protein, 266 aa, Thermomyces lanuginosus
SQDLFNQFNLFAQYSAAAYCGKNNRAPAGTKITCTANACPEVEKADATVLYSFEDSGVGDVTGFLALDNTNKLIVLSFRGSRSIENWIGNLNFELKEINDICSGCRGHAGFTSSWRSVADTLRQKVEDAVREHPDYRVVFTGHSLGGALATVAGADLRGNKYDIDVFSYGAPRVGNRAFAEFLTVQTGGTLYRITHTNDIVPRLPPREFGYSHSSPEYWIKSGTLPPVRRCDIVKIEGIDATGGNNQPNIPSITAHLWYFGLIGTC

SEQ ID NO: 15142 - protein, 266 aa, Thermomyces lanuginosus
SQDLFNQFNLFAQYSAAAYCGKNNRAPAGTKITCTANACPEVEKADATILYSFEDSGVGDVTGFLALDNTNKLIVLSFRGSRSIENWIGNLNFELKEINDICSGCRGHAGFTSSWRSVADTLRQKVEDAVREHPDYRVVFTGHSLGGALATVAGADLRGNKYDIDVFSYGAPRVGNRAFAEFLTVQTGGTLYRITHTNDIVPRLPPREFGYSHSSPEYWIKSGTDVPVRRCDIVKIEGIDATGGNNQPNIPSITAHLWYFGLIGTC

SEQ ID NO: 15143 - protein, 266 aa, Thermomyces lanuginosus
SQDLFNQFNLFAQYSAAAYCGKNNRAPAGTKITCTANACPEVEKADATLLYSFEDSGVGDVTGFLALDNTNKLIVLSFRGSRSIENWIGNLNFELKEINDICSGCRGHAGFTSSWRSVADTLRQKVEDAVREHPDYRVVFTGHSLGGALATVAGADLRGNKYDIDVFSYGAPRVGNRAFAEFLTVQTGGTLYRITHTNDIVPRLPPREFGYSHSSPEYWIKSGTLVPRRRCDIVKIEGIDATGGNNQPNIPSITAHLWYFGLIGTC

SEQ ID NO: 15144 - protein, 266 aa, Thermomyces lanuginosus
SQDLFNQFNLFAQYSAAAYCGKNNRAPAGTKITCTANACPEVEKADATLLYSFEDSGVGDVTGFLALDNTNKLIVLSFRGSRSIENWIGNLNFELKEINDICSGCRGHAGFTSSWRSVADTLRQKVEDAVREHPDYRVVFTGHSLGGALATVAGADLRGNKYDIDVFSYGAPRVGNRAFAEFLTVQTGGTLYRITITNDIVPRLPPREFGYSHSSPEYWIKSGTLVPVRRCDIVKIEGIDATGGNNQPNIPSITAHLWYFGLIGTC

SEQ ID NO: 15145 - protein, 266 aa, Thermomyces lanuginosus
SQDLFNQFNLFAQYSAAAYCGKNNRAPAGTKITCTANACPEVEKADATVLYSFEDSGVGDVTGFLALDNTNKLIVLSFRGSRSIENWIGNLNFELKEINDICSGCRGHAGFTSSWRSVADTLRQKVEDAVREHPDYRVVFTGHSLGGALATVAGADLRGNKYDIDVFSYGAPRVGNRAFAEFLTVQTGGTLYRITHTNDIVPRLPPREFGYSHSSPEYWIKSGTDVPVRRCDIVKIEGIDATGGNNQPNIPSITAHLWYFGLIGTC

SEQ ID NO: 15146 - protein, 266 aa, Thermomyces lanuginosus
SQDLFNQFNLFAQYSAAAYCGKNNRAPAGTKITCTANACPEVEKADATILYSFEDSGVGDVTGFLALDNTNKLIVLSFRGSRSIENWIGNLNFELKEINDICSGCRGHAGFTSSWRSVADTLRQKVEDAVREHPDYRVVFTGHSLGGALATVAGADLRGNKYDIDVFSYGAPRVGNRAFAEFLTVQTGGTLYRITHTNDIVPRLPPREFGYSHSSPEYWIKSGTLVPVRRCDIVKIEGIDATGGNNQPNIPSGTAHLWYFGLIGTC

SEQ ID NO: 15147 - protein, 266 aa, Thermomyces lanuginosus
SQDLFNQFNLFAQYSAAAYCGKNNRAPAGTKITCTANACPEVEKADATLLYSFEDSGVGDVTGFLALDNTNKLIVLSFRGSRSIENWIGNLNFELKEINDICSGCRGHAGFTSSWRSVADTLRQKVEDAVREHPDYRVVFTGHSLGGALATVAGADLRGNKYDIDVFSYGAPRVGNRAFAEFLTVQTGGTLYRITSTNDIVPRLPPREFGYSHSSPEYWIKSGTLVPVRRCDIVKIEGIDATGGNNQPNIPSITAHLWYFGLIGTC

SEQ ID NO: 15148 - protein, 266 aa, Thermomyces lanuginosus
SQDLFNQFNLFAQYSAAAYCGKNNRAPAGTKITCTANACPEVEKADATILYSFEDSGVGDVTGFLALDNTNKLIVLSFRGSRSIENWIGNLNFELKEINDICSGCRGHAGFTSSWRSVADTLRQKVEDAVREHPDYRVVFTGHSLGGALATVAGADLRGNKYDIDVFSYGAPRVGNRAFAEFLTVQTGGTLYRITHTNDIVPRLPPREFGYSHSSPEYWIKSGTLVPVRRCDIVKIEGIDATGGNNQPNIPSITVHLWYFGLIGTC

SEQ ID NO: 15149 - protein, 266 aa, Thermomyces lanuginosus
SQDLFNQFNLFAQYSAAAYCGKNNRAPAGTKITCTANACPEVEKADATILYSFEDSGVGDVTGFLALDNTNKLIVLSFRGSRSIENWIGNLNFELKEINDICSGCRGHAGFTSSWRSVADTLRQKVEDAVREHPDYRVVFTGHSLGGALATVAGADLRGNKYDIDVFSYGAPRVGNRAFAEFLTVQTGGTLYRITYTNDIVPRLPPREFGYSHSSPEYWIKSGTLVPVRRCDIVKIEGIDATGGNNQPNIPSITAHLWYFGLIGTC

SEQ ID NO: 15150 - protein, 266 aa, Thermomyces lanuginosus
SQDLFNQFNLFAQYSAAAYCGKNNRAPAGTKITCTANACPEVEKADATLLYSFEDSGVGDVTGFLALDNTNKLIVLSFRGSRSIENWIGNLNFELKEINDICSGCRGHAGFTSSWRSVADTLRQKVEDAVREHPDYRVVFTGHSLGGALATVAGADLRGNKYDIDVFSYGAPRVGNRAFAEFLTVQTGGTLYRITYTNDIVPRLPPREFGYSHSSPEYWIKSGTLVPVRRCDIVKIEGIDATGGNNQPNIPSITAHLWYFGLIGTC

SEQ ID NO: 15151 - protein, 266 aa, Thermomyces lanuginosus
SQDLFNQFNLFAQYSAAAYCGKNNRAPAGTKITCTANACPEVEKADATLLYSFEDSGVGDVTGFLALDNTNKLIVLSFRGSRSIENWIGNLNFELKEINDICSGCRGHAGFTSSWRSVADTLRQKVEDAVREHPDYRVVFTGHSLGGALATVAGADLRGNKYDIDVFSYGAPRVGNRAFAEFLTVQTGGTLYRITLTNDIVPRLPPREFGYSHSSPEYWIKSGTLVPVRRCDIVKIEGIDATGGNNQPNIPSITAHLWYFGLIGTC

SEQ ID NO: 15152 - protein, 266 aa, Thermomyces lanuginosus
SQDLFNQFNLFAQYSAAAYCGKNNRAPAGTKITCTANACPEVEKADATVLYSFEDSGVGDVTGFLALDNTNKLIVLSFRGSRSIENWIGNLNFELKEINDICSGCRGHAGFTSSWRSVADTLRQKVEDAVREHPDYRVVFTGHSLGGALATVAGADLRGNKYDIDVFSYGAPRVGNRAFAEFLTVQTGGTLYRITHTNDIVPRLPPREFGYSHSSPEYWIKSGTLVPVRRCDIVKIEGIDATGGNNQPNIPSITIHLWYFGLIGTC

SEQ ID NO: 15153 - protein, 266 aa, Thermomyces lanuginosus
SQDLFNQFNLFAQYSAAAYCGKNNRAPAGTKITCTANACPEVEKADATVLYSFEDSGVGDVTGFLALDNTNKLIVLSFRGSRSIENWIGNLNFELKEINDICSGCRGHAGFTSSWRSVADTLRQKVEDAVREHPDYRVVFTGHSLGGALATVAGADLRGNKYDIDVFSYGAPRVGNRAFAEFLTVQTGGTLYRITHTNDIVPRLPPREFGYSHSSPEYWIKPGTLVPVRRCDIVKIEGIDATGGNNQPNIPSITAHLWYFGLIGTC

SEQ ID NO: 15154 - protein, 266 aa, Thermomyces lanuginosus
SQDLFNQFNLFAQYSAAAYCGKNNRAPAGTKITCTANACPEVEKADATILYSFEDSGVGDVTGFLALDNTNKLIVLSFRGSRSIENWIGNLNFELKEINDICSGCRGHAGFTSSWRSVADTLRQKVEDAVREHPDYRVVFTGHSLGGGLATVAGADLRGNKYDIDVFSYGAPRVGNRAFAEFLTVQTGGTLYRITHTNDIVPRLPPREFGYSHSSPEYWIKSGTLVPVRRCDIVKIEGIDATGGNNQPNIPSITAHLWYFGLIGTC

SEQ ID NO: 15155 - protein, 266 aa, Thermomyces lanuginosus
SQDLFNQFNLFAQYSAAAYCGKNNRAPAGTKITCTANACPEVEKADATILYSFEDSGVGDVTGFLALDNTNKLIVLSFRGSRSIENWIGNLNFELKEINDICSGCRGHAGFTSSWRSVADTLRQKVEDAVREHPDYRVVFTGHSLGGALATVAGADLRGNKYDIDVFSYGAPRVGNRAFAEFLTVQTGGTLYRITHTNDIVPRLPPREFGYSHSSPEYWIKPGTLVPVRRCDIVKIEGIDATGGNNQPNIPSITAHLWYFGLIGTC

SEQ ID NO: 15156 - protein, 266 aa, Thermomyces lanuginosus
SQDLFNQFNLFAQYSAAAYCGKNNRAPAGTKITCTANACPEVEKADATILYSFEDSGVGDVTGFLALDNTNKLIVLSFRGSRSIENWIGNLNFELKEINDICSGCRGHAGFTSSWRSVADTLRQKVEDAVREHPDYRVVFTGHSLGGALATVAGADLRGNKYDIDVFSYGAPRVGNRAFAEFLTVQTGGTLYRITHTNDIVPRLPPREFGYSHSSPEYWIKSGTLPPVRRCDIVKIEGIDATGGNNQPNIPSITAHLWYFGLIGTC

SEQ ID NO: 15157 - protein, 266 aa, Thermomyces lanuginosus
SQDLFNQFNLFAQYSAAAYCGKNNRAPAGTKITCTANACPEVEKADATVLYSFEDSGVGDVTGFLALDNTNKLIVLSFRGSRSIENWIGNLNFELKEINDICSGCRGHAGFTSSWRSVADTLRQKVEDAVREHPDYRVVFTGHSLGGALATVAGADLRGNKYDIDVFSYGAPRVGNRAFAEFLTVQTGGTLYRITHTNDIVPRLPPREFGYSHSSPEYWIKSGTLVPVRRCDIVKIEGIDATGGNNQPNIPSGTAHLWYFGLIGTC

SEQ ID NO: 15158 - protein, 266 aa, Thermomyces lanuginosus
SQDLFNQFNLFAQYSAAAYCGKNNRAPAGTKITCTANACPEVEKADATVLYSFEDSGVGDVTGFLALDNTNKLIVLSFRGSRSIENWIGNLNFELKEINDICSGCRGHAGFTSSWRSVADTLRQKVEDAVREHPDYRVVFTGHSLGGALATVAGADLRGNKYDIDVFSYGAPRVGNRAFAEFLTVQTGGTLYRITHTNDIVPRLPPREFGYSHSSPEYWIKSGTLVPRRRCDIVKIEGIDATGGNNQPNIPSITAHLWYFGLIGTC

SEQ ID NO: 15159 - protein, 266 aa, Thermomyces lanuginosus
SQDLFNQFNLFAQYSAAAYCGKNNRAPAGTKITCTANACPEVEKADATVLYSFEDSGVGDVTGFLALDNTNKLIVLSFRGSRSIENWIGNLNFELKEINDICSGCRGHAGFTSSWRSVADTLRQKVEDAVREHPDYRVVFTGHSLGGALATVAGADLRGNKYDIDVFSYGAPRVGNRAFAEFLTVQTGGTLYRITYTNDIVPRLPPREFGYSHSSPEYWIKSGTLVPVRRCDIVKIEGIDATGGNNQPNIPSITAHLWYFGLIGTC

SEQ ID NO: 15160 - protein, 266 aa, Thermomyces lanuginosus
SQDLFNQFNLFAQYSAAAYCGKNNRAPAGTKITCTANACPEVEKADATLLYSFEDSGVGDVTGFLALDNTNKLIVLSFRGSRSIENWIGNLNFELKEINDICSGCRGHAGFTSSWRSVADTLRQKVEDAVREHPDYRVVFTGHSLGGALATVAGADLRGNKYDIDVFSYGAPRVGNRAFAEFLTVQTGGTLYRITHTNDIVPRLPPREFGYSHSSPEYWIKSGTLVPVRRCDIVKIEGIDATGGNNQPNIPSGTAHLWYFGLIGTC

SEQ ID NO: 15161 - protein, 266 aa, Thermomyces lanuginosus
SQDLFNQFNLFAQYSAAAYCGKNNRAPAGTKITCTANACPEVEKADATILYSFEDSGVGDVTGFLALDNTNKLIVLSFRGSRSIENWIGNLNFELKEINDICSGCRGHAGFTSSWRSVADTLRQKVEDAVREHPDYRVVFTGHSLGGALATVAGADLRGNKYDIDVFSYGAPRVGNRAFAEFLTVQTGGTLYRITITNDIVPRLPPREFGYSHSSPEYWIKSGTLVPVRRCDIVKIEGIDATGGNNQPNIPSITAHLWYFGLIGTC

SEQ ID NO: 15162 - protein, 266 aa, Thermomyces lanuginosus
SQDLFNQFNLFAQYSAAAYCGKNNRAPAGTKITCTANACPEVEKADATILYSFEDSGVGDVTGFLALDNTNKLIVLSFRGSRSIENWIGNLNFELKEINDICSGCRGHAGFTSSWRSVADTLRQKVEDAVREHPDYRVVFTGHSLGGALATVAGADLRGNKYDIDVFSYGAPRVGNRAFAEFLTVQTGGTLYRITSTNDIVPRLPPREFGYSHSSPEYWIKSGTLVPVRRCDIVKIEGIDATGGNNQPNIPSITAHLWYFGLIGTC

SEQ ID NO: 15163 - protein, 266 aa, Thermomyces lanuginosus
SQDLFNQFNLFAQYSAAAYCGKNNRAPAGTKITCTANACPEVEKADATLLYSFEDSGVGDVTGFLALDNTNKLIVLSFRGSRSIENWIGNLNFELKEINDICSGCRGHAGFTSSWRSVADTLRQKVEDAVREHPDYRVVFTGHSLGGALATVAGADLRGNKYDIDVFSYGAPRVGNRAFAEFLTVQTGGTLYRITHTNDIVPRLPPREFGYSHSSPEYWIKFGTLVPVRRCDIVKIEGIDATGGNNQPNIPSITAHLWYFGLIGTC

SEQ ID NO: 15164 - protein, 266 aa, Thermomyces lanuginosus
SQDLFNQFNLFAQYSAAAYCGKNNRAPAGTKITCTANACPEVEKADATVLYSFEDSGVGDVTGFLALDNTNKLIVLSFRGSRSIENWIGNLNFELKEINDICSGCRGHAGFTSSWRSVADTLRQKVEDAVREHPDYRVVFTGHSLGGALATVAGADLRGNKYDIDVFSYGAPRVGNRAFAEFLTVQTGGTLYRITITNDIVPRLPPREFGYSHSSPEYWIKSGTLVPVRRCDIVKIEGIDATGGNNQPNIPSITAHLWYFGLIGTC

SEQ ID NO: 15165 - protein, 266 aa, Thermomyces lanuginosus
SQDLFNQFNLFAQYSAAAYCGKNNRAPAGTKITCTANACPEVEKADATVLYSFEDSGVGDVTGFLALDNTNKLIVLSFRGSRSIENWIGNLNFELKEINDICSGCRGHAGFTSSWRSVADTLRQKVEDAVREHPDYRVVFTGHSLGGALATVAGADLRGNKYDIDVFSYGAPRVGNRAFAEFLTVQTGGTLYRITHTNDIVPRLPPREFGYSHSSPEYWIKFGTLVPVRRCDIVKIEGIDATGGNNQPNIPSITAHLWYFGLIGTC

SEQ ID NO: 15166 - protein, 266 aa, Thermomyces lanuginosus
SQDLFNQFNLFAQYSAAAYCGKNNRAPAGTKITCTANACPEVEKADATVLYSFEDSGVGDVTGFLALDNTNKLIVLSFRGSRSIENWIGNLNFELKEINDICSGCRGHAGFTSSWRSVADTLRQKVEDAVREHPDYRVVFTGHSLGGALATVAGADLRGNKYDIDVFSYGAPRVGNRAFAEFLTVQTGGTLYRITLTNDIVPRLPPREFGYSHSSPEYWIKSGTLVPVRRCDIVKIEGIDATGGNNQPNIPSITAHLWYFGLIGTC

SEQ ID NO: 15167 - protein, 266 aa, Thermomyces lanuginosus
SQDLFNQFNLFAQYSAAAYCGKNNRAPAGTKITCTANACPEVEKADATILYSFEDSGVGDVTGFLALDNTNKLIVLSFRGSRSIENWIGNLNFELKEINDICSGCRGHAGFTSSWRSVADTLRQKVEDAVREHPDYRVVFTGHSLGGALATVAGADLRGNKYDIDVFSYGAPRVGNRAFAEFLTVQTGGTLYRITNTNDIVPRLPPREFGYSHSSPEYWIKSGTLVPVRRCDIVKIEGIDATGGNNQPNIPSITAHLWYFGLIGTC

SEQ ID NO: 15168 - protein, 266 aa, Thermomyces lanuginosus
SQDLFNQFNLFAQYSAAAYCGKNNRAPAGTKITCTANACPEVEKADATLLYSFEDSGVGDVTGFLALDNTNKLIVLSFRGSRSIENWIGNLNFELKEINDICSGCRGHAGFTSSWRSVADTLRQKVEDAVREHPDYRVVFAGHSLGGALATVAGADLRGNKYDIDVFSYGAPRVGNRAFAEFLTVQTGGTLYRITHTNDIVPRLPPREFGYSHSSPEYWIKSGTLVPVRRCDIVKIEGIDATGGNNQPNIPSITAHLWYFGLIGTC

SEQ ID NO: 15169 - protein, 266 aa, Thermomyces lanuginosus
SQDLFNQFNLFAQYSAAAYCGKNNRAPAGTKITCTANACPEVEKADATLLYSFEDSGVGDVTGFLALDNTNKLIVLSFRGSRSIENWIGNLNFELKEINDICSGCRGHAGFTSSWRSVADTLRQKVEDAVREHPDYRVVFTGHSLGGALATVAGADLRGNKYDIDVFSYGAPRVGNRAFAEFLTVQTGGTLYRITHTNDIVPRLPPREFGYSHSSPEYWIKPGTLVPVRRCDIVKIEGIDATGGNNQPNIPSITAHLWYFGLIGTC

SEQ ID NO: 15170 - protein, 266 aa, Thermomyces lanuginosus
SQDLFNQFNLFAQYSAAAYCGKNNRAPAGTKITCTANACPEVEKADATILYSFEDSGVGDVTGFLALDNTNKLIVLSFRGSRSIENWIGNLNFELKEINDICSGCRGHAGFTSSWRSVADTLRQKVEDAVREHPDYRVVFTGHSLGGALATVAGADLRGNKYDIDVFSYGAPRVGNRAFAEFLTVQTGGTLYRITHTNDIVPRLPPREFGYSHSSPEYWIKFGTLVPVRRCDIVKIEGIDATGGNNQPNIPSITAHLWYFGLIGTC

SEQ ID NO: 15171 - protein, 269 aa, Thermomyces lanuginosus
EVSQDLFNQFNLFAQYSAAAYCGKNNRAPAGTQITCTGNACPEVEKADATFLYSFEDSGVGDVTGFLALDNTNKLIVLSFRGSRSIENWINNLRFDMKEINDICSGCRGHAGFTSSWRSVADTLRQKVEDAVREHPDYRVVFTGHSLGGALATVAGADLRGNGYDIDVFSYGAPRVGNRAFAEFLTVQTGGTLYRITHTNDIVPRLPPREFGYSHPSPEYWIKSGNGVPVRRRDIVKIEGIDATGGNNQPNIPDITAHLWYFGLIGTCH

SEQ ID NO: 15172 - protein, 268 aa, Thermomyces lanuginosus
EKSQDLFNQFNLFAQYSAAAYCGKNNRAPAGTKITCTANACPEVEKADATILYSFEDSGVGDVTGFLALDNTNKLIVLSFRGSRSIENWIGNLNFELKEINDICSGCRGHAGFTSSWRSVADTLRQKVEDAVREHPDYRVVFTGHSLGGALATVAGADLRGNKYDIDVFSYGAPRVGNRAFAEFLTVQTGGTLYRITNTNDIVPRLPPREFGYSHSSPEYWIKSGTLVPVRRRDIVKIEGIDATGGNNQPNIPSITAHLWYFGLIGTC

SEQ ID NO: 15173 - protein, 268 aa, Thermomyces lanuginosus
EYSQDLFNQFNLFAQYSAAAYCGKNNRAPAGTKITCTANACPEVEKADATLLYSFEDSGVGDVTGFLALDNTNKLIVLSFRGSRSIENWIGNLNFELKEINDICSGCRGHAGFTSSWRSVADTLRQKVEDAVREHPDYRVVFTGHSLGGALATVAGADLRGNKYDIDVFSYGAPRVGNRAFAEFLTVQTGGTLYRITHTNDIVPRLPPREFGYSHSSPEYWIKSGTLVPVRRRDIVKIEGIDATGGNNQPNIPSITVHLWYFGLIGTC

SEQ ID NO: 15174 - protein, 268 aa, Thermomyces lanuginosus
EYSQDLFNQFNLFAQYSAAAYCGKNNRAPAGTKITCTANACPEVEKADATVLYSFEDSGVGDVTGFLALDNTNKLIVLSFRGSRSIENWIGNLNFELKEINDICSGCRGHAGFTSSWRSVADTLRQKVEDAVREHPDYRVVFTGHSLGGALATVAGADLRGNKYDIDVFSYGAPRVGNRAFAEFLTVQTGGTLYRITHTNDIVPRLPPREFGYSHSSPEYWIKPGTLVPVRRRDIVKIEGIDATGGNNQPNIPSITAHLWYFGLIGTC

SEQ ID NO: 15175 - protein, 268 aa, Thermomyces lanuginosus
EKSQDLFNQFNLFAQYSAAAYCGKNNRAPAGTKITCTANACPEVEKADATVLYSFEDSGVGDVTGFLALDNTNKLIVLSFRGSRSIENWIGNLNFELKEINDICSGCRGHAGFTSSWRSVADTLRQKVEDAVREHPDYRVVFTGHSLGGALATVAGADLRGNKYDIDVFSYGAPRVGNRAFAEFLTVQTGGTLYRITHTNDIVPRLPPREFGYSHSSPEYWIKSGTDVPVRRRDIVKIEGIDATGGNNQPNIPSITAHLWYFGLIGTC

SEQ ID NO: 15176 - protein, 268 aa, Thermomyces lanuginosus
EKSQDLFNQFNLFAQYSAAAYCGKNNRAPAGTKITCTANACPEVEKADATVLYSFEDSGVGDVTGFLALDNTNKLIVLSFRGSRSIENWIGNLNFELKEINDICSGCRGHAGFTSSWRSVADTLRQKVEDAVREHPDYRVVFTGHSLGGALATVAGADLRGNKYDIDVFSYGAPRVGNRAFAEFLTVQTGGTLYRITHTNDIVPRLPPREFGYSHSSPEYWIKIGTLVPVRRRDIVKIEGIDATGGNNQPNIPSITAHLWYFGLIGTC

SEQ ID NO: 15177 - protein, 268 aa, Thermomyces lanuginosus
EYSQDLFNQFNLFAQYSAAAYCGKNNRAPAGTKITCTANACPEVEKADATLLYSFEDSGVGDVTGFLALDNTNKLIVLSFRGSRSIENWIGNLNFELKEINDICSGCRGHAGFTSSWRSVADTLRQKVEDAVREHPDYRVVFTGHSLGGALATVAGADLRGNKYDIDVFSYGAPRVGNRAFAEFLTVQTGGTLYRITHTNDIVPRLPPREFGYSHSSPEYWIKSGTLPPVRRRDIVKIEGIDATGGNNQPNIPSITAHLWYFGLIGTC

SEQ ID NO: 15178 - protein, 268 aa, Thermomyces lanuginosus
EKSQDLFNQFNLFAQYSAAAYCGKNNRAPAGTKITCTANACPEVEKADATLLYSFEDSGVGDVTGFLALDNTNKLIVLSFRGSRSIENWIGNLNFELKEINDICSGCRGHAGFTSSWRSVADTLRQKVEDAVREHPDYRVVFTGHSLGGALATVAGADLRGNKYDIDVFSYGAPRVGNRAFAEFLTVQTGGTLYRITHTNDIVPRLPPREFGYSHSSPEYWIKSGTDVPVRRRDIVKIEGIDATGGNNQPNIPSITAHLWYFGLIGTC

SEQ ID NO: 15179 - protein, 268 aa, Thermomyces lanuginosus
EYSQDLFNQFNLFAQYSAAAYCGKNNRAPAGTKITCTANACPEVEKADATILYSFEDSGVGDVTGFLALDNTNKLIVLSFRGSRSIENWIGNLNFELKEINDICSGCRGHAGFTSSWRSVADTLRQKVEDAVREHPDYRVVFTGHSLGGALATVAGADLRGNKYDIDVFSYGAPRVGNRAFAEFLTVQTGGTLYRITHTNDIVPRLPPREFGYSHSSPEYWIKSGTLVPVRRRDIVKIEGIDATGGNNQPNIPSITVHLWYFGLIGTC

SEQ ID NO: 15180 - protein, 268 aa, Thermomyces lanuginosus
EKSQDLFNQFNLFAQYSAAAYCGKNNRAPAGTKITCTANACPEVEKADATILYSFEDSGVGDVTGFLALDNTNKLIVLSFRGSRSIENWIGNLNFELKEINDICSGCRGHAGFTSSWRSVADTLRQKVEDAVREHPDYRVVFTGHSLGGALATVAGADLRGNKYDIDVFSYGAPRVGNRAFAEFLTVQTGGTLYRITSTNDIVPRLPPREFGYSHSSPEYWIKSGTLVPVRRRDIVKIEGIDATGGNNQPNIPSITAHLWYFGLIGTC

SEQ ID NO: 15181 - protein, 268 aa, Thermomyces lanuginosus
EYSQDLFNQFNLFAQYSAAAYCGKNNRAPAGTKITCTANACPEVEKADATVLYSFEDSGVGDVTGFLALDNTNKLIVLSFRGSRSIENWIGNLNFELKEINDICSGCRGHAGFTSSWRSVADTLRQKVEDAVREHPDYRVVFTGHSLGGALATVAGADLRGNKYDIDVFSYGAPRVGNRAFAEFLTVQTGGTLYRITYTNDIVPRLPPREFGYSHSSPEYWIKSGTLVPVRRRDIVKIEGIDATGGNNQPNIPSITAHLWYFGLIGTC

SEQ ID NO: 15182 - protein, 268 aa, Thermomyces lanuginosus
EYSQDLFNQFNLFAQYSAAAYCGKNNRAPAGTKITCTANACPEVEKADATLLYSFEDSGVGDVTGFLALDNTNKLIVLSFRGSRSIENWIGNLNFELKEINDICSGCRGHAGFTSSWRSVADTLRQKVEDAVREHPDYRVVFTGHSLGGALATVAGADLRGNKYDIDVFSYGAPRVGNRAFAEFLTVQTGGTLYRITNTNDIVPRLPPREFGYSHSSPEYWIKSGTLVPVRRRDIVKIEGIDATGGNNQPNIPSITAHLWYFGLIGTC

SEQ ID NO: 15183 - protein, 268 aa, Thermomyces lanuginosus
EYSQDLFNQFNLFAQYSAAAYCGKNNRAPAGTKITCTANACPEVEKADATVLYSFEDSGVGDVTGFLALDNTNKLIVLSFRGSRSIENWIGNLNFELKEINDICSGCRGHAGFTSSWRSVADTLRQKVEDAVREHPDYRVVFTGHSLGGGLATVAGADLRGNKYDIDVFSYGAPRVGNRAFAEFLTVQTGGTLYRITHTNDIVPRLPPREFGYSHSSPEYWIKSGTLVPVRRRDIVKIEGIDATGGNNQPNIPSITAHLWYFGLIGTC

SEQ ID NO: 15184 - protein, 268 aa, Thermomyces lanuginosus
EYSQDLFNQFNLFAQYSAAAYCGKNNRAPAGTKITCTANACPEVEKADATLLYSFEDSGVGDVTGFLALDNTNKLIVLSFRGSRSIENWIGNLNFELKEINDICSGCRGHAGFTSSWRSVADTLRQKVEDAVREHPDYRVVFTGHSLGGALATVAGADLRGNKYDIDVFSYGAPRVGNRAFAEFLTVQTGGTLYRITLTNDIVPRLPPREFGYSHSSPEYWIKSGTLVPVRRRDIVKIEGIDATGGNNQPNIPSITAHLWYFGLIGTC

SEQ ID NO: 15185 - protein, 268 aa, Thermomyces lanuginosus
EVSQDLFNQFNLFAQYSAAAYCGKNNRAPAGTNITCTANACPEVEKADATFLYSFEDSGVGDVTGFLALDNTNKLIVLSFRGTRSPENWILDLNYTLKEINDICSGCRGHAGFTSSWRSVADTLRQKVEDAVREHPDYRVVFTGHSLGGALATVAGADLRGNKYDIDVFSYGAPRVGNRAFAEFLTVQTGGTLYRITHTNDIVPRLPPREFGYSHSSPEYWIKSGTLVPVRRRDIVKIEGIDATGGNNQPNIPSITAHLWYFGLIGTC

SEQ ID NO: 15186 - protein, 268 aa, Thermomyces lanuginosus
EYSQDLFNQFNLFAQYSAAAYCGKNNRAPAGTKITCTANACPEVEKADATLLYSFEDSGVGDVTGFLALDNTNKLIVLSFRGSRSIENWIGNLNFELKEINDICSGCRGHAGFTSSWRSVADTLRQKVEDAVREHPDYRVVFTGHSLGGALATVAGADLRGNKYDIDVFSYGAPRVGNRAFAEFLTVQTGGTLYRITHTNDIVPRLPPREFGYSHSSPEYWIKPGTLVPVRRRDIVKIEGIDATGGNNQPNIPSITAHLWYFGLIGTC

SEQ ID NO: 15187 - protein, 268 aa, Thermomyces lanuginosus
EVSRDLFNQFNLFAQYSAAAYCGKNNAAPAGTQITCTGNACPEVEKADATFLYSFEDSGVGDVTGFLALDNTNKLIVLSFRGSRSIENWITNLSFDLKDINDICSGCRGHAGFTSSWRSVADTLRQKVEDAVREHPDYRVVFTGHSLGGALATVAGADLRGNAYDIDVFSYGAPRVGNRAFAEFLTVQTGGTLYRITHTNDIVPRLPPRVFGYSHPSPEYWIKSGTGVPVRRRDIVKIEGIDATGGNNQPNIPDILAHLWYFGLIGTC

SEQ ID NO: 15188 - protein, 268 aa, Thermomyces lanuginosus
EKSQDLFNQFNLFAQYSAAAYCGKNNRAPAGTKITCTANACPEVEKADATILYSFEDSGVGDVTGFLALDNTNKLIVLSFRGSRSIENWIGNLNFELKEINDICSGCRGHAGFTSSWRSVADTLRQKVEDAVREHPDYRVVFTGHSLGGALATVAGADLRGNKYDIDVFSYGAPRVGNRAFAEFLTVQTGGTLYRITHTNDIVPRLPPREFGYSHSSPEYWIKSGTLPPVRRRDIVKIEGIDATGGNNQPNIPSITAHLWYFGLIGTC

SEQ ID NO: 15189 - protein, 268 aa, Thermomyces lanuginosus
EVSRDLFNQFNLFAQYSAAAYCGKNNAAPAGTQITCTGNACPEVEKADATFLYSFEDSGVGDVTGFLALDNTNKLIVLSFRGSRSIENWITNLSFDLKDINDICSGCRGHAGFTSSWRSVADTLRQKVEDAVREHPDYRVVFTGHSLGGALATVAGADLRGNGYDIDVFSYGAPRIGNRAFAEFLTVQTGGTLYRITHTNDIVPRLPPRVFGYSHPSPEYWIKSGTGVPVRRRDIVKIEGIDATGGNNQPNIPDILAHLWYFGLIGTC

SEQ ID NO: 15190 - protein, 268 aa, Thermomyces lanuginosus
EYSQDLFNQFNLFAQYSAAAYCGKNNRAPAGTKITCTANACPEVEKADATLLYSFEDSGVGDVTGFLALDNTNKLIVLSFRGSRSIENWIGNLNFELKEINDICSGCRGHAGFTSSWRSVADTLRQKVEDAVREHPDYRVVFTGHSLGGALATVAGADLRGNKYDIDVFSYGAPRVGNRAFAEFLTVQTGGTLYRITHTNDIVPRLPPREFGYSHSSPEYWIKFGTLVPVRRRDIVKIEGIDATGGNNQPNIPSITAHLWYFGLIGTC

SEQ ID NO: 15191 - protein, 268 aa, Thermomyces lanuginosus
EKSQDLFNQFNLFAQYSAAAYCGKNNRAPAGTKITCTANACPEVEKADATLLYSFEDSGVGDVTGFLALDNTNKLIVLSFRGSRSIENWIGNLNFELKEINDICSGCRGHAGFTSSWRSVADTLRQKVEDAVREHPDYRVVFTGHSLGGALATVAGADLRGNKYDIDVFSYGAPRVGNRAFAEFLTVQTGGTLYRITNTNDIVPRLPPREFGYSHSSPEYWIKSGTLVPVRRRDIVKIEGIDATGGNNQPNIPSITAHLWYFGLIGTC

SEQ ID NO: 15192 - protein, 268 aa, Thermomyces lanuginosus
EYSQDLFNQFNLFAQYSAAAYCGKNNRAPAGTKITCTANACPEVEKADATILYSFEDSGVGDVTGFLALDNTNKLIVLSFRGSRSIENWIGNLNFELKEINDICSGCRGHAGFTSSWRSVADTLRQKVEDAVREHPDYRVVFTGHSLGGALATVAGADLRGNKYDIDVFSYGAPRVGNRAFAEFLTVQTGGTLYRITLTNDIVPRLPPREFGYSHSSPEYWIKSGTLVPVRRRDIVKIEGIDATGGNNQPNIPSITAHLWYFGLIGTC

SEQ ID NO: 15193 - protein, 268 aa, Thermomyces lanuginosus
EKSQDLFNQFNLFAQYSAAAYCGKNNRAPAGTKITCTANACPEVEKADATILYSFEDSGVGDVTGFLALDNTNKLIVLSFRGSRSIENWIGNLNFELKEINDICSGCRGHAGFTSSWRSVADTLRQKVEDAVREHPDYRVVFTGHSLGGALATVAGADLRGNKYDIDVFSYGAPRVGNRAFAEFLTVQTGGTLYRITHTNDIVPRLPPREFGYSHSSPEYWIKFGTLVPVRRRDIVKIEGIDATGGNNQPNIPSITAHLWYFGLIGTC

SEQ ID NO: 15194 - protein, 268 aa, Thermomyces lanuginosus
EYSQDLFNQFNLFAQYSAAAYCGKNNRAPAGTKITCTANACPEVEKADATLLYSFEDSGVGDVTGFLALDNTNKLIVLSFRGSRSIENWIGNLNFELKEINDICSGCRGHAGFTSSWRSVADTLRQKVEDAVREHPDYRVVFTGHSLGGALATVAGADLRGNKYDIDVFSYGAPRVGNRAFAEFLTVQTGGTLYRITHTNDIVPRLPPREFGYSHSSPEYWIKSGTLVPVRRRDIVKIEGIDATGGNNQPNIPSITIHLWYFGLIGTC

SEQ ID NO: 15195 - protein, 268 aa, Thermomyces lanuginosus
EVSQDLFNQFNLFAQYSAAAYCGKNNRAPAGTKITCTANACPEVEKADATVLYSFEGSGVGDVTGFLALDNTNKLIVLSFRGSRSIENWIGNLNFELIEINDICSGCRGHAGFTSSWRSVADTLRQKVEDAVREHPDYRVVFTGHSLGGALATVAGADLRGNKYDIDVFSYGAPRVGNRAFAEFLTVQTGGTLYRITHTNDIVPRLPPREFGYSHSSPEYWIKSGTLVPVRRRDIVKIEGIDATGGNNQPNIPSITAHLWYFGLIGTC

SEQ ID NO: 15196 - protein, 268 aa, Thermomyces lanuginosus
EKSQDLFNQFNLFAQYSAAAYCGKNNRAPAGTKITCTANACPEVEKADATILYSFEDSGVGDVTGFLALDNTNKLIVLSFRGSRSIENWIGNLNFELKEINDICSGCRGHAGFTSSWRSVADTLRQKVEDAVREHPDYRVVFTGHSLGGALATVAGADLRGNKYDIDVFSYGAPRVGNRAFAEFLTVQTGGTLYRITHTNDIVPRLPPREFGYSHSSPEYWIKPGTLVPVRRRDIVKIEGIDATGGNNQPNIPSITAHLWYFGLIGTC

SEQ ID NO: 15197 - protein, 268 aa, Thermomyces lanuginosus
EKSQDLFNQFNLFAQYSAAAYCGKNNRAPAGTKITCTANACPEVEKADATVLYSFEDSGVGDVTGFLALDNTNKLIVLSFRGSRSIENWIGNLNFELKEINDICSGCRGHAGFTSSWRSVADTLRQKVEDAVREHPDYRVVFTGHSLGGALATVAGADLRGNKYDIDVFSYGAPRVGNRAFAEFLTVQTGGTLYRITHTNDIVPRLPPREFGYSHSSPEYWIKSGTLPPVRRRDIVKIEGIDATGGNNQPNIPSITAHLWYFGLIGTC

SEQ ID NO: 15198 - protein, 268 aa, Thermomyces lanuginosus
EYSQDLFNQFNLFAQYSAAAYCGKNNRAPAGTKITCTANACPEVEKADATILYSFEDSGVGDVTGFLALDNTNKLIVLSFRGSRSIENWIGNLNFELKEINDICSGCRGHAGFTSSWRSVADTLRQKVEDAVREHPDYRVVFTGHSLGGALATVAGADLRGNKYDIDVFSYGAPRVGNRAFAEFLTVQTGGTLYRITHTNDIVPRLPPREFGYSHSSPEYWIKSGTDVPVRRRDIVKIEGIDATGGNNQPNIPSITAHLWYFGLIGTC

SEQ ID NO: 15199 - protein, 268 aa, Thermomyces lanuginosus
EVSQDLFNQFNLFAQYSAAAYCGKNNRAPAGTKITCTANACPEVEKADATVLYSFEDSGVGDVTGFLALDNTNKLIVLSFRGSRSIENWIGNLNFELEEIDDICSGCRGHAGFTSSWRSVADTLRQKVEDAVREHPDYRVVFTGHSLGGALATVAGADLRGNKYDIDVFSYGAPRVGNRAFAEFLTVQTGGTLYRITHTNDIVPRLPPREFGYSHSSPEYWIKSGTLVPVRRRDIVKIEGIDATGGNNQPNIPSITAHLWYFGLIGTC

SEQ ID NO: 15200 - protein, 268 aa, Thermomyces lanuginosus
EVSQDLFNQFNLFAQYSAAAYCGKNNRAPVGTQITCTGNACPEVEKADATFLYSFEDSGVGDVTGFLALDNTNKLIVLSFRGSRSIENWINNLRFDLKEINDICSGCRAHAGFTSSWRSVADTLRQKVEDAVREHPDYRVVFTGHSLGGALATVAGADLRGNGYDIDVFSYGAPRVGNRAFAEFLTVQTDGTLYRITHTNDIVPRLPPREFGYSHPSPEYWIKSGTGVPVRRRDIVKIEGIDATGGNNQPNIPDITAHLWYFGLIGTC

SEQ ID NO: 15201 - protein, 268 aa, Thermomyces lanuginosus
EKSQDLFNQFNLFAQYSAAAYCGKNNRAPAGTKITCTANACPEVEKADATILYSFEDSGVGDVTGFLALDNTNKLIVLSFRGSRSIENWIGNLNFELKEINDICSGCRGHAGFTSSWRSVADTLRQKVEDAVREHPDYRVVFTGHSLGGALATVAGADLRGNKYDIDVFSYGAPRVGNRAFAEFLTVQTGGTLYRITHTNDIVPRLPPREFGYSHSSPEYWIKSGTLVPVRRRDIVKIEGIDATGGNNQPNIPSITVHLWYFGLIGTC

SEQ ID NO: 15202 - protein, 268 aa, Thermomyces lanuginosus
EKSQDLFNQFNLFAQYSAAAYCGKNNRAPAGTKITCTANACPEVEKADATVLYSFEDSGVGDVTGFLALDNTNKLIVLSFRGSRSIENWIGNLNFELKEINDICSGCRGHAGFTSSWRSVADTLRQKVEDAVREHPDYRVVFTGHSLGGALATVAGADLRGNKYDIDVFSYGAPRVGNRAFAEFLTVQTGGTLYRITHTNDIVPRLPPREFGYSHSSPEYWIKSGTLVPVRRRDIVKIEGIDATGGNNQPNIPSITVHLWYFGLIGTC

SEQ ID NO: 15203 - protein, 268 aa, Thermomyces lanuginosus
EYSQDLFNQFNLFAQYSAAAYCGKNNRAPAGTKITCTANACPEVEKADATVLYSFEDSGVGDVTGFLALDNTNKLIVLSFRGSRSIENWIGNLNFELKEINDICSGCRGHAGFTSSWRSVADTLRQKVEDAVREHPDYRVVFTGHSLGGALATVAGADLRGNKYDIDVFSYGAPRVGNRAFAEFLTVQTGGTLYRITHTNDIVPRLPPREFGYSHSSPEYWIKSGTLPPVRRRDIVKIEGIDATGGNNQPNIPSITAHLWYFGLIGTC

SEQ ID NO: 15204 - protein, 268 aa, Thermomyces lanuginosus
EVSQDLFNQFNLFAQYSAAAYCGKNNRAPAGTQITCTGNACPKVEMADATFLYSFEDSGVGDVTGFLALDNTNKLIVLSFRGSRSIENWVNNLNFDLKEINDICSGCRGHAGFISSWRSVADTLRQKVEDAVREHPDYRVVFTGHSLGGALATVAGADLRGNGYDIDVFSYGAPRVGNRAFAEFLTVQTGGTLYRITHTNDIVPRLPPREFGYSHPSPEYWIKSGTGVPVRRRDIVKIEGIDATGGNNQPNIPDITAHLWYFGLIGTC

SEQ ID NO: 15205 - protein, 268 aa, Thermomyces lanuginosus
EVSQDLFNQFNLFAQYSAAAYCGKNNRAPAGTKITCTANACPEVEKADATVLYSFEDSGVGDVTGFLARDNTNKLIVLSFRGSRSIENWIGNLNFELEEINDICSGCRGHAGFTSSWRSVADTLRQKVEDAVREHPDYRVVFTGHSLGGALATVAGADLRGNKYDIDVFSYGAPRVGNRAFAEFLTVQTGGTLYRITHTNDIVPRLPPREFGYSHSSPEYWIKSGTLVPVRRRDIVKIEGIDATGGNNQPNIPSITAHLWYFGLIGTC

SEQ ID NO: 15206 - protein, 268 aa, Thermomyces lanuginosus
EVSQDLFNQFNLFAQYSAAAYCGKNHRAPAGTQITCTGNACPEVEKADATFLYSFEDSGVGDVTGFLALDNTNKLIVLSFRGSRSIENWINNLRFDLKEINDICSGCRGHAGFTSSWRSVADTLRQKVEDAVREHPDYRVVFTGHSLGGALATFAGADLRGNGYDIDVFSYGAPRVGNRAFAEFLTVQTCGTLYRITHTNDIVPRLPPREFGYSHPSPEYWIKSGTGVPVRRRDIVKIEGIDATGGNNQPNIPDITAHLWYFGLIGTC

SEQ ID NO: 15207 - protein, 268 aa, Thermomyces lanuginosus
EKSQDLFNQFNLFAQYSAAAYCGKNNRAPAGTKITCTANACPEVEKADATVLYSFEDSGVGDVTGFLALDNTNKLIVLSFRGSRSIENWIGNLNFELKEINDICSGCRGHAGFTSSWRSVADTLRQKVEDAVREHPDYRVVFTGHSLGGALATVAGADLRGNKYDIDVFSYGAPRVGNRAFAEFLTVQTGGTLYRITHTNDIVPRLPPREFGYSHSSPEYWIKSGTLVPRRRRDIVKIEGIDATGGNNQPNIPSITAHLWYFGLIGTC

SEQ ID NO: 15208 - protein, 268 aa, Thermomyces lanuginosus
EVSQDLFNQFNLFAQYSAAAYCGKNNRAPAGTNITCTANACPEVEKADATFLYSFEDSGVGDVTGFLALDNTNKLIVLSFRGTRSIENWIADLNYLPQEINDICSGCRGHAGFTSSWRSVADTLRQKVEDAVREHPDYRVVFTGHSLGGALATVAGADLRGNKYDIDVFSYGAPRVGNRAFAEFLTVQTGGTLYRITHTNDIVPRLPPREFGYSHSSPEYWIKSGTLVPVRRRDIVKIEGIDATGGNNQPNIPSITAHLWYFGLIGTC

SEQ ID NO: 15209 - protein, 268 aa, Thermomyces lanuginosus
EYSQDLFNQFNLFAQYSAAAYCGKNNRAPAGTKITCTANACPEVEKADATLLYSFEDSGVGDVTGFLALDNTNKLIVLSFRGSRSIENWIGNLNFELKEINDICSGCRGHAGFTSSWRSVADTLRQKVEDAVREHPDYRVVFTGHSLGGALATVAGADLRGNKYDIDVFSYGAPRVGNRAFAEFLTVQTGGTLYRITHTNDIVPRLPPREFGYSHSSPEYWIKSGTLVPVRRRDIVKIEGIDATGGNNQPNIPSGTAHLWYFGLIGTC

SEQ ID NO: 15210 - protein, 268 aa, Thermomyces lanuginosus
EKSQDLFNQFNLFAQYSAAAYCGKNNRAPAGTKITCTANACPEVEKADATVLYSFEDSGVGDVTGFLALDNTNKLIVLSFRGSRSIENWIGNLNFELKEINDICSGCRGHAGFTSSWRSVADTLRQKVEDAVREHPDYRVVFTGHSLGGALATVAGADLRGNKYDIDVFSYGAPRVGNRAFAEFLTVQTGGTLYRITNTNDIVPRLPPREFGYSHSSPEYWIKSGTLVPVRRRDIVKIEGIDATGGNNQPNIPSITAHLWYFGLIGTC

SEQ ID NO: 15211 - protein, 268 aa, Thermomyces lanuginosus
EVSQDLFNQFNLFAQYSAAAYCGKNNRAPAGTNITCTANACPEVEKADATFLYTFEDSGVGDVTGFLALDNTNKLIVLSFRGSRSIENWIGNLNFELTEINDICSGCRGHAGFTSSWRSVADTLRQKVEDAVREHPDYRVVFTGHSLGGALATVAGADLRGNPYDIDVFSYGAPRLGNRAFAEFLTVQTGGTLYRITHTNDIVPRLPPRRFGYSHSSPEYWIKSGTLVPVRRRDIVKIEGIDATGGNNQPNIPSITAHLWYFGLIGTC

SEQ ID NO: 15212 - protein, 268 aa, Thermomyces lanuginosus
EKSQDLFNQFNLFAQYSAAAYCGKNNRAPAGTKITCTANACPEVEKADATLLYSFEDSGVGDVTGFLALDNTNKLIVLSFRGSRSIENWIGNLNFELKEINDICSGCRGHAGFTSSWRSVADTLRQKVEDAVREHPDYRVVFTGHSLGGALATVAGADLRGNKYDIDVFSYGAPRVGNRAFAEFLTVQTGGTLYRITHTNDIVPRLPPREFGYSHSSPEYWIKIGTLVPVRRRDIVKIEGIDATGGNNQPNIPSITAHLWYFGLIGTC

SEQ ID NO: 15213 - protein, 268 aa, Thermomyces lanuginosus
EYSQDLFNQFNLFAQYSAAAYCGKNNRAPAGTKITCTANACPEVEKADATILYSFEDSGVGDVTGFLALDNTNKLIVLSFRGSRSIENWIGNLNFELKEINDICSGCRGHAGFTSSWRSVADTLRQKVEDAVREHPDYRVVFTGHSLGGALATVAGADLRGNKYDIDVFSYGAPRVGNRAFAEFLTVQTGGTLYRITHTNDIVPRLPPREFGYSHSSPEYWIKIGTLVPVRRRDIVKIEGIDATGGNNQPNIPSITAHLWYFGLIGTC

SEQ ID NO: 15214 - protein, 268 aa, Thermomyces lanuginosus
EKSQDLFNQFNLFAQYSAAAYCGKNNRAPAGTKITCTANACPEVEKADATVLYSFEDSGVGDVTGFLALDNTNKLIVLSFRGSRSIENWIGNLNFELKEINDICSGCRGHAGFTSSWRSVADTLRQKVEDAVREHPDYRVVFTGHSLGGALATVAGADLRGNKYDIDVFSYGAPRVGNRAFAEFLTVQTGGTLYRITITNDIVPRLPPREFGYSHSSPEYWIKSGTLVPVRRRDIVKIEGIDATGGNNQPNIPSITAHLWYFGLIGTC

SEQ ID NO: 15215 - protein, 268 aa, Thermomyces lanuginosus
EYSQDLFNQFNLFAQYSAAAYCGKNNRAPAGTKITCTANACPEVEKADATILYSFEDSGVGDVTGFLALDNTNKLIVLSFRGSRSIENWIGNLNFELKEINDICSGCRGHAGFTSSWRSVADTLRQKVEDAVREHPDYRVVFTGHSLGGALATVAGADLRGNKYDIDVFSYGAPRVGNRAFAEFLTVQTGGTLYRITHTNDIVPRLPPREFGYSHSSPEYWIKFGTLVPVRRRDIVKIEGIDATGGNNQPNIPSITAHLWYFGLIGTC

SEQ ID NO: 15216 - protein, 268 aa, Thermomyces lanuginosus
EKSQDLFNQFNLFAQYSAAAYCGKNNRAPAGTKITCTANACPEVEKADATVLYSFEDSGVGDVTGFLALDNTNKLIVLSFRGSRSIENWIGNLNFELKEINDICSGCRGHAGFTSSWRSVADTLRQKVEDAVREHPDYRVVFTGHSLGGALATVAGADLRGNKYDIDVFSYGAPRVGNRAFAEFLTVQTGGTLYRITYTNDIVPRLPPREFGYSHSSPEYWIKSGTLVPVRRRDIVKIEGIDATGGNNQPNIPSITAHLWYFGLIGTC

SEQ ID NO: 15217 - protein, 268 aa, Thermomyces lanuginosus
EVSQDLFNQFNLFAQYSAAAYCGKNNRAPAGTNITCTANACPEVEKADATFLYSFEDSGVGDVTGFLALDNTNKLIVLSFRGTRSIANWIANLDFIPDEINDICSGCRGHAGFTSSWRSVADTLRQKVEDAVREHPDYRVVFTGHSLGGALATVAGADLRGNKYDIDVFSYGAPRVGNRAFAEFLTVQTGGTLYRITHTNDIVPRLPPREFGYSHSSPEYWIKSGTLVPVRRRDIVKIEGIDATGGNNQPNIPSITAHLWYFGLIGTC

SEQ ID NO: 15218 - protein, 268 aa, Thermomyces lanuginosus
EYSQDLFNQFNLFAQYSAAAYCGKNNRAPAGTKITCTANACPEVEKADATFLYSFEDSGVGDVTGFLALDNTNKLIVLSFRGSRSIENWIGNLNFELKEINDICSGCRGHAGFTSSWRSVADTLRQKVEDAVREHPDYRVVFTGHSLGGALATVAGADLRGNKYDIDVFSYGAPRLGNRAFAEFLTVQTGGTLYRITHTNDIVPRLPPREFGYSHSSPEYWIKSGTLVPVRRRDIVKIEGIDATGGNNQPNIPSITAHLYYFGLIGTC

SEQ ID NO: 15219 - protein, 268 aa, Thermomyces lanuginosus
EKSQDLFNQFNLFAQYSAAAYCGKNNRAPAGTKITCTANACPEVEKADATILYSFEDSGVGDVTGFLALDNTNKLIVLSFRGSRSIENWIGNLNFELKEINDICSGCRGHAGFTSSWRSVADTLRQKVEDAVREHPDYRVVFTGHSLGGALATVAGADLRGNKYDIDVFSYGAPRVGNRAFAEFLTVQTGGTLYRITLTNDIVPRLPPREFGYSHSSPEYWIKSGTLVPVRRRDIVKIEGIDATGGNNQPNIPSITAHLWYFGLIGTC

SEQ ID NO: 15220 - protein, 268 aa, Thermomyces lanuginosus
EYSQDLFNQFNLFAQYSAAAYCGKNNRAPAGTKITCTANACPEVEKADATVLYSFEDSGVGDVTGFLALDNTNKLIVLSFRGSRSIENWIGNLNFELKEINDICSGCRGHAGFTSSWRSVADTLRQKVEDAVREHPDYRVVFTGHSLGGALATVAGADLRGNKYDIDVFSYGAPRVGNRAFAEFLTVQTGGTLYRITNTNDIVPRLPPREFGYSHSSPEYWIKSGTLVPVRRRDIVKIEGIDATGGNNQPNIPSITAHLWYFGLIGTC

SEQ ID NO: 15221 - protein, 268 aa, Thermomyces lanuginosus
EVSQDLFNQFNLFAQYSAAAYCGKNNRAPAGTNITCTANACPEVEKADATVLYSFEDSGVGDVTGFLARDNTNKLIVLSFRGSRSIENWIGNLNFELEEINDICSGCRGHAGFTSSWRSVADTLRQKVEDAVREHPDYRVVFTGHSLGGALATVAGADLRGNKYDIDVFSYGAPRVGNRAFAEFLTVQTGGTLYRITHTNDIVPRLPPRKFGYSHSSPEYWIKSGTLVPVRRRDIVKIEGIDATGGNNQPNIPSITAHLWYFGLIGTC

SEQ ID NO: 15222 - protein, 268 aa, Thermomyces lanuginosus
EYSQDLFNQFNLFAQYSAAAYCGKNNRAPAGTKITCTANACPEVEKADATVLYSFEDSGVGDVTGFLALDNTNKLIVLSFRGSRSIENWIGNLNFELKEINDICSGCRGHAGFTSSWRSVADTLRQKVEDAVREHPDYRVVFTGHSLGGALATVAGADLRGNKYDIDVFSYGAPRVGNRAFAEFLTVQTGGTLYRITHTNDIVPRLPPREFGYSHSSPEYWIKSGTLVPVRRRDIVKIEGIDATGGNNQPNIPSGTAHLWYFGLIGTC

SEQ ID NO: 15223 - protein, 268 aa, Thermomyces lanuginosus
EVSQDLFNQFNLFAQYSAAAYCGKNNRAPAGTNITCTANACPEVEKADATFLYSFEDSGVGDVTGFLALDNTNKLIVLSFRGTRSIANWILDLNYLLKEINDICSGCRGHAGFTSSWRSVADTLRQKVEDAVREHPDYRVVFTGHSLGGALATVAGADLRGNKYDIDVFSYGAPRVGNRAFAEFLTVQTGGTLYRITHTNDIVPRLPPREFGYSHSSPEYWIKSGTLVPVRRRDIVKIEGIDATGGNNQPNIPSITAHLWYFGLIGTC

SEQ ID NO: 15224 - protein, 268 aa, Thermomyces lanuginosus
EYSQDLFNQFNLFAQYSAAAYCGKNNRAPAGTKITCTANACPEVEKADATILYSFEDSGVGDVTGFLALDNTNKLIVLSFRGSRSIENWIGNLNFELKEINDICSGCRGHAGFTSSWRSVADTLRQKVEDAVREHPDYRVVFTGHSLGGGLATVAGADLRGNKYDIDVFSYGAPRVGNRAFAEFLTVQTGGTLYRITHTNDIVPRLPPREFGYSHSSPEYWIKSGTLVPVRRRDIVKIEGIDATGGNNQPNIPSITAHLWYFGLIGTC

SEQ ID NO: 15225 - protein, 268 aa, Thermomyces lanuginosus
EYSQDLFNQFNLFAQYSAAAYCGKNNRAPAGTKITCTANACPEVEKADATILYSFEDSGVGDVTGFLALDNTNKLIVLSFRGSRSIENWIGNLNFELKEINDICSGCRGHAGFTSSWRSVADTLRQKVEDAVREHPDYRVVFTGHSLGGALATVAGADLRGNKYDIDVFSYGAPRVGNRAFAEFLTVQTGGTLYRITHTNDIVPRLPPREFGYSHSSPEYWIKSGTLVPRRRRDIVKIEGIDATGGNNQPNIPSITAHLWYFGLIGTC

SEQ ID NO: 15226 - protein, 268 aa, Thermomyces lanuginosus
EVSQDLFNQFNLFAQYSAAAYCGKNNRAPAGTNITCTANACPEVEKADATVLYSFKDSGVGDVTGFLARDNTNKLIVLSFRGSRSIENWIGNLNFELEEINDICSGCRGHAGFTSSWRSVADTLRQKVEDAVREHPDYRVVFTGHSLGGALATVAGADLRGNKYDIDVFSYGAPRVGNRAFAEFLTVQTGGTLYRITHTNDIVPRLPPREFGYSHSSPEYWIKSGTLVPVRRRDIVKIEGIDATGGNNQPNIPSITAHLWYFGLIGTC

SEQ ID NO: 15227 - protein, 268 aa, Thermomyces lanuginosus
EVSQDLFNQFNLFAQYSAAAYCGKNNRAPAGTPITCTANACPEVEKADATVLYSFEGSGVGDVTGFLALDNTNKLIVLSFRGSRSIENWIGNLNFELKEINDICSGCRGHAGFTSSWRSVADTLRQKVEDAVREHPDYRVVFTGHSLGGALATVAGADLRGNKYDIDVFSYGAPRVGNRAFAEFLTVQTGGTLYRITHTNDIVPRLPPRKFGYSHSSPEYWIKSGTLVPVRRRDIVKIEGIDATGGNNQPNIPSITAHLWYFGLIGTC

SEQ ID NO: 15228 - protein, 268 aa, Thermomyces lanuginosus
EKSQDLFNQFNLFAQYSAAAYCGKNNRAPAGTKITCTANACPEVEKADATVLYSFEDSGVGDVTGFLALDNTNKLIVLSFRGSRSIENWIGNLNFELKEINDICSGCRGHAGFTSSWRSVADTLRQKVEDAVREHPDYRVVFTGHSLGGALATVAGADLRGNKYDIDVFSYGAPRVGNRAFAEFLTVQTGGTLYRITSTNDIVPRLPPREFGYSHSSPEYWIKSGTLVPVRRRDIVKIEGIDATGGNNQPNIPSITAHLWYFGLIGTC

SEQ ID NO: 15229 - protein, 268 aa, Thermomyces lanuginosus
EYSQDLFNQFNLFAQYSAAAYCGKNNRAPAGTKITCTANACPEVEKADATLLYSFEDSGVGDVTGFLALDNTNKLIVLSFRGSRSIENWIGNLNFELKEINDICSGCRGHAGFTSSWRSVADTLRQKVEDAVREHPDYRVVFAGHSLGGALATVAGADLRGNKYDIDVFSYGAPRVGNRAFAEFLTVQTGGTLYRITHTNDIVPRLPPREFGYSHSSPEYWIKSGTLVPVRRRDIVKIEGIDATGGNNQPNIPSITAHLWYFGLIGTC

SEQ ID NO: 15230 - protein, 268 aa, Thermomyces lanuginosus
EKSQDLFNQFNLFAQYSAAAYCGKNNRAPAGTKITCTANACPEVEKADATVLYSFEDSGVGDVTGFLALDNTNKLIVLSFRGSRSIENWIGNLNFELKEINDICSGCRGHAGFTSSWRSVADTLRQKVEDAVREHPDYRVVFAGHSLGGALATVAGADLRGNKYDIDVFSYGAPRVGNRAFAEFLTVQTGGTLYRITHTNDIVPRLPPREFGYSHSSPEYWIKSGTLVPVRRRDIVKIEGIDATGGNNQPNIPSITAHLWYFGLIGTC

SEQ ID NO: 15231 - protein, 268 aa, Thermomyces lanuginosus
EYSQDLFNQFNLFAQYSAAAYCGKNNRAPAGTKITCTANACPEVEKADATVLYSFEDSGVGDVTGFLALDNTNKLIVLSFRGSRSIENWIGNLNFELKEINDICSGCRGHAGFTSSWRSVADTLRQKVEDAVREHPDYRVVFTGHSLGGALATVAGADLRGNKYDIDVFSYGAPRVGNRAFAEFLTVQTGGTLYRITHTNDIVPRLPPREFGYSHSSPEYWIKSGTDVPVRRRDIVKIEGIDATGGNNQPNIPSITAHLWYFGLIGTC

SEQ ID NO: 15232 - protein, 268 aa, Thermomyces lanuginosus
EKSQDLFNQFNLFAQYSAAAYCGKNNRAPAGTKITCTANACPEVEKADATVLYSFEDSGVGDVTGFLALDNTNKLIVLSFRGSRSIENWIGNLNFELKEINDICSGCRGHAGFTSSWRSVADTLRQKVEDAVREHPDYRVVFTGHSLGGGLATVAGADLRGNKYDIDVFSYGAPRVGNRAFAEFLTVQTGGTLYRITHTNDIVPRLPPREFGYSHSSPEYWIKSGTLVPVRRRDIVKIEGIDATGGNNQPNIPSITAHLWYFGLIGTC

SEQ ID NO: 15233 - protein, 268 aa, Thermomyces lanuginosus
EVSQDLFNQFNLFAQYSAAAYCGKNNRAPAGTKITCTANACPEVEKADATVLYSFEDSGVGDVTGFLALDNTNKLIVLSFRGSRSIENWIGNLNFELIEINDICSGCRGHAGFTSSWRSVADTLRQKVEDAVREHPDYRVVFTGHSLGGALATVAGADLRGNKYDIDVFSYGAPRVGNRAFAEFLTVQTGGTLYRITHTNDIVPRLPPREFGYSHSSPEFWIKSGTLVPVRRRDIVKIEGIDATGGNNQPNIPSITAHLWYFGLIGTC

SEQ ID NO: 15234 - protein, 268 aa, Thermomyces lanuginosus
EVSQDLFNQFNLFAQYSAAAYCSKNNNAPAGTNITCTGNICPEVEKADATILYSFRDSGVGDVTGFLALDNTNKLIVLSFRGSRSIENWIGNLNFDLIEIDDICSGCRGHDGFTSSWFSVADTLRQKVEDAVREHPDYRVVFTGHSLGGALATVAGADLRGNGYDIDVFSYGAPRVGNRAFAEFLTVQTGGTLYRITHTNDIVPRLPPREFGYSHSSPEYWIKSGTLVPVRRRDIVKIEGIDAEGGNNQPNIPDITAHLWYFGLIGTC

SEQ ID NO: 15235 - protein, 268 aa, Thermomyces lanuginosus
EYSQDLFNQFNLFAQYSAAAYCGKNNRAPAGTKITCTANACPEVEKADATVLYSFEDSGVGDVTGFLALDNTNKLIVLSFRGSRSIENWIGNLNFELKEINDICSGCRGHAGFTSSWRSVADTLRQKVEDAVREHPDYRVVFTGHSLGGALATVAGADLRGNKYDIDVFSYGAPRVGNRAFAEFLTVQTGGTLYRITSTNDIVPRLPPREFGYSHSSPEYWIKSGTLVPVRRRDIVKIEGIDATGGNNQPNIPSITAHLWYFGLIGTC

SEQ ID NO: 15236 - protein, 268 aa, Thermomyces lanuginosus
EVSQDLFNQFNLFAQYSAAAYCGKNNRAPAGTNITCTANACPEVEKADATFLYSFEDSGVGDVTGFLALDNTNKLIVLSFRGTRSPKNWIADLNYDLKEINDICSGCRGHAGFTSSWRSVADTLRQKVEDAVREHPDYRVVFTGHSLGGALATVAGADLRGNKYDIDVFSYGAPRVGNRAFAEFLTVQTGGTLYRITHTNDIVPRLPPREFGYSHSSPEYWIKSGTLVPVRRRDIVKIEGIDATGGNNQPNIPSITAHLWYFGLIGTC

SEQ ID NO: 15237 - protein, 268 aa, Thermomyces lanuginosus
EVSQDLFNQFNLFAQYSAAAYCGKNNRAPAGTNITCTANACPEVEKADATFLYSFEDSGVGDVTGFLALDNTNKLIVLSFRGTRSPENWILDLNFLPKEINDICSGCRGHAGFTSSWRSVADTLRQKVEDAVREHPDYRVVFTGHSLGGALATVAGADLRGNKYDIDVFSYGAPRVGNRAFAEFLTVQTGGTLYRITHTNDIVPRLPPREFGYSHSSPEYWIKSGTLVPVRRRDIVKIEGIDATGGNNQPNIPSITAHLWYFGLIGTC

SEQ ID NO: 15238 - protein, 268 aa, Thermomyces lanuginosus
EVSQDLFNQFNLFAQYSAAAYCGKNNRAPAGTNITCTANACPEVEKADATFLYSFKDSGVGDVTGFLALDNTNKLIVLSFRGTRSIENWIADLDFLLQEINDICSGCRGHAGFTSSWRSVADTLRQKVEDAVREHPDYRVVFTGHSLGGALATVAGADLRGNGYDIDVFSYGAPRVGNRAFAEFLTVQTGGTLYRITHTNDIVPRLPPREFGYSHSSPEYWIKSGTLVPVRRRDIVKIPGIDATGGNNQPNIPSITAHLWYFGLIGTC

SEQ ID NO: 15239 - protein, 268 aa, Thermomyces lanuginosus
EKSQDLFNQFNLFAQYSAAAYCGKNNRAPAGTKITCTANACPEVEKADATILYSFEDSGVGDVTGFLALDNTNKLIVLSFRGSRSIENWIGNLNFELKEINDICSGCRGHAGFTSSWRSVADTLRQKVEDAVREHPDYRVVFTGHSLGGALATVAGADLRGNKYDIDVFSYGAPRVGNRAFAEFLTVQTGGTLYRITHTNDIVPRLPPREFGYSHSSPEYWIKSGTLVPRRRRDIVKIEGIDATGGNNQPNIPSITAHLWYFGLIGTC

SEQ ID NO: 15240 - protein, 268 aa, Thermomyces lanuginosus
EYSQDLFNQFNLFAQYSAAAYCGKNNRAPAGTKITCTANACPEVEKADATILYSFEDSGVGDVTGFLALDNTNKLIVLSFRGSRSIENWIGNLNFELKEINDICSGCRGHAGFTSSWRSVADTLRQKVEDAVREHPDYRVVFTGHSLGGALATVAGADLRGNKYDIDVFSYGAPRVGNRAFAEFLTVQTGGTLYRITYTNDIVPRLPPREFGYSHSSPEYWIKSGTLVPVRRRDIVKIEGIDATGGNNQPNIPSITAHLWYFGLIGTC

SEQ ID NO: 15241 - protein, 268 aa, Thermomyces lanuginosus
EKSQDLFNQFNLFAQYSAAAYCGKNNRAPAGTKITCTANACPEVEKADATILYSFEDSGVGDVTGFLALDNTNKLIVLSFRGSRSIENWIGNLNFELKEINDICSGCRGHAGFTSSWRSVADTLRQKVEDAVREHPDYRVVFTGHSLGGGLATVAGADLRGNKYDIDVFSYGAPRVGNRAFAEFLTVQTGGTLYRITHTNDIVPRLPPREFGYSHSSPEYWIKSGTLVPVRRRDIVKIEGIDATGGNNQPNIPSITAHLWYFGLIGTC

SEQ ID NO: 15242 - protein, 268 aa, Thermomyces lanuginosus
EYSQDLFNQFNLFAQYSAAAYCGKNNRAPAGTKITCTANACPEVEKADATVLYSFEDSGVGDVTGFLALDNTNKLIVLSFRGSRSIENWIGNLNFELKEINDICSGCRGHAGFTSSWRSVADTLRQKVEDAVREHPDYRVVFAGHSLGGALATVAGADLRGNKYDIDVFSYGAPRVGNRAFAEFLTVQTGGTLYRITHTNDIVPRLPPREFGYSHSSPEYWIKSGTLVPVRRRDIVKIEGIDATGGNNQPNIPSITAHLWYFGLIGTC

SEQ ID NO: 15243 - protein, 268 aa, Thermomyces lanuginosus
EVSQDLFNQFNLFAQYSAAAYCGKNNDAPAGTNITCTGNACPEVEKADATFLYSFEDAGSGDVTGFLALDNTNKLIVLSFRGSRSVENWIGNLNFDLKEINDICSGCRGHDGFTSSWRSVADTLRQKVEDAVREHPDYRVVFSGHSLGGGLATVAGADLRGNKYDIDVFSYGAPRVGNRAFAEFLTVQTGGTLYRITHTNDIVPRLPPREFGYSHPSPEYWIKSGTGVPVRRRDIVKIEGIDATGGNNQPNIPDAKAHLWYFGLIGTC

SEQ ID NO: 15244 - protein, 268 aa, Thermomyces lanuginosus
EVSQDLFNQFNLFAQYSAAAYCGKNNRAPAGTNITCTANACPEVEKADATFLYSFEDSGVGDVTGFLALDNTNKLIVLSFRGSRSIANWILDLNFDPEEINDICSGCRGHAGFTSSWRSVADTLRQKVEDAVREHPDYRVVFTGHSLGGALATVAGADLRGNKYDIDVFSYGAPRVGNRAFAEFLTVQTGGTLYRITHTNDIVPRLPPREFGYSHSSPEYWIKSGTLVPVRRRDIVKIEGIDATGGNNQPNIPSITAHLWYFGLIGTC

SEQ ID NO: 15245 - protein, 268 aa, Thermomyces lanuginosus
EKSQDLFNQFNLFAQYSAAAYCGKNNRAPAGTKITCTANACPEVEKADATILYSFEDSGVGDVTGFLALDNTNKLIVLSFRGSRSIENWIGNLNFELKEINDICSGCRGHAGFTSSWRSVADTLRQKVEDAVREHPDYRVVFTGHSLGGALATVAGADLRGNKYDIDVFSYGAPRVGNRAFAEFLTVQTGGTLYRITYTNDIVPRLPPREFGYSHSSPEYWIKSGTLVPVRRRDIVKIEGIDATGGNNQPNIPSITAHLWYFGLIGTC

SEQ ID NO: 15246 - protein, 268 aa, Thermomyces lanuginosus
EVSQDLFNQFNLFAQYSAAAYCGKNNRAPAGTKITCTANACPEVEKADATFLYSFKDSGVGDVTGFLARDNTNKLIVLSFRGSRSIENWIGNLNFELEEINDICSGCRGHAGFTSSWRSVADTLRQKVEDAVREHPDYRVVFTGHSLGGALATVAGADLRGNKYDIDVFSYGAPRVGNRAFAEFLTVQTGGTLYRITHTNDIVPRLPPREFGYSHSSPEYWIKSGTLVPVRRRDIVKIEGIDATGGNNQPNIPSITAHLWYFGLIGTC

SEQ ID NO: 15247 - protein, 268 aa, Thermomyces lanuginosus
EVSQDLFNQFNLFAQYSAAAYCGKNNRAPAGTQITCTGNACPEVEKADTTFLYSFEDSGVGDVTGFLALDNTNKLIVLSFRGSRSIENWINNLRFDLKEINDICSGCRGHAGFTSSWRSVADTLRQKVEDAVREHPDFRVVFTGHSLGGALATVAGADLRGNRYDIDVFSYGAPRVGNRAFAEFLTVQTGGTLYRITHTNDIVPRLPPREFGYSHPSPEYWIKSGTGVPVRRRDIVKIEGIDATGGNNQPNIPDITAHLWYFGLIGTC

SEQ ID NO: 15248 - protein, 268 aa, Thermomyces lanuginosus
EVSQDLFNQFNLFAQYSAAAYCGKNNRAPAGTKITCTANACPEVEKADATVLYSFEDSGVGDVTGFLALDNTNKLIVLSFRGSRSIENWIGNLNFELEEIDDICSGCRGHAGFTSSWRSVADTLRQKVEDAVREHPDYRVVFTGHSLGGALATVAGADLRGNPYDIDVFSYGAPRVGNRAFAEFLTVQTGGTLYRITHTNDIVPRLPPREFGYSHSSPEYWIKSGTLVPVRRLDIVKIEGIDATGGNNQPNIPSITAHLWYFGLIGTC

SEQ ID NO: 15249 - protein, 268 aa, Thermomyces lanuginosus
EKSQDLFNQFNLFAQYSAAAYCGKNNRAPAGTKITCTANACPEVEKADATLLYSFEDSGVGDVTGFLALDNTNKLIVLSFRGSRSIENWIGNLNFELKEINDICSGCRGHAGFTSSWRSVADTLRQKVEDAVREHPDYRVVFTGHSLGGALATVAGADLRGNKYDIDVFSYGAPRVGNRAFAEFLTVQTGGTLYRITHTNDIVPRLPPREFGYSHSSPEYWIKSGTLVPVRRRDIVKIEGIDATGGNNQPNIPSGTAHLWYFGLIGTC

SEQ ID NO: 15250 - protein, 268 aa, Thermomyces lanuginosus
EYSQDLFNQFNLFAQYSAAAYCGKNNRAPAGTKITCTANACPEVEKADATVLYSFEDSGVGDVTGFLALDNTNKLIVLSFRGSRSIENWIGNLNFELKEINDICSGCRGHAGFTSSWRSVADTLRQKVEDAVREHPDYRVVFTGHSLGGALATVAGADLRGNKYDIDVFSYGAPRVGNRAFAEFLTVQTGGTLYRITHTNDIVPRLPPREFGYSHSSPEYWIKSGTLVPVRRRDIVKIEGIDATGGNNQPNIPSITIHLWYFGLIGTC

SEQ ID NO: 15251 - protein, 268 aa, Thermomyces lanuginosus
EVSQDLFNQFNLFAQYSAAAYCGKNNRAPAGTNITCTANACPEVEKADATILYSFEDSGVGDVTGFLARDNTNKLIVLSFRGSRSIENWIGNLNFELEEINDICSGCRGHAGFTSSWRSVADTLRQKVEDAVREHPDYRVVFTGHSLGGALATVAGADLRGNKYDIDVFSYGAPRVGNRAFAEFLTVQTGGTLYRITHTNDIVPRLPPRKFGYSHSSPEYWIKSGTLVPVRRRDIVKIEGIDATGGNNQPNIPSITAHLWYFGLIGTC

SEQ ID NO: 15252 - protein, 268 aa, Thermomyces lanuginosus
EVSQDLFNQFNLFAQYSAAAYCGKNNRAPAGTNITCTANACPEVEKADATFLYSFEDSGVGDVTGFLALDNTNKLIVLSFRGTRSWENWILDLNYELKEINDICSGCRGHAGFTSSWRSVADTLRQKVEDAVREHPDYRVVFTGHSLGGALATVAGADLRGNKYDIDVFSYGAPRVGNRAFAEFLTVQTGGTLYRITHTNDIVPRLPPREFGYSHSSPEYWIKSGTLVPVRRRDIVKIEGIDATGGNNQPNIPSITAHLWYFGLIGTC

SEQ ID NO: 15253 - protein, 268 aa, Thermomyces lanuginosus
EVSQDLFNQFNLFAQYSAAAYCGKNNRAPAGTNITCTANACPEVEKADATLLYSFEDSGVGDVTGFLARDNTNKLIVLSFRGSRSIENWIGNLNFELEEINDICSGCRGHAGFTSSWRSVADTLRQKVEDAVREHPDYRVVFTGHSLGGALATVAGADLRGNKYDIDVFSYGAPRVGNRAFAEFLTVQTGGTLYRITHTNDIVPRLPPRKFGYSHSSPEYWIKSGTLVPVRRRDIVKIEGIDATGGNNQPNIPSITAHLWYFGLIGTC

SEQ ID NO: 15254 - protein, 268 aa, Thermomyces lanuginosus
EKSQDLFNQFNLFAQYSAAAYCGKNNRAPAGTKITCTANACPEVEKADATILYSFEDSGVGDVTGFLALDNTNKLIVLSFRGSRSIENWIGNLNFELKEINDICSGCRGHAGFTSSWRSVADTLRQKVEDAVREHPDYRVVFTGHSLGGALATVAGADLRGNKYDIDVFSYGAPRVGNRAFAEFLTVQTGGTLYRITHTNDIVPRLPPREFGYSHSSPEYWIKSGTLVPVRRRDIVKIEGIDATGGNNQPNIPSGTAHLWYFGLIGTC

SEQ ID NO: 15255 - protein, 268 aa, Thermomyces lanuginosus
EVSQDLFNQFNLFAQYSAAAYCGKNNRAPAGTNITCTANACPEVEKADATVLYSFEDSGVGDVTGFLALDNTNKLIVLSFRGSRSIENWIGNLNFELEEINDICSGCRGHAGFTSSWRSVADTLRQKVEDAVREHPDYRVVFTGHSLGGALATVAGADLRGNKYDIDVFSYGAPRVGNRAFAEFLTVQTGGTLYRITHTNDIVPRLPPRKFGYSHSSPEYWIKSGTLVPVRRRDIVKIEGIDATGGNNQPNIPSGTAHLWYFGLIGTC

SEQ ID NO: 15256 - protein, 268 aa, Thermomyces lanuginosus
EVSQDLFNQFNLFAQYSAAAYCGKNNRAPAGTNITCTANACPEVEKADATFLYSFEDSGVGDVTGFLALDNTNKLIVLSFRGTRSWENWILDLNYTLKEINDICSGCRGHAGFTSSWRSVADTLRQKVEDAVREHPDYRVVFTGHSLGGALATVAGADLRGNKYDIDVFSYGAPRVGNRAFAEFLTVQTGGTLYRITHTNDIVPRLPPREFGYSHSSPEYWIKSGTLVPVRRRDIVKIEGIDATGGNNQPNIPSITAHLWYFGLIGTC

SEQ ID NO: 15257 - protein, 268 aa, Thermomyces lanuginosus
EVSQDLFNQFNLFAQYSAAAYCGRNNDAPAGTNITCTGNACPEVERADATFLYSFEDNGSGDVTGFLALDNTNRLIVLSFRGSRSVENWIGNLNFDLREINDICSGCRGHDGFTSSWRSVADTLRQRVEDAVREHPKYRVVFTGHSLGGALATVAGADLRGNGYDIDVFSYGAPRVGNRAFAEFLTVQTGGTLYRITHTNDIVPRLPPREFGYSHSSPEYWIRSGTLVPVRRRDIVKIEGIDATGGNNQPNIPDIPAHLWYFGLIGTC

SEQ ID NO: 15258 - protein, 268 aa, Thermomyces lanuginosus
EVSQDLFNQFNLFAQYSAAAYCGKNNRAPAGTQITCKGNACPEVEKADATFLYSFEDSGVGDVTGFLALDITNKLIVLSFRGSRSIENWINNLRFDLIEINDICSGCRGHAGFTSSWRSVADTLRQKVEDAVREHPDYRVVFTGHSLGGALATVAGADLRGNGYDIDVFSYGAPRVGNRAFAEFLTVQTGGTLYRITHTNDIVPRLPPREFGYSHPSPEYWIKSGTGVPVRRRDIVKIEGIDATGGNNQPNIPDITAHLWYFGLIGTC

SEQ ID NO: 15259 - protein, 268 aa, Thermomyces lanuginosus
EVSQDLFNQFNLFAQYSAAAYCGKNNRAPAGTQITCTGNACPEVEKADATFLYSFQNSGVGDVTGFLALDNTNKLIVLSFRGSRSIENWINNLRFDLKEINDICSGCRGHAGFTSSWRSVADTLRQKVEDAVREHPDYRVVFTGHSLGGALATVAGADLRGNGYDIDVFSYGAPRVGNRAFAEFLTVQTGGTLYRITHTNDIVPRLPPREFGYSHPSPEYWIKSGTGVPVRRRDIVKIEGIDATGGNNQPNIPSITAHLWYFGLIGTC

SEQ ID NO: 15260 - protein, 268 aa, Thermomyces lanuginosus
EKSQDLFNQFNLFAQYSAAAYCGKNNRAPAGTKITCTANACPEVEKADATLLYSFEDSGVGDVTGFLALDNTNKLIVLSFRGSRSIENWIGNLNFELKEINDICSGCRGHAGFTSSWRSVADTLRQKVEDAVREHPDYRVVFTGHSLGGALATVAGADLRGNKYDIDVFSYGAPRVGNRAFAEFLTVQTGGTLYRITHTNDIVPRLPPREFGYSHSSPEYWIKFGTLVPVRRRDIVKIEGIDATGGNNQPNIPSITAHLWYFGLIGTC

SEQ ID NO: 15261 - protein, 268 aa, Thermomyces lanuginosus
EKSQDLFNQFNLFAQYSAAAYCGKNNRAPAGTKITCTANACPEVEKADATLLYSFEDSGVGDVTGFLALDNTNKLIVLSFRGSRSIENWIGNLNFELKEINDICSGCRGHAGFTSSWRSVADTLRQKVEDAVREHPDYRVVFTGHSLGGALATVAGADLRGNKYDIDVFSYGAPRVGNRAFAEFLTVQTGGTLYRITHTNDIVPRLPPREFGYSHSSPEYWIKSGTLVPVRRRDIVKIEGIDATGGNNQPNIPSITIHLWYFGLIGTC

SEQ ID NO: 15262 - protein, 268 aa, Thermomyces lanuginosus
EYSQDLFNQFNLFAQYSAAAYCGKNNRAPAGTKITCTANACPEVEKADATLLYSFEDSGVGDVTGFLALDNTNKLIVLSFRGSRSIENWIGNLNFELKEINDICSGCRGHAGFTSSWRSVADTLRQKVEDAVREHPDYRVVFTGHSLGGALATVAGADLRGNKYDIDVFSYGAPRVGNRAFAEFLTVQTGGTLYRITSTNDIVPRLPPREFGYSHSSPEYWIKSGTLVPVRRRDIVKIEGIDATGGNNQPNIPSITAHLWYFGLIGTC

SEQ ID NO: 15263 - protein, 268 aa, Thermomyces lanuginosus
EKSQDLFNQFNLFAQYSAAAYCGKNNRAPAGTKITCTANACPEVEKADATVLYSFEDSGVGDVTGFLALDNTNKLIVLSFRGSRSIENWIGNLNFELKEINDICSGCRGHAGFTSSWRSVADTLRQKVEDAVREHPDYRVVFTGHSLGGALATVAGADLRGNKYDIDVFSYGAPRVGNRAFAEFLTVQTGGTLYRITLTNDIVPRLPPREFGYSHSSPEYWIKSGTLVPVRRRDIVKIEGIDATGGNNQPNIPSITAHLWYFGLIGTC

SEQ ID NO: 15264 - protein, 268 aa, Thermomyces lanuginosus
EKSQDLFNQFNLFAQYSAAAYCGKNNRAPAGTKITCTANACPEVEKADATILYSFEDSGVGDVTGFLALDNTNKLIVLSFRGSRSIENWIGNLNFELKEINDICSGCRGHAGFTSSWRSVADTLRQKVEDAVREHPDYRVVFTGHSLGGALATVAGADLRGNKYDIDVFSYGAPRVGNRAFAEFLTVQTGGTLYRITHTNDIVPRLPPREFGYSHSSPEYWIKSGTDVPVRRRDIVKIEGIDATGGNNQPNIPSITAHLWYFGLIGTC

SEQ ID NO: 15265 - protein, 268 aa, Thermomyces lanuginosus
EVSQDLFNQFNLFAQYSAAAYCGKNNRAPAGTNITCTANACPEVEKADATFLYSFEDSGVGDVTGFLALDNTNKLIVLSFRGTRSPENWIADLNFLPQEINDICSGCRGHAGFTSSWRSVADTLRQKVEDAVREHPDYRVVFTGHSLGGALATVAGADLRGNKYDIDVFSYGAPRVGNRAFAEFLTVQTGGTLYRITHTNDIVPRLPPREFGYSHSSPEYWIKSGTLVPVRRRDIVKIEGIDATGGNNQPNIPSITAHLWYFGLIGTC

SEQ ID NO: 15266 - protein, 268 aa, Thermomyces lanuginosus
EYSQDLFNQFNLFAQYSAAAYCGKNNRAPAGTKITCTANACPEVEKADATILYSFEDSGVGDVTGFLALDNTNKLIVLSFRGSRSIENWIGNLNFELKEINDICSGCRGHAGFTSSWRSVADTLRQKVEDAVREHPDYRVVFTGHSLGGALATVAGADLRGNKYDIDVFSYGAPRVGNRAFAEFLTVQTGGTLYRITHTNDIVPRLPPREFGYSHSSPEYWIKSGTLVPVRRRDIVKIEGIDATGGNNQPNIPSITIHLWYFGLIGTC

SEQ ID NO: 15267 - protein, 268 aa, Thermomyces lanuginosus
EYSQDLFNQFNLFAQYSAAAYCGKNNRAPAGTKITCTANACPEVEKADATVLYSFEDSGVGDVTGFLALDNTNKLIVLSFRGSRSIENWIGNLNFELKEINDICSGCRGHAGFTSSWRSVADTLRQKVEDAVREHPDYRVVFTGHSLGGALATVAGADLRGNKYDIDVFSYGAPRVGNRAFAEFLTVQTGGTLYRITITNDIVPRLPPREFGYSHSSPEYWIKSGTLVPVRRRDIVKIEGIDATGGNNQPNIPSITAHLWYFGLIGTC

SEQ ID NO: 15268 - protein, 268 aa, Thermomyces lanuginosus
EKSQDLFNQFNLFAQYSAAAYCGKNNRAPAGTKITCTANACPEVEKADATLLYSFEDSGVGDVTGFLALDNTNKLIVLSFRGSRSIENWIGNLNFELKEINDICSGCRGHAGFTSSWRSVADTLRQKVEDAVREHPDYRVVFTGHSLGGALATVAGADLRGNKYDIDVFSYGAPRVGNRAFAEFLTVQTGGTLYRITHTNDIVPRLPPREFGYSHSSPEYWIKSGTLPPVRRRDIVKIEGIDATGGNNQPNIPSITAHLWYFGLIGTC

SEQ ID NO: 15269 - protein, 268 aa, Thermomyces lanuginosus
EKSQDLFNQFNLFAQYSAAAYCGKNNRAPAGTKITCTANACPEVEKADATLLYSFEDSGVGDVTGFLALDNTNKLIVLSFRGSRSIENWIGNLNFELKEINDICSGCRGHAGFTSSWRSVADTLRQKVEDAVREHPDYRVVFTGHSLGGGLATVAGADLRGNKYDIDVFSYGAPRVGNRAFAEFLTVQTGGTLYRITHTNDIVPRLPPREFGYSHSSPEYWIKSGTLVPVRRRDIVKIEGIDATGGNNQPNIPSITAHLWYFGLIGTC

SEQ ID NO: 15270 - protein, 268 aa, Thermomyces lanuginosus
EYSQDLFNQFNLFAQYSAAAYCGKNNRAPAGTKITCTANACPEVEKADATVLYSFEDSGVGDVTGFLALDNTNKLIVLSFRGSRSIENWIGNLNFELKEINDICSGCRGHAGFTSSWRSVADTLRQKVEDAVREHPDYRVVFTGHSLGGALATVAGADLRGNKYDIDVFSYGAPRVGNRAFAEFLTVQTGGTLYRITHTNDIVPRLPPREFGYSHSSPEYWIKSGTLVPVRRRDIVKIEGIDATGGNNQPNIPSITVHLWYFGLIGTC

SEQ ID NO: 15271 - protein, 268 aa, Thermomyces lanuginosus
EVSQDLFNQFNLFAQYSAAAYCGKNNRAPAGTNITCTANACPEVEKADATFLYSFEDSGVGDVTGFLALDNTNKLIVLSFRGTRSIENWILDLNFELQEINDICSGCRGHAGFTSSWRSVADTLRQKVEDAVREHHDYRVVFTGHSLGGALATVAGADLRGNKYDIDVFSYGAPRVGNRAFAEFLTVQTGGTLYRITHTNDIVPRLPPREFGYSHSSPEYWIKSGTLVPVRRRDIVKIEGIDATGGNNQPNIPSITAHLWYFGLIGTC

SEQ ID NO: 15272 - protein, 268 aa, Thermomyces lanuginosus
EKSQDLFNQFNLFAQYSAAAYCGKNNRAPAGTKITCTANACPEVEKADATLLYSFEDSGVGDVTGFLALDNTNKLIVLSFRGSRSIENWIGNLNFELKEINDICSGCRGHAGFTSSWRSVADTLRQKVEDAVREHPDYRVVFTGHSLGGALATVAGADLRGNKYDIDVFSYGAPRVGNRAFAEFLTVQTGGTLYRITLTNDIVPRLPPREFGYSHSSPEYWIKSGTLVPVRRRDIVKIEGIDATGGNNQPNIPSITAHLWYFGLIGTC

SEQ ID NO: 15273 - protein, 268 aa, Thermomyces lanuginosus
EVSQDLFNQFNLFAQYSAAAYCGKNNRAPAGTNITCTANACPEVEKADATVLYSFKDSGVGDVTGFLALDNTNKLIVLSFRGSRSIKNWIGNLNFELEEINDICSGCRGHAGFTSSWRSVADTLRQKVEDAVREHPDYRVVFTGHSLGGALATVAGADLRGNKYDIDVFSYGAPRVGNRAFAEFLTVQTGGTLYRITHTNDIVPRLPPREFGYSHSSPEYWIKSGTLVPVRRRDIVKIEGIDATGGNNQPNIPSITAHLWYFGLIGTC

SEQ ID NO: 15274 - protein, 268 aa, Thermomyces lanuginosus
EYSQDLFNQFNLFAQYSAAAYCGKNNRAPAGTKITCTANACPEVEKADATLLYSFEDSGVGDVTGFLALDNTNKLIVLSFRGSRSIENWIGNLNFELKEINDICSGCRGHAGFTSSWRSVADTLRQKVEDAVREHPDYRVVFTGHSLGGALATVAGADLRGNKYDIDVFSYGAPRVGNRAFAEFLTVQTGGTLYRITHTNDIVPRLPPREFGYSHSSPEYWIKSGTDVPVRRRDIVKIEGIDATGGNNQPNIPSITAHLWYFGLIGTC

SEQ ID NO: 15275 - protein, 268 aa, Thermomyces lanuginosus
EYSQDLFNQFNLFAQYSAAAYCGKNNRAPAGTKITCTANACPEVEKADATLLYSFEDSGVGDVTGFLALDNTNKLIVLSFRGSRSIENWIGNLNFELKEINDICSGCRGHAGFTSSWRSVADTLRQKVEDAVREHPDYRVVFTGHSLGGALATVAGADLRGNKYDIDVFSYGAPRVGNRAFAEFLTVQTGGTLYRITHTNDIVPRLPPREFGYSHSSPEYWIKIGTLVPVRRRDIVKIEGIDATGGNNQPNIPSITAHLWYFGLIGTC

SEQ ID NO: 15276 - protein, 268 aa, Thermomyces lanuginosus
EKSQDLFNQFNLFAQYSAAAYCGKNNRAPAGTKITCTANACPEVEKADATLLYSFEDSGVGDVTGFLALDNTNKLIVLSFRGSRSIENWIGNLNFELKEINDICSGCRGHAGFTSSWRSVADTLRQKVEDAVREHPDYRVVFTGHSLGGALATVAGADLRGNKYDIDVFSYGAPRVGNRAFAEFLTVQTGGTLYRITHTNDIVPRLPPREFGYSHSSPEYWIKSGTLVPRRRRDIVKIEGIDATGGNNQPNIPSITAHLWYFGLIGTC

SEQ ID NO: 15277 - protein, 268 aa, Thermomyces lanuginosus
EVSQDLFNQFNLFAQYSAAAYCGKNNRAPAGTNITCTANACPEVEKADATVLYSFEDSGVGDVTGFLARDNTNKLIVLSFRGSRSIENWIGNLNFDLEEINDICSGCRGHAGFTSSWRSVADTLRQKVEDAVREHPDYRVVFTGHSLGGALATVAGADLRGNKYDIDVFSYGAPRVGNRAFAEFLTVQTGGTLYRITHTNDIVPRLPPRKFGYSHSSPEYWIKSGTLVPVRRRDIVKIEGIDATGGNNQPNIPSITAHLWYFGLIGTC

SEQ ID NO: 15278 - protein, 268 aa, Thermomyces lanuginosus
EYSQDLFNQFNLFAQYSAAAYCGKNNRAPAGTKITCTANACPEVEKADATVLYSFEDSGVGDVTGFLALDNTNKLIVLSFRGSRSIENWIGNLNFELKEINDICSGCRGHAGFTSSWRSVADTLRQKVEDAVREHPDYRVVFTGHSLGGALATVAGADLRGNKYDIDVFSYGAPRVGNRAFAEFLTVQTGGTLYRITHTNDIVPRLPPREFGYSHSSPEYWIKIGTLVPVRRRDIVKIEGIDATGGNNQPNIPSITAHLWYFGLIGTC

SEQ ID NO: 15279 - protein, 268 aa, Thermomyces lanuginosus
EVSQDLFNQFNLFAQYSAAAYCGKNNRAPAGTKITCTANACPEVEKADATVLYSFEDSGVGDVTGFLALDNTNKLIVLSFRGSRSIENWIGNLNFELEEIDDICSGCRGHAGFTSSWRSVADTLRQKVEDAVREHPDYRVVFTGHSLGGALATVAGADLRGNPYDIDVFSYGAPRVGNRAFAEFLTVQTGGTLYRITHTNDIVPRLPPREFGYSHSSPEYWIKSGTLVPVRRRDIVKIEGIDATGGNNQPNIPSITAHLWYFGLIGTC

SEQ ID NO: 15280 - protein, 268 aa, Thermomyces lanuginosus
EYSQDLFNQFNLFAQYSAAAYCGKNNRAPAGTKITCTANACPEVEKADATILYSFEDSGVGDVTGFLALDNTNKLIVLSFRGSRSIENWIGNLNFELKEINDICSGCRGHAGFTSSWRSVADTLRQKVEDAVREHPDYRVVFAGHSLGGALATVAGADLRGNKYDIDVFSYGAPRVGNRAFAEFLTVQTGGTLYRITHTNDIVPRLPPREFGYSHSSPEYWIKSGTLVPVRRRDIVKIEGIDATGGNNQPNIPSITAHLWYFGLIGTC

SEQ ID NO: 15281 - protein, 268 aa, Thermomyces lanuginosus
EVSQDLFNQFNLFAQYSAAAYCGKNNRAPAGTNITCTANACPEVEKADATFLYTFEDSGVGDVTGFLALDNTNKLIVLSFRGSRSIENWIGNLNFELVEIDDICSGCRGHAGFTSSWRSVADTLRQKVEDAVREHPDYRVVFTGHSLGGALATVAGADLRGNPYDIDVFSYGAPRLGNRAFAEFLTVQTGGTLYRITHTNDIVPRLPPREFGYSHSSPEYWIKSGTLVPVRRRDIVKIEGIDATGGNNQPNIPSITAHLWYFGLIGTC

SEQ ID NO: 15282 - protein, 268 aa, Thermomyces lanuginosus
EVSQDLFNQFNLFAQYSAAAYCGKNNRAPAGTNITCTANACPEVEKADATFLYTFEDSGVGDVTGFLALDNTNKLIVLSFRGSRSIENWIGNLNFELTEINDICSGCRGHAGFTSSWRSVADTLRQKVEDAVREHPDYRVVFTGHSLGGALATVAGADLRGNPYDIDVFSYGAPRLGNRAFAEFLTVQTGGTLYRITHTNDIVPRLPPREFGYSHSSPEYWIKSGTLVPVRRRDIVKIEGIDATGGNNQPNIPSITAHLYYFGLIGTC

SEQ ID NO: 15283 - protein, 268 aa, Thermomyces lanuginosus
EVSQDLFNQFNLFAQYSAAAYCGKNNRAPAGTNITCTANACPEVEKADATVLYSFEGSGVGDVTGFLALDNTNKLIVLSFRGSRSIENWIGNLNFELKEIDDICSGCRGHAGFTSSWRSVADTLRQKVEDAVREHPDYRVVFTGHSLGGALATVAGADLRGNKYDIDVFSYGAPRVGNRAFAEFLTVQTGGTLYRITHTNDIVPRLPPRKFGYSHSSPEYWIKSGTLVPVRRRDIVKIEGIDATGGNNQPNIPSITAHLWYFGLIGTC

SEQ ID NO: 15284 - protein, 268 aa, Thermomyces lanuginosus
EKSQDLFNQFNLFAQYSAAAYCGKNNRAPAGTKITCTANACPEVEKADATILYSFEDSGVGDVTGFLALDNTNKLIVLSFRGSRSIENWIGNLNFELKEINDICSGCRGHAGFTSSWRSVADTLRQKVEDAVREHPDYRVVFTGHSLGGALATVAGADLRGNKYDIDVFSYGAPRVGNRAFAEFLTVQTGGTLYRITHTNDIVPRLPPREFGYSHSSPEYWIKIGTLVPVRRRDIVKIEGIDATGGNNQPNIPSITAHLWYFGLIGTC

SEQ ID NO: 15285 - protein, 268 aa, Thermomyces lanuginosus
EVSQDLFNQFNLFAQYSAAAYCGKNNRAPAGTKITCTANACPEVEKADATVLYTFEDSGVGDVTGFLALDNTNKLIVLSFRGSRSIENWIGNLNFELIEINDICSGCRGHAGFTSSWRSVADTLRQKVEDAVREHPDYRVVFTGHSLGGALATVAGADLRGNKYDIDVFSYGAPRVGNRAFAEFLTVQTGGTLYRITHTNDIVPRLPPREFGYSHSSPEYWIKSGTLVPVRRRDIVKIEGIDATGGNNQPNIPSITAHLWYFGLIGTC

SEQ ID NO: 15286 - protein, 268 aa, Thermomyces lanuginosus
EYSQDLFNQFNLFAQYSAAAYCGKNNRAPAGTKITCTANACPEVEKADATVLYSFEDSGVGDVTGFLALDNTNKLIVLSFRGSRSIENWIGNLNFELKEINDICSGCRGHAGFTSSWRSVADTLRQKVEDAVREHPDYRVVFTGHSLGGALATVAGADLRGNKYDIDVFSYGAPRVGNRAFAEFLTVQTGGTLYRITHTNDIVPRLPPREFGYSHSSPEYWIKFGTLVPVRRRDIVKIEGIDATGGNNQPNIPSITAHLWYFGLIGTC

SEQ ID NO: 15287 - protein, 268 aa, Thermomyces lanuginosus
EKSQDLFNQFNLFAQYSAAAYCGKNNRAPAGTKITCTANACPEVEKADATLLYSFEDSGVGDVTGFLALDNTNKLIVLSFRGSRSIENWIGNLNFELKEINDICSGCRGHAGFTSSWRSVADTLRQKVEDAVREHPDYRVVFTGHSLGGALATVAGADLRGNKYDIDVFSYGAPRVGNRAFAEFLTVQTGGTLYRITHTNDIVPRLPPREFGYSHSSPEYWIKSGTLVPVRRRDIVKIEGIDATGGNNQPNIPSITVHLWYFGLIGTC

SEQ ID NO: 15288 - protein, 268 aa, Thermomyces lanuginosus
EKSQDLFNQFNLFAQYSAAAYCGKNNRAPAGTKITCTANACPEVEKADATVLYSFEDSGVGDVTGFLALDNTNKLIVLSFRGSRSIENWIGNLNFELKEINDICSGCRGHAGFTSSWRSVADTLRQKVEDAVREHPDYRVVFTGHSLGGALATVAGADLRGNKYDIDVFSYGAPRVGNRAFAEFLTVQTGGTLYRITHTNDIVPRLPPREFGYSHSSPEYWIKSGTLVPVRRRDIVKIEGIDATGGNNQPNIPSGTAHLWYFGLIGTC

SEQ ID NO: 15289 - protein, 268 aa, Thermomyces lanuginosus
EVSPDLFNQFNLFAQYSAAAYCGKNNRAPAGTQITCTGNACPEVEKADATFLYSFEDSGVGDVTGFLALDNTNKLIVLSFRGSRSIENWINNLRFDLKEINDICSGCRGHAGFTSSWRSVADTLRQKVEDAVREHPDYRVVFTGHSLGGALATVAGADLRGNGYDIDVFSYGAPRVGNRAFAEFLTVQTGGTLYRITHTNDIVPIFPPREFGYSHPSPEYWIKSGTGVPVRRRDIVKIEGIDATGGNNQPNIPDITAHLWYFGLIGTC

SEQ ID NO: 15290 - protein, 268 aa, Thermomyces lanuginosus
EVSQDLFNQFNLFAQYSAAAYCGKNNRAPAGTNITCTANACPEVEKADATVLYSFEDSGVGDVTGFLARDNTNKLIVLSFRGSRSIKNWIGNLNFELEEINDICSGCRGHAGFTSSWRSVADTLRQKVEDAVREHPDYRVVFTGHSLGGALATVAGADLRGNKYDIDVFSYGAPRVGNRAFAEFLTVQTGGTLYRITHTNDIVPRLPPREFGYSHSSPEYWIKSGTLVPVRRRDIVKIEGIDATGGNNQPNIPSITAHLWYFGLIGTC

SEQ ID NO: 15291 - protein, 268 aa, Thermomyces lanuginosus
EVSQDLFNQFNLFAQYSAAAYCGKNNRAPAGTNITCTANACPEVEKADATFLYTFEDSGVGDVTGFLALDNTNKLIVLSFRGSRSIENWIGNLNFELTEIDDICSGCRGHAGFTSSWRSVADTLRQKVEDAVREHPDYRVVFTGHSLGGALATVAGADLRGNPYDIDVFSYGAPRLGNRAFAEFLTVQTGGTLYRITHTNDIVPRLPPREFGYSHSSPEYWIKSGTLVPVRRRDIVKIEGIDATGGNNQPNIPSITAHLWYFGLIGTC

SEQ ID NO: 15292 - protein, 268 aa, Thermomyces lanuginosus
EYSQDLFNQFNLFAQYSAAAYCGKNNRAPAGTKITCTANACPEVEKADATILYSFEDSGVGDVTGFLALDNTNKLIVLSFRGSRSIENWIGNLNFELKEINDICSGCRGHAGFTSSWRSVADTLRQKVEDAVREHPDYRVVFTGHSLGGALATVAGADLRGNKYDIDVFSYGAPRVGNRAFAEFLTVQTGGTLYRITHTNDIVPRLPPREFGYSHSSPEYWIKSGTLPPVRRRDIVKIEGIDATGGNNQPNIPSITAHLWYFGLIGTC

SEQ ID NO: 15293 - protein, 268 aa, Thermomyces lanuginosus
EVSQDLFNQFNLFAQYSAAAYCGKNNDAPAGTKITCTGNACPEVEKADATILYSFEDSGVGDVTGFLALDNTNKLIVLSFRGSRSIENWIGNLNFDLKEINDICSGCRGHDGFTSSWRSVADTLRQKVEDAVREHPDYRVVFTGHSLGGALATVAGADLRGDNYSIDVFSYGAPRVGNRAFAEFLTVQTGGTLYRITNTNDCVPRLPPRQFGYSHSSPEYWIKSGTLPPVRRRDIVKIEGIDATGGNNQPNICDIPAHLWYFGLIGTC

SEQ ID NO: 15294 - protein, 268 aa, Thermomyces lanuginosus
EKSQDLFNQFNLFAQYSAAAYCGKNNRAPAGTKITCTANACPEVEKADATLLYSFEDSGVGDVTGFLALDNTNKLIVLSFRGSRSIENWIGNLNFELKEINDICSGCRGHAGFTSSWRSVADTLRQKVEDAVREHPDYRVVFTGHSLGGALATVAGADLRGNKYDIDVFSYGAPRVGNRAFAEFLTVQTGGTLYRITYTNDIVPRLPPREFGYSHSSPEYWIKSGTLVPVRRRDIVKIEGIDATGGNNQPNIPSITAHLWYFGLIGTC

SEQ ID NO: 15295 - protein, 268 aa, Thermomyces lanuginosus
EYSQDLFNQFNLFAQYSAAAYCGKNNRAPAGTKITCTANACPEVEKADATILYSFEDSGVGDVTGFLALDNTNKLIVLSFRGSRSIENWIGNLNFELKEINDICSGCRGHAGFTSSWRSVADTLRQKVEDAVREHPDYRVVFTGHSLGGALATVAGADLRGNKYDIDVFSYGAPRVGNRAFAEFLTVQTGGTLYRITHTNDIVPRLPPREFGYSHSSPEYWIKSGTLVPVRRRDIVKIEGIDATGGNNQPNIPSGTAHLWYFGLIGTC

SEQ ID NO: 15296 - protein, 268 aa, Thermomyces lanuginosus
EYSQDLFNQFNLFAQYSAAAYCGKNNRAPAGTKITCTANACPEVEKADATILYSFEDSGVGDVTGFLALDNTNKLIVLSFRGSRSIENWIGNLNFELKEINDICSGCRGHAGFTSSWRSVADTLRQKVEDAVREHPDYRVVFTGHSLGGALATVAGADLRGNKYDIDVFSYGAPRVGNRAFAEFLTVQTGGTLYRITITNDIVPRLPPREFGYSHSSPEYWIKSGTLVPVRRRDIVKIEGIDATGGNNQPNIPSITAHLWYFGLIGTC

SEQ ID NO: 15297 - protein, 268 aa, Thermomyces lanuginosus
EVSQDLFNQFNLFAQYSAAAYCGKNNRAPAGTNITCTANACPEVEKADATFLYSFEDSGVGDVTGFLALDNTNKLIVLSFRGSRSPTNWIADLNFLPQEINDICSGCRGHAGFTSSWRSVADTLRQKVEDAVREHPDYRVVFTGHSLGGALATVAGADLRGNKYDIDVFSYGAPRVGNRAFAEFLTVQTGGTLYRITHTNDIVPRLPPREFGYSHSSPEYWIKSGTLVPVRRRDIVKIEGIDATGGNNQPNIPSITAHLWYFGLIGTC

SEQ ID NO: 15298 - protein, 268 aa, Thermomyces lanuginosus
EVSQDLFNQFNLFAQYSKAAYCQKNNSAEAGTNITCTGNACPEVFKADVTFLYSFEDMGVGDVTGFLALDNTSKQIVLSFRGSRSIENWIGNLNFDLKEINDICSGCKGHDGFTSSWRSVADTLRQKVEDAVREHPDYRVVFTGHSLGGALATVAGADLRGNGYDIDVFSYGAPRVGNRAFAEFLTTQDGGTLYRITHTNDIVPRLPPREFGYSHSSPEYWIKSGTLVPVTRNDIVKIEGIDATGGNNQPNIPDIPAHLWYFGLIGTC

SEQ ID NO: 15299 - protein, 268 aa, Thermomyces lanuginosus
EKSQDLFNQFNLFAQYSAAAYCGKNNRAPAGTKITCTANACPEVEKADATVLYSFEDSGVGDVTGFLALDNTNKLIVLSFRGSRSIENWIGNLNFELKEINDICSGCRGHAGFTSSWRSVADTLRQKVEDAVREHPDYRVVFTGHSLGGALATVAGADLRGNKYDIDVFSYGAPRVGNRAFAEFLTVQTGGTLYRITHTNDIVPRLPPREFGYSHSSPEYWIKSGTLVPVRRRDIVKIEGIDATGGNNQPNIPSITIHLWYFGLIGTC

SEQ ID NO: 15300 - protein, 268 aa, Thermomyces lanuginosus
EYSQDLFNQFNLFAQYSAAAYCGKNNRAPAGTKITCTANACPEVEKADATVLYSFEDSGVGDVTGFLALDNTNKLIVLSFRGSRSIENWIGNLNFELKEINDICSGCRGHAGFTSSWRSVADTLRQKVEDAVREHPDYRVVFTGHSLGGALATVAGADLRGNKYDIDVFSYGAPRVGNRAFAEFLTVQTGGTLYRITHTNDIVPRLPPREFGYSHSSPEYWIKSGTLVPRRRRDIVKIEGIDATGGNNQPNIPSITAHLWYFGLIGTC

SEQ ID NO: 15301 - protein, 268 aa, Thermomyces lanuginosus
EVSQDLFNQFNLFAQYSAAAYCGKNNRAPAGTKITCTANACPEVEKADATVLYSFEDSGVGDVTGFLALDNTNKLIVLSFRGSRSIENWIGNLNFELEEINDICSGCRGHAGFTSSWRSVADTLRQKVEDAVREHPDYRVVFTGHSLGGALATVAGADLRGNKYDIDVFSYGAPRVGNRAFAEFLTVQTGGTLYRITHTNDIVPRLPPRKFGYSHSSPEYWIKSGTLVPVRRRDIVKIEGIDATGGNNQPNIPSITAHLWYFGLIGTC

SEQ ID NO: 15302 - protein, 268 aa, Thermomyces lanuginosus
EVSQDLFNQFNLFAQYSAAAYCGKNNRAPAGTNITCTANACPEVEKADATFLYSFEDSGVGDVTGFLALDNTNKLIVLSFRGTRSITNWIADLNYLLQEINDICSGCRGHAGFTSSWRSVADTLRQKVEDAVREHPDYRVVFTGHSLGGALATVAGADLRGNKYDIDVFSYGAPRVGNRAFAEFLTVQTGGTLYRITHTNDIVPRLPPREFGYSHSSPEYWIKSGTLVPVRRRDIVKIEGIDATGGNNQPNIPSITAHLWYFGLIGTC

SEQ ID NO: 15303 - protein, 268 aa, Thermomyces lanuginosus
EKSQDLFNQFNLFAQYSAAAYCGKNNRAPAGTKITCTANACPEVEKADATLLYSFEDSGVGDVTGFLALDNTNKLIVLSFRGSRSIENWIGNLNFELKEINDICSGCRGHAGFTSSWRSVADTLRQKVEDAVREHPDYRVVFTGHSLGGALATVAGADLRGNKYDIDVFSYGAPRVGNRAFAEFLTVQTGGTLYRITITNDIVPRLPPREFGYSHSSPEYWIKSGTLVPVRRRDIVKIEGIDATGGNNQPNIPSITAHLWYFGLIGTC

SEQ ID NO: 15304 - protein, 268 aa, Thermomyces lanuginosus
EKSQDLFNQFNLFAQYSAAAYCGKNNRAPAGTKITCTANACPEVEKADATILYSFEDSGVGDVTGFLALDNTNKLIVLSFRGSRSIENWIGNLNFELKEINDICSGCRGHAGFTSSWRSVADTLRQKVEDAVREHPDYRVVFAGHSLGGALATVAGADLRGNKYDIDVFSYGAPRVGNRAFAEFLTVQTGGTLYRITHTNDIVPRLPPREFGYSHSSPEYWIKSGTLVPVRRRDIVKIEGIDATGGNNQPNIPSITAHLWYFGLIGTC

SEQ ID NO: 15305 - protein, 268 aa, Thermomyces lanuginosus
EYSQDLFNQFNLFAQYSAAAYCGKNNRAPAGTKITCTANACPEVEKADATILYSFEDSGVGDVTGFLALDNTNKLIVLSFRGSRSIENWIGNLNFELKEINDICSGCRGHAGFTSSWRSVADTLRQKVEDAVREHPDYRVVFTGHSLGGALATVAGADLRGNKYDIDVFSYGAPRVGNRAFAEFLTVQTGGTLYRITNTNDIVPRLPPREFGYSHSSPEYWIKSGTLVPVRRRDIVKIEGIDATGGNNQPNIPSITAHLWYFGLIGTC

SEQ ID NO: 15306 - protein, 268 aa, Thermomyces lanuginosus
EYSQDLFNQFNLFAQYSAAAYCGKNNRAPAGTKITCTANACPEVEKADATILYSFEDSGVGDVTGFLALDNTNKLIVLSFRGSRSIENWIGNLNFELKEINDICSGCRGHAGFTSSWRSVADTLRQKVEDAVREHPDYRVVFTGHSLGGALATVAGADLRGNKYDIDVFSYGAPRVGNRAFAEFLTVQTGGTLYRITSTNDIVPRLPPREFGYSHSSPEYWIKSGTLVPVRRRDIVKIEGIDATGGNNQPNIPSITAHLWYFGLIGTC

SEQ ID NO: 15307 - protein, 268 aa, Thermomyces lanuginosus
EYSQDLFNQFNLFAQYSAAAYCGKNNRAPAGTKITCTANACPEVEKADATVLYSFEDSGVGDVTGFLALDNTNKLIVLSFRGSRSIENWIGNLNFELKEINDICSGCRGHAGFTSSWRSVADTLRQKVEDAVREHPDYRVVFTGHSLGGALATVAGADLRGNKYDIDVFSYGAPRVGNRAFAEFLTVQTGGTLYRITLTNDIVPRLPPREFGYSHSSPEYWIKSGTLVPVRRRDIVKIEGIDATGGNNQPNIPSITAHLWYFGLIGTC

SEQ ID NO: 15308 - protein, 268 aa, Thermomyces lanuginosus
EKSQDLFNQFNLFAQYSAAAYCGKNNRAPAGTKITCTANACPEVEKADATILYSFEDSGVGDVTGFLALDNTNKLIVLSFRGSRSIENWIGNLNFELKEINDICSGCRGHAGFTSSWRSVADTLRQKVEDAVREHPDYRVVFTGHSLGGALATVAGADLRGNKYDIDVFSYGAPRVGNRAFAEFLTVQTGGTLYRITITNDIVPRLPPREFGYSHSSPEYWIKSGTLVPVRRRDIVKIEGIDATGGNNQPNIPSITAHLWYFGLIGTC

SEQ ID NO: 15309 - protein, 268 aa, Thermomyces lanuginosus
EVSQDLFNQFNLFAQYSAAAYCGKNNRAPAGTKITCTANACPEVEKADATVLYSFEDSGVGDVTGFLALDNTNKLIVLSFRGSRSIENWIGNLNFELEEIDDICSGCRGHAGFTSSWRSVADTLRQKVEDAVREHPDYRVVFTGHSLGGALATVAGADLRGNGYDIDVFSYGAPRVGNRAFAEFLTVQTGGTLYRITHTNDIVPRLPPREFGYSHSSPEFWIKSGTLVPVRRRDIVKIEGIDATGGNNQPNIPSITAHLWYFGLIGTC

SEQ ID NO: 15310 - protein, 268 aa, Thermomyces lanuginosus
EKSQDLFNQFNLFAQYSAAAYCGKNNRAPAGTKITCTANACPEVEKADATVLYSFEDSGVGDVTGFLALDNTNKLIVLSFRGSRSIENWIGNLNFELKEINDICSGCRGHAGFTSSWRSVADTLRQKVEDAVREHPDYRVVFTGHSLGGALATVAGADLRGNKYDIDVFSYGAPRVGNRAFAEFLTVQTGGTLYRITHTNDIVPRLPPREFGYSHSSPEYWIKFGTLVPVRRRDIVKIEGIDATGGNNQPNIPSITAHLWYFGLIGTC

SEQ ID NO: 15311 - protein, 268 aa, Thermomyces lanuginosus
EVSQDLFNQFNLFAQYSAAAYCGKNNRAPAGTNITCTANACPEVEKADATFLYSFEDSGVGDVTGFLALDNTNKLIVLSFRGSRSIENWIGNLNFELKEINDICSGCRGHAGFTSSWRSVADTLRQKVEDAVREHPDYRVVFTGHSLGGALATVAGADLRGNKYDIDVFSYGAPRVGNRAFAEFLTVQTGGTLYRITHTNDIVPRLPPREFGYSHSSPEYWIKSGTLVPVRRRDIVKCEGIDTYGCNNQPNIPSITAHLWYFGLIGTC

SEQ ID NO: 15312 - protein, 268 aa, Thermomyces lanuginosus
EKSQDLFNQFNLFAQYSAAAYCGKNNRAPAGTKITCTANACPEVEKADATLLYSFEDSGVGDVTGFLALDNTNKLIVLSFRGSRSIENWIGNLNFELKEINDICSGCRGHAGFTSSWRSVADTLRQKVEDAVREHPDYRVVFAGHSLGGALATVAGADLRGNKYDIDVFSYGAPRVGNRAFAEFLTVQTGGTLYRITHTNDIVPRLPPREFGYSHSSPEYWIKSGTLVPVRRRDIVKIEGIDATGGNNQPNIPSITAHLWYFGLIGTC

SEQ ID NO: 15313 - protein, 268 aa, Thermomyces lanuginosus
EYSQDLFNQFNLFAQYSAAAYCGKNNRAPAGTNITCTANACPEVEKADATFLYTFEDSGVGDVTGFLALDNTNKLIVLSFRGSRSIENWIGNLNFELEEIDDICSGCRGHAGFTSSWRSVADTLRQKVEDAVREHPDYRVVFTGHSLGGALATVAGADLRGNPYDIDVFSYGAPRVGNRAFAEFLTVQTGGTLYRITHTNDIVPRLPPREFGYSHSSPEYWIKSGTLVPVRRRDIVKIEGIDATGGNNQPNIPSITAHLWYFGLIGTC

SEQ ID NO: 15314 - protein, 268 aa, Thermomyces lanuginosus
EKSQDLFNQFNLFAQYSAAAYCGKNNRAPAGTKITCTANACPEVEKADATLLYSFEDSGVGDVTGFLALDNTNKLIVLSFRGSRSIENWIGNLNFELKEINDICSGCRGHAGFTSSWRSVADTLRQKVEDAVREHPDYRVVFTGHSLGGALATVAGADLRGNKYDIDVFSYGAPRVGNRAFAEFLTVQTGGTLYRITSTNDIVPRLPPREFGYSHSSPEYWIKSGTLVPVRRRDIVKIEGIDATGGNNQPNIPSITAHLWYFGLIGTC

SEQ ID NO: 15315 - protein, 268 aa, Thermomyces lanuginosus
EYSQDLFNQFNLFAQYSAAAYCGKNNRAPAGTKITCTANACPEVEKADATLLYSFEDSGVGDVTGFLALDNTNKLIVLSFRGSRSIENWIGNLNFELKEINDICSGCRGHAGFTSSWRSVADTLRQKVEDAVREHPDYRVVFTGHSLGGALATVAGADLRGNKYDIDVFSYGAPRVGNRAFAEFLTVQTGGTLYRITITNDIVPRLPPREFGYSHSSPEYWIKSGTLVPVRRRDIVKIEGIDATGGNNQPNIPSITAHLWYFGLIGTC

SEQ ID NO: 15316 - protein, 268 aa, Thermomyces lanuginosus
EKSQDLFNQFNLFAQYSAAAYCGKNNRAPAGTKITCTANACPEVEKADATLLYSFEDSGVGDVTGFLALDNTNKLIVLSFRGSRSIENWIGNLNFELKEINDICSGCRGHAGFTSSWRSVADTLRQKVEDAVREHPDYRVVFTGHSLGGALATVAGADLRGNKYDIDVFSYGAPRVGNRAFAEFLTVQTGGTLYRITHTNDIVPRLPPREFGYSHSSPEYWIKPGTLVPVRRRDIVKIEGIDATGGNNQPNIPSITAHLWYFGLIGTC

SEQ ID NO: 15317 - protein, 268 aa, Thermomyces lanuginosus
EKSQDLFNQFNLFAQYSAAAYCGKNNRAPAGTKITCTANACPEVEKADATILYSFEDSGVGDVTGFLALDNTNKLIVLSFRGSRSIENWIGNLNFELKEINDICSGCRGHAGFTSSWRSVADTLRQKVEDAVREHPDYRVVFTGHSLGGALATVAGADLRGNKYDIDVFSYGAPRVGNRAFAEFLTVQTGGTLYRITHTNDIVPRLPPREFGYSHSSPEYWIKSGTLVPVRRRDIVKIEGIDATGGNNQPNIPSITIHLWYFGLIGTC

SEQ ID NO: 15318 - protein, 268 aa, Thermomyces lanuginosus
EVSQDLFNQFNLFAQYSAAAYCGKNNRAPAGTNITCTANACPEVEKADATFLYSFEDSGVGDVTGFLALDNTNKLIVLSFRGSRSIENWLGNLNLELKEINDICSGCRGHAGFTSSWRSVADTLRQKVEDAVREHPDYRVVFTGHSLGGALATVAGADLRGNKYDIDVFSYGAPRVGNRAFAEFLTVQTGGTLYRITHTNDIVPRLPPRELGYSHSSPEYWIKSGTLVPVRRRDIVKIEGIDATGGNNQPNTPSITAHLWYFGLIGTC

SEQ ID NO: 15319 - protein, 268 aa, Thermomyces lanuginosus
EYSQDLFNQFNLFAQYSAAAYCGKNNRAPAGTKITCTANACPEVEKADATILYSFEDSGVGDVTGFLALDNTNKLIVLSFRGSRSIENWIGNLNFELKEINDICSGCRGHAGFTSSWRSVADTLRQKVEDAVREHPDYRVVFTGHSLGGALATVAGADLRGNKYDIDVFSYGAPRVGNRAFAEFLTVQTGGTLYRITHTNDIVPRLPPREFGYSHSSPEYWIKPGTLVPVRRRDIVKIEGIDATGGNNQPNIPSITAHLWYFGLIGTC

SEQ ID NO: 15320 - protein, 268 aa, Thermomyces lanuginosus
EYSQDLFNQFNLFAQYSAAAYCGKNNRAPAGTKITCTANACPEVEKADATLLYSFEDSGVGDVTGFLALDNTNKLIVLSFRGSRSIENWIGNLNFELKEINDICSGCRGHAGFTSSWRSVADTLRQKVEDAVREHPDYRVVFTGHSLGGALATVAGADLRGNKYDIDVFSYGAPRVGNRAFAEFLTVQTGGTLYRITYTNDIVPRLPPREFGYSHSSPEYWIKSGTLVPVRRRDIVKIEGIDATGGNNQPNIPSITAHLWYFGLIGTC

SEQ ID NO: 15321 - protein, 268 aa, Thermomyces lanuginosus
EKSQDLFNQFNLFAQYSAAAYCGKNNRAPAGTKITCTANACPEVEKADATVLYSFEDSGVGDVTGFLALDNTNKLIVLSFRGSRSIENWIGNLNFELKEINDICSGCRGHAGFTSSWRSVADTLRQKVEDAVREHPDYRVVFTGHSLGGALATVAGADLRGNKYDIDVFSYGAPRVGNRAFAEFLTVQTGGTLYRITHTNDIVPRLPPREFGYSHSSPEYWIKPGTLVPVRRRDIVKIEGIDATGGNNQPNIPSITAHLWYFGLIGTC

SEQ ID NO: 15322 - protein, 268 aa, Thermomyces lanuginosus
EVSQDLFNQFNLFAQYSAAAYCGKNNDAPAGTNITCTGNACPEVEKADATFLYSFEDSGVGCVTGFLALDNTNKLIVLSFRGTGSDCNLQLETSYTLTEINDICSGCRGHDGFTSSWRSVADTLRQKVEDAVREHPDYRVVFTGHSLGGALATVAGADLRGNGYDIDVFSYGAPRVGNRAFAEFLTVQTGGTLYRITHTNDIVPRLPPREFGYSHSSPEYWIKSGTLVPVTRNDIVKIEGIDATGGNNQPNIPDIPAHLWYFGLIGTC

SEQ ID NO: 15323 - protein, 268 aa, Thermomyces lanuginosus
EVSQDLFNQFNLFAQYSAAAYCGKNNDAPAGTNITCTGNACPEVEKADATFLYSFEDSGVGDVTGFLALDNTNKLIVLSFRGTGSDTNLQLDTNYTLTEINDICSGCRGHDGFTSSWRSVADTLRQKVEDAVREHPDYRVVFTGHSLGGALATVAGADLRGNGYDIDVFSYGAPRVGNRAFAEFLTVQTGGTLYRITHTNDIVPRLPPREFGYSHSSPEYWIKSGTLVPVRRRDIVKIEGIDATGGNNQPNIPDIPAHLWYFGLIGTC

SEQ ID NO: 15324 - protein, 268 aa, Thermomyces lanuginosus
EVSQDLFNQFNLFAQYSAAAYCGKNNRAPAGTNITCTANACPEVEKADATFLYSFEDSGVGDVTGFLALDNTNKLIVLSFRGTNSIENWIADLNFILSEINDICSGCRGHAGFTSSWRSVADTLRQKVEDAVREHPDYRVVFTGHSLGGALATVAGADLRGNKYDIDVFSYGAPRVGNRAFAEFLTVQTGGTLYRITHTNDIVPILPPREFGYSHSSPEYWIKSGTLVPVRRRDIVKIEGIDATGGNNQPNIPSITAHLWYFGLIGTC

SEQ ID NO: 15325 - protein, 268 aa, Thermomyces lanuginosus
EVSQDLFNQFNLFAQYSAAAYCGKNNRAPAGTNITCTANACPEVEKADATFLYSFEDSGVGDVTGFLALDNTNKLIVLSFRGTNSLENWIADFNFILQEINDICSGCRGHDGFTSSWRSVADTLRQKVEDAVREHPDYRVVFTGHSLGGALATVAGADLRGNKYDIDVFSYGAPRVGNRAFAEFLTVQTGGTLYRITHTNDIVPRLPPREFGYSHSSPEYWIKSGTLVPVRRRDIVKIEGIDATGGNNQPNIPSITAHLWYFGLIGTC

SEQ ID NO: 15326 - protein, 268 aa, Synthetic construct
EVSQDLFNQFNLFAQYSAAAYCGKNNDAPAGTNITCTGNACPEVEKADATFLYSFEDSGVGDVTGFLALDNTDKLIVLSFRGSPSIENWIGNLNFDLKEIKDICSGCRGHDGFTSSWRSVADRLRQKVEDAVRDHPDYRVVFTGHSLGGALATVAGADLRGNGYDIDVFSYGAPRVGNRAFAEFLTVQTGGTLYRITHTNDIVPRLPPREFGYSHSSPEYWIKSGTLVPVTRNDIVNIEGMDPTGCNNQPNIPEVRAHLWYFGLIGTC

SEQ ID NO: 15327 - protein, 268 aa, Thermomyces lanuginosus
EVSQDLFNQFNLFAQYSAAAYCGKNNRAPAGTNITCTANACPEVEKADATFLYTFEDSGVGDVTGFLALDNTNKLIVLSFRGTRSIENWIADLEFLLQEINDICSGCRGHAGFTSSWRSVADTLRQKVEDAVREHPDYRVVFTGHSLGGALATVAGADLRGNKYDIDVFSYGAPRVGNRAFAEFLTVQTGGTLYRITHTNDIVPRLPPREFGYSHSSPEYWIKSGTLVPVRRRDIVKIEGIDATGGNNQPNIPSITAHLWYFGLIGTC

SEQ ID NO: 15328 - protein, 268 aa, Thermomyces lanuginosus
EVSQDLFNQFNLFAQYSAAAYCGKNNRAPAGTNITCTANACPEVEKADAKFLYTFEDSGVGDVTGFLALDNTNKLIVLSFRGSRSIENWIADLNFLLQEINDICSGCRGHAGFTSSWRSVADTLRQKVEDAVREHPDYRVVFTGHSLGGALATVAGADLRGNKYDIDVFSYGAPRVGNRAFAEFLTVQTGGTLYRITHTNDIVPRLPPREFGYSHSSPEYWIKSGTLVPVRQRDIVKIEGIDATGGNNQPNIPSITAHLWYFGLIGTC

SEQ ID NO: 15329 - protein, 267 aa, Thermomyces lanuginosus
EVSQDLFNQFNLFAQYSAAAYCGKNNRAPAGTKITCTANACPEVEKADATVLYSFEDSGVGDVTGFLALDNTNKLIVLSFRGSRSIENWIGNRVHLKEINDICSGCRGHAGFTSSWRSVADTLRQKVEDAVREHPDYRVVFTGHSLGGALATVAGADLRGNKYDIDVFSYGAPRVGNRAFAEFLTVQTGGTLYRITHTNDIVPRLPPREFGYSHSSPEYWIKSGTLVPVRRRDIVKIEGIDATGGNNQPNIPSITAHLWYFGLIGTC

SEQ ID NO: 15330 - protein, 267 aa, Thermomyces lanuginosus
EVSQDLFNQFNLFAQYSAAAYCGKNNRAPAGTKITCTANACPEVEKADATVLYSFEDSGVGDVTGFLALDNTNKLIVLSFRGSRSIENWIGNRVPLKTINDICSGCRGHAGFTSSWRSVADTLRQKVEDAVREHPDYRVVFTGHSLGGALATVAGADLRGNKYDIDVFSYGAPRVGNRAFAEFLTVQTGGTLYRITHTNDIVPRLPPREFGYSHSSPEYWIKSGTLVPVRRRDIVKIEGIDATGGNNQPNIPSITAHLWYFGLIGTC

SEQ ID NO: 15331 - protein, 267 aa, Thermomyces lanuginosus
VSQDLFNQFNLFAQYSAAAYCGKNNDAPAGTNITCTGNACPEVEKADATFLYSFEDAGSGDVTGFLALDNTNKLIVLSFRGSRSVENWIGNLNFDLIKINAICSGCRGHDGFTSSWRSVADTLRQKVEDAVREHPDYRVVFSGHSLGGGLATVAGADLRGNGYDIDVFSYGAPRVGNRAFAEFLTVQTGGTLYRITHTNDIVPRLPPREFGYSHPSPEYWIKSGTGVPVRRRDIVKIEGIDATGGNNQPNIPDAKAHLWYFGLIGTC

SEQ ID NO: 15332 - protein, 267 aa, Thermomyces lanuginosus
VSQDLFNQFNLFAQYSAAAYCGKNNRAPAGTNITCTANACPEVEKADATLLYSFEDSGVGDVTGFLALDNTNKLIVLSFRGSRSIENWIGNLNFELIEINDICSGCRGHAGFTSSWRSVADTLRQKVEDAVREHPDYRVVFTGHSLGGALATVAGADLRGNKYDIDVFSYGAPRVGNRAFAEFLTVQTGGTLYRITSTNDIVPRLPPREFGYSHSSPEFWIKSGTLVPVRRCDIVKIEGIDATGGNNQPNIPSITAHLWYFGLIGTC

SEQ ID NO: 15333 - protein, 267 aa, Thermomyces lanuginosus
VSQDLFNQFNLFAQYSAAAYCGKNNRAPAGTNITCTANACPEVEKADATVLYSFEDSGVGDVTGFLALDNTNKLIVLSFRGSRSIENWIGNLNFELIEINDICSGCRGHAGFTSSWRSVADTLRQKVEDAVREHPDYRVVFTGHSLGGALATVAGADLRGNKYDIDVFSYGAPRVGNRAFAEFLTVQTGGTLYRITSTNDIVPRLPPREFGYSHSSPEFWIKSGTLVPVRRCDIVKIEGIDATGGNNQPNIPSITAHLWYFGLIGTC

SEQ ID NO: 15334 - protein, 267 aa, Thermomyces lanuginosus
VSQDLFNQFNLFAQYSAAAYCGKNNRAPAGTNITCTRNACPEVEKADATVLYSFEDSGVGDVTGFLALDNTNKLIVLSFRGSRSIENWIGNLNFELIEINDICSGCRGHAGFTSSWRSVADTLRQKVEDAVREHPDYRVVFTGHSLGGALATVAGADLRGNKYDIDVFSYGAPRVGNRAFAEFLTVQTGGTLYRITSTNDIVPRLPPREFGYSHSSPEFWIKSGTLVPVRRCDIVKIEGIDATGGNNQPNIPSITAHLWYFGLIGTC

SEQ ID NO: 15335 - protein, 267 aa, Thermomyces lanuginosus
VSQDLFNQFNLFAQYSAAAYCGKNNRAPAGTNITCTANACPEVEKADATILYSFEDSGVGDVTGFLALDNTNKLIVLSFRGSRSIENWIGNLNFELIEINDICSGCRGHAGFTSSWRSVADTLRQKVEDAVREHPDYRVVFTGHSLGGALATVAGADLRGNKYDIDVFSYGAPRVGNRAFAEFLTVQTGGTLYRITSTNDIVPRLPPREFGYSHSSPEFWIKSGTLVPVRRCDIVKIEGIDATGGNNQPNIPSITAHLWYFGLIGTC

SEQ ID NO: 15336 - protein, 267 aa, Thermomyces lanuginosus
VSQDLFNQFNLFAQYSAAAYCGKNNRAPAGTNITCTRNACPEVEKADATLLYSFEDSGVGDVTGFLALDNTNKLIVLSFRGSRSIENWIGNLNFELIEINDICSGCRGHAGFTSSWRSVADTLRQKVEDAVREHPDYRVVFTGHSLGGALATVAGADLRGNKYDIDVFSYGAPRVGNRAFAEFLTVQTGGTLYRITSTNDIVPRLPPREFGYSHSSPEFWIKSGTLVPVRRCDIVKIEGIDATGGNNQPNIPSITAHLWYFGLIGTC

SEQ ID NO: 15337 - protein, 268 aa, Thermomyces lanuginosus
EVSQDLFNQFNLFAQYSAAAYCGKNNRAPAGTNITCTANACPEVEKADATFLYSFEDSGVGDVTGFLALDNTNKLIVLSFRGTRSITNWILDLNFIFDEINDICSGCRGHAGFTSSWRSVADTLRQKVEDAVREHPDYRVVFTGHSLGGALATVAGADLRGNKYDIDVFSYGAPRVGNRAFAEFLTVQTGGTLYRITHTNDIVPRLPPREFGYSHSSPEYWIKSGTLVPVRRRDIVKIEGIDATGGNNQPNIPSITAHLWYFGLIGTC

SEQ ID NO: 15338 - protein, 268 aa, Thermomyces lanuginosus
EVSQDLFNQFNLFAQYSAAAYCGKNNRAPAGTKITCTANACPEVEKADATVLYTFKDSGVGDVTGFLALDNTNKLIVLSFRGSRSIENWIGNLNFELIEINDICSGCRGHAGFTSSWRSVADTLRQKVEDAVREHPDYRVVFTGHSLGGALATVAGADLRGNKYDIDVFSYGAPRVGNRAFAEFLTVQTGGTLYRITHTNDIVPRLPPREFGYSHSSPEYWIKSGTLVPVRRRDIVKIEGIDATGGNNQPNIPSITAHLWYFGLIGTC

SEQ ID NO: 15339 - protein, 268 aa, Thermomyces lanuginosus
EVSQDLFNQFNLFAQYSAAAYCGKNNRAPAGTKITCTANACPEVEKADATVLYSFEDSGVGDVTGFLALDNTNKLIVLSFRGSRSIENWIGNLNFELEEINDICSGCRGHAGFTSSWRSVADTLRQKVEDAVREHPDYRVVFTGHSLGGALATVAGADLRGNKYDIDVFSYGAPRVGNRAFAEFLTVQTGGTLYRITHTNDIVPRLPPRKFGYSHSSPEYWIKSGTLVPVRRRDIVKIEGIDATGGNNQPNIPSGTAHLWYFGLIGTC

SEQ ID NO: 15340 - protein, 268 aa, Thermomyces lanuginosus
EVSQDLFNQFNLFAQYSAAAYCGKNNRAPAGTKITCTANACPEVEKADATVLYSFKDSGVGDVTGFLARDNTNKLIVLSFRGSRSIENWIGNLNFELEEINDICSGCRGHAGFTSSWRSVADTLRQKVEDAVREHPDYRVVFTGHSLGGALATVAGADLRGNKYDIDVFSYGAPRVGNRAFAEFLTVQTGGTLYRITHTNDIVPRLPPREFGYSHSSPEYWIKSGTLVPVRRRDIVKIEGIDATGGNNQPNIPSITAHLWYFGLIGTC

SEQ ID NO: 15341 - protein, 268 aa, Thermomyces lanuginosus
EVSQDLFNQFNLFAQYSAAAYCGKNNRAPAGTNITCTANACPEVEKADATFLYSFEDSGVGDVTGFLALDNTNKLIVLSFRGTRSPANWIADLNYTPKEINDICSGCRGHAGFTSSWRSVADTLRQKVEDAVREHPDYRVVFTGHSLGGALATVAGADLRGNKYDIDVFSYGAPRVGNRAFAEFLTVQTGGTLYRITHTNDIVPRLPPREFGYSHSSPEYWIKSGTLVPVRRRDIVKIEGIDATGGNNQPNIPSITAHLWYFGLIGTC

SEQ ID NO: 15342 - protein, 268 aa, Thermomyces lanuginosus
EVSRDLFNQFNLFAQYSAAAYCGKNNNAPAGTQITCTANACPEVEKADATFLYSFEDSGVGDVTGFLALDNTNKLIVLSFRGSRSIENWITNLSFDLKDINDICSGCRGHAGFTSSWRSVADTLRQKVEDAVREHPDYRVVFTGHSLGGALATVAGADLRGNGYDIDVFSYGAPRIGNRAFAEFLTVQTGGTLYRITHTNDIVPRLPPRVFGYSHPSPEYWIKSGTGVPVRRRDIVKIEGIDATGGNNQPNIPDILAHLWYFGLIGTC

SEQ ID NO: 15343 - protein, 268 aa, Thermomyces lanuginosus
EVSQDLFNQFNLFAQYSAAAYCGKNNRAPAGTNITCTANACPEVEKADATVLYSFEDSGVGDVTGFLALDNTNKLIVLSFRGSRSIKNWIGNLNFELEEIDDICSGCRGHAGFTSSWRSVADTLRQKVEDAVREHPDYRVVFTGHSLGGALATVAGADLRGNKYDIDVFSYGAPRVGNRAFAEFLTVQTGGTLYRITHTNDIVPRLPPREFGYSHSSPEYWIKSGTLVPVRRRDIVKIEGIDATGGNNQPNIPSITAHLYYFGLIGTC

SEQ ID NO: 15344 - protein, 268 aa, Thermomyces lanuginosus
EVSQDLFNQFNLFAQYSAAAYCEKNNRAPAGTQITCTGNACPEVEKADATFRYSFEDSGVGDVTGFLALDNTNKLIVLSFRGSRSIENWINNLRFDLKEINDICSGCRGHAGFISSWRSVADTLRQKVEDAVREHPDYRVEFTGHSLGGALATVAGADLRGNGYDIDVFSYGAPRVGNRAFAEFLTVQTGGTLYRITHTNDIVPRLPPREFGYSHPSPEYWIKSGTLGPVRRRDIVKIEGIDATGGNNQPNIPDITAHLWYFGLIGTC

SEQ ID NO: 15345 - protein, 268 aa, Thermomyces lanuginosus
EVSQDLFNQFNLFAQYSAAAYCGKNNRAPAGTKITCTANACPEVEKADATFLYTFEDSGVGDVTGFLALDNTNKLIVLSFRGSRSIENWIGNLNFELVEIDDICSGCRGHAGFTSSWRSVADTLRQKVEDAVREHPDYRVVFTGHSLGGALATVAGADLRGNPYDIDVFSYGAPRVGNRAFAEFLTVQTGGTLYRITHTNDIVPRLPPREFGYSHSSPEFWIKSGTLVPVRRRDIVKIEGIDATGGNNQPNIPSITAHLWYFGLIGTC

SEQ ID NO: 15346 - protein, 268 aa, Thermomyces lanuginosus
EYSQDLFNQFNLFAQYSAAAYCGKNNRAPAGTNITCTANACPEVEKADATFLYTFEDSGVGDVTGFLALDNTNKLIVLSFRGSRSIENWIGNLNFELREINDICSGCRGHAGFTSSWRSVADTLRQKVEDAVREHPDYRVVFTGHSLGGALATVAGADLRGNPYDIDVFSYGAPRLGNRAFAEFLTVQTGGTLYRITHTNDIVPRLPPREFGYSHSSPEYWIKSGTLVPVRRRDIVKIEGIDATGGNNQPNIPSITAHLYYFGLIGTC

SEQ ID NO: 15347 - protein, 268 aa, Thermomyces lanuginosus
EVSQDLFNQFNLFAQYSAAAYCGKNNRAPAGTKITCTANACPEVEKADATLLYSFKDSGVGDVTGFLARDNTNKLIVLSFRGSRSIENWIGNLNFELEEINDICSGCRGHAGFTSSWRSVADTLRQKVEDAVREHPDYRVVFTGHSLGGALATVAGADLRGNKYDIDVFSYGAPRVGNRAFAEFLTVQTGGTLYRITHTNDIVPRLPPREFGYSHSSPEYWIKSGTLVPVRRRDIVKIEGIDATGGNNQPNIPSITAHLWYFGLIGTC

SEQ ID NO: 15348 - protein, 268 aa, Thermomyces lanuginosus
EYSQDLFNQFNLFAQYSAAAYCGKNNRAPAGTKITCTANACPEVEKADATLLYSFEDSGVGDVTGFLALDNTNKLIVLSFRGSRSIENWIGNLNFELKEINDICSGCRGHAGFTSSWRSVADTLRQKVEDAVREHPDYRVVFTGHSLGGGLATVAGADLRGNKYDIDVFSYGAPRVGNRAFAEFLTVQTGGTLYRITHTNDIVPRLPPREFGYSHSSPEYWIKSGTLVPRRRRDIVKIEGIDATGGNNQPNIPSITAHLWYFGLIGTC

SEQ ID NO: 15349 - protein, 268 aa, Thermomyces lanuginosus
EVSQDLFNQFNLFAQYSAAAYCGKNNRAPAGTKITCTANACPEVEKADATVLYSFEDSGVGDVTGFLALDNTNKLIVLSFRGSRSIENWIGNLNFELIEIDDICSGCRGHAGFTSSWRSVADTLRQKVEDAVREHPDYRVVFTGHSLGGALATVAGADLRGNKYDIDVFSYGAPRVGNRAFAEFLTVQTGGTLYRITHTNDIVPRLPPREFGYSHSSPEFWIKSGTLVPVRRRDIVKIEGIDATGGNNQPNIPSITAHLWYFGLIGTC

SEQ ID NO: 15350 - protein, 268 aa, Thermomyces lanuginosus
EVSQDLFNQFNLFAQYSAAAYCGKNNRAPAGTNITCTANACPEVEKADATFLYSFEDSGVGDVTGFLALDNTNKLIVLSFRGTRSITNWIADLNYTPQEINDICSGCRGHAGFTSSWRSVADTLRQKVEDAVREHPDYRVVFTGHSLGGALATVAGADLRGNKYDIDVFSYGAPRVGNRAFAEFLTVQTGGTLYRITHTNDIVPRLPPREFGYSHSSPEYWIKSGTLVPVRRRDIVKIEGIDATGGNNQPNIPSITAHLWYFGLIGTC

SEQ ID NO: 15351 - protein, 268 aa, Thermomyces lanuginosus
EVSQDLFNQFNLFAQYSAAAYCGKNNRAPAGTQITCTGNACPKVEMADATFLYSFEDSGVGDVTGFLALDNTNKLIVLSFRGSRSIENWVNNLRFDLKEINDICSGCRGHAGFISSWRSVADTLRQKVEDAVREHPDYRVVFTGHSLGGALATVAGADLRGNGYDIDVFSYGAPRVGNRAFAEFLTVQTGGTLYRITHTNDIVPRLPPREFGYSHPSPEYWIKSGTGVPVRRRDIVKIEGIDATGGNNQPNIPDITAHLWYFGLIGTC

SEQ ID NO: 15352 - protein, 268 aa, Thermomyces lanuginosus
EVSQDLFNQFNLFAQYSAAAYCGKNNRAPAGTQITCTGNACPEVEKADATFLYSFQNSGVGDVTGFLALDNTNKLIVLSFRGSRSIENWINNLRFDLKEINDICSGCRGHSGFTSSWRSVADTLRQKVEDAVREHPDYRVVFTGHSLGGALATVAGADLRGNGYDIDVFSYGAPRVGNRAFAEFLTVQTGGTLYRITHTNDIVPRLPPREFGYSHPSPEYWIKSGTGVPVRRRDIVKIEGIEATGGNNQPNIPSITAHLWYFGLIGTC

SEQ ID NO: 15353 - protein, 268 aa, Thermomyces lanuginosus
EVSQDLFNQFNLFAQYSAAAYCGKNNRAPAGTQITCTGNACPEVEKADATFLYSFQNSGVGDVTGFLALDNTNKLIVLSFRGSRSIENWINNLRFDLKEINDICSGCRGHSGFTSSWRSVADTLRQKVEDAVREHPDYRVVFTGHSLGGALATVAGADLRGNGYDIDVFSYGAPRVGNRAFAEFLTVQTGGTLYRITHTNDIVPRLPPREFGYSHPSPDYWIKSGTGVPVRRRDIVKIEGIDATGGNNQPNIPSITAHLWYFGLIGTC

SEQ ID NO: 15354 - protein, 268 aa, Thermomyces lanuginosus
EVSQDLFNQFNLFAQYSAAAYCGKNNRAPAGTKITCTANACPEVEKADATILYSFKDSGVGDVTGFLARDNTNKLIVLSFRGSRSIENWIGNLNFELEEINDICSGCRGHAGFTSSWRSVADTLRQKVEDAVREHPDYRVVFTGHSLGGALATVAGADLRGNKYDIDVFSYGAPRVGNRAFAEFLTVQTGGTLYRITHTNDIVPRLPPREFGYSHSSPEYWIKSGTLVPVRRRDIVKIEGIDATGGNNQPNIPSITAHLWYFGLIGTC

SEQ ID NO: 15355 - protein, 268 aa, Thermomyces lanuginosus
EVSQDLFNQFNLFAQYSAAAYCGKNNRAPAGTNITCTANACPEVEKADATVLYSFEDSGVGDVTGFLARDNTNKLIVLSFRGSRSIENWIGNLNFELEEINDICSGCRGHAGFTSSWRSVADTLRQKVEDAVREHPDYRVVFTGHSLGGALATVAGADLRGNKYDIDVFSYGAPRVGNRAFAEFLTVQTGGTLYRITHTNDIVPRLPPRKFGYSHSSPEYWIKSGTLVPVRRRDIVKIEGIDATGGNNQPNIPSGTAHLWYFGLIGTC

SEQ ID NO: 15356 - protein, 268 aa, Thermomyces lanuginosus
EVSQDLFNQFNLFAQYSAAAYCGKNNRAPAGTQITCTGNACPEVEKADATFLYSFQNSGVGDVTGFLALDNTNKLIVLSFRGSRSIENWINNLRFDLKEINDICSGCRGHSGFTSSWRSVADTLRQKVEDAVREHPDYRVVFTGHSLGGALATVAGADLRGNGYDIDVFSYGAPRVGNRAFAEFLTVQTGGTLYRITHTNDIVPRLPPREFGYSHPSPEYWIKSGTGVPVRRRDIVKIEGIDATGGNNRPNIPSITAHLWYFGLIGTC

SEQ ID NO: 15357 - protein, 268 aa, Thermomyces lanuginosus
EVSQDLFNQFNLFAQYSAAAYCGKNNRAPAGTQITCTANACPEVEKADATFLYSFQNSGVGDVTGFLALDNTNKLIVLSFRGSRSIENWINNLRFDLKEINDICSGCRGHSGFTSSWRSVADTLRQKVEDAVREHPDYRVVFTGHSLGGALATVAGADLRGNGYDIDVFSYGAPRVGNRAFAEFLTVQTGGTLYRITHTNDIVPRLPPREFGYSHPSPEYWIKSGTGVPVRRRDIVKIEGIDATGGNNQPNIPSITAHLWYFGLIGTC

SEQ ID NO: 15358 - protein, 268 aa, Thermomyces lanuginosus
EVSQDLFNQFNLFAQYSAAAYCEKNNRAPAGTQITCTGNACPEVEKADATFRYSFEDSGVGDVTGFLALDNTNKLIVLSFRGSRSIENWINNLRFDLKEINDICSGCRGHAGFISSWRSVADTLRQKVEDAVREHPDYRVEFTGHSLGGALATVAGADLRGNGYDIDVFSYGAPRVGNRAFAEFLTVQTGGTLYRITHTNDIVPRLPPREFGYSHPSPEYWIKSGTGVPVRRRDIVKIEGIDATGGNNQPNIPDITAHLWYFGLIGTC

SEQ ID NO: 15359 - protein, 268 aa, Thermomyces lanuginosus
EVSQDLFNQFNLFAQYSAAAYCGKNNRAPAGTKITCTANACPEVEKADATVLYSFEDSGVGDVTGFLALDNTNKLIVLSFRGSRSIENWIGNLNFELEEIDDICSGCRGHAGFTSSWRSVADTLRQKVEDAVREHPDYRVVFTGHSLGGALATVAGADLRGNPYDIDVFSYGAPRVGNRAFAEFLTVQTGGTLYRITHTNDIVPRLPPREFGYSHSSPEFWIKSGTLVPVRRRDIVKIEGIDATGGNNQPNIPSITAHLWYFGLIGTC

SEQ ID NO: 15360 - protein, 268 aa, Thermomyces lanuginosus
EVSQDLFNQFNLFAQYSAAAYCGKNNRAPAGTKITCTANACPEVEKADATFLYSFEDSGVGDVTGFLALDNTNKLIVLSFRGSRSIENWIGNLNFELVEINDICSGCRGHAGFTSSWRSVADTLRQKVEDAVREHPDYRVVFTGHSLGGALATVAGADLRGNKYDIDVFSYGAPRLGNRAFAEFLTVQTGGTLYRITHTNDIVPRLPPREFGYSHSSPEFWIKSGTLVPVRRRDIVKIEGIDATGGNNQPNIPSITAHLYYFGLIGTC

SEQ ID NO: 15361 - protein, 268 aa, Thermomyces lanuginosus
EVSQDLFNQFNLFAQYSKAAYCQKNNSAEAGTNITCTGNACPEVFKADVTFLYSFEDMGVGDVTGFLALDNTSKQIVLSFRGSRSIENWIGNLNFDLKEINDICSGCKGHDGFTSSWRSVADTLRQKVEDAVREFPDYRVVFTGHSLGGALATVAGADLRGNGYDIDVFSYGAPRVGNRAFAEFLTTQDGGTLYRITHTNDIVPRLPPREFGYSHSSPEYWIKSGTLVPVTRNDIVKIEGIDATGGNNQPNIPDIPAHLWYFGLIGTC

SEQ ID NO: 15362 - protein, 268 aa, Thermomyces lanuginosus
EVSQDLFNQFNLFAQYSAAAYCGKNNRAPAGTNITCTANACPEVEKADATVLYSFEDSGVGDVTGFLARDNTNKLIVLSFRGSRSIENWIGNLNFELEEINDICSGCRGHAGFTSSWRSVADTLRQKVEDAVREHPDYRVVFTGHSLGGALATVAGADLRGNKYDIDVFSYGAPRVGNRAFAEFLTVQTGGTLYRITHTNDIVPRLPPRKFGYSHSSPEFWIKSGTLVPVRRRDIVKIEGIDATGGNNQPNIPSITAHLWYFGLIGTC

SEQ ID NO: 15363 - protein, 268 aa, Thermomyces lanuginosus
EVSQDLFNQFNLFAQYSAAAYCGKNNRAPAGTNITCTANACPEVEKADATFLYSFEDSGVGDVTGFLALDNTNKLIVLSFRGTRSPTNWIADLNYTLQEINDICSGCRGHAGFTSSWRSVADTLRQKVEDAVREHPDYRVVFTGHSLGGALATVAGADLRGNKYDIDVFSYGAPRVGNRAFAEFLTVQTGGTLYRITHTNDIVPRLPPREFGYSHSSPEYWIKSGTLVPVRRRDIVKIEGIDATGGNNQPNIPSITAHLWYFGLIGTC

SEQ ID NO: 15364 - protein, 268 aa, Thermomyces lanuginosus
EVSQDLFNQFNLFAQYSAAAYCGKNNRAPAGTKITCTANACPEVEKADATVLYSFEDSGVGDVTGFLALDNTNKLIVLSFRGSRSIENWIGNLNFELEEINDICSGCRGHAGFTSSWRSVADTLRQKVEDAVREHPDYRVVFTGHSLGGALATVAGADLRGNKYDIDVFSYGAPRVGNRAFAEFLTVQTGGTLYRITHTNDIVPRLPPRRFGYSHSSPEYWIKSGTLVPVRRRDIVKIEGIDATGGNNQPNIPSITAHLYYFGLIGTC

SEQ ID NO: 15365 - protein, 268 aa, Thermomyces lanuginosus
EVSQDLFNQFNLFAQYSAAAYCGKNNRAPAGTKITCTANACPEVEKADATVLYSFKDSGVGDVTGFLALDNTNKLIVLSFRGSRSIENWIGNLNFELEEINDICSGCRGHAGFTSSWRSVADTLRQKVEDAVREHPDYRVVFTGHSLGGALATVAGADLRGNPYDIDVFSYGAPRVGNRAFAEFLTVQTGGTLYRITHTNDIVPRLPPRKFGYSHSSPEYWIKSGTLVPVRRRDIVKIEGIDATGGNNQPNIPSITAHLWYFGLIGTC

SEQ ID NO: 15366 - protein, 268 aa, Thermomyces lanuginosus
EVSQDLFNQFNLFAQYSAAAYCGKNNRAPAGTKITCTANACPEVEKADATLLYSFEDSGVGDVTGFLALDNTNKLIVLSFRGSRSIENWIGNLNFELEEIDDICSGCRGHAGFTSSWRSVADTLRQKVEDAVREHPDYRVVFTGHSLGGALATVAGADLRGNKYDIDVFSYGAPRVGNRAFAEFLTVQTGGTLYRITSTNDIVPRLPPREFGYSHSSPEYWIKSGTLVPVRRRDIVKIEGIDATGGNNQPNIPSITAHLWYFGLIGTC

SEQ ID NO: 15367 - protein, 268 aa, Thermomyces lanuginosus
EVSQDLFNQFNLFAQYSAAAYCEKNNRAPAGTQITCTGNACPEVEKADATFRYSFEDSGVGDVTGFLALDNTNKLIVLSFRGSRSIENWINNLRFDLKEINDICSGCRGHAGFISSWRSVADTLRQKVEDAVREHPDYREVFTGHSLGGALATVAGADLRGNGYDIDVFSYGAPRVGNRAFAEFLTVQTGGTLYRITHTNDIVPRLPPREFGYSHPSPEYWIKSGTGVPVRRRDIVKIEGIDATGGNNQPNIPDITAHLWYFGLIGTC

SEQ ID NO: 15368 - protein, 268 aa, Thermomyces lanuginosus
EVSQDLFNQFRLFAQYSAAAYCGKNNRAPAGTQITCTGNACPEVEKADATFLYSFQNSGVGDVTGFLALDNTNKLIVLSFRGSRSIENWINNLRFDLKEINDICSGCRGHSGFTSSWRSVADTLRQKVEDAVREHPDYRVVFTGHSLGGALATVAGADLRGNGYDIDVFSYGAPRVGNRAFAEFLTVQTGGTLYRITHTNDIVPRLPPREFGYSHPSPEYWIKSGTGVPVRRRDIVKIEGIDATGGNNQPNIPSITAHLWYFGLIGTC

SEQ ID NO: 15369 - protein, 268 aa, Thermomyces lanuginosus
EVSQDLFNQFNLFAQYSAAAYCGKNNRAPAGTNITCTANACPEVEKADATFLYSFEDSGVGDVTGFLALDNTNKLIVLSFRGTRSIKNWILDLNYDLQEINDICSGCRGHAGFTSSWRSVADTLRQKVEDAVREHPDYRVVFTGHSLGGALATVAGADLRGNKYDIDVFSYGAPRVGNRAFAEFLTVQTGGTLYRITHTNDIVPRLPPREFGYSHSSPEYWIKSGTLVPVRRRDIVKIEGIDATGGNNQPNIPSITAHLWYFGLIGTC

SEQ ID NO: 15370 - protein, 268 aa, Thermomyces lanuginosus
EVSQDLFNQFNLFAQYSAAAYCGKNNRAPAGTKITCTANACPEVEKADATVLYSFEDSGVGDVTGFLALDNTNKLIVLSFRGSRSIENWIGNLNFELEEIDDICSGCRGHAGFTSSWRSVADTLRQKVEDAVREHPDYRVVFTGHSLGGALATVAGADLRGNKYDIDVFSYGAPRVGNRAFAEFLTVQTGGTLYRITHTNDIVPRLPPREFGYSHSSPEFWIKSGTLVPVRRRDIVKIEGIDATGGNNQPNIPSITAHLWYFGLIGTC

SEQ ID NO: 15371 - protein, 268 aa, Thermomyces lanuginosus
EVSQDLFNQFNLFAQYSAAAYCGKNNRAPAGTQITCTGNACPEVEKADATFLYSFQNSGVGDVTGFLALDNTNKLIVLSFRGSRSIENWINNLRFDLKEINDICSGCRGHSGFTSSWRSVADTLRQKVEDAVREHPDYRVVFTGHSLGGALATVAGADLRGNTYDIDVFSYGAPRVGNRAFAEFLTVQTGGTLYRITHTNDIVPRLPPREFGYSHPSPEYWIKSGTGVPVRRRDIVKIEGIDATGGNNQPNIPSITAHLWYFGLIGTC

SEQ ID NO: 15372 - protein, 268 aa, Thermomyces lanuginosus
EVSQDLFNQFNLFAQYSAAAYCGKNNRAPAGTKITCTANACPEVEKADATVLYSFEDSGVGDVTGFLALDNTNKLIVLSFRGSRSIENWIGNWRVPLKEINDICSGCRGHAGFTSSWRSVADTLRQKVEDAVREHPDYRVVFTGHSLGGALATVAGADLRGNKYDIDVFSYGAPRVGNRAFAEFLTVQTGGTLYRITHTNDIVPRLPPREFGYSHSSPEYWIKSGTLVPVRRRDIVKIEGIDATGGNNQPNIPSITAHLWYFGLIGTC

SEQ ID NO: 15373 - protein, 268 aa, Thermomyces lanuginosus
EVSQDLFNQFNLFAQYSAAAYCGKNNRAPAGTKITCTANACPEVEKADATVLYSFEDSGVGDVTGFLALDNTNKLIVLSFRGSRSIENWIGNLNFELEEIDDICSGCRGHAGFTSSWRSVADTLRQKVEDAVREHPDYRVVFTGHSLGGALATVAGADLRGNKYDIDVFSYGAPRVGNRAFAEFLTVQTGGTLYRITSTNDIVPRLPPREFGYSHSSPEYWIKSGTLVPVRRRDIVKIEGIDATGGNNQPNIPSITAHLWYFGLIGTC

SEQ ID NO: 15374 - protein, 268 aa, Thermomyces lanuginosus
EVSQDLFNQFNLFAQYSAAAYCGKNNRAPAGTNITCTANACPEVEKADATFLYSFEDSGVGDVTGFLALDNTNKLIVLSFRGSRSPTNWILNLDFIFDEINDICSGCRGHAGFTSSWRSVADTLRQKVEDAVREHPDYRVVFTGHSLGGALATVAGADLRGNKYDIDVFSYGAPRVGNRAFAEFLTVQTGGTLYRITHTNDIVPRLPPREFGYSHSSPEYWIKSGTLVPVRRRDIVKIEGIDATGGNNQPNIPSITAHLWYFGLIGTC

SEQ ID NO: 15375 - protein, 268 aa, Thermomyces lanuginosus
EVSQDLFNQFNLFAQYSAAAYCGKNNDAPAGTKITCTGNACPEVEKADATILYSFEDSGVGDVTGFLALDNTNKLIVLSFRGSRSIENWIGNLNFDLKEINDICSGCRGHDGFTSSWRSVADTLRQKVEDAVREHPDYRVVFTGHSLGGALATVAGADLRGNNYSIDVFSYGAPRVGNRAFAEFLTVQTGGTLYRITNTNDCVPRLPPRQFGYSHSSPEYWIKSGTLPPVRRRDIVKCEGIDATCGNNQPNICDIPAHLWYFGLIGTC

SEQ ID NO: 15376 - protein, 268 aa, Thermomyces lanuginosus
EVSQDLFNQFNLFAQYSAAAYCGKNNNAPAGTNITCTGNACPEVEKADATFLYSFEDAGSGDVTGFLALDNTNKLIVLSFRGSRSVENWINNLRFDLKEINDICSGCRGHNGFTSSWRSVADTLRQKVEDAVREHPDYRVVFSGHSLGGGLATVAGADLRGNGYDIDVFSYGAPRVGNRAFAEFLTVQTGGTLYRITHTNDIVPRLPPREFGYSHSSPEYWIKSGTGVPVRRRDIVKIEGIDATGGNNQPNIPDAKAHLWYFGLIGTC

SEQ ID NO: 15377 - protein, 268 aa, Thermomyces lanuginosus
EVSQDLFNQFNLFAQYSAAAYCGKNNRAPAGTKITCTANACPEVEKADATVLYTFEDSGVGDVTGFLALDNTNKLIVLSFRGSRSIENWIGNLNFELEEINDICSGCRGHAGFTSSWRSVADTLRQKVEDAVREHPDYRVVFTGHSLGGALATVAGADLRGNKYDIDVFSYGAPRVGNRAFAEFLTVQTGGTLYRITHTNDIVPRLPPREFGYSHSSPEYWIKSGTLVPVRRRDIVKIEGIDATGGNNQPNIPSITAHLYYFGLIGTC

SEQ ID NO: 15378 - protein, 268 aa, Thermomyces lanuginosus
EVSQDLFNQFNLFAQYSAAAYCGKNNDAPAGTNITCTGNACPEVEKADATFLYSFEDSGVGCVTGFLALDNTNKLIVLSFRGTGSDCNLQLDTNYTLTEINDICSGCRGHDGFTSSWRSVADTLRQKVEDAVREHPDYRVVFTGHSLGGALATVAGADLRGNGYDIDVFSYGAPRVGNRAFAEFLTVQTGGTLYRITHTNDIVPRLPPREFGYSHSSPEYWIKSGTLVPVRRRDIVKIEGIDATGGNNQPNIPDIPAHLWYFGLIGTC

SEQ ID NO: 15379 - protein, 268 aa, Thermomyces lanuginosus
EVSQDLFNQFNLFAQYSAAAYCGKNNDAPAGTNITCTGNACPEVEKADATFLYSFEDSGVGDVTGFLALDNTNKLIVLSFRGTGSDQNLQLETSYTLTEINDICSGCRGHDGFTSSWRSVADTLRQKVEDAVREHPDYRVVFTGHSLGGALATVAGADLRGNGYDIDVFSYGAPRVGNRAFAEFLTVQTGGTLYRITHTNDIVPRLPPREFGYSHSSPEYWIKSGTLVPVRRRDIVKIEGIDATGGNNQPNIPDIPAHLWYFGLIGTC

SEQ ID NO: 15380 - protein, 267 aa, Thermomyces lanuginosus
EVSQDLFNQFNLFAQYSAAAYCGKNNDAPAGTNITCTGNACPEVEKADATFLYSFEDSGVGDVTGFLALDNTNKLIVLSFRGSRSIENWIGNLNFDLKEINDICSGCRGHDGFTSSWRSVADTLRQKVEDAVREHPDYRVVFTGHSLGGALATVAGADLRGNGYDIDVFSYGAPRVGNRAFAEFLTVQTGGTLYRITHTNDIVPRLPPREFGYSHSSPEYWIKSGTLVPVRRRDIVKIEGFDGNTGTGLPLLTDFEAHIWYFVQVDA

SEQ ID NO: 15381 - protein, 268 aa, Thermomyces lanuginosus
EVSQDLFNQFNLFAQYSAAAYCGKNNRAPAGTKITCTANACPEVEKADATLLYSFKDSGVGDVTGFLARDNTNKLIVLSFRGSRSIENWIGNLNFELEEINDICSGCRGHAGFTSSWRSVADTLRQKVEDAVREHPDYRVVFTGHSLGGALATVAGADLRGNKYDIDVFSYGAPRVGNRAFAEFLTVQTGGTLYRITHTNDIVPRLPPREFGYSHSSPEYWIKSGTLPPVRRRDIVKIEGIDATGGNNQPNIPSITAHLWYFGLIGTC

SEQ ID NO: 15382 - protein, 268 aa, Thermomyces lanuginosus
EVSQDLFNQFNLFAQYSAAAYCGKNNRAPAGTKITCTANACPEVEKADATVLYSFKDSGVGDVTGFLARDNTNKLIVLSFRGSRSIENWIGNLNFELEEINDICSGCRGHAGFTSSWRSVADTLRQKVEDAVREHPDYRVVFTGHSLGGALATVAGADLRGNKYDIDVFSYGAPRVGNRAFAEFLTVQTGGTLYRITSTNDIVPRLPPREFGYSHSSPEYWIKSGTLVPVRRRDIVKIEGIDATGGNNQPNIPSITAHLWYFGLIGTC

SEQ ID NO: 15383 - protein, 268 aa, Thermomyces lanuginosus
EVSQDLFNQFNLFAQYSAAAYCGKNNRAPAGTKITCTANACPEVEKADATLLYSFKDSGVGDVTGFLARDNTNKLIVLSFRGSRSIENWIGNLNFELEEINDICSGCRGHAGFTSSWRSVADTLRQKVEDAVREHPDYRVVFTGHSLGGALATVAGADLRGNKYDIDVFSYGAPRVGNRAFAEFLTVQTGGTLYRITHTNDIVPRLPPREFGYSHSSPEYWIKSGTLVPRRRRDIVKIEGIDATGGNNQPNIPSITAHLWYFGLIGTC

SEQ ID NO: 15384 - protein, 268 aa, Thermomyces lanuginosus
EVSQDLFNQFNLFAQYSAAAYCGKNNRAPAGTKITCTANACPEVEKADATILYSFKDSGVGDVTGFLARDNTNKLIVLSFRGSRSIENWIGNLNFELEEINDICSGCRGHAGFTSSWRSVADTLRQKVEDAVREHPDYRVVFTGHSLGGALATVAGADLRGNKYDIDVFSYGAPRVGNRAFAEFLTVQTGGTLYRITHTNDIVPRLPPREFGYSHSSPEYWIKIGTLVPVRRRDIVKIEGIDATGGNNQPNIPSITAHLWYFGLIGTC

SEQ ID NO: 15385 - protein, 268 aa, Thermomyces lanuginosus
EYSQDLFNQFNLFAQYSAAAYCGKNNRAPAGTNITCTANACPEVEKADATFLYTFEDSGVGDVTGFLALDNTNKLIVLSFRGSRSIENWIGNLNFELKEIDDICSGCRGHAGFTSSWRSVADTLRQKVEDAVREHPDYRVVFTGHSLGGALATVAGADLRGNPYDIDVFSYGAPRLGNRAFAEFLTVQTGGTLYRITHTNDIVPRLPPREFGYSHSSPEFWIKSGTLVPVRRRDIVKIEGIDATGGNNQPNIPSITAHLYYFGLIGTC

SEQ ID NO: 15386 - protein, 268 aa, Thermomyces lanuginosus
EVSQDLFNQFNLFAQYSAAAYCGKNNRAPAGTKITCTANACPEVEKADATLLYSFKDSGVGDVTGFLARDNTNKLIVLSFRGSRSIENWIGNLNFELEEINDICSGCRGHAGFTSSWRSVADTLRQKVEDAVREHPDYRVVFTGHSLGGALATVAGADLRGNKYDIDVFSYGAPRVGNRAFAEFLTVQTGGTLYRITHTNDIVPRLPPREFGYSHSSPEYWIKFGTLVPVRRRDIVKIEGIDATGGNNQPNIPSITAHLWYFGLIGTC

SEQ ID NO: 15387 - protein, 268 aa, Thermomyces lanuginosus
EVSQDLFNQFNLFAQYSAAAYCGKNNRAPAGTKITCTANACPEVEKADATLLYSFKDSGVGDVTGFLARDNTNKLIVLSFRGSRSIENWIGNLNFELEEINDICSGCRGHAGFTSSWRSVADTLRQKVEDAVREHPDYRVVFTGHSLGGALATVAGADLRGNKYDIDVFSYGAPRVGNRAFAEFLTVQTGGTLYRITYTNDIVPRLPPREFGYSHSSPEYWIKSGTLVPVRRRDIVKIEGIDATGGNNQPNIPSITAHLWYFGLIGTC

SEQ ID NO: 15388 - protein, 268 aa, Thermomyces lanuginosus
EVSQDLFNQFNLFAQYSAAAYCGKNNRAPAGTKITCTANACPEVEKADATVLYTFKDSGVGDVTGFLALDNTNKLIVLSFRGSRSIENWIGNLNFELIEINDICSGCRGHAGFTSSWRSVADTLRQKVEDAVREHPDYRVVFTGHSLGGALATVAGADLRGNKYDIDVFSYGAPRVGNRAFAEFLTVQTGGTLYRITHTNDIVPRLPPREFGYSHSSPEYWIKSGTLVPRRRRDIVKIEGIDATGGNNQPNIPSITAHLWYFGLIGTC

SEQ ID NO: 15389 - protein, 268 aa, Thermomyces lanuginosus
EVSQDLFNQFNLFAQYSAAAYCGKNNRAPAGTKITCTANACPEVEKADATLLYSFKDSGVGDVTGFLARDNTNKLIVLSFRGSRSIENWIGNLNFELEEINDICSGCRGHAGFTSSWRSVADTLRQKVEDAVREHPDYRVVFTGHSLGGALATVAGADLRGNKYDIDVFSYGAPRVGNRAFAEFLTVQTGGTLYRITSTNDIVPRLPPREFGYSHSSPEYWIKSGTLVPVRRRDIVKIEGIDATGGNNQPNIPSITAHLWYFGLIGTC

SEQ ID NO: 15390 - protein, 268 aa, Thermomyces lanuginosus
EVSQDLFNQFNLFAQYSAAAYCGKNNRAPAGTKITCTANACPEVEKADATLLYSFKDSGVGDVTGFLARDNTNKLIVLSFRGSRSIENWIGNLNFELEEINDICSGCRGHAGFTSSWRSVADTLRQKVEDAVREHPDYRVVFTGHSLGGALATVAGADLRGNKYDIDVFSYGAPRVGNRAFAEFLTVQTGGTLYRITHTNDIVPRLPPREFGYSHSSPEYWIKSGTLVPVRRRDIVKIEGIDATGGNNQPNIPSITIHLWYFGLIGTC

SEQ ID NO: 15391 - protein, 268 aa, Thermomyces lanuginosus
EVSQDLFNQFNLFAQYSAAAYCGKNNRAPAGTKITCTANACPEVEKADATILYSFKDSGVGDVTGFLARDNTNKLIVLSFRGSRSIENWIGNLNFELEEINDICSGCRGHAGFTSSWRSVADTLRQKVEDAVREHPDYRVVFTGHSLGGALATVAGADLRGNKYDIDVFSYGAPRVGNRAFAEFLTVQTGGTLYRITLTNDIVPRLPPREFGYSHSSPEYWIKSGTLVPVRRRDIVKIEGIDATGGNNQPNIPSITAHLWYFGLIGTC

SEQ ID NO: 15392 - protein, 268 aa, Thermomyces lanuginosus
EVSQDLFNQFNLFAQYSAAAYCGKNNRAPAGTKITCTANACPEVEKADATLLYTFKDSGVGDVTGFLALDNTNKLIVLSFRGSRSIENWIGNLNFELIEINDICSGCRGHAGFTSSWRSVADTLRQKVEDAVREHPDYRVVFTGHSLGGALATVAGADLRGNKYDIDVFSYGAPRVGNRAFAEFLTVQTGGTLYRITHTNDIVPRLPPREFGYSHSSPEYWIKSGTLVPVRRRDIVKIEGIDATGGNNQPNIPSITIHLWYFGLIGTC

SEQ ID NO: 15393 - protein, 268 aa, Thermomyces lanuginosus
EVSQDLFNQFNLFAQYSAAAYCGKNNRAPAGTKITCTANACPEVEKADATLLYSFKDSGVGDVTGFLARDNTNKLIVLSFRGSRSIENWIGNLNFELEEINDICSGCRGHAGFTSSWRSVADTLRQKVEDAVREHPDYRVVFTGHSLGGALATVAGADLRGNKYDIDVFSYGAPRVGNRAFAEFLTVQTGGTLYRITLTNDIVPRLPPREFGYSHSSPEYWIKSGTLVPVRRRDIVKIEGIDATGGNNQPNIPSITAHLWYFGLIGTC

SEQ ID NO: 15394 - protein, 268 aa, Thermomyces lanuginosus
EVSQDLFNQFNLFAQYSAAAYCGKNNRAPAGTKITCTANACPEVEKADATVLYSFKDSGVGDVTGFLARDNTNKLIVLSFRGSRSIENWIGNLNFELEEINDICSGCRGHAGFTSSWRSVADTLRQKVEDAVREHPDYRVVFTGHSLGGALATVAGADLRGNKYDIDVFSYGAPRVGNRAFAEFLTVQTGGTLYRITHTNDIVPRLPPREFGYSHSSPEYWIKSGTLPPVRRRDIVKIEGIDATGGNNQPNIPSITAHLWYFGLIGTC

SEQ ID NO: 15395 - protein, 268 aa, Thermomyces lanuginosus
EVSQDLFNQFNLFAQYSAAAYCGKNNRAPAGTKITCTANACPEVEKADATILYTFKDSGVGDVTGFLALDNTNKLIVLSFRGSRSIENWIGNLNFELIEINDICSGCRGHAGFTSSWRSVADTLRQKVEDAVREHPDYRVVFTGHSLGGALATVAGADLRGNKYDIDVFSYGAPRVGNRAFAEFLTVQTGGTLYRITHTNDIVPRLPPREFGYSHSSPEYWIKIGTLVPVRRRDIVKIEGIDATGGNNQPNIPSITAHLWYFGLIGTC

SEQ ID NO: 15396 - protein, 268 aa, Thermomyces lanuginosus
EVSQDLFNQFNLFAQYSAAAYCGKNNRAPAGTKITCTANACPEVEKADATVLYSFKDSGVGDVTGFLARDNTNKLIVLSFRGSRSIENWIGNLNFELEEINDICSGCRGHAGFTSSWRSVADTLRQKVEDAVREHPDYRVVFTGHSLGGALATVAGADLRGNKYDIDVFSYGAPRVGNRAFAEFLTVQTGGTLYRITHTNDIVPRLPPREFGYSHSSPEYWIKSPTLVPVRRRDIVKIEGIDATGGNNQPNIPSITAHLWYFGLIGTC

SEQ ID NO: 15397 - protein, 268 aa, Thermomyces lanuginosus
EVSQDLFNQFNLFAQYSAAAYCGKNNRAPAGTKITCTANACPEVEKADATVLYTFKDSGVGDVTGFLALDNTNKLIVLSFRGSRSIENWIGNLNFELIEINDICSGCRGHAGFTSSWRSVADTLRQKVEDAVREHPDYRVVFTGHSLGGALATVAGADLRGNKYDIDVFSYGAPRVGNRAFAEFLTVQTGGTLYRITLTNDIVPRLPPREFGYSHSSPEYWIKSGTLVPVRRRDIVKIEGIDATGGNNQPNIPSITAHLWYFGLIGTC

SEQ ID NO: 15398 - protein, 268 aa, Thermomyces lanuginosus
EVSQDLFNQFNLFAQYSAAAYCGKNNRAPAGTKITCTANACPEVEKADATLLYTFKDSGVGDVTGFLALDNTNKLIVLSFRGSRSIENWIGNLNFELIEINDICSGCRGHAGFTSSWRSVADTLRQKVEDAVREHPDYRVVFTGHSLGGALATVAGADLRGNKYDIDVFSYGAPRVGNRAFAEFLTVQTGGTLYRITYTNDIVPRLPPREFGYSHSSPEYWIKSGTLVPVRRRDIVKIEGIDATGGNNQPNIPSITAHLWYFGLIGTC

SEQ ID NO: 15399 - protein, 268 aa, Thermomyces lanuginosus
EVSQDLFNQFNLFAQYSAAAYCGKNNRAPAGTKITCTANACPEVEKADATLLYTFKDSGVGDVTGFLALDNTNKLIVLSFRGSRSIENWIGNLNFELIEINDICSGCRGHAGFTSSWRSVADTLRQKVEDAVREHPDYRVVFTGHSLGGALATVAGADLRGNKYDIDVFSYGAPRVGNRAFAEFLTVQTGGTLYRITHTNDIVPRLPPREFGYSHSSPEYWIKSGTDVPVRRRDIVKIEGIDATGGNNQPNIPSITAHLWYFGLIGTC

SEQ ID NO: 15400 - protein, 268 aa, Thermomyces lanuginosus
EVSQDLFNQFNLFAQYSAAAYCGKNNRAPAGTKITCTANACPEVEKADATILYSFKDSGVGDVTGFLARDNTNKLIVLSFRGSRSIENWIGNLNFELEEINDICSGCRGHAGFTSSWRSVADTLRQKVEDAVREHPDYRVVFTGHSLGGGLATVAGADLRGNKYDIDVFSYGAPRVGNRAFAEFLTVQTGGTLYRITHTNDIVPRLPPREFGYSHSSPEYWIKSGTLVPVRRRDIVKIEGIDATGGNNQPNIPSITAHLWYFGLIGTC

SEQ ID NO: 15401 - protein, 268 aa, Thermomyces lanuginosus
EVSQDLFNQFNLFAQYSAAAYCGKNNRAPAGTKITCTANACPEVEKADATVLYTFKDSGVGDVTGFLALDNTNKLIVLSFRGSRSIENWIGNLNFELIEINDICSGCRGHAGFTSSWRSVADTLRQKVEDAVREHPDYRVVFTGHSLGGALATVAGADLRGNKYDIDVFSYGAPRVGNRAFAEFLTVQTGGTLYRITHTNDIVPRLPPREFGYSHSSPEYWIKSGTLVPVRRRDIVKIEGIDATGGNNQPNIPSGTAHLWYFGLIGTC

SEQ ID NO: 15402 - protein, 268 aa, Thermomyces lanuginosus
EVSQDLFNQFNLFAQYSAAAYCGKNNRAPAGTKITCTANACPEVEKADATVLYSFKDSGVGDVTGFLARDNTNKLIVLSFRGSRSIENWIGNLNFELEEINDICSGCRGHAGFTSSWRSVADTLRQKVEDAVREHPDYRVVFTGHSLGGALATVAGADLRGNKYDIDVFSYGAPRVGNRAFAEFLTVQTGGTLYRITNTNDIVPRLPPREFGYSHSSPEYWIKSGTLVPVRRRDIVKIEGIDATGGNNQPNIPSITAHLWYFGLIGTC

SEQ ID NO: 15403 - protein, 268 aa, Thermomyces lanuginosus
EVSQDLFNQFNLFAQYSAAAYCGKNNRAPAGTKITCTANACPEVEKADATILYSFKDSGVGDVTGFLARDNTNKLIVLSFRGSRSIENWIGNLNFELEEINDICSGCRGHAGFTSSWRSVADTLRQKVEDAVREHPDYRVVFTGHSLGGALATVAGADLRGNKYDIDVFSYGAPRVGNRAFAEFLTVQTGGTLYRITHTNDIVPRLPPREFGYSHSSPEYWIKSGTLVPVRRRDIVKIEGIDATGGNNQPNIPSITIHLWYFGLIGTC

SEQ ID NO: 15404 - protein, 268 aa, Thermomyces lanuginosus
EVSQDLFNQFNLFAQYSAAAYCGKNNRAPAGTKITCTANACPEVEKADATILYTFKDSGVGDVTGFLALDNTNKLIVLSFRGSRSIENWIGNLNFELIEINDICSGCRGHAGFTSSWRSVADTLRQKVEDAVREHPDYRVVFTGHSLGGALATVAGADLRGNKYDIDVFSYGAPRVGNRAFAEFLTVQTGGTLYRITNTNDIVPRLPPREFGYSHSSPEYWIKSGTLVPVRRRDIVKIEGIDATGGNNQPNIPSITAHLWYFGLIGTC

SEQ ID NO: 15405 - protein, 268 aa, Thermomyces lanuginosus
EVSQDLFNQFNLFAQYSAAAYCGKNNRAPAGTKITCTANACPEVEKADATILYTFKDSGVGDVTGFLALDNTNKLIVLSFRGSRSIENWIGNLNFELIEINDICSGCRGHAGFTSSWRSVADTLRQKVEDAVREHPDYRVVFTGHSLGGALATVAGADLRGNKYDIDVFSYGAPRVGNRAFAEFLTVQTGGTLYRITLTNDIVPRLPPREFGYSHSSPEYWIKSGTLVPVRRRDIVKIEGIDATGGNNQPNIPSITAHLWYFGLIGTC

SEQ ID NO: 15406 - protein, 268 aa, Thermomyces lanuginosus
EVSQDLFNQFNLFAQYSAAAYCGKNNRAPAGTKITCTANACPEVEKADATILYSFKDSGVGDVTGFLARDNTNKLIVLSFRGSRSIENWIGNLNFELEEINDICSGCRGHAGFTSSWRSVADTLRQKVEDAVREHPDYRVVFAGHSLGGALATVAGADLRGNKYDIDVFSYGAPRVGNRAFAEFLTVQTGGTLYRITHTNDIVPRLPPREFGYSHSSPEYWIKSGTLVPVRRRDIVKIEGIDATGGNNQPNIPSITAHLWYFGLIGTC

SEQ ID NO: 15407 - protein, 268 aa, Thermomyces lanuginosus
EVSQDLFNQFNLFAQYSAAAYCGKNNRAPAGTKITCTANACPEVEKADATLLYTFKDSGVGDVTGFLALDNTNKLIVLSFRGSRSIENWIGNLNFELIEINDICSGCRGHAGFTSSWRSVADTLRQKVEDAVREHPDYRVVFTGHSLGGALATVAGADLRGNKYDIDVFSYGAPRVGNRAFAEFLTVQTGGTLYRITHTNDIVPRLPPREFGYSHSSPEYWIKSGTLVPRRRRDIVKIEGIDATGGNNQPNIPSITAHLWYFGLIGTC

SEQ ID NO: 15408 - protein, 268 aa, Thermomyces lanuginosus
EVSQDLFNQFNLFAQYSAAAYCGKNNRAPAGTKITCTANACPEVEKADATILYTFKDSGVGDVTGFLALDNTNKLIVLSFRGSRSIENWIGNLNFELIEINDICSGCRGHAGFTSSWRSVADTLRQKVEDAVREHPDYRVVFTGHSLGGALATVAGADLRGNKYDIDVFSYGAPRVGNRAFAEFLTVQTGGTLYRITYTNDIVPRLPPREFGYSHSSPEYWIKSGTLVPVRRRDIVKIEGIDATGGNNQPNIPSITAHLWYFGLIGTC

SEQ ID NO: 15409 - protein, 268 aa, Thermomyces lanuginosus
EVSQDLFNQFNLFAQYSAAAYCGKNNRAPAGTKITCTANACPEVEKADATVLYTFKDSGVGDVTGFLALDNTNKLIVLSFRGSRSIENWIGNLNFELIEINDICSGCRGHAGFTSSWRSVADTLRQKVEDAVREHPDYRVVFTGHSLGGALATVAGADLRGNKYDIDVFSYGAPRVGNRAFAEFLTVQTGGTLYRITHTNDIVPRLPPREFGYSHSSPEYWIKFGTLVPVRRRDIVKIEGIDATGGNNQPNIPSITAHLWYFGLIGTC

SEQ ID NO: 15410 - protein, 268 aa, Thermomyces lanuginosus
EVSQDLFNQFNLFAQYSAAAYCGKNNRAPAGTKITCTANACPEVEKADATVLYTFKDSGVGDVTGFLALDNTNKLIVLSFRGSRSIENWIGNLNFELIEINDICSGCRGHAGFTSSWRSVADTLRQKVEDAVREHPDYRVVFTGHSLGGALATVAGADLRGNKYDIDVFSYGAPRVGNRAFAEFLTVQTGGTLYRITHTNDIVPRLPPREFGYSHSSPEYWIKSGTDVPVRRRDIVKIEGIDATGGNNQPNIPSITAHLWYFGLIGTC

SEQ ID NO: 15411 - protein, 268 aa, Thermomyces lanuginosus
EVSQDLFNQFNLFAQYSAAAYCGKNNRAPAGTKITCTANACPEVEKADATVLYTFKDSGVGDVTGFLALDNTNKLIVLSFRGSRSIENWIGNLNFELIEINDICSGCRGHAGFTSSWRSVADTLRQKVEDAVREHPDYRVVFTGHSLGGALATVAGADLRGNKYDIDVFSYGAPRVGNRAFAEFLTVQTGGTLYRITHTNDIVPRLPPREFGYSHSSPEYWIKPGTLVPVRRRDIVKIEGIDATGGNNQPNIPSITAHLWYFGLIGTC

SEQ ID NO: 15412 - protein, 268 aa, Thermomyces lanuginosus
EVSQDLFNQFNLFAQYSAAAYCGKNNRAPAGTKITCTANACPEVEKADATVLYSFKDSGVGDVTGFLARDNTNKLIVLSFRGSRSIENWIGNLNFELEEINDICSGCRGHAGFTSSWRSVADTLRQKVEDAVREHPDYRVVFTGHSLGGALATVAGADLRGNKYDIDVFSYGAPRVGNRAFAEFLTVQTGGTLYRITHTNDIVPRLPPRKFGYSHSSPEYWIKSGTLVPVRRRDIVKIEGIDATGGNNQPNIPSITAHLWYFGLIGTC

SEQ ID NO: 15413 - protein, 268 aa, Thermomyces lanuginosus
EVSQDLFNQFNLFAQYSAAAYCGKNNRAPAGTKITCTANACPEVEKADATLLYSFKDSGVGDVTGFLARDNTNKLIVLSFRGSRSIENWIGNLNFELEEINDICSGCRGHAGFTSSWRSVADTLRQKVEDAVREHPDYRVVFTGHSLGGALATVAGADLRGNKYDIDVFSYGAPRVGNRAFAEFLTVQTGGTLYRITITNDIVPRLPPREFGYSHSSPEYWIKSGTLVPVRRRDIVKIEGIDATGGNNQPNIPSITAHLWYFGLIGTC

SEQ ID NO: 15414 - protein, 268 aa, Thermomyces lanuginosus
EVSQDLFNQFNLFAQYSAAAYCGKNNRAPAGTKITCTANACPEVEKADATLLYTFKDSGVGDVTGFLALDNTNKLIVLSFRGSRSIENWIGNLNFELIEINDICSGCRGHAGFTSSWRSVADTLRQKVEDAVREHPDYRVVFTGHSLGGALATVAGADLRGNKYDIDVFSYGAPRVGNRAFAEFLTVQTGGTLYRITHTNDIVPRLPPREFGYSHSSPEYWIKPGTLVPVRRRDIVKIEGIDATGGNNQPNIPSITAHLWYFGLIGTC

SEQ ID NO: 15415 - protein, 268 aa, Thermomyces lanuginosus
EVSQDLFNQFNLFAQYSAAAYCGKNNRAPAGTKITCTANACPEVEKADATVLYSFEDSGVGDVTGFLALDNTNKLIVLSFRGSRSIENWIGNLNFELEEIDDICSGCRGHAGFTSSWRSVADTLRQKVEDAVREHPDYRVVFTGHSLGGALATVAGADLRGNKYDIDVFSYGAPRVGNRAFAEFLTVQTGGTLYRITHTNDIVPRLPPRKFGYSHSSPEFWIKSGTLVPVRRRDIVKIEGIDATGGNNQPNIPSITAHLWYFGLIGTC

SEQ ID NO: 15416 - protein, 268 aa, Thermomyces lanuginosus
EVSQDLFNQFNLFAQYSAAAYCGKNNRAPAGTKITCTANACPEVEKADATILYTFKDSGVGDVTGFLALDNTNKLIVLSFRGSRSIENWIGNLNFELIEINDICSGCRGHAGFTSSWRSVADTLRQKVEDAVREHPDYRVVFTGHSLGGGLATVAGADLRGNKYDIDVFSYGAPRVGNRAFAEFLTVQTGGTLYRITHTNDIVPRLPPREFGYSHSSPEYWIKSGTLVPVRRRDIVKIEGIDATGGNNQPNIPSITAHLWYFGLIGTC

SEQ ID NO: 15417 - protein, 268 aa, Thermomyces lanuginosus
EVSQDLFNQFNLFAQYSAAAYCGKNNRAPAGTKITCTANACPEVEKADATILYSFKDSGVGDVTGFLARDNTNKLIVLSFRGSRSIENWIGNLNFELEEINDICSGCRGHAGFTSSWRSVADTLRQKVEDAVREHPDYRVVFTGHSLGGALATVAGADLRGNKYDIDVFSYGAPRVGNRAFAEFLTVQTGGTLYRITSTNDIVPRLPPREFGYSHSSPEYWIKSGTLVPVRRRDIVKIEGIDATGGNNQPNIPSITAHLWYFGLIGTC

SEQ ID NO: 15418 - protein, 268 aa, Thermomyces lanuginosus
EVSQDLFNQFNLFAQYSAAAYCGKNNRAPAGTKITCTANACPEVEKADATVLYSFKDSGVGDVTGFLARDNTNKLIVLSFRGSRSIENWIGNLNFELEEINDICSGCRGHAGFTSSWRSVADTLRQKVEDAVREHPDYRVVFTGHSLGGALATVAGADLRGNKYDIDVFSYGAPRVGNRAFAEFLTVQTGGTLYRITYTNDIVPRLPPREFGYSHSSPEYWIKSGTLVPVRRRDIVKIEGIDATGGNNQPNIPSITAHLWYFGLIGTC

SEQ ID NO: 15419 - protein, 268 aa, Thermomyces lanuginosus
EVSQDLFNQFNLFAQYSAAAYCGKNNRAPAGTKITCTANACPEVEKADATILYTFKDSGVGDVTGFLALDNTNKLIVLSFRGSRSIENWIGNLNFELIEINDICSGCRGHAGFTSSWRSVADTLRQKVEDAVREHPDYRVVFTGHSLGGALATVAGADLRGNKYDIDVFSYGAPRVGNRAFAEFLTVQTGGTLYRITHTNDIVPRLPPREFGYSHSSPEYWIKSGTLPPVRRRDIVKIEGIDATGGNNQPNIPSITAHLWYFGLIGTC

SEQ ID NO: 15420 - protein, 268 aa, Thermomyces lanuginosus
EVSQDLFNQFNLFAQYSAAAYCGKNNRAPAGTNITCTANACPEVEKADATFLYSFEDSGVGDVTGFLALDNTNKLIVLSFRGTRSIKNWILDLNYTPQEINDICSGCRGHAGFTSSWRSVADTLRQKVEDAVREHPDYRVVFTGHSLGGALATVAGADLRGNKYDIDVFSYGAPRVGNRAFAEFLTVQTGGTLYRITHTNDIVPRLPPREFGYSHSSPEYWIKSGTLVPVRRRDIVKIEGIDATGGNNQPNIPSITAHLWYFGLIGTC

SEQ ID NO: 15421 - protein, 268 aa, Thermomyces lanuginosus
EVSQDLFNQFNLFAQYSAAAYCGKNNRAPAGTNITCTANACPEVEKADATFLYSFEDSGVGDVTGFLALDNTNKLIVLSFRGSRSWANWIADLNYTLQEINDICSGCRGHAGFTSSWRSVADTLRQKVEDAVREHPDYRVVFTGHSLGGALATVAGADLRGNKYDIDVFSYGAPRVGNRAFAEFLTVQTGGTLYRITHTNDIVPRLPPREFGYSHSSPEYWIKSGTLVPVRRRDIVKIEGIDATGGNNQPNTPSTTAHLWYFGLIGTC

SEQ ID NO: 15422 - protein, 268 aa, Thermomyces lanuginosus
EVSQDLFNQFNLFAQYSAAAYCGKNNRAPAGTKITCTANACPEVEKADATILYTFKDSGVGDVTGFLALDNTNKLIVLSFRGSRSIENWIGNLNFELIEINDICSGCRGHAGFTSSWRSVADTLRQKVEDAVREHPDYRVVFTGHSLGGALATVAGADLRGNKYDIDVFSYGAPRVGNRAFAEFLTVQTGGTLYRITHTNDIVPRLPPREFGYSHSSPEYWIKSGTLVPVRRRDIVKIEGIDATGGNNQPNIPSITVHLWYFGLIGTC

SEQ ID NO: 15423 - protein, 268 aa, Thermomyces lanuginosus
EVSQDLFNQFNLFAQYSAAAYCGKNNRAPAGTKITCTANACPEVEKADATVLYTFKDSGVGDVTGFLALDNTNKLIVLSFRGSRSIENWIGNLNFELIEINDICSGCRGHAGFTSSWRSVADTLRQKVEDAVREHPDYRVVFTGHSLGGALATVAGADLRGNKYDIDVFSYGAPRVGNRAFAEFLTVQTGGTLYRITHTNDIVPRLPPREFGYSHSSPEYWIKIGTLVPVRRRDIVKIEGIDATGGNNQPNIPSITAHLWYFGLIGTC

SEQ ID NO: 15424 - protein, 268 aa, Thermomyces lanuginosus
EVSQDLFNQFNLFAQYSAAAYCGKNNRAPAGTKITCTANACPEVEKADATILYSFKDSGVGDVTGFLARDNTNKLIVLSFRGSRSIENWIGNLNFELEEINDICSGCRGHAGFTSSWRSVADTLRQKVEDAVREHPDYRVVFTGHSLGGALATVAGADLRGNKYDIDVFSYGAPRVGNRAFAEFLTVQTGGTLYRITHTNDIVPRLPPREFGYSHSSPEYWIKFGTLVPVRRRDIVKIEGIDATGGNNQPNIPSITAHLWYFGLIGTC

SEQ ID NO: 15425 - protein, 268 aa, Thermomyces lanuginosus
EVSQDLFNQFNLFAQYSAAAYCGKNNRAPAGTKITCTANACPEVEKADATVLYSFKDSGVGDVTGFLARDNTNKLIVLSFRGSRSIENWIGNLNFELEEINDICSGCRGHAGFTSSWRSVADTLRQKVEDAVREHPDYRVVFTGHSLGGALATVAGADLRGNKYDIDVFSYGAPRVGNRAFAEFLTVQTGGTLYRITHTNDIVPRLPPREFGYSHSSPEYWIKIGTLVPVRRRDIVKIEGIDATGGNNQPNIPSITAHLWYFGLIGTC

SEQ ID NO: 15426 - protein, 268 aa, Thermomyces lanuginosus
EVSQDLFNQFNLFAQYSAAAYCGKNNRAPAGTNITCTANACPEVEKADATVLYSFEDSGVGDVTGFLALDNTNKLIVLSFRGSRSPANWIADLNYTPQEINDICSGCRGHAGFTSSWRSVADTLRQKVEDAVREHPDYRVVFTGHSLGGALATVAGADLRGNKYDIDVFSYGAPRVGNRAFAEFLTVQTGGTLYRITHTNDIVPRLPPREFGYSHSSPEYWIKSGTLVPVRRRDIVKIEGIDATGGNNQPNIPSITAHLWYFGLIGTC

SEQ ID NO: 15427 - protein, 268 aa, Thermomyces lanuginosus
EVSQDLFNQFNLFAQYSAAAYCGKNNRAPAGTKITCTANACPEVEKADATLLYTFKDSGVGDVTGFLALDNTNKLIVLSFRGSRSIENWIGNLNFELIEINDICSGCRGHAGFTSSWRSVADTLRQKVEDAVREHPDYRVVFTGHSLGGALATVAGADLRGNKYDIDVFSYGAPRVGNRAFAEFLTVQTGGTLYRITSTNDIVPRLPPREFGYSHSSPEYWIKSGTLVPVRRRDIVKIEGIDATGGNNQPNIPSITAHLWYFGLIGTC

SEQ ID NO: 15428 - protein, 268 aa, Thermomyces lanuginosus
EVSQDLFNQFNLFAQYSAAAYCGKNNRAPAGTKITCTANACPEVEKADATLLYTFKDSGVGDVTGFLALDNTNKLIVLSFRGSRSIENWIGNLNFELIEINDICSGCRGHAGFTSSWRSVADTLRQKVEDAVREHPDYRVVFTGHSLGGALATVAGADLRGNKYDIDVFSYGAPRVGNRAFAEFLTVQTGGTLYRITHTNDIVPRLPPREFGYSHSSPEYWIKSGTLPPVRRRDIVKIEGIDATGGNNQPNIPSITAHLWYFGLIGTC

SEQ ID NO: 15429 - protein, 268 aa, Thermomyces lanuginosus
EVSQDLFNQFNLFAQYSAAAYCGKNNRAPAGTKITCTANACPEVEKADATLLYTFKDSGVGDVTGFLALDNTNKLIVLSFRGSRSIENWIGNLNFELIEINDICSGCRGHAGFTSSWRSVADTLRQKVEDAVREHPDYRVVFTGHSLGGALATVAGADLRGNKYDIDVFSYGAPRVGNRAFAEFLTVQTGGTLYRITHTNDIVPRLPPREFGYSHSSPEYWIKFGTLVPVRRRDIVKIEGIDATGGNNQPNIPSITAHLWYFGLIGTC

SEQ ID NO: 15430 - protein, 268 aa, Thermomyces lanuginosus
EVSQDLFNQFNLFAQYSAAAYCGKNNRAPAGTKITCTANACPEVEKADATILYTFKDSGVGDVTGFLALDNTNKLIVLSFRGSRSIENWIGNLNFELIEINDICSGCRGHAGFTSSWRSVADTLRQKVEDAVREHPDYRVVFTGHSLGGALATVAGADLRGNKYDIDVFSYGAPRVGNRAFAEFLTVQTGGTLYRITHTNDIVPRLPPREFGYSHSSPEYWIKSGTLVPVRRRDIVKIEGIDATGGNNQPNIPSITIHLWYFGLIGTC

SEQ ID NO: 15431 - protein, 268 aa, Thermomyces lanuginosus
EVSQDLFNQFNLFAQYSAAAYCGKNNRAPAGTKITCTANACPEVEKADATVLYSFKDSGVGDVTGFLARDNTNKLIVLSFRGSRSIENWIGNLNFELEEINDICSGCRGHAGFTSSWRSVADTLRQKVEDAVREHPDYRVVFTGHSLGGALATVAGADLRGNKYDIDVFSYGAPRVGNRAFAEFLTVQTGGTLYRITITNDIVPRLPPREFGYSHSSPEYWIKSGTLVPVRRRDIVKIEGIDATGGNNQPNIPSITAHLWYFGLIGTC

SEQ ID NO: 15432 - protein, 268 aa, Thermomyces lanuginosus
EVSQDLFNQFNLFAQYSAAAYCGKNNRAPAGTKITCTANACPEVEKADATILYSFKDSGVGDVTGFLARDNTNKLIVLSFRGSRSIENWIGNLNFELEEINDICSGCRGHAGFTSSWRSVADTLRQKVEDAVREHPDYRVVFTGHSLGGALATVAGADLRGNKYDIDVFSYGAPRVGNRAFAEFLTVQTGGTLYRITHTNDIVPRLPPREFGYSHSSPEYWIKSGTLVPVRRRDIVKIEGIDATGGNNQPNIPSGTAHLWYFGLIGTC

SEQ ID NO: 15433 - protein, 268 aa, Thermomyces lanuginosus
EVSQDLFNQFNLFAQYSAAAYCGKNNRAPAGTKITCTANACPEVEKADATVLYTFKDSGVGDVTGFLALDNTNKLIVLSFRGSRSIENWIGNLNFELIEINDICSGCRGHAGFTSSWRSVADTLRQKVEDAVREHPDYRVVFTGHSLGGALATVAGADLRGNKYDIDVFSYGAPRVGNRAFAEFLTVQTGGTLYRITYTNDIVPRLPPREFGYSHSSPEYWIKSGTLVPVRRRDIVKIEGIDATGGNNQPNIPSITAHLWYFGLIGTC

SEQ ID NO: 15434 - protein, 268 aa, Thermomyces lanuginosus
EVSQDLFNQFNLFAQYSAAAYCGKNNRAPAGTKITCTANACPEVEKADATLLYSFKDSGVGDVTGFLARDNTNKLIVLSFRGSRSIENWIGNLNFELEEINDICSGCRGHAGFTSSWRSVADTLRQKVEDAVREHPDYRVVFTGHSLGGALATVAGADLRGNKYDIDVFSYGAPRVGNRAFAEFLTVQTGGTLYRITHTNDIVPRLPPREFGYSHSSPEYWIKSGTLVPVRRRDIVKIEGIDATGGNNQPNIPSGTAHLWYFGLIGTC

SEQ ID NO: 15435 - protein, 268 aa, Thermomyces lanuginosus
EVSQDLFNQFNLFAQYSAAAYCGKNNRAPAGTKITCTANACPEVEKADATVLYSFKDSGVGDVTGFLARDNTNKLIVLSFRGSRSIENWIGNLNFELEEINDICSGCRGHAGFTSSWRSVADTLRQKVEDAVREHPDYRVVFTGHSLGGALATVAGADLRGNKYDIDVFSYGAPRVGNRAFAEFLTVQTGGTLYRITHTNDIVPRLPPREFGYSHSSPEYWIKSGTLVPVRRRDIVKIEGIDATGGNNQPNIPSITVHLWYFGLIGTC

SEQ ID NO: 15436 - protein, 268 aa, Thermomyces lanuginosus
EVSQDLFNQFNLFAQYSAAAYCGKNNRAPAGTKITCTANACPEVEKADATLLYTFKDSGVGDVTGFLALDNTNKLIVLSFRGSRSIENWIGNLNFELIEINDICSGCRGHAGFTSSWRSVADTLRQKVEDAVREHPDYRVVFTGHSLGGALATVAGADLRGNKYDIDVFSYGAPRVGNRAFAEFLTVQTGGTLYRITHTNDIVPRLPPREFGYSHSSPEYWIKSGTLVPVRRRDIVKIEGIDATGGNNQPNIPSITVHLWYFGLIGTC

SEQ ID NO: 15437 - protein, 268 aa, Thermomyces lanuginosus
EYSQDLFNQFNLFAQYSAAAYCGKNNRAPAGTKITCTANACPEVEKADATVLYSFKDSGVGDVTGFLARDNTNKLIVLSFRGSRSIENWIGNLNFELEEINDICSGCRGHAGFTSSWRSVADTLRQKVEDAVREHPDYRVVFTGHSLGGALATVAGADLRGNKYDIDVFSYGAPRVGNRAFAEFLTVQTGGTLYRITHTNDIVPRLPPREFGYSHSSPEYWIKSGTLVPVRRRDIVKIEGIDATGGNNQPNIPSITAHLWYFGLIGTC

SEQ ID NO: 15438 - protein, 268 aa, Thermomyces lanuginosus
EVSQDLFNQFNLFAQYSAAAYCGKNNRAPAGTKITCTANACPEVEKADATLLYSFKDSGVGDVTGFLARDNTNKLIVLSFRGSRSIENWIGNLNFELEEINDICSGCRGHAGFTSSWRSVADTLRQKVEDAVREHPDYRVVFTGHSLGGALATVAGADLRGNKYDIDVFSYGAPRVGNRAFAEFLTVQTGGTLYRITHTNDIVPRLPPREFGYSHSSPEYWIKSGTLVPVRRRDIVKIEGIDATGGNNQPNIPSITVHLWYFGLIGTC

SEQ ID NO: 15439 - protein, 268 aa, Thermomyces lanuginosus
EVSQDLFNQFNLFAQYSAAAYCGKNNRAPAGTKITCTANACPEVEKADATVLYTFKDSGVGDVTGFLALDNTNKLIVLSFRGSRSIENWIGNLNFELIEINDICSGCRGHAGFTSSWRSVADTLRQKVEDAVREHPDYRVVFTGHSLGGALATVAGADLRGNKYDIDVFSYGAPRVGNRAFAEFLTVQTGGTLYRITNTNDIVPRLPPREFGYSHSSPEYWIKSGTLVPVRRRDIVKIEGIDATGGNNQPNIPSITAHLWYFGLIGTC

SEQ ID NO: 15440 - protein, 268 aa, Thermomyces lanuginosus
EVSQDLFNQFNLFAQYSAAAYCGKNNRAPAGTKITCTANACPEVEKADATVLYTFKDSGVGDVTGFLALDNTNKLIVLSFRGSRSIENWIGNLNFELIEINDICSGCRGHAGFTSSWRSVADTLRQKVEDAVREHPDYRVVFAGHSLGGALATVAGADLRGNKYDIDVFSYGAPRVGNRAFAEFLTVQTGGTLYRITHTNDIVPRLPPREFGYSHSSPEYWIKSGTLVPVRRRDIVKIEGIDATGGNNQPNIPSITAHLWYFGLIGTC

SEQ ID NO: 15441 - protein, 268 aa, Thermomyces lanuginosus
EVSQDLFNQFNLFAQYSAAAYCGKNNRAPAGTKITCTANACPEVEKADATLLYSFKDSGVGDVTGFLARDNTNKLIVLSFRGSRSIENWIGNLNFELEEINDICSGCRGHAGFTSSWRSVADTLRQKVEDAVREHPDYRVVFAGHSLGGALATVAGADLRGNKYDIDVFSYGAPRVGNRAFAEFLTVQTGGTLYRITHTNDIVPRLPPREFGYSHSSPEYWIKSGTLVPVRRRDIVKIEGIDATGGNNQPNIPSITAHLWYFGLIGTC

SEQ ID NO: 15442 - protein, 268 aa, Thermomyces lanuginosus
EVSQDLFNQFNLFAQYSAAAYCGKNNRAPAGTKITCTANACPEVEKADATLLYSFKDSGVGDVTGFLARDNTNKLIVLSFRGSRSIENWIGNLNFELEEINDICSGCRGHAGFTSSWRSVADTLRQKVEDAVREHPDYRVVFTGHSLGGALATVAGADLRGNKYDIDVFSYGAPRVGNRAFAEFLTVQTGGTLYRITHTNDIVPRLPPREFGYSHSSPEYWIKIGTLVPVRRRDIVKIEGIDATGGNNQPNIPSITAHLWYFGLIGTC

SEQ ID NO: 15443 - protein, 268 aa, Thermomyces lanuginosus
EVSQDLFNQFNLFAQYSAAAYCGKNNRAPAGTKITCTANACPEVEKADATILYTFKDSGVGDVTGFLALDNTNKLIVLSFRGSRSIENWIGNLNFELIEINDICSGCRGHAGFTSSWRSVADTLRQKVEDAVREHPDYRVVFTGHSLGGALATVAGADLRGNKYDIDVFSYGAPRVGNRAFAEFLTVQTGGTLYRITSTNDIVPRLPPREFGYSHSSPEYWIKSGTLVPVRRRDIVKIEGIDATGGNNQPNIPSITAHLWYFGLIGTC

SEQ ID NO: 15444 - protein, 268 aa, Thermomyces lanuginosus
EVSQDLFNQFNLFAQYSAAAYCGKNNRAPAGTKITCTANACPEVEKADATILYSFKDSGVGDVTGFLARDNTNKLIVLSFRGSRSIENWIGNLNFELEEINDICSGCRGHAGFTSSWRSVADTLRQKVEDAVREHPDYRVVFTGHSLGGALATVAGADLRGNKYDIDVFSYGAPRVGNRAFAEFLTVQTGGTLYRITNTNDIVPRLPPREFGYSHSSPEYWIKSGTLVPVRRRDIVKIEGIDATGGNNQPNIPSITAHLWYFGLIGTC

SEQ ID NO: 15445 - protein, 268 aa, Thermomyces lanuginosus
EVSQDLFNQFNLFAQYSAAAYCGKNNRAPAGTKITCTANACPEVEKADATLLYTFKDSGVGDVTGFLALDNTNKLIVLSFRGSRSIENWIGNLNFELIEINDICSGCRGHAGFTSSWRSVADTLRQKVEDAVREHPDYRVVFTGHSLGGALATVAGADLRGNKYDIDVFSYGAPRVGNRAFAEFLTVQTGGTLYRITLTNDIVPRLPPREFGYSHSSPEYWIKSGTLVPVRRRDIVKIEGIDATGGNNQPNIPSITAHLWYFGLIGTC

SEQ ID NO: 15446 - protein, 268 aa, Thermomyces lanuginosus
EVSQDLFNQFNLFAQYSAAAYCGKNNRAPAGTKITCTANACPEVEKADATILYTFKDSGVGDVTGFLALDNTNKLIVLSFRGSRSIENWIGNLNFELIEINDICSGCRGHAGFTSSWRSVADTLRQKVEDAVREHPDYRVVFTGHSLGGALATVAGADLRGNKYDIDVFSYGAPRVGNRAFAEFLTVQTGGTLYRITHTNDIVPRLPPREFGYSHSSPEYWIKFGTLVPVRRRDIVKIEGIDATGGNNQPNIPSITAHLWYFGLIGTC

SEQ ID NO: 15447 - protein, 268 aa, Thermomyces lanuginosus
EVSQDLFNQFNLFAQYSAAAYCGKNNRAPAGTKITCTANACPEVEKADATLLYTFKDSGVGDVTGFLALDNTNKLIVLSFRGSRSIENWIGNLNFELIEINDICSGCRGHAGFTSSWRSVADTLRQKVEDAVREHPDYRVVFTGHSLGGALATVAGADLRGNKYDIDVFSYGAPRVGNRAFAEFLTVQTGGTLYRITHTNDIVPRLPPREFGYSHSSPEYWIKIGTLVPVRRRDIVKIEGIDATGGNNQPNIPSITAHLWYFGLIGTC

SEQ ID NO: 15448 - protein, 268 aa, Thermomyces lanuginosus
EVSQDLFNQFRLFAQYSAAAYCGKNNRAPAGTQITCTGNACPEVEKADATFLYSFQNSGVGDVTGFLALDNTNKLIVLSFRGSRSIENWINNLRFDLKEINDICSGCRGHSGFTSSWRSVADTLRQKVEDAVREHPDYRVVFTGHSLGGALATVAGADLRGNTYDIDVFSYGAPRVGNRAFAEFLTVQTGGTLYRITHTNDIVPRLPPREFGYSHPSPEYWIKSGTGVPVRRRDIVKIEGIDATGGNNQPNIPSITAHLWYFGLIGTC

SEQ ID NO: 15449 - protein, 268 aa, Thermomyces lanuginosus
EVSQDLFNQFNLFAQYSAAAYCGKNNRAPAGTKITCTANACPEVEKADATLLYSFKDSGVGDVTGFLARDNTNKLIVLSFRGSRSIENWIGNLNFELEEINDICSGCRGHAGFTSSWRSVADTLRQKVEDAVREHPDYRVVFTGHSLGGGLATVAGADLRGNKYDIDVFSYGAPRVGNRAFAEFLTVQTGGTLYRITHTNDIVPRLPPREFGYSHSSPEYWIKSGTLVPVRRRDIVKIEGIDATGGNNQPNIPSITAHLWYFGLIGTC

SEQ ID NO: 15450 - protein, 268 aa, Thermomyces lanuginosus
EVSQDLFNQFNLFAQYSAAAYCGKNNRAPAGTKITCTANACPEVEKADATVLYTFKDSGVGDVTGFLALDNTNKLIVLSFRGSRSIENWIGNLNFELIEINDICSGCRGHAGFTSSWRSVADTLRQKVEDAVREHPDYRVVFTGHSLGGALATVAGADLRGNKYDIDVFSYGAPRVGNRAFAEFLTVQTGGTLYRITSTNDIVPRLPPREFGYSHSSPEYWIKSGTLVPVRRRDIVKIEGIDATGGNNQPNIPSITAHLWYFGLIGTC

SEQ ID NO: 15451 - protein, 268 aa, Thermomyces lanuginosus
EVSQDLFNQFNLFAQYSAAAYCGKNNRAPAGTKITCTANACPEVEKADATILYTFKDSGVGDVTGFLALDNTNKLIVLSFRGSRSIENWIGNLNFELIEINDICSGCRGHAGFTSSWRSVADTLRQKVEDAVREHPDYRVVFAGHSLGGALATVAGADLRGNKYDIDVFSYGAPRVGNRAFAEFLTVQTGGTLYRITHTNDIVPRLPPREFGYSHSSPEYWIKSGTLVPVRRRDIVKIEGIDATGGNNQPNIPSITAHLWYFGLIGTC

SEQ ID NO: 15452 - protein, 268 aa, Thermomyces lanuginosus
EVSQDLFNQFNLFAQYSAAAYCGKNNRAPAGTKITCTANACPEVEKADATILYSFKDSGVGDVTGFLARDNTNKLIVLSFRGSRSIENWIGNLNFELEEINDICSGCRGHAGFTSSWRSVADTLRQKVEDAVREHPDYRVVFTGHSLGGALATVAGADLRGNKYDIDVFSYGAPRVGNRAFAEFLTVQTGGTLYRITHTNDIVPRLPPREFGYSHSSPEYWIKSGTLVPVRRRDIVKIEGIDATGGNNQPNIPSITVHLWYFGLIGTC

SEQ ID NO: 15453 - protein, 268 aa, Thermomyces lanuginosus
EVSQDLFNQFNLFAQYSAAAYCGKNNRAPAGTQITCTGNACPEVEKADATFLYSFQNSGVGDVTGFLALDNTNKLIVLSFRGSRSIENWINNLRFDLKEINDICSGCRGHSGFTSSWRSVADTLRQKVEDAVREHPDYRVVFTGHSLGGALATVAGADLRGNTYDIDVFSYGAPRVGNRAFAEFLTVQTGGTLYRITHTNDIVPRLPPREFGYSHPSPEYWIKSGTGVPVRRRDIVKIEGIDATGGNNRPNIPSITAHLWYFGLIGTC

SEQ ID NO: 15454 - protein, 268 aa, Thermomyces lanuginosus
EVSQDLFNQFNLFAQYSAAAYCGKNNRAPAGTQITCTGNACPEVEKADATFIYSFEDSGEGDVTGFLALDNTNKLIVLSFRGSRSIENWINNLRFDLKEINDICSGCRGHAGFISSWRSVADTLRQKVEDAVREHPDYRVVFTGHSLGGALATVAGADLRGNGYDIDMFSYGAPRVGNRAFAEFLTVQTGGTLYRITHTNDIVPRLPPRDFGYSHPSPEYWIKSGTGVPVRRRDIVKIEGIDATGGNNQPNIPDITAHLWYFGLIGTC

SEQ ID NO: 15455 - protein, 268 aa, Thermomyces lanuginosus
EVSQDLFNQFNLFAQYSAAAYCGKNNRAPAGTKITCTANACPEVEKADATVLYSFKDSGVGDVTGFLARDNTNKLIVLSFRGSRSIENWIGNLNFELEEINDICSGCRGHAGFTSSWRSVADTLRQKVEDAVREHPDYRVVFTGHSLGGALATVAGADLRGNKYDIDVFSYGAPRVGNRAFAEFLTDQTGGTLYRITHTNDIVPRLPPREFGYSHSSPEYWIKSGTLVPVRRRDIVKIEGIDATGGNNQPNIPSITAHLWYFGLIGTC

SEQ ID NO: 15456 - protein, 268 aa, Thermomyces lanuginosus
EVSQDLFNQFNLFAQYSAAAYCGKNNRAPAGTKITCTANACPEVEKADATVLYSFEDSGVGDVTGFLARDNTNKLIVLSFRGSRSIENWIGNLNFELEEIDDICSGCRGHAGFTSSWRSVADTLRQKVEDAVREHPDYRVVFTGHSLGGALATVAGADLRGNKYDIDVFSYGAPRVGNRAFAEFLTVQTGGTLYRITHTNDIVPRLPPREFGYSHSSPEFWIKSGTLVPVRRRDIVKIEGIDATGGNNQPNIPSITAHLWYFGLIGTC

SEQ ID NO: 15457 - protein, 268 aa, Thermomyces lanuginosus
EVSQDLFNQFNLFAQYSAAAYCGKNNRAPAGTKITCTANACPEVEKADATILYTFKDSGVGDVTGFLALDNTNKLIVLSFRGSRSIENWIGNLNFELIEINDICSGCRGHAGFTSSWRSVADTLRQKVEDAVREHPDYRVVFTGHSLGGALATVAGADLRGNKYDIDVFSYGAPRVGNRAFAEFLTVQTGGTLYRITHTNDIVPRLPPREFGYSHSSPEYWIKSGTLVPRRRRDIVKIEGIDATGGNNQPNIPSITAHLWYFGLIGTC

SEQ ID NO: 15458 - protein, 268 aa, Thermomyces lanuginosus
EVSQDLFNQFNLFAQYSAAAYCGKNNRAPAGTKITCTANACPEVEKADATVLYSFKDSGVGDVTGFLARDNTNKLIVLSFRGSRSIENWIGNLNFELEEINDICSGCRGHAGFTSSWRSVADTLRQKVEDAVREHPDYRVVFTGHSLGGALATVAGADLRGNKYDIDVFSYGAPRVGNRAFAEFLTVQTGGTLYRITHTNDIVPRLPPREFGYSHSSPEYWIKSGTDVPVRRRDIVKIEGIDATGGNNQPNIPSITAHLWYFGLIGTC

SEQ ID NO: 15459 - protein, 268 aa, Thermomyces lanuginosus
EVSQDLFNQFNLFAQYSAAAYCGKNNRAPAGTKITCTANACPEVEKADATVLYSFKDSGVGDVTGFLARDNTNKLIVLSFRGSRSIENWIGNLNFELEEINDICSGCRGHAGFTSSWRSVADTLRQKVEDAVREHPDYRVVFTGHSLGGALATVAGADLRGNKYDIDVFSYGAPRVGNRAFAEFLTVQTGGTLYRITHTNDIVPRLPPREFGYSHSSPEYWIKSGTLVPVRRRDIVKIEGIDATGGNNQPNIPSGTAHLWYFGLIGTC

SEQ ID NO: 15460 - protein, 268 aa, Thermomyces lanuginosus
EVSQDLFNQFNLFAQYSAAAYCGKNNRAPAGTKITCTANACPEVEKADATVLYSFKDSGVGDVTGFLARDNTNKLIVLSFRGSRSIENWIGNLNFELEEINDICSGCRGHAGFTSSWRSVADTLRQKVEDAVREHPDYRVVFTGHSLGGALATVAGADLRGNKYDIDVFSYGAPRVGNRAFAEFLTVQTGGTLYRITLTNDIVPRLPPREFGYSHSSPEYWIKSGTLVPVRRRDIVKIEGIDATGGNNQPNIPSITAHLWYFGLIGTC

SEQ ID NO: 15461 - protein, 268 aa, Thermomyces lanuginosus
EVSQDLFNQFNLFAQYSAAAYCGKNNRAPAGTKITCTANACPEVEKADATVLYSFKDSGVGDVTGFLARDNTNKLIVLSFRGSRSIENWIGNLNFELEEINDICSGCRGHAGFTSSWRSVADTLRQKVEDAVREHPDYRVVFAGHSLGGALATVAGADLRGNKYDIDVFSYGAPRVGNRAFAEFLTVQTGGTLYRITHTNDIVPRLPPREFGYSHSSPEYWIKSGTLVPVRRRDIVKIEGIDATGGNNQPNIPSITAHLWYFGLIGTC

SEQ ID NO: 15462 - protein, 268 aa, Thermomyces lanuginosus
EVSQDLFNQFNLFAQYSAAAYCGKNNRAPAGTKITCTANACPEVEKADATLLYSFKDSGVGDVTGFLARDNTNKLIVLSFRGSRSIENWIGNLNFELEEINDICSGCRGHAGFTSSWRSVADTLRQKVEDAVREHPDYRVVFTGHSLGGALATVAGADLRGNKYDIDVFSYGAPRVGNRAFAEFLTVQTGGTLYRITNTNDIVPRLPPREFGYSHSSPEYWIKSGTLVPVRRRDIVKIEGIDATGGNNQPNIPSITAHLWYFGLIGTC

SEQ ID NO: 15463 - protein, 268 aa, Thermomyces lanuginosus
EVSQDLFNQFNLFAQYSAAAYCGKNNRAPAGTKITCTANACPEVEKADATVLYSFKDSGVGDVTGFLARDNTNKLIVLSFRGSRSIENWIGNLNFELEEINDICSGCRGHAGFTSSWRSVADTLRQKVEDAVREHPDYRVVFTGHSLGGALATVAGADLRGNKYDIDVFSYGAPRVGNRAFAEFLTVQTGGTLYRITHTNDIVPRLPPREFGYSHSSPEYWIKSGTLVPVRRRDIVKIEGIDATGGNNQPNIPSITIHLWYFGLIGTC

SEQ ID NO: 15464 - protein, 268 aa, Thermomyces lanuginosus
EVSQDLFNQFNLFAQYSAAAYCGKNNRAPAGTKITCTANACPEVEKADATVLYSFKDSGVGDVTGFLARDNTNKLIVLSFRGSRSIENWIGNLNFELEEINDICSGCRGHAGFTSSWRSVADTLRQKVEDAVREHPDYRVVFTGHSLGGALATVAGADLRGNKYDIDVFSYGAPRVGNRAFAEFLTVQTGGTLYRITHTNDIVPRLPPREFGYSHSSPEYWIKPGTLVPVRRRDIVKIEGIDATGGNNQPNIPSITAHLWYFGLIGTC

SEQ ID NO: 15465 - protein, 268 aa, Thermomyces lanuginosus
EVSQDLFNQFNLFAQYSAAAYCGKNNRAPAGTKITCTANACPEVEKADATVLYTFKDSGVGDVTGFLALDNTNKLIVLSFRGSRSIENWIGNLNFELIEINDICSGCRGHAGFTSSWRSVADTLRQKVEDAVREHPDYRVVFTGHSLGGALATVAGADLRGNKYDIDVFSYGAPRVGNRAFAEFLTVQTGGTLYRITHTNDIVPRLPPREFGYSHSSPEYWIKSGTLVPVRRRDIVKIEGIDATGGNNQPNIPSITVHLWYFGLIGTC

SEQ ID NO: 15466 - protein, 268 aa, Thermomyces lanuginosus
EVSQDLFNQFNLFAQYSAAAYCGKNNRAPAGTKITCTANACPEVEKADATVLYTFKDSGVGDVTGFLALDNTNKLIVLSFRGSRSIENWIGNLNFELIEINDICSGCRGHAGFTSSWRSVADTLRQKVEDAVREHPDYRVVFTGHSLGGALATVAGADLRGNKYDIDVFSYGAPRVGNRAFAEFLTVQTGGTLYRITHTNDIVPRLPPREFGYSHSSPEYWIKSGTLVPVRRRDIVKIEGIDATGGNNQPNIPSITIHLWYFGLIGTC

SEQ ID NO: 15467 - protein, 268 aa, Thermomyces lanuginosus
EVSQDLFNQFNLFAQYSAAAYCGKNNRAPAGTKITCTANACPEVEKADATVLYSFEDSGVGDVTGFLALDNTNKLIVLSFRGSRSWENWMADLNALLKEINDICSGCRGHAGFTSSWRSVADTLRQKVEDAVREHPDYRVVFTGHSLGGALATVAGADLRGNKYDIDVFSYGAPRVGNRAFAEFLTVQTGGTLYRITHTNDIVPRLPPRELGYSHSSPEYWIKSGTLVPVRRRDIVKIEGIDATGGNNQPNIPSITAHLWYFGLIGTC

SEQ ID NO: 15468 - protein, 268 aa, Thermomyces lanuginosus
EVSQDLFNQFNLFAQYSAAAYCGKNNRAPAGTKITCTANACPEVEKADATVLYSFKDSGVGDVTGFLARDNTNKLIVLSFRGSRSIENWIGNLNFELEEINDICSGCRGHAGFTSSWRSVADTLRQKVEDAVREHPDYRVVFTGHSLGGALATVAGADLRGNKYDIDVFSYGAPRVGNRAFAEFLTVQTGGTLYRITHTNDIVPRLPPREFGYSHSSPEYWIKSGTLVPRRRRDIVKIEGIDATGGNNQPNIPSITAHLWYFGLIGTC

SEQ ID NO: 15469 - protein, 268 aa, Thermomyces lanuginosus
EVSQDLFNQFNLFAQYSAAAYCGKNNRAPAGTKITCTANACPEVEKADATILYSFKDSGVGDVTGFLARDNTNKLIVLSFRGSRSIENWIGNLNFELEEINDICSGCRGHAGFTSSWRSVADTLRQKVEDAVREHPDYRVVFTGHSLGGALATVAGADLRGNKYDIDVFSYGAPRVGNRAFAEFLTVQTGGTLYRITHTNDIVPRLPPREFGYSHSSPEYWIKSGTDVPVRRRDIVKIEGIDATGGNNQPNIPSITAHLWYFGLIGTC

SEQ ID NO: 15470 - protein, 268 aa, Thermomyces lanuginosus
EVSQDLFNQFNLFAQYSAAAYCGKNNRAPAGTKITCTANACPEVEKADATILYSFKDSGVGDVTGFLARDNTNKLIVLSFRGSRSIENWIGNLNFELEEINDICSGCRGHAGFTSSWRSVADTLRQKVEDAVREHPDYRVVFTGHSLGGALATVAGADLRGNKYDIDVFSYGAPRVGNRAFAEFLTVQTGGTLYRITYTNDIVPRLPPREFGYSHSSPEYWIKSGTLVPVRRRDIVKIEGIDATGGNNQPNIPSITAHLWYFGLIGTC

SEQ ID NO: 15471 - protein, 268 aa, Thermomyces lanuginosus
EVSQDLFNQFNLFAQYSAAAYCGKNNRAPAGTKITCTANACPEVEKADATILYTFKDSGVGDVTGFLALDNTNKLIVLSFRGSRSIENWIGNLNFELIEINDICSGCRGHAGFTSSWRSVADTLRQKVEDAVREHPDYRVVFTGHSLGGALATVAGADLRGNKYDIDVFSYGAPRVGNRAFAEFLTVQTGGTLYRITHTNDIVPRLPPREFGYSHSSPEYWIKPGTLVPVRRRDIVKIEGIDATGGNNQPNIPSITAHLWYFGLIGTC

SEQ ID NO: 15472 - protein, 268 aa, Thermomyces lanuginosus
EVSQDLFNQFNLFAQYSAAAYCGKNNRAPAGTKITCTANACPEVEKADATLLYSFKDSGVGDVTGFLARDNTNKLIVLSFRGSRSIENWIGNLNFELEEINDICSGCRGHAGFTSSWRSVADTLRQKVEDAVREHPDYRVVFTGHSLGGALATVAGADLRGNKYDIDVFSYGAPRVGNRAFAEFLTVQTGGTLYRITHTNDIVPRLPPREFGYSHSSPEYWIKPGTLVPVRRRDIVKIEGIDATGGNNQPNIPSITAHLWYFGLIGTC

SEQ ID NO: 15473 - protein, 268 aa, Thermomyces lanuginosus
EVSQDLFNQFNLFAQYSAAAYCGKNNRAPAGTKITCTANACPEVEKADATVLYSFKDSGVGDVTGFLARDNTNKLIVLSFRGSRSIENWIGNLNFELEEINDICSGCRGHAGFTSSWRSVADTLRQKVEDAVREHPDYRVVFTGHSLGGALATVAGADLRGNKYDIDVFSYGAPRVGNRAFAEFLTVQTGGTLYRITHTNDIVPRLPPREFGYSHSSPEYWIKFGTLVPVRRRDIVKIEGIDATGGNNQPNIPSITAHLWYFGLIGTC

SEQ ID NO: 15474 - protein, 268 aa, Thermomyces lanuginosus
EVSQDLFNQFNLFAQYSAAAYCGKNNRAPAGTKITCTANACPEVEKADATILYSFKDSGVGDVTGFLARDNTNKLIVLSFRGSRSIENWIGNLNFELEEINDICSGCRGHAGFTSSWRSVADTLRQKVEDAVREHPDYRVVFTGHSLGGALATVAGADLRGNKYDIDVFSYGAPRVGNRAFAEFLTVQTGGTLYRITHTNDIVPRLPPREFGYSHSSPEYWIKSGTLVPRRRRDIVKIEGIDATGGNNQPNIPSITAHLWYFGLIGTC

SEQ ID NO: 15475 - protein, 268 aa, Thermomyces lanuginosus
EVSQDLFNQFNLFAQYSAAAYCGKNNRAPAGTKITCTANACPEVEKADATVLYTFKDSGVGDVTGFLALDNTNKLIVLSFRGSRSIENWIGNLNFELIEINDICSGCRGHAGFTSSWRSVADTLRQKVEDAVREHPDYRVVFTGHSLGGALATVAGADLRGNKYDIDVFSYGAPRVGNRAFAEFLTVQTGGTLYRITHTNDIVPRLPPREFGYSHSSPEYWIKSGTLPPVRRRDIVKIEGIDATGGNNQPNIPSITAHLWYFGLIGTC

SEQ ID NO: 15476 - protein, 268 aa, Thermomyces lanuginosus
EVSQDLFNQFNLFAQYSAAAYCGKNNRAPAGTKITCTANACPEVEKADATLLYSFKDSGVGDVTGFLARDNTNKLIVLSFRGSRSIENWIGNLNFELEEINDICSGCRGHAGFTSSWRSVADTLRQKVEDAVREHPDYRVVFTGHSLGGALATVAGADLRGNKYDIDVFSYGAPRVGNRAFAEFLTVQTGGTLYRITHTNDIVPRLPPREFGYSHSSPEYWIKSGTDVPVRRRDIVKIEGIDATGGNNQPNIPSITAHLWYFGLIGTC

SEQ ID NO: 15477 - protein, 268 aa, Thermomyces lanuginosus
EVSQDLFNQFNLFAQYSAAAYCGKNNRAPAGTKITCTANACPEVEKADATLLYTFKDSGVGDVTGFLALDNTNKLIVLSFRGSRSIENWIGNLNFELIEINDICSGCRGHAGFTSSWRSVADTLRQKVEDAVREHPDYRVVFTGHSLGGGLATVAGADLRGNKYDIDVFSYGAPRVGNRAFAEFLTVQTGGTLYRITHTNDIVPRLPPREFGYSHSSPEYWIKSGTLVPVRRRDIVKIEGIDATGGNNQPNIPSITAHLWYFGLIGTC

SEQ ID NO: 15478 - protein, 268 aa, Thermomyces lanuginosus
EVSQDLFNQFNLFAQYSAAAYCGKNNRAPAGTKITCTANACPEVEKADATLLYTFKDSGVGDVTGFLALDNTNKLIVLSFRGSRSIENWIGNLNFELIEINDICSGCRGHAGFTSSWRSVADTLRQKVEDAVREHPDYRVVFTGHSLGGALATVAGADLRGNKYDIDVFSYGAPRVGNRAFAEFLTVQTGGTLYRITNTNDIVPRLPPREFGYSHSSPEYWIKSGTLVPVRRRDIVKIEGIDATGGNNQPNIPSITAHLWYFGLIGTC

SEQ ID NO: 15479 - protein, 268 aa, Thermomyces lanuginosus
EVSQDLFNQFNLFAQYSAAAYCGKNNRAPAGTKITCTANACPEVEKADATILYSFKDSGVGDVTGFLARDNTNKLIVLSFRGSRSIENWIGNLNFELEEINDICSGCRGHAGFTSSWRSVADTLRQKVEDAVREHPDYRVVFTGHSLGGALATVAGADLRGNKYDIDVFSYGAPRVGNRAFAEFLTVQTGGTLYRITHTNDIVPRLPPREFGYSHSSPEYWIKSGTLPPVRRRDIVKIEGIDATGGNNQPNIPSITAHLWYFGLIGTC

SEQ ID NO: 15480 - protein, 268 aa, Thermomyces lanuginosus
EVSQDLFNQFNLFAQYSAAAYCGKNNRAPAGTKITCTANACPEVEKADATVLYSFKDSGVGDVTGFLARDNTNKLIVLSFRGSRSIENWIGNLNFELEEINDICSGCRGHAGFTSSWRSVADTLRQKVEDAVREHPDYRVVFTGHSLGGGLATVAGADLRGNKYDIDVFSYGAPRVGNRAFAEFLTVQTGGTLYRITHTNDIVPRLPPREFGYSHSSPEYWIKSGTLVPVRRRDIVKIEGIDATGGNNQPNIPSITAHLWYFGLIGTC

SEQ ID NO: 15481 - protein, 268 aa, Thermomyces lanuginosus
EVSQDLFNQFNLFAQYSAAAYCGKNNRAPAGTKITCTANACPEVEKADATILYSFKDSGVGDVTGFLARDNTNKLIVLSFRGSRSIENWIGNLNFELEEINDICSGCRGHAGFTSSWRSVADTLRQKVEDAVREHPDYRVVFTGHSLGGALATVAGADLRGNKYDIDVFSYGAPRVGNRAFAEFLTVQTGGTLYRITITNDIVPRLPPREFGYSHSSPEYWIKSGTLVPVRRRDIVKIEGIDATGGNNQPNIPSITAHLWYFGLIGTC

SEQ ID NO: 15482 - protein, 268 aa, Thermomyces lanuginosus
EVSQDLFNQFNLFAQYSAAAYCGKNNRAPAGTKITCTANACPEVEKADATLLYTFKDSGVGDVTGFLALDNTNKLIVLSFRGSRSIENWIGNLNFELIEINDICSGCRGHAGFTSSWRSVADTLRQKVEDAVREHPDYRVVFAGHSLGGALATVAGADLRGNKYDIDVFSYGAPRVGNRAFAEFLTVQTGGTLYRITHTNDIVPRLPPREFGYSHSSPEYWIKSGTLVPVRRRDIVKIEGIDATGGNNQPNIPSITAHLWYFGLIGTC

SEQ ID NO: 15483 - protein, 268 aa, Thermomyces lanuginosus
EVSQDLFNQFNLFAQYSAAAYCGKNNRAPAGTKITCTANACPEVEKADATLLYTFKDSGVGDVTGFLALDNTNKLIVLSFRGSRSIENWIGNLNFELIEINDICSGCRGHAGFTSSWRSVADTLRQKVEDAVREHPDYRVVFTGHSLGGALATVAGADLRGNKYDIDVFSYGAPRVGNRAFAEFLTVQTGGTLYRITHTNDIVPRLPPREFGYSHSSPEYWIKSGTLVPVRRRDIVKIEGIDATGGNNQPNIPSGTAHLWYFGLIGTC

SEQ ID NO: 15484 - protein, 268 aa, Thermomyces lanuginosus
EVSQDLFNQFNLFAQYSAAAYCGKNNRAPAGTKITCTANACPEVEKADATLLYTFKDSGVGDVTGFLALDNTNKLIVLSFRGSRSIENWIGNLNFELIEINDICSGCRGHAGFTSSWRSVADTLRQKVEDAVREHPDYRVVFTGHSLGGALATVAGADLRGNKYDIDVFSYGAPRVGNRAFAEFLTVQTGGTLYRITITNDIVPRLPPREFGYSHSSPEYWIKSGTLVPVRRRDIVKIEGIDATGGNNQPNIPSITAHLWYFGLIGTC

SEQ ID NO: 15485 - protein, 268 aa, Thermomyces lanuginosus
EVSQDLFNQFNLFAQYSAAAYCGKNNRAPAGTKITCTANACPEVEKADATILYTFKDSGVGDVTGFLALDNTNKLIVLSFRGSRSIENWIGNLNFELIEINDICSGCRGHAGFTSSWRSVADTLRQKVEDAVREHPDYRVVFTGHSLGGALATVAGADLRGNKYDIDVFSYGAPRVGNRAFAEFLTVQTGGTLYRITHTNDIVPRLPPREFGYSHSSPEYWIKSGTDVPVRRRDIVKIEGIDATGGNNQPNIPSITAHLWYFGLIGTC

SEQ ID NO: 15486 - protein, 268 aa, Thermomyces lanuginosus
EVSQDLFNQFNLFAQYSAAAYCGKNNRAPAGTKITCTANACPEVEKADATVLYTFKDSGVGDVTGFLALDNTNKLIVLSFRGSRSIENWIGNLNFELIEINDICSGCRGHAGFTSSWRSVADTLRQKVEDAVREHPDYRVVFTGHSLGGGLATVAGADLRGNKYDIDVFSYGAPRVGNRAFAEFLTVQTGGTLYRITHTNDIVPRLPPREFGYSHSSPEYWIKSGTLVPVRRRDIVKIEGIDATGGNNQPNIPSITAHLWYFGLIGTC

SEQ ID NO: 15487 - protein, 268 aa, Thermomyces lanuginosus
EVSQDLFNQFRLFAQYSAAAYCGKNNRAPAGTQITCTGNACPEVEKADATFLYSFQNSGVGDVTGFLALDNTNKLIVLSFRGSRSIENWINNLRFDLKEINDICSGCRGHSGFTSSWRSVADTLRQKVEDAVREHPDYRVVFTGHSLGGALATVAGADLRGNKYDIDVFSYGAPRVGNRAFAEFLTVQTGGTLYRITHTNDIVPRLPPREFGYSHPSPEYWIKSGTGVPVRRRDIVKIEGIDATGGNNQPNIPSITAHLWYFGLIGTC

SEQ ID NO: 15488 - protein, 268 aa, Thermomyces lanuginosus
EVSQDLFNQFNLFAQYSAAAYCGKNNRAPAGTKITCTANACPEVEKADATILYSFKDSGVGDVTGFLARDNTNKLIVLSFRGSRSIENWIGNLNFELEEINDICSGCRGHAGFTSSWRSVADTLRQKVEDAVREHPDYRVVFTGHSLGGALATVAGADLRGNKYDIDVFSYGAPRVGNRAFAEFLTVQTGGTLYRITHTNDIVPRLPPREFGYSHSSPEYWIKPGTLVPVRRRDIVKIEGIDATGGNNQPNIPSITAHLWYFGLIGTC

SEQ ID NO: 15489 - protein, 268 aa, Thermomyces lanuginosus
EYSQDLFNQFNLFAQYSAAAYCGKNNRAPAGTNITCTANACPEVEKADATFLYTFEDSGVGDVTGFLALDNTNKLIVLSFRGSRSIENWIGNLNFELTEIDDICSGCRGHAGFTSSWRSVADTLRQKVEDAVREHPDYRVVFTGHSLGGALATVAGADLRGNPYDIDVFSYGAPRLGNRAFAEFLTVQTGGTLYRITHTNDIVPRLPPREFGYSHSSPEYWIKSGTLVPVRRRDIVKIEGIDATGGNNQPNIPSITAHLYYFGLIGTC

SEQ ID NO: 15490 - protein, 268 aa, Thermomyces lanuginosus
EVSQDLFNQFNLFAQYSAAAYCGKNNRAPAGTKITCTANACPEVEKADATILYTFKDSGVGDVTGFLALDNTNKLIVLSFRGSRSIENWIGNLNFELIEINDICSGCRGHAGFTSSWRSVADTLRQKVEDAVREHPDYRVVFTGHSLGGALATVAGADLRGNKYDIDVFSYGAPRVGNRAFAEFLTVQTGGTLYRITITNDIVPRLPPREFGYSHSSPEYWIKSGTLVPVRRRDIVKIEGIDATGGNNQPNIPSITAHLWYFGLIGTC

SEQ ID NO: 15491 - protein, 268 aa, Thermomyces lanuginosus
EVSQDLFNQFNLFAQYSAAAYCGKNNRAPAGTKITCTANACPEVEKADATILYTFKDSGVGDVTGFLALDNTNKLIVLSFRGSRSIENWIGNLNFELIEINDICSGCRGHAGFTSSWRSVADTLRQKVEDAVREHPDYRVVFTGHSLGGALATVAGADLRGNKYDIDVFSYGAPRVGNRAFAEFLTVQTGGTLYRITHTNDIVPRLPPREFGYSHSSPEYWIKSGTLVPVRRRDIVKIEGIDATGGNNQPNIPSGTAHLWYFGLIGTC

SEQ ID NO: 15492 - protein, 268 aa, Thermomyces lanuginosus
EVSQDLFNQFNLFAQYSAAAYCGKNNDAPAGTNITCTGNACPEVEKADATFLYSFEDSGVGCVTGFLALDNTNKLIVLSFRGTGSDCNLQLETSYTLTEINDICSGCRGHDGFTSSWRSVADTLRQKVEDAVREHPDYRVVFTGHSLGGALATVAGADLRGNGYDIDVFSYGAPRVGNRAFAEFLTVQTGGTLYRITHTNDIVPRLPPREFGYSHSSPEYWIKSGTLVPVRRRDIVKIEGIDATGGNNQPNIPDIPAHLWYFGLIGTC

SEQ ID NO: 15493 - protein, 268 aa, Thermomyces lanuginosus
EVSQDLYDQFKLFAHYAAAAYCGKNNDAPAGTKITCTGNNCPEVEKADATFIYSFEDSGVGDVTGFLALDNTNKLIVLSFRGSRSIENWIANLNFDLKDISDICSGCKGHKGFYNSWRSVADTLRQKVEDAVREYPDYRVVFTGHSLGGALATVAGADLRGNGYDIDVFSYGAPRVGNRAFAEFLTVQTGGTLYRITHTNDIVPRLPPREFGYSHSSPEYWIKSGTLVPVTRNDIVVIEGIDATGGNNQPNIPDIPAHLWYFGLIGTC

SEQ ID NO: 15494 - protein, 270 aa, Thermomyces lanuginosus
VSQDLFNQFNLFAQYSAAAYCGCNNDAPAGTQITCTGNACPEVEKADATFLYSFEDSGGGXVTGFLALDNTNKLIVLSFRGTWSIKNWIXNLKFXLKXISDGCSGCRGHDGFTSSWRSVADTLRQKVEDAVREHPDYRVVFTGHSLGGALATVAGADLRGNGYDIDVFSYGAPRVGNRAFAEFLTVQGGGTLYRITHTNDIVPRLPPPEFGYSHSSPEYWIKSPTLIPVTRNDIVKIEGIDARGGNNRPDIPDRPAHLWYFQATSACNXG

SEQ ID NO: 15495 - protein, 268 aa, Thermomyces lanuginosus
EVSQDLFNQFNLFAQYSAAAYCGKNNRAPAGTKITCTANACPEVEKADATVLYSFKDSGVGDVTGFLALDNTNKLIVLSFRGSRSIENWIGNLNFELEEINDICSGCRGHAGFTSSWRSVADTLRQKVEDAVREHPDYRVVFTGHSLGGALATVAGADLRGNKYDIDVFSYGAPRLGNRAFAEFLTVQTGGTLYRITHTNDIVPRLPPRKFGYSHSSPEFWIKSGTLVPVRRRDIVKIEGIDATGGNNQPNIPSITAHLWYFGLIGTC

SEQ ID NO: 15496 - protein, 268 aa, Thermomyces lanuginosus
EVSQDLFNQFNLFAQYSAAAYCGKNNRAPAGTKITCTANACPEVEKADATVLYSFEDSGVGDVTGFLALDNTNKLIVLSFRGSRSIENWIGNLNFELEEIDDICSGCRGHAGFTSSWRSVADTLRQKVEDAVREHPDYRVVFTGHSLGGALATVAGADLRGNKYDIDVFSYGAPRVGNRAFAEFLTVQTGGTLYRITSTNDIVPRLPPRKFGYSHSSPEYWIKPGTLVPVRRRDIVKIEGIDATGGNNQPNIPSITAHLWYFGLIGTC

SEQ ID NO: 15497 - protein, 268 aa, Thermomyces lanuginosus
EVSQDLFNQFNLFAQYSAAAYCGKNNRAPAGTKITCTANACPEVEKADATVLYTFKDSGVGDVTGFLARDNTNKLIVLSFRGSRSIENWIGNLNFELEEINDICSGCRGHAGFTSSWRSVADTLRQKVEDAVREHPDYRVVFTGHSLGGALATVAGADLRGNKYDIDVFSYGAPRVGNRAFAEFLTVQTGGTLYRITHTNDIVPRLPPREFGYSHSSPEYWIKSGTLVPVRRRDIVKIEGIDATGGNNQPNIPSITAHLYYFGLIGTC

SEQ ID NO: 15498 - protein, 268 aa, Thermomyces lanuginosus
EVSQDLFNQFNLFAQYSAAAYCGKNNRAPAGTKITCTANACPEVEKADATVLYTFKDSGVGDVTGFLALDNTNKLIVLSFRGSRSIENWIGNLNFELEEINDICSGCRGHAGFTSSWRSVADTLRQKVEDAVREHPDYRVVFTGHSLGGALATVAGADLRGNKYDIDVFSYGAPRVGNRAFAEFLTVQTGGTLYRITHTNDIVPRLPPRKFGYSHSSPEYWIKSGTLVPVRRRDIVKIEGIDATGGNNQPNIPSITAHLYYFGLIGTC

SEQ ID NO: 15499 - protein, 268 aa, Thermomyces lanuginosus
EVSQDLFNQFNLFAQYSAAAYCGKNNRAPAGTKITCTANACPEVEKADATVLYSFEDSGVGDVTGFLALDNTNKLIVLSFRGTHSIENWIADFNALLEEINDICSGCRGHAGFTSSWRSVADTLRQKVEDAVREHPDYRVVFTGHSLGGALATVAGADLRGNKYDIDVFSYGAPRVGNRAFAEFLTVQTGGTLYRITHTNDIVPRLPPREFGYSHSSPEYWIKSGTLVPVRRRDIVKIEGIDATGGNNQPNIPSITAHLWYFGLIGTC

SEQ ID NO: 15500 - protein, 268 aa, Thermomyces lanuginosus
EVSQDLFNQFNLFAQYSAAAYCGKNNRAPAGTNITCTANACPEVEKADATFLYSFEDSGVGDVTGFLALDNTNKLIVLSFRGSRSPANWIADLNYTPQEINDICSGCRGHAGFTSSWRSVADTLRQKVEDAVREHPDYRVVFTGHSLGGALATVAGADLRGNKYDIDVFSYGAPRVGNRAFAEFLTVQTGGTLYRITHTNDIVPRLPPREFGYSHSSPEYWIKSGTLVPVRRRDIVKIEGIDATGGNNQPNTPSTTAHLWYFGLIGTC

SEQ ID NO: 15501 - protein, 268 aa, Thermomyces lanuginosus
EVSQDLFNQFNLFAQYSAAAYCGKNNRAPAGTNITCTANACPEVEKADATFLYSFEDSGVGDVTGFLALDNTNKLIVLSFRGSRSWANWIADLNYTPQEINDICSGCRGHAGFTSSWRSVADTLRQKVEDAVREHPDYRVVFTGHSLGGALATVAGADLRGNKYDIDVFSYGAPRVGNRAFAEFLTVQTGGTLYRITHTNDIVPRLPPREFGYSHSSPEYWIKSGTLVPVRRRDIVKIEGIDATGGNNQPNTPSTTAHLWYFGLIGTC

SEQ ID NO: 15502 - protein, 268 aa, Thermomyces lanuginosus
EVSQDLFNQFNLFAQYSAAAYCGKNNRAPAGTKITCTANACPEVEKADATVLYSFEDSGVGDVTGFLARDNTNKLIVLSFRGSRSIENWIGNLNFELEEINDICSGCRGHAGFTSSWRSVADTLRQKVEDAVREHPDYRVVFTGHSLGGALATVAGADLRGNKYDIDVFSYGAPRLGNRAFAEFLTVQTGGTLYRITHTNDIVPRLPPRKFGYSHSSPEYWIKSGTGVPVRRRDIVKIEGIDATGGNNQPNIPSITAHLWYFGLIGTC

SEQ ID NO: 15503 - protein, 268 aa, Thermomyces lanuginosus
EKSQDLFNQFNLFAQYSAAAYCGKNNRAPAGTKITCTANACPEVEKADATVLYSFEDSGVGDVTGFLARDNTNKLIVLSFRGSRSIENWIGNLNFELEEINDICSGCRGHAGFTSSWRSVADTLRQKVEDAVREHPDYRVVFTGHSLGGALATVAGADLRGNKYDIDVFSYGAPRVGNRAFAEFLTVQTGGTLYRITHTNDIVPRLPPRKFGYSHSSPEYWIKSGTGVPVRRRDIVKIEGIDATGGNNQPNIPSITAHLWYFGLIGTC

SEQ ID NO: 15504 - protein, 268 aa, Thermomyces lanuginosus
EVSQDLFNQFNLFAQYSAAAYCGKNNRAPAGTKITCTANACPEVEKADATLLYSFEDSGVGDVTGFLALDNTNKLIVLSFRGSRSIENWIGNLNFELEEIDDICSGCRGHAGFTSSWRSVADTLRQKVEDAVREHPDYRVVFTGHSLGGALATVAGADLRGNKYDIDVFSYGAPRVGNRAFAEFLTVQTGGTLYRITSTNDIVPRLPPRKFGYSHSSPEYWIKPGTLVPVRRRDIVKIEGIDATGGNNQPNIPSITAHLWYFGLIGTC

SEQ ID NO: 15505 - protein, 268 aa, Thermomyces lanuginosus
EKSQDLFNQFNLFAQYSAAAYCGKNNRAPAGTKITCTANACPEVEKADATFLYSFEDSGVGDVTGFLARDNTNKLIVLSFRGSRSIENWIGNLNFELEEINDICSGCRGHAGFTSSWRSVADTLRQKVEDAVREHPDYRVVFTGHSLGGALATVAGADLRGNKYDIDVFSYGAPRLGNRAFAEFLTVQTGGTLYRITHTNDIVPRLPPRKFGYSHSSPEYWIKSGTGVPVRRRDIVKIEGIDATGGNNQPNIPSITAHLWYFGLIGTC

SEQ ID NO: 15506 - protein, 268 aa, Thermomyces lanuginosus
EVSQDLFNQFNLFAQYSAAAYCGKNNRAPAGTKITCTANACPEVEKADATVLYSFEDSGVGDVTGFLALDNTNKLIVLSFRGTRSIENWMADLNYLPQEINDICSGCRGHAGFTSSWRSVADTLRQKVEDAVREHPDYRVVFTGHSLGGALATVAGADLRGNKYDIDVFSYGAPRVGNRAFAEFLTVQTGGTLYRITHTNDIVPRLPPREFGYSHSSPEYWIKSGTLVPVRRRDIVKIEGIDATGGNNQPNIPSITAHLWYFGLIGTC

SEQ ID NO: 15507 - protein, 268 aa, Thermomyces lanuginosus
EVSQDLFNQFNLFAQYSAAAYCGKNNRAPAGTKITCTANACPEVEKADATILYSFEDSGVGDVTGFLALDNTNKLIVLSFRGSRSIENWIGNLNFELEEIDDICSGCRGHAGFTSSWRSVADTLRQKVEDAVREHPDYRVVFTGHSLGGALATVAGADLRGNKYDIDVFSYGAPRVGNRAFAEFLTVQTGGTLYRITSTNDIVPRLPPRKFGYSHSSPEYWIKPGTLVPVRRRDIVKIEGIDATGGNNQPNIPSITAHLWYFGLIGTC

SEQ ID NO: 15508 - protein, 268 aa, Thermomyces lanuginosus
EVSQDLYDQFKLFAHYAAAAYCGKNNDAPAGTKITCTGNNCPEVEKADATFIYSFEDSGVGDVTGFLALDNTNKLIVLSFRGSRSIENWIANLNFDLTEISDICSGCKGHRGFYNSWRSVADTLRQKVEDAVREYPDYRVVFTGHSLGGALATVAGADLRGNGYDIDVFSYGAPRVGNRAFAEFLTVQTGGTLYRITHTNDIVPRLPPREFGYSHSSPEYWIKSGTLVPVTRNDIVVIEGIDATGGNNQPNIPDIPAHLWYFGLIGTC

SEQ ID NO: 15509 - protein, 268 aa, Thermomyces lanuginosus
EVSQDLFNQFNLFAQYSAAAYCGKNNDAPAGTNITCTGNACPEVEKADATFLYSFEDSXXGDVTGFLALDNTNKLIVLSFRGSRXXXXWXXNXNXDLKEINDICSGCRGHDGFTSXWRSVADTLRQKVEDAVREHPDYRVVFTGHSLGGALATVAGADLRGNGYDIDVFSYGAPRVGNRAFAEFLTVQTGGTLYRITHTNDXVPRXPPREXGYSHSSPEYWIKSGTLVPVTRNDIVKIEGIDATGGNNQPNIPDXPAHXWYFGLXGTC

SEQ ID NO: 15510 - protein, 268 aa, Thermomyces lanuginosus
EVSQDLFNQFNLFAQYSAAAYCGKNNRAPAGTKITCTANACPEVEKADATVLYSFEDSGVGDVTGFLALDNTNKLIVLSFRGSRSIENWIGNLNFELEEIDDICSGCRGHAGFTSSWRSVADTLRQKVEDAVREHPDYRVVFTGHSLGGALATVAGADLRGNKYDIDVFSYGAPRVGNRAFAEFLTVQTGGTLYRITSTNDIVPRLPPRKFGYSHSSPEFWIKSGTLVPVRRRDIVKIEGIDATGGNNQPNIPSITFHLWYFGLIGTC

SEQ ID NO: 15511 - protein, 268 aa, Thermomyces lanuginosus
EVSQDLFNQFNLFAQYSAAAYCGKNNRAPAGTKITCTANACPEVEKADATILYSFEDSGVGDVTGFLALDNTNKLIVLSFRGSRSIENWIGNLNFELEEIDDICSGCRGHAGFTSSWRSVADTLRQKVEDAVREHPDYRVVFTGHSLGGALATVAGADLRGNKYDIDVFSYGAPRVGNRAFAEFLTVQTGGTLYRITSTNDIVPRLPPRKFGYSHSSPEFWIKSGTLPPVRRRDIVKIEGIDATGGNNQPNIPSITAHLWYFGLIGTC

SEQ ID NO: 15512 - protein, 268 aa, Thermomyces lanuginosus
EKSQDLFNQFNLFAQYSAAAYCGKNNRAPAGTKITCTANACPEVEKADATLLYSFEDSGVGDVTGFLARDNTNKLIVLSFRGSRSIENWIGNLNFELEEINDICSGCRGHAGFTSSWRSVADTLRQKVEDAVREHPDYRVVFTGHSLGGALATVAGADLRGNKYDIDVFSYGAPRLGNRAFAEFLTVQTGGTLYRITHTNDIVPRLPPRKFGYSHSSPEYWIKSGTGVPVRRRDIVKIEGIDATGGNNQPNIPSITAHLWYFGLIGTC

SEQ ID NO: 15513 - protein, 268 aa, Thermomyces lanuginosus
EVSQDLFNQFNLFAQYSAAAYCGKNNRAPAGTKITCTANACPEVEKADATVLYTFEDSGVGDVTGFLARDNTNKLIVLSFRGSRSIKNWIGNLNFELEEINDICSGCRGHAGFTSSWRSVADTLRQKVEDAVREHPDYRVVFTGHSLGGALATVAGADLRGNKYDIDVFSYGAPRVGNRAFAEFLTVQTGGTLYRITHTNDIVPRLPPRKFGYSHSSPEFWIKSGTLVPVRRRDIVKIEGIDATGGNNQPNIPSITAHLWYFGLIGTC

SEQ ID NO: 15514 - protein, 268 aa, Thermomyces lanuginosus
EVSQDLFNQFNLFAQYSAAAYCGKNNRAPAGTKITCTANACPEVEKADATILYSFEDSGVGDVTGFLALDNTNKLIVLSFRGSRSIENWIGNLNFELEEIDDICSGCRGHAGFTSSWRSVADTLRQKVEDAVREHPDYRVVFTGHSLGGALATVAGADLRGNKYDIDVFSYGAPRVGNRAFAEFLTVQTGGTLYRITSTNDIVPRLPPRRFGYSHSSPEFWIKSGTLVPVRRRDIVKIEGIDATGGNNQPNIPSITVHLWYFGLIGTC

SEQ ID NO: 15515 - protein, 268 aa, Thermomyces lanuginosus
EYSQDLFNQFNLFAQYSAAAYCGKNNRAPAGTKITCTANACPEVEKADATLLYSFEDSGVGDVTGFLARDNTNKLIVLSFRGSRSIENWIGNLNFELEEINDICSGCRGHAGFTSSWRSVADTLRQKVEDAVREHPDYRVVFTGHSLGGALATVAGADLRGNKYDIDVFSYGAPRLGNRAFAEFLTVQTGGTLYRITHTNDIVPRLPPRKFGYSHSSPEYWIKSGTDVPVRRRDIVKIEGIDATGGNNQPNIPSITAHLWYFGLIGTC

SEQ ID NO: 15516 - protein, 268 aa, Thermomyces lanuginosus
EVSQDLFNQFNLFAQYSAAAYCGKNNRAPAGTKITCTANACPEVEKADATILYSFEDSGVGDVTGFLALDNTNKLIVLSFRGSRSIENWIGNLNFELEEIDDICSGCRGHAGFTSSWRSVADTLRQKVEDAVREHPDYRVVFTGHSLGGALATVAGADLRGNKYDIDVFSYGAPRVGNRAFAEFLTVQTGGTLYRITSTNDIVPRLPPRKFGYSHSSPEFWIKSGTLVPVRRRDIVKIEGIDATGGNNQPNIPSITHHLWYFGLIGTC

SEQ ID NO: 15517 - protein, 268 aa, Thermomyces lanuginosus
EKSQDLFNQFNLFAQYSAAAYCGKNNRAPAGTKITCTANACPEVEKADATVLYSFEDSGVGDVTGFLARDNTNKLIVLSFRGSRSIENWIGNLNFELEEINDICSGCRGHAGFTSSWRSVADTLRQKVEDAVREHPDYRVVFTGHSLGGALATVAGADLRGNKYDIDVFSYGAPRLGNRAFAEFLTVQTGGTLYRITHTNDIVPRLPPRKFGYSHSSPEYWIKSGTGVPVRRRDIVKIEGIDATGGNNQPNIPSITAHLWYFGLIGTC

SEQ ID NO: 15518 - protein, 268 aa, Thermomyces lanuginosus
EVSQDLFNQFNLFAQYSAAAYCGKNNRAPAGTKITCTANACPEVEKADATVLYSFEDSGVGDVTGFLALDNTNKLIVLSFRGSRSIENWIGNLNFELEEIDDICSGCRGHAGFTSSWRSVADTLRQKVEDAVREHPDYRVVFTGHSLGGALATVAGADLRGNKYDIDVFSYGAPRVGNRAFAEFLTVQTGGTLYRITDTNDIVPRLPPRKFGYSHSSPEFWIKSGTLVPVRRRDIVKIEGIDATGGNNQPNIPSITVHLWYFGLIGTC

SEQ ID NO: 15519 - protein, 268 aa, Thermomyces lanuginosus
EVSQDLFNQFNLFAQYSAAAYCGKNNRAPAGTKITCTANACPEVEKADATLLYSFEDSGVGDVTGFLALDNTNKLIVLSFRGSRSIENWIGNLNFELEEIDDICSGCRGHAGFTSSWRSVADTLRQKVEDAVREHPDYRVVFTGHSLGGALATVAGADLRGNKYDIDVFSYGAPRVGNRAFAEFLTVQTGGTLYRITSTNDIVPRLPPRKFGYSHSSPEFWIKSGTLVPVRRRDIVKIEGIDATGGNNQPNIPSITFHLWYFGLIGTC

SEQ ID NO: 15520 - protein, 268 aa, Thermomyces lanuginosus
EVSQDLFNQFNLFAQYSAAAYCGKNNRAPAGTKITCTANACPEVEKADATVLYSFEDSGVGDVTGFLALDNTNKLIVLSFRGSRSIENWIGNLNFELEEIDDICSGCRGHAGFTSSWRSVADTLRQKVEDAVREHPDYRVVFTGHSLGGALATVAGADLRGNKYDIDVFSYGAPRVGNRAFAEFLTVQTGGTLYRITSTNDIVPRLPPRRFGYSHSSPEFWIKSGTLVPVRRRDIVKIEGIDATGGNNQPNIPSITVHLWYFGLIGTC

SEQ ID NO: 15521 - protein, 268 aa, Thermomyces lanuginosus
EYSQDLFNQFNLFAQYSAAAYCGKNNRAPAGTKITCTANACPEVEKADATILYSFEDSGVGDVTGFLARDNTNKLIVLSFRGSRSIENWIGNLNFELEEINDICSGCRGHAGFTSSWRSVADTLRQKVEDAVREHPDYRVVFTGHSLGGALATVAGADLRGNKYDIDVFSYGAPRLGNRAFAEFLTVQTGGTLYRITHTNDIVPRLPPRKFGYSHSSPEYWIKSGTDVPVRRRDIVKIEGIDATGGNNQPNIPSITAHLWYFGLIGTC

SEQ ID NO: 15522 - protein, 268 aa, Thermomyces lanuginosus
EVSQDLFNQFNLFAQYSAAAYCGKNNRAPAGTKITCTANACPEVEKADATVLYSFEDSGVGDVTGFLALDNTNKLIVLSFRGSRSIENWIGNLNFELEEIDDICSGCRGHAGFTSSWRSVADTLRQKVEDAVREHPDYRVVFTGHSLGGALATVAGADLRGNKYDIDVFSYGAPRVGNRAFAEFLTVQTGGTLYRITSTNDIVPRLPPRKFGYSHSSPEFWIKSGTLVPVRRRDIVKIEGIDATGGNNQPNIPSITVHLWYFGLIGTC

SEQ ID NO: 15523 - protein, 268 aa, Thermomyces lanuginosus
EVSQDLFNQFNLFAQYSAAAYCGKNNRAPAGTKITCTANACPEVEKADATILYSFEDSGVGDVTGFLALDNTNKLIVLSFRGSRSIENWIGNLNFELEEIDDICSGCRGHAGFTSSWRSVADTLRQKVEDAVREHPDYRVVFTGHSLGGALATVAGADLRGNKYDIDVFSYGAPRVGNRAFAEFLTVQTGGTLYRITSTNDIVPRLPPRKFGYSHSSPEFWIKSGTLVPVRRRDIVKIEGIDATGGNNQPNIPSITVHLWYFGLIGTC

SEQ ID NO: 15524 - protein, 268 aa, Thermomyces lanuginosus
EVSQDLFNQFNLFAQYSAAAYCGKNNRAPAGTKITCTANACPEVEKADATLLYSFEDSGVGDVTGFLALDNTNKLIVLSFRGSRSIENWIGNLNFELEEIDDICSGCRGHAGFTSSWRSVADTLRQKVEDAVREHPDYRVVFTGHSLGGALATVAGADLRGNKYDIDVFSYGAPRVGNRAFAEFLTVQTGGTLYRITSTNDIVPRLPPRRFGYSHSSPEFWIKSGTLVPVRRRDIVKIEGIDATGGNNQPNIPSITVHLWYFGLIGTC

SEQ ID NO: 15525 - protein, 268 aa, Thermomyces lanuginosus
EVSQDLFNQFNLFAQYSAAAYCGKNNRAPAGTKITCTANACPEVEKADATVLYSFKDSGVGDVTGFLARDNTNKLIVLSFRGSRSIENWIGNLNFELEEINDICSGCRGHAGFTSSWRSVADTLRQKVEDAVREHPDYRVVFTGHSLGGALATVAGADLRGNKYDIDVFSYGAPRLGNRAFAEFLTVQTGGTLYRITHTNDIVPRLPPRKFGYSHSSPEFWIKSGTLVPVRRRDIVKIEGIDATGGNNQPNIPSITAHLWYFGLIGTC

SEQ ID NO: 15526 - protein, 268 aa, Thermomyces lanuginosus
EKSQDLFNQFNLFAQYSAAAYCGKNNRAPAGTKITCTANACPEVEKADATVLYSFEDSGVGDVTGFLARDNTNKLIVLSFRGSRSIENWIGNLNFELEEINDICSGCRGHAGFTSSWRSVADTLRQKVEDAVREHPDYRVVFTGHSLGGALATVAGADLRGNKYDIDVFSYGAPRLGNRAFAEFLTVQTGGTLYRITHTNDIVPRLPPRKFGYSHSSPEYWIKSGTDVPVRRRDIVKIEGIDATGGNNQPNIPSITAHLWYFGLIGTC

SEQ ID NO: 15527 - protein, 268 aa, Thermomyces lanuginosus
EVSQDLFNQFNLFAQYSAAAYCGKNNRAPAGTKITCTANACPEVEKADATLLYSFEDSGVGDVTGFLALDNTNKLIVLSFRGSRSIENWIGNLNFELEEIDDICSGCRGHAGFTSSWRSVADTLRQKVEDAVREHPDYRVVFTGHSLGGALATVAGADLRGNKYDIDVFSYGAPRVGNRAFAEFLTVQTGGTLYRITDTNDIVPRLPPRKFGYSHSSPEFWIKSGTLVPVRRRDIVKIEGIDATGGNNQPNIPSITVHLWYFGLIGTC

SEQ ID NO: 15528 - protein, 268 aa, Thermomyces lanuginosus
EVSQDLFNQFNLFAQYSAAAYCGKNNRAPAGTKITCTANACPEVEKADATVLYSFEDSGVGDVTGFLALDNTNKLIVLSFRGSRSIENWIGNLNFELEEIDDICSGCRGHAGFTSSWRSVADTLRQKVEDAVREHPDYRVVFTGHSLGGALATVAGADLRGNKYDIDVFSYGAPRVGNRAFAEFLTVQTGGTLYRITSTNDIVPRLPPRKFGYSHSSPEFWIKSGTLVPVRRRDIVKIEGIDATGGNNQPNIPSITHHLWYFGLIGTC

SEQ ID NO: 15529 - protein, 268 aa, Thermomyces lanuginosus
EVSQDLFNQFNLFAQYSAAAYCGKNNRAPAGTKITCTANACPEVEKADATVLYSFEDSGVGDVTGFLALDNTNKLIVLSFRGTRSPENWITDLDALLQEINDICSGCRGHAGFTSSWRSVADTLRQKVEDAVREHPDYRVVFTGHSLGGALATVAGADLRGNKYDIDVFSYGAPRVGNRAFAEFLTVQTGGTLYRITHTNDIVPRLPPREFGYSHSSPEYWIKSGTLVPVRRRDIVKIEGIDATGGNNQPNIPSITAHLWYFGLIGTC

SEQ ID NO: 15530 - protein, 268 aa, Thermomyces lanuginosus
EVSQDLFNQFNLFAQYSAAAYCGKNNRAPAGTNITCTANACPEVEKADATFLYSFEDSGVGDVTGFLALDNTNKLIVLSFRGSRSPANWIADFNYTPQEINDICSGCRGHAGFTSSWRSVADTLRQKVEDAVREHPDYRVVFTGHSLGGALATVAGADLRGNKYDIDVFSYGAPRVGNRAFAEFLTVQTGGTLYRITHTNDIVPRLPPREFGYSHSSPEYWIKSGTLVPVRRRDIVKIEGIDATGGNNQPNTPSTTAHLWYFGLIGTC

SEQ ID NO: 15531 - protein, 268 aa, Thermomyces lanuginosus
EVSQDLFNQFNLFAQYSAAAYCGKNNRAPAGTKITCTANACPEVEKADATVLYSFEDSGVGDVTGFLALDNTNKLIVLSFRGTRSPENWFLDFNFLLKEINDICSGCRGHAGFTSSWRSVADTLRQKVEDAVREHPDYRVVFTGHSLGGALATVAGADLRGNKYDIDVFSYGAPRVGNRAFAEFLTVQTGGTLYRITHTNDIVPRLPPREFGYSHSSPEYWIKSGTLVPVRRRDIVKIEGIDATGGNNQPNIPSITAHFWYFGLIGTC

SEQ ID NO: 15532 - protein, 268 aa, Thermomyces lanuginosus
EVSQDLFNQFNLFAQYSAAAYCGKNNRAPAGTKITCTANACPEVEKADATILYSFEDSGVGDVTGFLALDNTNKLIVLSFRGSRSIENWIGNLNFELEEIDDICSGCRGHAGFTSSWRSVADTLRQKVEDAVREHPDYRVVFTGHSLGGALATVAGADLRGNKYDIDVFSYGAPRVGNRAFAEFLTVQTGGTLYRITDTNDIVPRLPPRKFGYSHSSPEFWIKSGTLVPVRRRDIVKIEGIDATGGNNQPNIPSITVHLWYFGLIGTC

SEQ ID NO: 15533 - protein, 268 aa, Thermomyces lanuginosus
EYSQDLFNQFNLFAQYSAAAYCGKNNRAPAGTKITCTANACPEVEKADATVLYSFEDSGVGDVTGFLARDNTNKLIVLSFRGSRSIENWIGNLNFELEEINDICSGCRGHAGFTSSWRSVADTLRQKVEDAVREHPDYRVVFTGHSLGGALATVAGADLRGNKYDIDVFSYGAPRLGNRAFAEFLTVQTGGTLYRITHTNDIVPRLPPRKFGYSHSSPEYWIKSGTDVPVRRRDIVKIEGIDATGGNNQPNIPSITAHLWYFGLIGTC

SEQ ID NO: 15534 - protein, 268 aa, Thermomyces lanuginosus
EVSQDLFNQFNLFAQYSAAAYCGKNNRAPAGTKITCTANACPEVEKADATVLYTFKDSGVGDVTGFLARDNTNKLIVLSFRGSRSIENWIGNLNFELEEINDICSGCRGHAGFTSSWRSVADTLRQKVEDAVREHPDYRVVFTGHSLGGALATVAGADLRGNKYDIDVFSYGAPRVGNRAFAEFLTVQTGGTLYRITHTNDIVPRLPPRKFGYSHSSPEFWIKSGTLVPVRRRDIVKIEGIDATGGNNQPNIPSITAHLWYFGLIGTC

SEQ ID NO: 15535 - protein, 268 aa, Thermomyces lanuginosus
EYSQDLFNQFNLFAQYSAAAYCGKNNRAPAGTKITCTANACPEVEKADATFLYSFEDSGVGDVTGFLARDNTNKLIVLSFRGSRSIENWIGNLNFELEEINDICSGCRGHAGFTSSWRSVADTLRQKVEDAVREHPDYRVVFTGHSLGGALATVAGADLRGNKYDIDVFSYGAPRLGNRAFAEFLTVQTGGTLYRITHTNDIVPRLPPRKFGYSHSSPEYWIKSGTGVPVRRRDIVKIEGIDATGGNNQPNIPSGTAHLWYFGLIGTC

SEQ ID NO: 15536 - protein, 268 aa, Thermomyces lanuginosus
EVSQDLFNQFNLFAQYSAAAYCGKNNRAPAGTKITCTANACPEVEKADATLLYSFEDSGVGDVTGFLALDNTNKLIVLSFRGSRSIENWIGNLNFELEEIDDICSGCRGHAGFTSSWRSVADTLRQKVEDAVREHPDYRVVFTGHSLGGALATVAGADLRGNKYDIDVFSYGAPRVGNRAFAEFLTVQTGGTLYRITSTNDIVPRLPPRKFGYSHSSPEFWIKSGTLVPVRRRDIVKIEGIDATGGNNQPNIPSITHHLWYFGLIGTC

SEQ ID NO: 15537 - protein, 268 aa, Thermomyces lanuginosus
EVSQDLFNQFNLFAQYSAAAYCGKNNRAPAGTKITCTANACPEVEKADATILYSFEDSGVGDVTGFLALDNTNKLIVLSFRGSRSIENWIGNLNFELEEIDDICSGCRGHAGFTSSWRSVADTLRQKVEDAVREHPDYRVVFTGHSLGGALATVAGADLRGNKYDIDVFSYGAPRVGNRAFAEFLTVQTGGTLYRITSTNDIVPRLPPRKFGYSHSSPEFWIKSGTLVPVRRRDIVKIEGIDATGGNNQPNIPSITFHLWYFGLIGTC

SEQ ID NO: 15538 - protein, 268 aa, Thermomyces lanuginosus
EKSQDLFNQFNLFAQYSAAAYCGKNNRAPAGTKITCTANACPEVEKADATILYSFEDSGVGDVTGFLARDNTNKLIVLSFRGSRSIENWIGNLNFELEEINDICSGCRGHAGFTSSWRSVADTLRQKVEDAVREHPDYRVVFTGHSLGGALATVAGADLRGNKYDIDVFSYGAPRLGNRAFAEFLTVQTGGTLYRITHTNDIVPRLPPRKFGYSHSSPEYWIKSGTDVPVRRRDIVKIEGIDATGGNNQPNIPSITAHLWYFGLIGTC

SEQ ID NO: 15539 - protein, 268 aa, Thermomyces lanuginosus
EVSQDLFNQFNLFAQYSAAAYCGKNNRAPAGTKITCTANACPEVEKADATLLYSFEDSGVGDVTGFLALDNTNKLIVLSFRGSRSIENWIGNLNFELEEIDDICSGCRGHAGFTSSWRSVADTLRQKVEDAVREHPDYRVVFTGHSLGGALATVAGADLRGNKYDIDVFSYGAPRVGNRAFAEFLTVQTGGTLYRITSTNDIVPRLPPRKFGYSHSSPEFWIKSGTLPPVRRRDIVKIEGIDATGGNNQPNIPSITAHLWYFGLIGTC

SEQ ID NO: 15540 - protein, 268 aa, Thermomyces lanuginosus
EVSQDLFNQFNLFAQYSAAAYCGKNNRAPAGTKITCTANACPEVEKADATVLYSFKDSGVGDVTGFLARDNTNKLIVLSFRGSRSIENWIGNLNFELEEINDICSGCRGHAGFTSSWRSVADTLRQKVEDAVREHPDYRVVFTGHSLGGALATVAGADLRGNKYDIDVFSYGAPRLGNRAFAEFLTVQTGGTLYRITHTNDIVPRLPPRKFGYSHSSPEYWIKSGTLVPVRRRDIVKIEGIDATGGNNQPNIPSITAHLYYFGLIGTC

SEQ ID NO: 15541 - protein, 268 aa, Thermomyces lanuginosus
EVSQDLFNQFNLFAQYSAAAYCGKNNRAPAGTKITCTANACPEVEKADATVLYSFEDSGVGDVTGFLALDNTNKLIVLSFRGSRSIENWIGNLNFELEEIDDICSGCRGHAGFTSSWRSVADTLRQKVEDAVREHPDYRVVFTGHSLGGALATVAGADLRGNKYDIDVFSYGAPRVGNRAFAEFLTVQTGGTLYRITSTNDIVPRLPPRKFGYSHSSPEFWIKSGTLPPVRRRDIVKIEGIDATGGNNQPNIPSITAHLWYFGLIGTC

SEQ ID NO: 15542 - protein, 268 aa, Thermomyces lanuginosus
EVSQDLFNQFNLFAQYSAAAYCGKNNRAPAGTKITCTANACPEVEKADATLLYSFEDSGVGDVTGFLALDNTNKLIVLSFRGSRSIENWIGNLNFELEEIDDICSGCRGHAGFTSSWRSVADTLRQKVEDAVREHPDYRVVFTGHSLGGALATVAGADLRGNKYDIDVFSYGAPRVGNRAFAEFLTVQTGGTLYRITSTNDIVPRLPPRKFGYSHSSPEFWIKSGTLVPVRRRDIVKIEGIDATGGNNQPNIPSITVHLWYFGLIGTC

SEQ ID NO: 15543 - protein, 267 aa, Thermomyces lanuginosus
EKSQDLFNQFNLFAQYSAAAYCGKNNRAPAGTKITCTANACPEVEKADATILYSFEDSGVGDVTGFLARDNTNKLIVLSFRGSRSIENWIGNLNFELEEINDICSGCRGHAGFTSSWRSVADTLRQKVEDAVREHPDYRVVFTGHSLGGALATVAGADLRGNKYDIDVFSYGAPRLGNRAFAEFLTVQTGGTLYRITTNDIVPRLPPRKFGYSHSSPEYWIKSGTGVPVRRRDIVKIEGIDATGGNNQPNIPSITAHLWYFGLIGTC

SEQ ID NO: 15544 - protein, 270 aa, Thermomyces lanuginosus
VSQDLFNQFNLFAQYSAAAYCGCNNDAPAGTQITCTGNACPEVEKADATFLYSFEDSGGGXVTGFLALDNTNKLIVLSFRGTWSIKNWIXNLKFXLKXISDGCSGCRGHDGFTSSWRSVADTLRQKVEDAVREHPDYRVVFTGHSLGGALATVAGADLRGNGYDIDVFSYGAPRVGNRAFAEFLTVQGGGTLYRITHTNDIVPRLPPPEFGYSHSSPEYWIKSPTLIPVRRRDIVKIEGIDARGGNNRPDIPDRPAHLWYFQATSACNXG

SEQ ID NO: 15545 - protein, 268 aa, Thermomyces lanuginosus
EYSQDLFNQFNLFAQYSAAAYCGKNNRAPAGTKITCTANACPEVEKADATVLYSFEDSGVGDVTGFLARDNTNKLIVLSFRGSRSIENWIGNLNFELEEINDICSGCRGHAGFTSSWRSVADTLRQKVEDAVREHPDYRVVFTGHSLGGALATVAGADLRGNKYDIDVFSYGAPRLGNRAFAEFLTVQTGGTLYRITSTNDIVPRLPPRKFGYSHSSPEYWIKSGTGVPVRRRDIVKIEGIDATGGNNQPNIPSITAHLWYFGLIGTC

SEQ ID NO: 15546 - protein, 268 aa, Thermomyces lanuginosus
EYSQDLFNQFNLFAQYSAAAYCGKNNRAPAGTKITCTANACPEVEKADATVLYSFEDSGVGDVTGFLARDNTNKLIVLSFRGSRSIENWIGNLNFELEEINDICSGCRGHAGFTSSWRSVADTLRQKVEDAVREHPDYRVVFTGHSLGGALATVAGADLRGNKYDIDVFSYGAPRLGNRAFAEFLTVQTGGTLYRITNTNDIVPRLPPRKFGYSHSSPEYWIKSGTGVPVRRRDIVKIEGIDATGGNNQPNIPSITAHLWYFGLIGTC

SEQ ID NO: 15547 - protein, 268 aa, Thermomyces lanuginosus
EYSQDLFNQFNLFAQYSAAAYCGKNNRAPAGTKITCTANACPEVEKADATLLYSFEDSGVGDVTGFLARDNTNKLIVLSFRGSRSIENWIGNLNFELEEINDICSGCRGHAGFTSSWRSVADTLRQKVEDAVREHPDYRVVFTGHSLGGALATVAGADLRGNKYDIDVFSYGAPRLGNRAFAEFLTVQTGGTLYRITYTNDIVPRLPPRKFGYSHSSPEYWIKSGTGVPVRRRDIVKIEGIDATGGNNQPNIPSITAHLWYFGLIGTC

SEQ ID NO: 15548 - protein, 268 aa, Thermomyces lanuginosus
EVSQDLFNQFNLFAQYSAAAYCGKNNRAPAGTKITCTANACPEVEKADATVLYTFKDSGVGDVTGFLARDNTNKLIVLSFRGSRSIENWIGNLNFELEEINDICSGCRGHAGFTSSWRSVADTLRQKVEDAVREHPDYRVVFTGHSLGGALATVAGADLRGNKYDIDVFSYGAPRVGNRAFAEFLTVQTGGTLYRITHTNDIVPRLPPRKFGYSHSSPEFWIKSGTLVPVRRRDIVKIEGIDATGGNNQPNIPSGTAHLWYFGLIGTC

SEQ ID NO: 15549 - protein, 268 aa, Thermomyces lanuginosus
EYSQDLFNQFNLFAQYSAAAYCGKNNRAPAGTKITCTANACPEVEKADATVLYSFEDSGVGDVTGFLARDNTNKLIVLSFRGSRSIENWIGNLNFELEEINDICSGCRGHAGFTSSWRSVADTLRQKVEDAVREHPDYRVVFTGHSLGGALATVAGADLRGNKYDIDVFSYGAPRLGNRAFAEFLTVQTGGTLYRITHTNDIVPRLPPRKFGYSHSSPEYWIKPGTGVPVRRRDIVKIEGIDATGGNNQPNIPSITAHLWYFGLIGTC

SEQ ID NO: 15550 - protein, 268 aa, Thermomyces lanuginosus
EYSQDLFNQFNLFAQYSAAAYCGKNNRAPAGTKITCTANACPEVEKADATVLYSFEDSGVGDVTGFLARDNTNKLIVLSFRGSRSIENWIGNLNFELEEINDICSGCRGHAGFTSSWRSVADTLRQKVEDAVREHPDYRVVFTGHSLGGALATVAGADLRGNKYDIDVFSYGAPRLGNRAFAEFLTVQTGGTLYRITLTNDIVPRLPPRKFGYSHSSPEYWIKSGTGVPVRRRDIVKIEGIDATGGNNQPNIPSITAHLWYFGLIGTC

SEQ ID NO: 15551 - protein, 268 aa, Thermomyces lanuginosus
EKSQDLFNQFNLFAQYSAAAYCGKNNRAPAGTKITCTANACPEVEKADATILYSFEDSGVGDVTGFLARDNTNKLIVLSFRGSRSIENWIGNLNFELEEINDICSGCRGHAGFTSSWRSVADTLRQKVEDAVREHPDYRVVFTGHSLGGALATVAGADLRGNKYDIDVFSYGAPRLGNRAFAEFLTVQTGGTLYRITLTNDIVPRLPPRKFGYSHSSPEYWIKSGTGVPVRRRDIVKIEGIDATGGNNQPNIPSITAHLWYFGLIGTC

SEQ ID NO: 15552 - protein, 268 aa, Thermomyces lanuginosus
EYSQDLFNQFNLFAQYSAAAYCGKNNRAPAGTKITCTANACPEVEKADATLLYSFEDSGVGDVTGFLARDNTNKLIVLSFRGSRSIENWIGNLNFELEEINDICSGCRGHAGFTSSWRSVADTLRQKVEDAVREHPDYRVVFTGHSLGGALATVAGADLRGNKYDIDVFSYGAPRLGNRAFAEFLTVQTGGTLYRITHTNDIVPRLPPRKFGYSHSSPEYWIKSGTGVPVRRRDIVKIEGIDATGGNNQPNIPSITVHLWYFGLIGTC

SEQ ID NO: 15553 - protein, 268 aa, Thermomyces lanuginosus
EYSQDLFNQFNLFAQYSAAAYCGKNNRAPAGTKITCTANACPEVEKADATILYSFEDSGVGDVTGFLARDNTNKLIVLSFRGSRSIENWIGNLNFELEEINDICSGCRGHAGFTSSWRSVADTLRQKVEDAVREHPDYRVVFTGHSLGGALATVAGADLRGNKYDIDVFSYGAPRLGNRAFAEFLTVQTGGTLYRITITNDIVPRLPPRKFGYSHSSPEYWIKSGTGVPVRRRDIVKIEGIDATGGNNQPNIPSITAHLWYFGLIGTC

SEQ ID NO: 15554 - protein, 268 aa, Thermomyces lanuginosus
EYSQDLFNQFNLFAQYSAAAYCGKNNRAPAGTKITCTANACPEVEKADATLLYSFEDSGVGDVTGFLARDNTNKLIVLSFRGSRSIENWIGNLNFELEEINDICSGCRGHAGFTSSWRSVADTLRQKVEDAVREHPDYRVVFTGHSLGGALATVAGADLRGNKYDIDVFSYGAPRLGNRAFAEFLTVQTGGTLYRITLTNDIVPRLPPRKFGYSHSSPEYWIKSGTGVPVRRRDIVKIEGIDATGGNNQPNIPSITAHLWYFGLIGTC

SEQ ID NO: 15555 - protein, 268 aa, Thermomyces lanuginosus
EKSQDLFNQFNLFAQYSAAAYCGKNNRAPAGTKITCTANACPEVEKADATILYSFEDSGVGDVTGFLARDNTNKLIVLSFRGSRSIENWIGNLNFELEEINDICSGCRGHAGFTSSWRSVADTLRQKVEDAVREHPDYRVVFTGHSLGGALATVAGADLRGNKYDIDVFSYGAPRLGNRAFAEFLTVQTGGTLYRITHTNDIVPRLPPRKFGYSHSSPEYWIKPGTGVPVRRRDIVKIEGIDATGGNNQPNIPSITAHLWYFGLIGTC

SEQ ID NO: 15556 - protein, 268 aa, Thermomyces lanuginosus
EYSQDLFNQFNLFAQYSAAAYCGKNNRAPAGTKITCTANACPEVEKADATVLYSFEDSGVGDVTGFLARDNTNKLIVLSFRGSRSIENWIGNLNFELEEINDICSGCRGHAGFTSSWRSVADTLRQKVEDAVREHPDYRVVFTGHSLGGALATVAGADLRGNKYDIDVFSYGAPRLGNRAFAEFLTVQTGGTLYRITHTNDIVPRLPPRKFGYSHSSPEYWIKSGTGVPVRRRDIVKIEGIDATGGNNQPNIPSITVHLWYFGLIGTC

SEQ ID NO: 15557 - protein, 268 aa, Thermomyces lanuginosus
EYSQDLFNQFNLFAQYSAAAYCGKNNRAPAGTKITCTANACPEVEKADATLLYSFEDSGVGDVTGFLARDNTNKLIVLSFRGSRSIENWIGNLNFELEEINDICSGCRGHAGFTSSWRSVADTLRQKVEDAVREHPDYRVVFTGHSLGGALATVAGADLRGNKYDIDVFSYGAPRLGNRAFAEFLTVQTGGTLYRITHTNDIVPRLPPRKFGYSHSSPEYWIKFGTGVPVRRRDIVKIEGIDATGGNNQPNIPSITAHLWYFGLIGTC

SEQ ID NO: 15558 - protein, 268 aa, Thermomyces lanuginosus
EYSQDLFNQFNLFAQYSAAAYCGKNNRAPAGTKITCTANACPEVEKADATILYSFEDSGVGDVTGFLARDNTNKLIVLSFRGSRSIENWIGNLNFELEEINDICSGCRGHAGFTSSWRSVADTLRQKVEDAVREHPDYRVVFTGHSLGGALATVAGADLRGNKYDIDVFSYGAPRLGNRAFAEFLTVQTGGTLYRITHTNDIVPRLPPRKFGYSHSSPEYWIKPGTGVPVRRRDIVKIEGIDATGGNNQPNIPSITAHLWYFGLIGTC

SEQ ID NO: 15559 - protein, 268 aa, Thermomyces lanuginosus
EYSQDLFNQFNLFAQYSAAAYCGKNNRAPAGTKITCTANACPEVEKADATVLYSFEDSGVGDVTGFLARDNTNKLIVLSFRGSRSIENWIGNLNFELEEINDICSGCRGHAGFTSSWRSVADTLRQKVEDAVREHPDYRVVFTGHSLGGALATVAGADLRGNKYDIDVFSYGAPRLGNRAFAEFLTVQTGGTLYRITHTNDIVPRLPPRKFGYSHSSPEYWIKSGTGVPVRRRDIVKIEGIDATGGNNQPNIPSGTAHLWYFGLIGTC

SEQ ID NO: 15560 - protein, 268 aa, Thermomyces lanuginosus
EYSQDLFNQFNLFAQYSAAAYCGKNNRAPAGTKITCTANACPEVEKADATLLYSFEDSGVGDVTGFLARDNTNKLIVLSFRGSRSIENWIGNLNFELEEINDICSGCRGHAGFTSSWRSVADTLRQKVEDAVREHPDYRVVFTGHSLGGALATVAGADLRGNKYDIDVFSYGAPRLGNRAFAEFLTVQTGGTLYRITHTNDIVPRLPPRKFGYSHSSPEYWIKSGTGPPVRRRDIVKIEGIDATGGNNQPNIPSITAHLWYFGLIGTC

SEQ ID NO: 15561 - protein, 268 aa, Thermomyces lanuginosus
EKSQDLFNQFNLFAQYSAAAYCGKNNRAPAGTKITCTANACPEVEKADATVLYSFEDSGVGDVTGFLARDNTNKLIVLSFRGSRSIENWIGNLNFELEEINDICSGCRGHAGFTSSWRSVADTLRQKVEDAVREHPDYRVVFTGHSLGGALATVAGADLRGNKYDIDVFSYGAPRLGNRAFAEFLTVQTGGTLYRITHTNDIVPRLPPRKFGYSHSSPEYWIKSGTGVPVRRRDIVKIEGIDATGGNNQPNIPSITIHLWYFGLIGTC

SEQ ID NO: 15562 - protein, 268 aa, Thermomyces lanuginosus
EYSQDLFNQFNLFAQYSAAAYCGKNNRAPAGTKITCTANACPEVEKADATLLYSFEDSGVGDVTGFLARDNTNKLIVLSFRGSRSIENWIGNLNFELEEINDICSGCRGHAGFTSSWRSVADTLRQKVEDAVREHPDYRVVFTGHSLGGALATVAGADLRGNKYDIDVFSYGAPRLGNRAFAEFLTVQTGGTLYRITHTNDIVPRLPPRKFGYSHSSPEYWIKPGTGVPVRRRDIVKIEGIDATGGNNQPNIPSITAHLWYFGLIGTC

SEQ ID NO: 15563 - protein, 268 aa, Thermomyces lanuginosus
EYSQDLFNQFNLFAQYSAAAYCGKNNRAPAGTKITCTANACPEVEKADATILYSFEDSGVGDVTGFLARDNTNKLIVLSFRGSRSIENWIGNLNFELEEINDICSGCRGHAGFTSSWRSVADTLRQKVEDAVREHPDYRVVFAGHSLGGALATVAGADLRGNKYDIDVFSYGAPRLGNRAFAEFLTVQTGGTLYRITHTNDIVPRLPPRKFGYSHSSPEYWIKSGTGVPVRRRDIVKIEGIDATGGNNQPNIPSITAHLWYFGLIGTC

SEQ ID NO: 15564 - protein, 268 aa, Thermomyces lanuginosus
EYSQDLFNQFNLFAQYSAAAYCGKNNRAPAGTKITCTANACPEVEKADATVLYSFEDSGVGDVTGFLARDNTNKLIVLSFRGSRSIENWIGNLNFELEEINDICSGCRGHAGFTSSWRSVADTLRQKVEDAVREHPDYRVVFTGHSLGGALATVAGADLRGNKYDIDVFSYGAPRLGNRAFAEFLTVQTGGTLYRITHTNDIVPRLPPRKFGYSHSSPEYWIKSGTGVPVRRRDIVKIEGIDATGGNNQPNIPSITIHLWYFGLIGTC

SEQ ID NO: 15565 - protein, 268 aa, Thermomyces lanuginosus
EKSQDLFNQFNLFAQYSAAAYCGKNNRAPAGTKITCTANACPEVEKADATILYSFEDSGVGDVTGFLARDNTNKLIVLSFRGSRSIENWIGNLNFELEEINDICSGCRGHAGFTSSWRSVADTLRQKVEDAVREHPDYRVVFTGHSLGGALATVAGADLRGNKYDIDVFSYGAPRLGNRAFAEFLTVQTGGTLYRITHTNDIVPRLPPRKFGYSHSSPEYWIKFGTGVPVRRRDIVKIEGIDATGGNNQPNIPSITAHLWYFGLIGTC

SEQ ID NO: 15566 - protein, 268 aa, Thermomyces lanuginosus
EYSQDLFNQFNLFAQYSAAAYCGKNNRAPAGTKITCTANACPEVEKADATLLYSFEDSGVGDVTGFLARDNTNKLIVLSFRGSRSIENWIGNLNFELEEINDICSGCRGHAGFTSSWRSVADTLRQKVEDAVREHPDYRVVFTGHSLGGALATVAGADLRGNKYDIDVFSYGAPRLGNRAFAEFLTVQTGGTLYRITNTNDIVPRLPPRKFGYSHSSPEYWIKSGTGVPVRRRDIVKIEGIDATGGNNQPNIPSITAHLWYFGLIGTC

SEQ ID NO: 15567 - protein, 268 aa, Thermomyces lanuginosus
EVSQDLFNQFNLFAQYSAAAYCGKNNRAPAGTKITCTANACPEVEKADATILYSFEDSGVGDVTGFLALDNTNKLIVLSFRGSRSIENWIGNLNFELEEIDDICSGCRGHAGFTSSWRSVADTLRQKVEDAVREHPDYRVVFTGHSLGGALATVAGADLRNNKYDIDVFSYGAPRVGNRAFAEFLTVQTGGTLYRITSTNDIVPRLPPRKFGYSHSSPEFWIKSGTLVPVRRRDIVKIEGIDATGGNNQPNIPSITVHLWYFGLIGTC

SEQ ID NO: 15568 - protein, 268 aa, Thermomyces lanuginosus
EKSQDLFNQFNLFAQYSAAAYCGKNNRAPAGTKITCTANACPEVEKADATILYSFEDSGVGDVTGFLARDNTNKLIVLSFRGSRSIENWIGNLNFELEEINDICSGCRGHAGFTSSWRSVADTLRQKVEDAVREHPDYRVVFTGHSLGGALATVAGADLRGNKYDIDVFSYGAPRLGNRAFAEFLTVQTGGTLYRITYTNDIVPRLPPRKFGYSHSSPEYWIKSGTGVPVRRRDIVKIEGIDATGGNNQPNIPSITAHLWYFGLIGTC

SEQ ID NO: 15569 - protein, 268 aa, Thermomyces lanuginosus
EKSQDLFNQFNLFAQYSAAAYCGKNNRAPAGTKITCTANACPEVEKADATVLYSFEDSGVGDVTGFLARDNTNKLIVLSFRGSRSIENWIGNLNFELEEINDICSGCRGHAGFTSSWRSVADTLRQKVEDAVREHPDYRVVFTGHSLGGGLATVAGADLRGNKYDIDVFSYGAPRLGNRAFAEFLTVQTGGTLYRITHTNDIVPRLPPRKFGYSHSSPEYWIKSGTGVPVRRRDIVKIEGIDATGGNNQPNIPSITAHLWYFGLIGTC

SEQ ID NO: 15570 - protein, 268 aa, Thermomyces lanuginosus
EYSQDLFNQFNLFAQYSAAAYCGKNNRAPAGTKITCTANACPEVEKADATVLYSFEDSGVGDVTGFLARDNTNKLIVLSFRGSRSIENWIGNLNFELEEINDICSGCRGHAGFTSSWRSVADTLRQKVEDAVREHPDYRVVFAGHSLGGALATVAGADLRGNKYDIDVFSYGAPRLGNRAFAEFLTVQTGGTLYRITHTNDIVPRLPPRKFGYSHSSPEYWIKSGTGVPVRRRDIVKIEGIDATGGNNQPNIPSITAHLWYFGLIGTC

SEQ ID NO: 15571 - protein, 268 aa, Thermomyces lanuginosus
EYSQDLFNQFNLFAQYSAAAYCGKNNRAPAGTKITCTANACPEVEKADATILYSFEDSGVGDVTGFLARDNTNKLIVLSFRGSRSIENWIGNLNFELEEINDICSGCRGHAGFTSSWRSVADTLRQKVEDAVREHPDYRVVFTGHSLGGALATVAGADLRGNKYDIDVFSYGAPRLGNRAFAEFLTVQTGGTLYRITYTNDIVPRLPPRKFGYSHSSPEYWIKSGTGVPVRRRDIVKIEGIDATGGNNQPNIPSITAHLWYFGLIGTC

SEQ ID NO: 15572 - protein, 268 aa, Thermomyces lanuginosus
EYSQDLFNQFNLFAQYSAAAYCGKNNRAPAGTKITCTANACPEVEKADATVLYSFEDSGVGDVTGFLARDNTNKLIVLSFRGSRSIENWIGNLNFELEEINDICSGCRGHAGFTSSWRSVADTLRQKVEDAVREHPDYRVVFTGHSLGGALATVAGADLRGNKYDIDVFSYGAPRLGNRAFAEFLTVQTGGTLYRITYTNDIVPRLPPRKFGYSHSSPEYWIKSGTGVPVRRRDIVKIEGIDATGGNNQPNIPSITAHLWYFGLIGTC

SEQ ID NO: 15573 - protein, 268 aa, Thermomyces lanuginosus
EKSQDLFNQFNLFAQYSAAAYCGKNNRAPAGTKITCTANACPEVEKADATILYSFEDSGVGDVTGFLARDNTNKLIVLSFRGSRSIENWIGNLNFELEEINDICSGCRGHAGFTSSWRSVADTLRQKVEDAVREHPDYRVVFTGHSLGGALATVAGADLRGNKYDIDVFSYGAPRLGNRAFAEFLTVQTGGTLYRITHTNDIVPRLPPRKFGYSHSSPEYWIKIGTGVPVRRRDIVKIEGIDATGGNNQPNIPSITAHLWYFGLIGTC

SEQ ID NO: 15574 - protein, 268 aa, Thermomyces lanuginosus
EKSQDLFNQFNLFAQYSAAAYCGKNNRAPAGTKITCTANACPEVEKADATILYSFEDSGVGDVTGFLARDNTNKLIVLSFRGSRSIENWIGNLNFELEEINDICSGCRGHAGFTSSWRSVADTLRQKVEDAVREHPDYRVVFTGHSLGGALATVAGADLRGNKYDIDVFSYGAPRLGNRAFAEFLTVQTGGTLYRITHTNDIVPRLPPRKFGYSHSSPEYWIKSGTGVPVRRRDIVKIEGIDATGGNNQPNIPSGTAHLWYFGLIGTC

SEQ ID NO: 15575 - protein, 268 aa, Thermomyces lanuginosus
EYSQDLFNQFNLFAQYSAAAYCGKNNRAPAGTKITCTANACPEVEKADATVLYSFEDSGVGDVTGFLARDNTNKLIVLSFRGSRSIENWIGNLNFELEEINDICSGCRGHAGFTSSWRSVADTLRQKVEDAVREHPDYRVVFTGHSLGGALATVAGADLRGNKYDIDVFSYGAPRLGNRAFAEFLTVQTGGTLYRITHTNDIVPRLPPRKFGYSHSSPEYWIKFGTGVPVRRRDIVKIEGIDATGGNNQPNIPSITAHLWYFGLIGTC

SEQ ID NO: 15576 - protein, 268 aa, Thermomyces lanuginosus
EYSQDLFNQFNLFAQYSAAAYCGKNNRAPAGTKITCTANACPEVEKADATLLYSFEDSGVGDVTGFLARDNTNKLIVLSFRGSRSIENWIGNLNFELEEINDICSGCRGHAGFTSSWRSVADTLRQKVEDAVREHPDYRVVFTGHSLGGALATVAGADLRGNKYDIDVFSYGAPRLGNRAFAEFLTVQTGGTLYRITITNDIVPRLPPRKFGYSHSSPEYWIKSGTGVPVRRRDIVKIEGIDATGGNNQPNIPSITAHLWYFGLIGTC

SEQ ID NO: 15577 - protein, 268 aa, Thermomyces lanuginosus
EYSQDLFNQFNLFAQYSAAAYCGKNNRAPAGTKITCTANACPEVEKADATLLYSFEDSGVGDVTGFLARDNTNKLIVLSFRGSRSIENWIGNLNFELEEINDICSGCRGHAGFTSSWRSVADTLRQKVEDAVREHPDYRVVFTGHSLGGALATVAGADLRGNKYDIDVFSYGAPRLGNRAFAEFLTVQTGGTLYRITHTNDIVPRLPPRKFGYSHSSPEYWIKIGTGVPVRRRDIVKIEGIDATGGNNQPNIPSITAHLWYFGLIGTC

SEQ ID NO: 15578 - protein, 268 aa, Thermomyces lanuginosus
EYSQDLFNQFNLFAQYSAAAYCGKNNRAPAGTKITCTANACPEVEKADATLLYSFEDSGVGDVTGFLARDNTNKLIVLSFRGSRSIENWIGNLNFELEEINDICSGCRGHAGFTSSWRSVADTLRQKVEDAVREHPDYRVVFTGHSLGGALATVAGADLRGNKYDIDVFSYGAPRLGNRAFAEFLTVQTGGTLYRITHTNDIVPRLPPRKFGYSHSSPEYWIKSGTGVPVRRRDIVKIEGIDATGGNNQPNIPSGTAHLWYFGLIGTC

SEQ ID NO: 15579 - protein, 268 aa, Thermomyces lanuginosus
EKSQDLFNQFNLFAQYSAAAYCGKNNRAPAGTKITCTANACPEVEKADATVLYTFEDSGVGDVTGFLARDNTNKLIVLSFRGSRSIENWIGNLNFELEEINDICSGCRGHAGFTSSWRSVADTLRQKVEDAVREHPDYRVVFTGHSLGGALATVAGADLRGNKYDIDVFSYGAPRLGNRAFAEFLTVQTGGTLYRITHTNDIVPRLPPRKFGYSHSSPEYWIKSGTLVPVRRRDIVKIEGIDATGGNNQPNIPSITAHLYYFGLIGTC

SEQ ID NO: 15580 - protein, 268 aa, Thermomyces lanuginosus
EKSQDLFNQFNLFAQYSAAAYCGKNNRAPAGTKITCTANACPEVEKADATVLYSFEDSGVGDVTGFLARDNTNKLIVLSFRGSRSIENWIGNLNFELEEINDICSGCRGHAGFTSSWRSVADTLRQKVEDAVREHPDYRVVFTGHSLGGALATVAGADLRGNKYDIDVFSYGAPRLGNRAFAEFLTVQTGGTLYRITHTNDIVPRLPPRKFGYSHSSPEYWIKIGTGVPVRRRDIVKIEGIDATGGNNQPNIPSITAHLWYFGLIGTC

SEQ ID NO: 15581 - protein, 268 aa, Thermomyces lanuginosus
EYSQDLFNQFNLFAQYSAAAYCGKNNRAPAGTKITCTANACPEVEKADATVLYSFEDSGVGDVTGFLARDNTNKLIVLSFRGSRSIENWIGNLNFELEEINDICSGCRGHAGFTSSWRSVADTLRQKVEDAVREHPDYRVVFTGHSLGGALATVAGADLRGNKYDIDVFSYGAPRLGNRAFAEFLTVQTGGTLYRITHTNDIVPRLPPRKFGYSHSSPEYWIKSGTGVPRRRRDIVKIEGIDATGGNNQPNIPSITAHLWYFGLIGTC

SEQ ID NO: 15582 - protein, 268 aa, Thermomyces lanuginosus
EKSQDLFNQFNLFAQYSAAAYCGKNNRAPAGTKITCTANACPEVEKADATVLYSFEDSGVGDVTGFLARDNTNKLIVLSFRGSRSIENWIGNLNFELEEINDICSGCRGHAGFTSSWRSVADTLRQKVEDAVREHPDYRVVFTGHSLGGALATVAGADLRGNKYDIDVFSYGAPRLGNRAFAEFLTVQTGGTLYRITSTNDIVPRLPPRKFGYSHSSPEYWIKSGTGVPVRRRDIVKIEGIDATGGNNQPNIPSITAHLWYFGLIGTC

SEQ ID NO: 15583 - protein, 268 aa, Thermomyces lanuginosus
EKSQDLFNQFNLFAQYSAAAYCGKNNRAPAGTKITCTANACPEVEKADATVLYSFEDSGVGDVTGFLARDNTNKLIVLSFRGSRSIENWIGNLNFELEEINDICSGCRGHAGFTSSWRSVADTLRQKVEDAVREHPDYRVVFTGHSLGGALATVAGADLRGNKYDIDVFSYGAPRLGNRAFAEFLTVQTGGTLYRITLTNDIVPRLPPRKFGYSHSSPEYWIKSGTGVPVRRRDIVKIEGIDATGGNNQPNIPSITAHLWYFGLIGTC

SEQ ID NO: 15584 - protein, 268 aa, Thermomyces lanuginosus
EKSQDLFNQFNLFAQYSAAAYCGKNNRAPAGTKITCTANACPEVEKADATILYSFEDSGVGDVTGFLARDNTNKLIVLSFRGSRSIENWIGNLNFELEEINDICSGCRGHAGFTSSWRSVADTLRQKVEDAVREHPDYRVVFTGHSLGGALATVAGADLRGNKYDIDVFSYGAPRLGNRAFAEFLTVQTGGTLYRITHTNDIVPRLPPRKFGYSHSSPEYWIKSGTGPPVRRRDIVKIEGIDATGGNNQPNIPSITAHLWYFGLIGTC

SEQ ID NO: 15585 - protein, 268 aa, Thermomyces lanuginosus
EKSQDLFNQFNLFAQYSAAAYCGKNNRAPAGTKITCTANACPEVEKADATVLYSFEDSGVGDVTGFLARDNTNKLIVLSFRGSRSIENWIGNLNFELEEINDICSGCRGHAGFTSSWRSVADTLRQKVEDAVREHPDYRVVFTGHSLGGALATVAGADLRGNKYDIDVFSYGAPRLGNRAFAEFLTVQTGGTLYRITHTNDIVPRLPPRKFGYSHSSPEYWIKSGTGPPVRRRDIVKIEGIDATGGNNQPNIPSITAHLWYFGLIGTC

SEQ ID NO: 15586 - protein, 268 aa, Thermomyces lanuginosus
EYSQDLFNQFNLFAQYSAAAYCGKNNRAPAGTKITCTANACPEVEKADATILYSFEDSGVGDVTGFLARDNTNKLIVLSFRGSRSIENWIGNLNFELEEINDICSGCRGHAGFTSSWRSVADTLRQKVEDAVREHPDYRVVFTGHSLGGALATVAGADLRGNKYDIDVFSYGAPRLGNRAFAEFLTVQTGGTLYRITHTNDIVPRLPPRKFGYSHSSPEYWIKSGTGVPRRRRDIVKIEGIDATGGNNQPNIPSITAHLWYFGLIGTC

SEQ ID NO: 15587 - protein, 268 aa, Thermomyces lanuginosus
EYSQDLFNQFNLFAQYSAAAYCGKNNRAPAGTKITCTANACPEVEKADATVLYSFEDSGVGDVTGFLARDNTNKLIVLSFRGSRSIENWIGNLNFELEEINDICSGCRGHAGFTSSWRSVADTLRQKVEDAVREHPDYRVVFTGHSLGGALATVAGADLRGNKYDIDVFSYGAPRLGNRAFAEFLTVQTGGTLYRITITNDIVPRLPPRKFGYSHSSPEYWIKSGTGVPVRRRDIVKIEGIDATGGNNQPNIPSITAHLWYFGLIGTC

SEQ ID NO: 15588 - protein, 268 aa, Thermomyces lanuginosus
EYSQDLFNQFNLFAQYSAAAYCGKNNRAPAGTKITCTANACPEVEKADATILYSFEDSGVGDVTGFLARDNTNKLIVLSFRGSRSIENWIGNLNFELEEINDICSGCRGHAGFTSSWRSVADTLRQKVEDAVREHPDYRVVFTGHSLGGALATVAGADLRGNKYDIDVFSYGAPRLGNRAFAEFLTVQTGGTLYRITLTNDIVPRLPPRKFGYSHSSPEYWIKSGTGVPVRRRDIVKIEGIDATGGNNQPNIPSITAHLWYFGLIGTC

SEQ ID NO: 15589 - protein, 268 aa, Thermomyces lanuginosus
EKSQDLFNQFNLFAQYSAAAYCGKNNRAPAGTKITCTANACPEVEKADATILYSFEDSGVGDVTGFLARDNTNKLIVLSFRGSRSIENWIGNLNFELEEINDICSGCRGHAGFTSSWRSVADTLRQKVEDAVREHPDYRVVFTGHSLGGALATVAGADLRGNKYDIDVFSYGAPRLGNRAFAEFLTVQTGGTLYRITSTNDIVPRLPPRKFGYSHSSPEYWIKSGTGVPVRRRDIVKIEGIDATGGNNQPNIPSITAHLWYFGLIGTC

SEQ ID NO: 15590 - protein, 268 aa, Thermomyces lanuginosus
EVSQDLFNQFNLFAQYSAAAYCGKNNRAPAGTKITCTANACPEVEKADATVLYSFEDSGVGDVTGFLALDNTNKLIVLSFRGSRSIENWIGNLNFELEEIDDICSGCRGHAGFTSSWRSVADTLRQKVEDAVREHPDYRVVFTGHSLGGALATVAGADLRNNKYDIDVFSYGAPRVGNRAFAEFLTVQTGGTLYRITSTNDIVPRLPPRKFGYSHSSPEFWIKSGTLVPVRRRDIVKIEGIDATGGNNQPNIPSITVHLWYFGLIGTC

SEQ ID NO: 15591 - protein, 268 aa, Thermomyces lanuginosus
EKSQDLFNQFNLFAQYSAAAYCGKNNRAPAGTKITCTANACPEVEKADATVLYSFEDSGVGDVTGFLARDNTNKLIVLSFRGSRSIENWIGNLNFELEEINDICSGCRGHAGFTSSWRSVADTLRQKVEDAVREHPDYRVVFAGHSLGGALATVAGADLRGNKYDIDVFSYGAPRLGNRAFAEFLTVQTGGTLYRITHTNDIVPRLPPRKFGYSHSSPEYWIKSGTGVPVRRRDIVKIEGIDATGGNNQPNIPSITAHLWYFGLIGTC

SEQ ID NO: 15592 - protein, 268 aa, Thermomyces lanuginosus
EKSQDLFNQFNLFAQYSAAAYCGKNNRAPAGTKITCTANACPEVEKADATVLYSFEDSGVGDVTGFLARDNTNKLIVLSFRGSRSIENWIGNLNFELEEINDICSGCRGHAGFTSSWRSVADTLRQKVEDAVREHPDYRVVFTGHSLGGALATVAGADLRGNKYDIDVFSYGAPRLGNRAFAEFLTVQTGGTLYRITHTNDIVPRLPPRKFGYSHSSPEYWIKSGTGVPVRRRDIVKIEGIDATGGNNQPNIPSGTAHLWYFGLIGTC

SEQ ID NO: 15593 - protein, 268 aa, Thermomyces lanuginosus
EYSQDLFNQFNLFAQYSAAAYCGKNNRAPAGTKITCTANACPEVEKADATLLYSFEDSGVGDVTGFLARDNTNKLIVLSFRGSRSIENWIGNLNFELEEINDICSGCRGHAGFTSSWRSVADTLRQKVEDAVREHPDYRVVFAGHSLGGALATVAGADLRGNKYDIDVFSYGAPRLGNRAFAEFLTVQTGGTLYRITHTNDIVPRLPPRKFGYSHSSPEYWIKSGTGVPVRRRDIVKIEGIDATGGNNQPNIPSITAHLWYFGLIGTC

SEQ ID NO: 15594 - protein, 268 aa, Thermomyces lanuginosus
EYSQDLFNQFNLFAQYSAAAYCGKNNRAPAGTKITCTANACPEVEKADATILYSFEDSGVGDVTGFLARDNTNKLIVLSFRGSRSIENWIGNLNFELEEINDICSGCRGHAGFTSSWRSVADTLRQKVEDAVREHPDYRVVFTGHSLGGALATVAGADLRGNKYDIDVFSYGAPRLGNRAFAEFLTVQTGGTLYRITHTNDIVPRLPPRKFGYSHSSPEYWIKFGTGVPVRRRDIVKIEGIDATGGNNQPNIPSITAHLWYFGLIGTC

SEQ ID NO: 15595 - protein, 268 aa, Thermomyces lanuginosus
EKSQDLFNQFNLFAQYSAAAYCGKNNRAPAGTKITCTANACPEVEKADATILYSFEDSGVGDVTGFLARDNTNKLIVLSFRGSRSIENWIGNLNFELEEINDICSGCRGHAGFTSSWRSVADTLRQKVEDAVREHPDYRVVFAGHSLGGALATVAGADLRGNKYDIDVFSYGAPRLGNRAFAEFLTVQTGGTLYRITHTNDIVPRLPPRKFGYSHSSPEYWIKSGTGVPVRRRDIVKIEGIDATGGNNQPNIPSITAHLWYFGLIGTC

SEQ ID NO: 15596 - protein, 268 aa, Thermomyces lanuginosus
EYSQDLFNQFNLFAQYSAAAYCGKNNRAPAGTKITCTANACPEVEKADATILYSFEDSGVGDVTGFLARDNTNKLIVLSFRGSRSIENWIGNLNFELEEINDICSGCRGHAGFTSSWRSVADTLRQKVEDAVREHPDYRVVFTGHSLGGALATVAGADLRGNKYDIDVFSYGAPRLGNRAFAEFLTVQTGGTLYRITHTNDIVPRLPPRKFGYSHSSPEYWIKSGTGPPVRRRDIVKIEGIDATGGNNQPNIPSITAHLWYFGLIGTC

SEQ ID NO: 15597 - protein, 268 aa, Thermomyces lanuginosus
EKSQDLFNQFNLFAQYSAAAYCGKNNRAPAGTKITCTANACPEVEKADATVLYSFEDSGVGDVTGFLARDNTNKLIVLSFRGSRSIENWIGNLNFELEEINDICSGCRGHAGFTSSWRSVADTLRQKVEDAVREHPDYRVVFTGHSLGGALATVAGADLRGNKYDIDVFSYGAPRLGNRAFAEFLTVQTGGTLYRITHTNDIVPRLPPRKFGYSHSSPEYWIKFGTGVPVRRRDIVKIEGIDATGGNNQPNIPSITAHLWYFGLIGTC

SEQ ID NO: 15598 - protein, 268 aa, Thermomyces lanuginosus
EKSQDLFNQFNLFAQYSAAAYCGKNNRAPAGTKITCTANACPEVEKADATVLYSFEDSGVGDVTGFLARDNTNKLIVLSFRGSRSIENWIGNLNFELEEINDICSGCRGHAGFTSSWRSVADTLRQKVEDAVREHPDYRVVFTGHSLGGALATVAGADLRGNKYDIDVFSYGAPRLGNRAFAEFLTVQTGGTLYRITHTNDIVPRLPPRKFGYSHSSPEYWIKSGTGVPRRRRDIVKIEGIDATGGNNQPNIPSITAHLWYFGLIGTC

SEQ ID NO: 15599 - protein, 268 aa, Thermomyces lanuginosus
EYSQDLFNQFNLFAQYSAAAYCGKNNRAPAGTKITCTANACPEVEKADATVLYSFEDSGVGDVTGFLARDNTNKLIVLSFRGSRSIENWIGNLNFELEEINDICSGCRGHAGFTSSWRSVADTLRQKVEDAVREHPDYRVVFTGHSLGGALATVAGADLRGNKYDIDVFSYGAPRLGNRAFAEFLTVQTGGTLYRITHTNDIVPRLPPRKFGYSHSSPEYWIKIGTGVPVRRRDIVKIEGIDATGGNNQPNIPSITAHLWYFGLIGTC

SEQ ID NO: 15600 - protein, 268 aa, Thermomyces lanuginosus
EYSQDLFNQFNLFAQYSAAAYCGKNNRAPAGTKITCTANACPEVEKADATLLYSFEDSGVGDVTGFLARDNTNKLIVLSFRGSRSIENWIGNLNFELEEINDICSGCRGHAGFTSSWRSVADTLRQKVEDAVREHPDYRVVFTGHSLGGALATVAGADLRGNKYDIDVFSYGAPRLGNRAFAEFLTVQTGGTLYRITHTNDIVPRLPPRKFGYSHSSPEYWIKSGTGVPRRRRDIVKIEGIDATGGNNQPNIPSITAHLWYFGLIGTC

SEQ ID NO: 15601 - protein, 268 aa, Thermomyces lanuginosus
EYSQDLFNQFNLFAQYSAAAYCGKNNRAPAGTKITCTANACPEVEKADATILYSFEDSGVGDVTGFLARDNTNKLIVLSFRGSRSIENWIGNLNFELEEINDICSGCRGHAGFTSSWRSVADTLRQKVEDAVREHPDYRVVFTGHSLGGALATVAGADLRGNKYDIDVFSYGAPRLGNRAFAEFLTVQTGGTLYRITHTNDIVPRLPPRKFGYSHSSPEYWIKSGTGVPVRRRDIVKIEGIDATGGNNQPNIPSGTAHLWYFGLIGTC

SEQ ID NO: 15602 - protein, 268 aa, Thermomyces lanuginosus
EKSQDLFNQFNLFAQYSAAAYCGKNNRAPAGTKITCTANACPEVEKADATVLYSFEDSGVGDVTGFLARDNTNKLIVLSFRGSRSIENWIGNLNFELEEINDICSGCRGHAGFTSSWRSVADTLRQKVEDAVREHPDYRVVFTGHSLGGALATVAGADLRGNKYDIDVFSYGAPRLGNRAFAEFLTVQTGGTLYRITNTNDIVPRLPPRKFGYSHSSPEYWIKSGTGVPVRRRDIVKIEGIDATGGNNQPNIPSITAHLWYFGLIGTC

SEQ ID NO: 15603 - protein, 268 aa, Thermomyces lanuginosus
EKSQDLFNQFNLFAQYSAAAYCGKNNRAPAGTKITCTANACPEVEKADATVLYSFEDSGVGDVTGFLARDNTNKLIVLSFRGSRSIENWIGNLNFELEEINDICSGCRGHAGFTSSWRSVADTLRQKVEDAVREHPDYRVVFTGHSLGGALATVAGADLRGNKYDIDVFSYGAPRLGNRAFAEFLTVQTGGTLYRITHTNDIVPRLPPRKFGYSHSSPEYWIKPGTGVPVRRRDIVKIEGIDATGGNNQPNIPSITAHLWYFGLIGTC

SEQ ID NO: 15604 - protein, 268 aa, Thermomyces lanuginosus
EKSQDLFNQFNLFAQYSAAAYCGKNNRAPAGTKITCTANACPEVEKADATVLYSFEDSGVGDVTGFLARDNTNKLIVLSFRGSRSIENWIGNLNFELEEINDICSGCRGHAGFTSSWRSVADTLRQKVEDAVREHPDYRVVFTGHSLGGALATVAGADLRGNKYDIDVFSYGAPRLGNRAFAEFLTVQTGGTLYRITITNDIVPRLPPRKFGYSHSSPEYWIKSGTGVPVRRRDIVKIEGIDATGGNNQPNIPSITAHLWYFGLIGTC

SEQ ID NO: 15605 - protein, 268 aa, Thermomyces lanuginosus
EYSQDLFNQFNLFAQYSAAAYCGKNNRAPAGTKITCTANACPEVEKADATILYSFEDSGVGDVTGFLARDNTNKLIVLSFRGSRSIENWIGNLNFELEEINDICSGCRGHAGFTSSWRSVADTLRQKVEDAVREHPDYRVVFTGHSLGGGLATVAGADLRGNKYDIDVFSYGAPRLGNRAFAEFLTVQTGGTLYRITHTNDIVPRLPPRKFGYSHSSPEYWIKSGTGVPVRRRDIVKIEGIDATGGNNQPNIPSITAHLWYFGLIGTC

SEQ ID NO: 15606 - protein, 268 aa, Thermomyces lanuginosus
EKSQDLFNQFNLFAQYSAAAYCGKNNRAPAGTKITCTANACPEVEKADATVLYSFEDSGVGDVTGFLARDNTNKLIVLSFRGSRSIENWIGNLNFELEEINDICSGCRGHAGFTSSWRSVADTLRQKVEDAVREHPDYRVVFTGHSLGGALATVAGADLRGNKYDIDVFSYGAPRLGNRAFAEFLTVQTGGTLYRITYTNDIVPRLPPRKFGYSHSSPEYWIKSGTGVPVRRRDIVKIEGIDATGGNNQPNIPSITAHLWYFGLIGTC

SEQ ID NO: 15607 - protein, 268 aa, Thermomyces lanuginosus
EYSQDLFNQFNLFAQYSAAAYCGKNNRAPAGTKITCTANACPEVEKADATLLYSFEDSGVGDVTGFLARDNTNKLIVLSFRGSRSIENWIGNLNFELEEINDICSGCRGHAGFTSSWRSVADTLRQKVEDAVREHPDYRVVFTGHSLGGGLATVAGADLRGNKYDIDVFSYGAPRLGNRAFAEFLTVQTGGTLYRITHTNDIVPRLPPRKFGYSHSSPEYWIKSGTGVPVRRRDIVKIEGIDATGGNNQPNIPSITAHLWYFGLIGTC

SEQ ID NO: 15608 - protein, 268 aa, Thermomyces lanuginosus
EYSQDLFNQFNLFAQYSAAAYCGKNNRAPAGTKITCTANACPEVEKADATLLYSFEDSGVGDVTGFLARDNTNKLIVLSFRGSRSIENWIGNLNFELEEINDICSGCRGHAGFTSSWRSVADTLRQKVEDAVREHPDYRVVFTGHSLGGALATVAGADLRGNKYDIDVFSYGAPRLGNRAFAEFLTVQTGGTLYRITHTNDIVPRLPPRKFGYSHSSPEYWIKSGTGVPVRRRDIVKIEGIDATGGNNQPNIPSITIHLWYFGLIGTC

SEQ ID NO: 15609 - protein, 268 aa, Thermomyces lanuginosus
EYSQDLFNQFNLFAQYSAAAYCGKNNRAPAGTKITCTANACPEVEKADATILYSFEDSGVGDVTGFLARDNTNKLIVLSFRGSRSIENWIGNLNFELEEINDICSGCRGHAGFTSSWRSVADTLRQKVEDAVREHPDYRVVFTGHSLGGALATVAGADLRGNKYDIDVFSYGAPRLGNRAFAEFLTVQTGGTLYRITNTNDIVPRLPPRKFGYSHSSPEYWIKSGTGVPVRRRDIVKIEGIDATGGNNQPNIPSITAHLWYFGLIGTC

SEQ ID NO: 15610 - protein, 268 aa, Thermomyces lanuginosus
EKSQDLFNQFNLFAQYSAAAYCGKNNRAPAGTKITCTANACPEVEKADATILYSFEDSGVGDVTGFLARDNTNKLIVLSFRGSRSIENWIGNLNFELEEINDICSGCRGHAGFTSSWRSVADTLRQKVEDAVREHPDYRVVFTGHSLGGALATVAGADLRGNKYDIDVFSYGAPRLGNRAFAEFLTVQTGGTLYRITHTNDIVPRLPPRKFGYSHSSPEYWIKSGTGVPVRRRDIVKIEGIDATGGNNQPNIPSITIHLWYFGLIGTC

SEQ ID NO: 15611 - protein, 268 aa, Thermomyces lanuginosus
EYSQDLFNQFNLFAQYSAAAYCGKNNRAPAGTKITCTANACPEVEKADATILYSFEDSGVGDVTGFLARDNTNKLIVLSFRGSRSIENWIGNLNFELEEINDICSGCRGHAGFTSSWRSVADTLRQKVEDAVREHPDYRVVFTGHSLGGALATVAGADLRGNKYDIDVFSYGAPRLGNRAFAEFLTVQTGGTLYRITHTNDIVPRLPPRKFGYSHSSPEYWIKIGTGVPVRRRDIVKIEGIDATGGNNQPNIPSITAHLWYFGLIGTC

SEQ ID NO: 15612 - protein, 268 aa, Thermomyces lanuginosus
EKSQDLFNQFNLFAQYSAAAYCGKNNRAPAGTKITCTANACPEVEKADATILYSFEDSGVGDVTGFLARDNTNKLIVLSFRGSRSIENWIGNLNFELEEINDICSGCRGHAGFTSSWRSVADTLRQKVEDAVREHPDYRVVFTGHSLGGALATVAGADLRGNKYDIDVFSYGAPRLGNRAFAEFLTVQTGGTLYRITNTNDIVPRLPPRKFGYSHSSPEYWIKSGTGVPVRRRDIVKIEGIDATGGNNQPNIPSITAHLWYFGLIGTC

SEQ ID NO: 15613 - protein, 268 aa, Thermomyces lanuginosus
EKSQDLFNQFNLFAQYSAAAYCGKNNRAPAGTKITCTANACPEVEKADATILYSFEDSGVGDVTGFLARDNTNKLIVLSFRGSRSIENWIGNLNFELEEINDICSGCRGHAGFTSSWRSVADTLRQKVEDAVREHPDYRVVFTGHSLGGALATVAGADLRGNKYDIDVFSYGAPRLGNRAFAEFLTVQTGGTLYRITHTNDIVPRLPPRKFGYSHSSPEYWIKSGTGVPVRRRDIVKIEGIDATGGNNQPNIPSITVHLWYFGLIGTC

SEQ ID NO: 15614 - protein, 268 aa, Thermomyces lanuginosus
EYSQDLFNQFNLFAQYSAAAYCGKNNRAPAGTKITCTANACPEVEKADATVLYSFEDSGVGDVTGFLARDNTNKLIVLSFRGSRSIENWIGNLNFELEEINDICSGCRGHAGFTSSWRSVADTLRQKVEDAVREHPDYRVVFTGHSLGGALATVAGADLRGNKYDIDVFSYGAPRLGNRAFAEFLTVQTGGTLYRITHTNDIVPRLPPRKFGYSHSSPEYWIKSGTGPPVRRRDIVKIEGIDATGGNNQPNIPSITAHLWYFGLIGTC

SEQ ID NO: 15615 - protein, 268 aa, Thermomyces lanuginosus
EKSQDLFNQFNLFAQYSAAAYCGKNNRAPAGTKITCTANACPEVEKADATILYSFEDSGVGDVTGFLARDNTNKLIVLSFRGSRSIENWIGNLNFELEEINDICSGCRGHAGFTSSWRSVADTLRQKVEDAVREHPDYRVVFTGHSLGGALATVAGADLRGNKYDIDVFSYGAPRLGNRAFAEFLTVQTGGTLYRITHTNDIVPRLPPRKFGYSHSSPEYWIKSGTGVPRRRRDIVKIEGIDATGGNNQPNIPSITAHLWYFGLIGTC

SEQ ID NO: 15616 - protein, 268 aa, Thermomyces lanuginosus
EYSQDLFNQFNLFAQYSAAAYCGKNNRAPAGTKITCTANACPEVEKADATLLYSFEDSGVGDVTGFLARDNTNKLIVLSFRGSRSIENWIGNLNFELEEINDICSGCRGHAGFTSSWRSVADTLRQKVEDAVREHPDYRVVFTGHSLGGALATVAGADLRGNKYDIDVFSYGAPRLGNRAFAEFLTVQTGGTLYRITSTNDIVPRLPPRKFGYSHSSPEYWIKSGTGVPVRRRDIVKIEGIDATGGNNQPNIPSITAHLWYFGLIGTC

SEQ ID NO: 15617 - protein, 268 aa, Thermomyces lanuginosus
EKSQDLFNQFNLFAQYSAAAYCGKNNRAPAGTKITCTANACPEVEKADATVLYSFEDSGVGDVTGFLARDNTNKLIVLSFRGSRSIENWIGNLNFELEEINDICSGCRGHAGFTSSWRSVADTLRQKVEDAVREHPDYRVVFTGHSLGGALATVAGADLRGNKYDIDVFSYGAPRLGNRAFAEFLTVQTGGTLYRITHTNDIVPRLPPRKFGYSHSSPEYWIKSGTGVPVRRRDIVKIEGIDATGGNNQPNIPSITVHLWYFGLIGTC

SEQ ID NO: 15618 - protein, 268 aa, Thermomyces lanuginosus
EKSQDLFNQFNLFAQYSAAAYCGKNNRAPAGTKITCTANACPEVEKADATILYSFEDSGVGDVTGFLARDNTNKLIVLSFRGSRSIENWIGNLNFELEEINDICSGCRGHAGFTSSWRSVADTLRQKVEDAVREHPDYRVVFTGHSLGGGLATVAGADLRGNKYDIDVFSYGAPRLGNRAFAEFLTVQTGGTLYRITHTNDIVPRLPPRKFGYSHSSPEYWIKSGTGVPVRRRDIVKIEGIDATGGNNQPNIPSITAHLWYFGLIGTC

SEQ ID NO: 15619 - protein, 268 aa, Thermomyces lanuginosus
EVSQDLFNQFNLFAQYSAAAYCGKNNRAPAGTKITCTANACPEVEKADATLLYSFEDSGVGDVTGFLALDNTNKLIVLSFRGSRSIENWIGNLNFELEEIDDICSGCRGHAGFTSSWRSVADTLRQKVEDAVREHPDYRVVFTGHSLGGALATVAGADLRNNKYDIDVFSYGAPRVGNRAFAEFLTVQTGGTLYRITSTNDIVPRLPPRKFGYSHSSPEFWIKSGTLVPVRRRDIVKIEGIDATGGNNQPNIPSITVHLWYFGLIGTC

SEQ ID NO: 15620 - protein, 268 aa, Thermomyces lanuginosus
EYSQDLFNQFNLFAQYSAAAYCGKNNRAPAGTKITCTANACPEVEKADATILYSFEDSGVGDVTGFLARDNTNKLIVLSFRGSRSIENWIGNLNFELEEINDICSGCRGHAGFTSSWRSVADTLRQKVEDAVREHPDYRVVFTGHSLGGALATVAGADLRGNKYDIDVFSYGAPRLGNRAFAEFLTVQTGGTLYRITHTNDIVPRLPPRKFGYSHSSPEYWIKSGTGVPVRRRDIVKIEGIDATGGNNQPNIPSITVHLWYFGLIGTC

SEQ ID NO: 15621 - protein, 268 aa, Thermomyces lanuginosus
EYSQDLFNQFNLFAQYSAAAYCGKNNRAPAGTKITCTANACPEVEKADATILYSFEDSGVGDVTGFLARDNTNKLIVLSFRGSRSIENWIGNLNFELEEINDICSGCRGHAGFTSSWRSVADTLRQKVEDAVREHPDYRVVFTGHSLGGALATVAGADLRGNKYDIDVFSYGAPRLGNRAFAEFLTVQTGGTLYRITHTNDIVPRLPPRKFGYSHSSPEYWIKSGTGVPVRRRDIVKIEGIDATGGNNQPNIPSITIHLWYFGLIGTC

SEQ ID NO: 15622 - protein, 268 aa, Thermomyces lanuginosus
EYSQDLFNQFNLFAQYSAAAYCGKNNRAPAGTKITCTANACPEVEKADATILYSFEDSGVGDVTGFLARDNTNKLIVLSFRGSRSIENWIGNLNFELEEINDICSGCRGHAGFTSSWRSVADTLRQKVEDAVREHPDYRVVFTGHSLGGALATVAGADLRGNKYDIDVFSYGAPRLGNRAFAEFLTVQTGGTLYRITSTNDIVPRLPPRKFGYSHSSPEYWIKSGTGVPVRRRDIVKIEGIDATGGNNQPNIPSITAHLWYFGLIGTC

SEQ ID NO: 15623 - protein, 268 aa, Thermomyces lanuginosus
EYSQDLFNQFNLFAQYSAAAYCGKNNRAPAGTKITCTANACPEVEKADATVLYSFEDSGVGDVTGFLARDNTNKLIVLSFRGSRSIENWIGNLNFELEEINDICSGCRGHAGFTSSWRSVADTLRQKVEDAVREHPDYRVVFTGHSLGGGLATVAGADLRGNKYDIDVFSYGAPRLGNRAFAEFLTVQTGGTLYRITHTNDIVPRLPPRKFGYSHSSPEYWIKSGTGVPVRRRDIVKIEGIDATGGNNQPNIPSITAHLWYFGLIGTC

SEQ ID NO: 15624 - protein, 268 aa, Thermomyces lanuginosus
EVSQDLFNQFNLFAQYSKAAYCQKNNSAEAGTDITCTGNACPEVFKADVTFLYSFEDMGVGDVTGFLALDNTSSQIILSFRGSRSIENWIGNLNFDLKEIDDICSGCKGHDGFTSSWRSVADTLRQKVEDAVREFPVYRVVFTGHSLGGALATVAWADLRGNGYDIDVFSYGAPRVGNRAFAEFLTTQDGGTLYRITHTNDIVPRLPPREFGYSHSSPEYWIKSGTLVPVTRNDIVKIEGIDATGGNNQPNIPDIPAHLWYFGLIGTC

SEQ ID NO: 15625 - protein, 268 aa, Thermomyces lanuginosus
EVSQDLFNQFNLFAQYSAAAYCGKNNRAPAGTNITCTANACPEVEKADATFLYSFEDSGVGDVTGFLALDNTNKLIVLSFQGTHTLTQWMAKFKALLQEINDICSGCRGHAGFTSSWRSVADTLRQKVEDAVREHPDYRVVFTGHSLGGALATVAGADLRGNKYDIDVFSYGAPRVGNRAFAEFLTVQTGGTLYRITHTNDIVPRLPPREFGYSHSSPEYWIKSGTLVPVRRRDIVKIEGIDATGGNNQPNIPSITAHLWYFGLIGTC

SEQ ID NO: 15626 - protein, 268 aa, Thermomyces lanuginosus
EVSQDLYDQFKLFAHYAAAAYCGKNNDAPAGTKITCTGNNCPEVEKADATFIYSFEDSGVGDVTGFLALDNTNKLIVLSFRGSRSIENWIANLDFLLTDISDICSGCKAHRGFYNAWRSVADTLRAKVEDAVREYPDYRVVFTGHSLGGALATVAGADLRGNGYDIDVFSYGAPRVGNRAFAEFLTVQTGGTLYRITHTNDIVPRLPPREFGYSHSSPEYWIKSGTLVPVTRNDIVVIEGIDSTGGNNQTNIPDIPAHLWYFGVIGTC

SEQ ID NO: 15627 - protein, 268 aa, Thermomyces lanuginosus
EVSQDLYDQFKLFAHYAAAAYCGKNNDAPAGTKITCTGNNCPEVEKADATFIYSFEDSGVGDVTGFLALDNTNKLIVLSFRGSRSIENWIANLDFLLTDISDICSGCKAHRGFWDAWRSVADTLRAKVEDAVREYPDYRVVFTGHSLGGALATVAGADLRGNGYDIDVFSYGAPRVGNRAFAEFLTVQTGGTLYRITHTNDIVPRLPPREFGYSHSSPEYWIKSGTLVPVTRNDIVVIEGIDSTGGNNQTNIPDIPAHLWYFGVIGTC

SEQ ID NO: 15628 - protein, 268 aa, Thermomyces lanuginosus
EVSQDLFNQFNLFAQYSAAAYCGKNNXAPAGTNITCTGNACPEVEKADATFLYSFXXSGVGXVTGFLALDNTNKLIVLSFRGSRXIXXWIGXLNFXLKXINDICSGCRGHXGFTSSWRSVADTLRQKVEDAVREHPDYRVVFTGHSLGGALATVAGADLRGNGYDIDVFSYGAPRVGNRAFAEFLTVQTGGTLYRITHTNDXXPRXPPRXFGYSHSSPXYWIKSGXXVPVTRNXIVKIXGIXATGGNNQPNIPXXPAHXWYFGLIGXC

SEQ ID NO: 15629 - protein, 268 aa, Thermomyces lanuginosus
EVSQDLFNQFNLFAQYSAAAYCGKNNXASAGSNITCTGNACPEVEKADATXLYSFEDSGVGDVTGFLALDNTNKLVVLSFRGSCSIENWXXNFXIXLKEIDDICSGCRGHXGFTSSWMSVADTLRQKVEDVVREYPNYRVVFTGHSLGGALATVAGADLRGRGYDIDVFSYGAPRVGNRAFAEFLTIQTGGTLYRITHTNDIVPRLPPREYGYSHPSPEYWIKXPNXXPVTRNDIVKVEGIDATGGNNQPNIPDITAHLWYFGLIGTC

SEQ ID NO: 15630 - protein, 268 aa, Thermomyces lanuginosus
DVSQDLYDQFKLFAHYAAAAYCGKNNDAPPGTKITCTGNNCPEVEKADATFIYSFEDSGLGDVTGFLALDNTNKLIVLSFRGSRSIENWIANLDFLLTDISDICSGCKAHRGFYNAWRSVRDTLRAKVEDAVREYPDYRVVFTGHSLGGALATVAGADLRGNGYDIDVFSYGAPRVGNRAFAEFLTVQTGGTLYRITHTNDIVPRLPPREFGYSHSSPEYWIKSGTLVPVTRNDIVVCEGIDSTGGNNGTNIPDIPAHLWYFGIIGTC

SEQ ID NO: 15631 - protein, 268 aa, Synthetic construct
EVSQDLFDQFNLFAQYSAAAYCAKNNDAPAGANVTCRGNICPEVEKADATFLYSFEDSGVGDVTGFLALDNTNRLIVLSFRGSRSLENWIGNINLDLKGIDDICSGCKGHDGFTSSWRSVANTLTQQVQNAVREHPDYRVVFTGHSLGGALATVAGASLRGNGYDIDVFSYGAPRVGNRAFAEFLTAQTGGTLYRITHTNDIVPRLPPRELGYSHSSPEYWITSGTLVPVTKNDIVKVEGIDSTDGNNQPNTPDIAAHLWYFGLIGTC

SEQ ID NO: 15632 - protein, 269 aa, Thermomyces lanuginosus
EVSQDLFNQFNLFAQYSAAAYCGKNIXATXGIXITCTGNACLXVEKADTTFLYSFEXXGLGDVTGFLAIDNTNKLIVLSFRGSRSIKNWIXNFXFXXIXINDICSGCRGHXGFISSWRSVADTLRQKVEDAVREHPDYRVVFTGHSSGGALATVAGADLRGNKYDIDVFSYGAPRVGNRAFAEFLTVQTGGTLYRITHTNDIVPRLPPRDFGYSHSPPEYWIKSGTGVPVRRRKIVKIVGIDATGGNNRPSIPNITAHLWYFQATDACN

SEQ ID NO: 15633 - protein, 268 aa, Thermomyces dupontii
EVSQDLFDQFNLFAQYSAAAYCAKNNDAPAGANVTCRGSICPEVEKADATFLYSFEDSGVGDVTGFLALDNTNRLIVLSFRGSRSLENWIGNLNLDLKGIDDICSGCKGHDGFTSSWRSVANTLTQQVQNAVREHPDYRVVFTGHSLGGALATVAGASLRGNGYDIDVFSYGAPRVGNRAFAVFLTAQTGGTLYRITHTNDIVPRLPPRELGYSHSSPEYWITSGTLVPVTKNDIVKVEGIDSTDGNNQPNTPDIAAHLWYFGLIGTC

SEQ ID NO: 15634 - protein, 268 aa, unidentified
EVSQDLFDQFNLFAQYSAAAYCAKNNDAPAGANVTCRGSICPEVEKADATFLYSFEDSGVGDVTGFLALDNTNRLIVLSFRGSRSLENWIGNINLDLKGIDDICSGCKGHDGFTSSWRSVANTLTQQVQNAVREHPDYRVVFTGHSLGGALATVAGASLRGNGYDIDVFSYGAPRVGNRAFAEFLTAQTGGTLYRITHTNDIVPRLPPRELGYSHSSPEYWITSGTLVPVTKNDIVKVEGIDSTDGNNQPNTPDIAAHLWYFGLIGTC

SEQ ID NO: 15635 - protein, 268 aa, Talaromyces thermophilus
EVSQDLFDQFNLFAQYSAAAYCAKNNDAPAGGNVTCRGSICPEVEKADATFLYSFEDSGVGDVTGFLALDNTNRLIVLSFRGSRSLENWIGNINLDLKGIDDICSGCKGHDGFTSSWRSVANTLTQQVQNAVREHPDYRVVFTGHSLGGALATVAGASLRGNGYDIDVFSYGAPRVGNRAFAEFLTAQTGGTLYRITHTNDIVPRLPPRELGYSHSSPEYWITSGTLVPVTKNDIVKVEGIDSTDGNNQPNTPDIAAHLWYFGSMATC

SEQ ID NO: 15636 - protein, 268 aa, Synthetic construct
EVSQDLFDQFNLFAQYSAAAYCAKNNDAPAGANVTCSENICPEVEKADATFLYSFEDSGVGDVTGFLALDNTNRLIVLSFRGSRSLENWIGNINLDLKGIDDICSGCKGHDGFTSSWRSVANTLTQQVQNAVREHPDYRVVFTGHSLGGALATVAGASLRGNGYDIDVFSYGAPRVGNRAFAEFLTAQTGGTLYRITHTNDIVPRLPPRELGYSHSSPEYWITSGTLVPVTKNDIVKVEGIDSTDGNNQPNTPDIAAHLWYFGLIGTC

SEQ ID NO: 15637 - protein, 268 aa, Thermomyces dupontii
EVSQDLFDQFNLFAQYSAAAYCAKNNDAPAGANVTCRGNICPEVEKADATFLYSFEDSGVGDVTGFLALDNTNRLIVLSFRGSRSLENWIGNINLDLKGIDDICSGCKGHDGFTSSWRSVANTLTQQVQNAVREHPDYRVVFTGHSLGGALATVAGASLRGNGYDIDVFSYGAPRVGNRAFAVFLTAQTGGTLYRITHTNDIVPRLPPRELGYSHSSPEYWITSGTLVPVTKNDIVKVEGIDSTDGNNQPNTPDIAAHLWYFGLIGTC

SEQ ID NO: 15638 - protein, 268 aa, Thermomyces lanuginosus
EVSQDLFDQFNLFAQYSAAAYCAKNNDAPAGANVTCRENICPEVEKADATFLYSFEDSGVGDVTGFLALDNTNRLIVLSFRGSRSLENWIGNINLDLKGIDDICSGCKGHDGFTSSWRSVANTLTQQVQNAVREHPDYRVVFTGHSLGGALATVAGASLRGNGYDIDVFSYGAPRVGNRAFAEFLTAQTGGTLYRITHTNDIVPRLPPRELGYSHSSPEYWITSGTLVPVTKNDIVKVEGIDSTDGNNQPNTPDIAAHLWYFGLIGTC

SEQ ID NO: 15639 - protein, 268 aa, Synthetic construct
EVSQDLFDQFNLFAQYSAAAYCAKNNDAPAGANVTCSENVCPEVEKADATFLYSFEDSGVGDVTGFLALDNTNRLIVLSFRGSRSLENWIGNINLDLKGIDDICSGCKGHDGFTSSWRSVANTLTQQVQNAVREHPDYRVVFTGHSLGGALATVAGASLRGNGYDIDVFSYGAPRVGNRAFAEFLTAQTGGTLYRITHTNDIVPRLPPRELGYSHSSPEYWITSGTLVPVTKNDIVKVEGIDSTDGNNQPNTPDIAAHLWYFGLIGTC

SEQ ID NO: 15640 - protein, 268 aa, Thermomyces dupontii
EVSQDLFDQFNLFAQYSAAAYCAKNNDAPAGANVTCRGSICPEVEKADATFLYSFEDSGVGDVTGFLALDNTNRLIVLSFRGSRSLENWIGNINLDLKGIDDICSGCKGHDGFTSSWRSVANTLTQQVQNAVREHPDYRVVFTGHSLGGALATVAGASLRGNGYDIDVFSYGAPRVGNRAFAEFLTAQTGGTLYRITHTNDIVPRLPPRELGYSHSSPEYWITSGTLVPVRRRDIVKVEGIDSTDGNNQPNTPDIAAHLWYFGLIGTC

SEQ ID NO: 15641 - protein, 268 aa, Thermomyces dupontii
EVSQDLFDQFNLFAQYSAAAYCAKNNDAPAGANVTCRGSICPEVEKADATFLYSFEDSGVGDVTGFLALDNTNRLIVLSFRGSRSLENWIGNINLDLKGIDDICSGCKGHDGFTSSWRSVANTLTQQVQNAVREHPDYRVVFTGHSLGGALATVAGASLRGNGYDIDVFSYGAPRVGNRAFAEFLTAQTGGTLYRITHTNDIVPRLPPRELGYSHSSPEYWITSGTLVPVTKNDIVKVEGIDSTDGNNQPNTPDIAAHFWYFGLIGTC

SEQ ID NO: 15642 - protein, 268 aa, Thermomyces dupontii
EVSQDLFDQFNLFAQYSAAAYCAKNNDAPAGANVTCRGSICPEVEKADATFLYSFEDSGVGDVTGFLALDNTNRLIVLSFRGTRSLENWIGNINLDLKGIDDICSGCKGHDGFTSSWRSVANTLTQQVQNAVREHPDYRVVFTGHSLGGALATVAGASLRGNGYDIDVFSYGAPRVGNRAFAEFLTAQTGGTLYRITHTNDIVPRLPPRELGYSHSSPEYWITSGTLVPVTKNDIVKVEGIDSTDGNNQPNTPDIAAHLWYFGLIGTC

SEQ ID NO: 15643 - protein, 268 aa, Thermomyces dupontii
EVSQDLFDQFNLFAQYSAAAYCAKNNDAPAGANVTCRGSICPEVEKADATFLYSFEDSGVGDVTGFLALDNTNRLIVLSFRGSRSLENWIGNINLDLKGIDDICSGCKGHDGFTSSWRSVANTLTQQVQNAVREHPDYRVVFTGHSLGGALATVAGASLRGNGYDIDVFSYGAPRVGNRAFAVFLTAQTGGTLYRITHTNDIVPRLPPRELGYSHSSPEYWITSGTLVPVTKNDIVKVEGIDSTDGNNQPNTPDIAAHLWYFGLIGTC

SEQ ID NO: 15644 - protein, 268 aa, Thermomyces dupontii
EVSQDLFDQFNLFAQYSAAAYCAKNNDAPAGANVTCRGSVCPEVEKADATFLYSFEDSGVGDVTGFLALDNTNRLIVLSFRGSRSLENWIGNINLDLKGIDDICSGCKGHDGFTSSWRSVANTLTQQVQNAVREHPDYRVVFTGHSLGGALATVAGASLRGNGYDIDVFSYGAPRVGNRAFAVFLTAQTGGTLYRITHTNDIVPRLPPRELGYSHSSPEYWITSGTLVPVTKNDIVKVEGIDSTDGNNQPNTPDIAAHLWYFGLIGTC

SEQ ID NO: 15645 - protein, 268 aa, Thermomyces dupontii
EVSQDLFDQFNLFAQYSAAAYCAKNNDAPAGANVTCRGSICPEVEKADATFLYSFEDSGVGDVTGFLALDNTNRLIVLSFRGSRSLENWIGNINADLKGIDDICSGCKGHDGFTSSWRSVANTLTQQVQNAVREHPDYRVVFTGHSLGGALATVAGASLRGNGYDIDVFSYGAPRVGNRAFAVFLTAQTGGTLYRITHTNDIVPRLPPRELGYSHSSPEYWITSGTLVPVTKNDIVKVEGIDSTDGNNQPNTPDIAAHLWYFGLIGTC

SEQ ID NO: 15646 - protein, 268 aa, Talaromyces thermophilus
EVSQDLFDQFNLFAQYSAAAYCAKNNDAPAGANVTCRESICPEVEKADATFLYSFEDSGVGDVTGFLALDNTNRLIVLSFRGSRSLENWIGNINLDLKGIDDICSGCKGHDGFTSSWRSVANTLTQQVQNAVREHPDYRVVFTGHSLGGALATVAGASLRGNGYDIDVFSYGAPRVGNRAFAEFLTAQTGGTLYRITHTNDIVPRLPPRELGYSHSSPEYWITSGTLVPVTKNDIVKVEGIDSTDGNNQPNTPDIAAHLWYFGLIGTC

SEQ ID NO: 15647 - protein, 268 aa, Thermomyces dupontii
EVSQDLFDQFNLFAQYSAAAYCAKNNDAPAGANVTCSGSICPEVEKADATFLYSFEDSGVGDVTGFLALDNTNRLIVLSFRGSRSLENWIGNINLDLKGIDDICSGCKGHDGFTSSWRSVANTLTQQVQNAVREHPDYRVVFTGHSLGGALATVAGASLRGNGYDIDVFSYGAPRVGNRAFAVFLTAQTGGTLYRITHTNDIVPRLPPRELGYSHSSPEYWITSGTLVPVTKNDIVKVEGIDSTDGNNQPNTPDIAAHLWYFGLIGTC

SEQ ID NO: 15648 - protein, 268 aa, Thermomyces dupontii
EVSQDLFDQFNLFAQYSAAAYCAKNNDAPAGANVTCRGSICPEVEKADATFLYSFEDSGVGDVTGFLALDNTNRLIVLSFRGSRSLENWIGNINLDLKGIDDICSGCKGHDGFTSSWRSVANTLTQQVQNAVREHPDYRVVFTGHSLGGALATVAGASLRGNGYDIDVFSYGAPRVGNRAFAVFLTAQTGGTLYRITHTNDIVPRLPPRELGYSHSSPEYWITSGTLVPVTCNDIVKVEGIDSTDGNNQPNTPDIAAHLWYFGLIGTC

SEQ ID NO: 15649 - protein, 268 aa, Thermomyces dupontii
EVSQDLFDQFNLFAQYSAAAYCAKNNDAPAGANVTCRGSICPEVEKADATFLYSFEDSGVGDVTGFLALDNTNRLIVLSFRGSRSLENWIGNINLDLKEIDDICSGCKGHDGFTSSWRSVANTLTQQVQNAVREHPDYRVVFTGHSLGGALATVAGASLRGNGYDIDVFSYGAPRVGNRAFAVFLTAQTGGTLYRITHTNDIVPRLPPRELGYSHSSPEYWITSGTLVPVTKNDIVKVEGIDSTDGNNQPNTPDIAAHLWYFGLIGTC

SEQ ID NO: 15650 - protein, 268 aa, Thermomyces dupontii
EVSQDLFDQFNLFAQYSAAAYCAKNNDAPAGANVTCRGSICPEVEKADATFLYSFEDSGVGDVTGFLALDNTNRLIVLSFRGSRSLENWIGNINLDLKGIDDICSGCKGHDGFTSSWRSVANTLTQQVQNAVREHPDYRVVFTGHSLGGALATVAGASLRGNGYDIDVFSYGAPRVGNRAFAEFLTAQTGGTLYRITHTNDIVPRLFPRELGYSHSSPEYWITSGTLVPVTKNDIVKVEGIDSTDGNNQPNTPDIAAHFWYFGLIGTC

SEQ ID NO: 15651 - protein, 268 aa, Thermomyces dupontii
EVSQDLFDQFNLFAQYSAAAYCAKNNDAPAGANVTCRGSICPEVEKADATFLYSFEDMGVGDVTGFLALDNTNRLIVLSFRGTRSLENWIGNINLDLKGIDDICSGCKGHDGFTSSWRSVANTLTQQVQNAVREHPDYRVVFTGHSLGGALATVAGASLRGNGYDIDVFSYGAPRVGNRAFAEFLTAQTGGTLYRITHTNDIVPRLPPRELGYSHSSPEYWITSGTLVPVTKNDIVKVEGIDSTDGNNQPNTPDIAAHLWYFGLIGTC

SEQ ID NO: 15652 - protein, 268 aa, Thermomyces dupontii
EVSQDLFDQFNLFAQYSAAAYCAKNNDAPAGANVTCRGSICPEVEKADATFLYSFEDSGVGDVTGFLALDNTNRLIVLSFRGSRSLENWIGNINLDLKGIDDICSGCKGHDGFTSSWRSVANTLTQQVQNAVREHPDYRVVFTGHSLGGALATVAGASLRGNGYDIDVFSYGAPRVGNRAFAEFLTAQTGGTLYRITHTNDIVPRFPPRELGYSHSSPEYWITSGTLVPVTKNDIVKVEGIDSTDGNNQPNTPDIAAHFWYFGLIGTC

SEQ ID NO: 15653 - protein, 268 aa, Thermomyces dupontii
EVSQDLFDQFNLFAQYSAAAYCAKNNDAPAGANVTCRESICPEVEKADATFLYSFEDSGVGDVTGFLALDNTNRLIVLSFRGSRSLENWIGNINLDLKGIDDICSGCKGHDGFTSSWRSVANTLTQQVQNAVREHPDYRVVFTGHSLGGALATVAGASLRGNGYDIDVFSYGAPRVGNRAFAVFLTAQTGGTLYRITHTNDIVPRLPPRELGYSHSSPEYWITSGTLVPVTKNDIVKVEGIDSTDGNNQPNTPDIAAHLWYFGLIGTC

SEQ ID NO: 15654 - protein, 268 aa, Thermomyces dupontii
EVSQDLFDQFNLFAQYSAAAYCAKNNDAPAGANVTCRGSICPEVEKADATFLYSFEDSGVGDVTGFLALDNTNRLIVLSFRGSRSLENWIGNIALDLKGIDDICSGCKGHDGFTSSWRSVANTLTQQVQNAVREHPDYRVVFTGHSLGGALATVAGASLRGNGYDIDVFSYGAPRVGNRAFAVFLTAQTGGTLYRITHTNDIVPRLPPRELGYSHSSPEYWITSGTLVPVTKNDIVKVEGIDSTDGNNQPNTPDIAAHLWYFGLIGTC

SEQ ID NO: 15655 - protein, 268 aa, Synthetic construct
EVSQDLFDQFNLFAQYSAAAYCAKNNDAPAGANVTCSENVCPEVEKADATFLYSFEDSGVGDVTGFLALDNTNRLIVLSFRGSRSLENWIGNINLDLKGIDDICSGCKGHDGFTSSWRSVANTLTQQVQNAVREHPDYRVVFTGHSLGGALATVAGASLRGNGYDIDVFSYGAPRVGNRAFAVFLTAQTGGTLYRITHTNDIVPRLPPRELGYSHSSPEYWITSGTLVPVTKNDIVKVECIDCTDGNNQPNTPDIAAHLWYFGLIGTC

SEQ ID NO: 15656 - protein, 268 aa, Thermomyces dupontii
EVSQDLFDQFNLFAQYSAAAYCAKNNDAPAGANVTCRGSICPEVEKADATFLYSFEDSGVGDVTGFLALDNTNRLIVLSFRGSRSLENWIGNINLDLTGIDDICSGCKGHDGFTSSWRSVANTLTQQVQNAVREHPDYRVVFTGHSLGGALATVAGASLRGNGYDIDVFSYGAPRVGNRAFAVFLTAQTGGTLYRITHTNDIVPRLPPRELGYSHSSPEYWITSGTLVPVTKNDIVKVEGIDSTDGNNQPNTPDIAAHLWYFGLIGTC

SEQ ID NO: 15657 - protein, 268 aa, Thermomyces lanuginosus
DVSADLFNQFKLFAQYSAAAYCGRNNDAPAGTNITCSANACPLVEAADATFLYSFENSGVGDVTGFLAVDNTNKLIVLSFRGSRSIENWIANLNFDLVDINDICSGCRGHDGFTSSWRSVADTLRQAVDDAVAAHPDYKVVVTGHSLGGGLATVAGADLRNNGYDVDLYTYGAPRVGNRAFAEFITVQTGGTLYRVTHTNDVVPRLPPRQFGYSHPSPEYWIKSGTLVPVRRRDIVKIEGIDATGGNNQNNAPDIPAHLWYFGAIGTC

SEQ ID NO: 15658 - protein, 268 aa, Thermomyces dupontii
EVSQDLCDQFNLFAQYSAAAYCAKNNDAPAGANVTCRGSICPEVEKADATFLYSFEDSGVGDVTGFLALDNTNRLIVLSFRGSRSLENWIGNINLDLKGIDDICSGCKGHDGFTSSWRSVANTLTQQVQNAVREHPDYRVVFTGHSLGGALATVAGASLRGNGYDIDVFSYGAPRVGNRAFAVFLTAQTGGTLYRITHTNDIVPRLPPRELGYSHSSPEYWITSGTLVPVTKNDIVKVEGIDSTDGNNQPNTPDIAAHLWYFGLIGTC

SEQ ID NO: 15659 - protein, 268 aa, Thermomyces dupontii
EVSQDLFDQFNLFAQYSAAAYCAKNNDAPAGANVTCRGSICPEVEKADATFLYSFEDSGVGDVTGFLALDNTNRLIVLSFRGSRSLENWIGNINLDLKGIDDICSGCKGHDGFTSSWRSVANTLTQQVQNAVREHPDYRVVFTGHSLGGALATVAGASLRGNGYDIDVFSYGAPRVGNRAFAVFLTAQTGGTLYRITHTNDIVPRLPPRELGYSHSSPEYWITSGNLVPVTKNDIVKVEGIDSTDGNNQPNTPDIAAHLWYFGLIGTC

SEQ ID NO: 15660 - protein, 268 aa, Thermomyces dupontii
EVSQDLFDQFNLFAQYSAAAYCAKNNDAPAGANVTCRGSICPEVEKADATFLYSFEDSGVGDVTGFLALDNTNRLIVLSFRGSRSLENWIGNINLDLKGIDDICSGCKGHDGFTSSWRSVANTLTQQVQNAVREHPDYRVVFTGHSLGGALATVAGASLRGNGYDIDVFSYGAPRVGNRAFAEFLTAQTGGTLYRITHTNDIVPRFFPRELGYSHSSPEYWITSGTLVPVTKNDIVKVEGIDSTDGNNQPNTPDIAAHFWYFGLIGTC

SEQ ID NO: 15661 - protein, 268 aa, Thermomyces lanuginosus
DVSADLLNQFKLFAQYSAAAYCGRNNDAPAGTNITCSANACPLVEAADATFLYSFENSGVGDVTGFLAVDNTNKLIVLSFRGSRSIENWITNLNFDLVDINDICSGCRGHDGFTSSWRSVADTLRQAVDDAVAAHPDYKVVVTGHSLGGALATLAGADLRNNGYDVDLYTYGAPRVGNRAFAEFITVQTGGTLYRVTHTNDVVPRLPPRQFGYSHPSPEYWIKSGTLVPVRRRDIVKIEGIDATGGNNQPNIPDIPAHLWYFGLIGTC

SEQ ID NO: 15662 - protein, 268 aa, Thermomyces lanuginosus
DVSKDLLNQFKLFAQYSAAAYCGRNNDAPAGTNITCSANACPLVEAADATFLYSFENSGVGDVTGFLAVDNTNKLIVLSFRGSRSIENWITNLNFDLVDINDICSGCRGHDGFTSSWRSVADTLRQAVDDAVAAHPDYKVVVTGHSLGGALATLAGADLRNNGYDVDLYTYGAPRVGNRAFAEFITVQTGGTLYRVTHTNDVVPRLPPRQFGYSHPSPEYWIKSGTLVPVTRRDIVKIEGIDATGGNNQNNAPDIPAHLWYFGAIGTC

SEQ ID NO: 15663 - protein, 268 aa, unidentified
EVSQDLFDQFNLFAQYSAAAYCAKNNHAPVGADVTCRGSICPEVEKADATFLYSFEDSGVGDVTGFLALDNTNRLIVLSFRGSRSLENWIGNINLDLKGIDDICSGCKGHDGFTSSWRSVANTLTQQVQNAVREHPDYRVVFTGHSLGGALATVAGASLRGNGYDIDVFSYGAPRVGNRAFAEFLTAQTGGTLYRITHTNDIVPRLPPRELGYSHSSPEYWITSGTLVPVTKNDIVKVEGIDSTDGNNQPNTPDIAAHLWYFGLIGTC

SEQ ID NO: 15664 - protein, 268 aa, Thermomyces dupontii
EVSQDLFDQFNLFAQYSAAAYCAKNNDAPAGANVTCRGSICPEVEKADATFLYSFEDSGVGDVTGFLALDNTNRLIVLSFRGSRSLENWIGNINLDLKGIDDICSGCKGHDGFTSSWRSVANTLTQQVQNAVREHPDYRVVFTGHSLGGALATVAGASLRCNGYDIDVFSYGAPRVGNRCFAVFLTAQTGGTLYRITHTNDIVPRLPPRELGYSHSSPEYWITSGTLVPVTKNDIVKVEGIDSTDGNNQPNTPDIAAHLWYFGLIGTC

SEQ ID NO: 15665 - protein, 268 aa, Thermomyces lanuginosus
DVSADLLNQFKLFAQYSAAAYCGRNNDAPAGTNITCSANACPLVEAADATFLYSFENSGVGDVTGFLAVDNTNKLIVLSFRGSRSIENWITNLNFDLVDINDICSGCRGHDGFTSSWRSVADTLRQAVDDAVAAHPDYKVVVTGHSLGGALATLAGADLRNNGYDVDLYTYGAPRVGNRAFAEFITVQTGGTLYRVTHTNDLVPRLPPRQFGYSHPSPEYWIKSGTLVPVRRRDIVKIEGIDATGGNNQPNIPDIPAHLWYFGLIGTC

SEQ ID NO: 15666 - protein, 268 aa, Thermomyces dupontii
EVSQDLFDQFNLFAQYSAAAYCAKNNDAPAGANVTCRGSICPEVEKADATFLYSFEDSGVGDVTGFLALDNTNRLIVLSFRGSRSLENWIGNINLDLKGIDDCCSGCKGHDGFTSSWRSVANTLTQQVQNAVREHPDYRVVFTGHSLGGALATVAGCSLRGNGYDIDVFSYGAPRVGNRAFAVFLTAQTGGTLYRITHTNDIVPRLPPRELGYSHSSPEYWITSGTLVPVTKNDIVKVEGIDSTDGNNQPNTPDIAAHLWYFGLIGTC

SEQ ID NO: 15667 - protein, 268 aa, Thermomyces lanuginosus
DVSADLLNQFKLFAQYSAAAYCGRNNDAPAGTNITCHANACPLVEAADATFLYSFENSGVGDVTGFLAVDNTNKLIVLSFRGSRSIENWITNLNFDLVDINDICSGCRGHDGFTSSWRSVADTLRQAVDDAVAAHPDYKVVVTGHSLGGALATLAGADLRNNGYDVDLYTYGAPRVGNRAFAEFITVQTGGTLYRVTHTNDVVPRLPPRQFGYSHPSPEYWIKSGTLVPVRRRDIVKIEGIDATGGNNQPNIPDIPAHLWYFGLIGTC

SEQ ID NO: 15668 - protein, 268 aa, Thermomyces lanuginosus
DVSADLLNQFKLFAQYSAAAYCGRNNDAPAGTNITCSANACPLVEAADATFLYSFENSGVGDVTGFLAVDNTNKLIVLSFRGSRSIENWITNLNFDLVDINDICSGCRGHDGFTSSWRSVADTLRQAVDDAVAAHPDYKVVITGHSLGGALATLAGADLRNNGYDVDLYTYGAPRVGNRAFAEFITVQTGGTLYRVTHTNDVVPRLPPRQFGYSHPSPEYWIKSGTLVPVRRRDIVKIEGIDATGGNNQPNIPDIPAHLWYFGLIGTC

SEQ ID NO: 15669 - protein, 268 aa, Thermomyces lanuginosus
DVSADLFNQFKLFAQYSAAAYCGRNNDAPAGTNITCSANACPLVEAADATFLYSFENSGVGDVTGFLAVDNTNKLIVLSFRGSRSIENWITNLNFDLVDINDICSGCRGHDGFTSSWRSVADTLRQAVDDAVAAHPDYKVVVTGHSLGGALATLAGADLRNNGYDVDLYTYGAPRVGNRAFAEFITVQTGGTLYRVTHTNDVVPRLPPRQFGYSHPSPEYWIKSGTLVPVRRRDIVKIEGIDATGGNNQNNAPDIPAHLWYFGAIGTC

SEQ ID NO: 15670 - protein, 268 aa, Thermomyces lanuginosus
DVSADLLNQFKLFAQYSAAAYCGRNNDAPAGTNITCSANACPLVEAADATFLYSFENSGVGDVTGFLAVDNTNKLIVLSFRGSRSIENWITNLNFDLVDINDICSGCRGHDGFTSSWRSVADTLRQAVDDAVAAHPDYKVVVTGHSLGGALATLAGADLRNNGYDVDLYTYGAPRVGNRAFAEFITVQTGGTLYRVTHTNDVVPRLPPRQFGYSHPSPEYWIKSGTLVPVRRNDIVKIEGIDATGGNNQNNAPDIPAHLWYFGAIGTC

SEQ ID NO: 15671 - protein, 268 aa, Thermomyces lanuginosus
DVSADLLNQFKLFAQYSAAAYCGRNNDAPAGTNITCSANACPLVEKADATFLYSFENSGVGDVTGFLAVDNTNKLIVLSFRGSRSIENWITNLNFDLVDINDICSGCRGHDGFTSSWRSVADTLRQAVDDAVAAHPDYKVVVTGHSLGGALATLAGADLRNNGYDVDLYTYGAPRVGNRAFAEFITVQTGGTLYRVTHTNDVVPRLPPRQFGYSHPSPEYWIKSGTLVPVRRRDIVKIEGIDATGGNNQNNAPDIPAHLWYFGAIGTC

SEQ ID NO: 15672 - protein, 268 aa, Thermomyces lanuginosus
DVSRDLLNQFKLFAQYSAAAYCGRNNDAPAGTNITCSANACPLVEAADATFLYSFENSGVGDVTGFLAVDNTNKLIVLSFRGSRSIENWITNLNFDLVDINDICSGCRGHDGFTSSWRSVADTLRQAVDDAVAAHPDYKVVVTGHSLGGALATLAGADLRNNGYDVDLYTYGAPRVGNRAFAEFITVQTGGTLYRVTHTNDVVPRLPPRQFGYSHPSPEYWIKSGTLVPVRRNDIVKIEGIDATGGNNQNNTPDIPAHLWYFGAIGTC

SEQ ID NO: 15673 - protein, 267 aa, Thermomyces dupontii
VSQDLFDQFNLFAQYSAAAYCAKNNDAPAGAXVTCRGSICPEVEKADATFLYSFEDSGVGDVTGFLALDNTNRLIVLSFRGSRSLENWIGNINXDLKGIDDICSGCKGHDGFTSSWRSVANTLTQQVQNAVREHPDYRVVFTGHSLGGALATVAGASLRGNGYDIDVFSYGAPRVGNRAFAEFLTAQTGGTLYRITHTNDIVPRLPPRELGYSHSSPEYWITSGTLVPVRRRDIVKVEGIDSTDGNNQPNTPDIAAHXWYFGXIGTC

SEQ ID NO: 15674 - protein, 267 aa, Thermomyces lanuginosus
VSADLLNQFKLFAQYSAAAYCGRNNDAPAGTNITCSANACPLVEAADATFLYSFENSGVGDVTGFLAVDNTNKLIVLSFRGSRSIENWITNLNFDLVDINDICSGCRGHDGFTSSWRSVADTLRQAVDDAVAAHPDYKVVVTGHSLGGALATLAGADLRNNGYDVDLYTYGAPRVGNRAFAEFITVQTGGTLYRVTHTNDVVPRLPPRQFGYSHPSPEYWIKSGTLVPVRRRDIVKIEGIDATGGNNQNNAPDIPAHLWYFGAIGTC

SEQ ID NO: 15675 - protein, 267 aa, Thermomyces lanuginosus
VSADLLNQFKLFAQYSAAAYCGRNNDAPAGTNITCSANACPLVEAADATFLYSFENSGVGDVTGFLAVDNTNKLIVLSFRGSRSIENWITNLNFDLVDINDICSGCRGHDGFTSSWRSVADTLRQAVDDAVAAHPDYKVVVTGHSLGGALATLAGADLRNNGYDVDLYTYGAPRVGNRAFAEFITVQTGGTLYRVTHTNDVVPRLPPRQFGYSHPSPEYWIKSGTLVPVRRCDIVKIEGIDATGGNNQNNAPDIPAHLWYFGAIGTC

SEQ ID NO: 15676 - protein, 268 aa, Thermomyces dupontii
DVSQDLFDQFNLFAQYSAAAYCAKNNDAPAGAIVTCRGSICPEVEKADATFLYSFEDSGVGDVTGFLALDNTNRLIVLSFRGSRSLENWIGNINMDLKGIDDICSGCKGHDGFTSSWRSVANTLTQQVQNAVREHPDYRVVFTGHSLGGALATVAGASLRGNGYDIDVFSYGAPRVGNRAFAEFLTAQTGGTLYRITHTNDIVPRLPPRELGYSHSSPEYWITSGTLVPVRRRDIVKVEGIDSTDGNNQPNTPDIAAHFWYFGSIGTC

SEQ ID NO: 15677 - protein, 268 aa, Thermomyces lanuginosus
DVSADLLNQFKLFAQYSAAAYCGRNNDAPAGTNITCSANACPLVEAADATFLYSFENSGVGDVTGFLAVDNTNKLIVLSFRGSRSIENWITNLNFDLVDINDICSGCRGHDGFTSSWRSVADTLRQAVDDAVAAHPDYKVVVTGHSLGGALATLAGADLRNNGYDVDLYTYGAPRVGNRAFAEFITVQTGGTLYRVTHTNDVVPRLPPRQFGYSHPSPEYWIKSGTLPPVRRRDIVKIEGIDATGGNNQPNIPDIPAHLWYFGLIGTC

SEQ ID NO: 15678 - protein, 268 aa, Thermomyces lanuginosus
DVSADLLNQFKLFAQYSAAAYCGRNNDAPAGTNITCSANACPLVEAADATFLYSFENSGVGDVTGFLAVDNTNKLIVLSFRGSRSIENWITNLNFDLVDINDICSGCRGHDGFTSSWRSVADTLRQAVDDAVAAHPDYKVVVTGHSLGGALATLAGADLRNNGYDVDLYTYGAPRVGNRAFAEFITVQTGGTLYRVTHTNDVVPRLPPRQFGYSHPSPEYWIKSGTLVPVRRRDIVKIEGIDATGGNNQNNAPDIPAHLWYFGAIGTC

SEQ ID NO: 15679 - protein, 268 aa, Thermomyces lanuginosus
DVSADLLNQFKLFAQYSAAAYCGRNNDAPAGTNITCEANACPLVEAADATFLYSFENSGVGDVTGFLAVDNTNKLIVLSFRGSRSIENWITNLNFDLVDINDICSGCRGHDGFTSSWRSVADTLRQAVDDAVAAHPDYKVVVTGHSLGGALATLAGADLRNNGYDVDLYTYGAPRVGNRAFAEFITVQTGGTLYRVTHTNDVVPRLPPRQFGYSHPSPEYWIKSGTLVPVRRRDIVKIEGIDATGGNNQNNAPDIPAHLWYFGAIGTC

SEQ ID NO: 15680 - protein, 268 aa, Thermomyces lanuginosus
DVSADLLNQFKLFAQYSAAAYCGRNNDAPAGTNITCSANACPLVEAADATFLYSFENSGVGDVTGFLAVDNTNKLIVLSFRGSRSIENWITNLNFDLVDINDICSGCRGHDGFTSSWRSVADTLRQAVDDAVAAHPDYKVVVTGHSLGGALATLAGADLRNNGYDVDLYTYGAPRVGNRAFAEFITVQTGGTLYRVTHTNDVVPRLPPRQFGYSHPSPEYWIKSGTGVPVRRRDIVKIEGIDATGGNNQPNIPDIPAHLWYFGLIGTC

SEQ ID NO: 15681 - protein, 268 aa, Thermomyces lanuginosus
DVSADLLNQFKLFAQYSAAAYCGRNNDAPAGTNITCSANACPLVEAADATFLYSFENSGVGDVTGFLAVDNTNKLIVLSFRGSRSIENWITNLNFDLVDINDICSGCRGHDGFTSSWRSVADTLRQAVDDAVAAHPDYKVVVTGHSLGGALATLAGADLRNNGYDVDLYTYGAPRVGNRAFAEFITVQTGGTLYRVTHTNDVVPRLPPREFGYSHPSPEYWIKSGTLVPVRRRDIVKIEGIDATGGNNQNNTPDIPAHLWYFGLIGTC

SEQ ID NO: 15682 - protein, 268 aa, Thermomyces lanuginosus
DVSADLLNQFKLFAQYSAAAYCGRNNDAPAGTNITCSANACPLVEAADATFLYSFENSGVGDVTGFLAEDNTNKLIVLSFRGSRSIENWITNLNFDLVDINDICSGCRGHDGFTSSWRSVADTLRQAVDDAVAAHPDYKVVVTGHSLGGALATLAGADLRNNGYDVDLYTYGAPRVGNRAFAEFITVQTGGTLYRVTHTNDVVPRLPPRQFGYSHPSPEYWIKSGTLVPVRRRDIVKIEGIDATGGNNQNNAPDIPAHLWYFGAIGTC

SEQ ID NO: 15683 - protein, 268 aa, Thermomyces lanuginosus
DVSADLLNQFKLFAQYSAAAYCGRNNDAPAGTNITCSANACPLVEAADATFLYSFESSGVGDVTGFLAVDNTNKLIVLSFRGSRSIENWITNLNFDLVDINDICSGCRGHDGFTSSWRSVADTLRQAVDDAVAAHPDYKVVVTGHSLGGALATLAGADLRNNGYDVDLYTYGAPRVGNRAFAEFITVQTGGTLYRVTHTNDVVPRLPPRQFGYSHPSPEYWIKSGTLVPVRRRDIVKIEGIDATGGNNQNNAPDIPAHLWYFGAIGTC

SEQ ID NO: 15684 - protein, 268 aa, Thermomyces lanuginosus
DVSADLLNQFKLFAQYSAAAYCGRNNDAPAGTNITCSANACPLVEFADATFLYSFENSGVGDVTGFLAVDNTNKLIVLSFRGSRSIENWITNLNFDLVDINDICSGCRGHDGFTSSWRSVADTLRQAVDDAVAAHPDYKVVVTGHSLGGALATLAGADLRNNGYDVDLYTYGAPRVGNRAFAEFITVQTGGTLYRVTHTNDVVPRLPPRQFGYSHPSPEYWIKSGTLVPVRRRDIVKIEGIDATGGNNQNNAPDIPAHLWYFGAIGTC

SEQ ID NO: 15685 - protein, 268 aa, Thermomyces lanuginosus
DVSADLLNQFKLFAQYSAAAYCGRNNDAPAGTNITCSANACPLVERADATFLYSFENSGVGDVTGFLAVDNTNKLIVLSFRGSRSIENWITNLNFDLVDINDICSGCRGHDGFTSSWRSVADTLRQAVDDAVAAHPDYKVVVTGHSLGGALATLAGADLRNNGYDVDLYTYGAPRVGNRAFAEFITVQTGGTLYRVTHTNDVVPRLPPRQFGYSHPSPEYWIKSGTLVPVRRRDIVKIEGIDATGGNNQNNAPDIPAHLWYFGAIGTC

SEQ ID NO: 15686 - protein, 268 aa, Thermomyces lanuginosus
DVSADLLNQFKHFAQYSAAAYCGRNNDAPAGTNITCSANACPLVEAADATFLYSFENSGVGDVTGFLAVDNTNKLIVLSFRGSRSIENWITNLNFDLVDINDICSGCRGHDGFTSSWRSVADTLRQAVDDAVAAHPDYKVVVTGHSLGGALATLAGADLRNNGYDVDLYTYGAPRVGNRAFAEFITVQTGGTLYRVTHTNDVVPRLPPRQFGYSHPSPEYWIKSGTLVPVRRRDIVKIEGIDATGGNNQPNIPDIPAHLWYFGLIGTC

SEQ ID NO: 15687 - protein, 268 aa, Thermomyces lanuginosus
DVSADLLNQFKLFAQYSAAAYCGRNNDAPAGTNITCSSNACPLVEAADATFLYSFENSGVGDVTGFLAVDNTNKLIVLSFRGSRSIENWITNLNFDLVDINDICSGCRGHDGFTSSWRSVADTLRQAVDDAVAAHPDYKVVVTGHSLGGALATLAGADLRNNGYDVDLYTYGAPRVGNRAFAEFITVQTGGTLYRVTHTNDVVPRLPPRQFGYSHPSPEYWIKSGTLVPVRRRDIVKIEGIDATGGNNQNNAPDIPAHLWYFGAIGTC

SEQ ID NO: 15688 - protein, 268 aa, Thermomyces lanuginosus
DVSADLLNQFKLFAQYSAAAYCGRNNDAPAGTNITCSANACPLVEAADATFLYSFENSGVGDVTGFLAVDNTNKLIVLSFRGSRSIENWITNLNFDLVDINDICSGCRGHDGFTSSWRSVADTLRQAVDDAVAAHPDYKVVVTGHSLGGGLATLAGADLRNNGYDVDLYTYGAPRVGNRAFAEFITVQTGGTLYRVTHTNDVVPRLPPRQFGYSHPSPEYWIKSGTLVPVRRRDIVKIEGIDATGGNNQPNIPDIPAHLWYFGLIGTC

SEQ ID NO: 15689 - protein, 268 aa, Thermomyces lanuginosus
DVSRDLLNQFKLFAQYSAAAYCGRNNDAPAGTNITCSANACPLVEAADATFLYSFENSGVGDVTGFLAVDNTNKLIVLSFRGSRSIENWITNLNFDLVDINDICSGCRGHDGFTSSWRSVADTLRQAVDDAVAAHPDYKVVVTGHSLGGALATLAGADLRNNGYDVDLYTYGAPRVGNRAFAEFITVQTGGTLYRVTHTNDVVPRLPPRQFGYSHPSPEYWIKSGTLVPVRRRDIVKIEGIDATGGNNQNNAPDIPAHLWYFGAIGTC

SEQ ID NO: 15690 - protein, 268 aa, Thermomyces lanuginosus
DVSADLLNQFKLFAQYSAAAYCGRNNDAPAGTNITCSANACPLVEAADATFLYSFENSGVGDVTGFLAVDNTNKLIVLSFRGSRSIENWITNLNFDLVDINDICSGCRGHDGFTSSWRSVADTLRQAVDDAVAAHPDYKVVVTGHSLGGALATLAGADLRNNGYDVDLYTYGAPRVGNRAFAEFITVQTGGTLYRVTHTNDVVPRLPPRQFGYSHPSPEYWIKSGTLVPVRRRDIVKIEGIDATGGNNQPNIPDDPAHLWYFGLIGTC

SEQ ID NO: 15691 - protein, 268 aa, Thermomyces lanuginosus; identical to SEQ ID NO: 9960

SEQ ID NO: 15692 - protein, 268 aa, Thermomyces lanuginosus
DVSADLLNQFKLFAQYSAAAYCGRNNDAPAGTNITCSANACPLVEAADATFLYSFENSGVGDVTGFLAVDNTNKLIVLSFRGSRSIENWITNLNFDLVDINDICSGCRGHDGFTSSWRSVADTLRQAVDDAVAAHPDYKVVVTGHSLGGALATLAGADLRNNGYDVDLYTYGAPRVGNRAFAEFITVQTGGTLYRVTHTNDCVPRLPPRQFGYSHPSPEYWIKSGTLVPVRRRDIVKIEGIDATGGNNQPNICDIPAHLWYFGLIGTC

SEQ ID NO: 15693 - protein, 268 aa, Thermomyces lanuginosus
DVSADLLNQFKLFAQYSAAAYCGRNNDAPAGTNITCSANACPLVENADATFLYSFENSGVGDVTGFLAVDNTNKLIVLSFRGSRSIENWITNLNFDLVDINDICSGCRGHDGFTSSWRSVADTLRQAVDDAVAAHPDYKVVVTGHSLGGALATLAGADLRNNGYDVDLYTYGAPRVGNRAFAEFITVQTGGTLYRVTHTNDVVPRLPPRQFGYSHPSPEYWIKSGTLVPVRRRDIVKIEGIDATGGNNQNNAPDIPAHLWYFGAIGTC

SEQ ID NO: 15694 - protein, 268 aa, Thermomyces lanuginosus
DVSADLLNQFKLFAQYSAAAYCGRNNDAPAGTNITCSANACPLVEAADATFLYSFENSGVGDVTGFLAVDNTNKLIVLSFRGSRSIENWITNLNFDVVDINDICSGCRGHDGFTSSWRSVADTLRQAVDDAVAAHPDYKVVVTGHSLGGALATLAGADLRNNGYDVDLYTYGAPRVGNRAFAEFITVQTGGTLYRVTHTNDVVPRLPPRQFGYSHPSPEYWIKSGTLVPVRRRDIVKIEGIDATGGNNQPNIPDIPAHLWYFGLIGTC

SEQ ID NO: 15695 - protein, 268 aa, Thermomyces lanuginosus
DVSRDLLNQFKLFAQYSAAAYCGRNNDAPAGTNITCSANACPLVEAADATFLYSFENSGVGDVTGFLAVDNTNKLIVLSFRGSRSIENWITNLNFDLVDINDICSGCRGHDGFTSSWRSVADTLRQAVDDAVAAHPDYKVVVTGHSLGGALATLAGADLRNNGYDVDLYTYGAPRVGNRAFAEFITVQTGGTLYRVTHTNDVVPRLPPRQFGYSHPSPEYWIKSGTLVPVRRNDIVKIEGIDATGGNNQNNAPDIPAHLWYFGLIGTC

SEQ ID NO: 15696 - protein, 268 aa, Thermomyces dupontii; identical to SEQ ID NO: 9884

SEQ ID NO: 15697 - protein, 268 aa, Thermomyces lanuginosus
DVSADLLNQFKLFAQYSAAAYCGRNNDAPAGTNITCSANACPLVEAADATFLYSFENSGVGDVTGFLAVDNTNKLIVLSFRGSRSIENWITNLNFDLVDINDICSGCRGHDGFTSSWRSVADTLRQAVDHAVAAHPDYKVVVTGHSLGGALATLAGADLRNNGYDVDLYTYGAPRVGNRAFAEFITVQTGGTLYRVTHTNDVVPRLPPRQFGYSHPSPEYWIKSGTLVPVRRRDIVKIEGIDATGGNNQPNIPDIPAHLWYFGLIGTC

SEQ ID NO: 15698 - protein, 268 aa, Thermomyces lanuginosus
DVSADLLNQFKLFAQYSAAAYCGRNNDAPAGTNITCSANACPLVEAADATFLYSFENSGVGDVTGFLAVDNTNKLIVLSFRGSRSIENWITNLNFDLVDINDICSGCRGHDGFTSSWRSVADTLRQAVDDAVAAHPDYKVVVTGHSLGGALATLAGADLRNNGYDVDEYTYGAPRVGNRAFAEFITVQTGGTLYRVTHTNDVVPRLPPRQFGYSHPSPEYWIKSGTLVPVRRRDIVKIEGIDATGGNNQNNAPDIPAHLWYFGAIGTC

SEQ ID NO: 15699 - protein, 268 aa, Thermomyces lanuginosus
DVSADLLNQFKLFAQYSAAAYCGRNNDAPAGTNITCSANACPLVEAADATFLYSFENSGMGDVTGFLAVDNTNKLIVLSFRGSRSIENWIANLNFDLVDINDICSGCRGHDGFTSSWRSVADTLRQAVDDAVAAHPDYKVVVTGHSLGGALATLAGADLRNNGYDVDLYTYGAPRVGNRAFAEFITVQTGGTLYRVTHTNDVVPRLPPRQFGYSHPSPEYWIKSGTLVPVRRRDIVKIEGIDATGGNNQNNAPDIPAHLWYFGAIGTC

SEQ ID NO: 15700 - protein, 268 aa, Thermomyces lanuginosus
DVSADLLNQFKLFAQYSAAAYCGRNNDAPAGTNITCSANACPGVEAADATFLYSFENSGVGDVTGFLAVDNTNKLIVLSFRGSRSIENWITNLNFDLVDINDICSGCRGHDGFTSSWRSVADTLRQAVDDAVAAHPDYKVVVTGHSLGGALATLAGADLRNNGYDVDLYTYGAPRVGNRAFAEFITVQTGGTLYRVTHTNDVVPRLPPRQFGYSHPSPEYWIKSGTLVPVRRRDIVKIEGIDATGGNNQNNAPDIPAHLWYFGAIGTC

SEQ ID NO: 15701 - protein, 268 aa, Thermomyces lanuginosus
EVSADLLNQFKLFAQYSAAAYCGRNNDAPAGTNITCSANACPLVEAADATFLYSFENSGVGDVTGFLAVDNTNKLIVLSFRGSRSIENWITNLNFDLVDINDICSGCRGHDGFTSSWRSVADTLRQAVDDAVAAHPDYKVVVTGHSLGGALATLAGADLRNNGYDVDLYTYGAPRVGNRAFAEFITVQTGGTLYRVTHTNDVVPRLPPRQFGYSHPSPEYWIKSGTLVPVRRRDIVKIEGIDATGGNNQNNTPDIPAHLWYFGLIGTC

SEQ ID NO: 15702 - protein, 268 aa, Thermomyces lanuginosus
DVSADLLNQFKLFAQYSAAAYCGRNNDAPAGTNITCSANACPLVEGADATFLYSFENSGVGDVTGFLAVDNTNKLIVLSFRGSRSIENWITNLNFDLVDINDICSGCRGHDGFTSSWRSVADTLRQAVDDAVAAHPDYKVVVTGHSLGGALATLAGADLRNNGYDVDLYTYGAPRVGNRAFAEFITVQTGGTLYRVTHTNDVVPRLPPRQFGYSHPSPEYWIKSGTLVPVRRRDIVKIEGIDATGGNNQNNAPDIPAHLWYFGAIGTC

SEQ ID NO: 15703 - protein, 268 aa, Thermomyces lanuginosus
DVSADLLNQFKLFAQYSAAAYCGRNNDAPAGTNITCSANACPLVEAADATFLYSFENSGVGDVTGFLAVDNTNKLIVLSFRGSRSIENWITNLNFDLVDINDICSECRGHDGFTSSWRSVADTLRQAVDDAVAAHPDYKVVVTGHSLGGALATLAGADLRNNGYDVDLYTYGAPRVGNRAFAEFITVQTGGTLYRVTHTNDVVPRLPPRQFGYSHPSPEYWIKSGTLVPVRRRDIVKIEGIDATGGNNQPNIPDIPAHLWYFGLIGTC

SEQ ID NO: 15704 - protein, 268 aa, Thermomyces lanuginosus
DVSADLLNQFKLFAQYSAAAYCGRNNDAPAGTNITCSANACPLVEAADATFLYSFENSGVGDVTGFLAQDNTNKLIVLSFRGSRSIENWITNLNFDLVDINDICSGCRGHDGFTSSWRSVADTLRQAVDDAVAAHPDYKVVVTGHSLGGALATLAGADLRNNGYDVDLYTYGAPRVGNRAFAEFITVQTGGTLYRVTHTNDVVPRLPPRQFGYSHPSPEYWIKSGTLVPVRRRDIVKIEGIDATGGNNQNNAPDIPAHLWYFGAIGTC

SEQ ID NO: 15705 - protein, 268 aa, Thermomyces lanuginosus
DVSADLLNQFKLFAQYSAAAYCGRNNDAPAGTNITCSANACPLVEAADATFLYSFENSGKGDVTGFLAVDNTNKLIVLSFRGSRSIENWITNLNFDLVDINDICSGCRGHDGFTSSWRSVADTLRQAVDDAVAAHPDYKVVVTGHSLGGALATLAGADLRNNGYDVDLYTYGAPRVGNRAFAEFITVQTGGTLYRVTHTNDVVPRLPPRQFGYSHPSPEYWIKSGTLVPVRRRDIVKIEGIDATGGNNQPNIPDIPAHLWYFGLIGTC

SEQ ID NO: 15706 - protein, 268 aa, Thermomyces lanuginosus
DVSLDLLNQFKLFAQYSAAAYCGRNNDAPAGTNITCSANACPLVEAADATFLYSFENSGVGDVTGFLAVDNTNKLIVLSFRGSRSIENWITNLNFDLVDINDICSGCRGHDGFTSSWRSVADTLRQAVDDAVAAHPDYKVVVTGHSLGGALATLAGADLRNNGYDVDLYTYGAPRVGNRAFAEFITVQTGGTLYRVTHTNDVVPRLPPRQFGYSHPSPEYWIKSGTLVPVRRRDIVKIEGIDATGGNNQNNAPDIPAHLWYFGAIGTC

SEQ ID NO: 15707 - protein, 268 aa, Thermomyces lanuginosus
DVSADLLNQFKLFAQYSAAAYCARNNDAPAGTNITCSANACPLVEAADATFLYSFENSGVGDVTGFLAVDNTNKLIVLSFRGSRSIENWITNLNFDLVDINDICSGCRGHDGFTSSWRSVADTLRQAVDDAVAAHPDYKVVVTGHSLGGALATLAGADLRNNGYDVDLYTYGAPRVGNRAFAEFITVQTGGTLYRVTHTNDVVPRLPPRQFGYSHPSPEYWIKSGTLVPVRRRDIVKIEGIDATGGNNQPNIPDIPAHLWYFGLIGTC

SEQ ID NO: 15708 - protein, 268 aa, Thermomyces lanuginosus
DVSADLFNQFKLFAQYSAAAYCGRNNDAPAGTNITCSANACPLVEAADATFLYSFENSGVGDVTGFLAVDNTNKLIVLSFRGSRSIENWITNLNFDLVDINDICSGCRGHDGFTSSWRSVADTLRQAVDDAVAAHPDYKVVVTGHSLGGALATLAGADLRNNGYDVDLYTYGAPRVGNRAFAEFITVQTGGTLYRVTHTNDVVPRLPPRQFGYSHPSPEYWIKSGTGVPVRRRDIVKIEGIDATGGNNQNNAPDIPAHLWYFGAIGTC

SEQ ID NO: 15709 - protein, 268 aa, Thermomyces lanuginosus
DVSADLLNQFKLFAQYSAAAYCGRNNDAPAGTNITCSANACPLVEAADATFLYSFENSGVGDVTGFLAKDNTNKLIVLSFRGSRSIENWITNLNFDLVDINDICSGCRGHDGFTSSWRSVADTLRQAVDDAVAAHPDYKVVVTGHSLGGALATLAGADLRNNGYDVDLYTYGAPRVGNRAFAEFITVQTGGTLYRVTHTNDVVPRLPPRQFGYSHPSPEYWIKSGTLVPVRRRDIVKIEGIDATGGNNQNNAPDIPAHLWYFGAIGTC

SEQ ID NO: 15710 - protein, 268 aa, Thermomyces lanuginosus
DVSADLLNQFKLFAQYSAAAYCGRNNDAPAGTNITCYANACPLVEAADATFLYSFENSGVGDVTGFLAVDNTNKLIVLSFRGSRSIENWITNLNFDLVDINDICSGCRGHDGFTSSWRSVADTLRQAVDDAVAAHPDYKVVVTGHSLGGALATLAGADLRNNGYDVDLYTYGAPRVGNRAFAEFITVQTGGTLYRVTHTNDVVPRLPPRQFGYSHPSPEYWIKSGTLVPVRRRDIVKIEGIDATGGNNQNNAPDIPAHLWYFGAIGTC

SEQ ID NO: 15711 - protein, 268 aa, Thermomyces lanuginosus
DVSADLLNQFLLFAQYSAAAYCGRNNDAPAGTNITCSANACPLVEAADATFLYSFENSGVGDVTGFLAVDNTNKLIVLSFRGSRSIENWITNLNFDLVDINDICSGCRGHDGFTSSWRSVADTLRQAVDDAVAAHPDYKVVVTGHSLGGALATLAGADLRNNGYDVDLYTYGAPRVGNRAFAEFITVQTGGTLYRVTHTNDVVPRLPPRQFGYSHPSPEYWIKSGTLVPVRRRDIVKIEGIDATGGNNQNNAPDIPAHLWYFGAIGTC

SEQ ID NO: 15712 - protein, 268 aa, Thermomyces lanuginosus
DVSADLLNQFKLFAQYSAAAYCGRNNDAPAGTNITCSANACPLVEAADATFLYSFENSGVGDVTGFLAVDNTNKLIVLSFRGSRSIENWITNLNFDLVDINDICSGCRGHDGFTSSWRSVADTLRQAVDDAVAAHPDYKVVVTGHSLGGALATLAGADLRNNGYDVDLYTYGAPRVGNRAFAEFITVQTGGTLYRVTHTNDVVPRLPPRQFGYSHPSPEYWIKSGTLVPVRRNDIVKIEGIDATGGNNQNNTPDIPAHLWYFGLIGTC

SEQ ID NO: 15713 - protein, 268 aa, Thermomyces lanuginosus
DVSADLLNQFKLFAQYSAAAYCGRNNDAPAGTNITCSANACPLVEAADATFLYSFENSGVGDVTGFLAVDNTNKLIVLSFRGSRSIENWITNLNFDLVDINDICSGCRGHDGFTSSWRSVADTLRQAVDDAVAAHPDYKVVVTGHSLGGALATLAGADLRNNGYDVDLYTYGAPRVGNRAFAEFITVQTGGTLYRVTHTNDVVPRLPPRQGGYSHPSPEYWIKSGTLVPVRRRDIVKIEGIDATGGNNQPNIPDIPAHLWYFGLIGTC

SEQ ID NO: 15714 - protein, 268 aa, Thermomyces lanuginosus
DVSADLLNQFKLFAQYSAAAYCGRNNDAPAGTNITCVANACPLVEAADATFLYSFENSGVGDVTGFLAVDNTNKLIVLSFRGSRSIENWITNLNFDLVDINDICSGCRGHDGFTSSWRSVADTLRQAVDDAVAAHPDYKVVVTGHSLGGALATLAGADLRNNGYDVDLYTYGAPRVGNRAFAEFITVQTGGTLYRVTHTNDVVPRLPPRQFGYSHPSPEYWIKSGTLVPVRRRDIVKIEGIDATGGNNQNNAPDIPAHLWYFGAIGTC

SEQ ID NO: 15715 - protein, 267 aa, Thermomyces lanuginosus
VSADLLNQFKLFAQYSAAAYCGRNNDAPAGTNITCSANACPLVEAADATFLYSFENSGVGDVTGFLAVDNTNKLIVLSFRGSRSIENWITNLNFDLVDINDICSGCRGHDGFTSSWRSVADTLRQAVDDAVAAHPDYKVVVTGHSLGGALATLAGADLRNNGYDVDLYTYGAPRVGNRAFAEFITVQTGGTLYRVTHTNDVVPRLPPRQFGYSHPSPEYWIKSGTLVPVRRRDIVKIEGIDATGGNNQNNAPDITAHLWYFGAIGTC

SEQ ID NO: 15716 - protein, 268 aa, Thermomyces lanuginosus
DVSADLLNQFKLFAQYSAAAYCGRNNDAPAGTNITCSANACPLVEAADATFLYSFENSGVGDVTGFLAVDNTNKLIVLSFRGSRSIENWITNLNFDLVDINDICSGCRGHDGFTSSWRSVADTLRQAVDDAVAAHPDYKVVVTGHSLGGALATLAGADLRNNGYDVDLYTYGAPRVGNRAFAEFITVQTGGTLYRVTHTNDVVPRLPPRQFGYSHPSPEYWIKSGTLVPVRRRDIVKIEGIDATGGNNQNNTPDIPAHLWYFGVIGTC

SEQ ID NO: 15717 - protein, 268 aa, Thermomyces lanuginosus
DVSADLLNQFKLFAQYSAAAYCGRNNDAPAGTNITCSANACPLVEAADANFLYSFENSGVGDVTGFLAVDNTNKLIVLSFRGSRSIENWITNLNFDLVDINDICSGCRGHDGFTSSWRSVADTLRQAVDDAVAAHPDYKVVVTGHSLGGALATLAGADLRNNGYDVDLYTYGAPRVGNRAFAEFITVQTGGTLYRVTHTNDVVPRLPPRQFGYSHPSPEYWIKSGTLVPVRRRDIVKIEGIDATGGNNQNNAPDIPAHLWYFGAIGTC

SEQ ID NO: 15718 - protein, 268 aa, Thermomyces lanuginosus
DVSADLLNQFKLFAQYSAAAYCGRNNDAPAGTNITCSANACPLVEAADATFLYDFENSGVGDVTGFLAVDNTNKLIVLSFRGSRSIENWITNLNFDLVDINDICSGCRGHDGFTSSWRSVADTLRQAVDDAVAAHPDYKVVVTGHSLGGALATLAGADLRNNGYDVDLYTYGAPRVGNRAFAEFITVQTGGTLYRVTHTNDVVPRLPPRQFGYSHPSPEYWIKSGTLVPVRRRDIVKIEGIDATGGNNQNNAPDIPAHLWYFGAIGTC

SEQ ID NO: 15719 - protein, 268 aa, Thermomyces lanuginosus
DVSADLLNQFKLFAQYSAAAYCGRNNDAPAGTNSTCSANACPLVEAADATFLYSFENSGVGDVTGFLAVDNTNKLIVLSFRGSRSIENWITNLNFDLVDINDICSGCRGHDGFTSSWRSVADTLRQAVDDAVAAHPDYKVVVTGHSLGGALATLAGADLRNNGYDVDLYTYGAPRVGNRAFAEFITVQTGGTLYRVTHTNDVVPRLPPRQFGYSHPSPEYWIKSGTLVPVRRRDIVKIEGIDATGGNNQNNAPDIPAHLWYFGAIGTC

SEQ ID NO: 15720 - protein, 268 aa, Thermomyces lanuginosus
DVSADLLNQLKLFAQYSAAAYCGRNNDAPAGTNITCSANACPLVEAADATFLYSFENSGVGDVTGFLAVDNTNKLIVLSFRGSRSIENWITNLNFDLVDINDICSGCRGHDGFTSSWRSVADTLRQAVDDAVAAHPDYKVVVTGHSLGGALATLAGADLRNNGYDVDLYTYGAPRVGNRAFAEFITVQTGGTLYRVTHTNDVVPRLPPRQFGYSHPSPEYWIKSGTLVPVRRRDIVKIEGIDATGGNNQNNAPDIPAHLWYFGAIGTC

SEQ ID NO: 15721 - protein, 268 aa, Thermomyces lanuginosus
DVSADLLNQFKLFAQYSAAAYCGRNNDAPAGTVITCSANACPLVEAADATFLYSFENSGVGDVTGFLAVDNTNKLIVLSFRGSRSIENWITNLNFDLVDINDICSGCRGHDGFTSSWRSVADTLRQAVDDAVAAHPDYKVVVTGHSLGGALATLAGADLRNNGYDVDLYTYGAPRVGNRAFAEFITVQTGGTLYRVTHTNDVVPRLPPRQFGYSHPSPEYWIKSGTLVPVRRRDIVKIEGIDATGGNNQNNAPDIPAHLWYFGAIGTC

SEQ ID NO: 15722 - protein, 268 aa, Thermomyces lanuginosus
DVSADLLNQFKLFAQYSAAAYCGRNNDAPAGTNITCSANACPLVEAADATFLYSFENYGVGDVTGFLAVDNTNKLIVLSFRGSRSIENWITNLNFDLVDINDICSGCRGHDGFTSSWRSVADTLRQAVDDAVAAHPDYKVVVTGHSLGGALATLAGADLRNNGYDVDLYTYGAPRVGNRAFAEFITVQTGGTLYRVTHTNDVVPRLPPRQFGYSHPSPEYWIKSGTLVPVRRRDIVKIEGIDATGGNNQNNAPDIPAHLWYFGAIGTC

SEQ ID NO: 15723 - protein, 268 aa, Thermomyces lanuginosus
DVSADLLNQFKLFAQYSAAAYCGRNNDAPAGTNITCSANACPLVEAADATFLYSFENSGVGDSTGFLAVDNTNKLIVLSFRGSRSIENWITNLNFDLVDINDICSGCRGHDGFTSSWRSVADTLRQAVDDAVAAHPDYKVVVTGHSLGGALATLAGADLRNNGYDVDLYTYGAPRVGNRAFAEFITVQTGGTLYRVTHTNDVVPRLPPRQFGYSHPSPEYWIKSGTLVPVRRRDIVKIEGIDATGGNNQNNAPDIPAHLWYFGAIGTC

SEQ ID NO: 15724 - protein, 268 aa, Thermomyces lanuginosus
DVSADLLKQFKLFAQYSAAAYCGRNNDAPAGTNITCSANACPLVEAADATFLYSFENSGVGDVTGFLAVDNTNKLIVLSFRGSRSIENWITNLNFDLVDINDICSGCRGHDGFTSSWRSVADTLRQAVDDAVAAHPDYKVVVTGHSLGGALATLAGADLRNNGYDVDLYTYGAPRVGNRAFAEFITVQTGGTLYRVTHTNDVVPRLPPRQFGYSHPSPEYWIKSGTLVPVRRRDIVKIEGIDATGGNNQNNAPDIPAHLWYFGAIGTC

SEQ ID NO: 15725 - protein, 268 aa, Thermomyces lanuginosus
DVSADLYNQFKLFAQYSAAAYCGRNNDAPAGTNITCSANACPLVEAADATFLYSFENSGVGDVTGFLAVDNTNKLIVLSFRGSRSIENWITNLNFDLVDINDICSGCRGHDGFTSSWRSVADTLRQAVDDAVAAHPDYKVVVTGHSLGGALATLAGADLRNNGYDVDLYTYGAPRVGNRAFAEFITVQTGGTLYRVTHTNDVVPRLPPRQFGYSHPSPEYWIKSGTLVPVRRRDIVKIEGIDATGGNNQNNTPDIPAHLWYFGLIGTC

SEQ ID NO: 15726 - protein, 268 aa, Thermomyces lanuginosus
DVSADLLNQFKLFAQYSAAAYCGRNNDAPAGTNITCSANACPLVEAADATFLYSFENSGVGDVTGFLAVDNTNKLIVLSFRGSRSIENWITNLNFDLVDINDICSGCRGHDGFTSSWRSVADTLRQAVDDAVAAHPDYKVVVTGHSLGGALATLAGADLRNNGYDVDLYTYGAPRVGNRAFAEFITVQTGGTLYRVTHTNDVVPRLPPRQFGYSHPSPEYCIKSGTLVPVRRRDIVKIEGIDATGCNNQPNIPDIPAHLWYFGLIGTC

SEQ ID NO: 15727 - protein, 268 aa, Thermomyces lanuginosus
DVSADLLNQFKLFAQYSAAAYCGRNNDAPAGTNITCSANACPLVEAADATFLYSFENSGVGDVTGFLAVDNTNKLIVLSFRGSRSIENWITNLNFDLVDINDICSGCRGHDGFTSSWRSVADTLRQAVDDAVAAHPDYKVVVTGHSLGGALATLAGADLRNNGYDVDLYTYGAPRVGNRAFAEFITVQTGGTLYRVTHTNDVVPRLPPRQFGYSHPSPEYWIKSGTLVPVRRRDIVKIEGIDATGGNNQNNAPDIPAHLWYFGPIGTC

SEQ ID NO: 15728 - protein, 268 aa, Thermomyces lanuginosus
DVSADLLNQFKLFAQYSAAAYCGRNNDAPAGTNITCSANACPLVEAADATFLYSFENSGVGDVTGFLAVDNTNKLIVLSFRGSRSIENWITNLNFDLVDINDICSGCRGHDGFTSSWRSVADTLRQAVDDAVAAHPDYKVVVTGHSLGGALATLAGADLRNNGYDVDLYTYGAPRVGNRAFAEFITVQTGGTLYRVTHTNDVVPRLPPRQFGYSHPSPEYWIKSGTLVPVRRRDIVKIEGIDATGGNNQNNTPDIPAHLWYFGLIGTC

SEQ ID NO: 15729 - protein, 268 aa, Thermomyces lanuginosus
DVSADLLNQFKLFAQYSAAAYCGRNNDAPAGTDITCSANACPLVEAADATFLYSFENSGVGDVTGFLAVDNTNKLIVLSFRGSRSIENWITNLNFDLVDINDICSGCRGHDGFTSSWRSVADTLRQAVDDAVAAHPDYKVVVTGHSLGGALATLAGADLRNNGYDVDLYTYGAPRVGNRAFAEFITVQTGGTLYRVTHTNDVVPRLPPRQFGYSHPSPEYWIKSGTLVPVRRRDIVKIEGIDATGGNNQNNAPDIPAHLWYFGAIGTC

SEQ ID NO: 15730 - protein, 268 aa, Thermomyces lanuginosus
DVSADLLNQFKLFAQYSAAAYCGRNNDAPAGTNITCSANACPLVEAADATFLYSFENSGVGDTTGFLAVDNTNKLIVLSFRGSRSIENWITNLNFDLVDINDICSGCRGHDGFTSSWRSVADTLRQAVDDAVAAHPDYKVVVTGHSLGGALATLAGADLRNNGYDVDLYTYGAPRVGNRAFAEFITVQTGGTLYRVTHTNDVVPRLPPRQFGYSHPSPEYWIKSGTLVPVRRRDIVKIEGIDATGGNNQNNAPDIPAHLWYFGAIGTC

SEQ ID NO: 15731 - protein, 268 aa, Thermomyces lanuginosus
DVSADLLNQMKLFAQYSAAAYCGRNNDAPAGTNITCSANACPLVEAADATFLYSFENSGVGDVTGFLAVDNTNKLIVLSFRGSRSIENWITNLNFDLVDINDICSGCRGHDGFTSSWRSVADTLRQAVDDAVAAHPDYKVVVTGHSLGGALATLAGADLRNNGYDVDLYTYGAPRVGNRAFAEFITVQTGGTLYRVTHTNDVVPRLPPRQFGYSHPSPEYWIKSGTLVPVRRRDIVKIEGIDATGGNNQNNAPDIPAHLWYFGAIGTC

SEQ ID NO: 15732 - protein, 268 aa, Thermomyces lanuginosus
DVSRDLLNQFKLFAQYSAAAYCGRNNDAPAGTNITCSANACPLVEAADATFLYSFENSGVGDVTGFLAVDNTNKLIVLSFRGSRSIENWITNLNFDLVDINDICSGCRGHDGFTSSWRSVADTLRQAVDDAVAAHPDYKVVVTGHSLGGALATLAGADLRNNGYDVDLYTYGAPRVGNRAFAEFITVQTGGTLYRVTHTNDVVPRLPPRQFGYSHPSPEYWIKSGTAVPVRRRDIVKIEGIDATGGNNQNNTPDIPAHLWYFGAIGTC

SEQ ID NO: 15733 - protein, 268 aa, Thermomyces lanuginosus
DVSADLLNQFKLFAQYSAAAYCGRNNDAPAGTNITCSANACPLVEAADATFLYSFENSGVGDMTGFLAVDNTNKLIVLSFRGSRSIENWITNLNFDLVDINDICSGCRGHDGFTSSWRSVADTLRQAVDDAVAAHPDYKVVVTGHSLGGALATLAGADLRNNGYDVDLYTYGAPRVGNRAFAEFITVQTGGTLYRVTHTNDVVPRLPPRQFGYSHPSPEYWIKSGTLVPVRRRDIVKIEGIDATGGNNQNNAPDIPAHLWYFGAIGTC

SEQ ID NO: 15734 - protein, 268 aa, Thermomyces lanuginosus
DVSADLLNQFKLFAQYSAAAYCGRNNDAPAGTNITCSANACPLVEAADATFLYSFENSGVGDVTGNLAVDNTNKLIVLSFRGSRSIENWITNLNFDLVDINDICSGCRGHDGFTSSWRSVADTLRQAVDDAVAAHPDYKVVVTGHSLGGALATLAGADLRNNGYDVDLYTYGAPRVGNRAFAEFITVQTGGTLYRVTHTNDVVPRLPPRQFGYSHPSPEYWIKSGTLVPVRRRDIVKIEGIDATGGNNQNNAPDIPAHLWYFGAIGTC

SEQ ID NO: 15735 - protein, 268 aa, Thermomyces lanuginosus
DVSADLLNQFKLFAQYSASAYCGRNNDAPAGTNITCSANACPLVEAADATFLYSFENSGVGDVTGFLAVDNTNKLIVLSFRGSRSIENWITNLNFDLVDINDICSGCRGHDGFTSSWRSVADTLRQAVDDAVAAHPDYKVVVTGHSLGGALATLAGADLRNNGYDVDLYTYGAPRVGNRAFAEFITVQTGGTLYRVTHTNDVVPRLPPRQFGYSHPSPEYWIKSGTLVPVRRRDIVKIEGIDATGGNNQNNAPDIPAHLWYFGAIGTC

SEQ ID NO: 15736 - protein, 268 aa, Thermomyces lanuginosus
DVSADLLNQFKLFAQYSAAAYCGRNNDAPAGTNITCSANACPLVEAADATFLYSFENSGVGDVTGFLAVDNTNKLIVLSFRGSRSIENWITNLNFDLVDINDICSGCRGHDGFTSSWRSVADTLRQAVDDAVAAHPDYKVVVTGHSLGGALATLAGADLRNNGYDVDLYTYGAPRVGNRAFAEFITVQTGGTLYRVTHTNDVVPRLPPRQFGYSHPSPEYWIKSGTLVPVRRRDIVKIEGIDATGGNNQDNTPDIPAHLWYFGLIGTC

SEQ ID NO: 15737 - protein, 268 aa, Thermomyces lanuginosus
DVSADLLNQFKLFAQYSAAAYCGRNNDAPAGTNITCSANACPLVEAADATFLYSFENSGVGDVTGFLAVDNTNKLIVLSFRGSRSIENWITNLNFSLVDINDICSGCRGHDGFTSSWRSVADTLRQAVDDAVAAHPDYKVVVTGHSLGGALATLAGADLRNNGYDVDLYTYGAPRVGNRAFAEFITVQTGGTLYRVTHTNDVVPRLPPRQFGYSHPSPEYWIKSGTLVPVRRRDIVKIEGIDATGGNNQNNTPDIPAHLWYFGLIGTC

SEQ ID NO: 15738 - protein, 268 aa, Thermomyces lanuginosus
DVSADLLNQFKLFAQYSAAAYCGRNNDAPAGTNITCSANACPLVEAADATFLYSFENSGVGDVTAFLAVDNTNKLIVLSFRGSRSIENWITNLNFDLVDINDICSGCRGHDGFTSSWRSVADTLRQAVDDAVAAHPDYKVVVTGHSLGGALATLAGADLRNNGYDVDLYTYGAPRVGNRAFAEFITVQTGGTLYRVTHTNDVVPRLPPRQFGYSHPSPEYWIKSGTLVPVRRRDIVKIEGIDATGGNNQNNAPDIPAHLWYFGAIGTC

SEQ ID NO: 15739 - protein, 268 aa, Thermomyces lanuginosus
DVSADLLNQFKLFAQYSAAAYCGRNNDAPAGTNITCSANACPLVEAADATFLYSFENSGVGDVTGFLAVDNTNKLIVLSFRGSRSIENWITNLNFDLVDINDICSGCRGHDGFTSSWRSVADTLRQAVDDAVAAHPDYKVVVTGHSLGGALATLAGADLRNNGYDVDLYTYGAPRVGNRAFAEFITVQTGGTLYRVTHTNDVVPRLPPRQFGYSHPSPEYWIKSGTLVPVRNRDIVKIEGIDATGGNNQNNAPDIPAHLWYFGAIGTC

SEQ ID NO: 15740 - protein, 268 aa, Thermomyces lanuginosus
DVSADLLNQFKLFAQYSAAAYCGRNNDAPAGTNITCSANACPLVEAADATFLYSFENSGVGDVTGFLAVDNTGKLIVLSFRGSRSIENWITNLNFDLVDINDICSGCRGHDGFTSSWRSVADTLRQAVDDAVAAHPDYKVVVTGHSLGGALATLAGADLRNNGYDVDLYTYGAPRVGNRAFAEFITVQTGGTLYRVTHTNDVVPRLPPRQFGYSHPSPEYWIKSGTLVPVRRRDIVKIEGIDATGGNNQNNAPDIPAHLWYFGAIGTC

SEQ ID NO: 15741 - protein, 268 aa, Thermomyces lanuginosus
DVSADLLNQFKLFAQYSAAAYCGRNNDAPAGTNITCSANNCPLVEAADATFLYSFENSGVGDVTGFLAVDNTNKLIVLSFRGSRSIENWITNLNFDLVDINDICSGCRGHDGFTSSWRSVADTLRQAVDDAVAAHPDYKVVVTGHSLGGALATLAGADLRNNGYDVDLYTYGAPRVGNRAFAEFITVQTGGTLYRVTHTNDVVPRLPPRQFGYSHPSPEYWIKSGTLVPVRRRDIVKIEGIDATGGNNQNNAPDIPAHLWYFGAIGTC

SEQ ID NO: 15742 - protein, 268 aa, Thermomyces lanuginosus
DVSADLLNQFKLFAQYSAAAYCGENNDAPAGTNITCSANACPLVEAADATFLYSFENSGVGDVTGFLAVDNTNKLIVLSFRGSRSIENWITNLNFDLVDINDICSGCRGHDGFTSSWRSVADTLRQAVDDAVAAHPDYKVVVTGHSLGGALATLAGADLRNNGYDVDLYTYGAPRVGNRAFAEFITVQTGGTLYRVTHTNDVVPRLPPRQFGYSHPSPEYWIKSGTLVPVRRRDIVKIEGIDATGGNNQNNTPDIPAHLWYFGLIGTC

SEQ ID NO: 15743 - protein, 268 aa, Thermomyces lanuginosus
DVSADLLNQFKLFAQYSAAAYCGQNNDAPAGTNITCSANACPLVEAADATFLYSFENSGVGDVTGFLAVDNTNKLIVLSFRGSRSIENWITNLNFDLVDINDICSGCRGHDGFTSSWRSVADTLRQAVDDAVAAHPDYKVVVTGHSLGGALATLAGADLRNNGYDVDLYTYGAPRVGNRAFAEFITVQTGGTLYRVTHTNDVVPRLPPRQFGYSHPSPEYWIKSGTLVPVRRRDIVKIEGIDATGGNNQNNTPDIPAHLWYFGLIGTC

SEQ ID NO: 15744 - protein, 268 aa, Thermomyces lanuginosus
DVSADLLNQFKLFAQYSAAAYCGRNNDAPAGTNITCSANACPLVEAADATFLYSFENSGVGDVTGFLAVDNTNKLIVLSFRGSRSIENWITNLNFDLVDINDICSGCRGHDGFTSSWRSVADTLRQAVDDAVAAHPDYKVVVTGHSLGGALATLAGADLRNNGYDVDLYTYGAPRVGNRAFAEFITVQTGGTLYRVTHTNDVVPRLPPRQFGYSHPSPEYWIKSGTLVPVRRKDIVKIEGIDATGGNNQNNTPDIPAHLWYFGLIGTC

SEQ ID NO: 15745 - protein, 268 aa, Thermomyces lanuginosus
DVSADLLNQFKLFAQYSAAAYCGRNNDAPAGTNITCSANACPLVEAADATFLYSFENSGVGDVTGFLAVDNGNKLIVLSFRGSRSIENWITNLNFDLVDINDICSGCRGHDGFTSSWRSVADTLRQAVDDAVAAHPDYKVVVTGHSLGGALATLAGADLRNNGYDVDLYTYGAPRVGNRAFAEFITVQTGGTLYRVTHTNDVVPRLPPRQFGYSHPSPEYWIKSGTLVPVRRRDIVKIEGIDATGGNNQNNAPDIPAHLWYFGAIGTC

SEQ ID NO: 15746 - protein, 268 aa, Thermomyces lanuginosus
DVSADLLNQFKLFAQYSAAAYCGRNNDAPAGTNITCSANACPLVEAADATFLYSFENSGVGDVTGFLAVDNTNKAIVLSFRGSRSIENWITNLNFDLVDINDICSGCRGHDGFTSSWRSVADTLRQAVDDAVAAHPDYKVVVTGHSLGGALATLAGADLRNNGYDVDLYTYGAPRVGNRAFAEFITVQTGGTLYRVTHTNDVVPRLPPRQFGYSHPSPEYWIKSGTLVPVRRRDIVKIEGIDATGGNNQNNAPDIPAHLWYFGAIGTC

SEQ ID NO: 15747 - protein, 268 aa, Thermomyces lanuginosus
DVSADLLNQFKLFAQYSAAAYCGRNNDAPAGTNITCSANACPLVEAADATFLYSFENSGVGDVTGFLAVDNTNKLIVLSFRGSRSIENWITNLNFDLVDINDICSGCRGHDGFTSSWRSVADTLRQAVDDAVAAHPDYKVVVTGHSLGGALATLAGADLRNNGYDVDLYTYGAPRVGNRAFAEFITVQTGGTLYRVTHTNDVVPRLPPRQFGYSHPSPEYWIKSGTLRPVRRRDIVKIEGIDATGGNNQNNAPDIPAHLWYFGAIGTC

SEQ ID NO: 15748 - protein, 268 aa, Thermomyces lanuginosus
DVSADLLNQFKLFAQYSAATYCGRNNDAPAGTNITCSANACPLVEAADATFLYSFENSGVGDVTGFLAVDNTNKLIVLSFRGSRSIENWITNLNFDLVDINDICSGCRGHDGFTSSWRSVADTLRQAVDDAVAAHPDYKVVVTGHSLGGALATLAGADLRNNGYDVDLYTYGAPRVGNRAFAEFITVQTGGTLYRVTHTNDVVPRLPPRQFGYSHPSPEYWIKSGTLVPVRRRDIVKIEGIDATGGNNQNNAPDIPAHLWYFGAIGTC

SEQ ID NO: 15749 - protein, 268 aa, Thermomyces lanuginosus
QVSADLLNQFKLFAQYSAAAYCGRNNDAPAGTNITCSANACPLVEAADATFLYSFENSGVGDVTGFLAVDNTNKLIVLSFRGSRSIENWITNLNFDLVDINDICSGCRGHDGFTSSWRSVADTLRQAVDDAVAAHPDYKVVVTGHSLGGALATLAGADLRNNGYDVDLYTYGAPRVGNRAFAEFITVQTGGTLYRVTHTNDVVPRLPPRQFGYSHPSPEYWIKSGTLVPVRRRDIVKIEGIDATGGNNQNNTPDIPAHLWYFGLIGTC

SEQ ID NO: 15750 - protein, 268 aa, Thermomyces lanuginosus
DVSADLLNQFKLFAQYSAAAYCGRNNDAPAGTNITCSANACPLVEAADATFLYSFENSGVGDVTGKLAVDNTNKLIVLSFRGSRSIENWITNLNFDLVDINDICSGCRGHDGFTSSWRSVADTLRQAVDDAVAAHPDYKVVVTGHSLGGALATLAGADLRNNGYDVDLYTYGAPRVGNRAFAEFITVQTGGTLYRVTHTNDVVPRLPPRQFGYSHPSPEYWIKSGTLVPVRRRDIVKIEGIDATGGNNQNNAPDIPAHLWYFGAIGTC

SEQ ID NO: 15751 - protein, 268 aa, Thermomyces lanuginosus
DVSADLLNQFKLFAQYSAAAYCGRNNDAPAGTNITCSANACPLVEAADATFLYSFENSGVGDCTGFLAVDNTNKLIVLSFRGSRSIENWITNLNFDLVDINDICSGCRGHDGFTSSWRSVADTLRQAVDDAVAAHPDYKVVVTGHSLGGALATLAGADLRNNGYDVDLYTYGAPRVGNRAFAEFITVQTGGTLYRVTHTNDVVPRLPPRQFGYSHPSPEYWIKSGTLVPVRRRDIVKIEGIDATGGNNQNNAPDIPAHLWYFGAIGTC

SEQ ID NO: 15752 - protein, 268 aa, Thermomyces lanuginosus
DVSADLLNQFKLFAQYSAAAYCGRNNDAPAGTNITCSANACPLVEAADATFLYSFENSGVGDQTGFLAVDNTNKLIVLSFRGSRSIENWITNLNFDLVDINDICSGCRGHDGFTSSWRSVADTLRQAVDDAVAAHPDYKVVVTGHSLGGALATLAGADLRNNGYDVDLYTYGAPRVGNRAFAEFITVQTGGTLYRVTHTNDVVPRLPPRQFGYSHPSPEYWIKSGTLVPVRRRDIVKIEGIDATGGNNQNNAPDIPAHLWYFGAIGTC

SEQ ID NO: 15753 - protein, 268 aa, Thermomyces lanuginosus
DVSADLLNQFKLFAQYSAAAYCGRNNDAPAGTNITCSANACPLVEAADATFLYSFENSGVGDVTGFLAVDNTNKLIVLSFRGSRSIENWITNLNFDLVDINDICSGCRGHDGFESSWRSVADTLRQAVDDAVAAHPDYKVVVTGHSLGGALATLAGADLRNNGYDVDLYTYGAPRVGNRAFAEFITVQTGGTLYRVTHTNDVVPRLPPRQFGYSHPSPEYWIKSGTLVPVRRRDIVKIEGIDATGGNNQNNAPDIPAHLWYFGAIGTC

SEQ ID NO: 15754 - protein, 268 aa, Thermomyces lanuginosus
DVSADLLNQFKLFAQYSAAAYCGRNNDAPAGTNITCSANACPLVEAADATFLYSFENSGVGDVSGFLAVDNTNKLIVLSFRGSRSIENWITNLNFDLVDINDICSGCRGHDGFTSSWRSVADTLRQAVDDAVAAHPDYKVVVTGHSLGGALATLAGADLRNNGYDVDLYTYGAPRVGNRAFAEFITVQTGGTLYRVTHTNDVVPRLPPRQFGYSHPSPEYWIKSGTLVPVRRRDIVKIEGIDATGGNNQNNAPDIPAHLWYFGAIGTC

SEQ ID NO: 15755 - protein, 268 aa, Thermomyces lanuginosus
DVSADLLNQFKLFAQYSAAAYCGRNNDAPAGTNITCSANACPLVEAADATFLYSFEQSGVGDVTGFLAVDNTNKLIVLSFRGSRSIENWITNLNFDLVDINDICSGCRGHDGFTSSWRSVADTLRQAVDDAVAAHPDYKVVVTGHSLGGALATLAGADLRNNGYDVDLYTYGAPRVGNRAFAEFITVQTGGTLYRVTHTNDVVPRLPPRQFGYSHPSPEYWIKSGTLVPVRRRDIVKIEGIDATGGNNQNNTPDIPAHLWYFGLIGTC

SEQ ID NO: 15756 - protein, 268 aa, Thermomyces lanuginosus
DVSADLLNQFKLFAQYSAAVYCGRNNDAPAGTNITCSANACPLVEAADATFLYSFENSGVGDVTGFLAVDNTNKLIVLSFRGSRSIENWITNLNFDLVDINDICSGCRGHDGFTSSWRSVADTLRQAVDDAVAAHPDYKVVVTGHSLGGALATLAGADLRNNGYDVDLYTYGAPRVGNRAFAEFITVQTGGTLYRVTHTNDVVPRLPPRQFGYSHPSPEYWIKSGTLVPVRRRDIVKIEGIDATGGNNQNNAPDIPAHLWYFGAIGTC

SEQ ID NO: 15757 - protein, 268 aa, Thermomyces lanuginosus
DVSADLLNQFKLFAQYSAAAYCGRNNDAPAGTNITCSANACPLVEAADATFLYSFENSGVGDATGFLAVDNTNKLIVLSFRGSRSIENWITNLNFDLVDINDICSGCRGHDGFTSSWRSVADTLRQAVDDAVAAHPDYKVVVTGHSLGGALATLAGADLRNNGYDVDLYTYGAPRVGNRAFAEFITVQTGGTLYRVTHTNDVVPRLPPRQFGYSHPSPEYWIKSGTLVPVRRRDIVKIEGIDATGGNNQNNAPDIPAHLWYFGAIGTC

SEQ ID NO: 15758 - protein, 268 aa, Thermomyces lanuginosus
DVSADLLNQFKLFAQYSAAAYCGRNNDAPAGTNITCSANACPLVEAADATFLYSFENSGTGDVTGFLAVDNTNKLIVLSFRGSRSIENWITNLNFDLVDINDICSGCRGHDGFTSSWRSVADTLRQAVDDAVAAHPDYKVVVTGHSLGGALATLAGADLRNNGYDVDLYTYGAPRVGNRAFAEFITVQTGGTLYRVTHTNDVVPRLPPRQFGYSHPSPEYWIKSGTLVPVRRRDIVKIEGIDATGGNNQNNAPDIPAHLWYFGAIGTC

SEQ ID NO: 15759 - protein, 268 aa, Thermomyces lanuginosus
DVSADLLRQFKLFAQYSAAAYCGRNNDAPAGTNITCSANACPLVEAADATFLYSFENSGVGDVTGFLAVDNTNKLIVLSFRGSRSIENWITNLNFDLVDINDICSGCRGHDGFTSSWRSVADTLRQAVDDAVAAHPDYKVVVTGHSLGGALATLAGADLRNNGYDVDLYTYGAPRVGNRAFAEFITVQTGGTLYRVTHTNDVVPRLPPRQFGYSHPSPEYWIKSGTLVPVRRRDIVKIEGIDATGGNNQNNAPDIPAHLWYFGAIGTC

SEQ ID NO: 15760 - protein, 268 aa, Thermomyces lanuginosus; identical to SEQ ID NO: 9922

SEQ ID NO: 15761 - protein, 268 aa, Thermomyces lanuginosus
DVSADLLNQFKLFAQYSAAAYCGRNNDAPAGTNITCSANACPLVEAGDATFLYSFENSGVGDVTGFLAVDNTNKLIVLSFRGSRSIENWITNLNFDLVDINDICSGCRGHDGFTSSWRSVADTLRQAVDDAVAAHPDYKVVVTGHSLGGALATLAGADLRNNGYDVDLYTYGAPRVGNRAFAEFITVQTGGTLYRVTHTNDVVPRLPPRQFGYSHPSPEYWIKSGTLVPVRRRDIVKIEGIDATGGNNQNNAPDIPAHLWYFGAIGTC

SEQ ID NO: 15762 - protein, 268 aa, Thermomyces lanuginosus
DVSADLLNQFKLFAQYSAAAYCGRNNDAPAGTNITCSANACPLVEAADATFLYSFENSGVGDVTGFLAVDCTNKLIVLSFRGSRSIENWITNLNFDLVDINDICSGCRGHDGFTSSWRSVADTLRQAVDDAVAAHPDYKVVVTGHSLGGALATLAGADLRNNGYDVDLYTYGAPRVGNRAFAEFITVQTGGTLYRVTHTNDVVPRLPPRQFGYSHPSPEYWIKSGTLVPVRRRDIVKIEGIDATGGNNQNNAPDIPAHLWYFGAIGTC

SEQ ID NO: 15763 - protein, 268 aa, Thermomyces lanuginosus
DVSADLLNQFKLFAQYSAAAYCGRNNEAPAGTNITCSANACPLVEAADATFLYSFENSGVGDVTGFLAVDNTNKLIVLSFRGSRSIENWITNLNFDLVDINDICSGCRGHDGFTSSWRSVADTLRQAVDDAVAAHPDYKVVVTGHSLGGALATLAGADLRNNGYDVDLYTYGAPRVGNRAFAEFITVQTGGTLYRVTHTNDVVPRLPPRQFGYSHPSPEYWIKSGTLVPVRRRDIVKIEGIDATGGNNQNNAPDIPAHLWYFGAIGTC

SEQ ID NO: 15764 - protein, 268 aa, Thermomyces lanuginosus
DVSARLLNQFKLFAQYSAAAYCGRNNDAPAGTNITCSANACPLVEAADATFLYSFENSGVGDVTGFLAVDNTNKLIVLSFRGSRSIENWITNLNFDLVDINDICSGCRGHDGFTSSWRSVADTLRQAVDDAVAAHPDYKVVVTGHSLGGALATLAGADLRNNGYDVDLYTYGAPRVGNRAFAEFITVQTGGTLYRVTHTNDVVPRLPPRQFGYSHPSPEYWIKSGTLVPVRRRDIVKIEGIDATGGNNQNNAPDIPAHLWYFGAIGTC

SEQ ID NO: 15765 - protein, 268 aa, Thermomyces lanuginosus
DVSADLLNQFKLFAQYSAAAYCGRNNDAPAGTNITCSANACPLVEAADATFLYSFENSGVGDVTGFLVVDNTNKLIVLSFRGSRSIENWITNLNFDLVDINDICSGCRGHDGFTSSWRSVADTLRQAVDDAVAAHPDYKVVVTGHSLGGALATLAGADLRNNGYDVDLYTYGAPRVGNRAFAEFITVQTGGTLYRVTHTNDVVPRLPPRQFGYSHPSPEYWIKSGTLVPVRRRDIVKIEGIDATGGNNQNNAPDIPAHLWYFGAIGTC

SEQ ID NO: 15766 - protein, 268 aa, Thermomyces lanuginosus
DVSADLLNQFKLFAQYSAAAYCGRNNDAPAGTNITCSANHCPLVEAADATFLYSFENSGVGDVTGFLAVDNTNKLIVLSFRGSRSIENWITNLNFDLVDINDICSGCRGHDGFTSSWRSVADTLRQAVDDAVAAHPDYKVVVTGHSLGGALATLAGADLRNNGYDVDLYTYGAPRVGNRAFAEFITVQTGGTLYRVTHTNDVVPRLPPRQFGYSHPSPEYWIKSGTLVPVRRRDIVKIEGIDATGGNNQNNAPDIPAHLWYFGAIGTC

SEQ ID NO: 15767 - protein, 268 aa, Thermomyces lanuginosus
DVSADLLNQFKLFAQYSAAAYCGRNNDAPAGTNITCSANACPLVEAADQTFLYSFENSGVGDVTGFLAVDNTNKLIVLSFRGSRSIENWITNLNFDLVDINDICSGCRGHDGFTSSWRSVADTLRQAVDDAVAAHPDYKVVVTGHSLGGALATLAGADLRNNGYDVDLYTYGAPRVGNRAFAEFITVQTGGTLYRVTHTNDVVPRLPPRQFGYSHPSPEYWIKSGTLVPVRRRDIVKIEGIDATGGNNQNNAPDIPAHLWYFGAIGTC

SEQ ID NO: 15768 - protein, 268 aa, Thermomyces lanuginosus
DVSADLLNQFKLFAQYSAAAYCGRNNDAPAGTNITCSASACPLVEAADATFLYSFENSGVGDVTGFLAVDNTNKLIVLSFRGSRSIENWITNLNFDLVDINDICSGCRGHDGFTSSWRSVADTLRQAVDDAVAAHPDYKVVVTGHSLGGALATLAGADLRNNGYDVDLYTYGAPRVGNRAFAEFITVQTGGTLYRVTHTNDVVPRLPPRQFGYSHPSPEYWIKSGTLVPVRRRDIVKIEGIDATGGNNQNNAPDIPAHLWYFGAIGTC

SEQ ID NO: 15769 - protein, 268 aa, Thermomyces lanuginosus
DVSADLLNQFKLFAQYSAAAYCGRNNDAPAGTNITCSANACPLVEAADATFLYSFENSGVGDVTGFLAVDNTNKLIVLSFRGSRSIENWITNLNFDLIDINDICSGCRGHDGFTSSWRSVADTLRQAVDDAVAAHPDYKVVVTGHSLGGALATLAGADLRNNGYDVDLYTYGAPRVGNRAFAEFITVQTGGTLYRVTHTNDVVPRLPPRQFGYSHPSPEYWIKSGTLVPVRRRDIVKIEGIDATGGNNQNNTPDIPAHLWYFGLIGTC

SEQ ID NO: 15770 - protein, 268 aa, Thermomyces lanuginosus
DVSADLLNQFKLFAQYSAAAYCGRNNDAPAGTNITCSANACPLVEAADATFLYSFENSGVGDVTGFLAVDNTNKLIVLSFRGSRSIENWITNLNFDLVDINDICSGCRGHDGFTSSWRSVADTLRQAVDDAVAAHPDYKVVVTGHSLGGALATLAGADLRNNGYDVDLYTYGAPRVGNRAFAEFITVQTGGTLYRVTHTNDVVPRLPPRQFGYSHPSPEYWIKSGTLVPVRRRDIVKIEGIDATGGNNQNNTPDIPAHLWYFGIIGTC

SEQ ID NO: 15771 - protein, 268 aa, Thermomyces lanuginosus
DVSADLLNQFKLFAQYSAAAYCGRNNDAPAGTNITCSANACPLVEAADATFLYSFENSGVGDGTGFLAVDNTNKLIVLSFRGSRSIENWITNLNFDLVDINDICSGCRGHDGFTSSWRSVADTLRQAVDDAVAAHPDYKVVVTGHSLGGALATLAGADLRNNGYDVDLYTYGAPRVGNRAFAEFITVQTGGTLYRVTHTNDVVPRLPPRQFGYSHPSPEYWIKSGTLVPVRRRDIVKIEGIDATGGNNQNNAPDIPAHLWYFGAIGTC

SEQ ID NO: 15772 - protein, 268 aa, Thermomyces lanuginosus
DVSADLLNQFKLFAQYSAAAYCGRNNDAPAGTNITCSANACPLVEAADATFLYSFENSGVGAVTGFLAVDNTNKLIVLSFRGSRSIENWITNLNFDLVDINDICSGCRGHDGFTSSWRSVADTLRQAVDDAVAAHPDYKVVVTGHSLGGALATLAGADLRNNGYDVDLYTYGAPRVGNRAFAEFITVQTGGTLYRVTHTNDVVPRLPPRQFGYSHPSPEYWIKSGTLVPVRRRDIVKIEGIDATGGNNQNNAPDIPAHLWYFGAIGTC

SEQ ID NO: 15773 - protein, 268 aa, Thermomyces lanuginosus
DVSADLLNQFKLFAQYSAAAYCGRNNDAPAGTNITCSANACPLVEAADATFTYSFENSGVGDVTGFLAVDNTNKLIVLSFRGSRSIENWITNLNFDLVDINDICSGCRGHDGFTSSWRSVADTLRQAVDDAVAAHPDYKVVVTGHSLGGALATLAGADLRNNGYDVDLYTYGAPRVGNRAFAEFITVQTGGTLYRVTHTNDVVPRLPPRQFGYSHPSPEYWIKSGTLVPVRRRDIVKIEGIDATGGNNQNNAPDIPAHLWYFGAIGTC

SEQ ID NO: 15774 - protein, 268 aa, Thermomyces lanuginosus
DVSADLLNQFKLFAQYSAAAYCGRNNDAPAGTNITCSANACPLVEAADATFLYSFENSGVGDVTGFLAVDNTNKLIVLSFRGSRSIENWITNLNFILVDINDICSGCRGHDGFTSSWRSVADTLRQAVDDAVAAHPDYKVVVTGHSLGGALATLAGADLRNNGYDVDLYTYGAPRVGNRAFAEFITVQTGGTLYRVTHTNDVVPRLPPRQFGYSHPSPEYWIKSGTLVPVRRRDIVKIEGIDATGGNNQNNTPDIPAHLWYFGLIGTC

SEQ ID NO: 15775 - protein, 268 aa, Thermomyces lanuginosus
DVSADLLNQFKLFAQYSAAAYCGRNNDAPAGTNITCSANACPLVEAADVTFLYSFENSGVGDVTGFLAVDNTNKLIVLSFRGSRSIENWITNLNFDLVDINDICSGCRGHDGFTSSWRSVADTLRQAVDDAVAAHPDYKVVVTGHSLGGALATLAGADLRNNGYDVDLYTYGAPRVGNRAFAEFITVQTGGTLYRVTHTNDVVPRLPPRQFGYSHPSPEYWIKSGTLVPVRRRDIVKIEGIDATGGNNQNNAPDIPAHLWYFGAIGTC

SEQ ID NO: 15776 - protein, 268 aa, Thermomyces lanuginosus
DVSADLLNQFKLFAQYSAAAYCGRNNDAPAGTNITCSANACPLVEAADATFLYSFENSGVGDVTGFLAVDNVNKLIVLSFRGSRSIENWITNLNFDLVDINDICSGCRGHDGFTSSWRSVADTLRQAVDDAVAAHPDYKVVVTGHSLGGALATLAGADLRNNGYDVDLYTYGAPRVGNRAFAEFITVQTGGTLYRVTHTNDVVPRLPPRQFGYSHPSPEYWIKSGTLVPVRRRDIVKIEGIDATGGNNQNNAPDIPAHLWYFGAIGTC

SEQ ID NO: 15777 - protein, 268 aa, Thermomyces lanuginosus
DVSADLLNQFKLFAQYSAAAYCGRNNDAPAGTNITCSANACPLVEAADATFLYRFENSGVGDVTGFLAVDNTNKLIVLSFRGSRSIENWITNLNFDLVDINDICSGCRGHDGFTSSWRSVADTLRQAVDDAVAAHPDYKVVVTGHSLGGALATLAGADLRNNGYDVDLYTYGAPRVGNRAFAEFITVQTGGTLYRVTHTNDVVPRLPPRQFGYSHPSPEYWIKSGTLVPVRRRDIVKIEGIDATGGNNQNNAPDIPAHLWYFGAIGTC

SEQ ID NO: 15778 - protein, 268 aa, Thermomyces lanuginosus
DVSADLLNQFKLFAQYSAAAYCGRNNDAPAGTNITCSANACPLVEAADATFLYSFENSGMGDVTGFLAVDNTNKLIVLSFRGSRSIENWITNLNFDLVDINDICSGCRGHDGFTSSWRSVADTLRQAVDDAVAAHPDYKVVVTGHSLGGALATLAGADLRNNGYDVDLYTYGAPRVGNRAFAEFITVQTGGTLYRVTHTNDVVPRLPPRQFGYSHPSPEYWIKSGTLVPVRRRDIVKIEGIDATGGNNQNNAPDIPAHLWYFGAIGTC

SEQ ID NO: 15779 - protein, 268 aa, Thermomyces lanuginosus
DVSADLLNQFKLFAQYSAAAYCGRNNDAPAGTNITCSANACPLVEAADATFLYSFENSGVGDVTGFLAVDNTNGLIVLSFRGSRSIENWITNLNFDLVDINDICSGCRGHDGFTSSWRSVADTLRQAVDDAVAAHPDYKVVVTGHSLGGALATLAGADLRNNGYDVDLYTYGAPRVGNRAFAEFITVQTGGTLYRVTHTNDVVPRLPPRQFGYSHPSPEYWIKSGTLVPVRRRDIVKIEGIDATGGNNQNNAPDIPAHLWYFGAIGTC

SEQ ID NO: 15780 - protein, 268 aa, Thermomyces lanuginosus
DVSADLLNQFKLFAQYSAAAYCGRNNDAPAGTNITCSANACPLVEAADAYFLYSFENSGVGDVTGFLAVDNTNKLIVLSFRGSRSIENWITNLNFDLVDINDICSGCRGHDGFTSSWRSVADTLRQAVDDAVAAHPDYKVVVTGHSLGGALATLAGADLRNNGYDVDLYTYGAPRVGNRAFAEFITVQTGGTLYRVTHTNDVVPRLPPRQFGYSHPSPEYWIKSGTLVPVRRRDIVKIEGIDATGGNNQNNAPDIPAHLWYFGAIGTC

SEQ ID NO: 15781 - protein, 268 aa, Thermomyces lanuginosus
DVSADLLNQFKLFAQYSAAAYCGRNNDAPAGTNITCSANACPLVEAADATFLYSFENSGWGDVTGFLAVDNTNKLIVLSFRGSRSIENWITNLNFDLVDINDICSGCRGHDGFTSSWRSVADTLRQAVDDAVAAHPDYKVVVTGHSLGGALATLAGADLRNNGYDVDLYTYGAPRVGNRAFAEFITVQTGGTLYRVTHTNDVVPRLPPRQFGYSHPSPEYWIKSGTLVPVRRRDIVKIEGIDATGGNNQNNAPDIPAHLWYFGAIGTC

SEQ ID NO: 15782 - protein, 268 aa, Thermomyces lanuginosus
DVSADLLNQFKLFAQYSAAAYCGRNNDAPAGTNITCSANACPLVEAADATFLYSFENSGVGDVTGFLAVDNTNKLIVLSFRGSRSIENWIANLNFDLVDINDICSGCRGHDGFTSSWRSVADTLRQAVDDAVAAHPDYKVVVTGHSLGGALATLAGADLRNNGYDVDLYTYGAPRVGNRAFAEFITVQTGGTLYRVTHTNDVVPRLPPRQFGYSHPSPEYWIKSGTLVPVRRRDIVKIEGIDATGGNNQNNAPDLKAHLWYFGAIGTC

SEQ ID NO: 15783 - protein, 268 aa, Thermomyces lanuginosus
DVSADLLNQFKLFAQYSAAAYCGRNNDAPAGTNITCSANACPLVEAADATFLYSFENSGVGDVTGFLAVDNTNKLIVLSFRGSRSIENWITNLNFDLVDINDICSGCRGHDGFTSSWRSVADTLRQAVDDAVAAHPDYKVVVTGHSLGGALATLAGADLRNNGYDVDLYTYGAPRVGNRAFAEFITVQTGGTLYRVTHTNDVVPRLPPRQFGYSHPSPEYWIKSGTLVPVRRRDIVKIEGIDANGSNNQPNIPDIPAHLWYFGLIGTC

SEQ ID NO: 15784 - protein, 268 aa, Thermomyces lanuginosus
DVSADLLNQFKLFAQYSAAAYCGRNNDAPAGTNITCSANACPLVEAADATFLYSFENSGLGDVTGFLAVDNTNKLIVLSFRGSRSIENWITNLNFDLVDINDICSGCRGHDGFTSSWRSVADTLRQAVDDAVAAHPDYKVVVTGHSLGGALATLAGADLRNNGYDVDLYTYGAPRVGNRAFAEFITVQTGGTLYRVTHTNDVVPRLPPRQFGYSHPSPEYWIKSGTLVPVRRRDIVKIEGIDATGGNNQNNAPDIPAHLWYFGAIGTC

SEQ ID NO: 15785 - protein, 268 aa, Thermomyces lanuginosus; identical to SEQ ID NO: 10074

SEQ ID NO: 15786 - protein, 268 aa, Thermomyces lanuginosus
DVSADLLNQFKLFAQYSAAAYCGRNNDAPAVTNITCSANACPLVEAADATFLYSFENSGVGDVTGFLAVDNTNKLIVLSFRGSRSIENWITNLNFDLVDINDICSGCRGHDGFTSSWRSVADTLRQAVDDAVAAHPDYKVVVTGHSLGGALATLAGADLRNNGYDVDLYTYGAPRVGNRAFAEFITVQTGGTLYRVTHTNDVVPRLPPRQFGYSHPSPEYWIKSGTLVPVRRRDIVKIEGIDATGGNNQNNAPDIPAHLWYFGAIGTC

SEQ ID NO: 15787 - protein, 268 aa, Thermomyces lanuginosus
DVSADLLNQFKLFAQYSAAAYCGRNNDAPAGTNITCSANACPLVEAADATFLYSFENSGVGDVTGFYAVDNTNKLIVLSFRGSRSIENWITNLNFDLVDINDICSGCRGHDGFTSSWRSVADTLRQAVDDAVAAHPDYKVVVTGHSLGGALATLAGADLRNNGYDVDLYTYGAPRVGNRAFAEFITVQTGGTLYRVTHTNDVVPRLPPRQFGYSHPSPEYWIKSGTLVPVRRRDIVKIEGIDATGGNNQNNAPDIPAHLWYFGAIGTC

SEQ ID NO: 15788 - protein, 268 aa, Thermomyces lanuginosus
DVSADLLNQFKLFAQYSAAAYCGRNNDAPAGTNITCSANACPLVEAADATFLYSFENSGVGDVTGFLAVDNTNKLIVLSFRGSRSIENWITNLDFDLVDINDICSGCRGHDGFTSSWRSVADTLRQAVDDAVAAHPDYKVVVTGHSLGGALATLAGADLRNNGYDVDLYTYGAPRVGNRAFAEFITVQTGGTLYRVTHTNDVVPRLPPRQFGYSHPSPEYWIKSGTLVPVRRRDIVKIEGIDATGGNNQNNAPDIPAHLWYFGAIGTC

SEQ ID NO: 15789 - protein, 268 aa, Thermomyces lanuginosus
DVSADLLNQFKLFAQYSAAAYCGRNNDAPAGTNITCSANACPLVEAADATFLYSFENSGVGDVTGFLAVDNTNKLIVLSFRGSRSIENWITNLNFQLVDINDICSGCRGHDGFTSSWRSVADTLRQAVDDAVAAHPDYKVVVTGHSLGGALATLAGADLRNNGYDVDLYTYGAPRVGNRAFAEFITVQTGGTLYRVTHTNDVVPRLPPRQFGYSHPSPEYWIKSGTLVPVRRRDIVKIEGIDATGGNNQNNTPDIPAHLWYFGLIGTC

SEQ ID NO: 15790 - protein, 268 aa, Thermomyces lanuginosus
DVSADLLNQFKLFAQYSAAAYCGRNNDAPAGTNITCSANACPLVEAADATFLYSFENSGVGDVTGFLAVDNTNKLIVLSFRGSRSIENWITNLNFDLVDINDICSGCRGHDGFTSSWRSVADTLRQAVDDAVAAHPDYKVVVTGHSLGGALATLAGADLRNNGYDVDLYTYGAPRVGNRAFAEFITVQTGGTLYRVTHTNDVVPRLPPRQFGYSHPSPEYWIKSGTLVPVQRRDIVKIEGIDATGGNNQNNTPDIPAHLWYFGLIGTC

SEQ ID NO: 15791 - protein, 268 aa, Thermomyces lanuginosus
DVSADLLNQFKLFAQYSAAAYCGRNKDAPAGTNITCSANACPLVEAADATFLYSFENSGVGDVTGFLAVDNTNKLIVLSFRGSRSIENWITNLNFDLVDINDICSGCRGHDGFTSSWRSVADTLRQAVDDAVAAHPDYKVVVTGHSLGGALATLAGADLRNNGYDVDLYTYGAPRVGNRAFAEFITVQTGGTLYRVTHTNDVVPRLPPRQFGYSHPSPEYWIKSGTLVPVRRRDIVKIEGIDATGGNNQNNAPDIPAHLWYFGAIGTC

SEQ ID NO: 15792 - protein, 268 aa, Thermomyces lanuginosus
DVSADLLNQFKLFAQYSAAAYCGRNNDAPAGTNITCSANACPLVEAADATFWYSFENSGVGDVTGFLAVDNTNKLIVLSFRGSRSIENWITNLNFDLVDINDICSGCRGHDGFTSSWRSVADTLRQAVDDAVAAHPDYKVVVTGHSLGGALATLAGADLRNNGYDVDLYTYGAPRVGNRAFAEFITVQTGGTLYRVTHTNDVVPRLPPRQFGYSHPSPEYWIKSGTLVPVRRRDIVKIEGIDATGGNNQNNAPDIPAHLWYFGAIGTC

SEQ ID NO: 15793 - protein, 268 aa, Thermomyces lanuginosus
DVSADLLNQFKLFAQYSAAAYCGRNNDAPAGTNITCSANACPLVEAADATFLYSFENSGAGDVTGFLAVDNTNKLIVLSFRGSRSIENWITNLNFDLVDINDICSGCRGHDGFTSSWRSVADTLRQAVDDAVAAHPDYKVVVTGHSLGGALATLAGADLRNNGYDVDLYTYGAPRVGNRAFAEFITVQTGGTLYRVTHTNDVVPRLPPRQFGYSHPSPEYWIKSGTLVPVRRRDIVKIEGIDATGGNNQNNAPDIPAHLWYFGAIGTC

SEQ ID NO: 15794 - protein, 268 aa, Thermomyces lanuginosus
DVSADLLNQFKLFAQYSAAAYCGENNDAPAGTNITCSANACPLVEAADATFLYSFENSGVGDVTGFLAVDNTNKLIVLSFRGSRSIENWITNLNFDLVDINDICSGCRGHDGFTSSWRSVADTLRQAVDDAVAAHPDYKVVVTGHSLGGALATLAGADLRNNGYDVDLYTYGAPRVGNREFAEFITVQTGGTLYRVTHTNDVVPRLPPRQFGYSHPSPEYWIKSGTLVPVRRRDIVKIEGIDATGGNNQDNAPDIPAHLWYFGAIGTC

SEQ ID NO: 15795 - protein, 268 aa, Thermomyces lanuginosus
DVSADLLNQFKLFAQYSAAAYCGRNNDAPAGTNITCSANACPLVEAADAMFLYSFENSGVGDVTGFLAVDNTNKLIVLSFRGSRSIENWITNLNFDLVDINDICSGCRGHDGFTSSWRSVADTLRQAVDDAVAAHPDYKVVVTGHSLGGALATLAGADLRNNGYDVDLYTYGAPRVGNRAFAEFITVQTGGTLYRVTHTNDVVPRLPPRQFGYSHPSPEYWIKSGTLVPVRRRDIVKIEGIDATGGNNQNNAPDIPAHLWYFGAIGTC

SEQ ID NO: 15796 - protein, 268 aa, Thermomyces lanuginosus
DVSADLLNQFKLFAQYSAAAYCGRNNDAPAGTNITCSANACPLVEAADATFLYSFENSGVGGVTGFLAVDNTNKLIVLSFRGSRSIENWITNLNFDLVDINDICSGCRGHDGFTSSWRSVADTLRQAVDDAVAAHPDYKVVVTGHSLGGALATLAGADLRNNGYDVDLYTYGAPRVGNRAFAEFITVQTGGTLYRVTHTNDVVPRLPPRQFGYSHPSPEYWIKSGTLVPVRRRDIVKIEGIDATGGNNQNNAPDIPAHLWYFGAIGTC

SEQ ID NO: 15797 - protein, 268 aa, Thermomyces lanuginosus
DVSADLLNQFKLFAQYSAAAYCGRNNDAPAGPNITCSANACPLVEAADATFLYSFENSGVGDVTGFLAVDNTNKLIVLSFRGSRSIENWITNLNFDLVDINDICSGCRGHDGFTSSWRSVADTLRQAVDDAVAAHPDYKVVVTGHSLGGALATLAGADLRNNGYDVDLYTYGAPRVGNRAFAEFITVQTGGTLYRVTHTNDVVPRLPPRQFGYSHPSPEYWIKSGTLVPVRRRDIVKIEGIDATGGNNQNNAPDIPAHLWYFGAIGTC

SEQ ID NO: 15798 - protein, 268 aa, Thermomyces lanuginosus
DVSADLLNQFKLFAQYSAAAYCGRNNDAPAGTNITCSANACPLVEAADATFLYCFENSGVGDVTGFLAVDNTNKLIVLSFRGSRSIENWITNLNFDLVDINDICSGCRGHDGFTSSWRSVADTLRQAVDDAVAAHPDYKVVVTGHSLGGALATLAGADLRNNGYDVDLYTYGAPRVGNRAFAEFITVQTGGTLYRVTHTNDVVPRLPPRQFGYSHPSPEYWIKSGTLVPVRRRDIVKIEGIDATGGNNQNNAPDIPAHLWYFGAIGTC

SEQ ID NO: 15799 - protein, 268 aa, Thermomyces lanuginosus
DVSADLLNQFKLFAQYSAAAYCGRNNDAPAGTNITCSANACPLVEAADATFLYSFENSGVGRVTGFLAVDNTNKLIVLSFRGSRSIENWITNLNFDLVDINDICSGCRGHDGFTSSWRSVADTLRQAVDDAVAAHPDYKVVVTGHSLGGALATLAGADLRNNGYDVDLYTYGAPRVGNRAFAEFITVQTGGTLYRVTHTNDVVPRLPPRQFGYSHPSPEYWIKSGTLVPVRRRDIVKIEGIDATGGNNQNNAPDIPAHLWYFGAIGTC

SEQ ID NO: 15800 - protein, 268 aa, Thermomyces lanuginosus
DVSRDLLNQFKLFAQYSAAAYCGRNNDAPAGTNITCSANACPLVEAADATFLYSFENSGVGDVTGFLAVDNTNKLIVLSFRGSRSIENWITNLNFDLVDINDICSGCRGHDGFTSSWRSVADTLRQAVDDAVAAHPDYKVVVTGHSLGGALATLAGADLRNNGYDVDLYTYGAPRVGNRAFAEFITVQTGGTLYRVTHTNDVVPRLPPRQFGYSHPSPEYWIKSGTLVPVRRRDIVKIEGIDATGGNNQNNTPDIPAHLWYFGLIGTC

SEQ ID NO: 15801 - protein, 268 aa, Thermomyces lanuginosus
DVSADLLNQFKLFAQYSAAAYCGRNNDAPAGTNITCSANACPLVEAADATFLYSFENSGVGDVTGFLAVDDTNKLIVLSFRGSRSIENWITNLNFDLVDINDICSGCRGHDGFTSSWRSVADTLRQAVDDAVAAHPDYKVVVTGHSLGGALATLAGADLRNNGYDVDLYTYGAPRVGNRAFAEFITVQTGGTLYRVTHTNDVVPRLPPRQFGYSHPSPEYWIKSGTLVPVRRRDIVKIEGIDATGGNNQNNAPDIPAHLWYFGAIGTC

SEQ ID NO: 15802 - protein, 268 aa, Thermomyces lanuginosus
DVSADLLNQFKLFAQYSAAAYCGNNNDAPAGTNITCSANACPLVEAADATFLYSFENSGVGDVTGFLAVDNTNKLIVLSFRGSRSIENWITNLNFDLVDINDICSGCRGHDGFTSSWRSVADTLRQAVDDAVAAHPDYKVVVTGHSLGGALATLAGADLRNNGYDVDLYTYGAPRVGNRAFAEFITVQTGGTLYRVTHTNDVVPRLPPRQFGYSHPSPEYWIKSGTLVPVRRRDIVKIEGIDATGGNNQNNTPDIPAHLWYFGLIGTC

SEQ ID NO: 15803 - protein, 268 aa, Thermomyces lanuginosus
DVSADLLNQFKLFAQYSAAAYCGRNNDAPAGTNITCSANACPLVEAADAWFLYSFENSGVGDVTGFLAVDNTNKLIVLSFRGSRSIENWITNLNFDLVDINDICSGCRGHDGFTSSWRSVADTLRQAVDDAVAAHPDYKVVVTGHSLGGALATLAGADLRNNGYDVDLYTYGAPRVGNRAFAEFITVQTGGTLYRVTHTNDVVPRLPPRQFGYSHPSPEYWIKSGTLVPVRRRDIVKIEGIDATGGNNQNNAPDIPAHLWYFGAIGTC

SEQ ID NO: 15804 - protein, 268 aa, Thermomyces lanuginosus
DVSADLLNQFKLFAQYSAAAYCGRNNDAPAGTNITCSANACPLVEAADATFLYSFENSGVGDVTGFLAVDNTNKLIVLSFRGSRSIENWITNLNFDLVDINDICSGCRGHDGFTSSWRSVADTLRQAVDDAVAAHPDYKVVVTGHSLGGALATLAGADLRNNGYDVDLYTYGAPRVGNRAFAEFITVQTGGTLYRVTHTNDVVPRLPPRQFGYSHPSPEYWIKSGTLVPVRRRDIVKIEGIDATGGNNQNNAPDIPAHLWYFGQIGTC

SEQ ID NO: 15805 - protein, 268 aa, Thermomyces lanuginosus
DVSADLLNQFKLFAQYSATAYCGRNNDAPAGTNITCSANACPLVEAADATFLYSFENSGVGDVTGFLAVDNTNKLIVLSFRGSRSIENWITNLNFDLVDINDICSGCRGHDGFTSSWRSVADTLRQAVDDAVAAHPDYKVVVTGHSLGGALATLAGADLRNNGYDVDLYTYGAPRVGNRAFAEFITVQTGGTLYRVTHTNDVVPRLPPRQFGYSHPSPEYWIKSGTLVPVRRRDIVKIEGIDATGGNNQNNAPDIPAHLWYFGAIGTC

SEQ ID NO: 15806 - protein, 268 aa, Thermomyces lanuginosus
DVSEDLLNQFKLFAQYSAAAYCGRNNDAPAGTNITCSANACPLVEAADATFLYSFENSGVGDVTGFLAVDNTNKLIVLSFRGSRSIENWITNLNFDLVDINDICSGCRGHDGFTSSWRSVADTLRQAVDDAVAAHPDYKVVVTGHSLGGALATLAGADLRNNGYDVDLYTYGAPRVGNRAFAEFITVQTGGTLYRVTHTNDVVPRLPPRQFGYSHPSPEYWIKSGTLVPVRRRDIVKIEGIDATGGNNQNNAPDIPAHLWYFGLIGTC

SEQ ID NO: 15807 - protein, 268 aa, Thermomyces lanuginosus
DVSADLLNQFKLFAQYSAAAYCGRNNDAPAGTNITCSANACPLVEAADATFLYSFENSGVGDVTGFLAVDNTNKLIVLSFRGSRSIENWIANLNFDLVDINDICSGCRGHDGFTSSWRSVADTLRQAVDDAVAAHPDYKVVVTGHSLGGALATLAGADLRNNGYDVDLYTYGAPRVGNRAFAEFITVQTGGTLYRVTHTNDVVPRLPPRQFGYSHPSPEYWIKSGTLLPVRRRDIVKIEGIDATGGNNQNNAPDIPAHLWYFGSIGTC

SEQ ID NO: 15808 - protein, 268 aa, Thermomyces lanuginosus
DVSRDLLNQFKLFAQYSAAAYCGRNNDAPAGTNITCSANACPLVEAADATFLYSFENSGMGDVTGFLAVDNTNKLIVLSFRGSRSIENWITNLNFDLVDINDICSGCRGHDGFTSSWRSVADTLRQAVDDAVAAHPDYKVVVTGHSLGGALATLAGADLRNNGYDVDLYTYGAPRVGNRAFAEFITVQTGGTLYRVTHTNDVVPRLPPRQFGYSHPSPEYWIKSGTLVPVRRNDIVKIEGIDATGGNNQNNTPDIPAHLWYFGLIGTC

SEQ ID NO: 15809 - protein, 268 aa, Thermomyces lanuginosus
DVSADLLNQFKLFAQYSAAAYCGRNNDAPAGTNITCSANACSLVEAADATFLYSFENSGVGDVTGFLAVDNTNKLIVLSFRGSRSIENWITNLNFDLVDINDICSGCRGHDGFTSSWRSVADTLRQAVDDAVAAHPDYKVVVTGHSLGGALATLAGADLRNNGYDVDLYTYGAPRVGNRAFAEFITVQTGGTLYRVTHTNDVVPRLPPRQFGYSHPSPEYWIKSGTLVPVRRRDIVKIEGIDATGGNNQNNAPDIPAHLWYFGAIGTC

SEQ ID NO: 15810 - protein, 268 aa, Thermomyces lanuginosus
DVSADLLNQFKLFAQYSAAAYCGRNNDAPAGTNITCSANACPLVEAADATFLYSFENSGVGDVTWFLAVDNTNKLIVLSFRGSRSIENWITNLNFDLVDINDICSGCRGHDGFTSSWRSVADTLRQAVDDAVAAHPDYKVVVTGHSLGGALATLAGADLRNNGYDVDLYTYGAPRVGNRAFAEFITVQTGGTLYRVTHTNDVVPRLPPRQFGYSHPSPEYWIKSGTLVPVRRRDIVKIEGIDATGGNNQNNAPDIPAHLWYFGAIGTC

SEQ ID NO: 15811 - protein, 268 aa, Thermomyces lanuginosus
DVSKDLLNQFKLFAQYSAAAYCGRNNDAPAGTNITCSANACPLVEAADATFLYSFENSGVGDVTGFLAVDNTNKLIVLSFRGSRSIENWITNLNFDLVDINDICSGCRGHDGFTSSWRSVADTLRQAVDDAVAAHPDYKVVVTGHSLGGALATLAGADLRNNGYDVDLYTYGAPRVGNRAFAEFITVQTGGTLYRVTHTNDVVPRLPPRQFGYSHPSPEYWIKSGTLVPVRVRDIVKIEGIDATGGNNQNNAPDIPAHLWYFGAIGTC

SEQ ID NO: 15812 - protein, 268 aa, Thermomyces lanuginosus
DVSADLLNQFKLFAQYSAAAYCGRNNDAPAGTNITCSANACPLVEAADATFLYSFENSGVGDVTGFLAVDNTNKLIVLSFRGSRSIENWITNLNFDLVDINDICSGCRGHDGFTSSWRSVADTLRQAVDDAVAAHPDYKVVVTGHSLGGALATLAGADLRNNGYDVDLYTYGAPRVGNRAFAEFITVQTGGTLYRVTHTNDVVPRLPPRQFGYSHPSPEYWIKSGTLVPVRRRDIVKIEGIDATGGNNNPSIPDIPAHLWYFGLIGTC

SEQ ID NO: 15813 - protein, 268 aa, Thermomyces lanuginosus
DVSADLLNQFKLFAQYSAAAYCGRNNDAPAGTNITCSANACPLVEAADATFLYSFENSGVGDLTGFLAVDNTNKLIVLSFRGSRSIENWITNLNFDLVDINDICSGCRGHDGFTSSWRSVADTLRQAVDDAVAAHPDYKVVVTGHSLGGALATLAGADLRNNGYDVDLYTYGAPRVGNRAFAEFITVQTGGTLYRVTHTNDVVPRLPPRQFGYSHPSPEYWIKSGTLVPVRRRDIVKIEGIDATGGNNQNNAPDIPAHLWYFGAIGTC

SEQ ID NO: 15814 - protein, 268 aa, Thermomyces lanuginosus
DVSRDLLNQFKLFAQYSAAAYCGRNNDAPAGTNITCSANACPLVEAADATFLYSFENSGVGDVTGFLAVDNTNKLIVLSFRGSRSIENWITNLNFDLVDINDICSGCRGHDGFTSSWRSVADTLRQAVDDAVAAHPDYKVVVTGHSLGGALATLAGADLRNNGYDVDLYTYGAPRVGNRAFAEFITVQTGGTLYRVTHTNDVVPRLPPRQFGYSHPSPEYWIKSGTGVPVRRNDIVKIEGIDATGGNNQNNTPDIPAHLWYFGLIGTC

SEQ ID NO: 15815 - protein, 268 aa, Thermomyces lanuginosus
DVSADLLNQFKLFAQYSAAAYCGRNNDAPAGTNITCSANACPLVEAADATPLYSFENSGVGDVTGFLAVDNTNKLIVLSFRGSRSIENWITNLNFDLVDINDICSGCRGHDGFTSSWRSVADTLRQAVDDAVAAHPDYKVVVTGHSLGGALATLAGADLRNNGYDVDLYTYGAPRVGNRAFAEFITVQTGGTLYRVTHTNDVVPRLPPRQFGYSHPSPEYWIKSGTLVPVRRRDIVKIEGIDATGGNNQNNAPDIPAHLWYFGAIGTC

SEQ ID NO: 15816 - protein, 268 aa, Thermomyces lanuginosus
DVSADLLNQFKLFAQYSAAAYCGRNNDAPAGTNITCSANACPLVEAADALFLYSFENSGVGDVTGFLAVDNTNKLIVLSFRGSRSIENWITNLNFDLVDINDICSGCRGHDGFTSSWRSVADTLRQAVDDAVAAHPDYKVVVTGHSLGGALATLAGADLRNNGYDVDLYTYGAPRVGNRAFAEFITVQTGGTLYRVTHTNDVVPRLPPRQFGYSHPSPEYWIKSGTLVPVRRRDIVKIEGIDATGGNNQNNAPDIPAHLWYFGAIGTC

SEQ ID NO: 15817 - protein, 268 aa, Thermomyces lanuginosus
DVSADLLNQFKLFAQYSAAAYCGRNNDAPAGTNITCSANACPLVEAADATFLYSFENSGVGDVTGFLAVDNTNKLIVLSFRGSRSIENWITNLNFDLVDINDICSGCRGHDGFTSSWRSVADTLRQAVDDAVAAHPDYKVVVTGHSLGGALATLAGADLRNNGYDVDLYTYGAPRVGNRAFAEFITVQTGGTLYRVTHTNDVVPRLPPRQFGYSHPSPEYWIKSGTLVPVRRQDIVKIEGIDATGGNNQNNTPDIPAHLWYFGLIGTC

SEQ ID NO: 15818 - protein, 268 aa, Thermomyces lanuginosus
DVSADLLNQFKLFAQYSAAAYCGRNNDAPAGTNITCSANACPLVEAADATFLYSFENSGVGDVTGFLAVDNTNKLIVLSFRGSRSIENWIADLNFLLQDINDICSGCRGHDGFTSSWRSVADTLRQAVDDAVAAHPDYKVVVTGHSLGGALATLAGADLRNNGYDVDLYTYGAPRVGNRAFAEFITVQTGGTLYRVTHTNDVVPRLPPRQFGYSHPSPEYWIKSGTLVPVRRRDIVKIEGIDATGGNNQNNTPDIPAHLWYFGLIGTC

SEQ ID NO: 15819 - protein, 268 aa, Thermomyces lanuginosus
DVSADLLNQFKLFAQYSAAAYCGRNNDAPAGTNITCSANACPLVEAADATFLYSFENSGVGDVTGFLAVDTTNKLIVLSFRGSRSIENWITNLNFDLVDINDICSGCRGHDGFTSSWRSVADTLRQAVDDAVAAHPDYKVVVTGHSLGGALATLAGADLRNNGYDVDLYTYGAPRVGNRAFAEFITVQTGGTLYRVTHTNDVVPRLPPRQFGYSHPSPEYWIKSGTLVPVRRRDIVKIEGIDATGGNNQNNAPDIPAHLWYFGAIGTC

SEQ ID NO: 15820 - protein, 268 aa, Thermomyces lanuginosus
DVSADLLNQFELFAQYSAAAYCGRNNDAPAGTNITCSANACPLVEAADATFLYSFENSGVGDVTGFLAVDNTNKLIVLSFRGSRSIENWITNLNFDLVDINDICSGCRGHDGFTSSWRSVADTLRQAVDDAVAAHPDYKVVVTGHSLGGALATLAGADLRNNGYDVDLYTYGAPRVGNRAFAEFITVQTGGTLYRVTHTNDVVPRLPPRQFGYSHPSPEYWIKSGTLVPVRRRDIVKIEGIDATGGNNQNNTPDIPAHLWYFGLIGTC

SEQ ID NO: 15821 - protein, 268 aa, Thermomyces lanuginosus
DVSADLLNQFKLFAQYSAAAYCGRNNDAPAGTNITCSANACPLVEAADATFLYSFENSGVGDVTGFLAVDNTNKYIVLSFRGSRSIENWITNLNFDLVDINDICSGCRGHDGFTSSWRSVADTLRQAVDDAVAAHPDYKVVVTGHSLGGALATLAGADLRNNGYDVDLYTYGAPRVGNRAFAEFITVQTGGTLYRVTHTNDVVPRLPPRQFGYSHPSPEYWIKSGTLVPVRRRDIVKIEGIDATGGNNQNNAPDIPAHLWYFGAIGTC

SEQ ID NO: 15822 - protein, 268 aa, Thermomyces lanuginosus
DVSADLLNQFKLFAQYSAAAYCGRNNDAPAGTNITCSANACPLVEAADATHLYSFENSGVGDVTGFLAVDNTNKLIVLSFRGSRSIENWITNLNFDLVDINDICSGCRGHDGFTSSWRSVADTLRQAVDDAVAAHPDYKVVVTGHSLGGALATLAGADLRNNGYDVDLYTYGAPRVGNRAFAEFITVQTGGTLYRVTHTNDVVPRLPPRQFGYSHPSPEYWIKSGTLVPVRRRDIVKIEGIDATGGNNQNNAPDIPAHLWYFGAIGTC

SEQ ID NO: 15823 - protein, 268 aa, Thermomyces lanuginosus
DVSADLLNQFKLFAQYSAAAYCGRNNDAPAGTNITCSANACPLVEAADAAFLYSFENSGVGDVTGFLAVDNTNKLIVLSFRGSRSIENWITNLNFDLVDINDICSGCRGHDGFTSSWRSVADTLRQAVDDAVAAHPDYKVVVTGHSLGGALATLAGADLRNNGYDVDLYTYGAPRVGNRAFAEFITVQTGGTLYRVTHTNDVVPRLPPRQFGYSHPSPEYWIKSGTLVPVRRRDIVKIEGIDATGGNNQNNAPDIPAHLWYFGAIGTC

SEQ ID NO: 15824 - protein, 268 aa, Thermomyces lanuginosus
DVSADLLNQFKLFAQYSAAAYCGRNNDAPAGTNITCSANACPLVEAADATFLYSFENSGVGDETGFLAVDNTNKLIVLSFRGSRSIENWITNLNFDLVDINDICSGCRGHDGFTSSWRSVADTLRQAVDDAVAAHPDYKVVVTGHSLGGALATLAGADLRNNGYDVDLYTYGAPRVGNRAFAEFITVQTGGTLYRVTHTNDVVPRLPPRQFGYSHPSPEYWIKSGTLVPVRRRDIVKIEGIDATGGNNQNNAPDIPAHLWYFGAIGTC

SEQ ID NO: 15825 - protein, 268 aa, Thermomyces lanuginosus
DVSADLLNQFKLFAQYSAAAYCGRNNDAPAGTNITCSANACPLVEAADATGLYSFENSGVGDVTGFLAVDNTNKLIVLSFRGSRSIENWITNLNFDLVDINDICSGCRGHDGFTSSWRSVADTLRQAVDDAVAAHPDYKVVVTGHSLGGALATLAGADLRNNGYDVDLYTYGAPRVGNRAFAEFITVQTGGTLYRVTHTNDVVPRLPPRQFGYSHPSPEYWIKSGTLVPVRRRDIVKIEGIDATGGNNQNNAPDIPAHLWYFGAIGTC

SEQ ID NO: 15826 - protein, 268 aa, Thermomyces lanuginosus
DVSADLLNQFKLFAQYSAAAYCGRNNDAPAGTNITCSANACPLVEAADATFLYSFENSGVGDVTGFLAVDNTNKKIVLSFRGSRSIENWITNLNFDLVDINDICSGCRGHDGFTSSWRSVADTLRQAVDDAVAAHPDYKVVVTGHSLGGALATLAGADLRNNGYDVDLYTYGAPRVGNRAFAEFITVQTGGTLYRVTHTNDVVPRLPPRQFGYSHPSPEYWIKSGTLVPVRRRDIVKIEGIDATGGNNQNNAPDIPAHLWYFGAIGTC

SEQ ID NO: 15827 - protein, 268 aa, Thermomyces lanuginosus
DVSADLLNQFKLFAQYSAAAYCGRNNDAPAGTNITCSANACPLVEAADATFLYSFENSGVGDVTGFLAVDNTNKLIVLSFRGSRSIENWITNLNFHLVDINDICSGCRGHDGFTSSWRSVADTLRQAVDDAVAAHPDYKVVVTGHSLGGALATLAGADLRNNGYDVDLYTYGAPRVGNRAFAEFITVQTGGTLYRVTHTNDVVPRLPPRQFGYSHPSPEYWIKSGTLVPVRRRDIVKIEGIDATGGNNQNNTPDIPAHLWYFGLIGTC

SEQ ID NO: 15828 - protein, 268 aa, Thermomyces lanuginosus
DVSADLLNQFKLFAQYSAAAYCGRNNDAPAGTNITCSANACPLVEQADATFLYSFENSGVGDVTGFLAVDNTNKLIVLSFRGSRSIENWITNLNFDLVDINDICSGCRGHDGFTSSWRSVADTLRQAVDDAVAAHPDYKVVVTGHSLGGALATLAGADLRNNGYDVDLYTYGAPRVGNRAFAEFITVQTGGTLYRVTHTNDVVPRLPPRQFGYSHPSPEYWIKSGTLVPVRRRDIVKIEGIDATGGNNQNNTPDIPAHLWYFGLIGTC

SEQ ID NO: 15829 - protein, 268 aa, Thermomyces lanuginosus
DVSADLLNQFKLFAQYSAAAYCGRNNDAPAGTNITCSANACPLVEAADATFLYSFENSGVGDVTGFLAVDNTNKLIVLSFRGSRSIENWITNLNFDLVDINDICSGCRGHDGFTSSWRSVADTLRQAVDDAVAAHPDYKVVVTGHSLGGALATLAGADLRNNGYDVDLYTYGAPRVGNRAFAEFITVQTGGTLYRVTITNDVVPRLPPRQFGYSHPSPEYWIKSGTLVPVRRRDIVKIEGIDATGGNNQNNAPDIPAHLWYFGAIGTC

SEQ ID NO: 15830 - protein, 268 aa, Thermomyces lanuginosus
DVSADLLNQFKLFAQYSAAAYCGRNNDAPAGTNITCSANACPLVEAADAHFLYSFENSGVGDVTGFLAVDNTNKLIVLSFRGSRSIENWITNLNFDLVDINDICSGCRGHDGFTSSWRSVADTLRQAVDDAVAAHPDYKVVVTGHSLGGALATLAGADLRNNGYDVDLYTYGAPRVGNRAFAEFITVQTGGTLYRVTHTNDVVPRLPPRQFGYSHPSPEYWIKSGTLVPVRRRDIVKIEGIDATGGNNQNNAPDIPAHLWYFGAIGTC

SEQ ID NO: 15831 - protein, 268 aa, Thermomyces lanuginosus
DVSADLLNQFKLFAQYSAAAYCGRNNDAPAGTNITCSANACPLVEAADATFLYSFENSGVGDVTGFLAVDNTNKLIVLSFRGSRSIENWITNLNFDLVDINDICSGCRGHDGFTSSWRSVADTLRQAVDDAVAAHPDYKVVVTGHSLGGALATLAGADLRNNGYDVDLYTYGAPRVGNRAFAEFITVQTGGTLYRVTHTNDVVPRLPPRQFGYSHPSPEYWIKSGTAVPVRRRDIVKIEGIDATGGNNQNNTPDIPAHLWYFGAIGTC

SEQ ID NO: 15832 - protein, 268 aa, Thermomyces lanuginosus
DVSADLLNQFKLFAMYSAAAYCGRNNDAPAGTNITCSANACPLVEAADATFLYSFENSGVGDVTGFLAVDNTNKLIVLSFRGSRSIENWITNLNFDLVDINDICSGCRGHDGFTSSWRSVADTLRQAVDDAVAAHPDYKVVVTGHSLGGALATLAGADLRNNGYDVDLYTYGAPRVGNRAFAEFITVQTGGTLYRVTHTNDVVPRLPPRQFGYSHPSPEYWIKSGTLVPVRRRDIVKIEGIDATGGNNQNNAPDIPAHLWYFGAIGTC

SEQ ID NO: 15833 - protein, 268 aa, Thermomyces lanuginosus
DVSADLLNQFKLFAQYSAAAYCGRNNDAPAGTNITCSANACPLVEAADGTFLYSFENSGVGDVTGFLAVDNTNKLIVLSFRGSRSIENWITNLNFDLVDINDICSGCRGHDGFTSSWRSVADTLRQAVDDAVAAHPDYKVVVTGHSLGGALATLAGADLRNNGYDVDLYTYGAPRVGNRAFAEFITVQTGGTLYRVTHTNDVVPRLPPRQFGYSHPSPEYWIKSGTLVPVRRRDIVKIEGIDATGGNNQNNAPDIPAHLWYFGAIGTC

SEQ ID NO: 15834 - protein, 268 aa, Thermomyces lanuginosus
DVSADLLNQFKLFAQYSAAAYCGRNNDAPAGTNITCSANACPLVEAADATFLYSFENSGVGDVTGFLAVDNTNKLIVLSFRGSRSIENWITNLNFDLVDINDICSGCRGHDGFTSSWRSVADTLRQAVDDAVAAHPDYKVVVTGHSLGGALATLAGADLRNNGYDVDLYTYGAPRVGNRAFAEFITVQTGGTLYRVTHTNDVVPRLPPRQFGYSHPSPEYWIKSGTLVPVRRRDIVKIEGIDATGGNNQNNAPDIPAHLWYFGTIGTC

SEQ ID NO: 15835 - protein, 268 aa, Thermomyces lanuginosus
DVSADLLNQFKLFAQYSAAAYCGRNNDAPAGTNITCSANACPLVEAADATFLYSFENSGVGDVTGFLAVDNTNKLIVLSFRGSRSIENWITNLNFDLVDINDICSGCRGHDGFTSSWRSVADTLRQAVDDAVAAHPDYKVVVTGHSLGGALATLAGADLRNNGYDVDLYTYGAPRVGNRAFAEFITVQTGGTLYRVTHTNDVVPRLPPRQFGYSHPSPEYWIKSGTLVPVRRRDIVKIEGIDATGGNNQNNAPDIPAHLWYFGSIGTC

SEQ ID NO: 15836 - protein, 268 aa, Thermomyces lanuginosus
DVSADLLNQFKLFAQYSAAAYCGRNNDAPAGTNITCSANACPLVEAADSTFLYSFENSGVGDVTGFLAVDNTNKLIVLSFRGSRSIENWITNLNFDLVDINDICSGCRGHDGFTSSWRSVADTLRQAVDDAVAAHPDYKVVVTGHSLGGALATLAGADLRNNGYDVDLYTYGAPRVGNRAFAEFITVQTGGTLYRVTHTNDVVPRLPPRQFGYSHPSPEYWIKSGTLVPVRRRDIVKIEGIDATGGNNQNNAPDIPAHLWYFGAIGTC

SEQ ID NO: 15837 - protein, 268 aa, Thermomyces lanuginosus
DVSADLLNQFKLFAQYSAAAYCGRNNDAPAGTFITCSANACPLVEAADATFLYSFENSGVGDVTGFLAVDNTNKLIVLSFRGSRSIENWITNLNFDLVDINDICSGCRGHDGFTSSWRSVADTLRQAVDDAVAAHPDYKVVVTGHSLGGALATLAGADLRNNGYDVDLYTYGAPRVGNRAFAEFITVQTGGTLYRVTHTNDVVPRLPPRQFGYSHPSPEYWIKSGTLVPVRRRDIVKIEGIDATGGNNQNNAPDIPAHLWYFGAIGTC

SEQ ID NO: 15838 - protein, 268 aa, Thermomyces lanuginosus
DVSADLLNQFKLFAQYSAAAYCGRNNDAPAGTNITCSANACPLVEAADATFLYSFENSGVGDVTGFLAVDNTNKLIVLSFRGSRSIENWITNLNFDLVDINDICSGCRGHDGFTSSWRSVADTLRQAVDDAVAAHPDYKVVVTGHSLGGALATLAGADLRNNGYDVDLYTYGAPRVGNRAFAEFITVQTGGTLYRVTHTNDVVPRLPPRQFGYSHPSPEYWIKSGTLVPVRRRDIVKIEGIDATGGNNQNNAPDIPAHLWYFGIIGTC

SEQ ID NO: 15839 - protein, 268 aa, Thermomyces lanuginosus
DVSADLLNQFKLFAQYSAAAYCGRNNDAPAGTNITCSANACPLVEAADATFLYSFENSGVGDVTGFLAVDNINKLIVLSFRGSRSIENWITNLNFDLVDINDICSGCRGHDGFTSSWRSVADTLRQAVDDAVAAHPDYKVVVTGHSLGGALATLAGADLRNNGYDVDLYTYGAPRVGNRAFAEFITVQTGGTLYRVTHTNDVVPRLPPRQFGYSHPSPEYWIKSGTLVPVRRRDIVKIEGIDATGGNNQNNAPDIPAHLWYFGAIGTC

SEQ ID NO: 15840 - protein, 268 aa, Thermomyces lanuginosus
DVSADLLNQFKLFAQYSAAAYCGRNNDAPAGTNITCSANACPLVEAADATFLYSFENSGVGDITGFLAVDNTNKLIVLSFRGSRSIENWITNLNFDLVDINDICSGCRGHDGFTSSWRSVADTLRQAVDDAVAAHPDYKVVVTGHSLGGALATLAGADLRNNGYDVDLYTYGAPRVGNRAFAEFITVQTGGTLYRVTHTNDVVPRLPPRQFGYSHPSPEYWIKSGTLVPVRRRDIVKIEGIDATGGNNQNNAPDIPAHLWYFGAIGTC

SEQ ID NO: 15841 - protein, 268 aa, Thermomyces lanuginosus
DVSADLLNQFKLFAQYSAAAYCGRNNDAPAGTNITCSANACPLVEAADATFLYSFENSGVGDVTGFLAVDNTNKLIVLSFRGSRSIENWITNLNFNLSDINDICSGCRGHDGFTSSWRSVADTLRQAVDDAVAAHPDYKVVVTGHSLGGALATLAGADLRNNGYDVDLYTYGAPRVGNRAFAEFITVQTGGTLYRVTHTNDVVPRLPPRQFGYSHPSPEYWIKSGTLVPVRRRDIVKIEGIDATGGNNQNNTPDIPAHLWYFGLIGTC

SEQ ID NO: 15842 - protein, 268 aa, Thermomyces lanuginosus
DVSADLLNQFKLFAQYSAAAYCGRNNDAPAGTNITCSANACPLVEAADATFLYSFENSGGGDVTGFLAVDNTNKLIVLSFRGSRSIENWITNLNFDLVDINDICSGCRGHDGFTSSWRSVADTLRQAVDDAVAAHPDYKVVVTGHSLGGALATLAGADLRNNGYDVDLYTYGAPRVGNRAFAEFITVQTGGTLYRVTHTNDVVPRLPPRQFGYSHPSPEYWIKSGTLVPVRRRDIVKIEGIDATGGNNQNNAPDIPAHLWYFGAIGTC

SEQ ID NO: 15843 - protein, 268 aa, Thermomyces lanuginosus
DVSADLLNQFKLFAQYSAAAYCGRNNDAPAGTNITCSANACPLVEAADATFLYSFENSGVGDVTGFLAVDNTNKLIVLSFRGSRSIENWITNLNFDLVDINDICSGCRGHDGFTSSWRSVADTLRQAVDDAVAAHPDYKVVVTGHSLGGALATLAGADLRNNGYDVDLYTYGAPRVGNRAFAEFITVQTGGTLYRVTHTNDVVPRLPPRQFGYSHPSPEYWIKSGTLVPVRRRDIVKIEGIDATGGNNQPNIPNISAHLWYFGLIGTC

SEQ ID NO: 15844 - protein, 268 aa, Thermomyces lanuginosus
DVSADLLNQFKLFAQYSAAAYCGRNNDAPAGTNITCSANACPLVEARDATFLYSFENSGVGDVTGFLAVDNTNKLIVLSFRGSRSIENWITNLNFDLVDINDICSGCRGHDGFTSSWRSVADTLRQAVDDAVAAHPDYKVVVTGHSLGGALATLAGADLRNNGYDVDLYTYGAPRVGNRAFAEFITVQTGGTLYRVTHTNDVVPRLPPRQFGYSHPSPEYWIKSGTLVPVRRRDIVKIEGIDATGGNNQNNAPDIPAHLWYFGAIGTC

SEQ ID NO: 15845 - protein, 268 aa, Thermomyces lanuginosus
DVSADLLNQFKLFAQYSAAAYCGRNNDAPAGTNITCSANACPLVEAADATKLYSFENSGVGDVTGFLAVDNTNKLIVLSFRGSRSIENWITNLNFDLVDINDICSGCRGHDGFTSSWRSVADTLRQAVDDAVAAHPDYKVVVTGHSLGGALATLAGADLRNNGYDVDLYTYGAPRVGNRAFAEFITVQTGGTLYRVTHTNDVVPRLPPRQFGYSHPSPEYWIKSGTLVPVRRRDIVKIEGIDATGGNNQNNAPDIPAHLWYFGAIGTC

SEQ ID NO: 15846 - protein, 268 aa, Thermomyces lanuginosus
DVSADLLNQFKLFAQYSAAAYCGRNNDAPAGTNITCSANACPLVEAADATFLYSFENSGVGDVTGFLAVDGTNKLIVLSFRGSRSIENWITNLNFDLVDINDICSGCRGHDGFTSSWRSVADTLRQAVDDAVAAHPDYKVVVTGHSLGGALATLAGADLRNNGYDVDLYTYGAPRVGNRAFAEFITVQTGGTLYRVTHTNDVVPRLPPRQFGYSHPSPEYWIKSGTLVPVRRRDIVKIEGIDATGGNNQNNAPDIPAHLWYFGAIGTC

SEQ ID NO: 15847 - protein, 268 aa, Thermomyces lanuginosus
DVSADLLNQFKLFAQYSAAAYCGRNNDAPAGTNITCSANACPLVEAADATFLYSFENSGVGDVTGFLAVDNTNKLIVLSFRGSRSIENWITNLNFDLVDINDICSGCRGHDGFTSSWRSVADTLRQAVDDAVAAHPDYKVVVTGHSLGGALATLAAADLRNNGYDVDLYTYGAPRVGNRAFAEFITVQTGGTLYRVTHTNDVVPRLPPRQFGYSHPSPEYWIKSGTLVPVRRRDIVKIEGIDATGGNNQNNAPDIPAHLWYFGAIGTC

SEQ ID NO: 15848 - protein, 268 aa, Thermomyces lanuginosus
DVSADLLNQFKLFAQYSAAAYCGRNWDAPAGTNITCSANACPLVEAADATFLYSFENSGVGDVTGFLAVDNTNKLIVLSFRGSRSIENWITNLNFDLVDINDICSGCRGHDGFTSSWRSVADTLRQAVDDAVAAHPDYKVVVTGHSLGGALATLAGADLRNNGYDVDLYTYGAPRVGNRAFAEFITVQTGGTLYRVTHTNDVVPRLPPRQFGYSHPSPEYWIKSGTLVPVRRRDIVKIEGIDATGGNNQNNAPDIPAHLWYFGAIGTC

SEQ ID NO: 15849 - protein, 268 aa, Thermomyces lanuginosus
DVSADLLNQFQLFAQYSAAAYCGRNNDAPAGTNITCSANACPLVEAADATFLYSFENSGVGDVTGFLAVDNTNKLIVLSFRGSRSIENWITNLNFDLVDINDICSGCRGHDGFTSSWRSVADTLRQAVDDAVAAHPDYKVVVTGHSLGGALATLAGADLRNNGYDVDLYTYGAPRVGNRAFAEFITVQTGGTLYRVTHTNDVVPRLPPRQFGYSHPSPEYWIKSGTLVPVRRRDIVKIEGIDATGGNNQNNTPDIPAHLWYFGLIGTC

SEQ ID NO: 15850 - protein, 268 aa, Thermomyces lanuginosus
DVSADLLNQFKLFAQYCAAAYCGRNNDAPAGTNITCSANACPLVEAADATFLYSFENSGVGDVTGFLAVDNTNKLIVLSFRGSRSIENWITNLNFDLVDINDICSGCRGHDGFTSSWRSVADTLRQAVDDAVAAHPDYKVVVTGHSLGGALATLAGADLRNNGYDVDLYTYGAPRVGNRAFAEFITVQTGGTLYRVTHTNDVVPRLPPRQFGYSHPSPEYWIKSGTLVPVRRRDIVKIEGIDATGGNNQNNAPDIPAHLWYFGAIGTC

SEQ ID NO: 15851 - protein, 268 aa, Thermomyces lanuginosus
DVSADLLNQFKLFAQYSAAAYCGRNNDAPAGTNITCSANACPLVEAADATFLYSFENSGVADVTGFLAVDNTNKLIVLSFRGSRSIENWITNLNFDLVDINDICSGCRGHDGFTSSWRSVADTLRQAVDDAVAAHPDYKVVVTGHSLGGALATLAGADLRNNGYDVDLYTYGAPRVGNRAFAEFITVQTGGTLYRVTHTNDVVPRLPPRQFGYSHPSPEYWIKSGTLVPVRRRDIVKIEGIDATGGNNQNNAPDIPAHLWYFGAIGTC

SEQ ID NO: 15852 - protein, 268 aa, Thermomyces lanuginosus
DVSADLLNQFKLFAQYSAAAYCGRNNDAPAGTNITCSANACPLVEAADATLLYSFENSGVGDVTGFLAVDNTNKLIVLSFRGSRSIENWITNLNFDLVDINDICSGCRGHDGFTSSWRSVADTLRQAVDDAVAAHPDYKVVVTGHSLGGALATLAGADLRNNGYDVDLYTYGAPRVGNRAFAEFITVQTGGTLYRVTHTNDVVPRLPPRQFGYSHPSPEYWIKSGTLVPVRRRDIVKIEGIDATGGNNQNNAPDIPAHLWYFGAIGTC

SEQ ID NO: 15853 - protein, 268 aa, Thermomyces lanuginosus
DVSADLLNQFKLFAQYSAAAYCGRNNDAPAGTNITCSANACPLVEAADATFLYSFENSGVGDVTGFLAVDNTNKLIVLSFRGSRSIENWITNLNFDLVDINDICSGCRGHDGFTSSWRSVADTLRQAVDDAVAAHPDYKVVVTGHSLGGALATLAGADLRNNGYDVDLYTYGAPRVGNRAFAEFITVQTGGTLYRVTHTNDVVPRLPPRQVGYSHPSPEYWIKSGTLVPVRRRDIVKIEGIDATGGNNQNNAPDIPAHLWYFGAIGTC

SEQ ID NO: 15854 - protein, 268 aa, Thermomyces lanuginosus
DVSADLLNQFKLFAQYSAAAYCGRNADAPAGTNITCSANACPLVEAADATFLYSFENSGVGDVTGFLAVDNTNKLIVLSFRGSRSIENWITNLNFDLVDINDICSGCRGHDGFTSSWRSVADTLRQAVDDAVAAHPDYKVVVTGHSLGGALATLAGADLRNNGYDVDLYTYGAPRVGNRAFAEFITVQTGGTLYRVTHTNDVVPRLPPRQFGYSHPSPEYWIKSGTLVPVRRRDIVKIEGIDATGGNNQNNAPDIPAHLWYFGAIGTC

SEQ ID NO: 15855 - protein, 268 aa, Thermomyces lanuginosus
DVRADLLNQFKLFAQYSAAAYCGRNNDAPAGTNITCSANACPLVEAADATFLYSFENSGVGDVTGFLAVDNTNKLIVLSFRGSRSIENWITNLNFDLVDINDICSGCRGHDGFTSSWRSVADTLRQAVDDAVAAHPDYKVVVTGHSLGGALATLAGADLRNNGYDVDLYTYGAPRVGNRAFAEFITVQTGGTLYRVTHTNDVVPRLPPRQFGYSHPSPEYWIKSGTLVPVRRRDIVKIEGIDATGGNNQNNAPDIPAHLWYFGAIGTC

SEQ ID NO: 15856 - protein, 268 aa, Thermomyces lanuginosus
DVSADLLNQFKLFAQYSAAAYCGRNNDAPAGTNITCSANACPLVEAADATFLYSFENSGVGDVTGFLAVDNTNKLIVLSFRGSRSIENWITNLNFDLVDINDICSGCRGHDGFTSSWRSVADTLRQAVDDAVAAHPDYKVVVTGHSLGGALATLAGADLRNNGYDVDLYTYGAPRVGNRAFAEFITVQTGGTLYRVTHTNDVVPRLPPRQFGYSHPSPEYWIKSGTGVPVRRRDIVKIEGIDATGGNNQNNAPDIPAHLWYFGAIGTC

SEQ ID NO: 15857 - protein, 268 aa, Thermomyces lanuginosus
DVSADLLNQFKLFAQYSAAAYCGRNNDAPAGTNITCSANACPLVEAADATYLYSFENSGVGDVTGFLAVDNTNKLIVLSFRGSRSIENWITNLNFDLVDINDICSGCRGHDGFTSSWRSVADTLRQAVDDAVAAHPDYKVVVTGHSLGGALATLAGADLRNNGYDVDLYTYGAPRVGNRAFAEFITVQTGGTLYRVTHTNDVVPRLPPRQFGYSHPSPEYWIKSGTLVPVRRRDIVKIEGIDATGGNNQNNAPDIPAHLWYFGAIGTC

SEQ ID NO: 15858 - protein, 268 aa, Thermomyces lanuginosus
DVSADLLNQFKLFAQYSAAAYCGRNNDAPAGTNITCSANACPLVEAADATFLYSFENSGVGDVTGFLAVRNTNKLIVLSFRGSRSIENWITNLNFDLVDINDICSGCRGHDGFTSSWRSVADTLRQAVDDAVAAHPDYKVVVTGHSLGGALATLAGADLRNNGYDVDLYTYGAPRVGNRAFAEFITVQTGGTLYRVTHTNDVVPRLPPRQFGYSHPSPEYWIKSGTLVPVRRRDIVKIEGIDATGGNNQNNAPDIPAHLWYFGAIGTC

SEQ ID NO: 15859 - protein, 268 aa, Thermomyces lanuginosus
DVSADLLNQFKLFAQYSAAAYCGRNNDAPAGTNITCSANACPLVEAADATFLYSFENSGVGDVTGFLAVDNTNKLIVLSFRGSRSPENWITNLNFDLVDINDICSGCRGHDGFTSSWRSVADTLRQAVDDAVAAHPDYKVVVTGHSLGGALATLAGADLRNNGYDVDLYTYGAPRVGNRAFAEFITVQTGGTLYRVTHTNDVVPRLPPRQFGYSHPSPEYWIKSGTLVPVRRRDIVKIEGIDATGGNNQNNTPDIPAHLWYFGLIGTC

SEQ ID NO: 15860 - protein, 268 aa, Thermomyces lanuginosus
DVSADLLNQFKLFAQYSAAAYCGRNNDAPAGTNITCSANACPLVEAADATFLYSFNNSGVGDVTGFLAVDNTNKLIVLSFRGSRSIENWITNLNFDLVDINDICSGCRGHDGFTSSWRSVADTLRQAVDDAVAAHPDYKVVVTGHSLGGALATLAGADLRNNGYDVDLYTYGAPRVGNRAFAEFITVQTGGTLYRVTHTNDVVPRLPPRQFGYSHPSPEYWIKSGTLVPVRRRDIVKIEGIDATGGNNQNNTPDIPAHLWYFGLIGTC

SEQ ID NO: 15861 - protein, 268 aa, Thermomyces lanuginosus
DVSADLLNQFKLFAQYSAAAYCGRNNDAPAGTNITCSANACPLVEAADATFLYSFENSSVGDVTGFLAVDNTNKLIVLSFRGSRSIENWITNLNFDLVDINDICSGCRGHDGFTSSWRSVADTLRQAVDDAVAAHPDYKVVVTGHSLGGALATLAGADLRNNGYDVDLYTYGAPRVGNRAFAEFITVQTGGTLYRVTHTNDVVPRLPPRQFGYSHPSPEYWIKSGTLVPVRRRDIVKIEGIDATGGNNQNNTPDIPAHLWYFGLIGTC

SEQ ID NO: 15862 - protein, 268 aa, Thermomyces lanuginosus
DVSADLLNQFKLFAQYSAAAYCGRNNDAPAGTNITCSANACPLVEAADATFLYSFENSGVGDVTGFLAVDNTNKLIVLSFRGSRSIENWITNFNFDLVDINDICSGCRGHDGFTSSWRSVADTLRQAVDDAVAAHPDYKVVVTGHSLGGALATLAGADLRNNGYDVDLYTYGAPRVGNRAFAEFITVQTGGTLYRVTHTNDVVPRLPPRQFGYSHPSPEYWIKSGTLVPVRRRDIVKIEGIDATGGNNQNNTPDIPAHLWYFGLIGTC

SEQ ID NO: 15863 - protein, 268 aa, Thermomyces lanuginosus
DVSADLLNQFKLFAQYSAAAYCGRNNDAPAGTNITCSANACPLVEAADATFLYSFENSGMGDVTGFLAVDNTNKLIVLSFRGSRSIENWITNLNFDLVDINDICSGCRGHDGFTSSWRSVADTLRQAVDDAVAAHPDYKVVVTGHSLGGALATLAGADLRNNGYDVDLYTYGAPRVGNRAFAEFITVQTGGTLYRVTHTNDVVPRLPPRQFGYSHPSPEYWIKSGTGVPVRRNDIVKIEGIDATGGNNQNNTPDIPAHLWYFGLIGTC

SEQ ID NO: 15864 - protein, 268 aa, Thermomyces lanuginosus
DVSADLLNQFKLFAQYSAAAYCGRNNDAPAGTNITCSANACPLVEAADATFLYSFENSGVGDVTGFLAVDNTNKLIVLSFRGSRSIENWITNLNFDLVDINDICSGCRGHDGFTSSWRSVADTLRQAVDDAVAAHPDYKVVVTGHSLGGALATLAGADLRNNGYDVDLYTYGAPRVGNRAFAEFITVQTGGTLYRVTHTNDVVPRLPPRQYGYSHPSPEYWIKSGTLVPVRRRDIVKIEGIDATGGNNQNNTPDIPAHLWYFGLIGTC

SEQ ID NO: 15865 - protein, 268 aa, Thermomyces lanuginosus
DVSADLLNQFKLFAQYSAAAYCGRNNDAPAGTNITCSANACPLVEAADATFLYSFENSGVGDVTGFLAVDNTNKLIVLSFRGSRSFENWITNLNFDLVDINDICSGCRGHDGFTSSWRSVADTLRQAVDDAVAAHPDYKVVVTGHSLGGALATLAGADLRNNGYDVDLYTYGAPRVGNRAFAEFITVQTGGTLYRVTHTNDVVPRLPPRQFGYSHPSPEYWIKSGTLVPVRRRDIVKIEGIDATGGNNQNNTPDIPAHLWYFGLIGTC

SEQ ID NO: 15866 - protein, 268 aa, Thermomyces lanuginosus
DVSADLLNQFKLFAQYSAAAYCGRNNDAPAGTNINCSANACPLVEAADATFLYSFENSGVGDVTGFLAVDNTNKLIVLSFRGSRSIENWITNLNFDLVDINDICSGCRGHDGFTSSWRSVADTLRQAVDDAVAAHPDYKVVVTGHSLGGALATLAGADLRNNGYDVDLYTYGAPRVGNRAFAEFITVQTGGTLYRVTHTNDVVPRLPPRQFGYSHPSPEYWIKSGTLVPVRRRDIVKIEGIDATGGNNQNNTPDIPAHLWYFGLIGTC

SEQ ID NO: 15867 - protein, 268 aa, Thermomyces lanuginosus
DVSADLLNQFKLFAQYSAAAYCGRNNDAPAGTNITCSANACPLVEAADATFLYSFENSGVGDVTGFLAVDNTNKLIVLSFRGSRSIENWITNLNFDLVDINDICSGCRGHDGFTSSWRSVADTLRQAVDDAVAAHPDYKVVVTGHSLGGALATLAGADLRNNGYDVDLYTYGAPRVGNRAFAEFITVQTGGTLYRVTHTQDVVPRLPPRQFGYSHPSPEYWIKSGTLVPVRRRDIVKIEGIDATGGNNQNNTPDIPAHLWYFGLIGTC

SEQ ID NO: 15868 - protein, 268 aa, Thermomyces lanuginosus
DVSADLLNQFKLFAQYSAAAYCGRNNDAPAGTNITCSAQACPLVEAADATFLYSFENSGVGDVTGFLAVDNTNKLIVLSFRGSRSIENWITNLNFDLVDINDICSGCRGHDGFTSSWRSVADTLRQAVDDAVAAHPDYKVVVTGHSLGGALATLAGADLRNNGYDVDLYTYGAPRVGNRAFAEFITVQTGGTLYRVTHTNDVVPRLPPRQFGYSHPSPEYWIKSGTLVPVRRRDIVKIEGIDATGGNNQNNTPDIPAHLWYFGLIGTC

SEQ ID NO: 15869 - protein, 268 aa, Thermomyces lanuginosus
DVSEDLLNQFKLFAQYSAAAYCGRNNDAPAGTNITCSANACPLVEAADATFLYSFENSGVGDVTGFLAVDNTNKLIVLSFRGSRSIENWITNLNFDLVDINDICSGCRGHDGFTSSWRSVADTLRQAVDDAVAAHPDYKVVVTGHSLGGALATLAGADLRNNGYDVDLYTYGAPRVGNRAFAEFITVQTGGTLYRVTHTNDVVPRLPPRQFGYSHPSPEYWIKSGTGVPVRRRDIVKIEGIDATGGNNQNNTPDIPAHLWYFGLIGTC

SEQ ID NO: 15870 - protein, 268 aa, Thermomyces lanuginosus
DVSADLLNQFKLFAQYSAAAYCGRNNDAPAGTNITCSANACPLVEAADATFLYSFENSGVGDVTGFLAVDQTNKLIVLSFRGSRSIENWITNLNFDLVDINDICSGCRGHDGFTSSWRSVADTLRQAVDDAVAAHPDYKVVVTGHSLGGALATLAGADLRNNGYDVDLYTYGAPRVGNRAFAEFITVQTGGTLYRVTHTNDVVPRLPPRQFGYSHPSPEYWIKSGTLVPVRRRDIVKIEGIDATGGNNQNNTPDIPAHLWYFGLIGTC

SEQ ID NO: 15871 - protein, 268 aa, Thermomyces lanuginosus
DVSADLLNQFKLFAQYSAAAYCGRNNDAPAGTNITCSANACPLVEAADATFLYSFENSGVGDVTGFLAVDNTNKLIVLSFRGSRSIENWITNLNFDLVDINDICRGCRGHDGFTSSWRSVADTLRQAVDDAVAAHPDYKVVVTGHSLGGALATLAGADLRNNGYDVDLYTYGAPRVGNRAFAEFITVQTGGTLYRVTHTNDVVPRLPPRQFGYSHPSPEYWIKSGTLVPVRRRDIVKIEGIDATGGNNQNNTPDIPAHLWYFGLIGTC

SEQ ID NO: 15872 - protein, 268 aa, Thermomyces lanuginosus
DVSADLLNQFKLFAQYSAAAYCGRNNDAPAGTNITCSANACPLVEAADATFLYSFENSGVGDVTGFLAVDNTNKLIVLSFRGSRSIENWITNLNFDLVDINDICSGCRGHDGFTSSWRSVADTLRQAVDDAVAAHPDYKVVVTGHSLGGALATLAGADLRNNGYDVDLYTYGAPRVGNRAFAEFITVQTGGTLYRVTHTNDVVPRLPPRQFRYSHPSPEYWIKSGTLVPVRRRDIVKIEGIDATGGNNQNNTPDIPAHLWYFGLIGTC

SEQ ID NO: 15873 - protein, 268 aa, Thermomyces lanuginosus
DVSADLLNQFKLFAQYSAAAYCGRNNDAPAGTNITCSANACPLVEAADATFLYSFENSGVGDVTGFLAVDNTNKLIVLSFRGSRSIENWITNLNFDLVDINDICSGCRGHQGFTSSWRSVADTLRQAVDDAVAAHPDYKVVVTGHSLGGALATLAGADLRNNGYDVDLYTYGAPRVGNRAFAEFITVQTGGTLYRVTHTNDVVPRLPPRQFGYSHPSPEYWIKSGTLVPVRRRDIVKIEGIDATGGNNQNNTPDIPAHLWYFGLIGTC

SEQ ID NO: 15874 - protein, 268 aa, Thermomyces lanuginosus
DVSADLLNQFKLFAQYSAAAYCGRNNDAPAGTNITCSANACPLVEAADATFLYSFENSGMGDVTGFLAVDNTNKLIVLSFRGSRSIENWITNLNFDLVDINDICSGCRGHDGFTSSWRSVADTLRQAVDDAVAAHPDYKVVVTGHSLGGALATLAGADLRNNGYDVDLYTYGAPRVGNRAFAEFITVQTGGTLYRVTHTNDVVPRLPPRQFGYSHPSPEYWIKSGTLVPVRRRDIVKIEGIDATGGNNQNNTPDIPAHLWYFGLIGTC

SEQ ID NO: 15875 - protein, 268 aa, Thermomyces lanuginosus
DVSADLLNQFKLFAQYSAAAYCGRNNDAPNGTNITCSANACPLVEAADATFLYSFENSGVGDVTGFLAVDNTNKLIVLSFRGSRSIENWITNLNFDLVDINDICSGCRGHDGFTSSWRSVADTLRQAVDDAVAAHPDYKVVVTGHSLGGALATLAGADLRNNGYDVDLYTYGAPRVGNRAFAEFITVQTGGTLYRVTHTNDVVPRLPPRQFGYSHPSPEYWIKSGTLVPVRRRDIVKIEGIDATGGNNQNNTPDIPAHLWYFGLIGTC

SEQ ID NO: 15876 - protein, 268 aa, Thermomyces lanuginosus
DVSADLLNQFKLFAQYSAAAYCGRNNDAPAGTNITCSANACPLVEAADATFLYSFENSGVGDVTGFLAVDNTSKLIVLSFRGSRSIENWITNLNFDLVDINDICSGCRGHDGFTSSWRSVADTLRQAVDDAVAAHPDYKVVVTGHSLGGALATLAGADLRNNGYDVDLYTYGAPRVGNRAFAEFITVQTGGTLYRVTHTNDVVPRLPPRQFGYSHPSPEYWIKSGTLVPVRRRDIVKIEGIDATGGNNQNNTPDIPAHLWYFGLIGTC

SEQ ID NO: 15877 - protein, 268 aa, Thermomyces lanuginosus
DVSADLLNQFKLFAQYSAAAYCGRNNDAPAGTNITCSANACPLVEAADATFLYSFENSGVGDVTGFLAVDNTNKLIVLSFRGSRSIENWITNLNFDLVDINDICSGCRGHDGFTSSWRSVADTLRQAVDDAVAAHPDYKVVVTGHSLGGALATLAGADLRNNGYDVDLYTYGAPRVGNRAFAEFITVQTGGTLYRVTHTNDVVPRLPPRQTGYSHPSPEYWIKSGTLVPVRRRDIVKIEGIDATGGNNQNNTPDIPAHLWYFGLIGTC

SEQ ID NO: 15878 - protein, 268 aa, Thermomyces lanuginosus
DVSADLLNQFKLFAQYSAAAYCGRNNDAPAGTNITCSANACPLVEAADATFLYSFENSGVGDVTGFLAVDNTNKLIVLSFRGSRSIENWITNLNFDLVDINDICSGCRGHDGFTSSWRSVADTLRQAVDDAVAAHPDYKVVVTGHSLGGALATLAGADLRNNGYDVDLYTYGAPRVGNRAFAEFITVQTGGTLYRVTHTNDVVPRLPPRQAGYSHPSPEYWIKSGTLVPVRRRDIVKIEGIDATGGNNQNNTPDIPAHLWYFGLIGTC

SEQ ID NO: 15879 - protein, 268 aa, Thermomyces lanuginosus
DVSADLLNQFKLFAQYSAAAYCGRNNDAPAGTNITCSANACPLVEAADATFLYSFENSGVGDVTGFLAVDNTNKLIVLSFRGSRSIENWITNLQFDLVDINDICSGCRGHDGFTSSWRSVADTLRQAVDDAVAAHPDYKVVVTGHSLGGALATLAGADLRNNGYDVDLYTYGAPRVGNRAFAEFITVQTGGTLYRVTHTNDVVPRLPPRQFGYSHPSPEYWIKSGTLVPVRRRDIVKIEGIDATGGNNQNNTPDIPAHLWYFGLIGTC

SEQ ID NO: 15880 - protein, 268 aa, Thermomyces lanuginosus
DVSADLLNQFKLFAQYSAAAYCGRNNDAPAGTNITCSADACPLVEAADATFLYSFENSGVGDVTGFLAVDNTNKLIVLSFRGSRSIENWITNLNFDLVDINDICSGCRGHDGFTSSWRSVADTLRQAVDDAVAAHPDYKVVVTGHSLGGALATLAGADLRNNGYDVDLYTYGAPRVGNRAFAEFITVQTGGTLYRVTHTNDVVPRLPPRQFGYSHPSPEYWIKSGTLVPVRRRDIVKIEGIDATGGNNQNNTPDIPAHLWYFGLIGTC

SEQ ID NO: 15881 - protein, 268 aa, Thermomyces lanuginosus
DVSADLLNQFKLFAQYSAAAYCGRNNDAPAGTNITCSANACPLVEAADATFLYSFENSGVGDVTGFLAVDNTNKLIVLSFRGSRSIENWITNLNFDLVDINDICSGCRGHDGFTSSWRSVADTLRQAVDDAVAAHPDYKVVVTGHSLGGALATLAGADLRNNGYDVDLYTYGAPRVGNRAFAEFITVQTGGTLYRVTHTNDVVPRLPPRQFEYSHPSPEYWIKSGTLVPVRRRDIVKIEGIDATGGNNQNNTPDIPAHLWYFGLIGTC

SEQ ID NO: 15882 - protein, 268 aa, Thermomyces lanuginosus
DVSADLLNQFKLFAQYSAAAYCGRNNDAPAGTNITCSANACPLVEAADATFLYSFENSGVGDVTGFLAVDNTNKLIVLSFRGSRSIENWITNLSFDLVDINDICSGCRGHDGFTSSWRSVADTLRQAVDDAVAAHPDYKVVVTGHSLGGALATLAGADLRNNGYDVDLYTYGAPRVGNRAFAEFITVQTGGTLYRVTHTNDVVPRLPPRQFGYSHPSPEYWIKSGTLVPVRRRDIVKIEGIDATGGNNQNNTPDIPAHLWYFGLIGTC

SEQ ID NO: 15883 - protein, 268 aa, Thermomyces lanuginosus
DVSADLLEQFKLFAQYSAAAYCGRNNDAPAGTNITCSANACPLVEAADATFLYSFENSGVGDVTGFLAVDNTNKLIVLSFRGSRSIENWITNLNFDLVDINDICSGCRGHDGFTSSWRSVADTLRQAVDDAVAAHPDYKVVVTGHSLGGALATLAGADLRNNGYDVDLYTYGAPRVGNRAFAEFITVQTGGTLYRVTHTNDVVPRLPPRQFGYSHPSPEYWIKSGTLVPVRRRDIVKIEGIDATGGNNQNNTPDIPAHLWYFGLIGTC

SEQ ID NO: 15884 - protein, 268 aa, Thermomyces lanuginosus
DVSADLLNQFKLFAQYSAAAYCGRNNQAPAGTNITCSANACPLVEAADATFLYSFENSGVGDVTGFLAVDNTNKLIVLSFRGSRSIENWITNLNFDLVDINDICSGCRGHDGFTSSWRSVADTLRQAVDDAVAAHPDYKVVVTGHSLGGALATLAGADLRNNGYDVDLYTYGAPRVGNRAFAEFITVQTGGTLYRVTHTNDVVPRLPPRQFGYSHPSPEYWIKSGTLVPVRRRDIVKIEGIDATGGNNQNNTPDIPAHLWYFGLIGTC

SEQ ID NO: 15885 - protein, 268 aa, Thermomyces lanuginosus
DVSADLLNQFKLFAQYSAAAYCGRNNDAPAGTNITCSANACPLVEAADATFLYSFENSGVGDVTGFLAVDNTNKLIVLSFRGSRSIENWITNLNFDLVDINDICSGCEGHDGFTSSWRSVADTLRQAVDDAVAAHPDYKVVVTGHSLGGALATLAGADLRNNGYDVDLYTYGAPRVGNRAFAEFITVQTGGTLYRVTHTNDVVPRLPPRQFGYSHPSPEYWIKSGTLVPVRRRDIVKIEGIDATGGNNQNNTPDIPAHLWYFGLIGTC

SEQ ID NO: 15886 - protein, 268 aa, Thermomyces lanuginosus
DVSADLLNQFKLFAQYSAAAYCGRNNDAPAGTNITCSANACPLVEAADATFLYSFENSGVGDVTGFLAVDNTNKLIVLSFRGSRSIENWITNLNFDLVDINDICSGCRGHDGFTSSWRSVADTLRQAVDDAVAAHPDYKVVVTGHSLGGALATLAGADLRNNGYDVDLYTYGAPRVGNRAFAEFITVQTGGTLYRVTHTNDVVPRLPPRQFGYSHPSPEYWIKSGTLVPVRRRDIVKIEGIDATGGNNQNNTPDIPSHLWYFGLIGTC

SEQ ID NO: 15887 - protein, 268 aa, Thermomyces lanuginosus
DVSADLLNQFKLFAQYSAAAYCGRNNDAPAGTQITCSANACPLVEAADATFLYSFENSGVGDVTGFLAVDNTNKLIVLSFRGSRSIENWITNLNFDLVDINDICSGCRGHDGFTSSWRSVADTLRQAVDDAVAAHPDYKVVVTGHSLGGALATLAGADLRNNGYDVDLYTYGAPRVGNRAFAEFITVQTGGTLYRVTHTNDVVPRLPPRQFGYSHPSPEYWIKSGTLVPVRRRDIVKIEGIDATGGNNQNNTPDIPAHLWYFGLIGTC

SEQ ID NO: 15888 - protein, 268 aa, Thermomyces lanuginosus; identical to SEQ ID NO: 9898

SEQ ID NO: 15889 - protein, 268 aa, Thermomyces lanuginosus
DVSADLLNQFKLFAQYSAAAYCGRNNNAPAGTNITCSANACPLVEAADATFLYSFENSGVGDVTGFLAVDNTNKLIVLSFRGSRSIENWITNLNFDLVDINDICSGCRGHDGFTSSWRSVADTLRQAVDDAVAAHPDYKVVVTGHSLGGALATLAGADLRNNGYDVDLYTYGAPRVGNRAFAEFITVQTGGTLYRVTHTNDVVPRLPPRQFGYSHPSPEYWIKSGTLVPVRRRDIVKIEGIDATGGNNQNNTPDIPAHLWYFGLIGTC

SEQ ID NO: 15890 - protein, 268 aa, Thermomyces lanuginosus
DVSADLLNQFKLFAQYSAAAYCGRNNDAPAGTNITCSANACPLVEAADATFLYSFENSGVGDVTGFLAVDNTNKLIVLSFRGSRSIENWITNLNFDLVDINDICSGCRGHDGFTSSWRSVADTLRQAVDDAVAAHPDYKVVVTGHSLGGALATLAGADLRNNGYDVQLYTYGAPRVGNRAFAEFITVQTGGTLYRVTHTNDVVPRLPPRQFGYSHPSPEYWIKSGTLVPVRRRDIVKIEGIDATGGNNQNNTPDIPAHLWYFGLIGTC

SEQ ID NO: 15891 - protein, 268 aa, Thermomyces lanuginosus
DVSADLLNQFKLFAQYSAAAYCGRNNDAPAGTNITCSANACPLVEAADATFLYSFKNSGVGDVTGFLAVDNTNKLIVLSFRGSRSIENWITNLNFDLVDINDICSGCRGHDGFTSSWRSVADTLRQAVDDAVAAHPDYKVVVTGHSLGGALATLAGADLRNNGYDVDLYTYGAPRVGNRAFAEFITVQTGGTLYRVTHTNDVVPRLPPRQFGYSHPSPEYWIKSGTLVPVRRRDIVKIEGIDATGGNNQNNTPDIPAHLWYFGLIGTC

SEQ ID NO: 15892 - protein, 268 aa, Thermomyces lanuginosus
DVSADLLNQFKLFAQYSAAAYCGRNNDAPAGTNITCSANACPLVEAAQATFLYSFENSGVGDVTGFLAVDNTNKLIVLSFRGSRSIENWITNLNFDLVDINDICSGCRGHDGFTSSWRSVADTLRQAVDDAVAAHPDYKVVVTGHSLGGALATLAGADLRNNGYDVDLYTYGAPRVGNRAFAEFITVQTGGTLYRVTHTNDVVPRLPPRQFGYSHPSPEYWIKSGTLVPVRRRDIVKIEGIDATGGNNQNNTPDIPAHLWYFGLIGTC

SEQ ID NO: 15893 - protein, 268 aa, Thermomyces lanuginosus
DVSADLLDQFKLFAQYSAAAYCGRNNDAPAGTNITCSANACPLVEAADATFLYSFENSGVGDVTGFLAVDNTNKLIVLSFRGSRSIENWITNLNFDLVDINDICSGCRGHDGFTSSWRSVADTLRQAVDDAVAAHPDYKVVVTGHSLGGALATLAGADLRNNGYDVDLYTYGAPRVGNRAFAEFITVQTGGTLYRVTHTNDVVPRLPPRQFGYSHPSPEYWIKSGTLVPVRRRDIVKIEGIDATGGNNQNNTPDIPAHLWYFGLIGTC

SEQ ID NO: 15894 - protein, 268 aa, Thermomyces lanuginosus
DVSADLLNQFKLFAQYSAAAYCGRNNDAPAGTNITCSANACPLVEAADATFLYSFENSGVGDVTGFLAVDNTNKLIVLSFRGSRSIENWITNLNFDLVDINDICSGCRGHDGFTSSWRSVADTLRQAVDDAVAAHPDYKVVVTGHSLGGALATLAGADLRNNGYDVDLYTYGAPRVGNRAFAEFITVQTGGTLYRVTHTNDVVPRLPPRQFGYSHPSPEYWIKSGTLEPVRRRDIVKIEGIDATGGNNQNNTPDIPAHLWYFGLIGTC

SEQ ID NO: 15895 - protein, 268 aa, Thermomyces lanuginosus
DVSADLLNQFKLFAQYSAAAYCGRNNDAPAGTNITCSANACPLVEAADATFLYSFENSGVGDVTGFLAVDNTNKLIVLSFRGSRSIENWITNLNFDLVDINDICSGCQGHDGFTSSWRSVADTLRQAVDDAVAAHPDYKVVVTGHSLGGALATLAGADLRNNGYDVDLYTYGAPRVGNRAFAEFITVQTGGTLYRVTHTNDVVPRLPPRQFGYSHPSPEYWIKSGTLVPVRRRDIVKIEGIDATGGNNQNNTPDIPAHLWYFGLIGTC

SEQ ID NO: 15896 - protein, 268 aa, Thermomyces lanuginosus
DVSADLLNQFKLFAQYSAAAYCGRNNDAPAGTNITCSANACPLVEAADATFLYSFENSGSGDVTGFLAVDNTNKLIVLSFRGSRSIENWITNLNFDLVDINDICSGCRGHDGFTSSWRSVADTLRQAVDDAVAAHPDYKVVVTGHSLGGALATLAGADLRNNGYDVDLYTYGAPRVGNRAFAEFITVQTGGTLYRVTHTNDVVPRLPPRQFGYSHPSPEYWIKSGTLVPVRRRDIVKIEGIDATGGNNQNNTPDIPAHLWYFGLIGTC

SEQ ID NO: 15897 - protein, 268 aa, Thermomyces lanuginosus
DVSADLLNQFKLFAQYSAAAYCGRNNDAPAGTNITCSANACPLVEAADATFNYSFENSGVGDVTGFLAVDNTNKLIVLSFRGSRSIENWITNLNFDLVDINDICSGCRGHDGFTSSWRSVADTLRQAVDDAVAAHPDYKVVVTGHSLGGALATLAGADLRNNGYDVDLYTYGAPRVGNRAFAEFITVQTGGTLYRVTHTNDVVPRLPPRQFGYSHPSPEYWIKSGTLVPVRRRDIVKIEGIDATGGNNQNNTPDIPAHLWYFGLIGTC

SEQ ID NO: 15898 - protein, 268 aa, Thermomyces lanuginosus
DVSADLLNQFKLFAQYSAAAYCGRNNDAPAGTNITCSANACPLVEAADATFLYSFENSGVGDVTGFLAVDNTNKLIVLSFRGSRSIENWITNLNFDLVDINDICSGCRGHDGFTSSWRSVADTLRQAVDDAVAAHPDYKVVVTGHSLGGALATLAGADLRNNGYDVDLYTYGAPRVGNRAFAEFITVQTGGTLYRVTHTNDVVPRLPPRQVGYSHPSPEYWIKSGTLVPVRRRDIVKIEGIDATGGNNQNNAPDIPAHLWYFGLIGTC

SEQ ID NO: 15899 - protein, 268 aa, Thermomyces lanuginosus
DVSADLLNQFKLFAQYSAAAYCGRNNDAPAGTNITCSANACPLVEAADATFLYSFENSGVGDVTGFLAVDNTNKLIVLSFRGSRSIENWITNLNFDLVDINDICSGCRGHDGFTSSWRSVADTLRQAVDDAVAAHPDYKVVVTGHSLGGALATLAGADLRNNGYDVDLYTYGQPRVGNRAFAEFITVQTGGTLYRVTHTNDVVPRLPPRQFGYSHPSPEYWIKSGTLVPVRRRDIVKIEGIDATGGNNQNNTPDIPAHLWYFGLIGTC

SEQ ID NO: 15900 - protein, 268 aa, Thermomyces lanuginosus
DVSADLLNQFKLFAQYSAAAYCGRNNDAPAGTNITCSANACPLVEAADATFLYSFENSGVGDVTGFLAVDNTNKLIVLSFRGSRSIENWITNLNFDLVDINDICSGCRGHDGFTSSWRSVAQTLRQAVDDAVAAHPDYKVVVTGHSLGGALATLAGADLRNNGYDVDLYTYGAPRVGNRAFAEFITVQTGGTLYRVTHTNDVVPRLPPRQFGYSHPSPEYWIKSGTLVPVRRRDIVKIEGIDATGGNNQNNTPDIPAHLWYFGLIGTC

SEQ ID NO: 15901 - protein, 268 aa, Thermomyces lanuginosus
DVSADLLNQFKLFAQYSAAAYCGRNNDAPAGTNITCSANACPLVEAADATFLYSFENSGVGDVTGFLAVDNTNKLIVLSFRGSRSIENWRTNLNFDLVDINDICSGCRGHDGFTSSWRSVADTLRQAVDDAVAAHPDYKVVVTGHSLGGALATLAGADLRNNGYDVDLYTYGAPRVGNRAFAEFITVQTGGTLYRVTHTNDVVPRLPPRQFGYSHPSPEYWIKSGTLVPVRRRDIVKIEGIDATGGNNQNNTPDIPAHLWYFGLIGTC

SEQ ID NO: 15902 - protein, 268 aa, Thermomyces lanuginosus
DVSADLLNQFKLFAQYSAAAYCGRNNDAPAGTNITCSANACPLVEAADATVLYSFENSGVGDVTGFLAVDNTNKLIVLSFRGSRSIENWITNLNFDLVDINDICSGCRGHDGFTSSWRSVADTLRQAVDDAVAAHPDYKVVVTGHSLGGALATLAGADLRNNGYDVDLYTYGAPRVGNRAFAEFITVQTGGTLYRVTHTNDVVPRLPPRQFGYSHPSPEYWIKSGTLVPVRRRDIVKIEGIDATGGNNQNNTPDIPAHLWYFGLIGTC

SEQ ID NO: 15903 - protein, 268 aa, Thermomyces lanuginosus
DVSADLLNQFKLFAQYSAAAYCGRNNDAPAGTNITCSANACPLVEAADATFLYSFENSGVGDVTGFLAVDNTNKLIVLSFRGSRSIENWITNLNFDLVDINDICSGCRGHDGFTSSWRSVADTLRQAVDDAVAAHPDYKVVVTGHSLGGALATLAGADLRNNGYDVDLYTYGAPRVGNRAFAEFITVQTGGTLYRVTHTNDVVPRLPPQQFGYSHPSPEYWIKSGTLVPVRRRDIVKIEGIDATGGNNQNNTPDIPAHLWYFGLIGTC

SEQ ID NO: 15904 - protein, 268 aa, Thermomyces lanuginosus
DVSADLLNQFKLFAQYSAAAYCGRNNDAPAGTNITCSANACPLVEAADATFLYSFENSGVGQVTGFLAVDNTNKLIVLSFRGSRSIENWITNLNFDLVDINDICSGCRGHDGFTSSWRSVADTLRQAVDDAVAAHPDYKVVVTGHSLGGALATLAGADLRNNGYDVDLYTYGAPRVGNRAFAEFITVQTGGTLYRVTHTNDVVPRLPPRQFGYSHPSPEYWIKSGTLVPVRRRDIVKIEGIDATGGNNQNNTPDIPAHLWYFGLIGTC

SEQ ID NO: 15905 - protein, 268 aa, Thermomyces lanuginosus
DVSAQLLNQFKLFAQYSAAAYCGRNNDAPAGTNITCSANACPLVEAADATFLYSFENSGVGDVTGFLAVDNTNKLIVLSFRGSRSIENWITNLNFDLVDINDICSGCRGHDGFTSSWRSVADTLRQAVDDAVAAHPDYKVVVTGHSLGGALATLAGADLRNNGYDVDLYTYGAPRVGNRAFAEFITVQTGGTLYRVTHTNDVVPRLPPRQFGYSHPSPEYWIKSGTLVPVRRRDIVKIEGIDATGGNNQNNTPDIPAHLWYFGLIGTC

SEQ ID NO: 15906 - protein, 268 aa, Thermomyces lanuginosus
DVSADLLNQFKLFAQYSAAAYCGRNNDAPAGTNITCSANACPLVEAADATFLYSFENSGVGDVTGFLAVDNTNKLIVLSFRGSRSIENWITNLNFDLVDIRDICSGCRGHDGFTSSWRSVADTLRQAVDDAVAAHPDYKVVVTGHSLGGALATLAGADLRNNGYDVDLYTYGAPRVGNRAFAEFITVQTGGTLYRVTHTNDVVPRLPPRQFGYSHPSPEYWIKSGTLVPVRRRDIVKIEGIDATGGNNQNNTPDIPAHLWYFGLIGTC

SEQ ID NO: 15907 - protein, 268 aa, Thermomyces lanuginosus
DVSADLLNQFKLFAQYSAAAYCGRNNDAPAGTNITCSANACPLVEAADATFLYSFENSGVGDVTGFLAVDNTNKLIVLSFRGTRSIENWITNLNFDLVDINDICSGCRGHDGFTSSWRSVADTLRQAVDDAVAAHPDYKVVVTGHSLGGALATLAGADLRNNGYDVDLYTYGAPRVGNRAFAEFITVQTGGTLYRVTHTNDVVPRLPPRQFGYSHPSPEYWIKSGTLVPVRRRDIVKIEGIDATGGNNQNNTPDIPAHLWYFGLIGTC

SEQ ID NO: 15908 - protein, 268 aa, Thermomyces lanuginosus
DVSADLLNQFKLFAQYSAAAYCGRNNDAPAGTNITCSANACPLVEAADATFLYSFENSGVGDVTGFLAVDNTNKLIVLSFRGSRSIENWITNLNFDLVDINDICSGCRGHDGFTSSWRSVADTLRQAVDDAVAAHPDYKVVVTGHSLGGALATLAGADLRNNGYDVDLYTYGAPRVGNRAFAEFITVQTGGTLYRVTHTNDVVPRLPPRQFGYSHPSPEYWIKSGTLVPVRQRDIVKIEGIDATGGNNQNNTPDIPAHLWYFGLIGTC

SEQ ID NO: 15909 - protein, 268 aa, Thermomyces lanuginosus
DVSADLLNQFKLFAQYSAAAYCGRNNDAPAGTNITCSANACPLVEAADATFLYSFENSGVGDVTGFLAVDNTNKLIVLSFRGSRSIENWITNLNFDLVDINDICSGCRGHDGFTSSWRSVADTLRQAVDDAVAAHPDYKVVVTGHSLGGALATLAGADLRNNGYDVDLYTYGAPRVGNRAFAEFITVQTGGTLYRVTHTNDVVPRLPPRQFGYSHPSPEYWIKSGTLVPVRRRDIVKIEGIDAEGGNNQNNTPDIPAHLWYFGLIGTC

SEQ ID NO: 15910 - protein, 268 aa, Thermomyces lanuginosus
DVSADLLNQFKLFAQYSAAAYCGRNNDAPAGTNITCSANACPLVEAADATFLYSFENSGVGDVTGFLAVDNTNKLIVLSFRGSRSIEDWITNLNFDLVDINDICSGCRGHDGFTSSWRSVADTLRQAVDDAVAAHPDYKVVVTGHSLGGALATLAGADLRNNGYDVDLYTYGAPRVGNRAFAEFITVQTGGTLYRVTHTNDVVPRLPPRQFGYSHPSPEYWIKSGTLVPVRRRDIVKIEGIDATGGNNQNNTPDIPAHLWYFGLIGTC

SEQ ID NO: 15911 - protein, 268 aa, Thermomyces lanuginosus
DVSADLLNQFKLFAQYSAAAYCGRNQDAPAGTNITCSANACPLVEAADATFLYSFENSGVGDVTGFLAVDNTNKLIVLSFRGSRSIENWITNLNFDLVDINDICSGCRGHDGFTSSWRSVADTLRQAVDDAVAAHPDYKVVVTGHSLGGALATLAGADLRNNGYDVDLYTYGAPRVGNRAFAEFITVQTGGTLYRVTHTNDVVPRLPPRQFGYSHPSPEYWIKSGTLVPVRRRDIVKIEGIDATGGNNQNNTPDIPAHLWYFGLIGTC

SEQ ID NO: 15912 - protein, 268 aa, Thermomyces lanuginosus
DVSADLLQQFKLFAQYSAAAYCGRNNDAPAGTNITCSANACPLVEAADATFLYSFENSGVGDVTGFLAVDNTNKLIVLSFRGSRSIENWITNLNFDLVDINDICSGCRGHDGFTSSWRSVADTLRQAVDDAVAAHPDYKVVVTGHSLGGALATLAGADLRNNGYDVDLYTYGAPRVGNRAFAEFITVQTGGTLYRVTHTNDVVPRLPPRQFGYSHPSPEYWIKSGTLVPVRRRDIVKIEGIDATGGNNQNNTPDIPAHLWYFGLIGTC

SEQ ID NO: 15913 - protein, 268 aa, Thermomyces lanuginosus
DVSADLLNQFKLFAQYSAAAYCGRNNDAPAGTNITCSANACPLVEAADATFLYSFENSGVGDVTGFLAVDNTNKLIVLSFRGSRSIEQWITNLNFDLVDINDICSGCRGHDGFTSSWRSVADTLRQAVDDAVAAHPDYKVVVTGHSLGGALATLAGADLRNNGYDVDLYTYGAPRVGNRAFAEFITVQTGGTLYRVTHTNDVVPRLPPRQFGYSHPSPEYWIKSGTLVPVRRRDIVKIEGIDATGGNNQNNTPDIPAHLWYFGLIGTC

SEQ ID NO: 15914 - protein, 268 aa, Thermomyces lanuginosus
DVSRDLLNQFKLFAQYSAAAYCGRNNDAPAGTNITCSANACPLVEAADATFLYSFENSGVGDVTGFLAVDNTNKLIVLSFRGSRSIENWVTNLEFLLVDIPDICSGCRGHDGFTSSWRSVADTLRQAVDDAVAAHPDYKVVVTGHSLGGALATLAGADLRNNGYDVDLYTYGAPRVGNRAFAEFITVQTGGTLYRVTHTNDVVPRLPPRQFGYSHPSPEYWIKSGTLVPVRRNDIVKIEGIDATGGNNQNNAPDIPAHLWYFGAIGTC

SEQ ID NO: 15915 - protein, 268 aa, Thermomyces lanuginosus
DVSADLLNQFKLFAQYSAAAYCGRNNDAPAGTNITCSANACPLVEAADATFLYSFENSGVGDVTGFLAVDNTNKLIVLSFRGSRSIENWITNLNFDLVDINDICSGCRGHDGFTSSWRSVADTLRQAVDDAVAAHPDYKVVVTGHSLGGALATLAGADLRNNGYDVDLYTYGAPRVGNRAFAEFITVQTGGTLYRVTHTNDVVPRLPPRQFGYSHPSPEYWIKSGTLVPVRERDIVKIEGIDATGGNNQNNTPDIPAHLWYFGLIGTC

SEQ ID NO: 15916 - protein, 268 aa, Thermomyces lanuginosus
DVSADLLNQFKLFAQYSAAAYCGRNNDAPAGTNITCSANACPLVEAADATFLYSFENSGVGDVTGFLAVDNTNKLIVLSFRGSRSIENWITNLNFDLVDINDICSGCRGHDGFTSSWRSVADTLRQAVDDAVAAHPDYKVVVTGHSLGGALATLAGADLRNNGYDVDLYTYGAPRVGNRAFAEFITVQTGGTLYRVTHTNDVVPRLPPRQFGYSHPSPEYWIKSGTLVPVRRRDIVKIEGIDATGGNNQNNTPSIPAHLWYFGLIGTC

SEQ ID NO: 15917 - protein, 268 aa, Thermomyces lanuginosus
DVSADLLNQFKLFAQYSAAAYCGRNNDAPAGTNITCSANACPLVEAADATFLYSFENSGVGDVTGFLAVQNTNKLIVLSFRGSRSIENWITNLNFDLVDINDICSGCRGHDGFTSSWRSVADTLRQAVDDAVAAHPDYKVVVTGHSLGGALATLAGADLRNNGYDVDLYTYGAPRVGNRAFAEFITVQTGGTLYRVTHTNDVVPRLPPRQFGYSHPSPEYWIKSGTLVPVRRRDIVKIEGIDATGGNNQNNTPDIPAHLWYFGLIGTC

SEQ ID NO: 15918 - protein, 268 aa, Thermomyces lanuginosus
DVSADLLNQFKLFAQYSAAAYCGRNNDAPAGTNITCSANACPLVEAADATFLYSFENSGVGDVTGFLAVDNTNKLIVLSFRGSRSIENWITNLNFDLVDINDICSGCRGHDGFTSSWRSVADTLRQAVDDAVAAHPDYKVVVTGHSLGGALATLAGADLRNDGYDVDLYTYGAPRVGNRAFAEFITVQTGGTLYRVTHTNDVVPRLPPRQFGYSHPSPEYWIKSGTLVPVRRRDIVKIEGIDATGGNNQNNTPDIPAHLWYFGLIGTC

SEQ ID NO: 15919 - protein, 268 aa, Thermomyces lanuginosus
DVSADLLNQFKLFAQYSAAAYCGRNNDAPAGTNITCSANACPLVEAADATFLYSFENSGVGDVTGFLAVDNTNKLIVLSFRGSRSIENWITNLNFDLVDINDICSGCRGHDGFTSSWRSVADTLRQAVDDAVAAHPDYKVVVTGHSLGGALATLAGADLRNNGYDVDLYTYGAPRVGNRAFAEFITVQTGGTLYRVTHTNDVVPRLPPRQSGYSHPSPEYWIKSGTLVPVRRRDIVKIEGIDATGGNNQNNTPDIPAHLWYFGLIGTC

SEQ ID NO: 15920 - protein, 268 aa, Thermomyces lanuginosus
DVSADLLNQFKLFAQYSAAAYCGRNNDAPAGTNITCSANACPLVEAADATILYSFENSGVGDVTGFLAVDNTNKLIVLSFRGSRSIENWITNLNFDLVDINDICSGCRGHDGFTSSWRSVADTLRQAVDDAVAAHPDYKVVVTGHSLGGALATLAGADLRNNGYDVDLYTYGAPRVGNRAFAEFITVQTGGTLYRVTHTNDVVPRLPPRQFGYSHPSPEYWIKSGTLVPVRRRDIVKIEGIDATGGNNQNNTPDIPAHLWYFGLIGTC

SEQ ID NO: 15921 - protein, 268 aa, Thermomyces lanuginosus
DVSADLLNQFKLFAQYSAAAYCGRNNDAPAGTNITCSANACPLVEAADATFLYSFENSGVGDVTGFLAVDNTNKLIVLSFRGSRSIENWITNLNFDLVDIDDICSGCRGHDGFTSSWRSVADTLRQAVDDAVAAHPDYKVVVTGHSLGGALATLAGADLRNNGYDVDLYTYGAPRVGNRAFAEFITVQTGGTLYRVTHTNDVVPRLPPRQFGYSHPSPEYWIKSGTLVPVRRRDIVKIEGIDATGGNNQNNTPDIPAHLWYFGLIGTC

SEQ ID NO: 15922 - protein, 268 aa, Thermomyces lanuginosus
DVSADLLNQFKLFAQYSAAAYCGRNNDAPAGTNITCSANACPLVEAADATFLYSFENSGVGDVTGFLAVDNTNKLIVLSFRGSRSIENWITNLNFDLVDINDICSGCRGHDGFTSSWRSVADTLRQAVDDAVAAHPDYKVVVTGHSLGGALATLAGADLRNNGYDVDLYTYGAPRVGNRAFAEFITVQTGGTLYRVTHTNDVVPRLPPRQFGYSHPSPEYWIKSGTLVPVRRRDIVKIEGIDATGGNNQNNTPDAPAHLWYFGLIGTC

SEQ ID NO: 15923 - protein, 268 aa, Thermomyces lanuginosus
DVSADLLNQFKLFAQYSAAAYCGRNNDAPAGTNITCSANACPLVEAADATFLYSFENSGVGDVTGFLAVDNTNKLIVLSFRGSRSIENWITNLNFDLVDIQDICSGCRGHDGFTSSWRSVADTLRQAVDDAVAAHPDYKVVVTGHSLGGALATLAGADLRNNGYDVDLYTYGAPRVGNRAFAEFITVQTGGTLYRVTHTNDVVPRLPPRQFGYSHPSPEYWIKSGTLVPVRRRDIVKIEGIDATGGNNQNNTPDIPAHLWYFGLIGTC

SEQ ID NO: 15924 - protein, 268 aa, Thermomyces lanuginosus
DVSADLLNQFKLFAQYSAAAYCGRNNDAPAGTNITCSANACPLVEAADATFLYSFENSGVGDVTGFLAVDNTNKLIVLSFRGSRSIENWITNLNFDLVDINDICSGCRGHDGFTSSWRSVADTLRQAVDDAVAAHPDYKVVVTGHSLGGALATLAGADLRNNGYDVDLYTYGAPRVGDRAFAEFITVQTGGTLYRVTHTNDVVPRLPPRQFGYSHPSPEYWIKSGTLVPVRRRDIVKIEGIDATGGNNQNNTPDIPAHLWYFGLIGTC

SEQ ID NO: 15925 - protein, 268 aa, Thermomyces lanuginosus
DVSADLLNQFKLFAQYSAAAYCGRNNDAPAGTNITCSANACPLVEAADATFLYSFENSGVGDVTGFLAVDNTNKLIVLSFRGSRSIENWITNLNFDLVDINDICSGCRGHDGFTSSWRSVADTLRQAVDQAVAAHPDYKVVVTGHSLGGALATLAGADLRNNGYDVDLYTYGAPRVGNRAFAEFITVQTGGTLYRVTHTNDVVPRLPPRQFGYSHPSPEYWIKSGTLVPVRRRDIVKIEGIDATGGNNQNNTPDIPAHLWYFGLIGTC

SEQ ID NO: 15926 - protein, 268 aa, Thermomyces lanuginosus
DVSADLLNQFKLFAQYSAAAYCGRNNDAPAGTNITCSANACPLVEAADATFLYSFENSGVGDVTGFLAVDNTNKLIVLSFRGSRSIENWITNLNFDLVDINDICSGCRGHDGFTSSWRSVADTLRQAVDDAVAAHPDYKVVVTGHSLGGALATLAGADLRNNGYDVDLYTYGAPRVGNRAFAEFITVQTGGTLYRVTHTNDVVPRLPPRQFDYSHPSPEYWIKSGTLVPVRRRDIVKIEGIDATGGNNQNNTPDIPAHLWYFGLIGTC

SEQ ID NO: 15927 - protein, 268 aa, Thermomyces lanuginosus
DVSADLLNQFKLFAQYSAAAYCGRNNDAPAGTNITCSANACPLVEAADATFLYSFENSGVGDVTGFLAVDNTNKLIVLSFRGSRSIENWITNLNFDLVDINDICSGCRGHDGFTSSWRSVADTLRQAVDDAVAAHPDYKVVVTGHSLGGALATLAGADLRNNGYDVDLYTYGAPRVGNRAFAEFITVQTGGTLYRVTHTNDVVPRLPPRQFGYSHPSPEYWIKSGTLPPVRRRDIVKIEGIDATGGNNQNNTPDIPAHLWYFGLIGTC

SEQ ID NO: 15928 - protein, 268 aa, Thermomyces lanuginosus
DVSADLLNQFKLFAQYSAAAYCGRNNDAPAGTNITCSANACPLVEAADATFLYSFENSGMGDVTGFLAVDNTNKLIVLSFRGSRSIENWIANLNFDLVDINDICSGCRGHDGFTSSWRSVADTLRQAVDDAVAAHPDYKVVVTGHSLGGALATLAGADLRNNGYDVDLYTYGAPRVGNRAFAEFITVQTGGTLYRVTHTNDVVPRLPPRQFGYSHPSPEYWIKSGTRVPVRRRDIVKIEGIDATGGNNQNNAPDIPAHLWYFGVIGTC

SEQ ID NO: 15929 - protein, 268 aa, Thermomyces lanuginosus
DVSADLLNQFKLFAQYSAAAYCGRNNDAPAGTNITCSANACPLVEAADATFLYSFENSGVGDVTGFLAVDNTNKLIVLSFRGSRSIENWITNLNFDLVDINDICSGCRGHDGFTSSWRSVADTLRQAVDDAVAAHPDYKVVVTGHSLGGALATLAGADLRNNGSDVDLYTYGAPRVGNRAFAEFITVQTGGTLYRVTHTNDVVPRLPPRQFGYSHPSPEYWIKSGTLVPVRRRDIVKIEGIDATGGNNQNNTPDIPAHLWYFGLIGTC

SEQ ID NO: 15930 - protein, 268 aa, Thermomyces lanuginosus
DVSADLLNQFKLFAQYSAAAYCGRNNDAPAGTNITCSANACPLVEAADATFLYSFENSGVGDVTGFLAVDNTNKLIVLSFRGSRSIENWITNLRFDLVDINDICSGCRGHDGFTSSWRSVADTLRQAVDDAVAAHPDYKVVVTGHSLGGALATLAGADLRNNGYDVDLYTYGAPRVGNRAFAEFITVQTGGTLYRVTHTNDVVPRLPPRQFGYSHPSPEYWIKSGTLVPVRRRDIVKIEGIDATGGNNQNNTPDIPAHLWYFGLIGTC

SEQ ID NO: 15931 - protein, 268 aa, Thermomyces lanuginosus
DVSADLLNQFKLFAQYSAAAYCGRNNDAPAGTNITCSANACPLVEAADATFLYSFENSGVGDVTGFLAVDNTNKLIVLSFRGSRSIENWITNLNFDLVDINDICSGCRGHDGFTSSWRSVADTLRQAVDDAVAAHPDYKVVVTGHSLGGALATLAGADLRNNGYDVDLYTYGAPRVGNREFAEFITVQTGGTLYRVTHTNDVVPRLPPRQFGYSHPSPEYWIKSGTLVPVRRRDIVKIEGIDATGGNNQNNTPDIPAHLWYFGLIGTC

SEQ ID NO: 15932 - protein, 268 aa, Thermomyces lanuginosus
DVSADLLNQFKLFAQYSAAAYCGRNNDAPAGTNITCSANACPLVEAADATFLYSFENSGVGDVTGFLAVDNTNKLIVLSFRGSRSIENWITNLNFDLVDINDICSGCRGHDGFTSSWRSVADTLRQAVDDAVAAHPDYKVVVTGHSLGGALATLAGADLRNEGYDVDLYTYGAPRVGNRAFAEFITVQTGGTLYRVTHTNDVVPRLPPRQFGYSHPSPEYWIKSGTLVPVRRRDIVKIEGIDATGGNNQNNTPDIPAHLWYFGLIGTC

SEQ ID NO: 15933 - protein, 268 aa, Thermomyces lanuginosus
DVSADLLNQFKLFAQYSAAAYCGRNNDAPAGTNITCSANACPLVEAADATFLYSFENSGVGDVTGFLAVDNTNKLIVLSFRGSRSIENWITNLNFDLVDINDICSGCRGHDGFTSSWRSVADTLRQAVDDAVAAHPDYKVVVTGHSLGGALATLAGAQLRNNGYDVDLYTYGAPRVGNRAFAEFITVQTGGTLYRVTHTNDVVPRLPPRQFGYSHPSPEYWIKSGTLVPVRRRDIVKIEGIDATGGNNQNNTPDIPAHLWYFGLIGTC

SEQ ID NO: 15934 - protein, 268 aa, Thermomyces lanuginosus
DVSADLLNQFKLFAQYSAAAYCGRNNDAPAGTNITCSANACPLVEAADATFLYSFENSGVGDVTGFLAVDNTNKLIVLSFRGSRSIENWITNLNFDLVDINDICSGCRGHDGFTSSWRSVADTLRQAVDDAVAAHPDYKVVVTGHSLGGALATLAGADLRNNGYDVDLYTYGAPRVGNRAFAEFITVQTGGTLYRVTHTNDVVPRLPPRQNGYSHPSPEYWIKSGTLVPVRRRDIVKIEGIDATGGNNQNNTPDIPAHLWYFGLIGTC

SEQ ID NO: 15935 - protein, 268 aa, Thermomyces lanuginosus
DVSEDLLNQFKLFAQYSAAAYCGRNNDAPAGTNITCSANACPLVEAADATFLYSFENSGVGDVTGFLAVDNTNKLIVLSFRGSRSIENWITNLNFDLVDINDICSGCRGHDGFTSSWRSVADTLRQAVDDAVAAHPDYKVVVTGHSLGGALATLAGADLRNNGYDVDLYTYGAPRVGNRAFAEFITVQTGGTLYRVTHTNDVVPRLPPRQVGYSHPSPEYWIKSGTLVPVRRRDIVKIEGIDATGGNNQNNTPDIPAHLWYFGLIGTC

SEQ ID NO: 15936 - protein, 268 aa, Thermomyces lanuginosus
DVSADLLNQFKLFAQYSAAAYCGRNNDAPAGTNITCSANACPLVEAADATFLYSFENSGVGDVTGFLAVDNTNKLIVLSFRGSRSIENWITNLNFDLVDINDICSGCRGHDGFTSSWRSVADTLRQAVDDAVAAHPDYKVVVTGHSLGGALATLAGADLRNNGYQVDLYTYGAPRVGNRAFAEFITVQTGGTLYRVTHTNDVVPRLPPRQFGYSHPSPEYWIKSGTLVPVRRRDIVKIEGIDATGGNNQNNTPDIPAHLWYFGLIGTC

SEQ ID NO: 15937 - protein, 268 aa, Thermomyces lanuginosus
DVSADLLNQFKLFAQYSAAAYCGRNNDAPAGTNITCSANACPLVEAADATFLYSFENSGMGDVTGFLAVDNTNKLIVLSFRGSRSIENWIANLNFDLVDINDICSGCRGHDGFTSSWRSVADTLRQAVDDAVAAHPDYKVVVTGHSLGGALATLAGADLRNNGYDVDLYTYGAPRVGNRAFAEFITVQTGGTLYRVTHTNDVVPRLPPRQFGYSHPSPEYWIKSGTVVPVRRRDIVKIEGIDATGGNNQNNAPDIPAHLWYFGMIGTC

SEQ ID NO: 15938 - protein, 267 aa, Thermomyces lanuginosus
VSADLLNQFKLFAQYSAAAYCGRNNDAPAGTNITCSANACPLVEAADATFLYSFENSGVGDVTGFLAVDNTNKLIVLSFRGSRSIENWITNLNFDLVDINDICSGCRGHDGFTSSWRSVADTLRQAVDDAVAAHPDYKVVVTGHSLGGALATLAGADLRNNGYDVDLYTYGAPRVGNRAFAEFITVQTGGTLYRVTHTNDCVPRLPPRQFGYSHPSPEYWIKSGTLVPVRRCDIVKCEGIDATCGNNQNNACDIPAHLWYFGAIGTC

SEQ ID NO: 15939 - protein, 268 aa, Thermomyces lanuginosus
DVSADLLNQFKLFAQYSAAAYCGRNNDAPAGTNITCSANACPLVNASDATFLYSFENSGVGDVTGFLAVDNTNKLIVLSFRGSRSIENWITNLNFDLVDINDICSGCRGHDGFTSSWRSVADTLRQAVDDAVAAHPDYKVVVTGHSLGGALATLAGADLRNNGYDVDLYTYGAPRVGNRAFAEFITVQTGGTLYRVTHTNDVVPRLPPRQFGYSHPSPEYWIKSGTLVPVRRRDIVKIEGIDATGGNNQNNTPDIPAHLWYFGLIGTC

SEQ ID NO: 15940 - protein, 268 aa, Thermomyces lanuginosus
DVSADLLNQFKLFAQYSAAAYCGRNNDAPAGTNITCSANACPLVEAADATFLYSFENSGMGDVTGFLAVDNTNKLIVLSFRGSRSIENWITNLNFDLVDINDICSGCRGHDGFTSSWRSVADTLRQAVDDAVAAHPDYKVVVTGHSLGGALATLAGADLRNNGYDVDLYTYGAPRVGNRAFAEFITVQTGGTLYRVTHTNDVVPRLPPRQFGYSHPSPEYWIKSGTGVPVRRRDIVKIEGIDATGGNNQNNTPDIPAHLWYFGVIGTC

SEQ ID NO: 15941 - protein, 268 aa, Thermomyces lanuginosus
DVSADLLNQFKLFAQYSAAAYCGRNNDAPAGTNITCSANACPLVEAADATFLYSFENSGVGDVTGFLAVDNNNSLIVLSFRGSRSIENWITNLNFDLVDINDICSGCRGHDGFTSSWRSVADTLRQAVDDAVAAHPDYKVVVTGHSLGGALATLAGADLRNNGYDVDLYTYGAPRVGNRAFAEFITVQTGGTLYRVTHTNDVVPRLPPRQFGYSHPSPEYWIKSGTLVPVRRRDIVKIEGIDATGGNNQNNTPDIPAHLWYFGLIGTC

SEQ ID NO: 15942 - protein, 268 aa, Thermomyces lanuginosus
DVSADLLNQFKLFAQYSAAAYCGRNNDAPAGTNITCSANACPLVEAADATFLYSFENSGMGDVTGFLAVDNTNKLIVLSFRGSRSIENWITNLNFDLVDINDICSGCRGHDGFTSSWRSVADTLRQAVDDAVAAHPDYKVVVTGHSLGGALATLAGADLRNNGYDVDLYTYGAPRVGNRAFAEFITVQTGGTLYRVTHTNDVVPRLPPRQFGYSHPSPEYWIKSGTGVPVRRRDIVKIEGIDATGGNNQNNTPDIPAHLWYFGIIGTC

SEQ ID NO: 15943 - protein, 268 aa, Thermomyces lanuginosus
DVSADLLNQFKLFAQYSAAAYCGRNNDAPAGTNITCSANACPLVEAADATFLYSFENSGVGDVTGFLAVDNTNKLIVLSFRGSRSIENWITNLNFDLVDINDICSGCRGHDGFTSSWRSVANTSRQAVDDAVAAHPDYKVVVTGHSLGGALATLAGADLRNNGYDVDLYTYGAPRVGNRAFAEFITVQTGGTLYRVTHTNDVVPRLPPRQFGYSHPSPEYWIKSGTLVPVRRRDIVKIEGIDATGGNNQNNTPDIPAHLWYFGLIGTC

SEQ ID NO: 15944 - protein, 268 aa, Thermomyces lanuginosus
DVSADLLNQFKLFAQYSAAAYCGRNNDAPAGTNITCSANACPLVEAADATFLYSFENSGVGDVTGFLAVDNTNKLIVLSFRGSRSIENWITNLNFDLVDINDICSGCRGHDGFTSSWRSVADTLRQAVDDAVAAHPDYKVVVTGHSLGGALATLAGADLRNNGYDVDLYTYGAPRVGNRAFAEFITVQTGGTLYRVTHTNDVVPRLPPRQFGYSHPSPEYWIKSGTLVPVRRRDIVKCEGIDATGCNNQNNTPDIPAHLWYFGLIGTC

SEQ ID NO: 15945 - protein, 268 aa, Thermomyces lanuginosus
DVSADLLNQFKLFAQYSAAAYCGRNNDAPAGTNITCSANACPLVEAADATFLYSFENSGVGDVTGFLAVDNTNKLIVLSFRGSRSIENWITNLNFDLVDINDICSGCRGHDGFTSSWRSVADTLRQAVDDAVAAHPDYKVVVTGHSLGGALATLAGADLRNNGYDVDLYTYGAPRVGNRAFAEFITVQTGGTLYRVTHTNDVVPRLPPRQVGYSHPSPEYWIKSGTGVPVRRRDIVKIEGIDATGGNNQNNTPDIPAHLWYFGLIGTC

SEQ ID NO: 15946 - protein, 268 aa, Thermomyces lanuginosus
DVSADLLNQFKLFAQYSAAAYCGRNNDAPAGTNITCSANACPLVEAADATFLYSFENSGVGDVTGFLAVDNTNKLIVLSFRGSRSIRNWITNLDFDLVDINDICSGCRGHDGFTSSWRSVADTLRQAVDDAVAAHPDYKVVVTGHSLGGALATLAGADLRNNGYDVDLYTYGAPRVGNRAFAEFITVQTGGTLYRVTHTNDVVPRLPPRQFGYSHPSPEYWIKSGTLVPVRRRDIVKIEGIDATGGNNQNNTPDIPAHLWYFGLIGTC

SEQ ID NO: 15947 - protein, 268 aa, Thermomyces lanuginosus
DVSADLLNQFKLFAQYSAAAYCGRNNDAPAGTNITCSANACPLVEAADATFLYSFENSGVGDVTGFLAVDNTNKLIVLSFRGSRSIENWITNLNFDLVDINDICDGCGGHDGFTSSWRSVADTLRQAVDDAVAAHPDYKVVVTGHSLGGALATLAGADLRNNGYDVDLYTYGAPRVGNRAFAEFITVQTGGTLYRVTHTNDVVPRLPPRQFGYSHPSPEYWIKSGTLVPVRRRDIVKIEGIDATGGNNQNNTPDIPAHLWYFGLIGTC

SEQ ID NO: 15948 - protein, 268 aa, Thermomyces lanuginosus
DVSRDLLNQFKLFAQYSAAAYCGRNNDAPAGTNITCSANACPLVEAADATFLYSFENSGMGDVTGFLAVDNTNKLIVLSFRGSRSIENWITNLNFDLVDINDICSGCRGHDGFTSSWRSVADTLRQAVDDAVAAHPDYKVVVTGHSLGGALATLAGADLRNNGYDVDLYTYGAPRVGNRAFAEFITVQTGGTLYRVTHTNDVVPRLPPRQFGYSHPSPEYWIKSGTGVPVRRRDIVKIEGIDATGGNNQNNTPDIPAHLWYFGLIGTC

SEQ ID NO: 15949 - protein, 268 aa, Thermomyces lanuginosus
DVSADLLNQFKLFAQYSAAAYCGRNNDAPAGTNITCSANACPLVEAADATFLYSFENSGVGDVTGFLAVDNTNKLIVLSFRGSRSIENWITNLNFDLVDINDICSGCRGHDGFTSSWRSVADNLSQAVDDAVAAHPDYKVVVTGHSLGGALATLAGADLRNNGYDVDLYTYGAPRVGNRAFAEFITVQTGGTLYRVTHTNDVVPRLPPRQFGYSHPSPEYWIKSGTLVPVRRRDIVKIEGIDATGGNNQNNTPDIPAHLWYFGLIGTC

SEQ ID NO: 15950 - protein, 268 aa, Thermomyces lanuginosus
DVSADLLNQFKLFAQYSAAAYCGRNNDAPAGTNITCSANACPLVEAADATFLYSFENSGVGDVTGFLAVDNTNKLIVLSFRGSRSIKNWITNLNYDLVDINDICSGCRGHDGFTSSWRSVADTLRQAVDDAVAAHPDYKVVVTGHSLGGALATLAGADLRNNGYDVDLYTYGAPRVGNRAFAEFITVQTGGTLYRVTHTNDVVPRLPPRQFGYSHPSPEYWIKSGTLVPVRRRDIVKIEGIDATGGNNQNNTPDIPAHLWYFGLIGTC

SEQ ID NO: 15951 - protein, 268 aa, Thermomyces lanuginosus
DVSADLLNQFKLFAQYSAAAYCGRNNDAPAGTNITCSANACPLVEAADATFLYSFENSGVGDVTGFLAVDNTNKLIVLSFRGSRSIENWITNLNFDLVDINDICSGCRGHDGFTSSWRSVADTLRQAVDDAVAAHPDYKVVVTGHSLGGALATLAGADLRNNGYDVDLYTYGAPRVGNRAFAEFITVQTGGTLYRVTHTNDVVPRLPPRQFGYSHPSPEYWIKSGTGAPVRRRDIVKIEGIDATGGNNQNNAPDIPAHLWYFGIIGTC

SEQ ID NO: 15952 - protein, 268 aa, Thermomyces lanuginosus
DVSADLLNQFKLFAQYSAAAYCGRNNDAPAGTNITCSANACPLVEAADATFLYSFENSGMGDVTGFLAVDNTNKLIVLSFRGSRSIENWITNLNFDLVDINDICSGCRGHDGFTSSWRSVADTLRQAVDDAVAAHPDYKVVVTGHSLGGALATLAGADLRNNGYDVDLYTYGAPRVGNRAFAEFITVQTGGTLYRVTHTNDVVPRLPPRQFGYSHPSPEYWIKSGTGVPVRRRDIVKIEGIDATGGNNQNNAPDIPAHLWYFGLIGTC

SEQ ID NO: 15953 - protein, 268 aa, Thermomyces lanuginosus
DVSADLLNQFKLFAQYSAAAYCGRNNDAPAGTNITCSANACPLVEAADATFLYSFENSGVGDVTGFLAVDNTNKLIVLSFRGSRSIENWITNLNFDLVDINDICSGCRGHDGFTSSWRSVADTLRQAVDDAVAAHPDYKVVVTGHSLGGALATLAGADLRNNGYNVSLYTYGAPRVGNRAFAEFITVQTGGTLYRVTHTNDVVPRLPPRQFGYSHPSPEYWIKSGTLVPVRRRDIVKIEGIDATGGNNQNNTPDIPAHLWYFGLIGTC

SEQ ID NO: 15954 - protein, 268 aa, Thermomyces lanuginosus
DVSADLLNQFKLFAQYSAAAYCGRNNDAPAGTNITCSANACPLVEAADATFLYSFENSGMGDVTGFLAVDNTNKLIVLSFRGSRSIENWITNLNFDLVDINDICSGCRGHDGFTSSWRSVADTLRQAVDDAVAAHPDYKVVVTGHSLGGALATLAGADLRNNGYDVDLYTYGAPRVGNRAFAEFITVQTGGTLYRVTHTNDVVPRLPPRQFGYSHPSPEYWIKSGTGVPVRRRDIVKIEGIDATGGNNQNNTPDIPAHLWYFGLIGTC

SEQ ID NO: 15955 - protein, 268 aa, Thermomyces lanuginosus
DVSADLLNQFKLFAQYSAAAYCGRNNDAPAGTNITCSANACPLVEAADATFLYSFENSGVGDVTGFLAVDNTNKLIVLSFRGSRSIENWITNLNFDLVDINDICSGCQGHDGFTSSWRSVADTLRQAVDDAVAAHPDYKVVVTGHSLGGALATLAGADLRNNGYDVDLYTYGAPRVGNEAFAEFITVQTGGTLYRVTHTNDVVPRLPPRQFEYSHPSPEYWIKSGTLVPVRRRDIVKIEGIDATGGNNQNNTPDIPAHLWYFGLIGTC

SEQ ID NO: 15956 - protein, 268 aa, Thermomyces lanuginosus
DVSADLLNQFKLFAQYSAAAYCGRNNDAPAGTNITCSANACPLVEAADATFLYSFENSGMGDVTGFLAVDNTNKLIVLSFRGSRSIENWITNLNFDLVDINDICSGCRGHDGFTSSWRSVADTLRQAVDDAVAAHPDYKVVVTGHSLGGALATLAGADLRNNGYDVDLYTYGAPRVGNRAFAEFITVQTGGTLYRVTHTNDVVPRLPPRQFGYSHPSPEYWIKSGTVPPVRRRDIVKIEGIDATGGNNQNNAPDIPAHLWYFGIIGTC

SEQ ID NO: 15957 - protein, 268 aa, Thermomyces lanuginosus
DVSADLLNQFKLFAQYSAAAYCGRNNDAPAGTNITCSANACPLVEAADATFLYSFENSGMGDVTGFLAVDNTNKLIVLSFRGSRSIENWITNLNFDLVNISDICSGCRGHDGFTSSWRSVADTLRQAVDDAVAAHPDYKVVVTGHSLGGALATLAGADLRNNGYDVDLYTYGAPRVGNRAFAEFITVQTGGTLYRVTHTNDVVPRLPPRQFGYSHPSPEYWIKSGTGVPVRRRDIVKIEGIDATGGNNQNNTPDIPAHLWYFGLIGTC

SEQ ID NO: 15958 - protein, 268 aa, Thermomyces lanuginosus
DVSADLLNQFKLFAQYSAAAYCGRNNDAPAGTNITCSANACPLVEAADATFLYSFENSGMGDVTGFLAVDNTNKLIVLSFRGSRSIENWITNLNFDLVDINDICSGCRGHDGFTSSWRSVADTLNQSVDDAVAAHPDYKVVVTGHSLGGALATLAGADLRNNGYDVDLYTYGAPRVGNRAFAEFITVQTGGTLYRVTHTNDVVPRLPPRQFGYSHPSPEYWIKSGTGVPVRRRDIVKIEGIDATGGNNQNNTPDIPAHLWYFGLIGTC

SEQ ID NO: 15959 - protein, 268 aa, Thermomyces lanuginosus
DVSADLLNQFKLFAQYSAAAYCGRNNDAPAGTNITCSANACPLVEAADATFLYSFENSGVGDVTGFLAVDNTNKLIVLSFRGSRSIENWITNLNFDLVDINDICSGCRGHDGFTSSWRSVADTLRQAVDDAVAAHPDYKVVVTGHSLGGALATLAGADLRNNGYDVDLYTYGAPRVGNRAFAEFITVQTGGTLYRVTNTNDVVPRLPPRQFGYSHPSPEYWIKSGTLVPVRRRDIVKIEGIDATGGNNQNNTPDITIHLWYFGLIGTC

SEQ ID NO: 15960 - protein, 268 aa, Thermomyces lanuginosus
DVSADLLNQFKLFAQYSAAAYCGRNNDAPAGTNITCSANACPLVEAADATFLYSFENSGMGDVTGFLAVDNTNKLIVLSFRGSRSIENWITNLNFDLVDINDICSGCRGHDGFTSSWRSVADTLRQAVDDAVAAHPDYKVVVTGHSLGGALATLAGADLRNNGYDVDLYTYGAPRVGNRAFAEFITVQTGGTLYRVTHTNDVVPRLPPRQFGYSHPSPEYWIKSGTGQPVRRRDIVKIEGIDATGGNNQNNTPDIPAHLWYFGLIGTC

SEQ ID NO: 15961 - protein, 268 aa, Thermomyces lanuginosus
DVSADLLNQFKLFAQYSAAAYCGRNNDAPAGTNITCSANACPLVEAADATFLYSFENSGMGDVTGFLAVDNTNKLIVLSFRGSRSIENWITNLNFDLVDINDICSGCRGHDGFTSSWRSVADTLRQAVDDAVAAHPDYKVVVTGHSLGGALATLAGADLRNNGYDVDLYTYGAPRVGNRAFAEFITVQTGGTLYRVTHTNDVVPRLPPRQFGYSHPSPEYWIKSGTGRPVRRRDIVKIEGIDATGGNNQNNTPDIPAHLWYFGTIGTC

SEQ ID NO: 15962 - protein, 268 aa, Thermomyces lanuginosus
DVSADLLNQFKLFAQYSAAAYCGRNNDAPAGTNITCSANACPLVEAADATFLYSFENSGVGDVTGFLAVDNTNKLIVLSFRGSRSIENWIANLNFDLVDINDICSGCRGHDGFTSSWRSVADTLRQAVDDAVAAHPDYKVVVTGHSLGGALATLAGADLRNNGYDVDLYTYGAPRVGNRAFAEFITVQTGGTLYRVTNTNDVVPRLPPRQFGYSHPSPEYWIKSGTLVPVRRRDIVKIEGIDATGGNNQNNTPSITIHLWYFGLIGTC

SEQ ID NO: 15963 - protein, 268 aa, Thermomyces lanuginosus
DVSADLLNQFKLFAQYSAAAYCGRNNDAPAGTNITCSANACPLVEAADATFLYSFENSGMGDVTGFLAVDNTNKLIVLSFRGSRSIENWITNLNFDLVDINDICSGCRGHDGFTSSWRSVADTLRQAVDDAVAAHPDYKVVVTGHSLGGALATLAGADLRNNGYDVDLYTYGAPRVGNRAFAEFITVQTGGTLYRVTHTNDVVPRLPPRQFGYSHPSPEYWIKSGTGLPVRRRDIVKIEGIDATGGNNQNNAPDIPAHLWYFGYIGTC

SEQ ID NO: 15964 - protein, 268 aa, Thermomyces lanuginosus
DVSADLLNQFKLFAQYSAAAYCGRNNDAPAGTNITCSANACPLVEAADATFLYSFENSGMGDVTGFLAVDNTNKLIVLSFRGSRSIENWITNLNFDLVDINDICSGCRGHDGFTSSWRNVSDTLRQAVDDAVAAHPDYKVVVTGHSLGGALATLAGADLRNNGYDVDLYTYGAPRVGNRAFAEFITVQTGGTLYRVTHTNDVVPRLPPRQFGYSHPSPEYWIKSGTGVPVRRRDIVKIEGIDATGGNNQNNTPDIPAHLWYFGLIGTC

SEQ ID NO: 15965 - protein, 268 aa, Thermomyces lanuginosus
DVSADLLNQFKLFAQYSAAAYCGRNNDAPAGTQITCSANACPLVEAADATFLYSFENSGMGDVTGFLAVDNTNKLIVLSFRGSRSIENWITNLNFDLVDINDICSGCRGHDGFTSSWRSVADTLRQAVDDAVAAHPDYKVVVTGHSLGGALATLAGADLRNNNYSVDLYTYGAPRVGNRAFAEFITVQTGGTLYRVTHTNDVVPRLPPRQFGYSHPSPEYWIKSGTGVPVRRRDIVKIEGIDATGGNNQNNTPDIPAHLWYFGLIGTC

SEQ ID NO: 15966 - protein, 269 aa, Thermomyces dupontii
EVSQDLLDLFNLFAQYSAAAYCAENNDAPVGSNVTCSENVCPKVEEADATFLYSFEDSGLGDVTGLLALDNTNKLIVLAFRGSRSIENWIGNLIVGLRDIDDICSGCEGHTGFVASWKSVANTLRGQVENAVKEHPDYRVVFTGHSLGGALATIAGAALRGNGYNIDVFSYGAPRVGNRAFAEFLTAQTGGTLYRITHTNDIVPRLPPRDWGYSHSSPEYWITSGNDAPVTANDIVKVEGIDSTDGNNQPNIPDIPSHLWYFGAIAECD

SEQ ID NO: 15967 - protein, 267 aa, Thermomyces lanuginosus; identical to SEQ ID NO: 10198

SEQ ID NO: 15968 - protein, 268 aa, Thermomyces lanuginosus
VPQDLLDQFELFSQYSAAAYCAANNHAPVGSDVTCSENVCPEVDAADATFLYSFEDSGLGDVTGLLALDNTNKLIVLSFRGTRSVENWIANLNADLTEISDICSGCEGHDGFVTSWRSVADTIREQVQNAVNEHPDYRVVFTGHSLGGALATIAAAALRGNGYNIDVFSYGAPRVGNRAFAEFLTAQTGGTLYRITHTNDIVPRLPPRDWGYSHSSPEYWVTSGNDVPVTANDITVVEGIDSTDGNNQGNIPDIPSHLWYFGPISECD

SEQ ID NO: 15969 - protein, 268 aa, Thermomyces lanuginosus
VPQDLLDQFELFSQYSAAAYCAANNHAPVGSDVTCSENVCPEVDAADATFLYSFEDSGLGDVTGLLALDNTNKLIVLSFRGSRSVENWIANLAADLTEISDICSGCEGHVGFVTSWRSVADTIREQVQNAVNEHPDYRVVFTGHSLGGALATIAAAALRGNGYNIDVFSYGAPRVGNRAFAEFLTAQTGGTLYRITHTNDIVPRLPPRDWGYSHSSPEYWVTSGNDVPVTANDITVVEGIDSTDGNNQGNIPDIPSHLWYFGPISECD

SEQ ID NO: 15970 - protein, 268 aa, Thermomyces lanuginosus
VPQDLLDQFELFSQYSAAAYCAANNHAPVGSDVTCSENVCPEVDAADATFLYSFEDLGLGDVTGLLALDNTNKLIVLSFRGTRSVENWIANLNADLTEISDICSGCEGHDGFVTSWRSVADTIREQVQNAVNEHPDYRVVFTGHSLGGALATIAAAALRGNGYNIDVFSYGAPRVGNRAFAEFLTAQTGGTLYRITHTNDIVPRLPPRDWGYSHSSPEYWVTSGNAVPVTANDITVVEGIDSTDGNNQGNIPDIPSHLWYFGPISECD

SEQ ID NO: 15971 - protein, 268 aa, Thermomyces lanuginosus
VPQDLLDQFELFSQYSAAAYCAANNHAPVGSDVTCSENVCPEVDAADATFLYSFEDMGLGDVTGLLALDNTNKLIVLSFRGTRSVENWIANLNADLTEISDICSGCEGHDGFVTSWRSVADTIREQVQNAVNEHPDYRVVFTGHSLGGALATIAAAALRGNGYNIDVFSYGAPRVGNRAFAEFLTAQTGGTLYRITHTNDIVPRLPPRDWGYSHSSPEYWVTSGNAVPVTANDITVVEGIDSTDGNNQGNIPDIPSHLWYFGPISECD

SEQ ID NO: 15972 - protein, 268 aa, Thermomyces lanuginosus
VPQDLLDQFELFSQYSAAAYCAANNHAPVGSDVTCSENVCPEVDAADATFLYSFEDLGLGDVTGLLALDNTNKLIVLSFRGTRSVENWIANLNADLTEISDICSGCEGHDGFVTSWRSVADTIREQVQNAVNEHPDYRVVFTGHSLGGALATIAAAALRGNGYNIDVFSYGAPRVGNRAFAEFLTAQTGGTLYRITHTNDIVPRLPPRDWGYSHSSPEYWVTSGNDVPVTANDITVVEGIDSTDGNNQGNIPDIPSHLWYFGPISECD

SEQ ID NO: 15973 - protein, 268 aa, Thermomyces lanuginosus
VPQDLLDQFELFSQYSAAAYCAANNHAPVGSDVTCSENVCPEVDAADATFLYSFEDSGLGDVTGLLALDNTNKLIVLSFRGTRSVENWIANLNADLTEISDICSGCEGHVGFVTSWRSVADTIREQVQNAVNEHPDYRVVFTGHSLGGALATIAAAALRGNGYNIDVFSYGAPRVGNRAFAEFLTAQTGGTLYRITHTNDIVPRLPPRDWGYSHSSPEYWVTSGNDVPVTANDITVVEGIDSTDGNNQGNIPDIPSHLWYFGPISECD

SEQ ID NO: 15974 - protein, 267 aa, Thermomyces lanuginosus; identical to SEQ ID NO: 10213

SEQ ID NO: 15975 - protein, 267 aa, Thermomyces lanuginosus; identical to SEQ ID NO: 10218

SEQ ID NO: 15976 - protein, 268 aa, Thermomyces ibadanensis
VPQDLLDQFELFSQYSAAAYCAANNHAPVGSDVTCSENVCPEVDAADATFLYSFEDSGLGDVTGLLALDNTNKLIVLSFRGSRSVENWIANLAADLTGISDICSGCEGHVGFVTSWRSVADTIREQVQNAVNEHPDYRVVFTGHSLGGALATIAAAALRGNGYNIDVFSYGAPRVGNRAFAEFLTAQTGGTLYRITHTNDIVPRLPPRDWGYSHSSPEYWVTSGNDVPVTANDITVVEGIDSTDGNNQGNTPDIPSHLWYFGPISECD

SEQ ID NO: 15977 - protein, 268 aa, Thermomyces lanuginosus
VPQDLLDQFELFSQYSAAAYCAANNHAPVGSDVTCSENVCPEVDAADATFLYSFEDSGLGDVTGLLALDNTNKLIVLSFRGSRSVENWIVNLAADLTEISDICSGCEGHVGFVTSWRSVADTIRERVQNAVNEHPDYRVVFTGHSLGGALATIAAAALRGNGYNIDVFSYGAPRVGNRAFAEFLTAQTGGTLYRITHTNDIVPRLPPRDWGYSHSSPEYWVTSGNDVPVTANDITVVEGIDSTDGNNQGNIPDIPSHLWYFGPISECD

SEQ ID NO: 15978 - protein, 268 aa, Thermomyces lanuginosus
VPQDLLDQFELFSQYSAAAYCAANNHAPVGSDVTCSENVCPEVDAADATFLYSFEDSGLGDVTGLLALDNTNKLIVLSFRGTRSVENWIANLAADLTEISDICSGCEGHVGFVTSWRSVADTIREQVQNAVNEHPDYRVVFTGHSLGGALATIAAAALRGNGYNIDVFSYGAPRVGNRAFAEFLTAQTGGTLYRITHTNDIVPRLPPRDWGYSHSSPEYWVTSGNDVPVTANDITVVEGIDSTDGNNQGNIPDIPSHLWYFGPISECD

SEQ ID NO: 15979 - protein, 610 aa, Aspergillus niger; identical to SEQ ID NO: 24

SEQ ID NO: 15980 - protein, 589 aa, Aspergillus niger
ERAEAEVASVAADLIVRALPNAPDGYTPSNVTCPSTRPSIRDASGISTNETEWLKVRRNATLTPMKNLLSRLNLTGFDTTSYINEHSSNISNIPNIAIAASGGGYRALTNGAGALKAFDSRSDNATNSGQLGGLLQAATYVSGLSGGSWLVGSMFVNNFSSIGELQASEKVWRFDKSLLEGPNFDHIQIVSTVEYWKDITEEVDGKANAGFNTSFTDYWGRALSYQLVNASDDKGGPDYTWSSIALMDDFKNGQYPMPIVVADGRNPGEIIVETNATVYEVNPWEFGSFDPSVYAFAPLQYLGSRFENGSIPDNGTCVSGFDNAGFIMGSSSTLFNQFLLQINSTSIPTILKDAFTDILEDLGERNDDIAVYSPNPFSGYRDSSEDYATAKDLDVVDGGEDGENIPLHPLIQPERAVDVIFAIDSSADTDYYWPNGTSLVATYERSLEPSIANGTAFPAVPDQNTFVNLGLNSRPTFFGCDPKNISGTAPLVIYLPNSPYTYDSNFSTFKLTYSDEERDSVITNGWNVVTRGNGTVDDNFPSCVACAILQRSTYRTNTSLPDICTTCFNDYCWNGTTNSTTPGAYEPSV

SEQ ID NO: 15981 - protein, 610 aa, Aspergillus niger
MKLPLFAAAAAGLANAASLPVERAEAEVASVAADLIVRALPNAPDGYTPSNVTCPSTRPSIRDASGISTNETEWLKVRRNATLTPMKNLLSRLNLTGFDTTSYINEHSSNISNIPNIAIAASGGGYRALTNGAGALKAFDSRSDNATNSGQLGGLLQAATYVSGLSGGSWLVGSMFVNNFSSIGELQASEKVWRFDKSLLEGPNFDHIQIVSTVEYWKDITEEVDGKANAGFNTSFTDYWGRALSYQLVNASDDKGGPDYTWSSIALMDDFKNGQYPMPIVVADGRNPGEIIVETNATVYEVNPWEFGSFDPSVYAFAPLQYLGSRFENGSIPDNGTCVSGFDNAGFIMGSSSTLFNQFLLQINSTSIPTILKDAFTDILEDLGERNDDIAVYSPNPFSGYRDSSEDYATAKDLDVVDGGEDGENIPLHPLIQPERAVDVIFAIDSSADTDYYWPNGTSLVATYERSLEPSIANGTAFPAVPDQNTFVNLGLNSRPTFFGCDPKNISGTAPLVIYLPNSPYTYDSNFSTFKLTYSDEERDSVITNGWNVVTRGNGTVDDNFPSCVACAILQALHYRTNTSLPDICTTCFNDYCWNGTTNSTTPGAYEPSV

SEQ ID NO: 15982 - protein, 209 aa, Thermochaetoides thermophila
LPTVPVEETASHLEARQSTTRNDLENGSSNNCPGVIFIFARASTEPGNMGISAGPNVANGLAVRYGSNLWVQGVGGPYTASLADNFLPAGTSRAAIEEAKRLFNLASTKCPNAAIVAGGYSQGTAVMSNAISELSSSVRDKIKGVVLFGYTKNLQNGGKIPNYPDDRLEVYCNVSDAVCWGTLFITPAHFLYTIESTVSAPQFLIRRIG

SEQ ID NO: 15983 - protein, 210 aa, Chaetomium olivicolor
AAVEVEQPAAEIEARQISSIRNDLETGSSSKCPRVIFIFARASTEPGNMGISAGPNVANGLAARYGSSLWVQGVGGPYTAGLAENFLPAGTSRAAIDEAKRMFNMANQKCPNAAIVAGGYSQGTAVMSNSISELSSTVRDQIKGVVLFGYTKNLQNGGRIPNFPSDRTEVYCNVSDAVCWGTLFIMPAHFLYTTDSAVDAPRYLISKIGA

SEQ ID NO: 15984 - protein, 210 aa, Chaetomium olivicolor
PAAVEVEQPAAEIEARQISSIRNDLETGSSSKCPRVIFIFARASTEPGNMGISAGPNVANGLAARYGSSLWVQGVGGPYTAGLAENFLPAGTSRAAIDEAKRMFNMANQKCPNAAIVAGGYSQGTAVMSNSISELSSTVRDQIKGVVLFGYTKNLQNGGRIPNFPSDRTEVYCNVSDAVCWGTLFIMPAHFLYTTDSAVDAPRYLISKIG

SEQ ID NO: 15985 - protein, 207 aa, Humicola hyalothermophila
PAAPAEDKIEARQLLRSTRTDLERGSSSNCPRVIFIFARASTEVGNMGLSAGPNVADGLENYYRNDLWVQGVGEPYSAGLAENFLPAGTSRAAIDEAKRLFTMAHDKCPNSAIVAGGYSQGTAVMSNSISELPSAIQNQIKGVVLFGYTKNLQNGGRIPNFPQDKTEVYCNVSDAVCWGTLFILPSHFLYTTESSVAAPLWLRSKIG

SEQ ID NO: 15986 - protein, 232 aa, Ascomycota
APTSVARQEGVSFPVTDVIDTGLSIEAYAQELEAGNVPEKTASAVSKRQFSGDTYNQLTDGTACRPVTVIYARGTTQEGNVGSPDSEGPTFFNALASRLGGAGRLAIQGVTYPANIFGFLAGGDANGATLMFDLINRCPSTKIVVSGYSQGAQLVHTATQRLSAAAAARVSAVVTFGDADRDESFGSVAASKTLIICHEGDNICENGIIITPQHRNYEIDAPAAAAFVASKV

SEQ ID NO: 15987 - protein, 208 aa, Thermochaetoides thermophila
PTVPVEETASHLEARQSTTRNDLENGSSNNCPGVIFIFARASTEPGNMGISAGPNVANGLAVRYGSNLWVQGVGGPYTASLADNFLPAGTSRAAIEEAKRLFNLASTKCPNAAIVAGGYSQGTAVMSNAISELSSSVRDKIKGVVLFGYTKNLQNGGKIPNYPDDRLEVYCNVSDAVCWGTLFITPAHFLYTIESTVSAPQFLIRRIG

SEQ ID NO: 15988 - protein, 208 aa, Ascomycota
APAVDVETRSIEARQSSSRTDLERGSSSNCPSVILIFARASGESGNMGGSAGPNVASGLDSRFRNDLWVQGVGGPYDASLSANFLPAGTSREAIDEAKRMFQMANDKCPNARVVAGGYSQGTAVMSNAISEVSSTIQNQIKGVVLFGYTKNQQNNGGIPNFPAAKTQVYCNTGDAVCRGSLYIAPSHFAYTTDSRVNAPRWLADKINS

SEQ ID NO: 15989 - protein, 208 aa, Myceliophthora
PTSPNASEIEARQLSSVRNELENGSSSNCPRVIFIFARASGEIGNMGLSAGPNVASVLERTYGNNIWVQGVGGPYTADLLDNALPAGTTRAAINEAKRLFQLANSKCPNAAVVAGGYSQGTAVMSNAISELAGTAAQEQIKGVVLFGYTKNLQNLGRIPNYPTDRTKVFCNIADLVCSGTLIVTPTHFLYTVESLTEAPRFLESKINA

SEQ ID NO: 15990 - protein, 208 aa, Humicola hyalothermophila
LPAAPAEDKIEARQLLRSTRTDLERGSSSNCPRVIFIFARASTEVGNMGLSAGPNVADGLENYYRNDLWVQGVGEPYSAGLAENFLPAGTSRAAIDEAKRLFTMAHDKCPNSAIVAGGYSQGTAVMSNSISELPSAIQNQIKGVVLFGYTKNLQNGGRIPNFPQDKTEVYCNVSDAVCWGTLFILPSHFLYTTESSVAAPLWLRSKIG

SEQ ID NO: 15991 - protein, 196 aa, Hypocrea virens
LSTTRNELESGSSSACPRVIFIFARASTETGNMAGGASAGPAVANALESHYGASQVWVQGVGGPYTADLASNFLPGGTSQAAINEARRLFNEANQKCPSSVIVAGGYSQGTAVMSGSISGLSSTVQNQIKGVVLFGYTQNFQNGGRIPNFPSSKLDVFCAATDAVCYGTLFILPAHFLYTDEAADEAPDFLISRIG

SEQ ID NO: 15992 - protein, 212 aa, unidentified
APVEVGLDTGVANLEARQSSTRNELESGSSSNCPKVIYIFARASTEPGNMGISAGPIVADALESRYGASQVWVQGVGGPYSADLASNFIIPEGTSRVAINEAKRLFTLANTKCPNSAVVAGGYSQGTAVMASSISELSSTIQNQIKGVVLSAITKNLQNLGRIPNFSTSKTEVYCALADAVCYGTLFILPAHFLYQADAATSAPRFLAARIG

SEQ ID NO: 15993 - protein, 208 aa, unidentified
APVEVETGVALETRQSSTRNELETGSSSACPKVIYIFARASTEPGNMGISAGPIVADALERIYGANDVWVQGVGGPYLADLASNFLPDGTSSAAINEARRLFTLANTKCPNAAIVSGGYSQGTAVMAGSISGLSTTIKNQIKGVVLFGYTKNLQNLGRIPNFETSKTEVYCDIADAVCYGTLFILPAHFLYQTDAAVAAPRFLQARIG

SEQ ID NO: 15994 - protein, 164 aa, Myceliophthora thermophila
GISAGPNVASVLEAAYGDNIWVQGVGGPYRAGLADNALPAGTTRAAIDEAKRLFNLANTKCPGAAVVAGGYSQGTAVVSNAIAELRGTGTATQEQIRGVVLFGYTKNLQNGGRVPDYPTDRTKVFCNVGDLVCSGTLIVAPAHFLYTAESLGEAPRFLQSKIDA

SEQ ID NO: 15995 - protein, 207 aa, Myceliophthora
LPTSPNASEIEARQLSSVRNELENGSSSNCPRVIFIFARASGEIGNMGLSAGPNVASVLERTYGNNIWVQGVGGPYTADLLDNALPAGTTRAAINEAKRLFQLANSKCPNAAVVAGGYSQGTAVMSNAISELAGTAAQEQIKGVVLFGYTKNLQNLGRIPNYPTDRTKVFCNIADLVCSGTLIVTPTHFLYTVESLTEAPRFLESKI

SEQ ID NO: 15996 - protein, 211 aa, Myceliophthora
LPTSPAEVSNAGEIEARQLASTRNDLENGDSANCPKAIFIFARASTEPGNMGISAGPNVASVLEAAYGDDIWVQGVGGPYRAGLADNALPAGTTRAAIDEAKRLFNLANTKCPGAAVVAGGYSQGTAVMSNAIAELRGTATQEQIRGVVLFGYTKNLQNGGRIPDYPTDRTKIFCNVGDLVCSGTLIVAPAHFLYTAESLGEAPRFLQSKI

SEQ ID NO: 15997 - protein, 211 aa, Myriococcum thermophilum
LPTSPAEVSNAGEIEARQLSSTRNDLENGNSANCPKAIFIFARASTEPGNMGISAGPNVASVLELAYGDDIWVQGVGGPYEARLIDNALPAGTTRAAIDEAKRLFNLANSKCPDAAVVAGGYSQGTAVMSNAISELAGTATQEQIRGVVLFGYTKNLQNRGRIPNYPTDRTKVFCNIGDLVCAGTLIVAPSHFLYTTESLGEAPRFLRSQI

SEQ ID NO: 15998 - protein, 214 aa, Thermothelomyces thermophilus
PTSPAEVSSAGEIEARQLASTRNELENGDSANCPKAIFIFARASTEPGNMGISAGPNVASVLEAAYGDNIWVQGVGGPYRAGLADNALPAGTTRAAIDEAKRLFNLANTKCPGAAVVAGGYSQGTAVVSNAIAELRGTGTATQEQIRGVVLFGYTKNLQNGGRVPDYPTDRTKVFCNVGDLVCSGTLIVAPAHFLYTAESLGEAPRFLQSKIDA

SEQ ID NO: 15999 - protein, 212 aa, Myceliophthora
PTSPAEVSNAGEIEARQLASTRNDLENGDSANCPKAIFIFARASTEPGNMGISAGPNVASVLEAAYGDDIWVQGVGGPYRAGLADNALPAGTTRAAIDEAKRLFNLANTKCPGAAVVAGGYSQGTAVMSNAIAELRGTATQEQIRGVVLFGYTKNLQNGGRIPDYPTDRTKIFCNVGDLVCSGTLIVAPAHFLYTAESLGEAPRFLQSKIDA

SEQ ID NO: 16000 - protein, 162 aa, Myceliophthora thermophila
GISAGPNVASVLEAAYGDNIWVQGVGGPYRAGLADNALPAGTTRAAIDEAKRLFNLANTKCPGAAVVAGGYSQGTAVVSNAIAELRGTGTATQEQIRGVVLFGYTKNLQNGGRVPDYPTDRTKVFCNVGDLVCSGTLIVAPAHFLYTAESLGEAPRFLQSKI

SEQ ID NO: 16001 - protein, 213 aa, Myceliophthora thermophila
LPTSPAEVSSAGEIEARQLASTRNELENGDSANCPKAIFIFARASTEPGNMGISAGPNVASVLEAAYGDNIWVQGVGGPYRAGLADNALPAGTTRAAIDEAKRLFNLANTKCPGAAVVAGGYSQGTAVVSNAIAELRGTGTATQEQIRGVVLFGYTKNLQNGGRVPDYPTDRTKVFCNVGDLVCSGTLIVAPAHFLYTAESLGEAPRFLQSKI

SEQ ID NO: 16002 - protein, 212 aa, Myriococcum thermophilum
PTSPAEVSNAGEIEARQLSSTRNDLENGNSANCPKAIFIFARASTEPGNMGISAGPNVASVLELAYGDDIWVQGVGGPYEARLIDNALPAGTTRAAIDEAKRLFNLANSKCPDAAVVAGGYSQGTAVMSNAISELAGTATQEQIRGVVLFGYTKNLQNRGRIPNYPTDRTKVFCNIGDLVCAGTLIVAPSHFLYTTESLGEAPRFLRSQIDA

SEQ ID NO: 16003 - protein, 200 aa, Trichoderma virens
MEYNLSTTRNELESGSSSACPRVIFIFARASTETGNMAGGASAGPAVANALESHYGASQVWVQGVGGPYTADLASNFLPGGTSQAAINEARRLFNEANQKCPSSVIVAGGYSQGTAVMSGSISGLSSTVQNQIKGVVLFGYTQNFQNGGRIPNFPSSKLDVFCAATDAVCYGTLFILPAHFLYTDEAADEAPDFLISRIG

SEQ ID NO: 16004 - protein, 202 aa, unidentified
APVEVETGVALETRQSSTRNELETGSSSACPKVIYIFARASTEPGNMGISAGPIVADALERIYGANNVWVQGVGGPYLADLASNFLPDGTSSAAINEARRLFTLANTKCPNAAIVSGGYSQGTAVMAGSISGLSTTIKNQIKGVVLFGYTKNLQNLGRIPNFETSKTEVYCDIADAVCYGTLFILPAHFLYQTDAAVAAPRF

SEQ ID NO: 16005 - protein, 245 aa, Bacillus thuringiensis; identical to SEQ ID NO: 33

SEQ ID NO: 16006 - protein, 245 aa, Bacillus cereus
WSAEDKHKEGVNSHLWIVNRAIDIMSRNTTLVKQDRVAQLNEWRTELENGIYAADYENPYYDNSTFASHFYDPDNGKTYIPFAKQAKETGAKYFKLAGESYKNKDMKQAFFYLGLSLHYLGDVNQPMHAANFTNLSYPQGFHSKYENFVDTIKDNYKVTDGNGYWNWKGTNPEEWIHGAAVVAKQDYSGIVNDNTKDWFVKAAVSQEYADKWRAEVTPMTGKRLMDAQRVTAGYIQLWFDTYGDR

SEQ ID NO: 16007 - protein, 245 aa, Bacillus anthracis
WSAEDKHKEGVNSHLWIVNRAIDIMSRNTTLVKQDRVAQLNEWRTELENGIYAADYENPYYDNSTFASHFYDPDNGKTYIPFAKQAKETGAKYFKLAGESYKNKDMKQAFFYLGLSLHYLGDVNQPMHAANFTNLSYPQGFHSKYENFVDTIKDNHKVTDGNGYWNWKGTNPEDWIHGAAVVAKQDYSGIVNDNTKDWFVKAAVSQEYADKWRAEVTPMTGKRLMDAQRVTAGYIQLWFDTYGDR

SEQ ID NO: 16008 - protein, 245 aa, Bacillus cereus
WSAEDKHKEGVNSHLWIVNRAIDIMSRNTTLVKQDRVAQLNEWRTELENGIYAADYENPYYDSSTFASHFYDPDNGKTYIPFAKQAKETGAKYFKLAGESYKNKDMKQAFFYLGLSLHYLGDVNQPMHAANFTNLSYPQGFHSKYENFVDTIKDNYKVTDGNGYWNWKGTNPEEWIHGAAVVAKQDYSGIVNDNTKDWFVKAAVSQEYADKWRAEVTPMTGKRLMDAQRVTAGYIQLWFDTYGDR

SEQ ID NO: 16009 - protein, 245 aa, Bacillus cereus
WSAEDKHKEGVNSHLWIVNRAIDIMSRNTTLVKQDRVAQLNEWRTELENGIYAADYENPYYDESTFASHFYDPDNGKTYIPFAKQAKETGAKYFKLAGESYKNKDMKQAFFYLGLSLHYLGDVNQPMHAANFTNLSYPQGFHSKYENFVDTIKDNYKVTDGNGYWNWKGTNPEEWIHGAAVVAKQDYSGIVNDNTKDWFVKAAVSQEYADKWRAEVTPMTGKRLMDAQRVTAGYIQLWFDTYGDR

SEQ ID NO: 16010 - protein, 245 aa, Bacillus cereus
WSAEDKHKEGVNSHLWIVNRAIDIMSRNTTLVKQDRVAQLNEWRTELENGIYAADYENPYYDISTFASHFYDPDNGKTYIPFAKQAKETGAKYFKLAGESYKNKDMKQAFFYLGLSLHYLGDVNQPMHAANFTNLSYPQGFHSKYENFVDTIKDNYKVTDGNGYWNWKGTNPEEWIHGAAVVAKQDYSGIVNDNTKDWFVKAAVSQEYADKWRAEVTPMTGKRLMDAQRVTAGYIQLWFDTYGDR

SEQ ID NO: 16011 - protein, 245 aa, Bacillus cereus
WSAEDKHKEGVNSHLWIVNRAIDIMSRNTTLVKQDRVAQLNEWRTELENGIYAADYENPYYDPSTFASHFYDPDNGKTYIPFAKQAKETGAKYFKLAGESYKNKDMKQAFFYLGLSLHYLGDVNQPMHAANFTNLSYPQGFHSKYENFVDTIKDNYKVTDGNGYWNWKGTNPEEWIHGAAVVAKQDYSGIVNDNTKDWFVKAAVSQEYADKWRAEVTPMTGKRLMDAQRVTAGYIQLWFDTYGDR

SEQ ID NO: 16012 - protein, 245 aa, Bacillus cereus
WSAEDKHKEGVNSHLWIVNRAIDIMSRNTTLVKQDRVAQLNEWRTELENGIYAADYENPYYDWSTFASHFYDPDNGKTYIPFAKQAKETGAKYFKLAGESYKNKDMKQAFFYLGLSLHYLGDVNQPMHAANFTNLSYPQGFHSKYENFVDTIKDNYKVTDGNGYWNWKGTNPEEWIHGAAVVAKQDYSGIVNDNTKDWFVKAAVSQEYADKWRAEVTPMTGKRLMDAQRVTAGYIQLWFDTYGDR

SEQ ID NO: 16013 - protein, 245 aa, Bacillus cereus
WSAEDKHKEGVNSHLWIVNRAIDIMSRNTTLVKQDRVAQLNEWRTELENGIYAADYENPYYDQSTFASHFYDPDNGKTYIPFAKQAKETGAKYFKLAGESYKNKDMKQAFFYLGLSLHYLGDVNQPMHAANFTNLSYPQGFHSKYENFVDTIKDNYKVTDGNGYWNWKGTNPEEWIHGAAVVAKQDYSGIVNDNTKDWFVKAAVSQEYADKWRAEVTPMTGKRLMDAQRVTAGYIQLWFDTYGDR

SEQ ID NO: 16014 - protein, 245 aa, Bacillus cereus
WSAEDKHKEGVNSHLWIVNRAIDIMSRNTTLVKQDRVAQLNEWRTELENGIYAADYENPYYDLSTFASHFYDPDNGKTYIPFAKQAKETGAKYFKLAGESYKNKDMKQAFFYLGLSLHYLGDVNQPMHAANFTNLSYPQGFHSKYENFVDTIKDNYKVTDGNGYWNWKGTNPEEWIHGAAVVAKQDYSGIVNDNTKDWFVKAAVSQEYADKWRAEVTPMTGKRLMDAQRVTAGYIQLWFDTYGDR

SEQ ID NO: 16015 - protein, 245 aa, Bacillus cereus
WSAEDKHKEGVNSHLWIVNRAIDIMSRNTTLVKQDRVAQLNEWRTELENGIYAADYENPYYDKSTFASHFYDPDNGKTYIPFAKQAKETGAKYFKLAGESYKNKDMKQAFFYLGLSLHYLGDVNQPMHAANFTNLSYPQGFHSKYENFVDTIKDNYKVTDGNGYWNWKGTNPEEWIHGAAVVAKQDYSGIVNDNTKDWFVKAAVSQEYADKWRAEVTPMTGKRLMDAQRVTAGYIQLWFDTYGDR

SEQ ID NO: 16016 - protein, 245 aa, Bacillus licheniformis
WSAEDKHKEGVNSHLWIVNRAIDIMSRNTTLVKQDRVAELNEWRTELENGIYAADYENPYYDNSTFASHFYDPDNGKTYIPFAKQAKETGAKYFKLAGESYKNKDMKQAFFYLGLSLHYLGDVNQPMHAANFTNLSYPQGFHSKYENFVDTIKDNYKVTDGNGYWNWKGTNPEEWIHGAAVVAKQDYSGIVNDNTKDWFVKAAVSQEYADKWRAEVTPMTGKRLMDAQRVTAGYIQLWFDTYGDR

SEQ ID NO: 16017 - protein, 245 aa, Bacillus cereus
WSAEDKHKEGVNSHLWIVNRAIDIMSRNTTLVKQDRVAQLNEWRTELENGIYAADYENPYYDASTFASHFYDPDNGKTYIPFAKQAKETGAKYFKLAGESYKNKDMKQAFFYLGLSLHYLGDVNQPMHAANFTNLSYPQGFHSKYENFVDTIKDNYKVTDGNGYWNWKGTNPEEWIHGAAVVAKQDYSGIVNDNTKDWFVKAAVSQEYADKWRAEVTPMTGKRLMDAQRVTAGYIQLWFDTYGDR

SEQ ID NO: 16018 - protein, 245 aa, Bacillus cereus
WSAEDKHKEGVNSHLWIVNRAIDIMSRNTTLVKQDRVAQLNEWRTELENGIYAADYENPYYDMSTFASHFYDPDNGKTYIPFAKQAKETGAKYFKLAGESYKNKDMKQAFFYLGLSLHYLGDVNQPMHAANFTNLSYPQGFHSKYENFVDTIKDNYKVTDGNGYWNWKGTNPEEWIHGAAVVAKQDYSGIVNDNTKDWFVKAAVSQEYADKWRAEVTPMTGKRLMDAQRVTAGYIQLWFDTYGDR

SEQ ID NO: 16019 - protein, 245 aa, Bacillus cereus
WSAEDKHKEGVNSHLWIVNRAIDIMSRNTTLVKQDRVAQLNEWRTELENGIYAADYENPYYDNSTFASHFYDPDNGKTYIPFDKQAKETGAKYFKLAGESYKNKDMKQAFFYLGLSLHYLGDVNQPMHAANFTNLSYPQGFHSKYENFVDTIKDNYKVTDGNGYWNWKGTNPEEWIHGAAVVAKQDYSGIVNDNTKDWFVKAAVSQEYADKWRAEVTPMTGKRLMDAQRVTAGYIQLWFDTYGDR

SEQ ID NO: 16020 - protein, 245 aa, Bacillus cereus
WSAEDKHKEGVNSHLWIVNHAIDIMSRNTTLVKQDRVAQLNEWRTELENGIYAADYENPYYDNSTFASHFYDPDNGKTYIPFAKQAKETGAKYFKLAGESYKNKDMKQAFFYLGLSLHYLGDVNQPMHAANFTNLSYPQGFHSKYENFVDTIKDNYKVTDGNGYWNWKGTNPEEWIHGAAVVAKQDYSGIVNDNTKDWFVKAAVSQEYADKWRAEVTPMTGKRLMDAQRVTAGYIQLWFDTYGDR

SEQ ID NO: 16021 - protein, 245 aa, Bacillus cereus
WSAEDKHKEGVNSHLWIVNRAIDIMSRNTTLVKQDRVAQLNEWRTELENGIYAADYENPYYDHSTFASHFYDPDNGKTYIPFAKQAKETGAKYFKLAGESYKNKDMKQAFFYLGLSLHYLGDVNQPMHAANFTNLSYPQGFHSKYENFVDTIKDNYKVTDGNGYWNWKGTNPEEWIHGAAVVAKQDYSGIVNDNTKDWFVKAAVSQEYADKWRAEVTPMTGKRLMDAQRVTAGYIQLWFDTYGDR

SEQ ID NO: 16022 - protein, 245 aa, Bacillus cereus
WSAEDKHKEGVNSHLWIVNRAIDIMSRNTTLVKQDRVAQLNEWRTELENGIYAADYENPYYDTSTFASHFYDPDNGKTYIPFAKQAKETGAKYFKLAGESYKNKDMKQAFFYLGLSLHYLGDVNQPMHAANFTNLSYPQGFHSKYENFVDTIKDNYKVTDGNGYWNWKGTNPEEWIHGAAVVAKQDYSGIVNDNTKDWFVKAAVSQEYADKWRAEVTPMTGKRLMDAQRVTAGYIQLWFDTYGDR

SEQ ID NO: 16023 - protein, 245 aa, Bacillus cereus
WSAEDKHKEGVNSHLWIVNRAIDIMSRNTTLVKQDRVAQLNEWRTELENGIYAADYENPYYDGSTFASHFYDPDNGKTYIPFAKQAKETGAKYFKLAGESYKNKDMKQAFFYLGLSLHYLGDVNQPMHAANFTNLSYPQGFHSKYENFVDTIKDNYKVTDGNGYWNWKGTNPEEWIHGAAVVAKQDYSGIVNDNTKDWFVKAAVSQEYADKWRAEVTPMTGKRLMDAQRVTAGYIQLWFDTYGDR

SEQ ID NO: 16024 - protein, 245 aa, Bacillus cereus
WSAEDKHKEGVNSHLWIVNRAIDIMSRNTTLVKQDRVAQLNEWRTELENGIYAADYENPYYDFSTFASHFYDPDNGKTYIPFAKQAKETGAKYFKLAGESYKNKDMKQAFFYLGLSLHYLGDVNQPMHAANFTNLSYPQGFHSKYENFVDTIKDNYKVTDGNGYWNWKGTNPEEWIHGAAVVAKQDYSGIVNDNTKDWFVKAAVSQEYADKWRAEVTPMTGKRLMDAQRVTAGYIQLWFDTYGDR

SEQ ID NO: 16025 - protein, 245 aa, Bacillus cereus
WSAEDKHKEGVNSHLWIVNRAIDIMSRNTTLVKQDRVAQLNEWRTELENGIYAADYENPYYDYSTFASHFYDPDNGKTYIPFAKQAKETGAKYFKLAGESYKNKDMKQAFFYLGLSLHYLGDVNQPMHAANFTNLSYPQGFHSKYENFVDTIKDNYKVTDGNGYWNWKGTNPEEWIHGAAVVAKQDYSGIVNDNTKDWFVKAAVSQEYADKWRAEVTPMTGKRLMDAQRVTAGYIQLWFDTYGDR

SEQ ID NO: 16026 - protein, 245 aa, Bacillus cereus
WSAEDKHKEGVNSHLWIVNRAIDIMSRNTTLVKQDRVAQLNEWRTELENGIYAADYENPYYDDSTFASHFYDPDNGKTYIPFAKQAKETGAKYFKLAGESYKNKDMKQAFFYLGLSLHYLGDVNQPMHAANFTNLSYPQGFHSKYENFVDTIKDNYKVTDGNGYWNWKGTNPEEWIHGAAVVAKQDYSGIVNDNTKDWFVKAAVSQEYADKWRAEVTPMTGKRLMDAQRVTAGYIQLWFDTYGDR

SEQ ID NO: 16027 - protein, 245 aa, Bacillus cereus
WSAEDKHKEGVNSHLWIVNRAIDIMSRNTTLVKQDRVAQLNEWRTELENGIYAADYENPYYDRSTFASHFYDPDNGKTYIPFAKQAKETGAKYFKLAGESYKNKDMKQAFFYLGLSLHYLGDVNQPMHAANFTNLSYPQGFHSKYENFVDTIKDNYKVTDGNGYWNWKGTNPEEWIHGAAVVAKQDYSGIVNDNTKDWFVKAAVSQEYADKWRAEVTPMTGKRLMDAQRVTAGYIQLWFDTYGDR

SEQ ID NO: 16028 - protein, 245 aa, Bacillus cereus
WSAEDKHKEGVNSHLWIVNRAIDIMSRNTTLVKQDRVAQLNEWRTELENGIYAADYENPYYDVSTFASHFYDPDNGKTYIPFAKQAKETGAKYFKLAGESYKNKDMKQAFFYLGLSLHYLGDVNQPMHAANFTNLSYPQGFHSKYENFVDTIKDNYKVTDGNGYWNWKGTNPEEWIHGAAVVAKQDYSGIVNDNTKDWFVKAAVSQEYADKWRAEVTPMTGKRLMDAQRVTAGYIQLWFDTYGDR

SEQ ID NO: 16029 - protein, 245 aa, Bacillus cereus
WSAEDKHKEGVNSHLWIVNRAIDIMSRNTTLVKQDRVAQLNEWRTELENGIYAADYENPYYDCSTFASHFYDPDNGKTYIPFAKQAKETGAKYFKLAGESYKNKDMKQAFFYLGLSLHYLGDVNQPMHAANFTNLSYPQGFHSKYENFVDTIKDNYKVTDGNGYWNWKGTNPEEWIHGAAVVAKQDYSGIVNDNTKDWFVKAAVSQEYADKWRAEVTPMTGKRLMDAQRVTAGYIQLWFDTYGDR

SEQ ID NO: 16030 - protein, 245 aa, Bacillus wiedmannii
WSAEDKHKEGVNSHLWIVNRAIDIMSRNTTLVKQDRVTQLNEWRTELENGIYAADYENPYYDNSTFASHFYDPDNGKTYIPLAKQAKETGAKYFKLAGESYKNKDMKQAFFYLGLSLHYLGDVNQPMHAANFTNLSYPQGFHSKYENFVDTIKDNYKVTDGNGYWNWKGTNPEEWIHGAAVVAKQDYSGIVNDNTKDWFVKAAVSQEYADKWRAEVTPMTGKRLMDAQRVTAGYIQLWFDTYGDR

SEQ ID NO: 16031 - protein, 245 aa, Bacillus cereus
WSAEDKHKEGVNSHLWIVNRAIDIMSRNTTLVKQDRVAQLNEWRTELENGIYAADYENPYYDNSTFASHFYDPDNGKTYIPRAKQAKETGAKYFKLAGESYKNKDMKQAFFYLGLSLHYLGDVNQPMHAANFTNLSYPPGFHSKYENFVDTIKDNYKVTDGNGYWNWKGTNPEDWIHGAAVVAKQDYSGIVNDNTKDWFVKAAVSQEYADKWRAEVTPMTGKRLMDAQRVTAGYIQLWFDTYGNR

SEQ ID NO: 16032 - protein, 245 aa, Bacillus cereus
WSAEDKHKEGVNSHLWIVNHAIDIMSRNTTLVKQDRVAQLNEWRTELENGIYAADYENPYYDSSTFASHFYDPDNGKTYIPFDKQAKETGAKYFKLAGESYKNKDMKQAFFYLGLSLHYLGDVNQPMHAANFTNLSYPQGFHSKYENFVDTIKDNYKVTDGNGYWNWKGTNPEEWIHGAAVVAKQDYSGIVNDNTKDWFVKAAVSQEYADKWRAEVTPMTGKRLMDAQRVTAGYIQLWFDTYGDR

SEQ ID NO: 16033 - protein, 245 aa, Bacillus cereus
WSAEDKHKEGVNSHLWIVNRAIDIMSRNTTLVKQDRVAQLNEWRTELENGIYAADYENPYYDDSTFASHFYDPDNGKTYIPFAKQAKETGAKYFKLAGESYKNKDMKQAFFYLGLSLHYLGDVNQPMHAASFTDLSYPQGFHSKYENFVDTIKDNYKVTDGNGYWNWKGTNPEEWIHGAAVVAKQDYSGIVNDNTKDWFVKAAVSQEYADKWRAEVTPMTGKRLMDAQRVTAGYIQLWFDTYGDR

SEQ ID NO: 16034 - protein, 245 aa, Bacillus cereus
WSAEDKHKEGVNSHLWIVNRAIDIMSRNKTLVKQDRVALLNEWRTELENGIYAADYENPYYDNSTFASHFYDPDNGKTYIPYAKQAKETGAKYFKLAGESYKNKDMKQAFFYLGLSLHYLGDVNQPMHAANFTNLSYPQGFHSKYENFVDTIKDNYKVTDGNGYWNWKGTNPEDWIHGAAVVAKQDYAGIVNDNTKDWFVRAAVSQEYADKWRAEVTPMTGKRLMDAQRVTAGYIQLWFDTYGDR

SEQ ID NO: 16035 - protein, 245 aa, Bacillus thuringiensis
WSAEDKHKEGVNSHLWIVNRAIDIMSRNTTLVKQDRVALLNEWRTELENGIYAADYENPYYDNSTFASHFYDPDNGKTYIPYAKQAKETGAKYFKLAGESYKNKDMQQAFFYLGLSLHYLGDVNQPMHAANFTNLSYPQGFHSKYENFVDTIKDNYKVTDGNGYWNWKGTNPEDWIHGAAVVAKQDYAGIVNDNTKDWFVRAAVSQEYADKWRAEVTPMTGKRLMDAQRVTAGYIQLWFDTYGDR

SEQ ID NO: 16036 - protein, 245 aa, Bacillus thuringiensis
WSAEDKHKEGVNSHLWIVNRAIDIMSRNTTLVKQDRVALLNEWRTELENGIYAADYENPYYDNSTFASHFYDPDNGKTYIPYAKQAKETGAKYFKLAGESYKNKDMKQAFFYLGLSLHYLGDVNQPMHAANFTNLSYPQGFHSKYENFVDTIKDNYKVTDGNGYWNWKGTNPEDWIHGAAVVAKQDYAGIVNDNTKDWFVRAAVSQEYADKWRAEVTPMTGKRLMDAQRVTAGYIQLWFDTYGNR

SEQ ID NO: 16037 - protein, 245 aa, Bacillus cereus
WSAEDKHKEGVNSHLWIVNRAIDIMSRNTTLVKQDRVAQLNEWRTELENGIYAADWENPYYDDSTFASHFYDPDNGKTYIPFAKQAKETGAKYFKLAGESYKNKDMKQAFFYLGLSLHYLGDVNQPMHAASFTDLSYPQGFHSKYENFVDTIKDNYKVTDGNGYWNWKGTNPEEWIHGAAVVAKQDYSGIVNDNTKDWFVKAAVSQEYADKWRAEVTPMTGKRLMDAQRVTAGYIQLWFDTYGDR

SEQ ID NO: 16038 - protein, 245 aa, Bacillus cereus
WSAEDKHKEGVNSHLWIVNRAIDIMSRNTTLVKQDRVAQLNEWRTELENGIYAADXENPYYDDSTFASHFYDPDNGKTYIPFAKQAKETGAKYFKLAGESYKNKDMKQAFFYLGLSLHYLGDVNQPMHAASFTDLSYPQGFHSKYENFVDTIKDNYKVTDGNGYWNWKGTNPEEWIHGAAVVAKQDYSGIVNDNTKDWFVKAAVSQEYADKWRAEVTPMTGKRLMDAQRVTAGYIQLWFDTYGDR

SEQ ID NO: 16039 - protein, 245 aa, Bacillus cereus
WSAEDKHKEGVNSHLWIVNRAIDIMSRNTTLVKQDRVAQLNEWRTELENGIYAADHENPYYDDSTFASHFYDPDNGKTYIPFAKQAKETGAKYFKLAGESYKNKDMKQAFFYLGLSLHYLGDVNQPMHAASFTDLSYPQGFHSKYENFVDTIKDNYKVTDGNGYWNWKGTNPEEWIHGAAVVAKQDYSGIVNDNTKDWFVKAAVSQEYADKWRAEVTPMTGKRLMDAQRVTAGYIQLWFDTYGDR

SEQ ID NO: 16040 - protein, 244 aa, Bacillus thuringiensis
SAEDKHKEGVNSHLWIVNRAIDIMSRNTTLVKQDRVALLNEWRTELENGIYAADYENPYYDNSTFASHFYDPDNGKTYIPYAKQAKETGAKYFKLAGESYKNKDMQQAFFYLGLSLHYLGDVNQPMHAANFTNLSYPQGFHSKYENFVDTIKDNYKVTDGNGYWNWKGTNPEDWIHGAAVVAKQDYAGIVNDNTKDWFVRAAVSQEYADKWRAEVTPMTGKRLMDAQRVTAGYIQLWFDTYGDR

SEQ ID NO: 16041 - protein, 245 aa, Bacillus cereus
WSAEDKHKEDVNSHLWIVNRAIDIMSRNTTLVKQDRVAQLNEWRTELENGIYAADHENPYYDDSTFASHFYDPDNGKTYIPFAKQAKETGAKYFKLAGESYKNKDMKQAFFYLGLSLHYLGDVNQPMHAASFTDLSYPQGFHSKYENFVDTIKDNYKVTDGNGYWNWKGTNPEEWIHGAAVVAKQDYSGIVNDNTKDWFVKAAVSQEYADKWRAEVTPMTGKRLMDAQRVTAGYIQLWFDTYGDR

SEQ ID NO: 16042 - protein, 245 aa, Bacillus mycoides
WSAEDKHKEGVNSHLWIVNRAMDIMSRNTTLVKQDQVALLNEWRTELENGIYAADYENPYYDNSTFASHFYDPDNGKTYIPFAKQAKETGAKYFKLAGESYKNKDMKQAFFYLGLSLHYLGDVNQPMHAANFTNLSYPQGFHSKYENFVDTIKDNYKVTDGNGYWNWKGTNPEDWIHGAAVAAKQDYSGIVNDNTKDWFVKAAVSQEYADKWRAEVTPMTGTRLMDAQRVTAGYIQLWFDTYGNR

SEQ ID NO: 16043 - protein, 245 aa, unidentified
WSAEDKHKEGVNSHLWIVNRAIDIMSRNTTLVKQDRVALLNEWRTELENGIYAADYENPYYDNSTHASHFYDPDNGKTYIPYAKQAKETGAKYFKLAGESYKNKDMKQAFFYLGLSLHYLGDVNQPMHAANFTNLSYPQGFHSKYENFVDTIKDNYKVTDGNGYWNWKGTNPEDWIHGAAVVAKQDYAGIVNDNTKDWFVRAAVSQEYADKWRAEVTPMTGKRLMDAQRVTAGYIQLWFDTYGNR

SEQ ID NO: 16044 - protein, 245 aa, Bacillus cereus
WSAEDKHKEGVNSHLWIVNRAIDIMSRNTTLVKQDRVALLNEWRTELENGIYAADYENPYYDDSTFASHFYDPDNGKTYIPYAKQAKETGAKYFKLAGESYKNKDMKQAFFYLGLSLHYLGDVNQPMHAASFTDLSYPQGFHSKYENFVDTIKDNYKVTDGNGYWNWKGTNPEDWIHGAAVVAKQDYAGIVNDNTKDWFVRAAVSQEYADKWRAEVTPMTGKRLMDAQRVTAGYIQLWFDTYGNR

SEQ ID NO: 16045 - protein, 245 aa, Bacillus cereus
WSAEDKHKEGVNSHLWIVNRAIDIMSRNTTLVKQDRVALLNEWRTELENGIYAADYENPYYDDSTYASHFYDPDNGKTYIPYAKQAKETGAKYFKLAGESYKNKDMKQAFFYLGLSLHYLGDVNQPMHAASFTDLSYPQGFHSKYENFVDTIKDNYKVTDGNGYWNWKGTNPEDWIHGAAVVAKQDYAGIVNDNTKDWFVRAAVSQEYADKWRAEVTPMTGKRLMDAQRVTAGYIQLWFDTYGNR

SEQ ID NO: 16046 - protein, 245 aa, Bacillus cereus
WSAEDXHXEXVNSHLWIVNRAIDIMSRNTTLVKQDRVAQLNEWRTELENGIYAADWENPYYDDSTFASHFYDPDNGKTYIPFAKQAKETGAKYFKLAGESYKNXDMKQAFFYLGLSLHYLGDVNQPMHAASFTDLSYPQGFHSKYENFVDTIKDNYKVTDGNGYWNWKGTNPEEWIHGAAVVAKQDYSGIVNDNTKDWFVKAAVSQEYADKWRAEVTPMTGKRLMDAQRVTAGYIQLWFDTYGDR

SEQ ID NO: 16047 - protein, 245 aa, Bacillus cereus
WSAEDKHKEGVNSHLWIVNRAIDIMSRNTTLVKQDRVALLNEWRTELENGIYAADYENPYYDDSTWASHFYDPDNGKTYIPYAKQAKETGAKYFKLAGESYKNKDMKQAFFYLGLSLHYLGDVNQPMHAASFTDLSYPQGFHSKYENFVDTIKDNYKVTDGNGYWNWKGTNPEDWIHGAAVVAKQDYAGIVNDNTKDWFVRAAVSQEYADKWRAEVTPMTGKRLMDAQRVTAGYIQLWFDTYGNR

SEQ ID NO: 16048 - protein, 245 aa, Bacillus cereus
WSAEDPHVESVNSHLWIVNRAIDIMSRNTTLVKQDRVAQLNEWRTELENGIYAADWENPYYDDSTFASHFYDPDNGKTYIPFAKQAKETGAKYFKLAGESYKNSDMKQAFFYLGLSLHYLGDVNQPMHAASFTDLSYPQGFHSKYENFVDTIKDNYKVTDGNGYWNWKGTNPEEWIHGAAVVAKQDYSGIVNDNTKDWFVKAAVSQEYADKWRAEVTPMTGKRLMDAQRVTAGYIQLWFDTYGDR

SEQ ID NO: 16049 - protein, 245 aa, Bacillus toyonensis
WSAEDKHKEGVNSHLWIVNRAMDIMSRNTTLVKQDRVALLNEWRTELENGIYAADYENLYYDNSTFASHFYDPDNGKTYIPYAKQAKETGAKYFKLAGESYKNKDMKQAFFYLGLSLHYLGDVNQPMHAANFTNLSYLQGFHSKYENFVDTIKDNYKVTDGNGYWNWKGTNPEDWIHGAAVVAKQDYAGIVNDNTKDWFVRAAVSQEYADKWRVEVTPMTGKRLMDAQRVTAGYIQLWFDTYGNR

SEQ ID NO: 16050 - protein, 245 aa, Bacillus cereus
WSAEDPHIETVNSHLWIVNRAIDIMSRNTTLVKQDRVAQLNEWRTELENGIYAADWENPYYDDSTFASHFYDPDNGKTYIPFAKQAKETGAKYFKLAGESYKNGDMKQAFFYLGLSLHYLGDVNQPMHAASFTDLSYPQGFHSKYENFVDTIKDNYKVTDGNGYWNWKGTNPEEWIHGAAVVAKQDYSGIVNDNTKDWFVKAAVYQEYADKWRAEVTPMTGKRLMDAQRVTAGYIQLWFDTYGDR

SEQ ID NO: 16051 - protein, 245 aa, Bacillus thuringiensis
WSAEDKHKEGVNSHLWIVNRAIDIMSRNTTIVKQDQVALLNEWRTDLENGIYSADFENPYYDNSTFASHFYDPDSEKTYIPLAKQAKETGAKYFKLAGESYQNNDMKQAFFYLGLSLHYLGDVNQPMHAANFTNLSYPQGFHSKYENFVDTIKDNYKVTDGTGYWNWKGTNPEDWIHGAAVVAKQDYSGIVNNNTKEWFVKAAVSQEYADKWRAEVTPMTGKRLIDAQRITAGYIQLWFDTYVNR

SEQ ID NO: 16052 - protein, 245 aa, Bacillus mycoides
WSAEDKHTEGVNSHLWIVNRAIDIMSRNMTLVKQDQVALLNEWRTDLENGIYSADYENPYYDNSTFASHFYDPDDGSTYIPFAKQAKETGAKYFKLAGESYKNKDMKQAFFYLGLSLHYLGDVNQPMHAANFTNISYPQGFHSKYENFVDTIKDNYKVTDGNGYWNWKGANPEDWIHGAAVAAKQDFPGIVNSNTKSWFVKAAVSQSYADKWRAEVTPMTGKRLIEAQRVTAGYIQLWFDTYVNR

SEQ ID NO: 16053 - protein, 245 aa, Bacillus bingmayongensis
WSAEDKHAEGVNSHLWIVNRAIDIMSRNTTIVKQDEVALLNEWRTELENGIYAADYENPYYDNSTFASHFYDPDSGKTYIPFAKQAKETGAKYFKLAGESYQKQEMKQAFFYLGLSLHYLGDVNQPMHVANFTNLSYPQGFHSKYENFVDTIKDNYKAIDGNGYWNWKGTNPEDWIHGAAVAAKQEYAGIVNDTTKDWFVWAAVSQEYADKWRAEVTPATGKRLVEAQRVTAGYIQLWFDTYGNR

SEQ ID NO: 16054 - protein, 245 aa, Bacillus sp.
WSAEDRHKEGVNSHLWIVNRGIDIMSHNTTVVKQDEVALLNEWRTDLENGIYSADYENPYYDNSTFASHFYDPDNGTTYIPFAKQAKETGAKYFKLAGESYQNKDMKQAFFYLGLSLHYLGDVNQPMHAANFTNLSYPQGFHSKYENFVDTIKDNYKVNDGNGYWNWKGTNPEDWIHASAVAAKQDFPSIVNDNTKDWFVKAAVSQDYANKWRAEVTPMTGKRLMEAQRVTAGYIQLWFDTYVNR

SEQ ID NO: 16055 - protein, 245 aa, Bacillus luti
WSAEDTHSEGVNSHLWIVNRAIDIMSRNTTLVRQDEVALLNAWRTDLEKGIYAADYENPYYDNSTFTSHFYDPDTGKTYVGLAKQAKETGNKYFKLAGESYKNKDMKQAFFYLGLSLHYLGDVNQPMHAANFTNLSYPQGFHSKYENFVDTIKDNYKVTDGNGYWNWKGMNPEEWIHGAAVAAKQDYSGIVNSNTKSWFVKAAVSQSYADKWRAEVTPTTGKRLMEAQRVTAGYIQLWFDTYGNR

SEQ ID NO: 16056 - protein, 245 aa, Bacillus pseudomycoides
WSAEDKHAEGVNSHLWIVNRAIDIMSRNTTVVKQDQVAVLNEWRTELENGIYAADYENPYYDNSTFASHFYEPDTGKTYIPFAKQAKETGAKYFKLAGEAYQKQDMKQAFFYLGLSLHYLGDVNQPMHAANFTNLSYPQGFHSKYENFVDTIKNNYKVADGNGYWNWKGVNPEDWIHGAAVAAKQDYAGIVNGTTKDWFVRAAVSQEYADKWRAEVTLTTGKRLVEAQRVTAGYIQLWFDTYVNR

SEQ ID NO: 16057 - protein, 245 aa, Bacillus thuringiensis
WSAEDKHSEGVNSHLWIVNRAIDIMSRNTTRVKQDQVVLLNEWRTDVENGIYSADHENPYYDNSTFASHFYDPDDGSTYIPFAKQAKETGAKYFKLAGESYKNKDMKQAFFYLGVSLHYLGDVNQPMHAANFTNLSYPQGFHSKYENFVDTIKDNYKVMDGNGYWNWKGIHPEDWIHGAAVAAKQDFSGIVNRNTKSWFVQAAVSQSYADKWRAEVTPMTGKRLIEAQRVTAGYIQLWFDTYGNR

SEQ ID NO: 16058 - protein, 245 aa, Bacillus mycoides
WSAEDKHAEGVNSHLWIVNRAIDIMSRNTTVVKQDQVALLNEWRTELENGIYAADYENPYYDNSTFASHFYDPDTGKTYIPFAKQAKETGAKYFKLAGEAYQKQEIKQAFFYLGLSLHYLGDVNQPMHAANFTNLSYPQGFHSKYENFVDTIKNNYKVADGNGYWNWKGVNPEDWIHGAAVAAKQDYAGIVNGTTKDWFVRAAVSQEYADKWRAEVTLTTGKRLVEAQRVTAGYIQLWFDTYVNR

SEQ ID NO: 16059 - protein, 245 aa, Bacillus toyonensis
WSAEDKHSEGVNSHLWIVNRAIDIMSRNTKLVKQDQIILLNEWRTDLENGIYSADHENPYYDNSTLVSHFYDPDDGSTYIPFAKQAKETGAKYFKLAGESYKNKDMKQAFFYLGVSLHYLGDVNQPMHAANFTNLSYPQGFHSKYENFVDTIKDNYKVTDGNGYWNWKGIHPEDWIHGAAVGAKQDFSGIVNSNTKSWFVKAAVSQSYADKWRAEVTPMTGKRLIEAQRVTAGYIQLWFDTYVNR

SEQ ID NO: 16060 - protein, 242 aa, unidentified
WSAEDKHNEGVSTHLWIVNRAIDIMSRNTAIVKPNETALLNEWRTDLENGIYSADYENPYYDNSTYASHFYDPDTGKTYIPFAKQAKETGTKYFKLAGEAYKNQDMKQAFFYLGLSLHYLGDVNQPMHAANFTNLSYPMGFHSKYENFVDTIKNNYIVSDSSGYWNWKGANPEDWIQGAAVAAKQDYPGIVNDTTKDWFVKAAVSQAYADKWRAEVTPVTGKRLMEAQRVTAGYIHLWFDTY

SEQ ID NO: 16061 - protein, 245 aa, Bacillus pseudomycoides
WSAEDRHKEGVNSHLWIVNRAIDIMSRNNTIVKPNETALLNEWRNELENGIYSADYENPYYDNSTFASHFYDPDTQKTYIPLAKQAKETGSKYFKLAGEAYQNKDMKQAFFYLGLSLHYLGDVNQPMHAANFTNLSYPMGFHSKYENFVDTIKDNYKVADGNGYWNWKGTNPEEWIHGAAAAAKQDYPGIVNDSTKSGFVKAATSQEYANKWRAEVTPATGKRLTEAQRVTAGYIHLWFDTYVNR

SEQ ID NO: 16062 - protein, 245 aa, Bacillus mycoides
WSAEDKHNEGVSTHLWIVNRAIDIMSRNTAIVKPNETALLNEWRTDLENGIYSADYENPYYDNGTYASHFYDPDTGGTYIPFAKQAKETGTKYFKLAGEAYQNQDMKQAFFYLGLSLHYLGDVNQPMHAANFTNLSYPMGFHSKYENFVDTVKDNYIVSDSNGYWNWKGTNPEDWIQGSAVAAKQDYPGIVNDTTKDWFVKAAVSQEYADKWRAEVTPVTGKRLMEAQRVTAGYIHLWFDTYVNR

SEQ ID NO: 16063 - protein, 245 aa, Bacillus toyonensis
WSAEDKHKEGVNSHLWIVNRSIDMMSRNTTIVKKNQVALLNEWRTELENGIYNADHENPYFDNFTFASHFYDPETGSTYIPLVSTQAKEAGSKYFKLAGESYKKNDMKQAFFYLGLSLHYLGDVNQPMHAANFTNLSYPQGFHSKYENFVDTIKDNYKVNDGNGYWNWKGSNPGDWIHGAAVAAKKDYTGIVNDTTKDWFVKAAISSEYADKWRAEVTPATGKRLMEAQRITAGYIQLWFDTYAN

SEQ ID NO: 16064 - protein, 245 aa, unidentified
WSAEDKHNEGINSHLWIVNRAIDIMSRNTTIVNPNETALLNEWRADLENGIYSADYENPYYDNSTYASHFYDPDTGTTYIPFAKHAKETGAKYFNLAGQAYQNQDMQQAFFYLGLSLHYLGDVNQPMHAANFTNLSYPMGFHSKYENFVDTIKNNYIVSDSNGYWNWKGANPEDWIEGAAVAAKQDYPGVVNDTTKDWFVKAAVSQEYADKWRAEVTPVTGKRLMEAQRVTAGYIHLWFDTYVNR

SEQ ID NO: 16065 - protein, 245 aa, Synthetic construct
WSAEDKHNEGINSHLWIVNRAIDIMSRNTTIVNPNETALLNEWRADLENGIYSADYENPYYDNSTYASHFYDPDTGTTYIPFAKHAKETGAKYFNLAGQAYQNQDMQQAFFYLGLSLHYLGDVNQPMHAANFTNLSYPWGFHSKYENFVDTIKNNYIVSDSNGYWNWKGANPEDWIEGAAVAAKQDYPGVVNDTTKDWFVKAAVSQEYADKWRAEVTPVTGKRLMEAQRVTAGYIHLWFDTYVNR

SEQ ID NO: 16066 - protein, 245 aa, Synthetic construct
WSARDKHNEGINSHLWIVNRAIDIMSRNTTIVNPNETALLNEWRADLENGIYSADYENPYYDNSTYASHFYDPDTGTTYIPFAKHAKETGAKYFNLAGQAYQNQDMQQAFFYLGLSLHYLGDVNQPMHAANFTNLSYPMGFHSKYENFVDTIKNNYIVSDSNGYWNWKGANPEDWIEGAAVAAKQDYPGVVNDTTKDWFVKAAVSQEYADKWRAEVTPVTGKRLMEAQRVTAGYIHLWFDTYVNR

SEQ ID NO: 16067 - protein, 245 aa, Synthetic construct
WSAADKHNEGINSHLWIVNRAIDIMSRNTTIVNPNETALLNEWRADLENGIYSADYENPYYDNSTYASHFYDPDTGTTYIPFAKHAKETGAKYFNLAGQAYQNQDMQQAFFYLGLSLHYLGDVNQPMHAANFTNLSYPMGFHSKYENFVDTIKNNYIVSDSNGYWNWKGANPEDWIEGAAVAAKQDYPGVVNDTTKDWFVKAAVSQEYADKWRAEVTPVTGKRLMEAQRVTAGYIHLWFDTYVNR

SEQ ID NO: 16068 - protein, 245 aa, Synthetic construct
WSAEDKHNEGINSHLWIVNRAIDIMSRNTTIVNPNETALLNEWRADLENGIYSADYENPYYDNSTYASHFYDPDTGTTYIPFAKHAKETGAKYFNLAGQAYQNQDMQQAFFYLGLSLHYLGDVNQPMHAANFTELSYPMGFHSKYENFVDTIKNNYIVSDSNGYWNWKGANPEDWIEGAAVAAKQDYPGVVNDTTKDWFVKAAVSQEYADKWRAEVTPVTGKRLMEAQRVTAGYIHLWFDTYVNR

SEQ ID NO: 16069 - protein, 245 aa, Synthetic construct
WSARDKHNEGINSHLWIVNRAIDIMSRNTTIVNPNETALLNEWRADLENGIYSADYENPYYDNSTYASHFYDPDTGTTYIPFAKHAKETGAKYFNLAGQAYQNQDMQQAFFYLGLSLHYLGDVNQPMHAANFTNLSYPWGFHSKYENFVDTIKNNYIVSDSNGYWNWKGANPEDWIEGAAVAAKQDYPGVVNDTTKDWFVKAAVSQEYADKWRAEVTPVTGKRLMEAQRVTAGYIHLWFDTYVNR

SEQ ID NO: 16070 - protein, 245 aa, Synthetic construct
WSAEDKHNEGINSHLWIVNRAIDIMSRNTTIVNPNETALLNEWRADLENGIYSADYENPYYDLSTYASHFYDPDTGTTYIPFAKHAKETGAKYFNLAGQAYQNQDMQQAFFYLGLSLHYLGDVNQPMHAANFTNLSYPMGFHSKYENFVDTIKNNYIVSDSNGYWNWKGANPEDWIEGAAVAAKQDYPGVVNDTTKDWFVKAAVSQEYADKWRAEVTPVTGKRLMEAQRVTAGYIHLWFDTYVNR

SEQ ID NO: 16071 - protein, 245 aa, Synthetic construct
WSAEDKHNEGINSHLWIVNRAIDIMSRNTTIVNPNETALLNEWRADLENGIYSADYENPYYDMSTYASHFYDPDTGTTYIPFAKHAKETGAKYFNLAGQAYQNQDMQQAFFYLGLSLHYLGDVNQPMHAANFTNLSYPMGFHSKYENFVDTIKNNYIVSDSNGYWNWKGANPEDWIEGAAVAAKQDYPGVVNDTTKDWFVKAAVSQEYADKWRAEVTPVTGKRLMEAQRVTAGYIHLWFDTYVNR

SEQ ID NO: 16072 - protein, 245 aa, Synthetic construct
WSAEDKHNEGINSHLWIVNRAIDIMSRNTTIVNPNETALLNEWRADLENGIYSADYENPYYDNSTYASHFYDPDTGTTYIPFAKHAKETGAKYFNLAGQAYQNQDMQQAFFYLGLSLHYLGDVNQPMHAASFTNLSYPMGFHSKYENFVDTIKNNYIVSDSNGYWNWKGANPEDWIEGAAVAAKQDYPGVVNDTTKDWFVKAAVSQEYADKWRAEVTPVTGKRLMEAQRVTAGYIHLWFDTYVNR

SEQ ID NO: 16073 - protein, 245 aa, Synthetic construct
WSAYDKHNEGINSHLWIVNRAIDIMSRNTTIVNPNETALLNEWRADLENGIYSADYENPYYDNSTYASHFYDPDTGTTYIPFAKHAKETGAKYFNLAGQAYQNQDMQQAFFYLGLSLHYLGDVNQPMHAANFTNLSYPMGFHSKYENFVDTIKNNYIVSDSNGYWNWKGANPEDWIEGAAVAAKQDYPGVVNDTTKDWFVKAAVSQEYADKWRAEVTPVTGKRLMEAQRVTAGYIHLWFDTYVNR

SEQ ID NO: 16074 - protein, 245 aa, Synthetic construct
WSAEDKHNEGINSHLWIVNRAIDIMSRNTTIVNPNETALLNEWRADLENGIYSADYENPYYDLSTYASHFYDPDTGTTYIPFAKHAKETGAKYFNLAGQAYQNQDMQQAFFYLGLSLHYLGDVNQPMHAANFTNLSYPWGFHSKYENFVDTIKNNYIVSDSNGYWNWKGANPEDWIEGAAVAAKQDYPGVVNDTTKDWFVKAAVSQEYADKWRAEVTPVTGKRLMEAQRVTAGYIHLWFDTYVNR

SEQ ID NO: 16075 - protein, 245 aa, Synthetic construct
WSAEDKHNEGINSHLWIVNRAIDIMSRNTTIVNPNETALLNEWRADLENGIYSADYENPYYDFSTYASHFYDPDTGTTYIPFAKHAKETGAKYFNLAGQAYQNQDMQQAFFYLGLSLHYLGDVNQPMHAANFTNLSYPWGFHSKYENFVDTIKNNYIVSDSNGYWNWKGANPEDWIEGAAVAAKQDYPGVVNDTTKDWFVKAAVSQEYADKWRAEVTPVTGKRLMEAQRVTAGYIHLWFDTYVNR

SEQ ID NO: 16076 - protein, 245 aa, Synthetic construct
WSAADKHNEGINSHLWIVNRAIDIMSRNTTIVNPNETALLNEWRADLENGIYSADYENPYYDNSTYASHFYDPDTGTTYIPFAKHAKETGAKYFNLAGQAYQNQDMQQAFFYLGLSLHYLGDVNQPMHAANFTNLSYPWGFHSKYENFVDTIKNNYIVSDSNGYWNWKGANPEDWIEGAAVAAKQDYPGVVNDTTKDWFVKAAVSQEYADKWRAEVTPVTGKRLMEAQRVTAGYIHLWFDTYVNR

SEQ ID NO: 16077 - protein, 245 aa, Synthetic construct
WSAFDKHNEGINSHLWIVNRAIDIMSRNTTIVNPNETALLNEWRADLENGIYSADYENPYYDNSTYASHFYDPDTGTTYIPFAKHAKETGAKYFNLAGQAYQNQDMQQAFFYLGLSLHYLGDVNQPMHAANFTNLSYPMGFHSKYENFVDTIKNNYIVSDSNGYWNWKGANPEDWIEGAAVAAKQDYPGVVNDTTKDWFVKAAVSQEYADKWRAEVTPVTGKRLMEAQRVTAGYIHLWFDTYVNR

SEQ ID NO: 16078 - protein, 245 aa, Synthetic construct
WSAEDKHNEGINSHLWIVNRAIDIMSRNTTIVNPNETALLNEWRADLENGIYSADYENPYYDYSTYASHFYDPDTGTTYIPFAKHAKETGAKYFNLAGQAYQNQDMQQAFFYLGLSLHYLGDVNQPMHAANFTNLSYPWGFHSKYENFVDTIKNNYIVSDSNGYWNWKGANPEDWIEGAAVAAKQDYPGVVNDTTKDWFVKAAVSQEYADKWRAEVTPVTGKRLMEAQRVTAGYIHLWFDTYVNR

SEQ ID NO: 16079 - protein, 245 aa, Synthetic construct
WSAEDKHNEGINSHLWIVNRAIDIMSRNTTIVNPNETALLNEWRADLENGIYSADYENPYYDMSTYASHFYDPDTGTTYIPFAKHAKETGAKYFNLAGQAYQNQDMQQAFFYLGLSLHYLGDVNQPMHAANFTNLSYPWGFHSKYENFVDTIKNNYIVSDSNGYWNWKGANPEDWIEGAAVAAKQDYPGVVNDTTKDWFVKAAVSQEYADKWRAEVTPVTGKRLMEAQRVTAGYIHLWFDTYVNR
